United States Patent Application Publication US 2005/0228172 A9 - sequence listing, part 163

SEQ ID NO: 726422 - DNA, 1269 bp, Homo sapiens
gttagcaatgagtatgccttgtctttagaagaaaggaggaatacggcctgatgaaatgtcatggaataatttgataaatgtttggctaagaaggagtagatggctcatggaaaatattgaaaaagtgcagatgtttggacttgatctgttagataataaggaaatactgaagaaaatacaatttcatgcagagctaatacatattaatgtaattcccagctactgcctggccattgtgcaggatgttatctcgctaaaataatttcccctgctttatagttctgaaggaagaggaagtctcctggagttatattatctaggattacctacatattattaatgttatactttggtaaaatattctaggtgtatcagctggtatcaatttgttatttcttcattgtgaaatgctttctgctttgcttaaaagtttaattttagacattaaaaaaagagaaaaataaaatatggagtttctatttacaatgatttataaattgacactttgaaatttttatttctcttacaccttgccaccttaaaaaaatgtgtgacagatagacagatagatagacagatagacagatagatgatagatagatagatggatagacagatagatgatagatataaaatgcatataagttaacataaaataaggcccaaagttatggcttatttgaaattaaggttctggggagtatataggtaaaggctcaatttaagaccagggtctaaaacagtccacctctgatttgagatctggatttgcaatatccctagtgtgccttagtccatacaggctgccataaataaaataggtagcttataaatagcataaacttatttctcagagttttggtagcttataaacaacaaacttatttctgagttttggaggttgggaagttcaaggcaaattcagtgtctgatgagggcctgcatttgaattatagacagtctttttctcactctaaccttacatggtaagataggtgccagagctctctaggatctcttttatcaggtactaattccattcataaggaatccatccttatgacctaattacttyccaagggcccacctcctaataccatcaccttgagggtcaggattttaacttatggattttgtggaggacataaacattcagaccacactaccatctatcattgtagaaaggagctccaagctgatattgtgagaattgactctggcatgggggtatcatgaggtaagtgaagcattcaaaatatgcaagatggg

SEQ ID NO: 726423 - DNA, 584 bp, Homo sapiens
ccctgaatcccacaaaagactagagaagggtgagtttaggagtaagaaaaaacagtaaacagtacatactgatataataaaactctatttcaatttacttttttaaatgaacaaggttttggttgtccaatctacagaaatgaaaaaatagatattagtattgacctgttcctcattctataaggagagaaacaaacagctcatctcaccaagagatacattctcaattttaaaaatttgataacaattatttactaaaatcggtaarttatatgctactttgatcaattgtaaaataatttaataattgacaatgaataaaaagatttatcatttaaagacctattgacactataaatttaatttcaacttacatatacatattttgcttgcaggaaattatgaaggaaaaatcattgaaagattcccaagcataaaagtatattacattaagaaaaaaatttatgggcaaaaatggaatggagtacaagttcaaaaggaaaaaaaatgaaaagcttttgactattgaaaatatacttgcttatatattctttatatttaagaaataactgtatttaaatgtc

SEQ ID NO: 726424 - DNA, 635 bp, Homo sapiens
aaaaatagtgatatctgagtcagattggcatgcttgcagaagtaaaacacttccatgtatttgaaacagaacccattttcgagttaataccagcaccttgtttctatgagactatattttgctcacattactactaaacttcaaccagtggaggtactaattttaaaaagcccacagcagagatatccaataattctttcttaggggcagcagaaggttggcaaaaaggaatactcagaagagacagggaaatattagccactgagaaacactggcagtaagaaaataaaagaatttcccccagaaaacattctgttaacagctaaacaatatctgtaacaataaaaatcacttgcttcctaaaagttaaatgtcatctcactaaacatcccacaagcaatatactcttctattcgttttcacacttctctaattcatagaaagcaagcatggagtgctttgatttgtatctagctgaatgtaatagtaaataactaatctgtaccctgcttggactaytgaagtgatttattctccaacatttccaaaaacatcttactagactatgtactaaattgaagtctattggtttaaacttatttaaccagtgctatcaaatataatgaatgggtaaa

SEQ ID NO: 726425 - DNA, 635 bp, Homo sapiens
aaaaatagtgatatctgagtcagattggcatgcttgcagaagtaaaacacttccatgtatttgaaacagaacccattttcgagttaataccagcaccttgtttctatgagactatattttgctcacattactactaaacttcaaccagtggaggtactaattttaaaaagcccacagcagagatatccaataattctttcttaggggcagcagaaggttggcaaaaaggaatactcagaagagacagggaaatattagccactgagaaacactggcagtaagaaaataaaagaatttcccccagaaaacattctgttaacagctaaacaatatctgtaacaataaaaatcacttgcttcctaaaagttaaatgtcatctcactaaacatcccacaagcaatatactcttctattcgttttcacacttctctaattcatagaaagcaagcatggagtgctttgatttgtatctagctgaatgtaatagtaaataactaatctgtaccctgcttggactattgaagtgatttattctccaacatttccamaaacatcttactagactatgtactaaattgaagtctattggtttaaacttatttaaccagtgctatcaaatataatgaatgggtaaa

SEQ ID NO: 726426 - DNA, 635 bp, Homo sapiens
aaaaatagtgatatctgagtcagattggcatgcttgcagaagtaaaacacttccatgtatttgaaacagaacccattttcgagttaataccagcaccttgtttctatgagactatattttgctcacattactactaaacttcaaccagtggaggtactaattttaaaaagcccacagcagagatatccaataattctttcttaggggcagcagaaggttggcaaaaaggaatactcagaagagacagggaaatattagccactgagaaacactggcagtaagaaaataaaagaatttcccccagaaaacattctgttaacagctaaacaatatctgtaacaataaaaatcacttgcttcctaaaagttaaatgtcatctcactaaacatcccacaagcaatatactcttctattcgttttcacacttctctaattcatagaaagcaagcatggagtgctttgatttgtatctagctgaatgtaatagtaaataactaatctgtaccctgcttggactattgaagtgatttattctccaacatttccaawaacatcttactagactatgtactaaattgaagtctattggtttaaacttatttaaccagtgctatcaaatataatgaatgggtaaa

SEQ ID NO: 726427 - DNA, 635 bp, Homo sapiens
aaaaatagtgatatctgagtcagattggcatgcttgcagaagtaaaacacttccatgtatttgaaacagaacccattttcgagttaataccagcaccttgtttctatgagactatattttgctcacattactactaaacttcaaccagtggaggtactaattttaaaaagcccacagcagagatatccaataattctttcttaggggcagcagaaggttggcaaaaaggaatactcagaagagacagggaaatattagccactgagaaacactggcagtaagaaaataaaagaatttcccccagaaaacattctgttaacagctaaacaatatctgtaacaataaaaatcacttgcttcctaaaagttaaatgtcatctcactaaacatcccacaagcaatatactcttctattcgttttcacacttctctaattcatagaaagcaagcatggagtgctttgatttgtatctagctgaatgtaatagtaaataactaatctgtaccctgcttggactattgaagtgatttattctccaacatttccaaawacatcttactagactatgtactaaattgaagtctattggtttaaacttatttaaccagtgctatcaaatataatgaatgggtaaa

SEQ ID NO: 726428 - DNA, 613 bp, Homo sapiens
agacggagtttcactcttgttgcccaggctggagtgcaatggtgtgatctcagctcaccgcaacctccgcctcccaggttcaagcaattctcctgcctcagactcccaagtagctgggattacaggcatgcaccaccacgcccggctaattttgtatttttagcagagacagggtttctccatgttgaggctggtctcgaactcctgacctcaggtgatccacccgcctcggcctcccaaagtgctgggattacaggtgtcagccaccgcgcccaactttatgtattttttaaatccttttgatttgccctggtactgagagtggtgggttaacatatcttatcattcatgcgttttatctatgtctccttgcatctcttgtggtttatgctmtataacatttactgctgtgttatttggtgtacagattatttatgattgttatgtcttagttgtcaactgtggcctttggcatttaaatatgccaaaagccatcatgtttaatgctctttgcttttaatcttgcaagggtcagagaggaacaaaatccctacatccctcacatctgaggacacctcacaaaaatgggaacttgcctaaattagtctgatag

SEQ ID NO: 726429 - DNA, 667 bp, Homo sapiens
tggatcacttgaggtcaggagtttgagaccagcatggccaacatrgtgaaacctcgtctctactaaaaatacaaaaaaatagccgggcgtggtggctcacgcctgtaatcccagcactttgggaggccgaggcgggtggatcatgaggtcaggagatcaagaccatcctggctgacacggtgaaaccccgtctctactaaaaaaatacaaaaaattagccaggcatggtggcgggcgcctgtagtcccagctactcaggaggctgaggcaggagaatggcgtgaacccgggaggcggagcttgcattgagccgagatcgtgccactgcactccagcctgggcgacagagcaagactctgtctcaaaaaaaaaaataataataattagctgggcgtggaggcaggcgcctgtaatcccagctactccggaggctgaggcaggagaatcgcttgaactcaggaggcagaggttgcagtgagtggagatcacgccattgcactctggccttggcaacgagagtgaaactcagtctcaaaaaaataaataaataaaaataaaaaataatgctttcattatgacctgtttaagaattgatcatcaaaggtagaactaagaatgtccttgctaattaagaaaaaaacaaaaccctttcacacctttaaatgtt

SEQ ID NO: 726430 - DNA, 667 bp, Homo sapiens
tggatcacttgaggtcaggagtttgagaccagcatggccaacatagtgaaacctcgtctctactaaaaatacaaaaaaatagccgggcgtggtggctcacgcctgtaatcccagcactttgggaggccgaggcgggtggatcatgaggtcaggagatcaagaccatcctggctgacacggtgaaaccccgtctctactaaaaaaatacaaaaaattagccaggcatggtggcgggcgcctgtagtcccagctactcaggaggctgaggcaggagaatggcgtgaacccgggaggcggagcttgcattgagccgagatcgtgccactgcactccagcctgggcgacagagcaagactctgtctcaaaaaaaaaaataataataattagctgggcgtggaggcaggcgcctrtaatcccagctactccggaggctgaggcaggagaatcgcttgaactcaggaggcagaggttgcagtgagtggagatcacgccattgcactctggccttggcaacgagagtgaaactcagtctcaaaaaaataaataaataaaaataaaaaataatgctttcattatgacctgtttaagaattgatcatcaaaggtagaactaagaatgtccttgctaattaagaaaaaaacaaaaccctttcacacctttaaatgtt

SEQ ID NO: 726431 - DNA, 600 bp, Homo sapiens
ctggccatcatggcaaaaccctgtctctactaaacatacaaaaaattcacagcgcgtggtggcaggtgcctgtaatcccagctactcaggaggctaaggcaggagaactgcttgaacccgggaggtggaggttgcagtgacccgagatagcgccattgcactccagcctgggcaacaagagcaaaactccgtcccaaaaaaaaaaagatatcaaacccagaaaaacagatcccagacttagaagccattatattccaattcccttcaagtcatctactttttgttgttattgccgttctatatgttttgcttttctgagttaattttgtaagattttaaaatttttatgagacagtcacttgtctccaaattttgtttcttcttcttcttcttcttctttttttttttttaaagagacagggtctcactatgttgcccaggctggactcgaactcccaagcttcaacaatcctcccaccccagcctcccaaagtgctgggattacaggcatgagccaccaygcccggccccaggttttgtatttcttaaagcaacatctaactcttacaaaatacgttggggtgtctgagtgggttcagt

SEQ ID NO: 726432 - DNA, 197 bp, Homo sapiens
ttctctagtagatcatyttagaggaactataatatttaatgaaagtccaagtaaagagcgtatttaaaatgtcaaaagaccataggtttatcacattgaattctttattcctttgcagtctagacatttaattcaccttgtttctgttcgggttccaaccatctttgaacacgcaaaacaatatgattcacacaact

SEQ ID NO: 726433 - DNA, 983 bp, Homo sapiens
gacccatgcctgactctgccctgtgtatgaatttgtgtctgcttgtagatctctgcagtatagctctgggtcagaagcatttccatagttaacctcaagcctgtgcctgtccagactgtctgtggtacccatggatctctagaatactaaaggcttcactgacatgttgaatccaaactcaccatatattaagtaaaaccaggttgagatcttaaaatgtgtttatcctcccaacagtaagctttttagacccgagaaagtggagagatataagagagagattatcattacagtttagaggagtgtatctcattgaaatattgttaaatgagagctgatcaaaactaagatatggtttcacaatacatgtgaaacacatttaggtcaggagtttagaaaacttctgaatgagcatgttaacaagaatattgatatggagtctctttctttcataaggaatggaggaatggcaaacagaaattaatgtttgaagtcaataacctagtgtgcaagttctttatgatctaactccatttcattttataagcttctttcactgtctaccctttagctatgccaagggtcagaaaattgaatatattctgtcttccttagtgtatttgttttttctccttttcacattttcttaccttagttcctctgcctggaatctctttctgctcatgactgtaagccatgcgtaatatctgctctttcagactcagatcatcatcttgtgcaaagccctcattcctccctttctttcccasctcctctctcccaccaacacagaagtaattcctctttcttcttaattcctactgaaattttggcatgagtataatttcttacagttttatatcatggcttagtctcattattgcttgccatatgtgaggggagttgttatggactgaatgtttgtgtttccccagaattcatgtgttgaagccctaatcccaaacgtgattagattaggattt

SEQ ID NO: 726434 - DNA, 3131 bp, Homo sapiens
tttcattataggtctcatatctcccacttcttgagcttcatttgttaaattgggcctatcaagttatttacttctaatttgtaacaatccatgtttccagatataggcagctggtatgcctgttatgtgggataatgtagctttgtgaaagttttacgtattatgtgggataatgtagctttgttaaaatcaataaatagccaagtttttmctcagcttaaggattgagactataatttttatacttcatacttgcatgtattgcctgagtcaaaaaagctattacatctaaaagaaaccagtgaaacatatcatttgacatgaagttttatcaaaatgacacattagcctaacccctttttcacaaatatttagaaaagaaaagaataaatttaaataagattacaaaataatttagtcaataaagaatattataaggaataaaaatttaatgaatcagggttattagtacttagtagcccctacaatgttttagaaattattctaagtcatttacccacatatacttaatagctgagtctaaaacatataatacagaaatttgttaataatgacaaattgaaatatttacaattatattaaatgacattaagaccatcagaaatcaaatgtttaacatacagtaactaaataaacacaagtaatgataactttattagaaagtatgactactagcaagagagaaaaattaataaaatttttcagcagtgaaccaaagatacacactgtatgacagagggggaaaataaatggcaagggtttaggcctaacaatatcattcattttatgagagcagaaattcaacagctcatatcttttaggacactaaaatgacagtagaaattctaaattgtactcaacaagtaatatttagccatgcacaaattttgtttcattaaattaatttataaaataaatataagatttcatgaattatttttgtgaggtcaaggacatactaaaaggaagcacagagttctgttctctgtagttaagtatatattttcataaaggcacataaaagaaaattttaagtatcaaaagaactaccccttacaagtgactattactacatatttgagagagatgttttgaatgaagaaacggaatatctcataagatgtggttgtatgctgcccaatgcctatgaaatattctactcatgtgtacactgcatatttgtgctttcagaagaaaaggctacatatttttaaatattttagtgtagacaagtaaaagttctcaagaagctacaagaactatgaaaataatgaatacagtttaaaaatatagaagcacttgatgaaagctaaagtaaatcaagagaataagccagagaagtaatcaaactgaaaaaaagtggtcccttcagatactgatagatcacaaggatgtcaagtctgtatgctgtccaccttcctccaagggaaaatggaataagcacagaaataacatgactacagacatctcaaatgtgatatttcccaaatattggaaccaagttaaaaactaaagaacacaagtaaataaaaagaaatttctgaagaaaaactaggccaccattttccatattcaaatatcatatttgaatcacagctcggtagaatgtaaagaataaaaaaattaggacaaggtataggtgaaacactaaattaaacagagataaaaaattacctgagtattgaatagaatgaatataaccaaatatagtaaagagagatgacatatcataagatatagttttaacaagataaaggctgggatgagacgctaaacatcttaattattttattagaacaaaaagtatgaatgaggcagagcaaataaggccagccagatccaagatttgggaaaagaaaatctttccctccatggaagcagcctcaagtgtacattgcagagggcccagatcagagaggaatgagaagtggttgccattcttgcaatcagtgttatccgttttcttgcagcccaggtttatataactgttctaagtccagtaaattgtctatagctgcacatctattaagaggctgagacagcagtcaggaccaactttgctaaatgtccataaactactctacctcatggaaattctctggatcttggagactctggagagtgacgcttctgcaaatagaggcataatttatttgagatttttatccatctgttattatcctttactgttaggaataatcttctctgaaaaatgcttttgacccaccttggaaggtcttttaatagtttgggaaagtggggcatggcaaggtggctcatgcctgtaatcccagcactttgggaggctgagatgggtgaatcatgaggtcaggagatccagaccatcctggataatacggtgaaaccctgtctctactaaaaatacaaaaaagtagtcgggcgtggtggcaggtgcctgtagtcccagctacttgggaggctgaggcaggagaatggcatgaacacgggaggtggagcttgcagtgagccgagatagctccactgcactccagcctgagagacagagcaagactccgtctcaaaacaaaaaaaaaaaaaattgggaaaatggctgagggctgaggttagaaatccaaggtaaaacattatgttatatattttacatcatagaagaaatttgagaacacatagaatacaatccgctattcataattttttttgagcattttcaggctatgtttttgacatagactaagttgaattactgtgccagagacaatctcgtgtctaaaagcaagtgacataaaaatagatctgcaaagatacattttctcccgctttaatttaagtaaacagctgagtacatcttcaagttgtactttgagttcagtaagataaatctgttttttaagactccaaatctagcactaacaatgggtcaaatccctgcaacagacatgaaaatcacaaacagctaatgcgttcctcatcctgaaattctcgctgccagcacagcagtctgaagttgacctgggccaattgaggtcagttggagggagtggagtccaccattactgaggctttagtagacagttttcccctgacggtgccaaggaggctggaaggtccgggttgggtgcagcaaagtg

SEQ ID NO: 726435 - DNA, 2431 bp, Homo sapiens
tggggcacagtatgcaaggaaaggaattgtattaagagatgaagtaagtactcttattagaaaaaggaacactttggggccagaaatggaccagtgtccaaggcatgcagaaagcaggaaataattaccgggtcatgggatggaactatggagagtgactaaaggttcaagatcataaaccagtctttagttgctcctaatttaatttaatgcaatcctcactctttgtcatcatttggttttaatgtataaagctatggggtctgcttattgtatgttttgtagtataatttggaaattaatctatcagctcttttttctcagcccagttggtgtcttgtcaactcctctgcactaattgcttcttgttttctcacagtccagccctatgttctcatgagctgtgaccctggggtatccaggctccggtttgcctgctgtggaaaaagtgcagctttctaagctggtcacatatctctacattaaatgtacattgtctttttaaagcaatgttcagacattcatatattctttcttcctgaggtttaagcaccacaagcagcagtcatataatggagagattctcaacaacagagtgagtctctgccataattggatttattatacgttagaaacagcagttacatactaaatgttttacaaagtgttttttataatttttatttccttaaatattgcaaatagaaaatttagaggtccaacatttatttaaaatttggctcttgtaatttgcagtggaaagcttatatgagtatctacctctaaamcaattaattaaaaatgctctggggttaactgggcaccaaagtataagaaaattttaattaagtgaaaaagtctaagtaatgaccaactaaggaaataaaaaggaaattatactttcaaccccctttcccccagttgctctatgctctattttttttctattgccaagttgtacaattttatttttgtccttgataattgtactttattttaacgtgactagattatattttattttattttaatttattttattttgttttattttattttaatgtgactagattttgcctcactccaggctggagtacggtagcatgattatagttcactgtaacctcaacttcctgagttcaagtatcctcctgcctcagcctttctagtagtgagaccacagttacatgctataatgtcaaaataatttttaaaacattttcagtgacaaggtcttgcttaggcttgtctcaaacttctggccttaattgatcctctggcctcagcatccctagcagctgaaatttcaagtgtgagccactgagcccagctctttatttttataaatatttatctctttagttttttctgaagcattttcaacaccttcacctgaactttcaggctttcaactcacagttgattttatccattttgctattcatcctatttattctattgcttatatacttttgtaacatatttaatattttgagttttaaattcttgatacttatatgtatgtatttttagttgtctcttttgcaaggctgcgattctctctagagaagagaatgggctctatgctttcttgagaaaagcattttataacatgggagtaaaacagaccctgtggaaaataaaataaaaggcattttaatcatgattttttataaattgctatttgggagacacaaatttagcaagaagctatatcatgttccattcagatgaggttagggagggacttataaagttttactgcaagtttacacaagtgaaagattttagcacagtctatgatggacaatgtttgattgccagcttagactgtatctaggcaatcatcagcttaattcagcacagctttctcttcaggaggtttgtgatcaggctcagtataaacaatccaagtcaaatgcagttgcctttttaggacatctgtaattttcccagttcgaacaggtaaaattccacctgggtgtgtatgagtattaattcaactcctcatgtcctcctagttgtctttagagacctctcaaataactatctccattttggatttcttttaattagaaataaagagcgcaaggattatcactggttgggaatatagaaaaatagtgcccacctgtgattcatcggaccccagtcagagagaaaaggccaagatatgcctgacagaaaggcttgaggacctttaggtaatttattcctcaaaaagaattggttcacacctgtaattccagcactttggaaggccaaggcgggcagattattggaggtcaggagttcaagaccagcctgacaaacatagtgaaactaaaaatacaaaatttactaaacatactaaacgtacaaaaattagctggacatgaagctgggtgcctgtaatctcagctacacagaagcctgaggcagcagaatctct

SEQ ID NO: 726436 - DNA, 2431 bp, Homo sapiens
tggggcacagtatgcaaggaaaggaattgtattaagagatgaagtaagtactcttattagaaaaaggaacactttggggccagaaatggaccagtgtccaaggcatgcagaaagcaggaaataattaccgggtcatgggatggaactatggagagtgactaaaggttcaagatcataaaccagtctttagttgctcctaatttaatttaatgcaatcctcactctttgtcatcatttggttttaatgtataaagctatggggtctgcttattgtatgttttgtagtataatttggaaattaatctatcagctcttttttctcagcccagttggtgtcttgtcaactcctctgcactaattgcttcttgttttctcacagtccagccctatgttctcatgagctgtgaccctggggtatccaggctccggtttgcctgctgtggaaaaagtgcagctttctaagctggtcacatatctctacattaaatgtacattgtctttttaaagcaatgttcagacattcatatattctttcttcctgaggtttaagcaccacaagcagcagtcatataatggagagattctcaacaacagagtgagtctctgccataattggatttattatacgttagaaacagcagttacatactaaatgttttacaaagtgttttttataatttttatttccttaaatattgcaaatagaaaatttagaggtccaacatttatttaaaatttggctcttgtaatttgcagtggaaagcttatatgagtatctacctctaaaacaattaattaaaaatgctctggggttaactgggcaccaaagtataagaaaattttaattaagtgaaaaagtctaagtaatgaccaactaaggaaataaaaaggaaattatactttcaaccccctttcccccagttgctctatgctctattttttttctattgccaagttgtacaattttatttttgtccttgataattstactttattttaacgtgactagattatattttattttattttaatttattttattttgttttattttattttaatgtgactagattttgcctcactccaggctggagtacggtagcatgattatagttcactgtaacctcaacttcctgagttcaagtatcctcctgcctcagcctttctagtagtgagaccacagttacatgctataatgtcaaaataatttttaaaacattttcagtgacaaggtcttgcttaggcttgtctcaaacttctggccttaattgatcctctggcctcagcatccctagcagctgaaatttcaagtgtgagccactgagcccagctctttatttttataaatatttatctctttagttttttctgaagcattttcaacaccttcacctgaactttcaggctttcaactcacagttgattttatccattttgctattcatcctatttattctattgcttatatacttttgtaacatatttaatattttgagttttaaattcttgatacttatatgtatgtatttttagttgtctcttttgcaaggctgcgattctctctagagaagagaatgggctctatgctttcttgagaaaagcattttataacatgggagtaaaacagaccctgtggaaaataaaataaaaggcattttaatcatgattttttataaattgctatttgggagacacaaatttagcaagaagctatatcatgttccattcagatgaggttagggagggacttataaagttttactgcaagtttacacaagtgaaagattttagcacagtctatgatggacaatgtttgattgccagcttagactgtatctaggcaatcatcagcttaattcagcacagctttctcttcaggaggtttgtgatcaggctcagtataaacaatccaagtcaaatgcagttgcctttttaggacatctgtaattttcccagttcgaacaggtaaaattccacctgggtgtgtatgagtattaattcaactcctcatgtcctcctagttgtctttagagacctctcaaataactatctccattttggatttcttttaattagaaataaagagcgcaaggattatcactggttgggaatatagaaaaatagtgcccacctgtgattcatcggaccccagtcagagagaaaaggccaagatatgcctgacagaaaggcttgaggacctttaggtaatttattcctcaaaaagaattggttcacacctgtaattccagcactttggaaggccaaggcgggcagattattggaggtcaggagttcaagaccagcctgacaaacatagtgaaactaaaaatacaaaatttactaaacatactaaacgtacaaaaattagctggacatgaagctgggtgcctgtaatctcagctacacagaagcctgaggcagcagaatctct

SEQ ID NO: 726437 - DNA, 2431 bp, Homo sapiens
tggggcacagtatgcaaggaaaggaattgtattaagagatgaagtaagtactcttattagaaaaaggaacactttggggccagaaatggaccagtgtccaaggcatgcagaaagcaggaaataattaccgggtcatgggatggaactatggagagtgactaaaggttcaagatcataaaccagtctttagttgctcctaatttaatttaatgcaatcctcactctttgtcatcatttggttttaatgtataaagctatggggtctgcttattgtatgttttgtagtataatttggaaattaatctatcagctcttttttctcagcccagttggtgtcttgtcaactcctctgcactaattgcttcttgttttctcacagtccagccctatgttctcatgagctgtgaccctggggtatccaggctccggtttgcctgctgtggaaaaagtgcagctttctaagctggtcacatatctctacattaaatgtacattgtctttttaaagcaatgttcagacattcatatattctttcttcctgaggtttaagcaccacaagcagcagtcatataatggagagattctcaacaacagagtgagtctctgccataattggatttattatacgttagaaacagcagttacatactaaatgttttacaaagtgttttttataatttttatttccttaaatattgcaaatagaaaatttagaggtccaacatttatttaaaatttggctcttgtaatttgcagtggaaagcttatatgagtatctacctctaaaacaattaattaaaaatgctctggggttaactgggcaccaaagtataagaaaattttaattaagtgaaaaagtctaagtaatgaccaactaaggaaataaaaaggaaattatactttcaaccccctttcccccagttgctctatgctctattttttttctattgccaagttgtacaattttatttttgtccttgataattgtactttattttaacgtgactagattatattttattttattttaatttattttattttgttttattttattttaatgtgactagattttgcctcactccaggctggagtacggtagcatgattatagttcactgtaacctcaacttcctgagttcaagtatcctcctgcctcagcctttctagtagtgagaccacagttacatgctataatgtcaaaataatttttaaaacattttcagtgacaaggtcttgcttaggcttgtctcaaacttctggccttaattgatcctctggcctcagcatccctagcagctgaaatttcaagtgtgagccactgagcccagctctttatttttataaatatttatctctttagttttttctgaagcattttcaacaccttcacctgaactttcaggctttcaactcacagttgattttatccattttgctattcatcctatttattctattgcttatatacttttgtaacatatttaatattttgagttttaaattcttgatacttatatgtatgtatttttagttgtctcttttgcaaggctgcgattctctctagagaagagaatgggctctatgctttcttgagaaaagcattttataacatgggagtaaaacagaccctgtggaaaataaaataaaaggcattttaatcatgattttttataaattgctatttgggagacacaaatttagcaagaagctatatcatgttccattcagatgaggttagggagggacttataaagttttactgcaagtttacacaagtgaaagattttagcacagtctatgatggacaatgtttgattgccagcttagactgtatctaggcaatcatcagcttaattcagcacagctttctcttcaggaggtttgtgatcaggctcagtataaacaatccaaktcaaatgcagttgcctttttaggacatctgtaattttcccagttcgaacaggtaaaattccacctgggtgtgtatgagtattaattcaactcctcatgtcctcctagttgtctttagagacctctcaaataactatctccattttggatttcttttaattagaaataaagagcgcaaggattatcactggttgggaatatagaaaaatagtgcccacctgtgattcatcggaccccagtcagagagaaaaggccaagatatgcctgacagaaaggcttgaggacctttaggtaatttattcctcaaaaagaattggttcacacctgtaattccagcactttggaaggccaaggcgggcagattattggaggtcaggagttcaagaccagcctgacaaacatagtgaaactaaaaatacaaaatttactaaacatactaaacgtacaaaaattagctggacatgaagctgggtgcctgtaatctcagctacacagaagcctgaggcagcagaatctct

SEQ ID NO: 726438 - DNA, 2431 bp, Homo sapiens
tggggcacagtatgcaaggaaaggaattgtattaagagatgaagtaagtactcttattagaaaaaggaacactttggggccagaaatggaccagtgtccaaggcatgcagaaagcaggaaataattaccgggtcatgggatggaactatggagagtgactaaaggttcaagatcataaaccagtctttagttgctcctaatttaatttaatgcaatcctcactctttgtcatcatttggttttaatgtataaagctatggggtctgcttattgtatgttttgtagtataatttggaaattaatctatcagctcttttttctcagcccagttggtgtcttgtcaactcctctgcactaattgcttcttgttttctcacagtccagccctatgttctcatgagctgtgaccctggggtatccaggctccggtttgcctgctgtggaaaaagtgcagctttctaagctggtcacatatctctacattaaatgtacattgtctttttaaagcaatgttcagacattcatatattctttcttcctgaggtttaagcaccacaagcagcagtcatataatggagagattctcaacaacagagtgagtctctgccataattggatttattatacgttagaaacagcagttacatactaaatgttttacaaagtgttttttataatttttatttccttaaatattgcaaatagaaaatttagaggtccaacatttatttaaaatttggctcttgtaatttgcagtggaaagcttatatgagtatctacctctaaaacaattaattaaaaatgctctggggttaactgggcaccaaagtataagaaaattttaattaagtgaaaaagtctaagtaatgaccaactaaggaaataaaaaggaaattatactttcaaccccctttcccccagttgctctatgctctattttttttctattgccaagttgtacaattttatttttgtccttgataattgtactttattttaacgtgactagattatattttattttattttaatttattttattttgttttattttattttaatgtgactagattttgcctcactccaggctggagtacggtagcatgattatagttcactgtaacctcaacttcctgagttcaagtatcctcctgcctcagcctttctagtagtgagaccacagttacatgctataatgtcaaaataatttttaaaacattttcagtgacaaggtcttgcttaggcttgtctcaaacttctggccttaattgatcctctggcctcagcatccctagcagctgaaatttcaagtgtgagccactgagcccagctctttatttttataaatatttatctctttagttttttctgaagcattttcaacaccttcacctgaactttcaggctttcaactcacagttgattttatccattttgctattcatcctatttattctattgcttatatacttttgtaacatatttaatattttgagttttaaattcttgatacttatatgtatgtatttttagttgtctcttttgcaaggctgcgattctctctagagaagagaatgggctctatgctttcttgagaaaagcattttataacatgggagtaaaacagaccctgtggaaaataaaataaaaggcattttaatcatgattttttataaattgctatttgggagacacaaatttagcaagaagctatatcatgttccattcagatgaggttagggagggacttataaagttttactgcaagtttacacaagtgaaagattttagcacagtctatgatggacaatgtttgattgccagcttagactgtatctaggcaatcatcagcttaattcagcacagctttctcttcaggaggtttgtgatcaggctcagtataaacaatccaagtcaaatgcagttgcctttttaggacatctgtaattttcccagttcgaacaggtaaaattccacctgggtgtgtrtgagtattaattcaactcctcatgtcctcctagttgtctttagagacctctcaaataactatctccattttggatttcttttaattagaaataaagagcgcaaggattatcactggttgggaatatagaaaaatagtgcccacctgtgattcatcggaccccagtcagagagaaaaggccaagatatgcctgacagaaaggcttgaggacctttaggtaatttattcctcaaaaagaattggttcacacctgtaattccagcactttggaaggccaaggcgggcagattattggaggtcaggagttcaagaccagcctgacaaacatagtgaaactaaaaatacaaaatttactaaacatactaaacgtacaaaaattagctggacatgaagctgggtgcctgtaatctcagctacacagaagcctgaggcagcagaatctct

SEQ ID NO: 726439 - DNA, 2054 bp, Homo sapiens
gaaaacaacgacatcgacaagaacaacgacaacgacaacagcaacgacgacaacaggaacaccaacaacagacacaagagcagcaggcagcatatcagcctcactggatttgcttattttataagatgtggtgatgaaggatrgtaaacatcaaccggctctgaatgcacgttgagagagatcacaaaagcgctagttaacaacaggacaaaacgggagctaacgtgtcttggggaaaatagacgtcttcctgaaaactgaggatattctacttcacctgaaaagaaagacatacgagaaaggaaaaacacgaacaaaacaaaacagaacgaaacaaaacaagccaacaaacacgggccaaggcgccgtccctggaaatcttaagtgagcaaagttattagttttcagaaagcgtttctattttgggcaagtactgagaaggcccagactagagccgtggcgcccttcgcattgtgaaactctgctggccggagggcggagaaactaaaacatcgtgataaaaggtgaccgagacccagccagggtgaagctttcctagggagggaggcctgaggcgggaagcagcggggggaaaagcctcacaactgcagacccgcccgcttgcccacgcgggtcaaggggctatgccatcggcccaagctgcctccggggaagtgggaccgtgccgcccccatcttcaaaaacggtggcccccgagtgaggcctgacgcccaccgatgcaaatgtcagcctggcaagaatgagatcgccggcaaggggtgggggaaggggagagaagacggaggcacaccggggtggctctggaaggtttccaagcagggtgttgggaggcgggggggggggggccggtttgggggaaacccacctaaccgactcactaaattaaggtgaagggacgtgggtagtggggggagccggggggcaacttgaaaattaaactgacccttcccaaagcccaagtagaagagtctaggcgccaaaacacaaagaaaagtaaagcgccgatcaaagaacaatagggcccccgccagggcggaggttccctaggcgaggttccctaggcaacgagggagagagggaggggcctccagaagggagagagagaaacccgttgccccaggctcggtgaagtcggcgagacctccctccgtgtcacgtcgactttcaataacagtggccgctaggtgatgcccgaagacaaccgatgcctgcctgcaaatgtccgtcagcagggaaaagaattaatgaattaattaatttccgtatttatttagagaccgagtctcactcactctacagcctgggccgtagtgcagtggcgcgatctcggctccctgcagcctccgcttccctggttcaagcgattctcccgcctcagcctcccgaggagctggcattacaggggcctgccccaccgctcccgactcagctttgtatttttagtagagacggggtttcgccgtgttgcgtccggccttaacagtttatgttgaagtcgaggagcttatcggggaaataggagaagtacggacgccacacgtgaccgagagaaaagtctgaaaatgcccctcgcatccaagcggggacccggcctcgacctcccgaaatcgtacaccgagtggggaagcccagcaaggcccgcctgtctagattcctctcggcctctctaagcaccgaagcacgcgcttctcactctcgtggaaggggcagggccctacccggcacgggggtgtctgacagactgacagagaaagagacagacatagaaagacagagatggacagcgagagatagagagaaacagacagaaagagaaagagagagagacagagacagagacagagagagagagacagacagacagacagggagggagaaagacaaacagagagagagagagagagagagagagagagacagacagacagacagacagacagagaaacagacagaaagagagagagagacggagagagagtgagtgagagggagagagagagacatggagggagagagacagacagagagagaaa

SEQ ID NO: 726440 - DNA, 1101 bp, Homo sapiens
taacaacaacccaatggactagatacttttattgttcccattttagaggtggatacaatacaaaaaaaattccagtaacttgcccatgatcacttggctaattatttgcaactcaggtatctgatcccactatctacatagttattttctgatagcatagccagaggaagaagaaataaataatattgtattgattgcatcatatatgcctgaaacttagctagatgtatttttctatgtatcttacttcatagccagaaaagcatggtactcaggcaaaatactgcagtgattaagaaggcaaaatctgaagttcacaggaaacagtcagtatgtatgcatattattattattatcctacttcatgcattaaagacaatatcctaaaattcagaattagcttgcacaaagctatgtgctatagtcatgattggaaaagagtccatgctgtatacccattgttttaaaaaatatatttgtgtgtgtgtatttgaggtttatgacataatgttatgagatacatatagatagtaaaatagttactatagtgaaggaaattaatgtatccatcatctcacatagtccctttttttgtgacaaaactgctaaaatccattaatttaacaaaaatccctaatgcaacacaattttattacctatagttctcacactgtacattggatctcaagatttgttcatcctgcatgtcttctactttgtgtcctttaatctgtatacatctctccaatttctccctcttcttggccctggttactaccgttttatcccctatctttgtatcttttttcaaaaatttagattttgcatatcagtgagatcatctaatatttttctttctgtatctgacttatttatcttagtgtaatgttctccaggtccatctacattgtagcaattggcagaatatcctttttaaggctgaataatattcctttatatmcacacacaatacaacacattttctttatccgtttgtccattgacagacacttaggttgtttccatatcttggctgttgtaaataatcctgcaacgaacataggagcacaaatgtcttcaagagacgaggatttcatctcc

SEQ ID NO: 726441 - DNA, 595 bp, Homo sapiens
gaatttgtggtactttttctaagatgactgtacactgagcaaaaggaaattcctagattttgtaagcgtatcagatactgagtagatactaatctctggggaacaaaaaaacactagtagaaactaattcctgagaaacaaaaaaaacactacagtgattgactagtcagaaagaaagctatggtgatcatgtgataaataggcccttgtcatatgtctatttcattgtgaaacctaaggactcctggactcattccaaatcaccaccaaaatggtaaattgaaagaaaacatataattggaagaatggcagatattagtgccatcatcatagacttgaaacatataccattggyaattcttatttaatttactttttgattgatgaaaaaatgaaataggtctttgaaaatacctgtgaattatcataaacatgatcaaactatgatgacaatcacagctgctgttttcaggtgggaagttgataatgcgtactactggtcccctacacacattctctacctggcctgcgcgtcaaagtttctgtaaatgttagattctaaaagttcacaagtgcttccactccagagaactgt

SEQ ID NO: 726442 - DNA, 2261 bp, Homo sapiens
ataattacttttgtttttatttattttggctaaacaagaaaaaagaatttgtctgacctactagttctctataacatgtcctccagatggcatttgcaaatagcttggtgagctatttattacaaaaggaagaattcatacgttggaaagtttgcacagacagtagttgagtaagaaaaagaaattcgacaataggaagccattccaattttcttgaagtcctcttcttcctgttgaaatgtggcctcttcttggtagtggttgcatgctgtttttggataatgactttctcgtgcagtttcactccttactctgttttcttattgtgtcatcatgttttccacactcccaatactactgtatagcctcttgagtctacttctctcccaaaggatgaccccctgggaacattatttaaaattgtatgaacaatggtatagagaaaaataagtttctaccagctaaatgaagacataaagggaacaaatacaaatatatttgtgtactttcaaatcttgtttgctggattccaatccttgtactcctcctctcagccactagactgagctaattatattctgaatttgtagttaattatcttgctgcatttcttaaatacatacagacacatatattatgtatatcactacatatgcatatgttaccaaacaccatataacatgtttttatatactaaaatgtcgtactgtgcatattattcattttgctttgcttttatwtatacattaactttcagatcattcataaataaagtgctgtacagtagcactttattctataaactaccacaagttatttatcaattctgaagttgatgggggcataagatttttttgtctctctctctccctttttattctcttataaacaatcctgcaatggagacttttatatatgtatatttttgagtctcaggaaggattttgtatattactattattcctacatgtatatgagaaaaatagttgggtcatagaaatatgcatatgtcttcaagtttgctacatactgccaaattacacagtaaacttatttcaacaattgatattcccaccaaccaactagtcattgttccaaattcttgccagcagctgaagctgtcagacatataaaatcttttgaaactaagttttaaatatttttgtttgtttaatctgcatatacttgattaccagcagtatttgggtttcctcttctacaaatgtcttctttatattacatttaggtagttttttaatgaatatattcattttaaaattgattttaaagaaatatatgcaaagtatatgtatttgtttaatttttacacattcccagtgtatgacttttatttgcacttgtctaaagcataattttgattgataaaagttgttttaaatatggttcttaatatttaacataattttccttaagaggctatacttttttttgtttgttatcttgtttaaaaaaatccactttgaggttatacagttttttttttaatctgttttcttttaaaagttacataatttttcatttcacattgaatccaccgttacagacttttgtgaatgagtgaggaaaaaacaccattttatttgcttttgctgaatagtgaattaattctgccagcacacttgctgacggcttctccagtgaactttactattgccactctccacttagtctcaactaggcttgcagctctcttgatcttctgcacagctgtcattgtgaactttcttttttattcctctgagttaggtctatatttttctaggtagagtctagtaactccctaagaaaacaaatgtgggaagtaaaatgttttattctttatatggccaaatcctatcatcaaggcggatcttggaacctgtaccaaaggaagtaagtgtcgtataaagaacttggattctccaggcagactgccaggatttgtatcctggctcttccacttactgcctatgtgatcatcatgctaatcttcaagctggatatgagcaatgcaccccttgagagcacatggagaccttagaatcaataaaagacatagttattccaagaaaatggatttttatagcccaaatctacataaacgtgtatacctatatatatacacacacatatatatgtatgtgtgtgtgtatatatatgtgtatatatatacgcttttccaaaatttatccatgaagctaccttgtttgactgagattttgttcctctttcctatctatcttttcacaatcacctttccg

SEQ ID NO: 726443 - DNA, 1059 bp, Homo sapiens
cttgtgatctcttagccacattttcttttattctaaaaagttattcaaatgtttttctttgaaaatgatgtgttctttttattgttctctctgacttcctgtaactgattgttaagctctaaaaattaagaaattaattctagattctttgcaaattgatattaaacataatgttctacattacatcagtaaaacaactctaatattgatggaaggaaaacaaaggaaataagatwtatttcaattttcacttaaccaaaaaaaaattttatgtgaagtttttttatctaccattatcttgtgagcagttacaaaaatccgatagggctggttataaagacttgctaagtcttatacataacttgatgcagcaagtgtcacattactgcccaaaagatgtcaactatagttactattttaacctaattaaaaacaactcataaaattattcacatgagtactaaaaagaaaagcaaagagaaaaaatattgcagatttgggggaaaaaagatgaattttgcttgaattccagtccagctacttagctctataaccttacactattttcttgcctaatatccctcatgtggcacatggaaatttaaaaagaaaactagttcacatggttattgtgagaattaagtaaaaaaaaaatatggacatgaaggaggatgacagcatttagactttgtcctagaatggttagaaatattctgaattcatatatatttatcacttttgacaagagacctttgggagatacatactataaaagctctgttgtatgtgcaaaaggaagtggcatagatcaggatgtaaggactggtaactcatttcagtcctttgcttattgatcataatatcttggacatgccacttcttttctgcctcactgaattattgtgaggataccattaaatagtacattttaaagtcattttaacattaagtaatttctttacatgtataaaattttgttgcaactagtcaatgagtatgtccatgatccttctttataattgaacaatttcttgtaacgttaaaaaggtgaagttttca

SEQ ID NO: 726444 - DNA, 1059 bp, Homo sapiens
cttgtgatctcttagccacattttcttttattctaaaaagttattcaaatgtttttctttgaaaatgatgtgttctttttattgttctctctgacttcctgtaactgattgttaagctctaaaaattaagaaattaattctagattctttgcaaattgatattaaacataatgttctacattacatcagtaaaacaactctaatattgatggaaggaaaacaaaggaaataagatatatttcaattttcacttaaccaaaaaaaaattttatgtgaagtttttttatctaccattatcttgtgagcagttacaaaaatccgatagggctggttataaagacttgctaagtcttatacataacttgatgcagcaagtgtcacattactgcccaaaagatgtcaactatagttactattttaacctaattaaaaacaactcataaaattattcacatgagtactaaaaagaaaagcaaagagaaaaaatattgcagatttgggggraaaaagatgaattttgcttgaattccagtccagctacttagctctataaccttacactattttcttgcctaatatccctcatgtggcacatggaaatttaaaaagaaaactagttcacatggttattgtgagaattaagtaaaaaaaaaatatggacatgaaggaggatgacagcatttagactttgtcctagaatggttagaaatattctgaattcatatatatttatcacttttgacaagagacctttgggagatacatactataaaagctctgttgtatgtgcaaaaggaagtggcatagatcaggatgtaaggactggtaactcatttcagtcctttgcttattgatcataatatcttggacatgccacttcttttctgcctcactgaattattgtgaggataccattaaatagtacattttaaagtcattttaacattaagtaatttctttacatgtataaaattttgttgcaactagtcaatgagtatgtccatgatccttctttataattgaacaatttcttgtaacgttaaaaaggtgaagttttca

SEQ ID NO: 726445 - DNA, 1526 bp, Homo sapiens
tttgcaggtgaactttagtcaacaattctgaacttccacagattccatttcaacatttgtttggaagctcaggcattatgaataataggaatatgacacttgcaactaccaatatagcctaggagaggaaaataaaagatgaaatagatgcatatgctatgatatttacatctgttaagttcttgaaagagtatggatagattaaggtttaggaaattaaattacattttaaatgcaaccagaaagcatgtcagaaaaacactcttgtgaagtaaaaaactccttctttatttaaaggaccacttggtttatattttgtgattcaatgtttgtagaactataactttagctatctgaaactcacctattctgtaactcctcttattcggaaaataacccagagacacaaaataagcaaaaggtattgccacaggctaaaagcaatatcacaatgtttgtgcactaaagtccaggaacttgactttgaggccagcccatktcaagacctgttcattattagttcacacacatttccaaaaactagctatcttcatctgttatttgtattagttttctcccaggctgttctaacaaatactatagactgggtgaattaaacaatataaattaatttcttcccagttgtggaggctggaggcccaagatcagggtgtctgcagggttggtttcactctgaggccattttccttgacagccttctttcctgtgtattcatatggtatttattctatgcatgtacatgtttgcatctatatttcctcttcttattaaggacactagtcatgttgcattagggcccactctcaagatctcattttaatttaattacccctttaatgaccttatttccaaatatggttatatgctaaggaactgggggtaaaacttccacatataagtttaggaggaaggatacagttcaggcctgaatacagcagctttgaagaagaaaacagaagcagtgactgaagaaagggcattagtcaagtatgctagtaacagcaataagcaattgcccaaagaaaaaaaaaagagatagcaaatttaatttaaaagcttatatgagtatattgaaaagcacaaaaaccggtgttaaatatctttgcatctctcagcaggtcctaaggtcatgttggtataactgcagaattaaaactaagacatcaagtaaaggtaaactgttcatcatatagaagtagcaagttcccatagaatgacagatgggagcttaagccccaacattgtcacttggatgtcacttaaactctctgtttgttttctcattcgtatcttgagaataaaaatatctgtgcaaataccagaggtaaagaagtcacctatgggtacttcataaacataagcattctccacagaataagctcttagatccaagaaggcatgaaaatatgtattacaattaaataaaatttagatttgcatatcaaattatcaaacaggaaaaatttttaatttttaccgagttataccctcaattatctggaaaa

SEQ ID NO: 726446 - DNA, 1526 bp, Homo sapiens
tttgcaggtgaactttagtcaacaattctgaacttccacagattccatttcaacatttgtttggaagctcaggcattatgaataataggaatatgacacttgcaactaccaatatagcctaggagaggaaaataaaagatgaaatagatgcatatgctatgatatttacatctgttaagttcttgaaagagtatggatagattaaggtttaggaaattaaattacattttaaatgcaaccagaaagcatgtcagaaaaacactcttgtgaagtaaaaaactccttctttatttaaaggaccacttggtttatattttgtgattcaatgtttgtagaactataactttagctatctgaaactcacctattctgtaactcctcttattcggaaaataacccagagacacaaaataagcaaaaggtattgccacaggctaaaagcaatatcacaatgtttgtgcactaaagtccaggaacttgactttgaggccagcccatttcaagacctgttcattattagttcacacacatttccaaaaactagctatcttcatctgttatttgtattagttttctcccaggctgttctaacaaatactatagactgggtgaattaaacaatataaattaatttcttcccagttgtggaggctggaggcccaagatcagggtgtctgcagggttggtttcactctgaggccattttccttgacagccttctttcctgtgtattcatatggtatttattctatgcatgtacatgtttgcatctatatttcctcttcttattaaggacactagtcatgttgcattagggcccactctcaagatctcattttaatttaattacccctttaatgaccttatttccaaatatggttatatgctaaggaactgggggtaaaacttccacatataagtttaggaggaaggatacagttcaggcctgaatacagcagctttgaagaagaaaacagaagcagtgactgaagaaagggcattagtcaagtatgctagtaacagcaataagcaattgcccaaagaaaaaaaaaagagatagcaaatttaatttaaaagctyatatgagtatattgaaaagcacaaaaaccggtgttaaatatctttgcatctctcagcaggtcctaaggtcatgttggtataactgcagaattaaaactaagacatcaagtaaaggtaaactgttcatcatatagaagtagcaagttcccatagaatgacagatgggagcttaagccccaacattgtcacttggatgtcacttaaactctctgtttgttttctcattcgtatcttgagaataaaaatatctgtgcaaataccagaggtaaagaagtcacctatgggtacttcataaacataagcattctccacagaataagctcttagatccaagaaggcatgaaaatatgtattacaattaaataaaatttagatttgcatatcaaattatcaaacaggaaaaatttttaatttttaccgagttataccctcaattatctggaaaa

SEQ ID NO: 726447 - DNA, 1262 bp, Homo sapiens
caggtgattctcagtgatttactctaggaatatgctaacccctttctcttgccatgcaattttagtccacacttgttccttgttcaccagagaaacctcaattacaacttcagacccactgagccactcaatttcctataggttcccatccaaaatttgcggttctgctcctcttgttccataatcatgcagcactttgtgcattctcttctgtagtactttgatataggatggtggctatttgtgtccacaaccatccttacattattctgtgaacttcctaagagaaggggctcttctcacccatctctgcaatcctaacactgcagcgtagtgcctggaatgtggtagaccctcccttaatccatttctactgaattactactggatgagtgattggattgccaattgatttgtcacttcagtcatgcattcatatgttaaactgtgtggatcaaaacccaaagttatccacagtagcgtaatacaaacccagcctaaggatttcgttggtaaaatcctagcaggaggatcggttgcccttcccagtgtgtaactgtgctcttcccaacacggctgcttgatcatgctgatgtattcagggatgcttttaratttgattgattgattagtctctgttctcttcagtttcccataaagttgcatgtgagtgtgcttaatgggctagtacctatttttctttccttcagcagttggttggggaatttttctttgcatagggaaatctaacgccttgtctgtcagtgtggcagttctggtgatgtgactgtttagtgagacaaggattaagaatatttagtcatcggcacctaaactatgttctctcctgtcagggtaggagtcaatgaagacatcttagtcttcttaataagttacagataatctgtctctgagtgcatgcttcctgcttctagcttggagccaaatgttgctcacactgaaaagaataatgtctgtctgtttgtttggatattaactctattttgatctatagcacaattttgtaattcagattgtcacccctgcacttcgtaccacatgtgcatattcgttcttcccagtcattgctgcaattatcttgtctgttctttgtgtaatatgttctgtgtgggcctctgcattgaattccatttcttgggcaattatggaaattccagtttggctgcagtttaactttgcactctctattcatatgaagttttctaaataaacttgaagagtagcatagtttgaaatcatcg

SEQ ID NO: 726448 - DNA, 1517 bp, Homo sapiens
ttactgcctcctaagtcaaacacagtgaaaatagagtcatttacgagatggcaactgagaacaacggaaacttacttgtataagctgayggtcggttcaactgccaacatcacaaagggtgctaccgtgtaagagacagccagctgagtgacggcccaggtgcctgcatcatacacagccttgagagctcttgaagaaaggaagtaatgtctgtagttgttcctgacctgcaggccaacacaggcaacagtagtgaggagggggtgaaaaacaaataacaacttttactctgtgcatgcagatagtatgccacaggaacatgggctacagaagataaccaacatctgagttgtattttcgactacaaataccatcaggactttttttttttttttttttttttttgagatggagtctcgctctgtcgcccaggctggagtgcagtggcgcaatctcagctcactgcaagctctgcctcctgggttcaagtgattctcctgcctcagcctcccaagtagctgggattacaggcacctgcctctatgccctgctaattttttgtatttttagtagagctggggtttcgccatgttggccaggctggtctcgaattcctgaccttgtgatctgcccaccttggccgcccaaagtgctgggattacaggcgtgagccaccgcgcccggcccaggactcttttttttttttttaaataagactcttgctctgccacccaggctgaagtgcaacgatgcaatcatagctcactgcagcttcaaactcctgggctcaagtgatcttcccacctcagcctcccaagtagctgagactaaaggcacatgccaccatgcccagctaagttttaaaaaatttttgtagagatgtgggtctcactttgctgcctaggctggtctcaaactcctggggtcaagcaatccttctgcctcggcctcccaaagtgctgggattacaggaatgagccactgtgcctggccaatttttcttattaaaataataataataataataatatgtgttcactgtagaaaaatggtcaaacaactaagcaaacaaaaaaaaaatttctttcttttttaacacctcccaaaggaaagcatcacttaaaaacttggcacagagccatccaagctttttctattcatatgtatccatgttaatattcttaatgacaccaatataatttctagctcattttttcatttagtaatatatcatgcacttttttccatgccagtaaatattaatctccagtataattttaagttaattttggaaaagttagcttgtctgcccatcccattttgctattataaacaattatgtgatgtatatccttgtaaataaatctctgctctgtttcctatttacttccttcaggtaatgataacacaaataatattactattactactaatacaagcagctaccatttgctgagtgcttactctgtgccaagcctgtgctaatgatttgcatggctcatctctggttgattctc

SEQ ID NO: 726449 - DNA, 1517 bp, Homo sapiens
ttactgcctcctaagtcaaacacagtgaaaatagagtcatttacgagatggcaactgagaacaacggaaacttacttgtataagctgatggtcggttcaactgccaacatcacaaagggtgctaccgtgtaagagacagccagctgagtgacggcccaggtgcctgcatcatacacagccttgagagctcttgaagaaaggaagtaatgtctgtagttgttcctgacctgcaggccaacacaggcaacagtagtgaggagggggtgaaaaacaaataacaacttttactctgtgcatgcagatagtatgccacaggaacatgggctacagaagataaccaacatctgagttgtattttcgactacaaataccatcaggactttttttttttttttttttttttttgagatggagtctcgctctgtcgcccaggctggagtgcagtggcgcaatctcagctcactgcaagctctgcctcctgggttcaagtgattctcctgcctcagcctcccaagtagctgggattacaggcacctgcctctatgccctgctaattttttgtatttttagtagagctggggtttcgccatgttggccaggctggtctcgaattcctgaccttgtgatctgcccaccttggccgcccaaagtgctgggattacaggcgtgagccaccgcgcccggcccaggactcttttttttttttttaaataagactcttgctctgccacccaggctgaagtgcaacgatgcaatcatagctcactgcagcttcaaactcctgggctcaagtgatcttcccacctcagcctcccaagtagctgagactaaaggcacatgccaccatgcccagctaagttttaaaaaatttttgtagagatgtgggtctcactttgctgcctaggctggtctcaaactcctggggtcaagcaatccttctgcctcggcctcccaaagtgctgggattacaggaatgagccactgtgcctggccaatttttcttattaaaataataataataataataatatgtgttcactgtagaaaaatggtcaaacaactaagcaaacaaaaaaaaaatttctttcttttttaacacctcccaaaggaaagcatcacttaaaaacttggcacagagccatccaagctttttctattcatatgtatccatgttaatattcttaatgacaccaatataatttctagctcattttttcatttagtaatatatcatgcacttttttccatgccagtaaatattaatctccagtataattttaagttaattttggaaaagttagcttgtctgcccatcccattttgctattataaacaattatgtgatgyatatccttgtaaataaatctctgctctgtttcctatttacttccttcaggtaatgataacacaaataatattactattactactaatacaagcagctaccatttgctgagtgcttactctgtgccaagcctgtgctaatgatttgcatggctcatctctggttgattctc

SEQ ID NO: 726450 - DNA, 582 bp, Homo sapiens
taaaaatatttttatcctattcaaacttgatcaacatttttagctaagtataggattccaaaattggaattctctctcaaaattttgaaggcatggctccatagaattttggctttccagtgaaaaatctttcagcctttagctgtggttgagattttcttctgggtccaaagctgtggtcagaaaaaggaatcaggagttctaagtgacttttttttaaaaagggataatttgtatatggtaccatgcacaratcttaaatgtataaattgctgaatttttatacatgtatacacatgtataatcattatccagatcaagatacagaaattttccagtgttctgtaaagtttccttatgcctcttctcagttgattcctctgtctccctgcaggagtaaccactgttctgatttttttctaccataggttatttttatgtgttctagaactctttttaatatggaatcatacagcacatgcccttttgtgtctggcttctttcagttaatataaggtttctgagattcatccatgttttatatgcatccgttgtttgtttctttttattgttgagtttcat

SEQ ID NO: 726451 - DNA, 566 bp, Homo sapiens
ctagttcattgcttcttccattgtaacattttaccacctcctccattagccaatcggtagccatctcactgtggccaacagtggcttttttgtggtgtagaatataaattaaataagctgttatcttgtttgtgaatgtccaattctttttcaagatctgaagtggcaaatgttttgggaattttatctttcactcaaaagagccagaggcagaaatgaccaaggtaacacaaggtgtagttttgagtctcagtcctatcaatttcaatcaatgagtggccaaggaaatgatctaatttgtacgctcatctgtacaaatgggatttaaggctgtgtaaacacattatgaattattttttaatcattcrttgataaaatctccaagagaagatttggcctctcaatttgatgtgtcattatgtaacaacccatggtagaaaaatgtgcacttaggtattgtgaaggcagcttaggctgggttcaggcttctctgtgatcacagtgcatttagtctgttggcaacagatctttgatttcttccctctgatcaccttatcccaggaact

SEQ ID NO: 726452 - DNA, 566 bp, Homo sapiens
ctagttcattgcttcttccattgtaacattttaccacctcctccattagccaatcggtagccatctcactgtggccaacagtggcttttttgtggtgtagaatataaattaaataagctgttatcttgtttgtgaatgtccaattctttttcaagatctgaagtggcaaatgttttgggaattttatctttcactcaaaagagccagaggcagaaatgaccaaggtaacacaaggtgtagttttgagtctcagtcctatcaatttcaatcaatgagtggccaaggaaatgatctaatttgtacgctcatctgtacaaatgggatttaaggctgtgtaaacacattatgaattattttttaatcattcgttgataaaatctccaagagaagatytggcctctcaatttgatgtgtcattatgtaacaacccatggtagaaaaatgtgcacttaggtattgtgaaggcagcttaggctgggttcaggcttctctgtgatcacagtgcatttagtctgttggcaacagatctttgatttcttccctctgatcaccttatcccaggaact

SEQ ID NO: 726453 - DNA, 1253 bp, Homo sapiens
tcctaatacctctgcttctggtcttcccttcccaccctcgcatggttacaggttaccccctacaggacagtttgcaggtcacagttaatctctttggggagcttcccttcctgatagcagctgcttaattgggggtgcatgtgaaagcatttccacaagtcttcactacctttaagcttccactgtgttggcagagggctgggggctggaagagctaggatctctgatgtcagtgaggcttttgtatctgtgcccagagtggggcaagaggggacatcccaggggagcatgtgaagggaaaggccagatgggaaaatcctgcataaggtagtgaagctttatgatatgtgatacatgctatgtctgaggcttgaaggacacactctgccattgatttgtttgttcactccacaaacacctacccagtggctcctggaagccatgactgagctcggcgtctggggtaggaaaatccgtagcatctcatctctgtccttcggacacctggcatctagcagaggagaaggcaggtgcatacagctcaggactgctctgttcttcttcctcatgaagcaggagcgagggcctgatggctttgtttaactctccatgttatggagcagaggattcagcatccagccctttactgatgtcttcgaatacattatctcactttcataatcttcacatagcatctattagtgagatgggacactggagccaagaaacttgaaatactataaatgtcacccagctggcaaatggtagacctgggatttgaatgctgcttcttttgaaacctccctcaggagaggggtaaggctacattagctggggtgaaggcagggagaagagttgggggagattaaagaccaagggagtcccatgggcaggagatgacatgggcatgggctagggcatcagtgaagtggggaagggagctagagagacrcattctgtttgcttgtgagccttctgcaaaggctaacttgagccaggcagagctggacattgaggatgcagagatgaacaattgtaatgaatgagctcacagtccaatgggcgagggatctgggagctgacaaccgcagaggagcatgatggatgttgtgcctgaggaggagccctgacacagtgaaggcaaactcagggcaggctggaggaggcaagaccagagccactgtcgagaagaagtcaaagaggcaatgaggagaatcagaggaaattgaaagacaagagctaagtgttcttcc

SEQ ID NO: 726454 - DNA, 1430 bp, Homo sapiens
caggcctcagaggatggaaaggtgatgtgcggatgaagggaggaggcccacagctgggcacatagcagcagtgacctgtgcagtgggcactcaggctgcctctggggcrgatagagacggcgccacccagagggagcctggggctctctggccttgtcaggggtttggcctcaattagggaggagcccagccacctctgcctctgtgaaaagtggtcacaggatggagatcctggtggcagcatgactaaggggcctgggacctcggacaccaaatccaaggctgtggtcccagttagagaggaggcagcgtgagctgcccgggttgtagtgctgggaatgagagagaaatgctgccctgggtgggatttagggactgagggaagcaggaattactggggagagaggaaggtctaggtgacctggtgggaaggagtgcatagagggggctgggctctgggtgacctggtggggaggggtgcatagtgggggctggtctcccctgcctcagctgcccttagggatcatggggatgatgggggccctgggcatgatcaggttgagagaagtccacatgacaacccccgggggctagtttcctagttgcccattggcatttttgctgggctgaagctccacaagataagagctccaagagttctagcattttcttcttcctctttttaatattcagcatggcaaagacagcagacatgggattcatcaggaaaaaaacagtgattagaaagtgatgggtgttctggtgtctgtacaggaagctcggcatctggtcgaagcaggttcctcaaggacggagacagccaggactccctaggcaaggagaggtgcatgtgcagaggtctcagcaggccagcgtggaggtccccctttctccttatagctcagagatggaggaacttgtcatgtcaaaacacagaatcgcctcaacccaacctctttacccgtactttctgctcctgtggatggctcagcttcttctaagtgagctgtttcttccacttcgctgcaggccttagttcacagtgtcctggtgggctactgatgatggccaggatggacttatggaatatgaatatgtaattgtatttcaattttaaacatgagtaaaagctcaaagaagtagacagtagaatggtggcctccagggcctggggtggggaaggaggatttcggttcgacaggaagaataagttctagagatctgttgatctgttgatcacagggttgtgcaacactgtgactatagttaataatatattgtattcttgaaaattcctaagaaagtggtgttatcaccataataagtaaagcttatgttaattcattcaattcagccattccacaatgtatacatatttttaaatattatgttgtacacaacaaatatgtacaattttatggcaattaaaa

SEQ ID NO: 726455 - DNA, 1791 bp, Homo sapiens
gaaggaaagtattaacaacatttaaatgaaaattaggcaagcaaaaaaataagaatttttaaaaaggtgacacaatagtgaacaaaaagctctacaaaaaataatgtatcgatcctcttcctaagctggcgctcagcaaggaaaaggccatattcagttccagcgccaagatcatgaagcccaatgacgagaagccggacgagctcaagcccagcatctcccaggctcttctgcagctggagatgagctcagacctcaaggctcagctcagggagctgaatattacggcagccaaagaaactgaagttggtagtggtcggaaagctatcataatctttgttcccgttcctaaactgaaatctttccagaaaatccaagtccagctagtagcgaattggagaaaaagttcagtgggaagcatgttgtctttatcactcagaggagaattctgcctaagccaactcgaaaaagctgtatgaaaaataagcaaaagcatcccaggagccgtgccctgacagctgtgcacgacgcaatccttgaggacttggtcttcccaagtgaaattgtgggcaagagaatctgcatgaaactggacggtggcctgctcgtaaaggttcatttggacaaagcacagcagaacaatgtggaacacaaagttgaaattttttctggtgtctataagaagctcacgggcaaggatgttaattttgaattcccagagtttcaattgtaaataaaaatgactaaataaaatattttcacagtaagaaaaaaagaaaataataataatgttgtgataactttttctttgcagcgagttatattttctgaatcagattatatggattcaactaaaagtagcttttaactatatttaagaaataagagagaggaggtgagagtatagaagttaaatgcacgtgtgtcatatatggaaatttaaagataaagtctgaagtattgataaatctagatagagaagtatatacctatgtagaagagmcttctagaggtcgcccagaagctgtctctccttgtccaacaggaggctttggcacatggctggccagtgcaagcagtacttctccaccctccaggctgggatgaagttttggctcatgagttgtacatacacgtttcaagtgacagcacctgaaatccttcaaggaacagcatgtccatgtgccctttgcctttttgtctttgtttattttccccatcttgatttctaaaacatagattctacctcagactgtgaggacagaggctacattctagtggcagtggaatgtgaactgggagaagtctggctctttatactgcaagtcttttatgtaagagaaaaactcaaaaacaaaaaccctgtttctcttatttgaggcatggctttgagcttgtcagagccaaacctaaactcttttagcatagtatgagaaatatgaagggaacatcaggaaccaactgaaatgataaaaaatggttgtctctggagagtatatttggcactaaggaggaacaaaggaaggagctactgttttccattataaacttcagtaataataagccgaatatgaaattgctatttagtagactgaaattggttaaatatcagtgatttactatgcttcaatctaatatatatattttaaaccaggtgcatgtattggtatgattaaaacatctttgaatacaaaagaaagaggagactgggtaagtagacaggaatctaatcttgaaagacctgctatgtcatagagagggtctgtggtttaacgtgatcagattgttgtt

SEQ ID NO: 726456 - DNA, 1298 bp, Homo sapiens
tccagggctcyttcccttgctccagtaaggaaatcacatcaggctttgggatagagagacctgtttataagaaaagaagtaaggtggccaggcaggcatagtggctcactcctgtaatcccagcactttgggaggccaaaacaggtggattgcttgaggtcaggagttcaagaccagcctgaccaacatggtgaaaccccgtctctactaaaaacacaaaaattggccaggtgtggtggcaggtgcctgtaatcccagctactcaggaggctgagacatgagaatcgcttgaacctgagatgaaggttggagtgaaccgagatcgtgccattgcactccatcctgggtgatagagtgagaattcatctcaaaaaagaaagaaagaaaaagaaagaaagaaagaaagaaagaaagaaagaaagaaagaaagaaagaaagaaagaaagaaggaagtaagaaaggaaggaaggaaggaaggaaggaaggaaggaaagaaagaaaaagagagaaagaaagaaaagtaagacatactcgtgctgttcctgaattcaaagttagtcccttagtagtcacgaaggactagaggaaggtgtaaaggtctgaagcatggagaagatggagggaccccaaagagctgcccatctattaatctacaaaacacaaaacaattccctaagcagcaggtgaaaagtcacccagacaagtgaaagctacacccaaaattcatgagttatttggggatagacatccttacctagtgagaccaggctgctatagttctccatcattacatctctgtatcagtccttctgagcagcgtccaggcactcccattcctcctgagagaagtctatagacagatcctggaacatgcccaacccctgaaatgacaaacccaggcagcactgttgaaattaaaggaaagatttttaagatgaaggaagagatggaagggtgctgaaggatggagagaatacagtgagcagaccagctaggctgagagtggggaagagtaaaaaaattagtgtaacttcaacaaagtacctccatgttcatgaatattcctgttgtggccagcaaacctccttcatagaaagggacattcccagtattccatggttagagctgggaatgaataaatacattgatatatgatttcccaaataaatgaaatagagttgaaaagcacacagcaagctgtaggcctggcaaggcttcaagaatattacagtaaacatctgatatgcaagttactatttacaacaaaagcttaataaataggcacttcccccttacca

SEQ ID NO: 726457 - DNA, 1298 bp, Homo sapiens
tccagggctctttcccttgctccagtaaggaaatcacatcaggctttgggatagagagacctgtttataagaaaagaagtaaggtggccaggcaggcatagtggctcactcctgtaatcccagcactttgggaggccaaaacaggtggattgcttgaggtcaggagttcaagaccagcctgaccaacatggtgaaaccccgtctctactaaaaacacaaaaattggccaggtgtggtggcaggtgcctgtaatcccagctactcaggaggctgagacatgagaatcgcttgaacctgagatgaaggttgsagtgaaccgagatcgtgccattgcactccatcctgggtgatagagtgagaattcatctcaaaaaagaaagaaagaaaaagaaagaaagaaagaaagaaagaaagaaagaaagaaagaaagaaagaaagaaagaaagaaggaagtaagaaaggaaggaaggaaggaaggaaggaaggaaggaaagaaagaaaaagagagaaagaaagaaaagtaagacatactcgtgctgttcctgaattcaaagttagtcccttagtagtcacgaaggactagaggaaggtgtaaaggtctgaagcatggagaagatggagggaccccaaagagctgcccatctattaatctacaaaacacaaaacaattccctaagcagcaggtgaaaagtcacccagacaagtgaaagctacacccaaaattcatgagttatttggggatagacatccttacctagtgagaccaggctgctatagttctccatcattacatctctgtatcagtccttctgagcagcgtccaggcactcccattcctcctgagagaagtctatagacagatcctggaacatgcccaacccctgaaatgacaaacccaggcagcactgttgaaattaaaggaaagatttttaagatgaaggaagagatggaagggtgctgaaggatggagagaatacagtgagcagaccagctaggctgagagtggggaagagtaaaaaaattagtgtaacttcaacaaagtacctccatgttcatgaatattcctgttgtggccagcaaacctccttcatagaaagggacattcccagtattccatggttagagctgggaatgaataaatacattgatatatgatttcccaaataaatgaaatagagttgaaaagcacacagcaagctgtaggcctggcaaggcttcaagaatattacagtaaacatctgatatgcaagttactatttacaacaaaagcttaataaataggcacttcccccttacca

SEQ ID NO: 726458 - DNA, 1298 bp, Homo sapiens
tccagggctctttcccttgctccagtaaggaaatcacatcaggctttgggatagagagacctgtttataagaaaagaagtaaggtggccaggcaggcatagtggctcactcctgtaatcccagcactttgggaggccaaaacaggtggattgcttgaggtcaggagttcaagaccagcctgaccaacatggtgaaaccccgtctctactaaaaacacaaaaattggccaggtgtggtggcaggtgcctgtaatcccagctactcaggaggctgagacatgagaatcgcttgaacctgagatgaaggttggagtgaaccgagatcgtgccattgcactccakcctgggtgatagagtgagaattcatctcaaaaaagaaagaaagaaaaagaaagaaagaaagaaagaaagaaagaaagaaagaaagaaagaaagaaagaaagaaagaaggaagtaagaaaggaaggaaggaaggaaggaaggaaggaaggaaagaaagaaaaagagagaaagaaagaaaagtaagacatactcgtgctgttcctgaattcaaagttagtcccttagtagtcacgaaggactagaggaaggtgtaaaggtctgaagcatggagaagatggagggaccccaaagagctgcccatctattaatctacaaaacacaaaacaattccctaagcagcaggtgaaaagtcacccagacaagtgaaagctacacccaaaattcatgagttatttggggatagacatccttacctagtgagaccaggctgctatagttctccatcattacatctctgtatcagtccttctgagcagcgtccaggcactcccattcctcctgagagaagtctatagacagatcctggaacatgcccaacccctgaaatgacaaacccaggcagcactgttgaaattaaaggaaagatttttaagatgaaggaagagatggaagggtgctgaaggatggagagaatacagtgagcagaccagctaggctgagagtggggaagagtaaaaaaattagtgtaacttcaacaaagtacctccatgttcatgaatattcctgttgtggccagcaaacctccttcatagaaagggacattcccagtattccatggttagagctgggaatgaataaatacattgatatatgatttcccaaataaatgaaatagagttgaaaagcacacagcaagctgtaggcctggcaaggcttcaagaatattacagtaaacatctgatatgcaagttactatttacaacaaaagcttaataaataggcacttcccccttacca

SEQ ID NO: 726459 - DNA, 269 bp, Homo sapiens
ctttgaaatggacccagggaagaggccatgcaggctcaggcacatttygccaggtccctgagtgcccagcatgtgccctagaagagagggtgaagctctgagtgggccagggtacagtcagtggagggccagagaggcaccttctcaagtgcaggattcagggcaggggtcctcttgcccagatcgatggctatgattgcttagtgcaatggcgcctgcgtcatgttttctcagctcacctttcattcagtctcagacaccgtgagaag

SEQ ID NO: 726460 - DNA, 2177 bp, Homo sapiens
tttcctgtgagacacctggtcatgggtcagatacttgagcattaggctgtggtccagaaaaaagaaatttctggtgaaaggctactctaaagacccacaggcccctcccctagagccccattagagtgaggtagagtttatagccattctcctgagagacctcaagacccaattagaagaaaactataacatttgttatatagacggcattttccaaagactagttcaaagatgaaagatatagtcttcctttggatataaaacaaaatctcaagatacaccaaaactgttttgcttttactgaataatttttgtgcatatgtgtttagctgcaagtggctaacaagctgtgattttctttcctttcctttccctttttttttttcttgagacagccttgctctgtcaaccaggctgaagtgcagtggcctgattttggctcactgcaacctcagcctcccatagctgggattacaggtgcctgccaccacacccacctaatttttgtatttttagtagagatggggtttcactgtgttgctgaggctggtctcgaaatcgtggcctcaagtgatccacccacattggctcccaaagtactaggattacaggcatgagccaccatgcctggccaactctgattttttaacttgtctcgtgtattaggttcatactaggaaaaaaacaggtcagagccattggagccacgtgtacagatgtgcagtagctctgctagcaacactgctgcttgcttcagctcttaagacagatgagtttagcacgtgtctgcccttgctctagctgtctctgattcaccccaacagatgcacaatcatgtcactccgttagattcactttggatatcccattattagattaaaaccagcaggccaaaaagataacttgaggaaatgatttcacatccacagtgttctcatagggccagtatcatttagacatgtcaggaacgtggttgcaggggaaagaatgaagtgtcattcttaactggccatctaatgtcatcagcatgaacaggaggactttataggagattatctgatgttttctgaatattaccttacaaatgctgctttatttatagcttaagagcagggaccttgtcttttaaagctttatacatcctcaagtaaaggtttttcatattaaatccattaataatatctaaaggccgacctggaaattccatttctaagtattcatccaaagtaaagattttttttctttttttgagatggagtttcgctcttgttgcccaggctggagtgcagtggtgtgatcttggctcactgcaacctctgcctcctgggttcatgtgattctcctgcctcatactcccgagtagctgggattaaaggcacgcaccaccacgcccagctaattttgtatttttaggagagatggagtttctccatgttagtcaggctggtctcaaactcctgacctcaggggatcaacccaccttggcctcccaaagtgctgggattacaggtgtgagccaccacgtcctgccaagaatttttttttttttttttttgagacaagtctcaatctgttacccaggctacagagcagtgaggtgatcacagctcactgcaacctctgcctcccgggttcaagtgatttttgtgactcagccatcaaagtagcttggaatacaggcacacaccaccatacccggctaatttttttttggtatttttggtagagagcaggtttttgtaatttttgcacagatggtgttttgccatgttgcccagtctggtcttgaactcctgagctccaacaatcttcccacctgagcctcccaaagtgccgrgattacaggaaagagccactgcacccggcctatcactgcatttttaaagggaaggaggactatagtgagattcactaaggcttacagaaaaggtagaaccctagatagatttaaagacagagattataatatccttgagataatatccaaatttagctttcatagatagggaaatttgaagtacatcagactataaggtggcattttgtgcaactaattaaaactatgtttgaaagagagcaattgcattttcattactgagtaatattaagcaacaatgaaaataaatagaaataaccaagaaattgttatatttaaatcttccctccttttttggaaa

SEQ ID NO: 726461 - DNA, 1520 bp, Homo sapiens
ttgctatttcttagctaagaaacagctgtgttgctgtgttggtggtaaaagtgtattatccacatcctactagagttttctatccaaaaaaaaaaaaaatggtaggtgacatccttaggggcagaattatgtctcagtatttctaacacctatctcttggttagtcagaagttttggctcagtggcaccttctctttgtccccatttagtggaagtaagcgtaactgttggcaaaatatgttttaagacgaatgtttggcaggcatttagcatttacaaatcaagtttctcataaaataatgtgttacattgaatttgcacagccatgctttcattgttttatggataggagaatctgagatagagagaagttaaataacctacctaaagttaattactacagctaggaaatgtcagagcagcaaagaacacagtttagctggctctaaatctggtatctttataaacttgtttcttgtgtgattttcataggaaaaggtgtagaatggaaagtacgcataggtggaagacctagacctcagtcctccttgactttctgaatatttcaaattccagagaccttgcatttctccgaattcctcttaatttcactcaacaycgcattactgttttaaagatttttcttattattacaagtaataatttttgtttttgtagaaaaatgagaagatccaaataagcaaaaagaaaaaaatacttttcatataagcatccagcacaaagtgctacacagaagcctttaataaatatctattgattgaatgctaggaattaactcactgacctctgagtaaattgcttaagttgtcatattccatctttaaaaaagggtggctggcagagctcttgagctacttatttccttatgttatagatttatgtgacatcagtgatctttcagggacgtgatgaaaggtgttaaataaatcatacctttattgttatctccaaggaagaaattatttgaaattggctgtctttaaatgtctcactgctttttgttgcaagtaggaaagaaaatgacttatttgcaatgtttgatatgtgtttatttagaagggggtatgtgtgagagcaaatgcatgtatttatacataaagcatcattttaaaatattaaaattttcttcctgtggtgttaagtactattgttcagtttattactccctccctaccctcctttgtacctttggtttagggtagaagctaaacaatagtacttgacatcccaggaagaaactagagtcagatggatttggaatttatctaccagcatttcttgatgaaaacagaaaaacaaggaaaaggaattgataaggtaggtaaagcttattcagtttcttggtagtctttctggttgattgtatttactcctgggcatggcattgacataggtatactaattcacatgatttacttagttcattagctgatatcagcatcattgtccaaaaacgttgctatttaggagggaaaattaaattagatagtgggttttca

SEQ ID NO: 726462 - DNA, 2085 bp, Homo sapiens
  misc_feature 1172, 1173, 1174, 1175, 1176, 1177, 1178, 1179, 1180, 1181,1182, 1183, 1184, 1185, 1186, 1187, 1188, 1189, 1190, 1191,1192, 1193, 1194, 1195, 1196, 1197, 1198, 1199, 1200, 1201,1202, 1203, 1204, 1205, 1206, 1207, 1208, 1209, 1210: n = A,T,C or G
  misc_feature 1211, 1212, 1213, 1214, 1215, 1216, 1217, 1218, 1219, 1220,1221, 1222, 1223, 1224, 1225, 1226, 1227, 1228, 1229, 1230,1231, 1232, 1233, 1234, 1235, 1236, 1237, 1238, 1239, 1240,1241, 1242, 1243, 1244, 1245, 1246, 1247, 1248, 1249: n = A,T,C or G
  misc_feature 1250, 1251, 1252, 1253, 1254, 1255, 1256, 1257, 1258, 1259,1260, 1261, 1262, 1263, 1264, 1265, 1266, 1267, 1268, 1269,1270, 1271: n = A,T,C or G
ttgtgataattcaaatatctgtatttctacaatcttattttgatatttcaattttactttctagtcctaggcacctttttttttttttttttttttgctttgtgcacttctgttggaaagattgaatttcctttattctcctatttccctttctatattatatctatctacccttttcagatgtatcttttgattgtatctttaaaaatttaacagacatgcttgacttaatattgcctaagtttatcattgcttatctcaaacaatacataagattctgaacgtatctttctcattttatattttcttgtttagcattttaataccaacttgtttttacacttcagcttaacattattgtattttaatatatttttatttacctatttatttcttgattcacacttttaatcatctcatttaattcaagttaattcattaatcctttagtagtaattttaataagaataatgtaataataagctcctttttggagggacagagatggagcaatgtgttctgaaaaattgaaaaatgctagctctattttttaattctttttgatttcaaaaaacttttatgattttgtttactttcttataattttgcttatgctttcaagaaaatgtttgtgaaattttctccatgttcgtatgcatgtgtgtgtgttttgtgaaacagttttcttttctcctctgtccttgaagtgcatgtgcaaagagtctagaaagtatgatcattccgtatgccaattcacggtgggaattttagtcaattaawttaaaactttgaagagcatcttaaataaattggccaaattaagaaattagtaacccagaaagaattttatatctccgatgacaggacataagcattactggaaaagaggatttgtagatgtattacatgtaaatgtttttctggatacttgtttagcatcccgaaagaatatatggtgatcagtatatttttctgaggaaatcattccctttccccttccctataatcacatgatgagctcaaagagcaatggagggcttggacagcttccttcctatgcgtacttttgctttactctgggaatctgttttgaagcaatgagtacaacagtaatgactatcatagtcatctgtaggatattgattgagtgtcattaatactgttattacacnnnnnnnnnnnnnnnnnnnnnnnnnnnnnnnnnnnnnnnnnnnnnnnnnnnnnnnnnnnnnnnnnnnnnnnnnnnnnnnnnnnnnnnnnnnnnnnnnnnntatagtttagaagtagaaaacagagtttcaaatcatgggggtaaaaatgtgaagcaaatataaaagaagaaaaatgtatttgaaaataatgcaaaaataaaatttagaataaatggcaaatatacatagattgtgttatgcaacaaaagaggatttatagtataaaaatgatgtatatcacttagcatttgtagatggtctgcattgtagtctgtgtctggtgctggcctaaagatctagaacttatttctttcccacgttttagatgtggggatattattcacacctaattaatgttctcttcactcttattttaaaaaccatctaagtgtatagcacagtcacagattttaacccgcacaacaatttctttatctagaaaaatgtaattgcttttgacctaccttgagctttctcaatgacagcacacactccaacatacactcataatctaatttaaactgtattctgatgcaataatttaaactttaatttctatttgtcctagagaaaattctcagtcctccgtgaggaagcacgatccctgcttctttgttcaagaaggtgcctatatgtttgaaagaaggaaggtggaaggttttgggcataatgacctccatcttctgggatgctatcttttttccatgtgaaagctatttgtcctctaaatctctcttgtctaaaacatgagcatatggtgctctttgctccctggcttagtgtccatctcttgttcctgccaatcctatgttccctctggggtctgggtaccattttggcacagctctgaaagtctgctctgcaggcacattat

SEQ ID NO: 726463 - DNA, 2085 bp, Homo sapiens
  misc_feature 1172, 1173, 1174, 1175, 1176, 1177, 1178, 1179, 1180, 1181,1182, 1183, 1184, 1185, 1186, 1187, 1188, 1189, 1190, 1191,1192, 1193, 1194, 1195, 1196, 1197, 1198, 1199, 1200, 1201,1202, 1203, 1204, 1205, 1206, 1207, 1208, 1209, 1210: n = A,T,C or G
  misc_feature 1211, 1212, 1213, 1214, 1215, 1216, 1217, 1218, 1219, 1220,1221, 1222, 1223, 1224, 1225, 1226, 1227, 1228, 1229, 1230,1231, 1232, 1233, 1234, 1235, 1236, 1237, 1238, 1239, 1240,1241, 1242, 1243, 1244, 1245, 1246, 1247, 1248, 1249: n = A,T,C or G
  misc_feature 1250, 1251, 1252, 1253, 1254, 1255, 1256, 1257, 1258, 1259,1260, 1261, 1262, 1263, 1264, 1265, 1266, 1267, 1268, 1269,1270, 1271: n = A,T,C or G
ttgtgataattcaaatatctgtatttctacaatcttattttgatatttcaattttactttctagtcctaggcacctttttttttttttttttttttgctttgtgcacttctgttggaaagattgaatttcctttattctcctatttccctttctatattatatctatctacccttttcagatgtatcttttgattgtatctttaaaaatttaacagacatgcttgacttaatattgcctaagtttatcattgcttatctcaaacaatacataagattctgaacgtatctttctcattttatattttcttgtttagcattttaataccaacttgtttttacacttcagcttaacattattgtattttaatatatttttatttacctatttatttcttgattcacacttttaatcatctcatttaattcaagttaattcattaatcctttagtagtaattttaataagaataatgtaataataagctcctttttggagggacagagatggagcaatgtgttctgaaaaattgaaaaatgctagctctattttttaattctttttgatttcaaaaaacttttatgattttgtttactttcttataattttgcttatgctttcaagaaaatgtttgtgaaattttctccatgttcgtatgcatgtgtgtgtgttttgtgaaacagttttcttttctcctctgtccttgaagtgcatgtgcaaagagtctagaaagtatgatcattccgtatgccaattcacggtgggaattttagtcaattaaattaaaactttgaagagcatcttaaataaattggccaaattaagaaattagtaacccagaaagaattttatatctcmgatgacaggacataagcattactggaaaagaggatttgtagatgtattacatgtaaatgtttttctggatacttgtttagcatcccgaaagaatatatggtgatcagtatatttttctgaggaaatcattccctttccccttccctataatcacatgatgagctcaaagagcaatggagggcttggacagcttccttcctatgcgtacttttgctttactctgggaatctgttttgaagcaatgagtacaacagtaatgactatcatagtcatctgtaggatattgattgagtgtcattaatactgttattacacnnnnnnnnnnnnnnnnnnnnnnnnnnnnnnnnnnnnnnnnnnnnnnnnnnnnnnnnnnnnnnnnnnnnnnnnnnnnnnnnnnnnnnnnnnnnnnnnnnnntatagtttagaagtagaaaacagagtttcaaatcatgggggtaaaaatgtgaagcaaatataaaagaagaaaaatgtatttgaaaataatgcaaaaataaaatttagaataaatggcaaatatacatagattgtgttatgcaacaaaagaggatttatagtataaaaatgatgtatatcacttagcatttgtagatggtctgcattgtagtctgtgtctggtgctggcctaaagatctagaacttatttctttcccacgttttagatgtggggatattattcacacctaattaatgttctcttcactcttattttaaaaaccatctaagtgtatagcacagtcacagattttaacccgcacaacaatttctttatctagaaaaatgtaattgcttttgacctaccttgagctttctcaatgacagcacacactccaacatacactcataatctaatttaaactgtattctgatgcaataatttaaactttaatttctatttgtcctagagaaaattctcagtcctccgtgaggaagcacgatccctgcttctttgttcaagaaggtgcctatatgtttgaaagaaggaaggtggaaggttttgggcataatgacctccatcttctgggatgctatcttttttccatgtgaaagctatttgtcctctaaatctctcttgtctaaaacatgagcatatggtgctctttgctccctggcttagtgtccatctcttgttcctgccaatcctatgttccctctggggtctgggtaccattttggcacagctctgaaagtctgctctgcaggcacattat

SEQ ID NO: 726464 - DNA, 2257 bp, Homo sapiens
tgccaaccatgaccctgcccatggagctctatcctacactctatcccatccccgtcttcagcccatcctgtttggtgacacccaccatggccccagcccacatcttcagcaggtgcagaatgtctcttagtgttgacttacaccctggcagtcctgtgcaccattcacaggatagtcttacttacagattgagaatctacagttttgagatcattatctttacatttctgtatcctccatccttcacagagtcttcagcacagagcatgagttcaaaatcaatgctgggagcattaggagaaaattacagagaaaaaaatgttcaaagatttcatgtagttaaacattcattccttccacttttgcatcctagattgacccctcttgtgtcttcctagataaatgggaagttgtctgtctcagttgatgtgatatttaaatataccagagtttggagtttgcagagaaagagtgtggagaagctaagtagggaaacttgatgagtccctagactgaggatacaggagaatgaagaggaggcaggagtggggaggaaggaacagagaaccaggaggcccagggacgtgtgtgttgcagcagctttgagtgtgaatgggcaagaatgaactgcacgtggggctgccacatttaacaaataaaaatataagatatgcagtcaaattttaatttcaggtaaaaaaaaaacttaagtctatccatgcaatatttaggatatacttacactagaaaaaatgttgcttatctgaaattccaattttactgagtgtcctggattttgtcttgcaaccctagctgtaaagggaagaaggagctttgtagggtagagccaagcattggacaaaggcatggatggaggagcgatcggtgtccccagtccagttcagtaatatggagggcggagggtggagattacaagaattacaagcaaagatgggggccgtagaattccatcttctacctttaaagamtttgcccttttttttttccctttaattgatttttccctctgtttttaagttgttctcttttgaatactctgcttatagatttatttcctaaacaagtgctgttaaatggcctccacttcacaggctccatggaggagcagagctctcctctctctatgccgatgctttcagcatcctcagaatagcagctggaaggcagtaggttttatggggataactgtgcactcaccagtttagatgtgtggttgctaagagtcacggtatttgtttgcaaacctgttggtaccattggtccatgtttagctttgtttaatatacataaacaaaaaagtgtaactggaagctatggtattttatttttcaattagctatggaaagtacaagaaaatcaagttgctaagcaatttctgttgaattggatgtgggtggaaccattatcaaaggttggaagaaatcgtaaaaatggaggagcattttatattcacgttgtttttcctatgtcttcaagttctttaaaggaactgaaactggaaattgcagaaaatgcattatgggtgtgatttatgaggtaaagaagagtacacagtgcatggtgtgttgttatggcaaccctaggaaactaacatcaagatcttaactcaagatattgatcctcatgtatgttaacgtgagagacatgtgtgtcttgtgtggagggcctctccaggtgagagggtggctgtgctttcactcatggtcagctccagtctgctcagggagctctgggcatccatgtgcccatgtgtcatccttgtgacatcccttcagtgtcagctacttttatcctttgatcaattgctccagggctcataatacatgatgtaattggttggaaacgtggatgtccaaaaagtgcatcaacgctcaaggtcatgtgtcctttgttttgaggtgtcactctgggcagagctgtccggtgcaactcaggggaagtggtgtcctggtgagaaccaagtcagaatgtggcttgaaatgagctcttgtatgaagctggcaaattatggcttatctttcctttagtaggttttcttcatttatttccttaatttaatggaatgccttagtgctatttcaattaaaaaatattgatggtaaatgtttgggaggacattctgcatcctttgatgctcaagattttctgttctccaaagcagtagagacattagcctcactcaaaggagagtaaaattatgttcaatgtgtaaacttgcttgctgcgtaacaaagta

SEQ ID NO: 726465 - DNA, 2257 bp, Homo sapiens
tgccaaccatgaccctgcccatggagctctatcctacactctatcccatccccgtcttcagcccatcctgtttggtgacacccaccatggccccagcccacatcttcagcaggtgcagaatgtctcttagtgttgacttacaccctggcagtcctgtgcaccattcacaggatagtcttacttacagattgagaatctacagttttgagatcattatctttacatttctgtatcctccatccttcacagagtcttcagcacagagcatgagttcaaaatcaatgctgggagcattaggagaaaattacagagaaaaaaatgttcaaagatttcatgtagttaaacattcattccttccacttttgcatcctagattgacccctcttgtgtcttcctagataaatgggaagttgtctgtctcagttgatgtgatatttaaatataccagagtttggagtttgcagagaaagagtgtggagaagctaagtagggaaacttgatgagtccctagactgaggatacaggagaatgaagaggaggcaggagtggggaggaaggaacagagaaccaggaggcccagggacgtgtgtgttgcagcagctttgagtgtgaatgggcaagaatgaactgcacgtggggctgccacatttaacaaataaaaatataagatatgcagtcaaattttaatttcaggtaaaaaaaaaacttaagtctatccatgcaatatttaggatatacttacactagaaaaaatgttgcttatctgaaattccaattttactgagtgtcctggattttgtcttgcaaccctagctgtaaagggaagaaggagctttgtagggtagagccaagcattggacaaaggcatggatggaggagcgatcggtgtccccagtccagttcagtaatatggagggcggagggtggagattacaagaattacaagcaaagatgggggccgtagaattccatcttctacctttaaagactttgcccttttttttttccctttaattgatttttccctctgtttttaagttgttctcttttgaatactctgcttatagatttatttcctaaacaagtgctgttaaatggcctccacttcacaggctccatggaggagcagagctctcctctctctatgccgatgytttcagcatcctcagaatagcagctggaaggcagtaggttttatggggataactgtgcactcaccagtttagatgtgtggttgctaagagtcacggtatttgtttgcaaacctgttggtaccattggtccatgtttagctttgtttaatatacataaacaaaaaagtgtaactggaagctatggtattttatttttcaattagctatggaaagtacaagaaaatcaagttgctaagcaatttctgttgaattggatgtgggtggaaccattatcaaaggttggaagaaatcgtaaaaatggaggagcattttatattcacgttgtttttcctatgtcttcaagttctttaaaggaactgaaactggaaattgcagaaaatgcattatgggtgtgatttatgaggtaaagaagagtacacagtgcatggtgtgttgttatggcaaccctaggaaactaacatcaagatcttaactcaagatattgatcctcatgtatgttaacgtgagagacatgtgtgtcttgtgtggagggcctctccaggtgagagggtggctgtgctttcactcatggtcagctccagtctgctcagggagctctgggcatccatgtgcccatgtgtcatccttgtgacatcccttcagtgtcagctacttttatcctttgatcaattgctccagggctcataatacatgatgtaattggttggaaacgtggatgtccaaaaagtgcatcaacgctcaaggtcatgtgtcctttgttttgaggtgtcactctgggcagagctgtccggtgcaactcaggggaagtggtgtcctggtgagaaccaagtcagaatgtggcttgaaatgagctcttgtatgaagctggcaaattatggcttatctttcctttagtaggttttcttcatttatttccttaatttaatggaatgccttagtgctatttcaattaaaaaatattgatggtaaatgtttgggaggacattctgcatcctttgatgctcaagattttctgttctccaaagcagtagagacattagcctcactcaaaggagagtaaaattatgttcaatgtgtaaacttgcttgctgcgtaacaaagta

SEQ ID NO: 726466 - DNA, 639 bp, Homo sapiens
tagaaaagatctactttgttaaagggaaattcttgcaaatcccaatggtcgaggtagtgatgaaataaatgataaagcattgagtcatgattacccaaagttggcattctagactcttttaaagggggttcaattcccttcttttaacttgcacacatccagggctgagtctctgaccttctagggctgttaaagtkgtggtggcagcgggttgaacgtggagtgatggtatgagctggaacttcagtgcgtgagtccttgctgactgtcaccctctcctgacgaggtttccaagagaagcacatgcctggagcacatggctggccaaaacacactctttgatggtaagggcttgtcccaaaccctggtgaattctcttttgtatagaggagacagcctgctgttaaatggttttcttttccttttcctccaactgcacaagctcctgtgatatctatggtgattctgtgcaaaggaagcaagaaggagaaaagagactccctgtaaggtctatgcagcatatgcagcacacatctagcccttccaatgcaagtctttcttggtggcacactttctacatgggggcagcccttgcctgccctgcctcaacagagagattgtgggaggaggtgggagagg

SEQ ID NO: 726467 - DNA, 722 bp, Homo sapiens
ctctagttgtgaggctatggtgcagcgaaggaaaagattattgaaactaagattaaaggaaaagactgaaaggccagagtttgggatggggcatccagtggatgttgaaatcatggagaataataacagcagtgggaggagaaagggattgagacaaatgctgcagtcatcagtgaatggggaggagygactgggaggttggtagatagaaactgtatggaacagtgaagactgatgctggggatgttctgttccaagagcttgcacctccaggctttgagggatgtgaagtgcagaagggaaagcaacaccccttgagggaccgcagcccaggctacctcccaatggtcacatcgaatgctcactgcacagcattgcctcccatgtgaatggcatcccctgaccctttccacatggtggccctggctttagggaagggatatgattagagattgcaggggatcagaatatgtcacctcaaaatatgccgctttggcccaggaattattttgagacagaggcaaatgagagccaacgcagaaagaaggtttcccagagcttcccttatcttattaaaagcaggtactcctgagaaataaggctgccataaatccctctcccagggaagttttatggccatgaagaagaaggagtatcagcaccaagatgggctgcacaaacaaatcttactaaattaaccttatcttccattagtttccccc

SEQ ID NO: 726468 - DNA, 722 bp, Homo sapiens
ctctagttgtgaggctatggtgcagcgaaggaaaagattattgaaactaagattaaaggaaaagactgaaaggccagagtttgggatggggcatccagtggatgttgaaatcatggagaataataacagcagtgggaggagaaagggattgagacaaatgctgcagtcatcagtgaatggggaggagtgactgggaggttggtagatagaaactgtatggaacagtgaagactgatgctggggatgttctgttccaagagcttgcacctccaggctttgagggatgtgaagtgcagaagggaaagcaacaccccttgagggaccgcagcccaggctacctcccaatggtcacatcgaatgctcactgcacagcattgcctcccatgtgaatggcatcccctgaccctttccacatggtggccctggctttagggaagggatatgattagagattgcaggggatcagaatatgtcacctcaaaatatgccgctttggcmcaggaattattttgagacagaggcaaatgagagccaacgcagaaagaaggtttcccagagcttcccttatcttattaaaagcaggtactcctgagaaataaggctgccataaatccctctcccagggaagttttatggccatgaagaagaaggagtatcagcaccaagatgggctgcacaaacaaatcttactaaattaaccttatcttccattagtttccccc

SEQ ID NO: 726469 - DNA, 688 bp, Homo sapiens
  misc_feature 2, 3, 4, 5, 6, 7, 8, 9, 10, 11, 12, 13, 14, 15, 16, 17, 18,19, 20, 21, 22, 23, 24, 25, 26, 27, 28, 29, 30, 31, 32,33, 34, 35, 36, 37, 38, 39, 40, 41, 42, 43, 44, 45, 46,47, 48, 49, 50, 51, 52, 53, 54, 55, 56, 57, 58, 59, 60,61: n = A,T,C or G
  misc_feature 62, 63, 64, 65, 66, 67, 68, 69, 70, 71, 72, 73, 74, 75, 76,77, 78, 79, 80, 81, 82, 83, 84, 85, 86, 87, 88, 89, 90,91, 92, 93, 94, 95, 96, 97, 98, 99, 100, 101: n = A,T,C or G
cnnnnnnnnnnnnnnnnnnnnnnnnnnnnnnnnnnnnnnnnnnnnnnnnnnnnnnnnnnnnnnnnnnnnnnnnnnnnnnnnnnnnnnnnnnnnnnnnnnnnatctaagcaccccatcaggatgttgcctcctcttctcggcttttctctgcacatcagctgccttctctcaggcagatttctccacggggctggaaccacaatggccagcatcccgtggctgtcacgcagactctcaggtggagagtcaagcctgccccccaccagctccagtgggaaactctctcactgcccagtttgggtcatatgcttatcactggaccaatctctatgagaaagagkgtgtttggagttgacccgtgttcccccaaaagatatatgcaagtcctaactcttggtgtctgtgaatgtaaccttgtttggaaatagggtctttgcagatgtaatcaagttcagatggggttgtattgtattagtccaataactggtgtccttacaggaagcgagaagtttgaacacaggttggagtgatacatctacaaaccaagagatactaggggttgccagcaactctcagaagctgggacagagaaatgaaacagattctaactcagagcctccagaaggaaccaaccctctaccatcactttgctttaagactcctaccctctactactgtgagagaatcc

SEQ ID NO: 726470 - DNA, 688 bp, Homo sapiens
  misc_feature 2, 3, 4, 5, 6, 7, 8, 9, 10, 11, 12, 13, 14, 15, 16, 17, 18,19, 20, 21, 22, 23, 24, 25, 26, 27, 28, 29, 30, 31, 32,33, 34, 35, 36, 37, 38, 39, 40, 41, 42, 43, 44, 45, 46,47, 48, 49, 50, 51, 52, 53, 54, 55, 56, 57, 58, 59, 60,61: n = A,T,C or G
  misc_feature 62, 63, 64, 65, 66, 67, 68, 69, 70, 71, 72, 73, 74, 75, 76,77, 78, 79, 80, 81, 82, 83, 84, 85, 86, 87, 88, 89, 90,91, 92, 93, 94, 95, 96, 97, 98, 99, 100, 101: n = A,T,C or G
cnnnnnnnnnnnnnnnnnnnnnnnnnnnnnnnnnnnnnnnnnnnnnnnnnnnnnnnnnnnnnnnnnnnnnnnnnnnnnnnnnnnnnnnnnnnnnnnnnnnnatctaagcaccccatcaggatgttgcctcctcttctcggcttttctctgcacatcagctgccttctctcaggcagatttctccacggggctggaaccacaatggccagcatcccgtggctgtcacgcagactctcaggtggagagtcaagcctgccccccaccagctccagtgggaaactctctcactgcccagtttgggtcatatgcttatcactggaccaatctctatgagaaagagtgtgtttggagttgacccgtgttcccccaaaagatatatgcaagtcctaactcttggtgtctgtgaatgtaaccttgtttggaaatagggtctttgcagatgtaatcaagttcagatggggttgtattgtattagtccaataactggtgtccttacargaagcgagaagtttgaacacaggttggagtgatacatctacaaaccaagagatactaggggttgccagcaactctcagaagctgggacagagaaatgaaacagattctaactcagagcctccagaaggaaccaaccctctaccatcactttgctttaagactcctaccctctactactgtgagagaatcc

SEQ ID NO: 726471 - DNA, 652 bp, Homo sapiens
cacacataataataatttctaccctggattatcataaggattaaataatagatgattatagttgtatgcttatattaatccacatatccatcacccatacagaaatttcattcattattccttatttaagcacaatgcctgatactacaactggaagtggtttgaaattataagaatatgttattttgcttagacaaaatgttacatttaaatacggcaggggcaattaattaatttcctccaaattgggttcattctaaggctggttcttcmgggttgcaaactggctgcagcagttcaaggcatcatgtccacacacaacaacatccagaggcaaaagaatgtgctgcctctttcttgtgtctttgaaagggaacttcacgcagaagcctctcactacatctctcccttttccttggtctgaattacatcacatgccaatgcacttgttcattattgctaaagaaagaaggggaatgagatcttcaggataagttggccaacaacgctctcccgcgtggagaaaatggcttgtctgattaaatcagggatgtgtgtgctcgcaggagagtgtgcgtgtgtcctgggtagatgaagtgtgggcagctggatatccaaattccagccaaggatgtgacatcagattgcttca

SEQ ID NO: 726472 - DNA, 1482 bp, Homo sapiens
attagccatgcatggtggcacacacctgcaaatccagctactaaggaggctgagacaggagaatcccttgaacccgggaagcagaggttkcagtgagccaaaattatgccactgcactccagcctgggcaacagagcaagactcagtcattaaaaaacaaaaaaatcaagggaagagttggaaagtcccatctttggggataatatatagctgacaaaagatcttactcttttctatatgctccaaggttctaggattcacagaaaggcactcatgtgatgagggcaaaacaagttatgtcactgcctgcagtggagatgttaacaagtaatagacatgagataatgtattaaaaaggataagcacagcagcacatcataagaactcaaacatttttagatatctttattagtttagaggaaaatagtaaaatagaaaatcatgaaaaggaaaggaagagtggcaaacatcagtaattctcaccaatcaattattcaatattaatgaatcatttattcattctattttgtgtgattttcacctaaagattgcccttagcatattgtagggttttgaatatggaaccccatatcacatatgacaatttacatgtctgaatcaaagaaaatattttccatatggtaagcagctagtcagtaatgaatacattcttttaaaaggatatgtgattgctaccaataacatttaaccctcaaaactttttgttaatgatgaacatatagctggcttatttctattcaaaacaatgcaagatgagttcctgctttcattgagaatttgaaatagaaaatgtcagaatatctctttgctctgttgacagatatggaggactatgtttgaacaattgaccctgtgtagtttgtgtgataaattccaggcaagggaatataagttgaaaattttcttattttgaaaaaaaaaaaaaacacattataaactcatgttcatgaaagacattctacaaatagtccgaaaataaacttcttaacattcacactaatggcagcttcatataaattcactttgctaccagctttttaatagagtcatttcatccatatttatgtactatcctttctcttttcagtcttatggaccatcctgattatccattttcagatgaatattagcatagagggtgttgcacgacatctagcagaaggccctgtgtgtggatggtgatgcagaggatgtctctatgctggtgactggacacacagcctctggttaaatccctcccctcctgcttggcaacttcagctagctagatatatccatggtccagaaagcaaacataataaatttttatcttgaagtaattgaatgtttttccttaaagattcttttcctactcctttctctgttacttgtgtgtttcttttccttctagttctttaaggccaaaaactgatttgcctataagtttggggcagagagcagatgataaccaatattttatag

SEQ ID NO: 726473 - DNA, 1148 bp, Homo sapiens
aaattagggaatgattagaataaaattattgtataattatagccatttgatgatgtcaacttttaaaaagcatggtgtgatgtgtatggtttggctatgtccttacccaaatctcatattgaattgtagtttccataatccccatgtgtcatgggagggacctagtgggaggtaattgaatcatggggttggttacccccatgctgctcttctcatggtagtgagttctcacgatatctgatggttttataaggggctttcccccatttgctaggcacttctccttcctgccatcatgtgaagaagggtgtgtttgctttcccttccatcatgattgtaagtttcctgaggcctccccagccacgtggaactgtgagtcaattaaacctcttcataaattacccagtctctggcagttctttatagcagtgtgagaatgggctaatacaggtggtatataggcaaatgcatgtgaarcactactgaatgaaaaatatgaaaagattgataacctctggccttcttgtggtctgagaaaaacagacttcttacttttactgctgtggtcaggttttctgttgtctgtggccaatgcactcctcatagtcacaacaaagaagtaaacagacagtgcttgaagattgtaaattggggtaaatctttctagaggaaatacagaaatatgtaacaaaaatctcctgattttggtaacttattagtaaataagtttaaactttaatttgtacatattttacctattgtgaatgtacataaagattcaaatatttgaatattaatttaatcattttgggtttggggttttatttgagtctcactctgtcattcaggctggagtgcagtgatatgatcacggctcactgtagccttcatctcccaggctcaactgatccttccacctcagcctagtgggtagctgggactgtaggtacatgctaccatgcctggctaattttttaaaatgtttttgtggagatggggttttgccatgttgcccaagctggtcatggtcattgttaatagcattaaaaaaaactactttatatcccaacaatatattatttacataaatattatataatatttacataaattatggttcaaccatccaatagaatactttacactca

SEQ ID NO: 726474 - DNA, 1113 bp, Homo sapiens
tttctactattttacctttctgtgttcagaaaataaagagaacaaagagggagtcccactgattcaaaactagcagaacagccaaacaacagagcacaactgttctctcatgcatgactgggattaggataaaagcagaaaaagacttctgagaaaaagaaaacaacaaaagaaacaggagtgctgacaaaacttttttttctttctattgaggcaaaagagagggagaaaaaagaggactgctttaaaaaaagatagaagaagaaagattaacaaacagaagtaagggctttcacctcttgttttacttttagcccaatctggtcagagaaacaaaacccagaagtaaagtagatgataacctaagacactttggcaattttcacactcagaaaagaagctctattgctagaaaatctacttttatgttatcagttcattattctctcagatatctaggatgtgagacaatgtcccctgactggaattttcccytgcacagttaggacaggatgcatgtgaattcacacattcttccacagagggaaatcaggggaaggcaggggagcttttgcatttggaaatcgcattcacaaattaaacataattgtttaaaaaagaatgaccctgaggtcaacgccaccagtgtggcatcactggacggctggagggagggattcaaagctcaggcaactgcaaactttgattaaaggctcctcataaaggcatgcagatcagtcatattctgctgtgactccccccagccttctcttctagaatgttttacagatcccattaggctctaatgattagtgggttacatagaacatctatttttacaagttttgacctatatctcaaagattcttaccacgccttaaaataggaattagattcttactcaactactattaagtatcttgatttttaaaaattctatcagctcccatactagaatcttgttcgcccaaaatatatttcaaccatgaaacagccaacagacatgatgcctactcctgagatccttaaataaagtaccctcacagaacctggaaattgactagaagagtttatgtttaatagaagcttctattgtcagaagaaacagctttt

SEQ ID NO: 726475 - DNA, 1214 bp, Homo sapiens
aatcattggtatgattatgtgaatggaagataaatcatttaaatttctttccttctactcttatactaacaggattaaaagctatagaatgaaagagtaacaggacaaggacagtcagtacacaaaggaagaaataaaacaactccattagtagccaaaggaaaatcaaactcatcaccacacagtatttttaygtattatattggcaaaaaatgaaaaataattgaaaataaattagaaaacatccaatgttgtttagcatgtaaggaaacagactgtcattaactgctgataaacatgtaaagtgtcataccctttctggaaaaagatttggaattgtcagagatatttgatacatgcataaaggaatttatgtgtcaaagagtataatgtatttgtaagtgtttatgctgaagtcagaatatacacagagttgtttggttggatgtctatttcgattggacagccccatgctgtactagttgtaaaatatttttattttcacccccacatatatgccagcactcatttgaatatatttctcacactaagcatattagtataattttaaatgaataattggtaagtggtaaatgacatttctctgatttagtttttatttatataattgttggtaagattaaacatattcccatgtttactcaacattgtaatttttttgaacattgcctatttatattgtttgagttcacttttctattggaaagtttatctctcagtaattcattagagctattcgtacattatgaatagtaatatttttaatagctatctttcccacttagtcttgagaccaaccataattatttcttcattttataattaaagtattttgcaattttctctgcagcataaccatttcttcattatgtttgtttttgtaaaaatacagaatttgaattttttctgtatagtcaaaaatcactatttcttctctcttaaagtcctcctatttacttagaaaattcttcatgccaaacaaaataaatactaacctaccattaatttcaaatatttatctctttaatacaagtatactttattttgtgtgaagacttttttctacagaaaacaactttactccactcatgatttgtgattttatatttgttataaaagaagtcctgatatatgtacgagggtttgtttcctggctttctagtttgttccattcttcactttacctatacttt

SEQ ID NO: 726476 - DNA, 1451 bp, Homo sapiens
  misc_feature 317, 318, 319, 320, 321, 322, 323, 324, 325, 326, 327, 328,329, 330, 331, 332, 333, 334, 335, 336, 337, 338, 339, 340,341, 342, 343, 344, 345, 346, 347, 348, 349, 350, 351, 352,353, 354, 355, 356, 357, 358, 359, 360, 361, 362, 363: n = A,T,C or G
  misc_feature 364, 365, 366, 367, 368, 369, 370, 371, 372, 373, 374, 375,376, 377, 378, 379, 380, 381, 382, 383, 384, 385, 386, 387,388, 389, 390, 391, 392, 393, 394, 395, 396, 397, 398, 399,400, 401, 402, 403, 404, 405, 406, 407, 408, 409, 410: n = A,T,C or G
  misc_feature 411, 412, 413, 414, 415, 416: n = A,T,C or G
aaggaaaaaaattacatatatgtatatatagaaagaggggaaagaaatgtagaaaaatgataataattgatgactctggatgaagagatttaggagttatttgtactatcctagcaacttgttggcaataaaaattaaagttaaaagttttgaaaaagttgttaagataaatttgaagggaagaagaaataaagagctcataatttcacaagtaagtgggggtaaattactggacaatttttttaaactaaattttgtaaattgtgcaagaaaaatttttaaaatcattctccaataagctgcctttatcctatagnnnnnnnnnnnnnnnnnnnnnnnnnnnnnnnnnnnnnnnnnnnnnnnnnnnnnnnnnnnnnnnnnnnnnnnnnnnnnnnnnnnnnnnnnnnnnnnnnnnntagtttcttgatcaataggaacatacgtagtaatattatggttacaacttccagaacatgctcttttagttttgtttgttatcttgagacggagtcttgctctgtgccaggctggagtgcagtggtacgatcttggctcactgcaacctccgactccctggttcaagcgattgtcctgcctcaccctcccaagtagctgggactataggcatgcaccaccatgcccagctattttttgtatttttagtagagacagggtttcacagtgttagccaagatggtctcgatctcctgacctcgtgatccgcccacctcgacctcccaaagtgctgggattacaggcatgagccactacacctggcccagatcatgctcttaaaaggaatgggtgttttcctttttctcctgcttacctccccattggctggaagagggaaatggtgaaggtaaactatctttaaccttgtagatgagggaaagagcagagcaacaagagaggagtctaggtcttcagcaccatggaaccaccatattagtcttgaactgtttggactgctatgggagagagaaacttattttgtttaaggtattgtggtttggtctytttttatagcaactgaacaatgtaccctcatgcacaaggcatatgaagaggcaaataagaccagcctgcagaacaggattggagttggagcatgggagtaagctatataagactctaaaaaggcctggaaaggtaagcaaaaggtgtttacacctgatacagtaagcattaagaagcctaagcagcaaagtgacataacagaaatcagtacactaggaaaaaatcagtataatgtgtagaatggattggatctgaaaggagggaaaatgaaaagtatgacaaccaatcagacaccaggtatgttactcgtaagtttcaactacgaacctgggctgggatggtatcaatgaaaatatggtgaaagggatggctatgaaaggcatttgtaagaactgctgagttaatctgatgacagtctgaaagaatcagtg

SEQ ID NO: 726477 - DNA, 598 bp, Homo sapiens
atatatatcatagatatatatatatatcatagattaccagcrctctaaaatatttctaacaaacagaaaagtaatttgatgttttactttgcatgtacaggctaattaggggtaaatgtgcaattaccattaggcttttctgaaatagagaacagcttgagagccacccatacccgatctgcttgccgccctagggtctaaagaccctcattaaatgattataataatggctaatgttggtccaaatatgcaactgatccaaatgaaaacaggattcaaaaaggagactacaatagaatccaagctatcagccaaataataaaaaccttgaaaaaattagggtcatggtaagaaaaatatgtttcttttcccaacttgaagcgtgggtgaaaacgggcacagaggataaatcaaattccaggaaaaaaaacaaaaacactatacaagagttatgatttacatataaggaaaactaaaatgtagcaagatttaaagcaactgatgaagcattaaaaaacaaaggaaaaacatttgacagtcttcaatagcagaaaggtctgtaatataggaaacaaagggcaaggaataaactcaatac

SEQ ID NO: 726478 - DNA, 598 bp, Homo sapiens
atatatatcatagatatatatatatatcatagattaccagcactctaaaatatttctaacaaacagaaaagtaatttgatgttttactttgcatgtacaggctaattaggggtaaatgtgcaattaccattaggcttttctgaaatagagaacagcttgagagccacccatacccgatctgcttgccgccctagggtctaaagaccctcattaaatgattataataatggctaatgttggtccaaatatgcaactgatccaaatgaaaacaggattcaaaaaggagactacaatagaatccaagctatcagccaaataataaaaaccttgaaaaaattagggtcatggtaagaaaaatatgtttcttttcccaacttgaagcgtgggtgaaaacgggcacagaggataaatcaaattccaggaaaaaaaacaaaaacactayacaagagttatgatttacatataaggaaaactaaaatgtagcaagatttaaagcaactgatgaagcattaaaaaacaaaggaaaaacatttgacagtcttcaatagcagaaaggtctgtaatataggaaacaaagggcaaggaataaactcaatac

SEQ ID NO: 726479 - DNA, 1928 bp, Homo sapiens
tctgtcacatatcagacctctgactggctgagaggtagccatcagggctggccttccaggatctggaagatcaaaatctgctcatacaaactggcaaggagaacgtgaaaagcataaatgcaagaaatgagaaatctccgtggctggagtggtggcttatggatcctctctctttttcctgtcttagggacataatgcttctgggaatgtcctggtgtcatagcaatactctttagggaccatttctgtgctttctgtaactttgtttaagcaacaaaaaagcaaaaaagctttggacttgctcaaagggtggctaatctgatacagataaagtgtggatgaaactcatttttagcctgtaactatgttgtaggatggaaaagaaaacttgcttgtgggtcaaaattttgtgggttagactctcaaatgaatcagttattcaccatgtgtccattgtcaaaacttatccttttagttgcagtttcttctctggaaagtgagcctaaaatattaatttgaaagcttattttgggattagaaaaggagagtgaattagatggtatctacgtcgtaaagggtcaggcacgtgagcagtgctcagtacataggacctattattaaaatatgatgaaaatactggttatggtgatttgacaaaacaaccttcttttgtggatagtggttactacttgatacagaatagtttcatttaaagagtggtaactctagtctatcatttccctttaatgtgattctgtaaaagaaattttaattgaaaatatttaactatcaggagagaaatatgacttttccagtttctctgttcacttcgttttagtatagaattasagattcttaacatataaatcctagaaagtaatttagaaatcttgtcattatatcttcagagtaataactttcatcacagggtctgtttgggctgagagtagagctttattcatgtttaccagaagtcccaagcaaaaattttttaaaccaagtacattctacaacccttcaaaaagattcaaaaaacaataatttaaaccaaagaactctggcagtgcatgacattttctgcctcattaaatgaggcaaacaaaaaatgaccaaatgactactgaaaacatagaggagaaaaaatactaagaaagtttacagagactttccagtaacaaaagttactggaacaaaaatctgttttgttgactcaatagtaatcaatattcacttttatgttgttttatgcttaagacaggaaaacctgagccttcctctttactatcagagcaaatggtaatcatgaagtgaagcaaattgattattgattactgattacttgaatttctatgttttataagtagagcaaccatctgttaacaggaataacaggttttagcagggaaaggattaagggttttattttcctcaactgaggcccaaaatgagtgagatttttcaagttaactttcattccatttggctcaggtgtcagggatctatatttaacttgtgttaggcatgcgtccgaagagctggaaggctcaggatgtcaatggctttcagatgtcaggataaccttaaggatagatgaagggttgagagcctgtgcctcatttctgagttctcagctgctatgccgtggaaatcctgtttactttctgcatctgctcctgcaagactctggagccagtcttgaggtcctacatctccgaaagcaagctcttctagaagttggtgagcagaatgctttttgtttagaagtgtggctataaatgtctttgtagttgatgcactctcatctagtaagtaactattatttttgggctctctaaaaaggtaattattatctgatataatagtttagtctgtgatgcttcttttaacatatttgtaagttttaaccaaatggttaaagaaatttgctt

SEQ ID NO: 726480 - DNA, 1928 bp, Homo sapiens
tctgtcacatatcagacctctgactggctgagaggtagccatcagggctggccttccaggatctggaagatcaaaatctgctcatacaaactggcaaggagaacgtgaaaagcataaatgcaagaaatgagaaatctccgtggctggagtggtggcttatggatcctctctctttttcctgtcttagggacataatgcttctgggaatgtcctggtgtcatagcaatactctttagggaccatttctgtgctttctgtaactttgtttaagcaacaaaaaagcaaaaaagctttggacttgctcaaagggtggctaatctgatacagataaagtgtggatgaaactcatttttagcctgtaactatgttgtaggatggaaaagaaaacttgcttgtgggtcaaaattttgtgggttagactctcaaatgaatcagttattcaccatgtgtccattgtcaaaacttatccttttagttgcagtttcttctctggaaagtgagcctaaaatattaatttgaaagcttattttgggattagaaaaggagagtgaattagatggtatctacgtcgtaaagggtcaggcacgtgagcagtgctcagtacataggacctattattaaaatatgatgaaaatactggttatggtgatttgacaaaacaaccttcttttgtggatagtggttactacttgatacagaatagtttcatttaaagagtggtaactctagtctatcatttccctttaatgtgattctgtaaaagaaattttaattgaaaatatttaactatcaggagagaaatatgacttttccagtttctctgttcacttcgttttagtatagaattagagattcttaacatataaatcctagaaagtaatttagaaatcttgtcattatatcttcagagtaataactttcatcacagggtctgtttgggctgagagtagagctttattcatgtttaccagaagtcccaagcaaaaattttttaaaccaagtacattctacaacccttcaaaaagattcaaaaaacaataatttaaaccaaagaactctggcagtgcatgacattttctgcctcattaaatgaggcaaacaaaaaatgaccaaatgactactgaaaacatagaggagaaaaaatactaagaaagtttacagagactttccagtaacaaaagttactggaacaaaaatctgttttgttgactcaatagtaatcaatattcacttttatgttgttttatgcttaakacaggaaaacctgagccttcctctttactatcagagcaaatggtaatcatgaagtgaagcaaattgattattgattactgattacttgaatttctatgttttataagtagagcaaccatctgttaacaggaataacaggttttagcagggaaaggattaagggttttattttcctcaactgaggcccaaaatgagtgagatttttcaagttaactttcattccatttggctcaggtgtcagggatctatatttaacttgtgttaggcatgcgtccgaagagctggaaggctcaggatgtcaatggctttcagatgtcaggataaccttaaggatagatgaagggttgagagcctgtgcctcatttctgagttctcagctgctatgccgtggaaatcctgtttactttctgcatctgctcctgcaagactctggagccagtcttgaggtcctacatctccgaaagcaagctcttctagaagttggtgagcagaatgctttttgtttagaagtgtggctataaatgtctttgtagttgatgcactctcatctagtaagtaactattatttttgggctctctaaaaaggtaattattatctgatataatagtttagtctgtgatgcttcttttaacatatttgtaagttttaaccaaatggttaaagaaatttgctt

SEQ ID NO: 726481 - DNA, 1928 bp, Homo sapiens
tctgtcacatatcagacctctgactggctgagaggtagccatcagggctggccttccaggatctggaagatcaaaatctgctcatacaaactggcaaggagaacgtgaaaagcataaatgcaagaaatgagaaatctccgtggctggagtggtggcttatggatcctctctctttttcctgtcttagggacataatgcttctgggaatgtcctggtgtcatagcaatactctttagggaccatttctgtgctttctgtaactttgtttaagcaacaaaaaagcaaaaaagctttggacttgctcaaagggtggctaatctgatacagataaagtgtggatgaaactcatttttagcctgtaactatgttgtaggatggaaaagaaaacttgcttgtgggtcaaaattttgtgggttagactctcaaatgaatcagttattcaccatgtgtccattgtcaaaacttatccttttagttgcagtttcttctctggaaagtgagcctaaaatattaatttgaaagcttattttgggattagaaaaggagagtgaattagatggtatctacgtcgtaaagggtcaggcacgtgagcagtgctcagtacataggacctattattaaaatatgatgaaaatactggttatggtgatttgacaaaacaaccttcttttgtggatagtggttactacttgatacagaatagtttcatttaaagagtggtaactctagtctatcatttccctttaatgtgattctgtaaaagaaattttaattgaaaatatttaactatcaggagagaaatatgacttttccagtttctctgttcacttcgttttagtatagaattagagattcttaacatataaatcctagaaagtaatttagaaatcttgtcattatatcttcagagtaataactttcatcacagggtctgtttgggctgagagtagagctttattcatgtttaccagaagtcccaagcaaaaattttttaaaccaagtacattctacaacccttcaaaaagattcaaaaaacaataatttaaaccaaagaactctggcagtgcatgacattttctgcctcattaaatgaggcaaacaaaaaatgaccaaatgactactgaaaacatagaggagaaaaaatactaagaaagtttacagagactttccagtaacaaaagttactggaacaaaaatctgttttgttgactcaatagtaatcaatattcacttttatgttgttttatgcttaagacaggaaaacctgagccttcctctttactatcagagcaaatggtaatcatgaagtgaagcaaattgattattgattactgattacttgaatttctatgttttataagtagagcaaccatctgttaacaggaataacaggttttagcagggaaaggattaagggttttattttcctcaactgaggcccaaaatgagtgagatttttcaagttaactttcattccatttggctcaggtgtcagggatctatatttaacttgtgttaggcatgcgtccgaagagctggaaggctcaggatgtcaatggctttcagatgtcaggataaccttaaggatagatgaagggttgagagcctgtgcctcatttctgagttctcagctgctatgccgtggaaatcctgtttactttctgcatctgctcctgcaagactctggagccagtcttgaggtcctacatctccgaaagcaagctcttctagaagttggtgagcagaatgctttttgtttagaagtgtggctataaatgtctttgtagttgatgcactctcatctagtaagtaactattatttttgggctctctaraaaggtaattattatctgatataatagtttagtctgtgatgcttcttttaacatatttgtaagttttaaccaaatggttaaagaaatttgctt

SEQ ID NO: 726482 - DNA, 639 bp, Homo sapiens
aagataccacaggtatcttgaatatcattctaaggttctttttttacaaatctgagacacttaggttttcaaggacagttgaaaataatgaagcaaagagcaattataagccaagatatgccaaacatgaagagaataaacctttgcactaaccttycataccctttcagtgtctcctcaattcctactgaatggataccttgcccaagcatttaacattttctgtgatatttcctcagttttctttttcttttttcccaaatttgaaaattatttcctacttcttgagttggcagagcttcaggcaaacttaatgcctctctgcttcatgtacatatcccatatgtttaagggcctccaagtctttttttaaactgtttgctctgcctagaagctcatttctttccctttccacatgttcatatcctatgaattttttcaaagttttacataatatcctattatctctgcatttcctcatctccttctgagatgtcaaagcaaattatttatgcatatcttacagtttaataattagctactttctattataactatcatctatctactattgtactacagtttttcccaaccactagtttccaatattcagggattaacaataacaaaaatggtaaa

SEQ ID NO: 726483 - DNA, 1038 bp, Homo sapiens
tccattgaactcatcaatagagtactcctgagtagagctgggagtttttctcttctttggcctggacatatcaaggccaaagatatgtctcatctttgagacattaatgccattgtcactcccatattttctctgccctcctcaaaggcctgctgactttccctgatggttctcatggaatcccccgcaatgaaggtctctttgagaacaacaagctgctgcgacgtgagaagtgttctgccattgttcagcgggcccagagcgcctccaagtcagccagaaatctcactgcctgacagcgcagtgggcaccagctgataagtattgggtaaagccagtgcccctgttgttgattcgaggtgaacaaatgaatcagagctgagatgagttgacaatgacagtggagcagaggccttgtatgtgccctgtcacctgccattccagaactggaccacagaaaagtgctgaggatgctggccagcagaccctgcagcagtcattggtggttctgtctttccctaacccttatgtgctggaggacagaggagccacctcttctcactggttgatactctgttcctaagacctcaggttacccagtgtagcctgctgtgacccttctgcttcattttctgccaagtgatacagaaccttcgttctgctgctttggggacaggtgatcctagccccagcttagggccagtgctctgtgccactctggagaaatagggaaaagataggggtggctcagtacagcagccctgtgaaagtcaaggccagagcttttcttttttaatttttttattattattattattattttattttttgtttttgagatggagtytcgctgtgttgcccaggctagagtgcagtggcatgatctcagctcactgcaacttctgcctcccaggttcaagcaattcccctgcctcagcttcctgagtagctgggactacaggagcgcgccaccacacccagctaatttttgtatttttttttagtagagacggggtttcaccatattggccaggctgg

SEQ ID NO: 726484 - DNA, 1038 bp, Homo sapiens
tccattgaactcatcaatagagtactcctgagtagagctgggagtttttctcttctttggcctggacatatcaaggccaaagatatgtctcatctttgagacattaatgccattgtcactcccatattttctctgccctcctcaaaggcctgctgactttccctgatggttctcatggaatcccccgcaatgaaggtctctttgagaacaacaagctgctgcgacgtgagaagtgttctgccattgttcagcgggcccagagcgcctccaagtcagccagaaatctcactgcctgacagcgcagtgggcaccagctgataagtattgggtaaagccagtgcccctgttgttgattcgaggtgaacaaatgaatcagagctgagatgagttgacaatgacagtggagcagaggccttgtatgtgccctgtcacctgccattccagaactggaccacagaaaagtgctgaggatgctggccagcagaccctgcagcagtcattggtggttctgtctttccctaacccttatgtgctggaggacagaggagccacctcttctcactggttgatactctgttcctaagacctcaggttacccagtgtagcctgctgtgacccttctgcttcattttctgccaagtgatacagaaccttcgttctgctgctttggggacaggtgatcctagccccagcttagggccagtgctctgtgccactctggagaaatagggaaaagataggggtggctcagtacagcagccctgtgaaagtcaaggccagagcttttcttttttaatttttttattattattattattattttattttttgtttttgagatggagtctcrctgtgttgcccaggctagagtgcagtggcatgatctcagctcactgcaacttctgcctcccaggttcaagcaattcccctgcctcagcttcctgagtagctgggactacaggagcgcgccaccacacccagctaatttttgtatttttttttagtagagacggggtttcaccatattggccaggctgg

SEQ ID NO: 726485 - DNA, 1818 bp, Homo sapiens
ggcctcccaaagtgctaggattacaggcatgagctaccacgcccagccagctttttacattttacatttatatcatctttgtaggaaaatcataaaatagggatgaacaacaataaataattaaaaccacctataatttctttcttttttttttttgagatggagtctcgctctcttgccaggctggagtgcagtggcgcagtcttggctcactgcaacctccacctcctgggttcaagcgattctcctgcctcagcctcccaagtagctgggattacaggcatgcgccaccatgcctggctaatttttgtatttttagtagatatggggttttaccatgttggccaggctggacttgaactcctgacctcgtgatctgcccacctcggcctcccaaagtgctgggattacagacatgagccactacgcccggaccaaaaccacctataatttcttgagacccagagatgaccactgccaactgccagacttttttctacactatagttagatagaaagatagaatttagaaagtaaaagtggggtcacaatctaacactggttccttttctgctttcctttgcatctaacacaacattgtgatcgcttctttgccaatacatttatatatatatttgatagttccctggttaaatttctatatattttaggataattgtttcttatcccttcaagtattaactagtttacatcttttcactgttataaacaatattacatttgtttttggaactaaatgttttatgcatatccattagtgtttcttaaaaatggaattgccgagtcagagggtctgttcttttttttttttttttttttttttgagacagggtcttgctctgttgcccaggctggagtacggtgacatgatctcagctcactgcaacctccacctcccaggttcaagtgattcttatgcccagcctcccaagcagctgggattacaggtgtgcaccaccccacctggctaatttttttgtatttttagtagatacagagtttcaccatgttggccaggttaggatctgttcatttttaagtgttttttgtgttttttttttttctttttgttttttgagatggagtctctcactctgttacccaggctggagtgcagtggcacgatctcggctcactgcaacctccgcctcccgggttcgagcaattctcctgcctcagcctccccagtagttgggactacaggcgtgtgccaccacggtcggctaattttttttggtatttttagtagagatggggtttcgccatgttggccaggctcgtctgaaactcctgacctcaagtgatctacctgcctcagcctcccaaagtgctgggattacaggcgtgmgccagcgtgcctggcaagtatttatttttttgaattctccccaactctgcgtcgttcttttgtatctttactaactggagggcaaaaaaataaaggatttgttttcatttgtattttttaaatgattagagaggtttccattttctgttttgctaatttttacttttgtaaatggcctatttgcatgattttccattggtattttaaaaaattgatttgtaggcgtcctctctactgatctcctttcagaggcagatctggaatgctgaggcctctccctcacccatctcctttttcccactgcagatcttaaatctgacccaggccttgaaagacaacaagagtcccctgcacctcgtccagatgccacctgtgattgtcgagacggcccgttcccaccagcggtcttctagcgagtcctacacacagagctttcagagccggaagcc

SEQ ID NO: 726486 - DNA, 1818 bp, Homo sapiens
ggcctcccaaagtgctaggattacaggcatgagctaccacgcccagccagctttttacattttacatttatatcatctttgtaggaaaatcataaaatagggatgaacaacaataaataattaaaaccacctataatttctttcttttttttttttgagatggagtctcgctctcttgccaggctggagtgcagtggcgcagtcttggctcactgcaacctccacctcctgggttcaagcgattctcctgcctcagcctcccaagtagctgggattacaggcatgcgccaccatgcctggctaatttttgtatttttagtagatatggggttttaccatgttggccaggctggacttgaactcctgacctcgtgatctgcccacctcggcctcccaaagtgctgggattacagacatgagccactacgcccggaccaaaaccacctataatttcttgagacccagagatgaccactgccaactgccagacttttttctacactatagttagatagaaagatagaatttagaaagtaaaagtggggtcacaatctaacactggttccttttctgctttcctttgcatctaacacaacattgtgatcgcttctttgccaatacatttatatatatatttgatagttccctggttaaatttctatatattttaggataattgtttcttatcccttcaagtattaactagtttacatcttttcactgttataaacaatattacatttgtttttggaactaaatgttttatgcatatccattagtgtttcttaaaaatggaattgccgagtcagagggtctgttcttttttttttttttttttttttttgagacagggtcttgctctgttgcccaggctggagtacggtgacatgatctcagctcactgcaacctccacctcccaggttcaagtgattcttatgcccagcctcccaagcagctgggattacaggtgtgcaccaccccacctggctaatttttttgtatttttagtagatacagagtttcaccatgttggccaggttaggatctgttcatttttaagtgttttttgtgttttttttttttctttttgttttttgagatggagtctctcactctgttacccaggctggagtgcagtggcacgatctcggctcactgcaacctccgcctcccgggttcgagcaattctcctgcctcagcctccccagtagttgggactacaggcgtgtgccaccacggtcggctaattttttttggtatttttagtagagatggggtttcgccatgttggccaggctcgtctgaaactcctgacctcaagtgatctacctgcctcagcctcccaaagtgctgggattacaggcgtgagccagcgtgcctggcaagtatttatttttttgaattctccccaactctgcgtcgttcttttgtatctttactaactggagggcaaaaaaataaaggatttgttttcatttgtattttttaaatgattagagaggtttccattttctgttttgctaatttttacttttgtaaatggcctatttgcatgattttccattggtattttaaaaaattgatttgtaggcgtcctctctactgatctcctttcagaggcagatctggaatgytgaggcctctccctcacccatctcctttttcccactgcagatcttaaatctgacccaggccttgaaagacaacaagagtcccctgcacctcgtccagatgccacctgtgattgtcgagacggcccgttcccaccagcggtcttctagcgagtcctacacacagagctttcagagccggaagcc

SEQ ID NO: 726487 - DNA, 1110 bp, Homo sapiens
tatatcaattatcatttaaattcaaggccatcttcttcaacttaaatcagatggaccactggaggtgactttttttttttctagttttcagcacagcttattcctagacatcccttgagcagcccacctgtgcagccacaagtttttccttcttccctccccctccccagtcccctttccctaccgagtaccttcctgttctgcaaacacagctatgtcttctcttcttcattattcaacaatgagaggtgtctattaaaaaaagctaagggcaaagtgcattatttgtatttataatggcccctctttctcacctgaagatgaatttgccttttttaaaaaactggttttggggaataaataattctccggagtagtctgaaattcacaaagaagtagcctctgggagactgtaatgggaattttggttccaaagtttttatttgtctcttatgattttactgttttcaaaatttcattggaaaaaaatgggggcaaagtaaggcaatttccaactctcttttttttaaaaaaataattttttagcagtttaatcactgttgtaccttcattaggagaaaagaatacgatttaattaccgtgagtcactgcaagggccaaagcaaagctgtctggaggtttgcaggcatcgggcttcgtgcacttcagctgcctgcacagacacgcccttgaccaggagtaacgatggaggcccaggaaaatgcatgcagattgcgctcgagtggcagagtggggactagaaccccagcatcctgattttacattttcacactgctggattcaatgcagagaacagctgctgagccaggcagtagagagtcagcattgctttggaggaggatcagctgtgagctcatgggcctgggagagaatcaggcaaaggaagaaacggtccaggagagatsccttgggaccaggagccaggacggctcgaggcacccagccatgctctgcgtgacccagcttcttctctttcatgagtctcctaactcagcctagaagagtcagagcctctgacatggtctgtaagccccccttctcctcccctctctctaactgcaaaccctcattggaagcaggtatgctcca

SEQ ID NO: 726488 - DNA, 647 bp, Homo sapiens
tccagggattagcacatggacatttttttttggcggggggcggggggcggtggggggagtaagcattcttcttcctaccacctctcataactattttataattgctaaaacaaaataataaaattagcacaatagatatggtaagaattacattgtactcactcttgacaagtggctggattcacagtgtgataactgagaatgaagactcgggccagacagcctgggttgcgatggcagctcctgtgtttacccactgtacagtttgagcaagttacttactctctttgtgcctccattgtccaatgtttaaagtggaatgacaatcacygttcctcccttatacagcctacacgaaaaaccctcccaggatgctggagcccagcacttgctaagtactttttaaggactagttgttagttgttaactgaataaagctccctcagctctgccctcttgtgtggggctcaaggccacactcaccctggccgtcagagggcagctccgagcccatgtccctgctgtgcctgcaccaagcactcactgcacagatgtttcttcttggtgtttcactttgctttgcccctatttccaacaccctctgttcccaacgagcatctcaggagggtctcctgattctcccatat

SEQ ID NO: 726489 - DNA, 647 bp, Homo sapiens
tccagggattagcacatggacatttttttttggcggggggcggggggcggtggggggagtaagcattcttcttcctaccacctctcataactattttataattgctaaaacaaaataataaaattagcacaatagatatggtaagaattacattgtactcactcttgacaagtggctggattcacagtgtgataactgagaatgaagactcgggccagacagcctgggttgcgatggcagctcctgtgtttacccactgtacagtttgagcaagttacttactctctttgtgcctccattgtccaatgtttaaagtggaatgacaatcactgttcctcccttatacagcctacacgaaaaaccctcccaggatgctggagcccagcacttgctaagtactttttaaggactagttgttagttgttaactgaataaagctccctcagctctgccctcttgtgtggggctcaaggccacactcaccctggccgtcagagggcagctccgagcccatgtccctgctgtgcctgcaccaagcaytcactgcacagatgtttcttcttggtgtttcactttgctttgcccctatttccaacaccctctgttcccaacgagcatctcaggagggtctcctgattctcccatat

SEQ ID NO: 726490 - DNA, 1478 bp, Homo sapiens
cagctgatgagctggcattgctatctgattattaactgaaggtgttggyttacatcagcgttattccttgtgtcttctagttctataggttttgacaaatgcataatgtcacatatgcatgattacagtatcaacacaggatcataccactgccctgaaaatgccctgtgtgggcttccctttgttggagccctgtggcaagcatgcatatttgttttgtcttagtctcctaacgatcgtccgtctcaggatctttgttcctgggagagcctcatgtctgtgctttagtcccagtccctctcctggctcttgcatatcgtgcgaggctatactgctcccaaagtcctcgcagcctgactttccttctctggcactgccttgattacttttgccctccacccgcacttccatgctccctgtcagtcttgggtgggagactgacttgctctagacgctctagacagcgcatcctacagcctattggatggaatttgattcgtattttgcaccttgccagtctttccatcagtggccctggcaaagcgtcagttcggctcctccatggataagtaacatctgttttatgtaacgatccggcactgtctccattctcatgtccctggttgtatccccagggctcatttcctgtgcaggaaactgccgcaaggagctgtctatcagtacctcttctgaagaatcgaaatagctgattctgtatgcaccgtcactggccacacttgaagcccgcctggattcaaggacattagttcagctcccatgctgaccgtggtaccctcgcctgcactttcccgcagagggggtttaattgttttttcatgatgctgggaagtaagtggctgggcctgcatttatactcgaagcgcacgttcaggccaggtcccagatgtggttcccctcttagccagccaatcctgaactgtcagagtttaaatccaccctgcttctgtctctgggcctgagagtcctgaactgagatctgagcccctggcagtggtcccagcacttgttaggatttgcgctccacgagaaaccagctcttcagagactcacagtccccttttcctgcccagtggcctttgcctctcaaaaattaatcttgtctgatcgaagaggcttgttagcctccagaccccagcaacagccgcagattggcgaggtccagcgggccactcagtttccccgtgtggactgcggtaatcacaactgcttaacaagcactcctcgcctctcccgcgggccctggctagtagcacaccatgcagctgggcccaggtagaccccaattccgcccaagcccaggacttcacctctccatgcttgctgagcccgagcatattgtgaaggtttccagagggggagaccatctgtctgctcgcgaacgcacatggccctcaggcagccgcctcttcctaggatcctgctctcataccctgtggggctggagcagccgctgcaca

SEQ ID NO: 726491 - DNA, 1478 bp, Homo sapiens
cagctgatgagctggcattgctatctgattattaactgaaggtgttggcttacatcagcgttattccttgtgtcttctagttctataggttttgacaaatgcataatgtcacatatgcatgattacagtatcaacacaggatcataycactgccctgaaaatgccctgtgtgggcttccctttgttggagccctgtggcaagcatgcatatttgttttgtcttagtctcctaacgatcgtccgtctcaggatctttgttcctgggagagcctcatgtctgtgctttagtcccagtccctctcctggctcttgcatatcgtgcgaggctatactgctcccaaagtcctcgcagcctgactttccttctctggcactgccttgattacttttgccctccacccgcacttccatgctccctgtcagtcttgggtgggagactgacttgctctagacgctctagacagcgcatcctacagcctattggatggaatttgattcgtattttgcaccttgccagtctttccatcagtggccctggcaaagcgtcagttcggctcctccatggataagtaacatctgttttatgtaacgatccggcactgtctccattctcatgtccctggttgtatccccagggctcatttcctgtgcaggaaactgccgcaaggagctgtctatcagtacctcttctgaagaatcgaaatagctgattctgtatgcaccgtcactggccacacttgaagcccgcctggattcaaggacattagttcagctcccatgctgaccgtggtaccctcgcctgcactttcccgcagagggggtttaattgttttttcatgatgctgggaagtaagtggctgggcctgcatttatactcgaagcgcacgttcaggccaggtcccagatgtggttcccctcttagccagccaatcctgaactgtcagagtttaaatccaccctgcttctgtctctgggcctgagagtcctgaactgagatctgagcccctggcagtggtcccagcacttgttaggatttgcgctccacgagaaaccagctcttcagagactcacagtccccttttcctgcccagtggcctttgcctctcaaaaattaatcttgtctgatcgaagaggcttgttagcctccagaccccagcaacagccgcagattggcgaggtccagcgggccactcagtttccccgtgtggactgcggtaatcacaactgcttaacaagcactcctcgcctctcccgcgggccctggctagtagcacaccatgcagctgggcccaggtagaccccaattccgcccaagcccaggacttcacctctccatgcttgctgagcccgagcatattgtgaaggtttccagagggggagaccatctgtctgctcgcgaacgcacatggccctcaggcagccgcctcttcctaggatcctgctctcataccctgtggggctggagcagccgctgcaca

SEQ ID NO: 726492 - DNA, 1478 bp, Homo sapiens
cagctgatgagctggcattgctatctgattattaactgaaggtgttggcttacatcagcgttattccttgtgtcttctagttctataggttttgacaaatgcataatgtcacatatgcatgattacagtatcaacacaggatcataccactgccctgaaaatgccctgtgtgggcttccctttgttggagccctgtggcaagcatgcatatttgttttgtcttagtctcctaacgatcgtccgtctcaggatctttgttcctgggagagcctcatgtctgtgctttagtcccagtccctctcctggctcttgcatatcgtgcgaggctatactgctcccaaagtcctcgcagcctgactttccttctctggcactgccttgattacttttgccctccacccgcacttccatgctccctgtcagtcttgggtgggagactgacttgctctagacgctctagacagcgcatcctacagcctattggatggaatttgattcgtattttgcaccttgccagtctttccatcagtggccctggcaaagcgtcagttcggctcctccatggataagtaacatctgttttatgtaacgatccggcactgtctccattctcatgtccctggttgtatccccagggctcatttcctgtgcaggaaactgccgcaaggagctgtctatcagtacctcttctgaagaatcgaaatagctgattctgtatgcaccgtcactggccacacttgaagcccgcctggattcaaggacattagttcagctcccatgctgaccgtggtaccctcgccygcactttcccgcagagggggtttaattgttttttcatgatgctgggaagtaagtggctgggcctgcatttatactcgaagcgcacgttcaggccaggtcccagatgtggttcccctcttagccagccaatcctgaactgtcagagtttaaatccaccctgcttctgtctctgggcctgagagtcctgaactgagatctgagcccctggcagtggtcccagcacttgttaggatttgcgctccacgagaaaccagctcttcagagactcacagtccccttttcctgcccagtggcctttgcctctcaaaaattaatcttgtctgatcgaagaggcttgttagcctccagaccccagcaacagccgcagattggcgaggtccagcgggccactcagtttccccgtgtggactgcggtaatcacaactgcttaacaagcactcctcgcctctcccgcgggccctggctagtagcacaccatgcagctgggcccaggtagaccccaattccgcccaagcccaggacttcacctctccatgcttgctgagcccgagcatattgtgaaggtttccagagggggagaccatctgtctgctcgcgaacgcacatggccctcaggcagccgcctcttcctaggatcctgctctcataccctgtggggctggagcagccgctgcaca

SEQ ID NO: 726493 - DNA, 685 bp, Homo sapiens
ttgggccattaactcagtcttagatagctgagattcattaaaatccaaaatttgggagagagcagtgaactggactgcttttaacacctggtcacgtaagcttgttcttaaaaaggacttgggcatctcatgaatgacagcaatggccttgctgtaatcttgtaacccctttgcaaataccacaagtttttccartgttatattgcaagggaagatcagatttgatatttaaaaccttgttacagattctcatttactaaaacactttctgtaaagtaaaattttccttctctttttccttgcgatcttggctctttagaagatgacttaaaaggatggacgtaagtcaacccttcgtgcagctggagcatttgcaaaaggagtgttgatgagagcatttcctccataactctcaggagagcagaggtagacggcgcccacacagtaatcacgcacttccgcctttggatgtgcagattagatgacaggaagcggcgttctttggaattcagtgaggtggatgctttaagctcatcatggctagaaaagtgactccacactgctcagaactagagatatatggaagcatcaaacaatatgcattttcaagaaattaaaaatgttttatgtgtttatttattctgaaaatcccccaaatgaaaaaaaaaataagaatatttccaat

SEQ ID NO: 726494 - DNA, 685 bp, Homo sapiens
ttgggccattaactcagtcttagatagctgagattcattaaaatccaaaatttgggagagagcagtgaactggactgcttttaacacctggtcacgtaagcttgttcttaaaaaggacttgggcatctcatgaatgacagcaatggccttgctgtaatcttgtaacccctttgcaaataccacaagtttttccaatgttatattgcaagggaagatcagatttgatatttaaaaccttgttacagattctcatttactaaaacactttctgtaaagtaaaattttccttctctttttccttgcgatcttggctctttagaagatgacttraaaggatggacgtaagtcaacccttcgtgcagctggagcatttgcaaaaggagtgttgatgagagcatttcctccataactctcaggagagcagaggtagacggcgcccacacagtaatcacgcacttccgcctttggatgtgcagattagatgacaggaagcggcgttctttggaattcagtgaggtggatgctttaagctcatcatggctagaaaagtgactccacactgctcagaactagagatatatggaagcatcaaacaatatgcattttcaagaaattaaaaatgttttatgtgtttatttattctgaaaatcccccaaatgaaaaaaaaaataagaatatttccaat

SEQ ID NO: 726495 - DNA, 659 bp, Homo sapiens
caataaacttattgacagaaaagaaaaaaagcaagtaatagatgattctgatgtggaaattataacatatggatttagatttttttttttaagaaaacaaaagaagaaacactgtccctgagggatccgatgtgtttrtgtggcttcacttgccatcttgaaaatggtcccatatgactatggaactgggttggagctcccagctggaaggaatcatgaaaagtcttcttgtcccctcattattttaaaatttttattgttttttttaagacaaggtctctctctgtcacccaggctggagtgcagtggtaccaccatagctcactcaacctcaactcctgggttcaagcaatcctcctgcctcagccccctgagtagctgggattacaggtaaatgccaccacacctggctatttaaaaaaatttttgatagagatggggtcttgctgttgttgcccaggctggtctcaaactcctgggctcaagcaatcctcccgcctcggctctccaaagtgctgggattacatgcaagagctactgtgccgggcctgtcccctcattttagaactaaggaaactgcagcccagataatggcaaagtggggcctaggacccagggtcttttgactccagtcttgccttccatgatactcagctgcc

SEQ ID NO: 726496 - DNA, 659 bp, Homo sapiens
caataaacttattgacagaaaagaaaaaaagcaagtaatagatgattctgatgtggaaattataacatatggatttagatttttttttttaagaaaacaaaagaagaaacactgtccctgagggatccgatgtgtttatgtggcttcacttgccatcttgaaaatggtcccatatgactatggaactgggttggagctcccagctggaaggaatcatgaaaagtcttcttgtcccctcattattttaaaatttttattrttttttttaagacaaggtctctctctgtcacccaggctggagtgcagtggtaccaccatagctcactcaacctcaactcctgggttcaagcaatcctcctgcctcagccccctgagtagctgggattacaggtaaatgccaccacacctggctatttaaaaaaatttttgatagagatggggtcttgctgttgttgcccaggctggtctcaaactcctgggctcaagcaatcctcccgcctcggctctccaaagtgctgggattacatgcaagagctactgtgccgggcctgtcccctcattttagaactaaggaaactgcagcccagataatggcaaagtggggcctaggacccagggtcttttgactccagtcttgccttccatgatactcagctgcc

SEQ ID NO: 726497 - DNA, 1257 bp, Homo sapiens
actactactatattttttttccccactattcatgctggacttctaaatgataaaaaagcaaaaagatatatgaatagaattttaatcacatggtaaacaataaagcacccattatagaaacagcataaataagaaacaaaacatagactacctaaccctgtatgtatggtgtgtgtacgtttgtgggtagttttaatgaaatttaagaaatgcaaacttactaagtgtgcattttcctgtacctgttagtattgaaatagacaaatatgcttagcaagaaaggaaaaaaattggggtgggtaaccaataagttgataaataaggtccyaaataactgagagtttactgtagtttaagcagtcacattacttctttttagcaaaacagataaacgatcacatctgtaattaaactctggtctgattgcattgctatatctaagtgtttgcctctggtgtaataatgtgctttctcaaataggattgcttttctattgctctttattcctgaatgacctggtctttcctgaaccagggagaaaatgtgctttataatgaaataatgatttctttcaaggtttaacagtattatttgctaagttatctcttttagggtctctaatgatgcctccaggcagtgaaggagttacttttcctcaagaagaaaattaaaaaatagaaatggaaattttcataatggaaaattaaaagtgtgagttccttaaaaggaagaaaagcttttatggatctcacaggaggattcttggttactccactaagcaacttcgcctgaccattttttttttttaagtagtgaaatgtaatgtgtgttcgaatgtcttagaagttcaaacttttagcctatatgttctgtttggcctgaggcactaagaaatagtatgaaatttcatatagaaatatggatttttggcttccctttaaaaattttttacatatcaacaagttagctggctgtccttctattgatgccctcattagaggcatagggcatttgtcagtcctttgtcatgtcacttagctaacagacttggtcttaaagtttgcaactcttaatccatattgtcattcatttaaaaaattatacagacatgttatatgaaaaactttgctcaaggagctaagccaagatgcacatggcctgttacttaagggatcttatggaataccagatcactgatatgttcagtggaacgcattccatgacacatgagttgagatgtgttccagatttctgctt

SEQ ID NO: 726498 - DNA, 1257 bp, Homo sapiens
actactactatattttttttccccactattcatgctggacttctaaatgataaaaaagcaaaaagatatatgaatagaattttaatcacatggtaaacaataaagcacccattatagaaacagcataaataagaaacaaaacatagactacctaaccctgtatgtatggtgtgtgtacgtttgtgggtagttttaatgaaatttaagaaatgcaaacttactaagtgtgcattttcctgtacctgttagtattgaaatagacaaatatgcttagcaagaaaggaaaaaaattggggtgggtaaccaataagttgataaataaggtcctaaataactgagagtttactgtagtttaagcagtcacattacttctttttagcaaaacagataaacgatcacatctgtaattaaactctggtctgattgcattgctatatctaagtgtttgcctctggtgtaataatgtgctttctcaaatrggattgcttttctattgctctttattcctgaatgacctggtctttcctgaaccagggagaaaatgtgctttataatgaaataatgatttctttcaaggtttaacagtattatttgctaagttatctcttttagggtctctaatgatgcctccaggcagtgaaggagttacttttcctcaagaagaaaattaaaaaatagaaatggaaattttcataatggaaaattaaaagtgtgagttccttaaaaggaagaaaagcttttatggatctcacaggaggattcttggttactccactaagcaacttcgcctgaccattttttttttttaagtagtgaaatgtaatgtgtgttcgaatgtcttagaagttcaaacttttagcctatatgttctgtttggcctgaggcactaagaaatagtatgaaatttcatatagaaatatggatttttggcttccctttaaaaattttttacatatcaacaagttagctggctgtccttctattgatgccctcattagaggcatagggcatttgtcagtcctttgtcatgtcacttagctaacagacttggtcttaaagtttgcaactcttaatccatattgtcattcatttaaaaaattatacagacatgttatatgaaaaactttgctcaaggagctaagccaagatgcacatggcctgttacttaagggatcttatggaataccagatcactgatatgttcagtggaacgcattccatgacacatgagttgagatgtgttccagatttctgctt

SEQ ID NO: 726499 - DNA, 1479 bp, Homo sapiens
tgcagcccagctgcagtgataaaacgcatgggacagcttagggaacaatttacaacgtattattaaccactcaaatgaaagagatggatggcaggaggtttataaactaagagaggaaacagggcaggcctcagcagcagagctgggcttccagagcaggtcctccaggtagagctgaacagacgggcagtgccgggagaggaggaagtgaagggattcttctgtgtgtgtgtgcaggaatgagcacaatatgcagagatgtgtgaagtgtgtgtgtgtgtgtccacatgtgcatgtgtgcacaagtgagcaggaacggacacagtgtgcagagatgtgtgaaggcctggccgggcctctctggaggattgcagagttggagaaagtggctggcatggatttgggctgcctgcccctgggtggggattcaatgcagacacatcactgtgatgactggctgaccatcttctttctgtagctttgcctctgggttggggcatatcccataaccttgattacacatctgccaagtaggcactcctggttttgatgacagcttgctgaaggatcagccctgactgcagcaaagtgccatgatgcttgtggttttgaaaagagaagaagcgagccgggctgtgtctggctcctgtgaggagtggctggctagccctggggtctgggtgactggtagtatcattgtgctgatggacagtctggtagacaaagcsgggggtagtttggcaaggaatggataagattctgctgggatagaggtactgttggaaaatgccagctgtctagacggtgtcaggagttatctgatgaaggctgggattgggcgggattttctcgcgtgtcctccacatctgaagttgatatctctttcttcttaaactttttacagccttgtgttgagagctgtcacgtgtatagagttagagacagatggacccacacggactcatctgtatctgtgtcattctctgtgactcagtgatccacccatgaaatattaatatgtttcaggagaagtaaacactaacacacagagaagcatcaaagaaaaagaaagtagatttttaactcaaccaaaatatgaggtgattttataataaaccatgcatagtagcttgatgacatgtaatgatgccattaaattaatttataccccaactgtacagtaagtaccggttattgccaggttattccacgttaaaataacatggaaatgcctatgccattctattatgtgaaaaacgagacaaagtgatacacgaagcatgctcataaacgtggctatgcaaaaatttcccccaaaatgtgtgctttgggttaagacttggaaggagtactttaaaggtatgtttatttacttctcttccatagtttttacatttttcaaattcctttcatgaggaaaatctattaaatgcacttctgctctggacgtagggctaccagcaatccaggaaaattttc

SEQ ID NO: 726500 - DNA, 1479 bp, Homo sapiens
tgcagcccagctgcagtgataaaacgcatgggacagcttagggaacaatttacaacgtattattaaccactcaaatgaaagagatggatggcaggaggtttataaactaagagaggaaacagggcaggcctcagcagcagagctgggcttccagagcaggtcctccaggtagagctgaacagacgggcagtgccgggagaggaggaagtgaagggattcttctgtgtgtgtgtgcaggaatgagcacaatatgcagagatgtgtgaagtgtgtgtgtgtgtgtccacatgtgcatgtgtgcacaagtgagcaggaacggacacagtgtgcagagatgtgtgaaggcctggccgggcctctctggaggattgcagagttggagaaagtggctggcatggatttgggctgcctgcccctgggtggggattcaatgcagacacatcactgtgatgactggctgaccatcttctttctgtagctttgcctctgggttggggcatatcccataaccttgattacacatctgccaagtaggcactcctggttttgatgacagcttgctgaaggatcagccctgactgcagcaaagtgccatgatgcttgtggttttgaaaagagaagaagcgagccgggctgtgtctggctcctgtgaggagtggctggctagccctggggtctgggtgactggtagtatcattgtgctgatggacagtctggtagacaaagcggggggtagtttggcaaggaatggataagattctgctgggatagaggtactgttggaaaatgccagctgtctagacggtgtcaggagttatctgatgaaggctgggattgggcgggattttctcgcgtgtcctccacatctgaagttgatatctctttcttcttaaactttttacagccttgtgttgagagctgtcacgtgtatagagttagagacagatggacccacacggactcatctgtatcygtgtcattctctgtgactcagtgatccacccatgaaatattaatatgtttcaggagaagtaaacactaacacacagagaagcatcaaagaaaaagaaagtagatttttaactcaaccaaaatatgaggtgattttataataaaccatgcatagtagcttgatgacatgtaatgatgccattaaattaatttataccccaactgtacagtaagtaccggttattgccaggttattccacgttaaaataacatggaaatgcctatgccattctattatgtgaaaaacgagacaaagtgatacacgaagcatgctcataaacgtggctatgcaaaaatttcccccaaaatgtgtgctttgggttaagacttggaaggagtactttaaaggtatgtttatttacttctcttccatagtttttacatttttcaaattcctttcatgaggaaaatctattaaatgcacttctgctctggacgtagggctaccagcaatccaggaaaattttc

SEQ ID NO: 726501 - DNA, 1589 bp, Homo sapiens
aaatgggagggtaattgtttaacggagacagtgcttgagttttcaagctataacattctgtgattgggtggtggtgatggtttcgtgactttgtgaatacgctgaatgccactgaatcatacacttaaaatagttaaaatggtaaattttatattgtgtatatttcaaaagaaaacaactgaacaaaatgacctcaagaagaaaaataacacaaatgttattttcattcatgagtataccctataaatccactggcattggtctgttctcttctgagccagactttgatgaatttaactgggcttgcttgtgcaaggggctggcttcatgggcacgagacctgagtgtgctcagaggccacttggtmtttcttctgtcatggtcctgaagttcttaataatttttggacgagaggcctcacggttttcctttgcactgggctctgtatctgcagtgtaccctgggatcagcgaaagcatgcctcacttctaagtgtggttgggtgtaggtggagtgatgtggtgaactcatccccatcatacaagtctactgcagaatttttcagcctgttggttatgagtttagggatggggtgtgtgtggtaagagaaagagatgcccctttttttgcaaggggtatatgcatcagacagtctattgttctggagacaaagaaatgttttgaacatgatgtgaacatgtaggatgcctttggatccatgaggacctctgagaggtgagctttttcataaggaggtgcatgctaataagcccaaggtgtggcaatgaacttcttgttccagatccccacatctcacccaggcttgtcttgaccttacagttgcttaaaatccctaagtctgttttacacaaaacacatttcaagcaactctcccttacatcgtatataaaattgatttcctgaatgagaacacaaaatcttttttatttatctaagttttaatgtaattatttttagttgaaaatttttaaaatatgtttctgccattctatttactatccatctcatcttggtgtcagagtccaaagtccaatgagactgtagttattaatgtggaaaaatggatagtgcatcagaattgactttaaataggaaataagtccatgttaccaagaaaagagaacaggaagggaggtgctcatgggagagccagtgggacggtctggaaatgggcaacatgcttcactttgaggattcgcagatgctgagttctgatgtgtattggtgaagtcatcttccctcaattatcttacgagtgaaccctgcaagtcaataagctgcagactgtgtctacagaagccttagggatgagttcactgtgtgtccctgagccttctgcttcagtaatctctagtcagttgcattgactctggccccctgttttctcctcctaaatgccaagctctgcttcagtgcttaaagcaatcttcccaacattgcttacatttaaatatttgtttatctgactgagattcaaacagatgcagttctctttctgaacatacaagactctcagaaactcagatttgaaagaaagcaacccaaatctgtttctttaatatggagca

SEQ ID NO: 726502 - DNA, 1473 bp, Homo sapiens
taaaagttcctaggtgtttgtaatttgcagtcaggttgtgaagcattgatctctagcaagaggagagaaagtagatacctggggacccagcttggcagctgagtagcttacaaagagtgaagagctcttagaaattcttctatgattccttcaattatccaggcaaaattggaagccagatcaactgagggcaacgctggaagatgagcttttggaggttatgaaaaggaaatatgaaagakagtttgaggataatgacagtgtgaataaacgggaggaatgtccttttgctaagtctgtggttacgaatctcaagttagatcatccagagagctcgtgagttttttctcatcctatgtttggctgtacgggagcaggtatggagtaagcggaggcagatttaaccgtgcttgtcgttttccaaggcatctaatcatgtcagataaaatgagagcagggtaggagggtgattgtgatggttaaccatggagacagagccgaagtgacagagcccatacttttagctcccaaagacatggactgtggggaaagggtaccggggagagggctggaaggaggagatggggaggtaaccagtgaaaagcttgaacttgcgattgggggatgggaattattggtaacaacaaggtccacggcatgaccacaggcatgcgatgtcttaggaggggatccagaattcctttagagacagaaggaaaggagcatggacagaagaggaggacacacagggagatgtcctagcatgcactgtgacgtccggagggtacacgggaagtttgaagcattggaagatccggagtcatgaggtttttgagcatgggaggcagtgagtgacctgggaatctggtcatccttggagtatgacacaaataagaagaaaaggacatgatggaaagagtgtcactgatctcagagcagatggttatgaggaagctgcctgtgcgagaggttagcaagacgcggggctgtgcgtgtccttctcctctctgttgatatgagtgcagaaacttattttaatgacgaggctctcttgaccctttccaaagaaggcatgaaggttttgcaaagaagtctaactcagaggtcttcctataaatttcatttacacataagcagtgcaaaatgttaaatgagataccatgctaaaaaacacacataccctgcctcaagatacttatatctagtaacattaatagatacatacacaaatcctttcacacaggacaagacgtatataacatattccttaagagagatcaaaataaagtatcatgaggttttggaatgacagaagcatagtcattagggataaatcagaaaaatttcacaagacaggtgcatttgagctacaccttaaagaacagtttggattctgacagatacaagacaagattgggagatgtttcaactggtctaatgaaaagagcaaaaatgggctgggtgccgtggctc

SEQ ID NO: 726503 - DNA, 1473 bp, Homo sapiens
taaaagttcctaggtgtttgtaatttgcagtcaggttgtgaagcattgatctctagcaagaggagagaaagtagatacctggggacccagcttggcagctgagtagcttacaaagagtgaagagctcttagaaattcttctatgattccttcaattatccaggcaaaattggaagccagatcaactgagggcaacgctggaagatgagcttttggaggttatgaaaaggaaatatgaaagagagtttgaggataatgacagtgtgaataaacgggaggaatgtccttttgctaagtctgtggttacgaatctcaagttagatcatccagagagctcgtgagttttttctcatcctatgtttggctgtacrggagcaggtatggagtaagcggaggcagatttaaccgtgcttgtcgttttccaaggcatctaatcatgtcagataaaatgagagcagggtaggagggtgattgtgatggttaaccatggagacagagccgaagtgacagagcccatacttttagctcccaaagacatggactgtggggaaagggtaccggggagagggctggaaggaggagatggggaggtaaccagtgaaaagcttgaacttgcgattgggggatgggaattattggtaacaacaaggtccacggcatgaccacaggcatgcgatgtcttaggaggggatccagaattcctttagagacagaaggaaaggagcatggacagaagaggaggacacacagggagatgtcctagcatgcactgtgacgtccggagggtacacgggaagtttgaagcattggaagatccggagtcatgaggtttttgagcatgggaggcagtgagtgacctgggaatctggtcatccttggagtatgacacaaataagaagaaaaggacatgatggaaagagtgtcactgatctcagagcagatggttatgaggaagctgcctgtgcgagaggttagcaagacgcggggctgtgcgtgtccttctcctctctgttgatatgagtgcagaaacttattttaatgacgaggctctcttgaccctttccaaagaaggcatgaaggttttgcaaagaagtctaactcagaggtcttcctataaatttcatttacacataagcagtgcaaaatgttaaatgagataccatgctaaaaaacacacataccctgcctcaagatacttatatctagtaacattaatagatacatacacaaatcctttcacacaggacaagacgtatataacatattccttaagagagatcaaaataaagtatcatgaggttttggaatgacagaagcatagtcattagggataaatcagaaaaatttcacaagacaggtgcatttgagctacaccttaaagaacagtttggattctgacagatacaagacaagattgggagatgtttcaactggtctaatgaaaagagcaaaaatgggctgggtgccgtggctc

SEQ ID NO: 726504 - DNA, 1473 bp, Homo sapiens
taaaagttcctaggtgtttgtaatttgcagtcaggttgtgaagcattgatctctagcaagaggagagaaagtagatacctggggacccagcttggcagctgagtagcttacaaagagtgaagagctcttagaaattcttctatgattccttcaattatccaggcaaaattggaagccagatcaactgagggcaacgctggaagatgagcttttggaggttatgaaaaggaaatatgaaagagagtttgaggataatgacagtgtgaataaacgggaggaatgtccttttgctaagtctgtggttacgaatctcaagttagatcatccagagagctcgtgagttttttctcatcctatgtttggctgtacgggagcaggtatggagtaagcggaggcagatttaaccgtgcttgtcgttttccaaggcatctaatcatgtcagataaaatgagagcagggtaggagggtgattgtgatggttaaccatggagacagagccgaagtgacagagcccatacttttagctccyaaagacatggactgtggggaaagggtaccggggagagggctggaaggaggagatggggaggtaaccagtgaaaagcttgaacttgcgattgggggatgggaattattggtaacaacaaggtccacggcatgaccacaggcatgcgatgtcttaggaggggatccagaattcctttagagacagaaggaaaggagcatggacagaagaggaggacacacagggagatgtcctagcatgcactgtgacgtccggagggtacacgggaagtttgaagcattggaagatccggagtcatgaggtttttgagcatgggaggcagtgagtgacctgggaatctggtcatccttggagtatgacacaaataagaagaaaaggacatgatggaaagagtgtcactgatctcagagcagatggttatgaggaagctgcctgtgcgagaggttagcaagacgcggggctgtgcgtgtccttctcctctctgttgatatgagtgcagaaacttattttaatgacgaggctctcttgaccctttccaaagaaggcatgaaggttttgcaaagaagtctaactcagaggtcttcctataaatttcatttacacataagcagtgcaaaatgttaaatgagataccatgctaaaaaacacacataccctgcctcaagatacttatatctagtaacattaatagatacatacacaaatcctttcacacaggacaagacgtatataacatattccttaagagagatcaaaataaagtatcatgaggttttggaatgacagaagcatagtcattagggataaatcagaaaaatttcacaagacaggtgcatttgagctacaccttaaagaacagtttggattctgacagatacaagacaagattgggagatgtttcaactggtctaatgaaaagagcaaaaatgggctgggtgccgtggctc

SEQ ID NO: 726505 - DNA, 737 bp, Homo sapiens
gaaggagtaagttctagtgtttgagagcactgtaaggtgacaatagctaataataacttattgcatatttcaaaatagctagaagacttgaaatgttcacaacacaaagaaaagataaatatttgaggtgacggatgtctasacaccctgatttaataattacacattgagtacattcatcaaaatgtcacatgcaccccataaatatgtacaattattaagtagatcaaaaaatactttttattatattaaaacaggagaatgaaatggggaactgagtaagtcaaatagggaaatagggaattgtaccttagaataggatgctgttttcaaatgggttaatacatgtgtgcatttatgtatcaaaaccacgtaggtcacaaagccagttttgttaaaaaccaattatttctggtatgtggcagattgagcgctcactcaatagccacgtacccaccagcaggccctagtccttttgcacaaagacagagctgggatagtgccagccagcaagctgggaactgaaggaacacagcgagaatctcattgcttcttccattccactgctgctgtcagaggctgcaggtggaggtggcagaaggtcaggaaggaagcagcctgggtccccaggttgcctccggcagagcagcactgtcgggaatcacaggacactctgggagggagaagcactgacccagcacagtgtgaagtcactgagatttcaaggagaatttatc

SEQ ID NO: 726506 - DNA, 579 bp, Homo sapiens
gttttcttggggtggcatatgatattagaagacctaatttgaatgaagtacccacagacatttaagtggaactatctaggatgcagatgaatgtatgggcttggagcttagaaaaaaaaaacaggctggaagtggagatttggaattcatcagaataaagactgtaactaaagccatgcaaattagagagtgaggagtgaagtgagagtggagagtgaggtgagagcggggagtgaggtgagagcggggagtgaggtgagagcggggagtgaggtgagaatggggagygaggtgagagtggggagtgaggtgagagtggggagtgaggggagagtgaggagtggggtgatagtgggctctttctggtgtcccaggtgtgggccaaggaaaagaatttgtcagaagatcttggagtcagatctccaccttctctaaggttgtatgggggtgagtgtaatgtccaccaattacttggctctatcactttctcaaataataataattcacatcttttgcatcccaacggcgtatcaggcatggtactacgcacttcacataagttatttcagttaaacctca

SEQ ID NO: 726507 - DNA, 579 bp, Homo sapiens
gttttcttggggtggcatatgatattagaagacctaatttgaatgaagtacccacagacatttaagtggaactatctaggatgcagatgaatgtatgggcttggagcttagaaaaaaaaaacaggctggaagtggagatttggaattcatcagaataaagactgtaactaaagccatgcaaattagagagtgaggagtgaagtgagagtggagagtgaggtgagagcggggagtgaggtgagagcggggagtgaggtgagagcggggagtgaggtgagaatggggagtgaggtgagagtggggagtgaggtgagagtggggagtgaggggagagtgaggagtggggtgatagtgggctctttctggtgtcccaggtgtgggccaaggaaaagaatttgtcagaagatcttggagtcagatctccaccttctctaaggttgtatgggggtgagtgtaatgtccaccaattacttggctctatcaytttctcaaataataataattcacatcttttgcatcccaacggcgtatcaggcatggtactacgcacttcacataagttatttcagttaaacctca

SEQ ID NO: 726508 - DNA, 1238 bp, Homo sapiens
  misc_feature 224, 225, 226, 227, 228, 229, 230, 231, 232, 233, 234, 235,236, 237, 238, 239, 240, 241, 242, 243, 244, 245, 246, 247,248, 249, 250, 251, 252, 253, 254, 255, 256, 257, 258, 259,260, 261, 262, 263, 264, 265, 266, 267, 268, 269, 270: n = A,T,C or G
  misc_feature 271, 272, 273, 274, 275, 276, 277, 278, 279, 280, 281, 282,283, 284, 285, 286, 287, 288, 289, 290, 291, 292, 293, 294,295, 296, 297, 298, 299, 300, 301, 302, 303, 304, 305, 306,307, 308, 309, 310, 311, 312, 313, 314, 315, 316, 317: n = A,T,C or G
  misc_feature 318, 319, 320, 321, 322, 323: n = A,T,C or G
gcagagatgaagcagtcactggtattactaaggtccgggtatgaccataataatggttgattaattaatgtggaattgaagtgaagatcaatggagttgaggaggtcaaggtctgaagttagaggcgaggtgcttggaggaaaatatttttgacttgattgttttctatgaggatgaggtgtcattttcagatatgattgtattgatatgttagaaaaacagannnnnnnnnnnnnnnnnnnnnnnnnnnnnnnnnnnnnnnnnnnnnnnnnnnnnnnnnnnnnnnnnnnnnnnnnnnnnnnnnnnnnnnnnnnnnnnnnnnnactgggacaaaaaagcctctcctgacggattcgagcaccccccctgggttcagtattaggcatgtcagttcttaaaagactcatggccatttctaaaggaggctaccatcctcccagatcactaagttgtcttttctcttctctgctgtctccccttgaagagaaagaaaggttttattacattctgaatctgagcatttttgttttcgctaggctgcacctttaaagtcagctccagatctttttgcgtattgagaacttggcctaatcattaaattcagttcaagagatagtagtggctcagaccagtgatggtaatgggaagatgtcaggacagattctgggyttattttgaaggtaaagccaacaaattttgttcatggcttggataagggctatgagagaaagagaggagtcaaggatacaccaagattttcagcccaagcaactagagagatgagttggcatcagctgagtaggggaggctgtgggaaataaggtttgaaaggggaggattaggagttcagctctgtcccttttgaggtgtcatttttatatccaagtggagatgtcaagtaggaagctgaatagtctagagttcaggtcagggctggagacttaaaattctggggaaatctcagtaaaatccagcttgttccactgtttgactattttatacatacaacctttccccaagaaatctatttccaaatagtctctcagaaaatggatctaacaacagaatacagacagccaacagattttcaatctcatgccaatggggagagaacccaagttaaatgcaggcactatattcagagtttatatcaagagggcaattttcttacagtctggaggaaacctatggattgtttcaaataaagagatctatggatcgttctagataatttaatt

SEQ ID NO: 726509 - DNA, 609 bp, Homo sapiens
tggaaatgtaaaaattgaatgcagacccaattcccatgctacctttgtcacaccttccaggagatgtgaactgtgggtcacagctgcatgccgagggcatgaaccttaagatcaaagccttttacaccagaggaagcattggtgttaacccaatctacaaaccagtccttgtgcctgtccccacgttcttgttcactccagtgttgtaaaaagttatttgtttgaatgatgttttaaagtgctctgtgcagttaagttttcaaaagcgtgggggctagttttccttcagtgtatatatgaaactcccaataaatttaaagtctttaggtgtgttttaggggaggcggaggattaaaaagagaaaagtttgaaaggaacaaggacttcaaaaaggtaagccccttagaatattaaaacatgtctttatagttggaaagaaagtctatagataaaaaaatagataccaaaaaagtgtataccaatttcataatcacttgtaccaaatttgtakttcactttcctgagaaaactattccttttatgtaattatgacaaagagattagaaactgccctcaccttgctccgtgtgttagtgatttgaaaacacg

SEQ ID NO: 726510 - DNA, 976 bp, Homo sapiens
gttattattatattagttatgattatttagccatattcatcttagtattcatcctctctactaaatttgtggttttgccaaatatatcttcaatttccaaaaaaaacagttttaagcctatgaatttttaataacagtttatgtgaacccttaggtgtttctgagaatattaattttaaaattatttcattccttacattatctctgtttcttctgaagtcagttctgctagttcatgtgggtgtgtgtctttaacatggttagtattccttaaatatatagtgatctttgtttaaatttatgaatgaaggactggactgattagttaaagtgactgattaagattatccttcaaggatttgtatcaatctttccccagttggcttatttctttccctgtaaacaatattatttaaatttggcactttaaaaaatatatttgaactttaataggaattatattatatatctatttctgcaagtttttattttgttcaacatatttgtgatatgtattgatattgacgaatacattgccaaaatacattgatttttcactgctgcaatgtataacatagtgtgattccagtaargatttgagatctttttaattttttggctgtgataacaaatgattccattaatgggtttataataggtctcctctattccaaacacacattacaattcgctttttaaaaaatattatatttaggatgacatttagagtcaagttaaatttattgtagaactatcctttatataaaaatattcaacaagacctaggcaagatggccaaataggaacagctctggtctgcagctcccagtgagatcgacacagaaagtgggtgatttctgcatttccaattgaggtacccatctcatctcattgggacttgttagacagtgggtacagcccacggagggcaagcagaagcagactggggcgtcacctcacttgggaagcacaaggg

SEQ ID NO: 726511 - DNA, 641 bp, Homo sapiens
ttattcaaaactaacatagatagtggaaaggattgtaggggagagaaataacttgagatagggaaagattaatgatggagatggaaaaggaactggttcttgaagatgggatacaattttcttggcaggaaaagaatgagtgaattcttggttggggaaaaccacgaggcatgaaagaaggctgaatatgctatagtgtgaaggtttgggtcatgttttggaccagataacttgaaaaccttcctgatacaaacatttagaaaaggagatgaatcgaaacacatcttgctggtaaggaagacacaatctaagagtctcagaatgaaaagaggacggagaaggaaaacgcggagcgtgtgagttaagtgatatcccccaggagagttaccactcgctgggtcctcgggcctgaggctttcatgaccctgtgggaacagcagatgagagcttgggcgctctgaggtggggggttgaacytgagacccctgatgaagctggctccatcaaaggactgcacccttaggggagagtaggcagaggaaacctccacccactgatgcaggaagacaacatagaaggttgcccaactctgtttggctttggaggttggggggcaagggaagacttcccttataaccatg

SEQ ID NO: 726512 - DNA, 822 bp, Homo sapiens
gtcaggagttcgagaccagcctaaccaacatggtgaaaccccgtctctactaaaaatataaaaatttgccagttgttgtggtgggcacctataatcccagctactcaggaggctgaggcaggagaatcacttgaacccgggaggcggaggttgcagtgagctgagatcacaccattgtactccagcctgggcaacaagaaagaaacttcgtcctccaaaaaacaagaagaaacgaacagaaaactccatgtttaatcctgtcctagaatttcagaataagaaaaccaatagtcaaactcacatccccaaatggatacatactaaacatctcagagttaacggaaccataactgaattcttcaatcctaaaatgtacttcaccttcagtcttcctcattacaataaaaatcagcccaaccatcaatttgctaaagccagaagtatactcttttcttcctccttcccttcattctgayggccagttgatcatcaaatcttattgagagttattcctccaaaattgagcaagaaaaccccaaaaacctcaactcttcaaagttttcctgatgtaacaactgaaaagccgaagaaaatgtaaggcaatactccagattgaatagatgtatttataaaattattgatcaatggaaaaaactatattgaatacaaaattttaaaactagaaacagaaatggcaaataaaaatgaaaattacaaaaaattggccaggcatagtggctcatgcctgtaatcccagcactttgggaggctgaagctagagaatcactcgaacccatgaatttgatatcagcctaggcaaca

SEQ ID NO: 726513 - DNA, 657 bp, Homo sapiens
ggtttatcctggaggctgtttcatgtgcacttcagaagaatgcgtactctgcttttgatgtatggagtgttgtgtatatttcttttaagttcagttagtatatactgttcaagtcctctgtttccttattgattttttgtctggttgttctattccttaaggaaagtgaggttttgaagtctcttactgttgttgtgttgcggtttatttcttccttccattttgtcaaggtttgctttgcatatttggtagctgcatatataccaatacacctatggtgttaggtgtatatatatttataattgttgtattttctggtttgtttacccttttgtaatttttaaatgccctttgtctcttattacagtttttgatttgatgatattttttctgttataattatggctacccctcctctcttttggttatcatttgcatggcatatctttcttcatctttttacttttggcaaataaatgtcctagtatctawagtgagtcttttatagacttcataatagttcataatagttgaatcttgtttcttgtttgttttggattttctagctattcagccaatctatgtctttcaactggataatttaatttattcacattgaaagtaacaactgatggacaagaattactactgtcattt

SEQ ID NO: 726514 - DNA, 600 bp, Homo sapiens
aatgatcccacccaaatggaaagcccctattcttcaacagacttcaatcatcaagaaaccaaaacattaatttgtagtaatcagattcattgaaattatccccttgtgctatttccatggcctggaaaagacccagtcagaaccttcacctggtagcgagtttgcagtaactacagcaagttcaactcaatgcttcttcaaataagaaaaacgtgtagtaaaatagacagctcgaagctatactctatttttctccctttcttttttttttttgagatggagtctggctctggcaccgaggctggagtgcagtggcatgatctcggctcactgcaacctctgcctcctgggttcaagtgattcccttgcctcagcttcccaggtagctgggattacaggcgcccaccaccatgtccggctaatttttgtaattttggtagagacgaggtttcaccatattgcccaggctggtcatgaactcctgacctcaggtgatccacccgcctcggcctctcaaagtgctgggattacagacatgagaaattgattatttgagtatcctgctcygccattttccatgaagtaatttgtatatatgct

SEQ ID NO: 726515 - DNA, 809 bp, Homo sapiens
tgcaccccttttggccccatatccctggccaaccaggctgctagacgaccgtgggcctgcagcagccctggctgtgtggcccactcaggttgtggggcagttggagactctgagggagcatcaggactgactcctggtggcggggtggggtctgggagggagatgaagcacagatacttgggtttgcttcaggactgtctgacctgatgagaggcaaatcactggacggtgctagaaagcacacccaggagctgtgttctttttctttttgagatggaggcttgctctgttgcccagactggagtgcagtggcacgatctgggctcactgcaacctctgcctcctgggttcaagtgattcttctgcctcagcctcccgagtagctgggattacaggcgcccaccaccacggccggctcatttttgtattatttttagtacagacggtgtttcaccatgttgtccaggctggtctcaaactccagacctcaggtgatccgcctgcctcggcctcccaaagcgctgggattacaggtgtgagccactgtgcccggctgaagctgtgtgttttctaattccagaagctcygctgctctctcgctgccatttctcccgacccatcagctaacgtgtgaacttttaaaactatgcctttcgataagacattgaatccctattgataaaaatggcgtggcaagagttacattttgatctgttctcagttattatactttagtgcatgcaaataggttctgttcttttttttctgtcgcttcttttaagagacggaatcttgctctgtgttgccca

SEQ ID NO: 726516 - DNA, 1391 bp, Homo sapiens
tgaagatgaagaagagcctgaaaatgctaaagaggaagaatgataacagcttgttattggcaggacaaaggggcccaaacaaaggaaggcattgctatggtttgaatgtgtgccccaaagttcttgtgctgggaacttgatcctcagtgtcgtggtgctgacaggtgaagcctaatgaggggtgtttggtttatgtgggtactgccctcatggacaaattaatgctsctattgtgggaggtggttccttataaaagggtgagtttgtccctcaccacctcttcttggccttctgccttcctccatggggtgacacagcaagaatgccctcaccaaatgccagaggcttgaccttggacttcccagcctccagaactgtgaaaacataaatttctgttcatgataaattacccagttttaggtattctgttgtaggatcaccaaatggactaacacaggcatgcagttcaaaccactttttattttaaagtgcagccccttctgggaaaatgaaagcattgtgtggtggtttttttttttttttccttttgtcttgttttatagagatggggtcttgctatgttggccgggcttaactcaaacttctagcctcaagcaatcctcccaccttggtctctcaaagtgctgggattacaggtgtgagccactgagcccaccctgagagcactgttaatgaagtggccctctcttcttttatgacacctagattgaaaggggacataactgttacatccagccagaaccttcaactctcaacctgcagccataatatcattaagcctcataaaattatgaatgctcaccactccttccaccattgccagtttccaattttaaaacaagtaaaatactcctttcaggagcaatatttcctccacttttcaggggttggtgtctatcttagacagaagggagctggacttggggttaaatgacctgcaagtactaatttttaggaaagtgaaatgctccgagcctcagcttctatcttggtaaaatggggataataatatttgtccttcctaccctcaagttgctgaatgaaatgatgaacatgaacatgctttgttagtattattcttgctgtgtgttcatgttgttatctgtgtggaaggctcttctttcctgctctacccagccaactgctatagtgccttcgagaccctgttaatatgtcacttcttctgctgtttcttgacttctctccagggctttcaggacattccgtttctatgtttctagctgttattgcacctaccacattgtgttgtcattgtctatttacatgttcacctctccaattggactctgagttctttgagctcacagccagtgtcttattcacttttttccctatttttctttctttcc

SEQ ID NO: 726517 - DNA, 943 bp, Homo sapiens
ctttctagaaacagaattgcaataccacacatggtaagcatttaacaaacgcctgttgagtgaatgggtgaaaaatagtaattcaatgtaccgtcaataaacagttagagaaagtcttgaaaatattttaagtggggtgtggtggttcatgcctgtcatcccagccctttgggagacctgatgtgggaggagcgcttgaggccagtagttccaggctgcagtgagctatgatcacatcactgaactccagagtaagaccctgtcaacaaaaaagaaaagaaaagaaagagaaaaagaaagaaaaagtaatttagttatggtggtaaaagaattgaaagaaagaaagaaagaaagagaacgaaagggagaaaggagggaaggaggaagggagggaggaaggaagcaagcaaggaaggaaggaaggattttagttaggtggtaaaataattgactcttcctctgcctccacacagcctgcaagcagcagctggtgcccagcgtgcaaatgtatcactaccagcaccagagkttaacagatactacagctggagctgcagaaagagcctcctgaggagctggactctgcagatgagaatgaaagcagtgactttatggtgtacaggtgtccaggcgtggccccgaacagggagatggtggtgtgcaaccctctttttggccacttctcgctgtcagtgcctctgctgggcccacgcccactgccccactgaagtgacccccaaggctgcaggacacccacctgctccatgagtggggagaggcagggcccacgcttctcattacaaaaatatgttctgacactctgagtacttgtggctgggctggagaggcattgggccctgggatctcttgccagggagacaacccccctgcaactttgtgctaggtaatcttctgtcccctcttgtgtctcttctttccagtc

SEQ ID NO: 726518 - DNA, 1365 bp, Homo sapiens
gacaagcaaaggagagtgttaaccattgaaaaatctattggttaaagaactatgaaaggatatacttcaaaaaggaagagacagaacccagaagtaaggaattggagatatgtagaaatagaaaacaaaagaactggtaaacatgttggtaaatcttaacaaattgactctataacataatagtggtgatggctgattttggaaacagcagggtagctgcagttaaagcattccaaatccttacactgtttgtaagaaggagaaagatattgatcaactttagactttagatttgatgtcaactatgcatggtgaatttttaagggaatctatgaaagagaaaaacaaagaattaagataatgtatttaagggaatcagagacagagagagaatattatactgagtggtggtaactgttgagtaaaagaaaaactgtaaaaagggaataggtagtaatggttagtgggaagactggtaaacaggaaaacagaacataaagaaaactcagtctgatagaatttttttgagcattacaaaaaatcagggaaaataagaaggtagaaataaacctaaaattatcaataaacaaactaaacacaaagataagatttttttttaattacaagagatattcctaaagtacaaagacaccaaaagtttaaaagtaaaaatataggaaaactacttttcaaaatccagctgattgagctatgttaatactaggcaaatttgtaagtaaaaatattattacgagagttcttacataatacgaaaggagcaattcaagcaggaagaaataaaaattataatcttatactcaccttatcatgatctaaaatgttcttaaagcgaaaaatgtcagagagaaggagaaataagacaaatctccaaacttttttcagtgattaagcagacagaaaattaggaaaagtacagatgtggacaatacaattaacaaggttgatctaacgaacaaacaragaacactgaacccagagcatttagagagtatgtatgtttttcaaacagcaggcgtcaggtataaaaactgaccacttagttggtcacaaatcaagttcaacaaattccaaagaatctgtataatacagacaacaatgcagaaaagtgaccaatcagtaagtaaaagataacttaaatacatatatatttggaaaatttaaaatacacttttaattatcctaaaatattataaaatatctcctaattatgattaggagaaatagtgaatatttattaagacttactgtcaaaggagaaataattctgaaaatatacaacatttaggactaaatgaaaattccccatatcaaaacctgtggaaaggaactaaataattttttttt

SEQ ID NO: 726519 - DNA, 1687 bp, Homo sapiens
  misc_feature 414, 415, 416, 417, 418, 419, 420, 421, 422, 423, 424, 425,426, 427, 428, 429, 430, 431, 432, 433, 434, 435, 436, 437,438, 439, 440, 441, 442, 443, 444, 445, 446, 447, 448, 449,450, 451, 452, 453, 454, 455, 456, 457, 458, 459, 460: n = A,T,C or G
  misc_feature 461, 462, 463, 464, 465, 466, 467, 468, 469, 470, 471, 472,473, 474, 475, 476, 477, 478, 479, 480, 481, 482, 483, 484,485, 486, 487, 488, 489, 490, 491, 492, 493, 494, 495, 496,497, 498, 499, 500, 501, 502, 503, 504, 505, 506, 507: n = A,T,C or G
  misc_feature 508, 509, 510, 511, 512, 513: n = A,T,C or G
aaaagctcatcaagcaacgccctaggtgggacctgaggtttctgcacctatccaagtgttactggtggtaaaaagttataatgagatggcgggacacagcctttactcactgcttccacaattatacaattttgcaaaaggcattatggattatctgtaaccagatttggctatgggcataaatcatatctcaagagtcatacttgtagaatttctcccattcatacatgatctcaacacgagtttcatagaaatcatctgtttaaatctagcaaaacaaatagtaccacctgaagtcttctagccatgagaataattaggctctctctctctttctctttctttctctctctctctttctctctctctctctctctctctctctctctctctctctctctctctctctctctnnnnnnnnnnnnnnnnnnnnnnnnnnnnnnnnnnnnnnnnnnnnnnnnnnnnnnnnnnnnnnnnnnnnnnnnnnnnnnnnnnnnnnnnnnnnnnnnnnnntctctctctctctctctctctctctctctctctatctctgtctctctctcagggataccagctccctatccatggcaggctacagagtccactgagtaaaagaatatggtgccctgaagccaggctctaatgtggtgctgagctttagacacagagaatttgctgctgaattattcaccaagaatcaaagtgctatcagatacatgtaggatgattggaaagagacaagatagaagcaggggcttgttaggactggaaggcagtaactccaaatgagatggttccttcagtgctgatgaaacaagcctgggacacaatgggcagatgaatgcagacacagcaacatctgcagagaactactgacatcctgtcacaaccataatgtgctgacagtgtacaggatcctcaggcatcagtggagcctggtagcaacagaaaaagtaaaagaaacatggaaggacaagatttgtctgctgaaggggatgaatgaagatgaggatgacctactaaagacagtcgtttgcctatcggcttggaaaagtcataaattgaattgtcctgtccaagggtatcttacaggctacctagcaggcaaaggcttgcccctccaagagggattatgtacccgcgtagcttcgtacaactcgcaataatgagataaatgtctcttggagcaaagttactagaaaatctgccctttccctcagggttttggttggcagacttcagatgcatgaaatccagggacctgtgtgaaatgtgattcattcttaggctaaaaaagtcaagaggctaaaactcaacatttgagctgtcatatttttctagagaatgtcaaacgagcttaatgataggccaaaattatccagtcggagcaccattgcaagtcacccttggatagactcaaataataaatcaggcaggcctctctctctgctyctcattcttgccttcattggaaatgcagggagaaagggcatcccagttcaacagtaagtccaaagcaatcatcttcctataatcgatgacctaaagccatccagacctgggattctccatttggagcagtctctggagcagaagccttttaatcatccttcatgttcaccagctgccaaatctgctggcccaggtccaaatgatacaggactttattgccctgtattttattgta

SEQ ID NO: 726520 - DNA, 597 bp, Homo sapiens
aagttaaggaattttctcaatatcataccactacaaagtatcagagatagatgatctcagatcatctgctccattgaagggccagttttcgttaatatgtccaataaggttttttttctccttatttcctctatctctacataactaacatttgtgaatggccttctataccctcatttaattgatgataaatgcacaatatggtctccattaaccagaactcaagggattgtgaccttctgctggtgtcaatccctttgctgttccagtttctgttagatcatcctaaaatgtatcatttagaaattttgccttagtaggtacaggtcagtgaataaaatttctactttgatgatttattgcttttcagagcccacggggaaaatcagktaccactgtaaaacatagaaaaagataaactttttcaggtcatttatgagttcctcctaaaagcaatgttcaggaaaatattaagttaatcaaaacatcatataatattttattgatagcagaggccaaatgtttaattttatgtatcttcagtacatagcaacataacttccatccagcaggcaattggcagattgttgtggcaag

SEQ ID NO: 726521 - DNA, 425 bp, Homo sapiens
cttcagtgggaaggagcttgcctgactgttgacaaaaatctaaggtgacgcaaccttcrctgggcttattgcttgctcaggtggcagcctggctgtgctgttcccttgggactgggatgagggacaaaagccccagggtgatgaaagggtccctgtctctgagccaaaaggcaggtcacggtgtcctgcaaagggctggggcacggcttttgtggtgagcacgcactttgccattgagagaacactgtacaatagagtaggctacagggaaggcctcttctcttccctccctgctcaggcagttggcaaagatcaggcaagggctggcggttgccttcctctcatcatggccccatgctggggtgagatggggcaagggagcccctcccccattctcagcaaggcaccccaggtgcaggcttgta

SEQ ID NO: 726522 - DNA, 2230 bp, Homo sapiens
caagtatttaagtatctgtttttaattctttagggtttacatgtagaagcagaattgctaggtcatatggacatcttgtttaacttttgtggaactgccaaaccaactggctacactattttacatgcccaccagcaatgtaccagggttcctattactccacatcatccccgacccttgatattttcaattttttaaaaatcttttttctttttactttccttagtctttcctgtgtcgtatctttttttttttttttgccttgttaaagaacctagcttttagttttattcatcaattccatattaattttttttttttgagatgaagtttcactcttgttgcccaggctggagtgcagtggcgtgatcttgtctcactgcaacctccacctcccgggttcaagtgattctcctgcctcagccacctgagtagctgggattacaggtgcgtgccaccacacccaactaattatttgtatttttagtagagatggggtttcaccatgttgaccaggctggtctccaactcctgacttcagatgatttgtcggccttggcctcccaaagtgctgggattacaggcgtgagccaccacacccagccttccttttgggaaaatttatattgttttcctcccttacttttttttttttttttttttttttttgagtctcactctgttgcccaggctggagtgcagtggcgcgatctcggcacactgcaagctccgcctcctgggttcacgccattctcctgcctcagcctcccaagtagctgggactacatacaggtgcctgccaccacgcccggctaattttttgtatttttagtagagacagggtttcactgtgttagccaggatggtctcgatctcctgacttcatgatccgcctgcctcagcctcccaaagtgctgggaatacaggcatgagccactgcgcccggccccccttattttcttaagttaaatgtttagttcacttatttataattcttttttttttttttgagatggagtttcactyttgttgcccaggctcgagtgcaatggtgctatctcagctctctgcaaccttcacctcccaggttcaagtgattctcctgcctcagcttcctgagtagctgggattacaggtgtctgccaccatgcctggctaatttctgtattgttaatagagatggagtttcaccatgttgaccagggtggtcgtgaatttctgacctcaagtgatcctcctgcttcggcctcccaaagtgttgggattccaggtgtgagccccgtgcccagccttataattctcataaaagtcttaatttcaccaataacatttctcttttgatggccaagtgaggtgactcatgcctataatcccagcactttgggattccgaggctggtggatcacttgaggccagggcaacagagtgagaccccatctccacaaaaaataaaaattagccagtgtggtggcacttctgtagtctcagctactcaggaggcagaggtggcagaatcacttgaatcgagaaggttgaggctacagtgagacatgatcacaccactgcactccagcctgggtgacagagcaaagaaacataaaataataaaacatttctctattgatacaacggaatctgattttctaaactcaattcaatagcactttgttctactgttaattgaaaaactctctctaaagtgagatacgttaggctgaggtcatttttcctttctgttgggtgcatggtcaaaaaattgacatatgaatcaattattctttcctagtggtcatttaggtattattaggtcatttactaccaactctaaagcagtgacaccatggagagcacataaaatccatagagctaggtcccataacctctctgtcagtctcctctccttgctactccccctgtgtttcagtggcactttctagctaagattcagtccccttttctccagatggtggtgctacattcccatacctgtctccagagtatctccctcaaactcatttagatcagcccaaccttggaaaatgccaaaccgggtcatgctcttttggcctaatattctttcccacagcagtaggagttgtgatgggaaaaaaagaaaagatggagggtgggctttctcagtgtctccagtattcaccacatcaccccaggggtactacctcaagcatttattgaataatttttccaaacaaggagatttcctgtgagggat

SEQ ID NO: 726523 - DNA, 680 bp, Homo sapiens
accccatgactgcacaactggtacaggaatctccccaccaatgccatgatgcaggaatgcactgctattactcttattatgtgatgaggaaactgaaggtctagggaagttaaggtgacttgcctagcaacttcaaatggcagagccctgatgtgaagccaggtccatctactcttttttttttttttttttttttttttttttgagactgagtctcgctgtgttgcccaggctggcgtgcagtggcacgatcttggctcactgcaagctctgcctcccgggttcaagccattctcatgcttcagctcctgagtagctgggattacagccgcccaccaccatgcccggctaatttttgtatttttagtagagacggggtttcaccatgttggccaggctgatctcgaactcctgacctaaagtgatccacccgccttggcctcccaaaatgctgggattaccggaatgagctaccggcccagccctcatttgtttttaagggaaatgctccaccacgtttccttcacatgtttatattaacaatatgtcaggacagaacagacttaagtcccagtgctgtcaggttggagctgaggtgggacaagatgggtgaggaattcaggcatggggcagtcctggtgaagtctcccaacatgccactgwtcagccaccagctttga

SEQ ID NO: 726524 - DNA, 964 bp, Homo sapiens
caagaccagcctgggcaacatagtgaaaccctgtctctactaaaatacaaaaattagctgggcatgatggcgggtgcctgtaatcccagctacttgggaggctgagaccagagaatcgcttgaacccaggagatagtggttgcagtgggctgagatcgtgccactggactccagcctggatggctgagcaaaactccgtctcaaaaaaaaaaaacaataaaatttgcaaaaagaagctcataattctcattccaagactgtttcaaattccaaatacatggatccgaaaatgtcaagctctcttaaatttgggtactgtctgtgagaccagttagtgaggttagtctttctgttccatctgcccctctctctgcctcccagcttagccttgattccatcacatgggctggagtgggagcctcagaggaggctggacttccctggtrtgcttgcagctaaagtcatcactttggtgagcatgtttcctgaaggaagaatgacatacgagttcaccaatgacaatttctctacatggagtcctgtgggcagtcaaaaacacaggcccaccatgtaacttctaaaataatgaattggtaatactggatgtcagtgaaagcaaaccaccctgatgagatgaatgctggcaggcatggaaaggtctagccatcccttctcatcagcggacggctggtctcatcaggacacagctccccctcttctggccctaagggaacctgatctcccagcagatgaggactgtgaatccgctcctggatttggcaaaattgaggaggtttctgtggtgacctgggcaaaagcctgattagagtaagcttagggaaggattggaggacagagaattggagacagtgagaactcacagctttttcaagaatgattaaagaaatgagaccagactgggtgcggtggctcacgcctgtaatcccagcactttgggaggcca

SEQ ID NO: 726525 - DNA, 964 bp, Homo sapiens
caagaccagcctgggcaacatagtgaaaccctgtctctactaaaatacaaaaattagctgggcatgatggcgggtgcctgtaatcccagctacttgggaggctgagaccagagaatcgcttgaacccaggagatagtggttgcagtgggctgagatcgtgccactggactccagcctggatggctgagcaaaactccgtctcaaaaaaaaaaaacaataaaatttgcaaaaagaagctcataattctcattccaagactgtttcaaattccaaatacatggatccgaaaatgtcaagctctcttaaatttgggtactgtctgtgagaccagttagtgaggttagtctttctgttccatctgcccctctctctgcctcccagcttagccttgattccatcacatgggctggagtgggagcctcagaggaggctggacttccctggtgtgcttgcagctaaagtcatcactttggtgagcatgtttcctgaaggaagaatgacatacgagttcaccaatgacaatttctctacatggagtcctgtgggcagtcaaaaacacaggcccaccatgtaacttctaaaataatgaattggtaatactggatgtcagtgaaagcaaaccaccctgatgagatgaatgctggcaggcatggaaaggtctagccatcccttctcatcagcggacggctggtctcatcaggacacagctccccctcttctggccctaagggaacctgatctcccagcagatgaggactgtgaatccgctcctggatttggcaaaattgaggaggtttctgtggtgacctgggcaaaagcctgattagagtaagcttagggaagrattggaggacagagaattggagacagtgagaactcacagctttttcaagaatgattaaagaaatgagaccagactgggtgcggtggctcacgcctgtaatcccagcactttgggaggcca

SEQ ID NO: 726526 - DNA, 1500 bp, Homo sapiens
tgaaaagttgaaaacatcacatgctcgctggtaaaacagtggaaaagctgagatttgaacccgggtctgaggcgaaagtctgggctgtttcccagagcaccacatcacctccttcctgtccaccccacaccaccattaccgccccaccaccattattaccactcagctgcccactttgtaacaaatcctctctgtacagccctcayggtcccgcaggtggtcttaacctcccgctgaatatcagtcctacctccactcccaccttggcagacttttttttcgagacagggtctcgctatctcacccaggatggagtgcagtggtgcgatctcggctcactgcagcctcgacttcctgggctcatgtgattctcccacctcagtctcccaagtagctggaactacagtcgtatgccacctcagtctcccaagtagccagaactacagtcgtatcccaccccacccagctaattttttgtatttgcagtagagacggggtttcgccatgttgcccaggctggtttccaactcctgagctcaagtaatccacctgcctcagcgtctccaagtgttgagattattggtgtaagccccgtgcccagccactggtggacttcaaatcttcaaaggaccagcagatctggagggtgatgcagcaataccccacaggatccctaagcaggactccaggtctctgctgcatccctactgggtccagcctttggcatgctcaagaatactaatatcagtttgtcacagctaacctgacgctcacctcatcaggaaaatccttggggtggggagaggtaaaacggatcctcatttcaggatctactctggagacctgatccagaagatgagcaaaacgaagtcctccttgcttggttttatagttggtggtaaagccacgactgagattggtaggcactgcactgttgaactggacctccgaattgtcccgaaaactattaacattctgaccaagaagtgtcacttctttcagcccctaaacatgggaaaatatattggaattttaaaacttttgggtagcttcataaaaaaacactaattaaaaattagctgaaattaacatatcttttgttttaaacaaaagaaaaatcgaacctaccaagagtcacctataagtgtgttgtgtctataaccgaataatttcaagcttagacatcttacctaaagagctaaacctaataaagccttatataaaaattaatcttcaaaacattatttagaatcaaaactggaaacaaactcaataatccacaataatggttaatttatgatagatctgtcatttgaatgttatacaccatgactatataaagtattctcaccagaaatatttaacctgaactaatcaagcttttacacctaacttccagttactagaattcacagagatatattaaatgacaacatgaggaaaaaatcagacaaaggagactcatgtctgatctcttcaaaaagttaatgcatcatttaa

SEQ ID NO: 726527 - DNA, 896 bp, Homo sapiens
agtgccaacctgctgagttttatgctgagtgggcttagagagcctgctggtcccatctcctaatgatgagaggtggaggcacaggagaaggtaaacaaatggcaaagacactgaaatacatgagaaaatgagtccaacctgaactttgactttggtgggtggcccacttatcccactaactaccatawcttcatttcgtctgctttttgcaaagaacagacaattccaaacagccaagcctaacaagtagctcatcttagcttgtggattcagagcactggtggcctctccacctccaattgacaccagaaaacatataaatacctctaaacatgccttgggtatttgtttttctaattgcaaatattataccataacttagtttgaaggctttgtaaagaatatgccagaaacatctaatattagccctaaaaactagggcaatcttttttttaacagaagagtgttcatataaacatcaaaagatgtgatgagagtagtttcaacttctaatcatagaaattatagggctatttcatgaaagaggtgctttatcagctcatcttgagtgaatgttaaagatgaagatatggctagtatctccagagtctactgtctcagagaggtagcccaaagttgtaagactgagtgccttgaggtagggaacaggaagcaacagggtctccaggttcactgaggagtactgacctgcaatgcgattcctacatcagcaaaggtcttccttccatcgttagaggactcctggatttgctatgcctatcctgatggcttcctacatgagaccatccattcacacttggcccttacccaggcctgaaattctccccagttgcactccacccacttatgtctatcacttagctcaaagccagtaa

SEQ ID NO: 726528 - DNA, 896 bp, Homo sapiens
agtgccaacctgctgagttttatgctgagtgggcttagagagcctgctggtcccatctcctaatgatgagaggtggaggcacaggagaaggtaaacaaatggcaaagacactgaaatacatgagaaaatgagtccaacctgaactttgactttggtgggtggcccacttatcccactaactaccataacttcatttcgtctgctttttgcaaagaacagacaattccaaacagccaagcctaacaagtagytcatcttagcttgtggattcagagcactggtggcctctccacctccaattgacaccagaaaacatataaatacctctaaacatgccttgggtatttgtttttctaattgcaaatattataccataacttagtttgaaggctttgtaaagaatatgccagaaacatctaatattagccctaaaaactagggcaatcttttttttaacagaagagtgttcatataaacatcaaaagatgtgatgagagtagtttcaacttctaatcatagaaattatagggctatttcatgaaagaggtgctttatcagctcatcttgagtgaatgttaaagatgaagatatggctagtatctccagagtctactgtctcagagaggtagcccaaagttgtaagactgagtgccttgaggtagggaacaggaagcaacagggtctccaggttcactgaggagtactgacctgcaatgcgattcctacatcagcaaaggtcttccttccatcgttagaggactcctggatttgctatgcctatcctgatggcttcctacatgagaccatccattcacacttggcccttacccaggcctgaaattctccccagttgcactccacccacttatgtctatcacttagctcaaagccagtaa

SEQ ID NO: 726529 - DNA, 651 bp, Homo sapiens
tctctttctgtctcatacacgctgagttgcacccaatccctgggcacgcctccaatccagccccctgcttggcatgacatgcctccctctctaggacctatgagtacaataatttcaagtgcctctcccctagagtttccctagccaggctggagtgatccttgaagaccccaccagaggcacttccccatttacaacacagacgtttgctaagatattggcctgtgatttcaaccactgtcacttctgattaccccctgcctttagcaaattagttgcaggagaaaacttctgccaaggataaccaagaacatcacagtgctggtgcgtcgaaacatgtagagaatgagttggaagattatgacaaatcaaagtcacctttcagatcaaaggtattgaatctgagaagagtgtgtcactaaggctcacaggacctgagactattttagagcctgatttggggtgcataaagcaggcacaggtgacccttgaacaccacgggttggarctgagtccacgagacacagattttcttctgcctctgccacccaggagacagcaagaccaacccctccccttcctcctcagccttcctcaatgtgaggaagatgagatgaagatctttatgatgatccacttccagtcagtgaa

SEQ ID NO: 726530 - DNA, 959 bp, Homo sapiens
tgaactgattatgaaaaacaattttaaacaaaggctgtgtttaaaaggatagttttgttagtttctttttcagcagatactttgcaacatcaattttacaaagatcctttctttgaggaaatatataagacaacattagagaagcactcttaacagattcattaattaggattctttttacattcctaatgcttccttttcattaaagtcattggtgataatttaggaaaattgcatcttcgaatttaacatgtcttaaatttcctagctttgtctcacacaaagtcattttcatctcctgatttctttaatctgaccatggaataggtcttaaatgatcagataattatccttccaaaatgcatgagtttattcttcttggaacatttctcttttgtatttttagtcttttttggtctgtctgtgtctagtaaatgtcttatgctgttacattggaagattatttgaagtaaatatgttagtctctattaaagtagacataaactgggaggtcagatagaggtctgagagaccatggcctttgtggcttcattcatttaatctcatttctggtcacattttagggaacactcatctcagctgaaatactagaattgcctcttacggagttaccttgcatctactcttgcttcatctacaatatcttttccacatggtacctagataaatcttttcaaaatataaattttgattttagacatttttcctccacttctttgtatatattccctttaaccttcagtggcttcctattgcctttagggcagagacaaaggtcctctgcatggcctgcaaggtttcctggtctctcccctgcctgttkatgccacttcagtttttgctgctccctgtcacttagtgcacacatgagcatcctcctattttctggaatatggtatgccttcttctgctagaagacctttgatgtgctcttcctt

SEQ ID NO: 726531 - DNA, 435 bp, Homo sapiens
cctyggcctcccaaagtgctgggattacaggcgtgagccaccgtacccagccaggaatgttcttaattttatttgagaatttgaattttctctattaaaattaataaaatgtaggctgggtgtagtggctgatgcctgtaatcccagcactttgggaggccaaggttgagaattgcttgagcccaggagttggaggccagcctgggcaacatagcaagagcccatctctacagaaaatgaagaaagaaaaataaataaaatttaaaaggttgaaaagatggcatttaaaaaataacttttgctataaagtaatagctgctagctgtactgtttagaaaatataaaaaggaacaaatgcaaattatccttaatgttttcacttcacaataacctttttgttttttgatggccttgttactcttttttatgcgtaca

SEQ ID NO: 726532 - DNA, 1081 bp, Homo sapiens
taaggacaccctttttatggattactgctttcttaccataatatcccaagatctattttgctattcccattgattcctggggatacttaattgctaagtcaccagcccctggtcaatccttgctgctctctgtcctctctgagaaaaagcaacaaatacagaactcatccttgcttctttcatgccctccttggaatccttcaataataatccaaaccttgtgaaagctccttactttctcttttttgaagggcatttctcattcctctaattactcttcctctctgtgagtcaataaagctgattttgcaggaataccagtttgtcctggtagtcttcagctgactaggctttaacgtcttatcagtcaatgttttaccagagaggagtggaaaagtgattttctggtgttactgtttcaatttttgattatggattctactatctataaatatccatagatgctgaataccaccaaagaaagtattacaagaacatgttaaacgaaaaacatcagccaaaataaatttaaaagagtttaactgagcaaagaacaattcacaaataaggcagcctcttgagccagagtagtcttagagactttcgtgcagtggaagaagatttatggacagaaaaaggaaagtgaaatgcagaaaatggaagtgaggtacagaaacagccagattggttacagctcagtgtttaccaaatttgccttatttgaacagttggccacctttggctaaaacttggtgattggcagaagagtaagctatagtctgtttacaatttcatttaggttatagtttatgatttacaaagaaacctttagattgaatttaaaatatgtaaggagggagactgactgagaaaatggtagataggaggcaagactaacttgcagctcccacttggatggacagagcagcatgtagagacacaccatgaattttcgctccaagaactaccaaagtaacataccargaaagctaagacaatccacaggccctttgaaggaagtggattgctgctgcaggctccaggagacagccaaaaaactgtgagtgccccaagtgtgaaa

SEQ ID NO: 726533 - DNA, 1134 bp, Homo sapiens
ctggcctctctacaccattttactcattctgccttgggaaggtagagtgttttacttcaaatacgtattgatatgctccattgttcttatctacagagaatagctactattaatttatttcctgaatagtgtatattacacaaggtcctgtctctccctgggacatatgcagctatgagccattaatttcagagtccttaaactttggtgtacttgttagatattctaaatcataaaacaaaaatggtaatttagggaaatgattaaggctacttctgtgcagaggatgtatggcattgaaccttggattttagtatgtgggcagagtcttttaaccttaggagaggcttagttttatccaggtgatatttttacagttgaacatttggtttttattcctgaggcttgggaaagatatttaaacaagctctgtagtaattgcagggacctaagcaaaggcatcaccttaaggaaagatgcctatagtttcaggagaagggctagatatctctaggcttggtagtgatttggacctaagaaagaatccataaagggccacttagggcatttcaatgctctgcaagacagaccttgtggggcttaacagccagtagaacccagccgaggactgataaataaaggctggcagctgggggcttagcaaacaaaaatcatggaaattgaaactactctctgaaaacgtgaaattacttgtgaccctgcaggctaacatctgtaactttagttggtacaggttgcttccacatgcatgctttctctgcttatttcacaagattatgttaaaccctctacatcttcaatgtattttcctaaagttccttttcatcttcttatgctgggtatgcctcaaatatattgttccctttagtatgtctctcagctgaaggcttttagacagccacaaaaacagtgagtgtagacttctccattcattactgcrttttcaaaacttttatcctttttttttctacaaaagattccatttcactggagcacacgatattagactataccaccttctatcttacatgctatcccagcttcttgttctctctcatttagactataaaacccttggaaactggaccataatattcctctttacctctattg

SEQ ID NO: 726534 - DNA, 1365 bp, Homo sapiens
gcacagggggcaagatccttacttgaataaacacctttttggctcacagtgtgatgccttaatatcatctcttttaccagaactccaaaggggaaagtttgagtattttttgtgtgttttgtttttgagacagggtcccattctgccacccaggctggagtgcagtggtgtgatcttggttcactgcagccttgccctcccaggatcaagcaatcatcccacctcagcctcccaagtagctgggactacagatgcacgccaccatatctgaccaatttttatagagtcgggatttcgtcatgttgcccaggctggtctcaaactcctgggctcaagtgatctgcccgcctctccctcccaaagtgctgggattacagatgtgagccaccacacccagcctgttttacttatcagtgaatttgaaaataagtatgacttatgatggacatataattacttactttaaaagctaaaatatagtattaggatttagagtttaaaactattccatttagtatgaaaagtgaacaaaattaatgtcctaattatataaaaaagaaaatctaaattgttcatgagaacgattgcaatcagctgctcttcataatgcaaacctgagtgaaggatgaaatacagaaaagataaataaattttatcttgtcttctttcatttatttttattattagatccagagagtgagattgggaaaagtataaaaggcagccctttgatattttggcttagtaacaaacggacctgagtttagccacaggctgcctcttactgtgtggcacgtaggaattgggttagtggctctgaacctcaatctttctactattaatgattccacacatattgcacactacatgcaagacttcaaagaggaaactgcacagaagggtggaaagaaagacaagagaagaaactttgtgttcgttctcattttgttcccctctcacccaactcattaaagctcctactcatccttcaagatccagtctaaatgttacctcccacatgaagccttctcaaattctctgccaccccttcccagttcctcagcacttttcttttcattcttttttgttttgttttgtttttgcccaccctataytgcctagcatagtgattgagacaaattaattactcaatgtaagacctttaaaatctgctcaattgccctttttcaagaaatgcctaatatggatttggaaaaatatctaaaagcaaatacaatgaatcatcattgcataaggttctggtattttttacgttaagctgagtactatggaaaaatccataaatgcacagatatcattgcagacagaatagatacaacacaaaccaacacttttgtcccatat

SEQ ID NO: 726535 - DNA, 511 bp, Homo sapiens
tgacagcccttcagagctctgaagacagcaaactcagtctgccttctcagcattcttctaactctaccaaactggatagcctgaaccttataaaggatcaagaacttaacagaagcccccgcttgtttcattaagtaactgccatctaccccttggtaagcaaaaggcagagtttgaaatttttcatagatttatacagaaagcacagccttcaaccttttcctgacaatgcctaagartgtgcctcaggctagcctgaagaaaatgaggcaaggggactaatctcttatttttctttttttttttttttttttttttttttgagatggagtctccctctgttgcccaggctggagtacggtggcgcaatctccacctccgtctcactgcaacctcggtctcccgggttcaagcgattctcctgcatcagcctcccaaatagctaggattacaggcgcccaccaccacacctggctaatttttgagacagtctcacattgtcgcccaggct

SEQ ID NO: 726536 - DNA, 611 bp, Homo sapiens
ttttttttttttgagacagggtctcactcagttgcctaggctttgtagtggtgggtgcgatcacagctcactgcagccttggcctcccaggctcaggtgatcctcccacctcagcttcccaagtagctgagaacacaggtgcatgctaccatacccagctaatttttgtattttttgtagagatgggatttcaccatgttgcccaggctgatcttgagaacccctgggttcaagtgatctgcctgccttggcctcccaaagtgctgggattacaggcatgagccactgtccctggcctttactgtatccttgagaagtccttcctctgattctccatgtcttcatctcctgttcattcctgaattcaggtcatctggctcaggattaaccattccactgaaggagctctccacattggtcaccaatgatcttcatgtccaccaaatccaaaagtttctgctgtggatatcagacaayatgaatataaagactatggtaagtagtggatgctcaataaagtggttgttcttatattcttatttgctcacttctgtttttttgttttttaaaaattattatttatttttgagatggagtcttgctctgtcgcc

SEQ ID NO: 726537 - DNA, 671 bp, Homo sapiens
tttccatcacaagtaaatctgttgattgcttaccgagaacccagttgtactttctgtaaaaagaataaagccatcctgtaagaaattaataaatagaaaacaacccataatatctgtcagaggagagtaggttgcaggtttactgtcatgaaatgcagtccacaaacaaaagaatcaagagagaaaatgatgaatggccttaggaatagtcatggtttataataaagattttattaaaaaagtgttaaaataaataatacatattccagaacatcactgttctgagaaatcacttccctttagaatatgagttctagatggcagatctacttacaactgctctgaggtctttcactagctgatttataatcctatattwaaaaaaaatctatagtctgcagtcttttgacatacttctcaagggtggatatgtggtggaatgcagactccatcaatatgtgtggttttgtttgctttttgtagcttaactgctgtttagaaatcccagaggaatatgattgaggccagagttacattggttcataaaattcgaacagttgaagctgtttttgttaattgctgggccacaaccagaaatccggatgatgggagagaaacacttctttaggataatgattaatttccataaagatgagtgctttaacaaattt

SEQ ID NO: 726538 - DNA, 665 bp, Homo sapiens
tcaaacaaaaatgaaaaactttcagaagttcagaaaattgtttaagatcataccttttgtaagtgaagattttggattagaatttagaagtcatgtttctaacttctcaatattgccccagttttgataatagaattttagatgcctgtttgaataaatttttgttggctttaaaatacaaacagaagaatgtgttttgtcactggaatyatagtttccaccaaaagcccaggaaaagtgtttggaataaaaacaaaatgagaaaagtatgatgttttaaaatttcacttctctagaatattttattcatgaaaactatgtttttgtgctccaagacaagccaaatgaatgcatttttaaatttagatttccttattcagcatacccctttgatatgcaataatttcctttataattcaatgaatgttaataattacatacataacaatctgaccagatgtttgcattagctgtaaggtaatagaaaataacaaaaatgtggtaataacgcacttatatgaaaataacttaaactatgctagttattttatgaatgaaaaagatttatttatgaagtcaagaaaagggagattatctttccctaccagtttcttagaggatgtaaattttgtaatctaaatgacttaaagaaatcctgaaaagag

SEQ ID NO: 726539 - DNA, 665 bp, Homo sapiens
tcaaacaaaaatgaaaaactttcagaagttcagaaaattgtttaagatcataccttttgtaagtgaagattttggattagaatttagaagtcatgtttctaacttctcaatattgccccagttttgataatagaattttagatgcctgtttgaataaatttttgttggctttaaaatacaaacagaagaatgtgttttgtcactggaattatagtttccaccaaaagcccaggaaaagtgtttggaataaaaacaaaatgagaaaagtatgatgttttaaaatttcacttctctagaatattttattcatgaaaactatgtttttgtgctccaagacaagccaaatgaatgcatttttaaatttagatttccttattcagcatacccctttgatatgcaataatttcctttataattcaatgaatgttaataattacatacataacaayctgaccagatgtttgcattagctgtaaggtaatagaaaataacaaaaatgtggtaataacgcacttatatgaaaataacttaaactatgctagttattttatgaatgaaaaagatttatttatgaagtcaagaaaagggagattatctttccctaccagtttcttagaggatgtaaattttgtaatctaaatgacttaaagaaatcctgaaaagag

SEQ ID NO: 726540 - DNA, 1646 bp, Homo sapiens
tattgcactttcccctaagccttctcacctattagctttttccttttgctatgcaaattatttaatataatagaccaccttatctgcctttattttcacaaatctgatgtactttccagcatgtattatgaaggtactggtttcatcctacttcttaaccatgttcaccacatttaagacttttccataatcttacggaagcatttaccatattttgctaaatcagatggcctatgttgcttctcattcttttgacactctaatagtatgtgatgttgttgaccattcctattggaaaatatttttatgcttcacttctaagaaatttcttcttgtctctccctgccttttttaaattattcttttgatagtttctcctcccctactcacagcttaaacattttgctcttcagggtctagtttcttttgttgttgttgttgttgtttcactttacaggtgctttatgtaatcaaacataaagcatggcgcaaaatgatttaataattttaacctccttttacctcttttaaaaattcatattgtgtggccaggcgtggtggccaggcatgggattacacctgtaatcccagcactttgggaggccgaggcgggcagatcacgaggtcaggagatagagaccatcctggccaacatggtgaaactccatctctactaaaaaaatacaaaaaaaaaaaaaaaaaattagccgggcgtgatgggcgcctgtaattcccactactggtcaggctgaggcaggagaatcgcttgaacccggggggcgtagcttgcagtgagccgagatcgcgccactgtactccagccttggcgacagagccaggctccatctcaaaaaaagaaaaaaaaaattcacattatgatatggctgcaagatttatgcagtcccaaacgtaggagcctgagtatcttcattctctcctttccttcaacactcatacaaaatcaggaactaaatcagcccaatcagtgcttctcaaactctcaaacaaacaaaaacaaaaataaaaacatgtttttatttttctgtaccatgccttcctttctgttgctgccctaattccatccaactttaatggtcagataacttacagtatgcttcttgcccccctcccccaatcttgatctgtatttctttgtaagttcctaataaaaatatgtttttccactgtcattcttataacaaaacaacaacctcaaccatctctgacatttcctgccaacttcttacactacagttcccttcagaaattcacttcaaacacagccagaactacacataactcacagatccttaaatatagcacttgcttttgttgcataagctgttcccatggcctggaatgtcctttaacaccttaaccatataggaaaatcctggttatcctcaagtcttggatcacacgtcgtcttttctgccaagtcctttgtgaacattccaggcttacttagctttcaagtataatgaaaaaaacatatgaggtttgkagtaactcaatttggattctatcacctgatagtcaagaaccatatttcaattttctaaagttctctcatcctcaattgtttcttctaaatcatcaaaataatcatattgatattaccgagatgtattgatgattcaatgaaa

SEQ ID NO: 726541 - DNA, 1646 bp, Homo sapiens
tattgcactttcccctaagccttctcacctattagctttttccttttgctatgcaaattatttaatataatagaccaccttatctgcctttattttcacaaatctgatgtactttccagcatgtattatgaaggtactggtttcatcctacttcttaaccatgttcaccacatttaagacttttccataatcttacggaagcatttaccatattttgctaaatcagatggcctatgttgcttctcattcttttgacactctaatagtatgtgatgttgttgaccattcctattggaaaatatttttatgcttcacttctaagaaatttcttcttgtctctccctgccttttttaaattattcttttgatagtttctcctcccctactcacagcttaaacattttgctcttcagggtctagtttcttttgttgttgttgttgttgtttcactttacaggtgctttatgtaatcaaacataaagcatggcgcaaaatgatttaataattttaacctccttttacctcttttaaaaattcatattgtgtggccaggcgtggtggccaggcatgggattacacctgtaatcccagcactttgggaggccgaggcgggcagatcacgaggtcaggagatagagaccatcctggccaacatggtgaaactccatctctactaaaaaaatacaaaaaaaaaaaaaaaaaattagccgggcgtgatgggcgcctgtaattcccactactggtcaggctgaggcaggagaatcgcttgaacccggggggcgtagcttgcagtgagccgagatcgcgccactgtactccagccttggcgacagagccaggctccatctcaaaaaaagaaaaaaaaaattcacattatgatatggctgcaagatttatgcagtcccaaacgtaggagcctgagtatcttcattctctcctttccttcaacactcatacaaaatcaggaactaaatcagcccaatcagtgcttctcaaactctcaaacaaacaaaaacaaaaataaaaacatgtttttatttttctgtaccatgccttcctttctgttgctgccctaattccatccaactttaatggtcagataacttacagtatgcttcttgcccccctcccccaatcttgatctgtatttctttgtaagttcctaataaaaatatgtttttccactgtcattcttataacaaaacaacaacctcaaccatctctgacatttcctgccaacttcttacactacagttcccttcagaaattcacttcaaacacagccagaactacacataactcacagatccttaaatatagcacttgcttttgttgcataagctgttcccatggcctggaatgtcctttaacaccttaaccatataggaaaatcctggttatcctcaagtcttggatcacacgtcgtcttttctgccaagtcctttgtgaacattccaggcttacttagctttcaagtataatgaaaaaaacatatgaggtttggagtaactcaakttggattctatcacctgatagtcaagaaccatatttcaattttctaaagttctctcatcctcaattgtttcttctaaatcatcaaaataatcatattgatattaccgagatgtattgatgattcaatgaaa

SEQ ID NO: 726542 - DNA, 1146 bp, Homo sapiens
cctggagttatctgcaaaatttaccaaactagcagaatcaattgatttatctgaagagtgacttggaattgtacattcaaacattagaaaatgtctaccaaatttttttgtgtgtgtgtgtgtgtgtatttatagaagttaatgttatgatgttgagctgttctttcagcgagtaattagtaatcaggccctattcttaagaacatcatggtttatgatagaaaaattgcatcgccattgaagaaaataatgcttttttattgcattgacaagttggcatgtgtccaacttatctaaaaatrgaatcatttagatatgttagaggagaagtacacagggcttgtccaacctcttttctactgcttaacattgaattctgatctgctaagaggctatttctttaatttccagggacagcagtagcatttcgatactttctgtgaaacccggttgttaaaagtatgtcttctctctctctcccagtgttaagtataaccagtaattgcatgcttatgtgcataaaccaacctctaattatgtattttagaggtttcacaaatgttaataatgattccctgtgggaaaaaataaacaaataataaaaatacagtccctgatattccatcaccattataaaatcgggctctacaacttgctaaccatgttgtcactgacaagttacttggaacccacaaaacttccttgtccttatccacaaaatgggagaaataagtttacttgaataaaaaccgaatacttgtgaagcacttacacaatgtctagtgtggagtaaaatataaatggaagcatttcagcctatacttacgatgactgatgcaggtggccttataagccttttccatctctggacattaaagttggtgatagatcaataaatggtgcaaagtgtcttaatcaatgagtgggggaaagagtattgcatcttctgaatttccttaatgagaagaaaaagcactgcaataatcactagtggaaaagctacacctaaagtctgcttcctccttgttcaaggtctccagaactgtagcattttaagaaaaggaagttaaactatgaaagaatgtctaaagtggaagtataatttgtaaaaaacagagagttactttttttgaaaatagggaaggc

SEQ ID NO: 726543 - DNA, 542 bp, Homo sapiens
cactgtggcttttctttgcttcagctcaagtaattttgcacgtaagctttgccctcagtaaaaaagtcattatttttctcctatacaggaatcaagatgaaggaatgcccagaaataaaactcctctttgtggctgtaaaccaaaaagtgtctgagacaggtgtcaatcaatttagagatttattttttcaaggttgaagacatacctgggaaaataagacacaagtcaccataggatctgtggcccctgctttttccaaagagggttttgaagactacaatatttaaatgggaaagagtggcttggggggaaaaaggaaagatactgtattagtccattctgatgccactatgaagaaatatttgaggctggataatttataaagaaaagaggtttagttgactcacagttccacatggctgtggaggcctccagaaacttacaatcatggcgaaaggcattttttcacagggtgccaggagagagaatgagtgccaagcgaagggagaagcccctaataaaaccatcagatctcaygaga

SEQ ID NO: 726544 - DNA, 774 bp, Homo sapiens
tttccccatttcttaaatagttttaaagccatttttactaactaaattgtgcatagaaaagagatacgtacttctacatttttgaaactctaagcttctgcaatgtttacagtgcccttgattgctagagctgaatgggcactttggcatacttcctgcatttcatgagtaaattgaggctcagcaagctagtcacatattcccagtcccacaagtagttgggagatgcagaggaatccacttctgtcactagaggctgccytcagctcctaggagccacaagttcctctacatattgctgtttattttatcaatccagcatagggaatcttaagaacatcccatcatttttgccatgttggttagaagcaagtcacccatcctatccacactcaaagaaagagaattacacaaaatcatgaacatcagaaggtggggatcatggaagataaggatggtggcagcacaatagtctgcccaccaaatttttcaaaaaataggtttttataagtatctgtttttaagttaaatttattttatttaacttgtacaacagcactgcctttcatggatgagaaaactagtttgtagtatatctaaggccaaacatcaaatattcaaagttaaaatacctttatggaactcttgctttaccaattagacggatagttttaagaacaagaactatgacatatacacctttggcactgctatgaagcattttaatgctcaatccgtgctttattgtttggtgtgctcatgtgaataatgaga

SEQ ID NO: 726545 - DNA, 1043 bp, Homo sapiens
tttccaacagtcctacttctctgtttcagacgctgctcaggttcaacgccgtgctgaggaagctgctcattgtcttcccccacttctgactgggccggggcctcattgaccttgcactgagccaggctgtgacagatgtctatgcccggtttggtgggtggtagccgaggcccatggagcatgggccctgggtccaaagctgggagggttaccgggggggctcctgcatcagactgtggcaggggctggtgctaggaggggaccttgttgggctgraggtgtcctgccagctggagaggattagggtgcctctgtttccatggctggggagccacaggagggatggagggcagcccttatgaggcgggtgtttggctcttgctcagttcccacataaggcctggtctagtgggccttgtgctgtggccaggtctgtggggtgagctggggcggctgaagtggactcaattcctgttgatgcccaggtgaggagcactctgcaaatccgttccactgggacctgattgggaagaacctgtttgccatggtggtggaaggggtggtgtacttcctcctgaccctgctggtccagcgccacttcttcctctcccaatggtacgtccatgccacaccctgggccagtgggcagctcagggcatccagaactggaccttatacccacatggtcatttctttcctcaggagccccactccacaatgttttttctacattctcaaagcctggcttttctccaataatacaagtagaggatcgggttaaaataggcacattcaaatatgtgaagagcatccactttaaaatatttaaaatgcagtgctattaatttcaattgctgatatttaatccttctcatttaattaccaaatgtgtattttgattagatgatagtattgcaaataacaatggttacagggtatccaaagtactaggaaatagactaatgtatttatgagagaaaggacacagcaggcccctttgctaattagagatttgggagcatgggagtaatatgggagccatg

SEQ ID NO: 726546 - DNA, 1043 bp, Homo sapiens
tttccaacagtcctacttctctgtttcagacgctgctcaggttcaacgccgtgctgaggaagctgctcattgtcttcccccacttctgactgggccggggcctcattgaccttgcactgagccaggctgtgacagatgtctatgcccggtttggtgggtggtagccgaggcccatggagcatgggccctgggtccaaagctgggagggttaccgggggggctcctgcatcagactgtggcaggggctggtgctaggaggggaccttgttgggctggaggtgtcctgccagctggagaggattagggtgcctctgtttccatggctggggagccacaggagggatggagggcagcccttatgaggcgggtgtttggctcttgctcagttcccacataaggcctggtctagtgggccytgtgctgtggccaggtctgtggggtgagctggggcggctgaagtggactcaattcctgttgatgcccaggtgaggagcactctgcaaatccgttccactgggacctgattgggaagaacctgtttgccatggtggtggaaggggtggtgtacttcctcctgaccctgctggtccagcgccacttcttcctctcccaatggtacgtccatgccacaccctgggccagtgggcagctcagggcatccagaactggaccttatacccacatggtcatttctttcctcaggagccccactccacaatgttttttctacattctcaaagcctggcttttctccaataatacaagtagaggatcgggttaaaataggcacattcaaatatgtgaagagcatccactttaaaatatttaaaatgcagtgctattaatttcaattgctgatatttaatccttctcatttaattaccaaatgtgtattttgattagatgatagtattgcaaataacaatggttacagggtatccaaagtactaggaaatagactaatgtatttatgagagaaaggacacagcaggcccctttgctaattagagatttgggagcatgggagtaatatgggagccatg

SEQ ID NO: 726547 - DNA, 1043 bp, Homo sapiens
tttccaacagtcctacttctctgtttcagacgctgctcaggttcaacgccgtgctgaggaagctgctcattgtcttcccccacttctgactgggccggggcctcattgaccttgcactgagccaggctgtgacagatgtctatgcccggtttggtgggtggtagccgaggcccatggagcatgggccctgggtccaaagctgggagggttaccgggggggctcctgcatcagactgtggcaggggctggtgctaggaggggaccttgttgggctggaggtgtcctgccagctggagaggattagggtgcctctgtttccatggctggggagccacaggagggatggagggcagcccttatgaggcgggtgtttggctcttgctcagttcccacataaggcctggtctagtgggccttgtgctgtggccaggtctgtggggtgagctggggcggctgaagtggactcaattcctgttgatgcccaggtgaggagcactctgcaaatccgttccactgggacctgattgggaagaacctgtttgccatggtggtggaaggggtggtgtacttcctcctgaccctgctggtccagcgccacttcttcctctcccaatggtacgtccatgccacaccctgggccagtgggcagctcagggcatccagaactggaccttatacccacatggtcatttctttcctcaggagccccactccacaatgttttttctacattctcaaagcctggcttttctccaataatacaagtagaggatcgggttaaaataggcacattcaaatatgtgaagagcatccactttaaaatatttaaaatgcagtgctattaatttcaattgctgatatttaatccttctcatttaattaccaaatgtgtattttgattagatgatagtattgcaaataacaatggttacaggrtatccaaagtactaggaaatagactaatgtatttatgagagaaaggacacagcaggcccctttgctaattagagatttgggagcatgggagtaatatgggagccatg

SEQ ID NO: 726548 - DNA, 2236 bp, Homo sapiens
tggcaccacctcggctcactgcagcgtctgcctgccgggttcaagggatcctcctgcctcagcctcccaagttgctgggattacaggcatgcgccaccatgcctggctaatttttgcatttcggtagagacagtgtttcactatgttggtcaggcggtctcgaattcctgaccttgtgatcggcccacctctacctcacaaagtgctgggactacaggcgtgagccaccgtgcccaggacccttttgtatttttacatgaaaactataaatgcctctaacctaccactgtatctgctccctgctgtcctgggccatctgaaacttacccttgggtgtgtaattctccagctgaatgtcaagcagttgctctgtaagtatgtccaccacctctctcagtactgggttctgtgctttccaggccattgtgacatttagtttcttccccaggggactgacgggtgtgactgtcttgttgccacagtcatagtgaagaaaagtcttttcatccacctggccttgaaccgcacaccaccgtggtccaggtctgaacttagggatgacggtgatgtcatagcaaagagagtgagggtctgtggagaaaggcaggtgaggggtgggtggggaggaaaagacccctagttagcccccctccacgctgtgtcaataagaggatgcctctggcaggctgggctggcccaggaaggagtgccccctccagaactgtggtgtctacaagtttaaggcgagtgcttgccccttgcatgaggacaaggaggaggaggaggaggaagtctctgtctgctgagaaaccacatgtccccagacatgtcccactgcccctctgcccacatcagtcaacacatgaccttgctagaaaggtgccaggcctctctagcaagagaggaggaagggcctggatggcagaggatcttcagcagtagcccacgtggactgcgggaggtgggagagggtgtgggtccacccctgtggatgctggtgctggttgaacagagtgaggatggaaccccgttggataaagaagagttaattatcatggtcacaggatgtaacatgttggcaaagcccctggtgatggcatgcatctgctatgaggaggccttcctgaaaccttggacaaagagatggtccacacagcaagaaatggaaaatctgaaagtctaaggcaggtagtggagggagagatcacaggctcagagaagtgcccatgccagaggggtctaagtgtgaaaatccagaacaatgtccatccactgtgcttatgggaaacctggaggactcctgtttacccagcatataaagaaggccccatgagaaggcaycagaatggaatgaagcttagggatgcctattgctgaaggccagggttgggggtaggagatgctgttcctgaaatctgctcccagagtaatgggatgaacaattctgaaattccaaattccaggtggaggctgtcaactgtcaggagcaaggagggtgcaatgatggaaatgattagagaagtcacaatgccagctggggacctcagttatacaaagttatgcccatggctcatagaacaaaggggtccaaagtccaaaagagatggaaacccaccccggatactgctggatttaaataattacaagaaacagagataaaccaaatcaggaggctgaaagtagccagtccatcaagaacgaggctgctttgcctaatttgcagaatgaagccacttctcagaccctgaacccatgactataagaagacaccagtttctagtgaggaaggaccctttaaccctgcagccaggacagtgagtccttgtggccttctccagagatatttatggccaatagagtttgctgtgaagggcaattttgtaaacatgtaaaggtgttcagggaatatattctccattgtaactactcaactctgctgttgaagctcaaaagcagccatagacaatccatgaatgatgagcgaggctggacctaccttaagtgcccaatgacccaagaccccctaagatcctagaggtacatgtggtcacaatgtctaattggagaatcacaacagagattccatgtgaatattcagagacaaggcaatgccactcacagcaaggaaatcgcaacattaagcagtggctcctgtagagtactgcaccttggcagagatggggccttttgccatgcatataaagaaggccccatgacaaggcaccagaatggaatg

SEQ ID NO: 726549 - DNA, 1190 bp, Homo sapiens
agtggtctgaggatctggcttttcccctagagagagacctcagctggtcaaataatgacaaacccaatgaatggggcttttccagtgagtcccagactagtcaaatagagttctctggggcaggggcttttgaggggctccaagcccagcrtgcccctccagtgagtggagactgtgtccttgcagctgtcacggacatggtgagtccactgttttctgggcacaataaatcaggatatattgtgcagacaagaaatacgaagaaatattaggaggaagaatataaattttcaagtacgagttgggaagaattagaaaaaaaacaatgaggaaaggggcaaggttggcttggttgtagctaacctggtggagaaacacagccatctgtgatagagggcctaagctgttaggttcccctccaatggtgagaccacctccacaacctgccctgtgtcctcctctctcctgaggctgaatgcagctcttgtgccttcagtgccaagaatgccacagtcccagaccagaggaagagctgatgtggacggtggaaaaggagggggtgggtgtagaaggagaaggctgacagcaaggatttcctgaggataaacaaaaaaaatgtcacttgaaactggcaaaaaaaaaaaaaaaaaaaaaaaaaagtaagggtataaagaacaagatggaaatggaaatcttgtataatttcattatgcagtgtttaattttagggtttggcactttcacgtataacttttatacaattatcatcatatacaacttacgattattttaaatgactagagtttagtttttgatctgggttagcgttcatagtgcaaagttctctcgttccactcagttaaccccattttttggagggctctatgtcattttattttacttacgaatctttaattttaacctttattatagattaaagggtacacatacaggtttgttacatgggtagattttggaaggctgaggcttggtgtcccaatgatctcatcactcaaacagtaagcatggtacccaacaggtggtttttcagcccaggtgcccctcctgtctcacctgtctagtaatctccagtgcctctggttcatgtgaattcaatgtgtagctgccactttccaatgggaacatgcagtatgtagttttctgttcttgcattaggttgcttaggataa

SEQ ID NO: 726550 - DNA, 657 bp, Homo sapiens
ttcacttgcaagataaggaaaccaagctactagaagttatgtggccccctaacattacccttaagttttatgaggagtggagatgggaccttatttttaatctgctggcctagttgtttgtaaaatcttacttatatgtttcagccccctctcagttctggggcagggtctttagggcagggctgtgtgtttatggcaggggtatatgggcaggtagcaacccccacccccaaccttccattctagcttggcttgctggagtctgggaacattgtaggagagcatcaggggacagagagcctcaaaaggaacatgsgccctcccctcacaaagattgctatttcagttccaattctggacttgccaaatattgttctaactaatgaaggcggtttttcctttccctttctctgctttaagaactaaaaccctctacaattaattggtgatactagatggcgtctggcagatgttcagtaccatgtcccttgtcacatgggcccacccagacctattaagtcaaagtctctggggatctggcctgggcactggtgttatttaaaagttcctagaaggctgggtggggtggctcacgcctgtaatcccagcactttgggaggccaaggtgggtggatcacgaggtcaggagttcaagac

SEQ ID NO: 726551 - DNA, 657 bp, Homo sapiens
ttcacttgcaagataaggaaaccaagctactagaagttatgtggccccctaacattacccttaagttttatgaggagtggagatgggaccttatttttaatctgctggcctagttgtttgtaaaatcttacttatatgtttcagccccctctcagttctggggcagggtctttagggcagggctgtgtgtttatggcaggggtatatgggcaggtagcaacccccacccccaaccttccattctagcttggcttgctggagtctgggaacattgtaggagagcatcaggggacagagagcctcaaaaggaacatgggccctcccctcacaaagattgctatttcagttccaattctggacttgccaaatattgttctaactaatgaaggcggtttttcctttccctttctctgctttaagaactaaaaccctctacaattaattggtgatactagatggcrtctggcagatgttcagtaccatgtcccttgtcacatgggcccacccagacctattaagtcaaagtctctggggatctggcctgggcactggtgttatttaaaagttcctagaaggctgggtggggtggctcacgcctgtaatcccagcactttgggaggccaaggtgggtggatcacgaggtcaggagttcaagac

SEQ ID NO: 726552 - DNA, 1877 bp, Homo sapiens
ttttgaatgaaatattttcagtgcctatttcccccaatgactataagcacattgagggcattaattataacttgtttatgcttgtatccctggcaccacacacagtgactgcaaaaaaacaaaacaaccgccaccaatttcaacacagatgtgtgtagcactgagccaaattactcaatttctgctcaagaaaggtcaatgaggttttaaaggaacagcttatctgctaacatctacgtagtatttttacatcaatattcatgagtgatattggtctgtctttatctggcttatacagcagtgttatacttgcttcacagaaggagttggagaggtttctttccttttcagtgctctagatcaggaatcagcacatttttctgtataataggtcagacagtaaatattttaggctttgtggtccatatagtctctgttgaaagtttcaactttgccccaaagcagccatgtacaatgaggaaacaagtagggtggctgtgttccaattaaactttataaaaaataaaacaggttgctggggctgaatttggtcagtggctgatatctactctggaataatttatacaccacttgaaccatgtggtctttaaagggttgaaaaatgctatagactaaatgtatatgtccatgtaaaattcatatgttaaagcctaatgcccaatgtgattctgttactggtggggcctttgggacatgattagtgcgtgggggcacaacccttatgaatggaattagtgccttagtaaatgagagtggagagagcttctgtgctccatttgcatgtgagggcccaagaagaaggtgccatttatgaaccaggatgtcagccctcacctgacacatatgttctaggaccttgatcttggacttcccagccaccaaatttatgagaaataaatgtgtgtttttcataagccacccagagcggaattttgttatatgatcctgaatggtctaacacactataggaatgcctgatcttaatggaaaagcctctagtgttttcccattaaaaaagatcacgaaatgttgcaggttcatcttgtattttcgttaccttagttctggaataaaccatgtctccaaggaggcagtggcatactgttttagttayagagtgtttatagtgtatttttgatatctagtagaagtagttccccttgtggttttactgttttcctattttgtgacagaatctttcttggctgagccaaccacagaagaacagagaagactaaaagggtgtgtgacccaaagtcagacttgccacagggacagtgggtgcaaggaggaagcgcagcttatcaggccaaatgtggaagctagtagcttgagcatggcaatattgtgaccatgggttccagcatgtgctcatgtctgtgggtcctggcatgtggtcagggaggctgagagtttaacactagtgacataaggctccagcagcagtgaatccaggtgcaagagaaatcttgagaccgacacatgctgggtagcaactggttaacaacggtccctacagaggaaggttagcctggtaaggacaaggcaaagccctcactgcagaggctcagggtcccaagacagcgacccagtagaaggatcaaggcagatctgtttggtagagctgccaggcatctggggaagagactgagatgccaaaataagccctaagatgagttaccagaactggagctcagggcacagctggacatgcaccaaatggggtttagggtgaactcaaatatcaggctagagctcctaagtccctcctgactaatgtcccaattagtcccagagtgtccaagtagagccgattactctggctttgaagtaaggaaggagagcaatcttggaaa

SEQ ID NO: 726553 - DNA, 1233 bp, Homo sapiens
  misc_feature 1011, 1012, 1013, 1014, 1015, 1016, 1017, 1018, 1019, 1020,1021, 1022, 1023, 1024, 1025, 1026, 1027, 1028, 1029, 1030,1031, 1032, 1033, 1034, 1035, 1036, 1037, 1038, 1039, 1040,1041, 1042, 1043, 1044, 1045, 1046, 1047, 1048, 1049: n = A,T,C or G
  misc_feature 1050, 1051, 1052, 1053, 1054, 1055, 1056, 1057, 1058, 1059,1060, 1061, 1062, 1063, 1064, 1065, 1066, 1067, 1068, 1069,1070, 1071, 1072, 1073, 1074, 1075, 1076, 1077, 1078, 1079,1080, 1081, 1082, 1083, 1084, 1085, 1086, 1087, 1088: n = A,T,C or G
  misc_feature 1089, 1090, 1091, 1092, 1093, 1094, 1095, 1096, 1097, 1098,1099, 1100, 1101, 1102, 1103, 1104, 1105, 1106, 1107, 1108,1109, 1110: n = A,T,C or G
gatgaaaacatatcttctttacccaccatgaaaataagcaaatatatttatatatggccatatttaaaaggcatgggatggcaggtctaatgcatatagtaatttaacatgtgaggggcttggtggttccrtacattagggtagttcattgtgctggataaaaacaacttcctagtaaaacaactttacgttctaataagtcaactttctactaaaacaacttttgccaagtccttcccattacttggcatgtcacatcagtatcagaactgcagttgatataaactttgcgaagaagaaaaaatttcactcaattcttcaaggattcaggtgatggttgaaaacaagatagaggacataaaaaagaatttgggcttcaatcagcaagaattttaagtaattctggggtaaaatgtctgttttaactaatttaggaaagctgaatttatatagactacatagagaaaaagcagctttttgtctctctccaatgagtgactatatttatttctattttagggttgttagtaatatattaacagatttaaacagagatgatggtaaagaatgcaataagacttgtatatatgggaaaaatttaatcatattttccccaccctctccaaaacatagattaactggactttgaaacatgagattaggaagaaactatttggcacactccaagtttagatgtgaaaatttctcttgtatttattattaaagaagaactggcaaaccaagcatttcattgcagccttatgtgcaaaaattccgtacattacattttctccactagctttttaccttacataagttgttgaaatttcttaaaccccagtttccttacctgtaaaatgagggtgtttgacttctgatgtctattgtcttttttatgtgccctccataaatatttttcttcatttctatctcttagggcatttattcattttttaaaagaaaataattcagagctattttttggttaacttagagaactgaaggatgagnnnnnnnnnnnnnnnnnnnnnnnnnnnnnnnnnnnnnnnnnnnnnnnnnnnnnnnnnnnnnnnnnnnnnnnnnnnnnnnnnnnnnnnnnnnnnnnnnnnntctgttgttttttgactttttaataatcgacattcagtcaggggtaatctttaacttttccttggtctgaagtgtttttttttgttgttgtttttaaatttttttctactgaggtaaaatata

SEQ ID NO: 726554 - DNA, 1585 bp, Homo sapiens
caggaatagctgaaatgttcaagaccccagtgaaggagcaaccgcagttgacaagcacatgtcacatcgctatttcaaattcagagaatttgcttggaaaacagtttcaaggaactgattcaggagaagaacctctgctccccacctcagagagttttggttggtttccttgtttcctaacactgtgatgttttgggataggaacatacagtattatttttttacaagcagtatgatattacttctctaaaacaaatgttcctggcacaaaataccatttccgtcttctctgttctaattgaaagggagatttcaatcagcagttgaactaacattggcattcattgacttatatagaaagaaagactccgttaatgtgtgtaaatgacctgtgtacacttttggcttctttattgtaagtaaccagggtgacatagcaaaaaaatacaatggtgtctcaccatatttacatataaattactcatattcaaaattactgccaattacaaaacagaaagataacagtttgtatactgtgcaattattcctgctaaccttttaggtgggagcaggcccggggtaagtgtgagatgggagatgagaatctgtctaatctctcatttggcactggtcactgtattcctgtcacagagggaacagcttgctaccctgaagatgtttgcggtaggtaaatatttcctgtgtaatatggaccctaaccacataaggataatccatgttattttattggcgatttaaggcaagaaacagctgtttgtttctaatgtttgaaggaaaaaatgcctatatttacgtcaatgacacagggcatggcaacctttggaggaaccttctgaagcagtatttttaccttctatgatcatttcagcatctaactttgcttaatgatgaccccactatagcaccaaataacattattcttaattgtgcatggctcttataagacagatttatagacacataagtagcctcatgtcgttcagtgaatacgaagctaaatatttagttttttaccatattttatgaggctgtaatactygattgacatgagacactaatagaatgtttttattgtgtatgtttttatttcaggaggaaatgtgttcttcagtgcacagaatgcagcaaaacagccatctgataaatgctctgcaagccctcccttaagacggcagtgtattagagaaaatggaaacgtagcaaaaacgcccaggaacacctacaaaatgacttctctggagacaaaaacttcagatactgagacagagccttcaaaaacagtatccactgcaaacaggtcaggaaggtctacagagttcaggaatatacagaagctacctgtggaaagtaagagtgaagaaacaaatacagaaattgttgagtgcatcctaaaaagaggtcagaaggcaacactactacaacaaaggagagaaggagagatgaaggaaatagaaagaccttttgagacatataaggaaaatattgaattaaaagaaaacgatgaaaagatgaaagcaatgaagagatcaagaacttgggggcagaaatgtgcaccaatgtctga

SEQ ID NO: 726555 - DNA, 1237 bp, Homo sapiens
taattctttaaaattgtgaaatttatttgaacatccaagtccgattgtgagtatatgacttttttcgcctctaagcattacattttctgtgagtattattcttgtaagttatatttcagataatttatgtatatatttgttaatatgataaacattgaattcttaaattctcttaatccatatgttgtatttctataatctgagggctttgtttaatctagtgtgttgtttcattttttttttaataggtcctgattgttctttgaatgttccctctactgagtcttactggattctgccaaacgttaaacccttcagtccttctgtaggtcgggcttcacataaagcagttttacacgggaaatttatgtgggtgattggtggatatacttttaactacagttcttttcaaatggtcctaaagtaagtatttattttcagattcttgctgttttttaagctggatttttatccaaaatgtcttttttttttaattgttgtccgagagtaaaagtggttatttttgtggtagtgtctmtttgctagtgagactgatttgtgaatacatgaactcagtatgtccatagctgtcattgcacatagaagtatgcttcatgtagaaatgttattacttctctagagtacttttaataaattctgagtaagaaaatattaacttcaaatacaggcaggccttgcctataatggataaaatgaatcaaatgaatcatgccacctttttttttaatgaagtataatctcatatataaaaatcctctcaatttgttctgtaaattttagtgtacctgaactttactttgtatgtgctttacaaactttcattgggagaacagttctagtattatgagagagatgattgatttactgttggctcaatagagattgttctctgcatgattggataaggggaatcatatggatggcagctttatctgatttctttttcagctaatgattgtattttatgaactgtttagtaacaatacaaaaggaaatagggagaatcatttgatttttaatgttgcttccaggggtagtgttcatattatgtaataactggtacagcttgggcatcaaacaatcagaacttgccctggacagtatggcataatggtgtatacacaatagaattgccagatttagcagataaatatacaggatacccagttaaacttgaatttcagataaaaaacaagtacatttttagtataagaag

SEQ ID NO: 726556 - DNA, 763 bp, Homo sapiens
aactttgtttctgcttcatttgtatgggcaagcgactcttggcaaaatcaatcactatttcctctctgctcctgtggtaccctgcaaatacctcaaatatgcttcatatattgtattattgatctttgtctatcacccccrttgaactgatagctccttgaagagagagacatcttcttaatctttgcactctcagtgtctagggcagtgatttaaacaatcacagcagctatgattgttcaaatgcaatcagcaataaggggaaagctaagcaaatggtattgcattgacccagtggaatataagtactctgagtaagacatgctttctgcccataacatgcatttcacctaggagagaagttatggcctatgtaagtacagttttaaaaacaagggagtatataataaatgtcagaaagtaaatgtaagtaatagttaacatttgatagacattcatcttgtgtcaggtattgtgctgtttctccatgtgctttaatccatttggtcttcacaacaagcccacgatatggatattgttattcccatgttcacagttaaggcaactgggacacatagaggtgaaataacttgtccgaagttacagagatagtaagtggcagatctgggatttgaatttagatcatctgactccagaggaactgtgccaaactactacctatacttcctgttaaaataggttacgggaattcagaaagaaagatacttatcagcttgaaaggtgggaagtggaaatcatggaa

SEQ ID NO: 726557 - DNA, 473 bp, Homo sapiens
ttaccttggggattagaatttcaacatattaattttggggggacacattctgcccagagcactctgtgtccaaatgtcgagtgggttgggctgcgtcccatggtcatctctactttaggactcaggctgaaagagcacttcctggctgggctactctagtgatgacagagggaaaaagacatggtggaccagaaactagctctgaagcctctgcttggaagtgacacctatcacttctgcccacgctgcactkgtcacgcaatcccatggtcactcctgagttcaacacttgcagctcagtataaataaccatttcacgtggagacacactgcagggagttggaaaccagagtatttagcacatgctaagacaatctgccccaaattgtaaatggggctgcaaatgattttgataatcttgaaatttaccgagtttggtcttatgtactgcttagatttgcctagggatgttt

SEQ ID NO: 726558 - DNA, 1116 bp, Homo sapiens
tatttattcaagtatatagttattcaatcaacaattatttattaagcacctattattaacttggtgttgaggagatggtgggaagcagacaaagtttctggccgtcatacattcaaaagtcaattcattcagtgctctctgagcactcacctcatatcctattggtggcttgaaatcagccattacagaagcatatacaccagagaaaacagtaagtgacccccaggcactgtcaaacatttcccagtacacccatgcctgtataccaagtacttggggtaagatggtgcctgatccatagttagcacataataaataattgtcaaatgaataactgaaaaagtgaatataaaatatttcataacaactaatatcacaggaataatatcttaatagaaaatgctttggggactgttttgttgaaggaagagccacctaaggaaatgcctttaaggaagttttgccaataaaataaatttcattgaatgacctcatttcctgttctgtcactgtagaaccaatgagttgaatggtgatttttaaaaagtcttccccctttattttcacctttgtctcaactgcaagtaattaatttctaaaatatcaagaaaccaaattatgctgtctaatagaccaacccagtgatatagtttggctgtgtgcccacccacatctcatcttgaattgtaactcccacaattcccacatgttgtgggarggacccagtaggaggtcattgaatcatgggggcgggtctttcctgtgccattctcatgatagtgaataagtcttatgagatgtgatggttttataaaggggagtttccctgcacaagctgtcttctcttgactgccaccacaccatgtgagatgtgcctttcatcttccaccatgattgtgaggcctctccagtcacatggaattgtgagtccattaaacctctttcttttgtaaattgcccagtctgtctttatgagcagcatgaaaacggactaatacacccagtatgtaatacttagtatttcagttgtttacacttatctcccaatggtggtgttaaagaggttgagaatgtgtattctaatgttaagtctttaagtgagaatgatggagaaat

SEQ ID NO: 726559 - DNA, 1116 bp, Homo sapiens
tatttattcaagtatatagttattcaatcaacaattatttattaagcacctattattaacttggtgttgaggagatggtgggaagcagacaaagtttctggccgtcatacattcaaaagtcaattcattcagtgctctctgagcactcacctcatatcctattggtggcttgaaatcagccattacagaagcatatacaccagagaaaacagtaagtgacccccaggcactgtcaaacatttcccagtacacccatgcctgtataccaagtacttggggtaagatggtgcctgatccatagttagcacataataaataattgtcaaatgaataactgaaaaagtgaatataaaatatttcataacaactaatatcacaggaataatatcttaatagaaaatgctttggggactgttttgttgaaggaagagccacctaaggaaatgcctttaaggaagttttgccaataaaataaatttcattgaatgacctcatttcctgttctgtcactgtagaaccaatgagttgaatggtgatttttaaaaagtcttccccctttattttcacctttgtctcaactgcaagtaattaatttctaaaatatcaagaaaccaaattatgctgtctaatagaccaacccagtgatatagtttggctgtgtgcccacccacatctcatcttgaattgtaactcccacaattcccacatgttgtgggagggacccagtaggaggtcattgaatcatgggggcgggyctttcctgtgccattctcatgatagtgaataagtcttatgagatgtgatggttttataaaggggagtttccctgcacaagctgtcttctcttgactgccaccacaccatgtgagatgtgcctttcatcttccaccatgattgtgaggcctctccagtcacatggaattgtgagtccattaaacctctttcttttgtaaattgcccagtctgtctttatgagcagcatgaaaacggactaatacacccagtatgtaatacttagtatttcagttgtttacacttatctcccaatggtggtgttaaagaggttgagaatgtgtattctaatgttaagtctttaagtgagaatgatggagaaat

SEQ ID NO: 726560 - DNA, 595 bp, Homo sapiens
atacgagagcgatttaatttatattcattcacctcatgaagcagggctttgccattccctccaaatatccaggcagtcccttgcacctagaggagaaccccttcctgaaccctccgcctttctgatcttggagggagggaaggcagcttccaccaacccggcagcactgacccggcagaagcagcctgggccggggttggggaggagaagccccgctcgcttgcgcgccggatgggtggaatttggcactggctcaagcgggttatcccagtctcagctgaagccgaagttatcagtacacttttggccttttcgctggaaaccaggttagcacaggttgttacctctgattgtaacgtgagaaacagagacgtctctttctctactgccgtgtttagacaacaaaggatgatctttacacgagttttaaaaatagaaccatggaaccactcccctccccacccgccttgwgtgagctcattaaaaccacacctaatcttctgggaactgcattattagccttacttcctacacagaagtctcccaaatatagctgcattttagggagctggtgaaatggctggtctagcagggt

SEQ ID NO: 726561 - DNA, 1539 bp, Homo sapiens
tcaaatagattccataacttttctagttactcagaacaattaacactcattctaatgtgcaggcattcagaatcctgtttgttctaatgtagaatcgttggtcaaacctcgacacatctacttctcaggttctgttctgactcatgacaggctttggagaagaagaggaggtgctggctttctccatgtttcttgttgcagcctgccttgacttatctgctattgtcagatgccagcattggggcaggcatgggggggcagacaaacgaaatcagatgggagctacagtcattatgagacagataccccaattacggccttaagctggaattaaataccagtacgatgatctttcaagaaaaaaaagcaaacataaaaaaatgaagacgctcttttccaactggaatcgtggagrgtgttgaaaagaagaggaagttgcctgctgtaccagaaaccctttagagaaagtaaaggaattttgcagagctgaagataagtgcctgagaaagaagtttgcccataagatgcttcaaaaggcaaggaggaagctcatctatgaaaaagtgaaacactgtcacaaggaatataggcagatgtacagaactgaaattcaaatggcgacgatggcaagaaaagctggcaacttcttcgtacatccaaaacccaaattggcgtttgtcatcaggatcagtgctatcagtggtgtgagccccaaggtctgaaaggtgttgcagcttctttgcctttgtcaggtcttcagtggaacctttgtgaagctcaacaaggctttaatgaacatactgagaattgtagaaacgtatattgcatgtaggtacccaaatctgaagtcaataaaggaactaatctagaagcatggttatggcaaaatcaatgagaagcgaattgcactgacagataacacttagattgctcgatctcttggtaaatatggcatcatctgcatggaggatctgattcatgagatctatactgttggaaaacgcttcaaagaagcaaataacttcctgtgacctttcagattatcttcctcactaggcagaatgaagaaaaagatcacccatttcatagaaggtggaactgctggcaacagggaggagcagatcaacaggcttcttaggagactgaattaagtgtctaccatgattatttttctaagctggccagttaataaacagcacctgctctcaaattgaaattaaaaaaagacaaaaagaaggaaagaataaactagcaaatatgtatatgtatacacataagaacagaacccaaagataaccaacattatccaataaagaatttctaaaatagaaggaatactgaatgataagaatcgcaaaataatgtcatataatgtaaacaaatatttaatgtttaaaacattcttgttttatcattagacagaaatcttgatattaaataccaaggggaaaaggaagaatagatacatgttaaaacactctatggttttacctctggtgtaatgcaaaagtattgatttgattttgacataattacttt

SEQ ID NO: 726562 - DNA, 1864 bp, Homo sapiens
tcttcagacttgccacaaactccagactgcatttttgttcaacattgtcacattcattaccatagagtctgtagatcatacagcccatgaagcaggtcataaagccaccccttttttttcctcaggaacctgctcaggacaatcagacttcgaatttcacctggcttatcatcttaaccagcattcttagatgttgacttaattgcttctaggaccctagaagtaatacagtcttttcttctatgtggaagtagattaaaaatacaacaatccatctttacctttaatggcaatgtccttgcatgcccctgaccttgggatctagaaaatttttactttccaggctctacaaaacatattttttagcaaggcttccatcatacgtgccaactcatacacatcttgcctgattggcatcatataatcagtacttggtgttctgcaatggtgttcatgtcgtccagatcttttcagactataaaaggtgctaacatagtgttaaggcattatattaagcatggattgttttttgttccatacaaatgagacatttttcagatcctctttcttgattaggatggaaagtaactcatttgtcaaatcaaggacctcttggttgagctctagccattccactgtcactctccagcatccatcaggttgttcaggagccagagaggaaaattaaatggagacatggtagacatcatcatccatgcattttttagatctttaacatgagcttatattcaccattttccccaggaagtgatgtcatttctaatttactatcttggccaggagaggagggagagcattcagtgttttcttggggcctcgcttagaattagagaggagaaattaataatatattaatacatgatttttcacagaaaattagtatctaaagtataagcaaaaaagaagctgaacaattggtttgattcagagatggtatttttctcaagatcgagttctagagagaaactaaagctgtttcaagtgagggataataaaatatttgatatatatgggaagaaataaagacaggaagtgtttagatatttcataaaaatgtagaatcatcaagagactgaagtttttaagatgtttaagggttaatatggtcataattgaaagatttggaaggaaaagtgtttttggtcagagggtggaaaaattagatttaatatggagcattttcagcccgaataaattgatgtgaacatgcagggaatggtatcccagaacaccaccgtgaggagtggagtccgggaattatttatagataaggtggcttggtgtctgtgctgtaggggaagagatggagaaagagggaggaaatttcagctgtgggtttagggggcatgaatgtgcttctgcagttggggtgacagggacatggtatttttggtagtgtgaagagccatgtactttccatgtatgcagaacataggaaaccactgacttatggcagaatctgcacttctcagagtgaggttccatgtgactgtacttcagggacatggttgttgagagtagaaatactgaagaaaccggctgggcgcggtggctcacgcttgtaatcccagcactttgggaggccgaggcgggcggatcaggaggtcaggagatcgagaccatcctggctaacacggtgaaacccccgtctctaataaaatacaaaaaacttagccgggcgtggtggcgggcgcctgtagtctcagctactcgggaggctgaggcaggagaatggcatgaacccgggaggtggagtttgcagtgagccgagatcgcaccactgcactccagcctgggggacagagcgagaatccgtctcaaaaaaaaaaaaaaaaaaaaraaa

SEQ ID NO: 726563 - DNA, 1364 bp, Homo sapiens
tgtggtctctattctaatcatgggcaggagtcatcattcctttgccctgatgcatttttttggctcaacacagcaaycctatttcttacttccgctgctggggtagctggctggtctgccttctgcttgctgcaattctcaggcaggattcagactcaagatattaaaattccccagttgcaggagtcccatttgaagctgagtggtcctgtggaagttgaggtgatgaaagcactcactccattcctccttctaggtagtggtgaatggctcttcgtacactggcaactctgtctacaaggtctttctcacaaattctctctggacattttatattctcggtgaggaggaagtactgaatattatcttgagcatctaaagttttgcaagttctattgattgattagttcaacttacaacccatttttgaatcagacatccgtcattgtaggctaaaaatgagacaaacttttcacctgacagaaaataaaaacatatatggttttgcagaaaagaaaacaaaaaattaaagcataattttaggcaaaaatttatgaatcattacatatggcttttatttaacaaatttaacaaacactgttgctgcttttccaagaactttatagactaacacagtcttaaaaatgatcaacttcatgatgcaagcactatcattttaatctccattttcaagtgagtaaactgaggtatagagaagctaagtaacttgtccaaggtcacatgactggtaaatgataaatcccagattcaaacacaggaagtctggctccagtatgattggtcctagcaattatgctatacttcttctcaaggttactggaggccctacagaattctttaattaattaattaatttatttttttgagacagagtttcactcttgttgcccaagctggagtgcaatggcgcaatctcggcttaccaccacctccacctcctgggttcaagtgattctcctgcctcagcctcccgagtagctgggattacaggcatgcaccaccatgcccagctagttttgtatttttattagagacagggtttctctatgttggtcaggctggtcttgaactcccgacctcaggtgattcacccgccttggcctcccaaagtgctgagattacaggcatgagccactggcccggccagccctgcagaattcttataggagaaagtatatttcttctcaatctttattccagagcctctagtttcaaccattctcttgccaccactctcaaatgctttgtttccctgtagctctgtccttctctcacctgacaaatcagatcacatcagttttctacctaaaatcttttagtatgtttaaattaccaagaccaga

SEQ ID NO: 726564 - DNA, 1364 bp, Homo sapiens
tgtggtctctattctaatcatgggcaggagtcatcattcctttgccctgatgcatttttttggctcaacacagcaaccctatttcttacttccgctgctggggtagctggctggtctgccttctgcttgctgcaattctcaggcaggattcagactcaagatattaaaattccccagttgcaggagtcccatttgaagctgagtggtcctgtggaagttgaggtgatgaaagcactcactccattcctccttctaggtagtggtgaatggctcttygtacactggcaactctgtctacaaggtctttctcacaaattctctctggacattttatattctcggtgaggaggaagtactgaatattatcttgagcatctaaagttttgcaagttctattgattgattagttcaacttacaacccatttttgaatcagacatccgtcattgtaggctaaaaatgagacaaacttttcacctgacagaaaataaaaacatatatggttttgcagaaaagaaaacaaaaaattaaagcataattttaggcaaaaatttatgaatcattacatatggcttttatttaacaaatttaacaaacactgttgctgcttttccaagaactttatagactaacacagtcttaaaaatgatcaacttcatgatgcaagcactatcattttaatctccattttcaagtgagtaaactgaggtatagagaagctaagtaacttgtccaaggtcacatgactggtaaatgataaatcccagattcaaacacaggaagtctggctccagtatgattggtcctagcaattatgctatacttcttctcaaggttactggaggccctacagaattctttaattaattaattaatttatttttttgagacagagtttcactcttgttgcccaagctggagtgcaatggcgcaatctcggcttaccaccacctccacctcctgggttcaagtgattctcctgcctcagcctcccgagtagctgggattacaggcatgcaccaccatgcccagctagttttgtatttttattagagacagggtttctctatgttggtcaggctggtcttgaactcccgacctcaggtgattcacccgccttggcctcccaaagtgctgagattacaggcatgagccactggcccggccagccctgcagaattcttataggagaaagtatatttcttctcaatctttattccagagcctctagtttcaaccattctcttgccaccactctcaaatgctttgtttccctgtagctctgtccttctctcacctgacaaatcagatcacatcagttttctacctaaaatcttttagtatgtttaaattaccaagaccaga

SEQ ID NO: 726565 - DNA, 1364 bp, Homo sapiens
tgtggtctctattctaatcatgggcaggagtcatcattcctttgccctgatgcatttttttggctcaacacagcaaccctatttcttacttccgctgctggggtagctggctggtctgccttctgcttgctgcaattctcaggcaggattcagactcaagatattaaaattccccagttgcaggagtcccatttgaagctgagtggtcctgtggaagttgaggtgatgaaagcactcactccattcctccttctaggtagtggtgaatggctcttcgtacactggcaactctgtctacaaggtctttctcacaaattctctctggacattttatattctcggtgaggaggaagtactgaatattatcttgagcatctaaagttttgcaagttctattgattgattagttcaacttacaacccatttttgaatcagacatccgtcattgtaggctaaaaatgagacaaacttttcacctgacagaaaataaaaacatatatggttttgcagaraagaaaacaaaaaattaaagcataattttaggcaaaaatttatgaatcattacatatggcttttatttaacaaatttaacaaacactgttgctgcttttccaagaactttatagactaacacagtcttaaaaatgatcaacttcatgatgcaagcactatcattttaatctccattttcaagtgagtaaactgaggtatagagaagctaagtaacttgtccaaggtcacatgactggtaaatgataaatcccagattcaaacacaggaagtctggctccagtatgattggtcctagcaattatgctatacttcttctcaaggttactggaggccctacagaattctttaattaattaattaatttatttttttgagacagagtttcactcttgttgcccaagctggagtgcaatggcgcaatctcggcttaccaccacctccacctcctgggttcaagtgattctcctgcctcagcctcccgagtagctgggattacaggcatgcaccaccatgcccagctagttttgtatttttattagagacagggtttctctatgttggtcaggctggtcttgaactcccgacctcaggtgattcacccgccttggcctcccaaagtgctgagattacaggcatgagccactggcccggccagccctgcagaattcttataggagaaagtatatttcttctcaatctttattccagagcctctagtttcaaccattctcttgccaccactctcaaatgctttgtttccctgtagctctgtccttctctcacctgacaaatcagatcacatcagttttctacctaaaatcttttagtatgtttaaattaccaagaccaga

SEQ ID NO: 726566 - DNA, 657 bp, Homo sapiens
tccagactgttccaacctctgagtattacccagttccaaagttgcttccacattttcgggtatctttacagcagcacccccttctggtaccaatttactgtattagtgtgttctcacattgctaataaagacatacctgagactgggtgacttayaaagaaaagaggtttaatggatttacagttccacatggctggggtggcctcacaatcatggcagaaggcaaggagaagcaaagccatgtctcacatggtggcaggcaaaaggtaactttgcaggggaacttccctttataaaaccgttagattttgtgagacttattcactaatatgagaatagcacaggaaagactcacccccatgattcaattccctcccgctgggtccctcctatgacatgggaattatgggagctacaattcaagatgagatttgggtggggatacagccaaaccatatcaatgacataaagtgatatttgggctatcgctacttccctcattaagtgaaccaatatttctttaccacttttcaggggaatggctcttaccagtatttctagaagaaactactgcagtccctcttctactgagattaagggatgatatcgccaggaacaaatgaacaggcatgtaatccaattcaactaagtaaattg

SEQ ID NO: 726567 - DNA, 657 bp, Homo sapiens
tccagactgttccaacctctgagtattacccagttccaaagttgcttccacattttcgggtatctttacagcagcacccccttctggtaccaatttactgtattagtgtgttctcacattgctaataaagacatacctgagactgggtgacttacaaagaaaagaggtttaatggatttacagttccacatggctggggtggcctcacaatcatggcagaaggcaaggagaagcaaagccatgtctcacatggtggcaggcaaaaggtaactttgcaggggaacttccctttataaaaccrttagattttgtgagacttattcactaatatgagaatagcacaggaaagactcacccccatgattcaattccctcccgctgggtccctcctatgacatgggaattatgggagctacaattcaagatgagatttgggtggggatacagccaaaccatatcaatgacataaagtgatatttgggctatcgctacttccctcattaagtgaaccaatatttctttaccacttttcaggggaatggctcttaccagtatttctagaagaaactactgcagtccctcttctactgagattaagggatgatatcgccaggaacaaatgaacaggcatgtaatccaattcaactaagtaaattg

SEQ ID NO: 726568 - DNA, 657 bp, Homo sapiens
tccagactgttccaacctctgagtattacccagttccaaagttgcttccacattttcgggtatctttacagcagcacccccttctggtaccaatttactgtattagtgtgttctcacattgctaataaagacatacctgagactgggtgacttacaaagaaaagaggtttaatggatttacagttccacatggctggggtggcctcacaatcatggcagaaggcaaggagaagcaaagccatgtctcacatggtggcaggcaaaaggtaactttgcaggggaacttccctttataaaaccgttagattttgtgagacttattcactaatatgagaatagcacaggaaagactcacccccatgattcaattccctcccgctgggtccctcctatgacrtgggaattatgggagctacaattcaagatgagatttgggtggggatacagccaaaccatatcaatgacataaagtgatatttgggctatcgctacttccctcattaagtgaaccaatatttctttaccacttttcaggggaatggctcttaccagtatttctagaagaaactactgcagtccctcttctactgagattaagggatgatatcgccaggaacaaatgaacaggcatgtaatccaattcaactaagtaaattg

SEQ ID NO: 726569 - DNA, 657 bp, Homo sapiens
tccagactgttccaacctctgagtattacccagttccaaagttgcttccacattttcgggtatctttacagcagcacccccttctggtaccaatttactgtattagtgtgttctcacattgctaataaagacatacctgagactgggtgacttacaaagaaaagaggtttaatggatttacagttccacatggctggggtggcctcacaatcatggcagaaggcaaggagaagcaaagccatgtctcacatggtggcaggcaaaaggtaactttgcaggggaacttccctttataaaaccgttagattttgtgagacttattcactaatatgagaatagcacaggaaagactcacccccatgattcaattccctcccgctgggtccctcctatgacatgggaattatgggagctacaattcaagatgagatttgggtggggatacagccaaaccatatcaatgacataaagtgatatttgggctatcgctacttccctcattaagtgaaccaatatttctttaccacttttcaggggaatggctcttaccagtatttctagaakaaactactgcagtccctcttctactgagattaagggatgatatcgccaggaacaaatgaacaggcatgtaatccaattcaactaagtaaattg

SEQ ID NO: 726570 - DNA, 782 bp, Homo sapiens
taaaccttttatctttataaattatccagtctcagatgttccttcgtagcaacaaaaaacagactaagaaaacttcctacttaggagaaaaaaggcacaaagtatgtcacatcaaatggctttttgttatgaatgcaaacatctatgctgagtctgatcaatcatgcatactctctccctactaactagttccacagtcctggatgctgaaagaaggagtttaaggtggagtagtagttctgagaaagctggactgcaggtcattctgtgagacctttctaagagtgggcagaatccccttctgctataaaattaattgactagaaaggctgctgtacaactttggtttttgactttaattgtatggtgagttggctttgctgaaattatttatttgattttaaagtgaagactgaaatctttgaaatagttttggaatggatcttatagctgattattgtaaagctatgaccttccttaatacctgtcattaataaacattaatgcatatatttttatttctgctagtaaactaataattcatattatttacttttactgaatacttagttatgtcattagaattcctttcaatacactatttttaatgcattagaatatttttttttytttgagacggagtctcactctgtcaccaggctggagtgcagtggtatgatcttggctcactgcaacctccaacttcctggttcaagcgattatcctgcctcagcctccctactagctaggactacatgtgtgagccaccacggccagctaat

SEQ ID NO: 726571 - DNA, 952 bp, Homo sapiens
  misc_feature 201, 202, 203, 204, 205, 206, 207, 208, 209, 210, 211, 212,213, 214, 215, 216, 217, 218, 219, 220, 221, 222, 223, 224,225, 226, 227, 228, 229, 230, 231, 232, 233, 234, 235, 236,237, 238, 239, 240, 241, 242, 243, 244, 245, 246, 247: n = A,T,C or G
  misc_feature 248, 249, 250, 251, 252, 253, 254, 255, 256, 257, 258, 259,260, 261, 262, 263, 264, 265, 266, 267, 268, 269, 270, 271,272, 273, 274, 275, 276, 277, 278, 279, 280, 281, 282, 283,284, 285, 286, 287, 288, 289, 290, 291, 292, 293, 294: n = A,T,C or G
  misc_feature 295, 296, 297, 298, 299, 300: n = A,T,C or G
tgcctttttttttttcttttgcttgcctaattgttttggctaggacttccagtctctagatttctctctagatttaagatttggccaggcacagtggctcatacctgtaatcccagcactttgggaggctgaggcgggcagatcacgaggtcaagaggttgagaccatcctgaccaacatggtgaaaccccatctctactnnnnnnnnnnnnnnnnnnnnnnnnnnnnnnnnnnnnnnnnnnnnnnnnnnnnnnnnnnnnnnnnnnnnnnnnnnnnnnnnnnnnnnnnnnnnnnnnnnnngcatgtgcctgttgttcccagctactcaggaggctgaggaaggagaatcgcttgaatctgggaagtggaggttgcagtgagccgagatcacgccactgcactctagcctggtaacagagcgagactctgtctcaaaaaaaaaaaaaagaaaagatttaagataatagaaagtatttccaaatcaatttgggttcccttttacagatagyaaattaatttcctttttgttttgaaagagattggctgggcatggtagctcacacctgtaattccaggactttgggaggctgaggcaggcagatcacctgaggtcaggagtacgagaccagcctggccaacatggtgaaaccctatctctactaaaaatacaaaaattgctgagcgtggtggtagttgcctgtaatcccagctactagggaggctgaggtaggagaattgctggaatccaggaggcagaagcttcagtgagctgagattgctactgcactccagcctgggtgacagagtgagactccatctcaaaaaaaaaaaccaaaaaaacaaaaaagtaatactgatcataattaagcttgcctttgatatgttaattaccactattacatgtatatttttacaagttaaaacaaagattccaaatttttctgaaatgaga

SEQ ID NO: 726572 - DNA, 952 bp, Homo sapiens
  misc_feature 201, 202, 203, 204, 205, 206, 207, 208, 209, 210, 211, 212,213, 214, 215, 216, 217, 218, 219, 220, 221, 222, 223, 224,225, 226, 227, 228, 229, 230, 231, 232, 233, 234, 235, 236,237, 238, 239, 240, 241, 242, 243, 244, 245, 246, 247: n = A,T,C or G
  misc_feature 248, 249, 250, 251, 252, 253, 254, 255, 256, 257, 258, 259,260, 261, 262, 263, 264, 265, 266, 267, 268, 269, 270, 271,272, 273, 274, 275, 276, 277, 278, 279, 280, 281, 282, 283,284, 285, 286, 287, 288, 289, 290, 291, 292, 293, 294: n = A,T,C or G
  misc_feature 295, 296, 297, 298, 299, 300: n = A,T,C or G
tgcctttttttttttcttttgcttgcctaattgttttggctaggacttccagtctctagatttctctctagatttaagatttggccaggcacagtggctcatacctgtaatcccagcactttgggaggctgaggcgggcagatcacgaggtcaagaggttgagaccatcctgaccaacatggtgaaaccccatctctactnnnnnnnnnnnnnnnnnnnnnnnnnnnnnnnnnnnnnnnnnnnnnnnnnnnnnnnnnnnnnnnnnnnnnnnnnnnnnnnnnnnnnnnnnnnnnnnnnnnngcatgtgcctgttgttcccagctactcaggaggctgaggaaggagaatcgcttgaatctgggaagtggaggttgcagtgagccgagatcacgccactgcactctagcctggtaacagagcgagactctgtctcaaaaaaaaaaaaaagaaaagatttaagataatagaaagtatttccaaatcaatttgggttcccttttacagatagcaaattaatttcctttttgttttgaaagagattggctgggcatggtagctcacacctgtaattccaggactttgggaggctgaggcaggcagatcacctgaggtcaggagtacgagaccagcctggccaacatggtgaaaccctatctctactaaaaatacaaaaattgctgagcgtggtggtagttgcctgtaatcccagctactagggaggctgaggtaggagaattgctggaatccaggaggcagaagcttcagtgagctgagattgctactgcactccagcctgggtgacagagtgagaytccatctcaaaaaaaaaaaccaaaaaaacaaaaaagtaatactgatcataattaagcttgcctttgatatgttaattaccactattacatgtatatttttacaagttaaaacaaagattccaaatttttctgaaatgaga

SEQ ID NO: 726573 - DNA, 1394 bp, Homo sapiens
tgtagatgaactcttactgatggaagagatgtaattacacatttgtacccaatctattaatagaagtgaccacacttgactacgagatcacttactattacccttttgttatttgtttatagtttcttagaaatgtgattgctgacagcgttgagaatatttgtgtatctgtaccagcatagtggttatgagtgcagaccaaggagtgggaaggcttgggttcaattcccttttcaccacttatgaggcatgtgcatgtgggcagttcattaactctccaagtttcactttcctcatctgcaaagtggggataatattatagtaatttcgacttcataacattgttatggagattaaatgagatgatacacgcaaagaattactactgagcccagaggatagtaagtagttaacacatgttattttataattattatcctaccttaattggtgaatttgtatcacttcaaaacaggttgttatataagccaaaattagagatcttgtagttttctaaaaagtcagttttacagtcaaatatttttatttcaagatagtttccaactcactctaaaattcgctttttctttgttttgtttttcgttcaaggacagcttcactttagagacttcccaaatgaatgctttcctaattactcatttctatgaatatccatggctctgtaatatatttttctcattgctattaaacttaagtgtgattaaacactatgcagccacaaaacacttaaattgcattttctgtgtcttatttatagcctggatctacactgggaattttggaactgcatcagaccctcagcctaaaaagaaacagagtctatgtcaacataattactctaagggagtgatctacaatgaaaaaaaaacaactttttgagtgagtctatctagagtatatagaatcctatgatgaaatgacattataccttaaggctcagtttctcttttgtgttttgttttttaccctagaagtttatagtctagcttagatagagcagacaaactaatgaaagattagatggctgcccactatattaatatttcaaatcaattatttttcctgtctatgagaaagcaaagatgctgacttaccattgaaggacctgcattgaattgctttccctcactaggtgacagattcacaattacttatgcctttcttttcacctggttccttgtaatgtctagtgaggtacttgtccatatttatgtacatagcatgttgccatgggacacaactttgcattgatccrtcaaacagttcctgggaggctgctgtgggtcaggaattactcagtcatatcaatgaccccatagggccaacaccaccctctactttagtgtgtatgttagtacacaccaatgattgca

SEQ ID NO: 726574 - DNA, 984 bp, Homo sapiens
gaatattgaatgaagtaatacatatgaaaaggttagaacaagcaagcattggttagaacacagcaagcattcagtaaaatgctattacgttattttattaatagtatcctcttaaaagaggtgatgcatgtgtttgcggtgtaaattgtggcaatggtttacttatctctatttgtatagattaaatacgtacagttttgtatgtcaatcaaacttcaataaattgttttttaaaaatattttttaaattaaaaagtaatattcctgttctgcagacacagactctcacaaaagccaaaatattggtgcatttatgttgagcaaaagtgttggtattttatccagaagagtagttataatgcatcaaccattaatttattcatttattaagtatttgtttggatcctataatctgactgcctacctatcatgttaaaatcagtgcatcataaaagagagaaaaagaaacaagtaaaattaattttaaaattaataacatgttatttaactcattatatcccaaatattatttccacatgtagtcattgtcaaaatcactgatgaaatattttacatttttacattatttattgtattaaatattcgaaatctgatgtgtattttatacttatagcacagctgaaatctgaatggccacatttcaagtgctcatggccacttatggctattgcttagagaattagatagtatagacagtgcaagattattgctctctgcacaaggagatatactgcttagtgtttatgagcatagattctgcagccagagttactgtcaggttaatttcaaatctcactgttgttacaagatttaaaaactatgtaattttggataagttacttggtgtcctgttctcaatttggccatattacaatgaggcytataaatctccaaaaagatcacaatataatgaggattaaattagcaaaggcatgtaatattcttaaaactgttcaataatca

SEQ ID NO: 726575 - DNA, 1022 bp, Homo sapiens
cagacaaaaagtagaggtgtaagtgaattgaatacatcgctcaagatacacagatgttctgagcagtagagggagyatttgaatctaggcagtctgacaggacatgctcttaataattactctatactgtgtctttttttttaagtatttaagcttgaaaacacacaaatactcattgttattataatggaaatattaacactttaatggtctaattggatatatggtataggtatttttattgtcctaattttacagacaagactgctgaattgcagagagattgaataatttgccccaaatccagccctaggttatcttattcaaattccatctgtttccattacttctatttcatttgcaatagttgttaaccattcatctactcattcatatatctattcaactcaaacatacgggtaatgtttggtgcctcttggataatttatggtcatgaaaaatacagtcagggtttttccctccattctggcttacattctagtaaagggatacaatataaaatttgacaaagataaaaatagaatagtttaaggcggtaatggtgtcaataaagggaaaattgaataatttaaattagaaatgagttctacaaaagaaaatgttggagcatgatttggagagaacacggactggtagtttaggaaaaacttctgtgagaatgtaacatttgtttaacagatgaatgatgagaactagaaatttgaatggctagccaacattaacaaattcattatttaaaatttaactttcagtgaggtttttggttattattatgattcaattttaaaggtgttaaagttaatatgtgttttgctagaacacacttgacttttaatacatttcttctgagacgctagaatgaacaaatctaatgaatcataagacaatataatttgttaaattagtttatgttaaagtaggctttatttttatctcttgaaacatgaattttgggggacatattcaaacaatagcacattccatttcttccctcctctaaa

SEQ ID NO: 726576 - DNA, 2727 bp, Homo sapiens
tcccagcactttgggaggccaaggcgggcaaatcacgaggtcaggagatcgagaccatcctggctaacacggtgaaaccccgtctctactaaaaaataataataaaaaaatagccgggcttggtacggtggttacctgtagtcccagctacttgggaggctgaggcaggagaatggcgtgaacccgggaggcggagcttgcagtgagccgagatmgcgccactgcactccagcctgggcaacagagcgagactccgtctcaaaaaaaaaaaaaaaaaaaaatgtaagttaacagtggaaggacaggaacaaacagaggaagctgtgtactgcaactgtataatttattatacaaatgggaatatttgtgagtaaaagtggtcactctttataattcagctaagaaaacagatgtaagctggtgctacaactggaaacaaaatatttatgttcaccctaatgatatgggagcacatgcaagcacctcagaatgaaaacaagaggagagtcaggaaaagttccagggaggaagtgacatctatactgcattaaaaagatacattcatgtacaatcaatcaggaaaatgtgagtaggagaagaggaggagtgtggcaggatcctgcctccaaactttccattgataaacaggtgctatgacctaagagagcatcaccagatcagacagctacaattcatgcaatggaactgctataccgtggccttgagtttgacagatggcaggtggcatggggaaagatgaatctggaaaggcaaacacagagaaaactgctttcccaaataggggatacaaaaaacttctggcagtgatcaagctatctcgccaaggtcatacagatcacaggtagtcaacttgaaaatacaagtttatgtttctgaatgcccaggctaagaatctatttactatactgtgagaatcttatttcccaattcaatgacccaaatagctgtgaagaataaaatattgcattttatgttaaaattctaaggattattgtataaagtagtcacttgagatttatctcataaaaagcatatgttaatagttgttcaaagtacctagcctgtgtattagaaaatgtcttttagctttgaagaatattcagctaatcatactgtaaaatactgtcatatcattatccatgtatctataggctttatgagtttaaaaaaatgaataccttagatattgataaactgtctccagagttctgccaagattcctagaattccaaggcttaaagtggtcattgattacatcaataccttggggcattcagttaaaacactgcggtaattaaccaaagcaagctgtcgatgaaatcagctctgattaactggagggatggtagaaagataaagcttggatttagacaaaaaatgttatataaagtagacgaatttgataaaaatcacctcgttaccttttcttcataaagtttcgccaaccttttggcaacactatcccatccaccttatctatgcccagtgccatccaactatctgaacatctctcatgtgaactggaagaactcatactgtaaggatagcttatgtgtttaagtgatttttgtatttctgcacccctggaggtcgtatttataatgtttaacacatctgatatactttataatattagtgttgtagaacaggtgtcaaggagctctaggcaagttttttttatttttatcagaggttttctggaagtaatactgaaacacattattaaatttttggtcctacaatggactttttgacctttcagattccagggttcacctttacaataatggtccatgattggtttattttgaattcaataattattgactgggtttcttcacttggtaacaaagcagatgtattttaacacctagatgtcacacaatgttttcagtttgcatttcttcctcaatgataaataaagaaactgactctctatgggggagtttcatgcaacggatatgtccctatgagggctatctttctggataactatccatccaagaaagtttacccagtagggaatctggaaggaaaaatcctatgagctttaagtcatagcttttagccatgtaataacatgatatttaatacaaatgttttcctattacaaacacatttaataagagaaataacagaaacaaaacctgcaccaggaaccttagctagaagctttccccatggtacatctcaaaccccaataaacagttgactctccagactctcagaagcccaccatatgagatcaactggcacgtattggttttgggaaattgttaatgatatgtacacttttgaatgacagggattaaattctgcgtgggcatctggcagtccagataacttcactgcattctttaacaggcaattaagtgttatttgactaaatatttgtatctccacatttctgggaaaaaaaagtcgtagctattctgatgtcttctatagattcggagaattgagaacttgcctaatgtcacatggtcagtatatagtagggaagaaacaaattgtaaaaccctaatcgcttctctctgttaacatatcctcctgctctttattagtaaagagcatttttttgtgtactgaaatttctattcctgttcatttagttcaggatgcctagattctattggaagctaggccatcaacaagttttatgacttttgatatgtctgtggatgtcagttgcatcatctataaaat

SEQ ID NO: 726577 - DNA, 2727 bp, Homo sapiens
tcccagcactttgggaggccaaggcgggcaaatcacgaggtcaggagatcgagaccatcctggctaacacggtgaaaccccgtctctactaaaaaataataataaaaaaatagccgggcttggtacggtggttacctgtagtcccagctacttgggaggctgaggcaggagaatggcgtgaacccgggaggcggagcttgcagtgagccgagatakcgccactgcactccagcctgggcaacagagcgagactccgtctcaaaaaaaaaaaaaaaaaaaaatgtaagttaacagtggaaggacaggaacaaacagaggaagctgtgtactgcaactgtataatttattatacaaatgggaatatttgtgagtaaaagtggtcactctttataattcagctaagaaaacagatgtaagctggtgctacaactggaaacaaaatatttatgttcaccctaatgatatgggagcacatgcaagcacctcagaatgaaaacaagaggagagtcaggaaaagttccagggaggaagtgacatctatactgcattaaaaagatacattcatgtacaatcaatcaggaaaatgtgagtaggagaagaggaggagtgtggcaggatcctgcctccaaactttccattgataaacaggtgctatgacctaagagagcatcaccagatcagacagctacaattcatgcaatggaactgctataccgtggccttgagtttgacagatggcaggtggcatggggaaagatgaatctggaaaggcaaacacagagaaaactgctttcccaaataggggatacaaaaaacttctggcagtgatcaagctatctcgccaaggtcatacagatcacaggtagtcaacttgaaaatacaagtttatgtttctgaatgcccaggctaagaatctatttactatactgtgagaatcttatttcccaattcaatgacccaaatagctgtgaagaataaaatattgcattttatgttaaaattctaaggattattgtataaagtagtcacttgagatttatctcataaaaagcatatgttaatagttgttcaaagtacctagcctgtgtattagaaaatgtcttttagctttgaagaatattcagctaatcatactgtaaaatactgtcatatcattatccatgtatctataggctttatgagtttaaaaaaatgaataccttagatattgataaactgtctccagagttctgccaagattcctagaattccaaggcttaaagtggtcattgattacatcaataccttggggcattcagttaaaacactgcggtaattaaccaaagcaagctgtcgatgaaatcagctctgattaactggagggatggtagaaagataaagcttggatttagacaaaaaatgttatataaagtagacgaatttgataaaaatcacctcgttaccttttcttcataaagtttcgccaaccttttggcaacactatcccatccaccttatctatgcccagtgccatccaactatctgaacatctctcatgtgaactggaagaactcatactgtaaggatagcttatgtgtttaagtgatttttgtatttctgcacccctggaggtcgtatttataatgtttaacacatctgatatactttataatattagtgttgtagaacaggtgtcaaggagctctaggcaagttttttttatttttatcagaggttttctggaagtaatactgaaacacattattaaatttttggtcctacaatggactttttgacctttcagattccagggttcacctttacaataatggtccatgattggtttattttgaattcaataattattgactgggtttcttcacttggtaacaaagcagatgtattttaacacctagatgtcacacaatgttttcagtttgcatttcttcctcaatgataaataaagaaactgactctctatgggggagtttcatgcaacggatatgtccctatgagggctatctttctggataactatccatccaagaaagtttacccagtagggaatctggaaggaaaaatcctatgagctttaagtcatagcttttagccatgtaataacatgatatttaatacaaatgttttcctattacaaacacatttaataagagaaataacagaaacaaaacctgcaccaggaaccttagctagaagctttccccatggtacatctcaaaccccaataaacagttgactctccagactctcagaagcccaccatatgagatcaactggcacgtattggttttgggaaattgttaatgatatgtacacttttgaatgacagggattaaattctgcgtgggcatctggcagtccagataacttcactgcattctttaacaggcaattaagtgttatttgactaaatatttgtatctccacatttctgggaaaaaaaagtcgtagctattctgatgtcttctatagattcggagaattgagaacttgcctaatgtcacatggtcagtatatagtagggaagaaacaaattgtaaaaccctaatcgcttctctctgttaacatatcctcctgctctttattagtaaagagcatttttttgtgtactgaaatttctattcctgttcatttagttcaggatgcctagattctattggaagctaggccatcaacaagttttatgacttttgatatgtctgtggatgtcagttgcatcatctataaaat

SEQ ID NO: 726578 - DNA, 2727 bp, Homo sapiens
tcccagcactttgggaggccaaggcgggcaaatcacgaggtcaggagatcgagaccatcctggctaacacggtgaaaccccgtctctactaaaaaataataataaaaaaatagccgggcttggtacggtggttacctgtagtcccagctacttgggaggctgaggcaggagaatggcgtgaacccgggaggcggagcttgcagtgagccgagatagcgccactgcactccagcctgggcaacagagcgagactccgtctcaaaaaaaaaaaaaaaaaaaaatgtaagttaacagtggaaggacaggaacaaacagaggaagctgtgtactgcaactgtataatttattatacaaatgggaatatttgtgagtaaaagtggtcactctttataattcagctaagaaaacagatgtaagctggtgctacaactggaaacaaaatatttatgttcaccctaatgatatgggagcacatgcaagcacctcagaatgaaaacaagaggagagtcaggaaaagttccagggaggaagtgacatctatactgcattaaaaagatacattcatgtacaatcaatcaggaaaatgtgagtaggagaagaggaggagtgtggcaggatcctgcctccaaactttccattgataaacaggtgctatgacctaagagagcatcaccagatcagacagctacaattcatgcaatggaactgctataccgtggccttgagtttgacagatggcaggtggcatggggaaagatgaatctggaaaggcaaacacagagaaaactgctttcccaaataggggatacaaaaaacttctggcagtgatcaagctatctcgccaaggtcatacagatcacaggtagtcaacttgaaaatacaagtttatgtttctgaatgcccaggctaagaatctatttactatactgtgagaatcttatttcccaattcaatgacccaaatagctgtgaagaataaaawattgcattttatgttaaaattctaaggattattgtataaagtagtcacttgagatttatctcataaaaagcatatgttaatagttgttcaaagtacctagcctgtgtattagaaaatgtcttttagctttgaagaatattcagctaatcatactgtaaaatactgtcatatcattatccatgtatctataggctttatgagtttaaaaaaatgaataccttagatattgataaactgtctccagagttctgccaagattcctagaattccaaggcttaaagtggtcattgattacatcaataccttggggcattcagttaaaacactgcggtaattaaccaaagcaagctgtcgatgaaatcagctctgattaactggagggatggtagaaagataaagcttggatttagacaaaaaatgttatataaagtagacgaatttgataaaaatcacctcgttaccttttcttcataaagtttcgccaaccttttggcaacactatcccatccaccttatctatgcccagtgccatccaactatctgaacatctctcatgtgaactggaagaactcatactgtaaggatagcttatgtgtttaagtgatttttgtatttctgcacccctggaggtcgtatttataatgtttaacacatctgatatactttataatattagtgttgtagaacaggtgtcaaggagctctaggcaagttttttttatttttatcagaggttttctggaagtaatactgaaacacattattaaatttttggtcctacaatggactttttgacctttcagattccagggttcacctttacaataatggtccatgattggtttattttgaattcaataattattgactgggtttcttcacttggtaacaaagcagatgtattttaacacctagatgtcacacaatgttttcagtttgcatttcttcctcaatgataaataaagaaactgactctctatgggggagtttcatgcaacggatatgtccctatgagggctatctttctggataactatccatccaagaaagtttacccagtagggaatctggaaggaaaaatcctatgagctttaagtcatagcttttagccatgtaataacatgatatttaatacaaatgttttcctattacaaacacatttaataagagaaataacagaaacaaaacctgcaccaggaaccttagctagaagctttccccatggtacatctcaaaccccaataaacagttgactctccagactctcagaagcccaccatatgagatcaactggcacgtattggttttgggaaattgttaatgatatgtacacttttgaatgacagggattaaattctgcgtgggcatctggcagtccagataacttcactgcattctttaacaggcaattaagtgttatttgactaaatatttgtatctccacatttctgggaaaaaaaagtcgtagctattctgatgtcttctatagattcggagaattgagaacttgcctaatgtcacatggtcagtatatagtagggaagaaacaaattgtaaaaccctaatcgcttctctctgttaacatatcctcctgctctttattagtaaagagcatttttttgtgtactgaaatttctattcctgttcatttagttcaggatgcctagattctattggaagctaggccatcaacaagttttatgacttttgatatgtctgtggatgtcagttgcatcatctataaaat

SEQ ID NO: 726579 - DNA, 762 bp, Homo sapiens
ccaataacaggagctgaaattgtggcaataatcaatagcttaccaaccaaaaagagtccaggaccagatggattcacagccgaattctaccacaggtacaaggaggaactggtaccattccttctgaaactattccaatcaatagaaaaagagggaatcctccctaactcattttatgaggccagcatcaccctgataccaaagcctggcagagacacaaccaaaaaagagaattttagaccaatatccttgatgaacattgatggaattttttttttaatttctcttttggaaaggctaagaacattcgctattataatgccttctgcayattctattttctagggcagagtttggccctagaggtttaaacacaaatatactaagaagaaattccttttcttctttattttatacataactaatgaccataaaatgggcgtcaaatatttgaatggtggcaatcatctgaaagaaaaaggaaatttaaaaaaaaatcgattttagttgatatttggttattgaaagaaaataatccccccaaaatgcatgtaagtacaggctatgtgtaaaatgaggtgggacatgttggcttacgcctgtgatctcagcactttgggaggccaaagcaggtggatcacctgaggtcaggagttcaagatcagcctggctaagatggtgaaaccccgtctctactaataatacaaaaattagctaggtatgatggtgcacgcctgtaatcccagctactcaggagcctga

SEQ ID NO: 726580 - DNA, 762 bp, Homo sapiens
ccaataacaggagctgaaattgtggcaataatcaatagcttaccaaccaaaaagagtccaggaccagatggattcacagccgaattctaccacaggtacaaggaggaactggtaccattccttctgaaactattccaatcaatagaaaaagagggaatcctccctaactcattttatgaggccagcatcaccctgataccaaagcctggcagagacacaaccaaaaaagagaattttagaccaatatccttgatgaacattgatggaattttttttttaatttctcttttggaaaggctaagaacattcgctattataatgccttctgcatattctattttctagggcagagtttggccctagaggtttaaacacaaatatactaagaagaaattccttttcttctttattttatacataactaatgaccataaaatgggcgtcaaatatttgaatggtggcaatcatctgaaagaaaaaggaaatttaaaaaaaaatcgattttagttgatatttggttattgaaagaaaataatccccccaaaatgcatgtaagtacaggctaygtgtaaaatgaggtgggacatgttggcttacgcctgtgatctcagcactttgggaggccaaagcaggtggatcacctgaggtcaggagttcaagatcagcctggctaagatggtgaaaccccgtctctactaataatacaaaaattagctaggtatgatggtgcacgcctgtaatcccagctactcaggagcctga

SEQ ID NO: 726581 - DNA, 941 bp, Homo sapiens
ctaagaatgaccttcaagcaattatataccactatatactaattataacagtaaaaactattactatcacatcaatagcttctagtaaacaataagggaacccgtttatttattcctgtcaataatatatttaatataatatgccttttctgcacttaaaaaagttatttttccatggcaataaatagggtacattctaatattctaaacattgcaagggccattttggtgagaaaacacacacacacacgcacgcacgcatacatctatgtataatatatatatatatatatatgtatctccccaattacaggctcaatttacaatacgtatttcraagtatcctgtcaagaataaaatagacattatttcctgcttagcattctgatgcatctaataatggatgaaataaatacagtcacgtaatgcacacaattatttcaccaagctaactgtataattttcctaaaattaagaaatattttaccaaatgatataaaattgtaaatatttcctttcaagcattccttttaaataggttccttgctattcatataagtgatatcctgaggagagtcatttcactaaaacacactttagtaggtggcaatgtctgaaataatgctagagggtctttcactaaatactctaggatgacttgctaagatttccattatggttaaaactgacaatctgctataacgattggacaccaaacttactcatcttctgattgcatttgacaaactgatattttgattcatagtacagtttcttaatggcatgaaaattagttaatgtggcaaatggtgattcccttgaatccaattatatcatataaagttgagtctaggctggttttggatagcaggattgtgcttaataaagtgaactaatgtagccatttactaaataatacactcataaaataaaggacatgg

SEQ ID NO: 726582 - DNA, 2470 bp, Homo sapiens
  misc_feature 797, 798, 799, 800, 801, 802, 803, 804, 805, 806, 807, 808,809, 810, 811, 812, 813, 814, 815, 816, 817, 818, 819, 820,821, 822, 823, 824, 825, 826, 827, 828, 829, 830, 831, 832,833, 834, 835, 836, 837, 838, 839, 840, 841, 842, 843: n = A,T,C or G
  misc_feature 844, 845, 846, 847, 848, 849, 850, 851, 852, 853, 854, 855,856, 857, 858, 859, 860, 861, 862, 863, 864, 865, 866, 867,868, 869, 870, 871, 872, 873, 874, 875, 876, 877, 878, 879,880, 881, 882, 883, 884, 885, 886, 887, 888, 889, 890: n = A,T,C or G
  misc_feature 891, 892, 893, 894, 895, 896: n = A,T,C or G
cttactaaaatgcagctttattatttgaattaggcatttagttggtttacatttactttgcaaagacaactttttgtttgttggaattatcacaaactatgctttaaatattagaaagtacacatattatgagattttaaagaaaaatcttgagcagtgttgtcatgagcattaactggtatatataaaatgtacctaacggagtagctgacacatagaacatagctaatggaaacattaatattacttggttatagaatggtgttatatattagcttagttttgagttggagtccctactgactacaatttaaatgtacaaaccacttaggtgatcttttgtaggccataggagatggagaaaattatgagattgttcaataaattagtggttcaataaatatttgaaaacatgttatgtwcagcccaagtaatttgtctttctgttgggtataactacaaattaataattagttccatgtggattataagttttacttggtaaattaacttgacatatacattggtatcctgtaaagtgaaaatataaatatacaattaagagaaataagtttaaggtaaatgaccaagtaacatatgtacatctttctgttaatcagcagatcaccttcaaagcaggtgggaaggtaggagcataccagaaatttggagatgacttttgaactacacccacccctatgtttaccccaccctactccttccttctatccaaaatcttatttaaaggatctttgaaaaattagaaattgttattaagggggagtattctacataannnnnnnnnnnnnnnnnnnnnnnnnnnnnnnnnnnnnnnnnnnnnnnnnnnnnnnnnnnnnnnnnnnnnnnnnnnnnnnnnnnnnnnnnnnnnnnnnnnngctaggccccaggtttcacctgttggccaggatcgtctggatctcctgaccttgtgtctgcctacctcggcttcccaaatgctgggattacaggagtgagccactggtttgactttcttaaagactgtgtttcatttgctttatcattagggaataaaaaatatgttgttaaaaattagagaaagtagtaaactatgaaaatcaaagaatatagaaagtaattacatacacttgatagtatgacataatatatacagttgatttattacaataactgaataatgatatagtcaaaaccaccaaagaatatataaagctaaggtttgagtaggcatccaagttagtgaaacttgttatcagcccaaactggcagatagatggatatttattattcacctaccatctctgtgccaaggaaacatagtttataggattccaagtttcatatttattttgacagctctcctagaaaaattcccctgaagcaacagtctattctttttaaaatttctgagcctatttcctccctgacaatctcccagtatcaaggtccatgcatgataaagcactatagcaggctttctcagtgttgagttccaacaatagaggactctctattttcactttgtgagcctttccattccacatgctgttcatagaccacagggatctacattttaattctcctttgtcataaatagtaacataatgtattttatctgataccactggataaatatttctaaaactcttgcttatcatgccacattcctgattacaacctacaccaacaccttattacctattggataaaaacaatagatttaaataaccttatctggtatcttatgcccctgccattgagttctagtcacagatgcacctcatctaatttttaaaatatttttcactgcaatcaagtatttttattccttcctgaccactcacaacaaacaactgaaagtttctacatatttttggaaatactgatatcctccatccttttgatcttgtttcttgctatttaaaaaccagaccagttctctcaattttgtgaaaatttctctaatcatctaaagcccaaatcctatatattttcaccaacactaatcatttggaatatattattcaatttattaatgctatctaagtcatatatatattattaggatgcttataacataatcaggaagctattggttttattacaaaaaatagcctccaatttttacctaatttctacattgtttgtagaataatctcctcactttataaaaatctcagtattgttcaagtcataatgagttaaacatattctttccagactagaaattggaacatacctttcattaaatatattctttgttacttaccggtaccgtgtcacaaagtacataaaaaaaattcctggaagaataatatcttccctttcccaatgatatagtattttaagattaggaaaaaaataattgaatagtaatgctacatatagtctaaactcttctaaattattatattgcttcaaatgagtttatttttggtataacatctggacaactaaaattatcataaaa

SEQ ID NO: 726583 - DNA, 1009 bp, Homo sapiens
actttgaacaaagagatgaatctctttgagggttctgggcaaagactgccccaaataaagtggacagatgaaggcccatgtgccatatctgccacattcagcctgtttttgtgttatggtctgatccaaaggcaaggatggatttgcattttttaaatagctggaggaaaaaagtcaaaagaatactttatgacacatgaaaatgtgatgatattcacacatcaacatgcaaaatatatacgggaataaagccacactcattcatttatgttttgtgtatggctgctttcatgacacaatagtagagatgagtattacaacagggactgtatctcctgtaaaactttaataagttactatttggctatttatgagggaaaaacaagtttgcttcttattgctctggtctagaccaatggaccattaagtattttaagctgtycttgttggatttttttgttaagtctggtttactcaactatttctgttatttccattttaatgtcttgccattaaggttcctgccttgtgtgagctaacacagtcagatttcactgcttgcaaccaaaagaacattaaataatataattatctaatgacttagtccaagaaatccattagctttgtgtaattatagagccggatagactatctcaagtaaatttaccagtgaattagtgaaaacaaacaagcaaaatattcatttttataaatgcccaacatagtgaaaaaaaattgcttcaatttgtcttaaatggatggctgaaactgttaatggaatttatattgtatgcaagggttactgtgatgtttgtaattattattgccattttcagaaaagcgatgacttcaggggattcggatttaaaaggaaagcctatagttcctgtatgaagtctgtcaggaccacacaggggaatgggtggacatagcatgtgaatgccacctttttagctgtgctagacagaaaagctgtgttttcagttttgttggattttgagcatgaaca

SEQ ID NO: 726584 - DNA, 2990 bp, Homo sapiens
aaaaaaaataaaatcactaatgatcatctctatatgaaatttgagctatcttttacagaaaatgtatttttattgaaatttctattacttgtaaaaatgaattatacatgtactgacagaaaatgggcctttcaatcctcttaataaaaataaaataaagtagtagaaacattccattcttcaaaaccaatagccagcgtcattttaccttataaataaactcaatctttgcaattaatttttcctcaggtggaaaacatttccaactttttgaccccaagtactttaataaagtgtctagctttccctgttttcctccccattttttcttcctaacttcacagactagtctaggacaggaatcatggtaaacatgttggtattgctatcaaaaaagaccatgaaccataaggtgaacagacattctttttgttttaccaattagctaggatttttaggattttcaactagttagaatgtataaaaggcaaactaatttacacagctttctatttatagtttttatatatcagcatattatagaacatcactacacagatatagacatactgcagatggagttccatctgtttagcctaattttggtacatgcttaagaacaaagcccaggcatcaaccctctacgttgctgctgccttaaaaactcactgcatttcaacattatagactatgaatgttttccttgccttgaatatcattttcttttccttgaaaattgattgttttgctggaagatttgcctgtaatgcaatgtgttatttttgacaagtattgcctgttacatcttttatattaattttaattgtaaatttattcattaaaatgcttcttgtttgcactaaaattccaaaaaatatattgttttaagtcaacacaatgaatgcataaatgttgtcttactaatacttttgttactttaactatcttttttaccaagagccttttagtactgactaaattgacatggcattgccttaaaaatacaatggcaaaaaggtagcttaaatctacaggacgcattagcacaaactacgcaagcaggacacacgtgtcatgctctattgtcttgagaagcagaacctaatgtcaggatggatgatttatacgctccctctgcaatctcttccaccatcttttcaaagtgggttagaacaacaacaaacaaaacaaaacataaatgacagatgaaattaagaaaatgctgccatcattgcctccactggaatgcctacagtttaggggaataaactcatggttcagaaatgaagtctctgtatcacctatgtccctcctagtagtacatttacagcaacacaccagttatctgttgtgcaataaaatatgctatattggaggagagggagtataagaacatatataatataggtctgcaattgcttttacatagaataaacaatgtttaacttttccagcctacagcgttcttactttatgagtaataattctacagacacacttctgttcatctgagaatagtctgttctaaagtattctttacttgaattgatgagaattataatctctttcaatctttccttcctctttctgcctcaatctcttttaacccatactcttcctcatatagagaatcttttgagtacttttgcctcgccaatgaagaaacagttatttgatattcccagctgtggaaagattatcagtttcctcctcccatcacacagccatatgtacacacacacatgcatgtacagtattctttttgagctaccatttggaagaaatttcagagtcattgaatccctcctcctttttttccccccttatcttgcaaggtatatgaaaaggtctgagtttaaaagcttcagtcagggagatttaattttgagtgagatagctgaaactctcaaaggagccaccagccaagcagctgtaacaaatcagcgttacaggtggtgatctacacctagaacttcctggtggagttgatcactgtcctcacaggtatacatctctctaacagccttgcacccaacaatttcagtcaaacagtacagggccataaaaacagaatggaatttgagatcacagaatcctgttttgaatcgtgggtttgagaagtgtctgttctgttttgttaacctgcttagatatgtaaaccctgtctttgctcatgtctaaacttgattcccctactttctgcaacacccttcctgttgtccttgcacctttatttccggagctaactcttaatcatgctgtgtgttgtataacgttagtacatacacaaacacatggtatattagtcaaggttctccagatggacacaactaataggatagatacacatatctataaaggggagtttattaagtattaacttacatgattgcaaggtcccacaatggtctgtatgcaagcttgaggagcaaggagagacagtctgagtctcaaaactgaagaacttggagtctgatgttcaagggcaggaagcatccagcacaggagaaaagatgtaggcccgggggctaggccagtactctccatttcacatttttctgcctgctttatattctctggcaactgattagattgtgcccaccagatcaagggtggacctgtcttcctcagcccactgactcaaatgtgaatcccttcactgactcaaatgttaatctctttcggcaacaccctcacagacacacagagcatcaatgctttgtatccttcaatccagtcaagttracactcagtatcaaccatcacacatgggattttaaacaaatacaaagttatgtttatgtcacatttagtagatttttacagtactttctctctacttcccatttttctcctatatatggctttcacagtaagggttccaggtttttgtttgtccattttttcaccagtatattaatcaaacacttcatatttacttaaataattaaattaataactttattatatattcttgacatatggtgatg

SEQ ID NO: 726585 - DNA, 592 bp, Homo sapiens
ggctatcatgctgctttgtatacaggctttctttactgatatgtaatataatacacagacaaatatacaaatcctaagccatcaactcattgaatttttattcrttgtttttaatacctgcattgtgttccattgttaggctatgtcacaacatatttaattaagcccctattgatgaatattaatttactctatttgccagttcattccagtccaacatttattgagtgtctacttacgggccaggcactcttgtattcatcaagatcaccacattatctgtatcagttatttattgccacaataaaactgcataacaaatcactccaaaatgtagcaccttaaaactacaactacttattatttctcaagagtcaatgggtcagctgagcagttctgccgataggggtcaaggtcaacacatttcaactagactacttgtaaaaaagaatgagtgtctgggtaggtgtgttcttctaaaaataaaacaaggaatgaggaaattgcaggtaggataagaggggtggttggcaaccaaaccccacaaaaggcagacaaattttaaggaaacataatgccagactcctatgtc

SEQ ID NO: 726586 - DNA, 483 bp, Homo sapiens
gaggcaggagagtcccttgaacccgggaggtggaggttgcagtgagctgagattatgccactgcactccagcctgggcaatggagtgggggaaaagaaaaaagaaaaaaagagaatatcattaggatccaatatatatttccttttggtttttcctgggacttatgattctataaataataagctaatgaacttttcaacaagagaatcacatctttgaccagacattaacctctattccttctctgttgattctctgcactttataagcaacagttttgagtgatctaaggcctggaatacagagttctggggagaggaagttcctagttcattgcagcctcagaaaacacagaagaaagagaacaagaagtaggaagatgagcacratcttcttaaattttagagaagaccactagcttatagaggaagagagaatttgaactagtaccttgataggttggtcataatttgatggaattta

SEQ ID NO: 726587 - DNA, 1067 bp, Homo sapiens
tggcaacagatgcgccatatcacacaccattttatcatattcccgcaactcacacacagggatgcaagtaacctctagattatcaataatagtaacctgtagtaaagtaatttgcaggtaatgaggtttgaatagctattgcatttgtgtttagtatcatttattaattctaaacttatagaatttaattttaataatggctgtatttaataaataaatcgcagaatttctaaaactttctcaattggccttaaaagctagtataagccagctttagcatgccactatctacttgaatggctataaaggagaacacaatttctccccatgtaacctacatgactctagacaaattacataacctcacttatcttcaattagtccatctgtaaaatggagttaaaggagtaacacctagctcacatagaggtggaagaattaagtaagatagacataaagtgcctggctcctggtagggatttatacattatggcctttctttatcctcttatataacttcagtgccctccccccattatttctataattttcttcactttattttgatgtargaatgattctattctgtatctccaaatctatataatgacctctgacaaaattaggattttattttgtctctatgataaactcatgcctacctaaatattgtcacatgcatgccacatttctttttttttatttttattattattattatactttaagttttagggtacatgtgcacaatgtgcaggatagttacatatgtatacatgtgccatgctggtgcgctgcacccactaactcgtcatctagcattaggtatatctcccaatgctatccctcccccctccccatgccccacaacagtctccagagtgtgatgttccccttcctgtgtccatgtgttctcattgttcaattcccacctatgagtgagaatatgcggtgtttggttttttgttcttgggatagtttactgagaatgatgatttccaatttcatccatgtccctacaaaggacatgaactcatcattttttatggctgcatagtattccatgg

SEQ ID NO: 726588 - DNA, 1067 bp, Homo sapiens
tggcaacagatgcgccatatcacacaccattttatcatattcccgcaactcacacacagggatgcaagtaacctctagattatcaataatagtaacctgtagtaaagtaatttgcaggtaatgaggtttgaatagctattgcatttgtgtttagtatcatttattaattctaaacttatagaatttaattttaataatggctgtatttaataaataaatcgcagaatttctaaaactttctcaattggccttaaaagctagtataagccagctttagcatgccactatctacttgaatggctataaaggagaacacaatttctccccatgtaacctacatgactctagacaaattacataacctcacttatcttcaattagtccatctgtaaaatggagttaaaggagtaacacctagctcacatagaggtggaagaattaagtaagatagacataaagtgcctggctcctggtagggatttatacattatggcctttctttatcctcttatataacttcagtgccctccccccattatttctataattttcttcactttattttgatgtaggaatgattctattctgtatctccaaatctatataatgacctctgacaaaattaggattttattttgtctctatgataaactcatgcctacctaaatattgtcacatgcatgccacatttctttttttttatttttattattattattatactttaagttttagggtacatgtgcacaatgtgcargatagttacatatgtatacatgtgccatgctggtgcgctgcacccactaactcgtcatctagcattaggtatatctcccaatgctatccctcccccctccccatgccccacaacagtctccagagtgtgatgttccccttcctgtgtccatgtgttctcattgttcaattcccacctatgagtgagaatatgcggtgtttggttttttgttcttgggatagtttactgagaatgatgatttccaatttcatccatgtccctacaaaggacatgaactcatcattttttatggctgcatagtattccatgg

SEQ ID NO: 726589 - DNA, 1108 bp, Homo sapiens
ttgaaacattacttctgttcagttttcttctgcattttaggggtaagtactctcaagcatactacttgtaaaagctgtgatttttgaatggttatgctggtaaaattccaatttttcttttatgttaatttttatccatgcacctgcaggcaggcataacatggccctataagtaaaataggccagttcttaagtcaagagtttcttagaaaatgactaataytgtagatttcagatgacgtatttctgcatgttggagagagattcccatgatacagcattgtaaaattactgacccaaaaataataaaaatgccttattttatataaggtgtcacaacagcatggtactttctaaaaggcagaatcataccatatgaatcttccatgtctccaatgggtgtttaggcagtacactacaataagatgattgaggagcaactacatatactgttttgcagaacctagggaggcctagaaataccagcagactgagatttgagaaggtttcaaattgcctgtgggtaacaaaaggtgcctcaaaagaggaggagagaaatttagtctttcagggaacaaagtgaaaacatttgctatcataaaaagaagttaataggattagatttaatatttctttaaatgtaaatttcactcaaatggttactttatcacctaagtgtattttaatatgttaagccaattactttttctgggcattcaagagacggttaaatgcctttaatcacaatatgttggagacaattaaatgatggtatattccagataactcagcatgtgcttgcactcagaatacgtaatttagaatataaaaccaaaacaaacaaaaaaagcctgttttactcatgggaatttgaatatataccctatatttataaccttgtagtatatatttggttccagtttgagcttgcaggtttaatgatgccttgtaaaaaataaataaataaataaagagagaaaagaaaaaaaaaaaaaaggaatacatccaaataggctgagtacaatggtttaggagagataattgaaatataatgcattcttacacctatttcagcttgcgcattagttcttggtctatatctatcatt

SEQ ID NO: 726590 - DNA, 1108 bp, Homo sapiens
ttgaaacattacttctgttcagttttcttctgcattttaggggtaagtactctcaagcatactacttgtaaaagctgtgatttttgaatggttatgctggtaaaattccaatttttcttttatgttaatttttatccatgcacctgcaggcaggcataacatggccctataagtaaaataggccagttcttaagtcaagagtttcttagaaaatgactaatattgtagatttcagatgacgtatttctgcatgttggagagagattcccatgatacagcattgtaaaattactgacccaaaaataataaaaatgccttattttatataaggtgtcacaacagcatggtactttctaaaaggcagaatcataccatatgaatcttccatgtctccaatgggtgtttaggcagtacactacaataagatgattgaggagcaactacatatactgttttgcagaacctagggaggcctagaaataccagcagactgagatttgagaaggtttcaaattgcctgtgggtaacaaaaggtgcctcaaaagaggaggagagaaatttagtctttcagggaacaaagtgaaaacatttgctatcataaaaagaagttaataggattagatttaatatttctttaaatgtaaatttcactcaaatggttactttatcacctaagtgtattttaatatgttaagccaattactttttctgggcattcaagagacggttaaatgcctttaatcacaatatgttggagacaattaaatgatggtatattccagataactcagcatgtgcttgcactcagaatacgtaatttagaatataaaaccaaaacaaacaaaaaaagcctgttttactcatgggaatttgaatatataccctatatttataaccttgtagtatatatttggttccagtttgagcttgcaggtttaatgatgccttgtaaaaaataaataaataaataaagagagaaaagaaaaraaaaaaaaaggaatacatccaaataggctgagtacaatggtttaggagagataattgaaatataatgcattcttacacctatttcagcttgcgcattagttcttggtctatatctatcatt

SEQ ID NO: 726591 - DNA, 1653 bp, Homo sapiens
cattaatatagcaattgtttttttttacaaagccttgacctatgctcccttctaataaccacaacagtctgcagatgtatataggcaaaatactcctttccccttttaacagatggaaaaactgaggcccaaaagtttctgaatccatgatcatagccaattactggcagagtcagagcaagaacctaagactccttctttccaaaccaggggaccttccacccagtctaaatttataaacagtagaaaatggaagcccaattggctcacttactgtttctgctttcaatctatagtcccttttgagatctatccttcataaattaaaaaatatatatttttatgcaatattaattatttcttcaggccatggtagagcctacagtagctttattgccaaatgtagtcatttgcaaaggttctcgaaatcattactgcaacctgacaatgctatgctgtccactgaaagctttgaaaaactgaaaaattcccctttgggctcatgaacaatcacagaatatatactcgtaaagcattaaaattcaatatgaccttagagttcatctaatctattatctctcttgcacacgcgcacacacaaacgtgtgcgtgcacacacacaatattttgaagataaggaaatgggcccagagaaacttacaaccacccccaaagcaacgcagctggttattggaaactcaggcatggattcagaactgagctcttctgacattctctctacttgcccagctccttcttgttagttctcttaagaaatcctggaagaataaaacctaatactcaaagtcttgtcaactaaatttctcatgggaggaaaaaagtgaaawttagtgtaaattatgtttgtagatcacttcttctcaataccctatcattaagaaaagtaattgttcctagggatactgtagaaagaggatgtatgatccacccaaggaaatagactgcctttagctgagtgatccagagaatattgaatgataaagctctgtgaaatacggcctcattctagcaaacaacttgctttgttgccacttaaattgctcatttataattgctagagataaactgcaatcaaaatacagtatcttctattagttttgcccactggggattgtttgatcgtagtgaaattatctaaaaggtaaattttctcatttttactgcctcagtggaaagaaactctctggcattagaccaccaaggggagctggaatgatgacaagtattgctccctggtgaagggagcatttttcctctctaaatagtactgagcaactaactataaccttctgcctttgcaactaacacctaagtagaaaagggaaaatctgttctgctcacttcctaaaagcatccatctcaggcttacttgctttcccgtgttggagtcatacctttgcagttcagatttcagtaattcatatttggtgagcattcggatagagctaggctgctgtttctatttttataaaggtttgctgggcaaattgtggtataaacaaggttacaaggaaaatgtttaaactaacaagaataaattgtttttaggcactttagaagcaatttacaaacaataagtatgttaattgcacatcattcttatttattcattaaaacaagtccaaggacttc

SEQ ID NO: 726592 - DNA, 1265 bp, Homo sapiens
tcaaagttctttccactatattaacaacttctcatatgataaagttataaagtgttcataccacagagctcactataatgattaagtataggatttaagaataagccttgaaataactgaattcatgaaaataaagtgaccatttatgaaccacacagaaaatttcatacatctcattttagagataaaagagatacaggctatcaagacactcaccctgacaataaggatccatttgatcaaggaaaggccaaatccgcagatagcaccataccttccagctatggtattggtgatacagaaggataaacaaaatccaagccagttgaaaataaatgccactaaaagcaacagaaaccgttcttttataaaccacaatttggaaacaaattaacatagacatattaataatatttcatggctcaatggaaacagcagctccctttcttttaactctgccaattaagccttctttatagactatagcctactttttgcaaatggcttatttgctatactgtatatcaacaaatgggtaagcttggtttcttgtcagtttggccaacaggaatccattcctgaaagcttatcattaatggttgtaactgcagttataaactagcttaaaaccagatcacaatgtatctcacatgtggttccacccaagaagtccagcctaagcaatcagccaacaaaattggctttttaaaaaaggtaaagcaggccaggcacagtggctcatgcctgtaatcccagcactttgggaggccaaggcagggggatcagctgaggtcaggagttcgagaccagcctggccaacatggtgaaaccctgtctctactaaaaatataaaaattagccgggtgtggtggtgggcacctgtaatcccagctacttgggaagctgaggcaggagaattgcttgaacctgggaggtagaggttgcagtgggccaagatcacgccactgcactggaatgtgggcaacagagcaagactccggctcaaaaaaaaaaaggaaaaaaaaggtaaacaaaacaataaaattgaatacttsacaaatactttatgggtttcctcagctgtaattacaattcttagatgttccttttctgaatttacttatgctatgtaatgtcatgtaaaagctatataaaaaacagctttttgtggacagaataagacatcaatgttttgttttccaagatgtgtcaagatgtgtagtgtccagataacccctttaaaaactgtaactttttgacttgta

SEQ ID NO: 726593 - DNA, 587 bp, Homo sapiens
gtttgtgacattctattatagcaatgcaaaacagataaagacaatccacatatcaataattatgctcagttttggaaaagcgaacctgaataaaacatgaattctaccttaagaagagttcaatatgtagtgggaaatagaagggaaaggggaaagaaagagagagataaagtgggggagagagagacagtgagaaagagggaggtgagagttcaaaaagtggcaagagtggagtagagaagtttttaacaaattcatacatctgaaaaaataagtagatttttgctagatatagaaaggaaaaacrctttctttttttttgcagggaaatcagcatgaacaaaacagtagaaatatgaaagagcatagcagtctacaagaatcactgtacttttgcctggtgcctgtgtaggatagagggaagataatgaagcagtttgtcagaagtgatagacaagtagactcatggataatactaagggaattagagtttatctcagtagtaacaggagattttttttctatctgtttgtatgctttctagctgaatttgaggtacagggtgttgggataattattcttgtcaa

SEQ ID NO: 726594 - DNA, 641 bp, Homo sapiens
tagaatttatttcagtgttagttccagcacttctagtatctcatggctctgtaatattagtttctcaattcaatattatttttctgagaatcagtcattatgaaaaacaaagatgtttctctatattctgaatctctttgaacttccatagaatggtattttccaaattgtagacctgagtcctttacaagtgattgtgacaataaatgtttttaaataacaggataagaaaatcatgtttatgtttttagtaccacaattagtttttaagagatctttgwaaaaaaaaacttagtctattgggatctgattaaaaacatatgcaggatacgttatgaaaatgggctatatatatcttagaactgctctgaatataggctatgtcatttaatagttctatggtcaatgagcctcattttttatcatttaaatagggagaatcaaacttaatatcagcatggctttaatacttatattaaattatgtatgtatgttaaagcactgagttaggctgcaccatttttcacaaatatttgtgattcatcactgaagatgaattatgtttccccaactcaataacatcacacttagacatgtggtttgctttggcgaatggtatgtaggtagaatgatgtgtttca

SEQ ID NO: 726595 - DNA, 1078 bp, Homo sapiens
tgttagattgctcattaattctcttgtgccttctaagtcattttgaagatctagtgtttttcaggtgtcgcctcttctttttattcttttaagtcatttctaggactcagatgttttcctcaagaagatgcattgttttagtaaagttcagtttgaatccttcttactacatttttatttaatcccccactatgttgtttttcttcttgagatattttatttgctgtcagtaggcattctaagcagaggtttagctgataattagccatttctttagtgacacatctcacttgacaaagagggttaaaaaagatgatttccttggattgtactttttagttgtgatgatatattccattatttactatgtaaactgatacaccttagctcagcactaggttttgtatcatcaaactaaaaaaacaaatttaatagttttttctcctctttgaaccaaaacttaagaagtttgtggaaatgtgaaaagctagaataacaaatatgcaattaagcacaatcctctgagaaatagaaaatagcaataattgtttagattataagattcggggttcaatgttccataaaacaaaggtattatttagatttatttttgtttccttacaactaagcttaacacaggcttttatagaaatttaaaaatatttatataaaaggacaagggactattaagaaggaagataaatatttcatgtagaactactacatcagctttcttgaaataattaactggtaagttcaatttaccctcaaatcaattaagattcaataacagtttcaaccttttccccttttggttgaagtttgaccaaaytgattttgttattttgacagactatggtcataatcaaaccactcgaaatcctttgtggcatcataaagggactctttcagaatattaagaaaagcatccatagcattattatactttttgtccacacattatttgacatgccatctttttcacatgaatatgtaaaatgatgtaatcctaattaggttcatcatacaaatttttaatagtgaaaaggcatgacaaaatgaggcctctctaaagtta

SEQ ID NO: 726596 - DNA, 864 bp, Homo sapiens
gctgcacttacttccaatcctctggttgttccaaaaaagtttaagcacacaattccatctattaatctacttttcaattaaaatatttattctaaactctgacaaagtatactgttaataaaccttgatagtataaatgtgtcattatatgactatgtctaaagtaacaacctcctccctgtttgtagtaaaagaacagcaaacacaccttcatcttattgaatgattagaaaaattaatgaaacaacagttgtataatcttcaaattataattaggaaattaactcatatataaattgtgaatgtgataatttttaatttttgagtctcgtttgatgttaaaaaaaactgaaatgtccaaaggatgtgtcgaacccctttctcctttgcccatgtatgcctcaggagtcagaaagaataagtaacaaatatttaagcctcatttgaggttcagatggccatgtgactctgcttgtatcaatgaggcttacagacaaattagcatgtctactaacaaaattatgcaaaatgaatttctaattttaaaaagttataaaacataaaaacagataactmtgcaaaggtaaataatcaagatgatgttgttttctaaaagacaaataaaaaaatctgaagttttatttatacaagtaggaatatttcaagttgaggtgccattttgtaggagattcttaaatgactgacttcagtgctttccctgttgaggcacttgtgatagctttaatacctgtatttggcagcattaactgaaggggaacttttacatcaaatctataaatataataaaggattactttggaaaaactaaactcactaacagaatataaatattttgcctgtaac

SEQ ID NO: 726597 - DNA, 1767 bp, Homo sapiens
gaatgtagtggcacaatctcagctgactgcaacctctgcctctcggttcaagcaatcctcccgtctcagcttcctgagtagctgggatacaggcgcacgacaacatgcctcgctaattttcctttcctctgctccttccttgacaaaagtgctagctttacctgagtggctttcggagcttgataaaaactctcttttttcaggagatttttggaagccaaagaaatttttatttgctcttgcttcatcatctgttttgaggtggtgagtctgtagtcccagccactctgaaggctgtggtgagaggatcatttgagcctgagagttcgaggctgcagtgagctatggttgggccacagcactacagcttgggtgagagaatgagacagtgtctcaaacataaataaaatgaaatccaaaartatatttagaaaaaaataagtaaataatgatagaaagaaaaatgtgacttaatatgcagtaattaaatatccctatgcaaattaagatttctctattcctgctcacttttggtgtctatttgcatggaatattttttccaccccttaaccttaagtttatgtgagttcttatgtgttaggtgagtcttctgaagagagcacaaacttggttgttgaatttttatccattctgtcattctgtatcttttaagtggagcatttaagccatttacatccaacattagtaattacatttattagggataaagtgtaggcataaaaagttagcggctagaatagagaaacaaaaacagaaagagttttagttccttaggaaaccactaaataagttgactgaaatcagaaaatgccttcttagactgttaggtgagaaaaataaagccttgatcatttcagcctctataactcaattttctgttacgttctactaaacacattctttgctgagacagtacctcctatataacatatccaataaacttcaataaataatctccacttcttatttttattaaaaatgtctcaccattaaaagcactaaatcttctacagcatgttagcatcttacagcacattacagcctgttttgtgtgtttatggagcttctagaccattttcccttccttctacttagaacatcctggccttaaattcatcttcaaccacttcacccactgtttttacttccttagacattcttccaacctttacctgaatattttatctcctggatcactgtcacactctctaacattgctgctttggttttctctcccaggtacaaaatataaagtttttctatggataatctaatgagtcaagcttaagtcttgggaatatgaggcacacgaaaaagaaaggtttatgtaagaatctcaaaatcgagaagtatctcaaagtctgaatatcaaaaagtcagaaacatagtcccaaatttacacttcttgcagaattacaactgtccatttcaacctcctggagagaaatttagaaatttagaattttagaaatttagaaatttagaattttttttcctagaaaatgaagtgctttcaaggaaaggatctgcatttttctaagtagttcccacaaataaaatgtatgtttgccatttcattcactcaaaagtgaaggcagctaagctcagaggtccaactatagtcatagacattctaataaatagcaatatagtccctttctcttaagtgtgaaaagaaaaccagagactaccagccctatggagaaaatttgcaatgtatatgaaataccataatttaaaaaaaaa

SEQ ID NO: 726598 - DNA, 1767 bp, Homo sapiens
gaatgtagtggcacaatctcagctgactgcaacctctgcctctcggttcaagcaatcctcccgtctcagcttcctgagtagctgggatacaggcgcacgacaacatgcctcgctaattttcctttcctctgctccttccttgacaaaagtgctagctttacctgagtggctttcggagcttgataaaaactctcttttttcaggagatttttggaagccaaagaaatttttatttgctcttgcttcatcatctgttttgaggtggtgagtctgtagtcccagccactctgaaggctgtggtgagaggatcatttgagcctgagagttcgaggctgcagtgagctatggttgggccacagcactacagcttgggtgagagaatgagacagtgtctcaaacataaataaaatgaaatccaaaagtatatttagaaaaaaataagtaaataatgatagaaagaaaaatgtgacttaatatgcagtaattaaatatccctatgcaaattaagatttctctattcctgctcacttttggtgtctatttgcatggaatattttttccaccscttaaccttaagtttatgtgagttcttatgtgttaggtgagtcttctgaagagagcacaaacttggttgttgaatttttatccattctgtcattctgtatcttttaagtggagcatttaagccatttacatccaacattagtaattacatttattagggataaagtgtaggcataaaaagttagcggctagaatagagaaacaaaaacagaaagagttttagttccttaggaaaccactaaataagttgactgaaatcagaaaatgccttcttagactgttaggtgagaaaaataaagccttgatcatttcagcctctataactcaattttctgttacgttctactaaacacattctttgctgagacagtacctcctatataacatatccaataaacttcaataaataatctccacttcttatttttattaaaaatgtctcaccattaaaagcactaaatcttctacagcatgttagcatcttacagcacattacagcctgttttgtgtgtttatggagcttctagaccattttcccttccttctacttagaacatcctggccttaaattcatcttcaaccacttcacccactgtttttacttccttagacattcttccaacctttacctgaatattttatctcctggatcactgtcacactctctaacattgctgctttggttttctctcccaggtacaaaatataaagtttttctatggataatctaatgagtcaagcttaagtcttgggaatatgaggcacacgaaaaagaaaggtttatgtaagaatctcaaaatcgagaagtatctcaaagtctgaatatcaaaaagtcagaaacatagtcccaaatttacacttcttgcagaattacaactgtccatttcaacctcctggagagaaatttagaaatttagaattttagaaatttagaaatttagaattttttttcctagaaaatgaagtgctttcaaggaaaggatctgcatttttctaagtagttcccacaaataaaatgtatgtttgccatttcattcactcaaaagtgaaggcagctaagctcagaggtccaactatagtcatagacattctaataaatagcaatatagtccctttctcttaagtgtgaaaagaaaaccagagactaccagccctatggagaaaatttgcaatgtatatgaaataccataatttaaaaaaaaa

SEQ ID NO: 726599 - DNA, 1767 bp, Homo sapiens
gaatgtagtggcacaatctcagctgactgcaacctctgcctctcggttcaagcaatcctcccgtctcagcttcctgagtagctgggatacaggcgcacgacaacatgcctcgctaattttcctttcctctgctccttccttgacaaaagtgctagctttacctgagtggctttcggagcttgataaaaactctcttttttcaggagatttttggaagccaaagaaatttttatttgctcttgcttcatcatctgttttgaggtggtgagtctgtagtcccagccactctgaaggctgtggtgagaggatcatttgagcctgagagttcgaggctgcagtgagctatggttgggccacagcactacagcttgggtgagagaatgagacagtgtctcaaacataaataaaatgaaatccaaaagtatatttagaaaaaaataagtaaataatgatagaaagaaaaatgtgacttaatatgcagtaattaaatatccctatgcaaattaagatttctctattcctgctcacttttggtgtctatttgcatggaatattttttccaccccttaaccttaagtttatgtgagttcttatgtgttaggtgagtcttctgaagagagcacaaacttggttgttgaatttttatccattctgtcattctgtatcttttaagtggagcatttaagccatttacatccaacattagtaattacatttattagggataaagtgtaggcataaaaagttagcggctagaatagagaaacaaaaacagaaagagttttagttccttaggamaccactaaataagttgactgaaatcagaaaatgccttcttagactgttaggtgagaaaaataaagccttgatcatttcagcctctataactcaattttctgttacgttctactaaacacattctttgctgagacagtacctcctatataacatatccaataaacttcaataaataatctccacttcttatttttattaaaaatgtctcaccattaaaagcactaaatcttctacagcatgttagcatcttacagcacattacagcctgttttgtgtgtttatggagcttctagaccattttcccttccttctacttagaacatcctggccttaaattcatcttcaaccacttcacccactgtttttacttccttagacattcttccaacctttacctgaatattttatctcctggatcactgtcacactctctaacattgctgctttggttttctctcccaggtacaaaatataaagtttttctatggataatctaatgagtcaagcttaagtcttgggaatatgaggcacacgaaaaagaaaggtttatgtaagaatctcaaaatcgagaagtatctcaaagtctgaatatcaaaaagtcagaaacatagtcccaaatttacacttcttgcagaattacaactgtccatttcaacctcctggagagaaatttagaaatttagaattttagaaatttagaaatttagaattttttttcctagaaaatgaagtgctttcaaggaaaggatctgcatttttctaagtagttcccacaaataaaatgtatgtttgccatttcattcactcaaaagtgaaggcagctaagctcagaggtccaactatagtcatagacattctaataaatagcaatatagtccctttctcttaagtgtgaaaagaaaaccagagactaccagccctatggagaaaatttgcaatgtatatgaaataccataatttaaaaaaaaa

SEQ ID NO: 726600 - DNA, 932 bp, Homo sapiens
aggagctgtaagctgtaaccctctcatcctttgctggcaccaggcaggggtggagctgggctagccctggagccatgggtcagagcagtgtgatgggaacaaataagcagaggcctggccagccacagaagtggaattctggctagcaaaagcagggccaagaaaaatcccatttcatttctacatggcaagagcagcacaatacctccattgtcttaattaagggttaaggtaactsttctctttgttataatgttatgtggggtatctttgatcatcttaatatctcaaaaagtacaaagttgaatattacaataatcatatttcactaattttcctggtgaactgaaagtagtaagcaatctagataccttggtaaaaatgtagatataacttggtaaatgattgcatgtcacagagaggaagatatatcctgaaaagttcctggcttcccatattagcagaagttctaggaatccagtggttttgggcatattggagtatttttctaaacagaatattctgagctttactacatgatgcaaaaaggccaaatgtttgtggttatgcctctgatatttgaaggcaatatgtaccatatgcaggcatattgttcagattcacttattatgtatcctagaagtctgtctattttcagtaatatctgaggcaaaacaaaagcaaacaaaaggctctatagtaggtagaatagctcttttcccatttgggcaacatggcaaagcagttgttcttttcccatttgggcaacgtggcaaagcacacgcagtgatctcggtagcattgttgtcaaatataaatgccagagaaagcctttgccacactccaatagagaagtccaaaattttgcaactgtaattttttgagaaagatcatgctaatttattatgactttctaacctagaaaatttacc

SEQ ID NO: 726601 - DNA, 627 bp, Homo sapiens
ccaaactagatagtaattctacattaatgttcaaaatatattgcaaattctagtcctggtgcattttaagccgatttcgacatcagacatggggggtcagcttttctaggaacagatctgggaatctgtattttcaccaggatttcctggtcatcctcaggcatgataaaacttgagaaccactgactcagatttttcttctataagagaagagctgccattcccacttccttctcactataaattaaagagtgacaatcaaataattcataggyacaagagatcgatagtccacagtaacatatgacagtgccctgaaacagcctacctaaaatgatatccctttaaaagtgaggccagtagaagaaagaacatctcataggcactgtcataaaatgtcctatatcagaatggttttgccattctttccatctgaatatattttaagcagcacagtttaaacacaaggcaccaaattcttccctggtcaagtttggtgttggtgattcgcaagattcttcaaggaaacagatgtttttaagcaccctgccaccacaaggtacacatttaagtatgtgctttctattccatattcacttacaaaacattaactatgttaaggggtca

SEQ ID NO: 726602 - DNA, 934 bp, Homo sapiens
tgctagccatgagygaagctccgtgggcgtaggaccctccaagccaggtgtgggatataacctcctggtgtgccgtttgttaagcccgttggaaaagtgcagtattagggtgggagtgacccaattttccaggtgccctctgtcacccctttctttgactaggaaagggaattccctgaccccttgtgcttcccaggtgaggtgatgccttgccctgcttcagctcatgcacggtgtgctgcacccactgtcctgcacccactgtccggcactccccagtgagatgaacctggtaccttagttggaaatgcagaaatgactcgtcttctgcatcgctcatgctgggagctgtagactggagctgttcctatttggccatcttggctccacccccttggctggcttctttaccatatgctgttttatcagcaaggtctttgtgacctttctgtaggttgcctgttcactctgatgtaatgttattaagttttacttttgctggaaaatatgatttgacctcctatctcatcctgtgactaagaatgacttaacctcctgggaattcagcccagtaagtcccagccttatttttacccagcccctattcaagatggagtagctcttggtcaaacgcctctgacatatttcacccttcctttttataagagaacccttaatcctaagtgttctagagcagcaaagatccatcttctgtaacttcttcaggctgaataggggtgatgatattcttgcttaactattagggtctcttgtatttggggtagagaggagctcagtcagaaagcatcagtatggccacttataactccaagttccaacaaaaggtgatatctggaagattaataagtgtttgatttaagaaaatgttttgtaagcttatcctgcattcctacacaacgagtacaacaggaat

SEQ ID NO: 726603 - DNA, 934 bp, Homo sapiens
tgctagccatgagcgaagctccgtgggcgtaggaccctccaagccaggtgtgggatataacctcctggtgtgccgtttgttaagcccgttggaaargtgcagtattagggtgggagtgacccaattttccaggtgccctctgtcacccctttctttgactaggaaagggaattccctgaccccttgtgcttcccaggtgaggtgatgccttgccctgcttcagctcatgcacggtgtgctgcacccactgtcctgcacccactgtccggcactccccagtgagatgaacctggtaccttagttggaaatgcagaaatgactcgtcttctgcatcgctcatgctgggagctgtagactggagctgttcctatttggccatcttggctccacccccttggctggcttctttaccatatgctgttttatcagcaaggtctttgtgacctttctgtaggttgcctgttcactctgatgtaatgttattaagttttacttttgctggaaaatatgatttgacctcctatctcatcctgtgactaagaatgacttaacctcctgggaattcagcccagtaagtcccagccttatttttacccagcccctattcaagatggagtagctcttggtcaaacgcctctgacatatttcacccttcctttttataagagaacccttaatcctaagtgttctagagcagcaaagatccatcttctgtaacttcttcaggctgaataggggtgatgatattcttgcttaactattagggtctcttgtatttggggtagagaggagctcagtcagaaagcatcagtatggccacttataactccaagttccaacaaaaggtgatatctggaagattaataagtgtttgatttaagaaaatgttttgtaagcttatcctgcattcctacacaacgagtacaacaggaat

SEQ ID NO: 726604 - DNA, 934 bp, Homo sapiens
tgctagccatgagcgaagctccgtgggcgtaggaccctccaagccaggtgtgggatataacctcctggtgtgccgtttgttaagcccgttggaaaagtgcagtattagggtgggagtgacccaattttccaggtgccctctgtcacccctttctttgactaggaaagggaattccctgaccccttgtgcttcccaggtgaggtgatgccttgccctgcttcagctcatgcacggtgtgctgcacccmctgtcctgcacccactgtccggcactccccagtgagatgaacctggtaccttagttggaaatgcagaaatgactcgtcttctgcatcgctcatgctgggagctgtagactggagctgttcctatttggccatcttggctccacccccttggctggcttctttaccatatgctgttttatcagcaaggtctttgtgacctttctgtaggttgcctgttcactctgatgtaatgttattaagttttacttttgctggaaaatatgatttgacctcctatctcatcctgtgactaagaatgacttaacctcctgggaattcagcccagtaagtcccagccttatttttacccagcccctattcaagatggagtagctcttggtcaaacgcctctgacatatttcacccttcctttttataagagaacccttaatcctaagtgttctagagcagcaaagatccatcttctgtaacttcttcaggctgaataggggtgatgatattcttgcttaactattagggtctcttgtatttggggtagagaggagctcagtcagaaagcatcagtatggccacttataactccaagttccaacaaaaggtgatatctggaagattaataagtgtttgatttaagaaaatgttttgtaagcttatcctgcattcctacacaacgagtacaacaggaat

SEQ ID NO: 726605 - DNA, 934 bp, Homo sapiens
tgctagccatgagcgaagctccgtgggcgtaggaccctccaagccaggtgtgggatataacctcctggtgtgccgtttgttaagcccgttggaaaagtgcagtattagggtgggagtgacccaattttccaggtgccctctgtcacccctttctttgactaggaaagggaattccctgaccccttgtgcttcccaggtgaggtgatgccttgccctgcttcagctcatgcacggtgtgctgcacccactgtcctgcacccactgtccggcactccccagtgagatgaacctggtaccttagttggaaatgcagaaatgactcrtcttctgcatcgctcatgctgggagctgtagactggagctgttcctatttggccatcttggctccacccccttggctggcttctttaccatatgctgttttatcagcaaggtctttgtgacctttctgtaggttgcctgttcactctgatgtaatgttattaagttttacttttgctggaaaatatgatttgacctcctatctcatcctgtgactaagaatgacttaacctcctgggaattcagcccagtaagtcccagccttatttttacccagcccctattcaagatggagtagctcttggtcaaacgcctctgacatatttcacccttcctttttataagagaacccttaatcctaagtgttctagagcagcaaagatccatcttctgtaacttcttcaggctgaataggggtgatgatattcttgcttaactattagggtctcttgtatttggggtagagaggagctcagtcagaaagcatcagtatggccacttataactccaagttccaacaaaaggtgatatctggaagattaataagtgtttgatttaagaaaatgttttgtaagcttatcctgcattcctacacaacgagtacaacaggaat

SEQ ID NO: 726606 - DNA, 934 bp, Homo sapiens
tgctagccatgagcgaagctccgtgggcgtaggaccctccaagccaggtgtgggatataacctcctggtgtgccgtttgttaagcccgttggaaaagtgcagtattagggtgggagtgacccaattttccaggtgccctctgtcacccctttctttgactaggaaagggaattccctgaccccttgtgcttcccaggtgaggtgatgccttgccctgcttcagctcatgcacggtgtgctgcacccactgtcctgcacccactgtccggcactccccagtgagatgaacctggtaccttagttggaaatgcagaaatgactcgtcttctgcatcgctcatgctgggagctgtagactggagctgttcctatttggccatcttggctccacccccttggctggcttctttaccatatgctgttttatcagcaaggtctttgtgacctttctgtaggttgcctgttcactstgatgtaatgttattaagttttacttttgctggaaaatatgatttgacctcctatctcatcctgtgactaagaatgacttaacctcctgggaattcagcccagtaagtcccagccttatttttacccagcccctattcaagatggagtagctcttggtcaaacgcctctgacatatttcacccttcctttttataagagaacccttaatcctaagtgttctagagcagcaaagatccatcttctgtaacttcttcaggctgaataggggtgatgatattcttgcttaactattagggtctcttgtatttggggtagagaggagctcagtcagaaagcatcagtatggccacttataactccaagttccaacaaaaggtgatatctggaagattaataagtgtttgatttaagaaaatgttttgtaagcttatcctgcattcctacacaacgagtacaacaggaat

SEQ ID NO: 726607 - DNA, 934 bp, Homo sapiens
tgctagccatgagcgaagctccgtgggcgtaggaccctccaagccaggtgtgggatataacctcctggtgtgccgtttgttaagcccgttggaaaagtgcagtattagggtgggagtgacccaattttccaggtgccctctgtcacccctttctttgactaggaaagggaattccctgaccccttgtgcttcccaggtgaggtgatgccttgccctgcttcagctcatgcacggtgtgctgcacccactgtcctgcacccactgtccggcactccccagtgagatgaacctggtaccttagttggaaatgcagaaatgactcgtcttctgcatcgctcatgctgggagctgtagactggagctgttcctatttggccatcttggctccacccccttggctggcttctttaccatatgctgttttatcagcaaggtctttgtgacctttctgtaggttgcctgttcactctgatgtaatgttattaagttttacttttgctggaaaatatgatttgacctcctatctcatcctgtgactaagaatgacttaacctcctgggaattcagcccagtaagtcccagccttatttttacccagcccctattcaagatggagtagctcttggtcaaacgcctctgacatatttcacccttcctttttataagagaacccttaatcctaagtgttctagagcagcaaagatccatcttctgtaacttcttcaggckgaataggggtgatgatattcttgcttaactattagggtctcttgtatttggggtagagaggagctcagtcagaaagcatcagtatggccacttataactccaagttccaacaaaaggtgatatctggaagattaataagtgtttgatttaagaaaatgttttgtaagcttatcctgcattcctacacaacgagtacaacaggaat

SEQ ID NO: 726608 - DNA, 2056 bp, Homo sapiens
tcttttatccatatagttttattattttttctatcttgaattgacaaattgcttattatttatctctatgtttttcgtagtttttgttgctgttgtaaatctgatcttttgccatgtcattttctaatatttattggtgtatatataggaacactactgatgtgtatatatttacttcacatcagccaccttattaattctactattcacactacaattctcttgaattgtttatgtagacaattgtatcacctccatattttgctaactttgtcttttctccaggatctgcaggccaaatccacgtggctgcttctgtagataatgttttattggcactagccatgcttgtttgkttacgtagtgtctacaacagcagacttgtgtggttctgacaaagaccatctgacttgcaaaacctgaagtatttgctgtcttgtcccttataaaaaaaagtttcccaagtcctgccattgactgtttataaatttaagatctttttctggacctcttattgttaaggacaaccaaaacaaaactaaatagtagcaataatggcgggacccctttgacttgtgttttacattggaacatttttggtgttttacagttagaatgatggttgccattggtttctggtagataacctctatcaagttaaggaaaacactaaccatttcaaccttactaagagatttttatcaggagtgggtattggattttaggaacttcctactcaccatgcattgagatgatcatatagtatctcatttaatattttaacttagtgaattattctgatacatttcccactggtgagttgttcttgtatacttggttattatgtactatccttttaatgtatttatgggatcaatttttgaaaattttgtttgggattttttcatctatatttgtaagtaatagtgatttgttgttttcctattttaggaatgctttttttagtggcaactcattcttgttgctgtcatcttaaatctctctgaagacagcaattggaatttcttaaaagcctctcttctatttctttcatccactcaatttcctctggggtcaatatcttggtttttaatctcgatgcttcatgctcttgttactcctcaaatgtttgatgaccccgattgtcgactcataattttaatgaaagggttagaatgacatagaaggtggtatggatttacttgggaactagagcaagcctccttctggactgagaggctgactgtggcattctgtagatgaacatgggcatttatagacagatctaccctttgggttggatgaagatcagacagtaaacttcagccatcgttgagcgttatttgccgaagccagcaaaaatatgtactgaaaatggagcacccaagagtgcttagtaaaattcactggaaggccaggcgtggtggctcacacctgaaatctcagccttttgagaggcagaggtgggagaatcatttggtgctaggagttcaagactagcctgggcaagatagtgagatcccatctttaccaaaaaattcaaaaaattagctggggatagtgtcacacacttgtagtcctagctactcaggaggctaaggcgagagaattacttgaacccaggagtttgaagctgtagtgagctatgactgtgccactgtactccagcctgagtgacagagtgggaccccatgtctaaaatttttaaaaaaatgtaaaacttcactggaatgtggaaatttcttttcccactcccttctgattgattgattggatgcttggctggttggatgggaatctgcctgactgttatggtgtcccaagctttctgggcactgctctacttgttttttggctcaagacccacctttggaatcaatgaggtattttttccacgttatttaaggcaagggttcttgctgattgtagactgggggtgattatggcagcccattgttgacagggaagtcaaatggcccatagcatttttaaaaaatgtttactttaaggtctgggatacatgtgcagaatgtgcaggtttgttacatatgtatgc

SEQ ID NO: 726609 - DNA, 2056 bp, Homo sapiens
tcttttatccatatagttttattattttttctatcttgaattgacaaattgcttattatttatctctatgtttttcgtagtttttgttgctgttgtaaatctgatcttttgccatgtcattttctaatatttattggtgtatatataggaacactactgatgtgtatatatttacttcacatcagccaccttattaattctactattcacactacaattctcttgaattgtttatgtagacaattgtatcacctccatattttgctaactttgtcttttctccaggatctgcaggccaaatccacgtggctgcttctgtagataatgttttattggcactagccatgcttgtttgtttacgtagtgtctacaacagcagacttgtgtggttctgacaaagaccatctgacttgcaaaacctgaartatttgctgtcttgtcccttataaaaaaaagtttcccaagtcctgccattgactgtttataaatttaagatctttttctggacctcttattgttaaggacaaccaaaacaaaactaaatagtagcaataatggcgggacccctttgacttgtgttttacattggaacatttttggtgttttacagttagaatgatggttgccattggtttctggtagataacctctatcaagttaaggaaaacactaaccatttcaaccttactaagagatttttatcaggagtgggtattggattttaggaacttcctactcaccatgcattgagatgatcatatagtatctcatttaatattttaacttagtgaattattctgatacatttcccactggtgagttgttcttgtatacttggttattatgtactatccttttaatgtatttatgggatcaatttttgaaaattttgtttgggattttttcatctatatttgtaagtaatagtgatttgttgttttcctattttaggaatgctttttttagtggcaactcattcttgttgctgtcatcttaaatctctctgaagacagcaattggaatttcttaaaagcctctcttctatttctttcatccactcaatttcctctggggtcaatatcttggtttttaatctcgatgcttcatgctcttgttactcctcaaatgtttgatgaccccgattgtcgactcataattttaatgaaagggttagaatgacatagaaggtggtatggatttacttgggaactagagcaagcctccttctggactgagaggctgactgtggcattctgtagatgaacatgggcatttatagacagatctaccctttgggttggatgaagatcagacagtaaacttcagccatcgttgagcgttatttgccgaagccagcaaaaatatgtactgaaaatggagcacccaagagtgcttagtaaaattcactggaaggccaggcgtggtggctcacacctgaaatctcagccttttgagaggcagaggtgggagaatcatttggtgctaggagttcaagactagcctgggcaagatagtgagatcccatctttaccaaaaaattcaaaaaattagctggggatagtgtcacacacttgtagtcctagctactcaggaggctaaggcgagagaattacttgaacccaggagtttgaagctgtagtgagctatgactgtgccactgtactccagcctgagtgacagagtgggaccccatgtctaaaatttttaaaaaaatgtaaaacttcactggaatgtggaaatttcttttcccactcccttctgattgattgattggatgcttggctggttggatgggaatctgcctgactgttatggtgtcccaagctttctgggcactgctctacttgttttttggctcaagacccacctttggaatcaatgaggtattttttccacgttatttaaggcaagggttcttgctgattgtagactgggggtgattatggcagcccattgttgacagggaagtcaaatggcccatagcatttttaaaaaatgtttactttaaggtctgggatacatgtgcagaatgtgcaggtttgttacatatgtatgc

SEQ ID NO: 726610 - DNA, 1356 bp, Homo sapiens
actgaaatgtttggtaccaaagcctagttaaaaaattattcctggtttcacccatgaatgtggggaaaagaaagagagatcagactgttactgtgtctatgtagaaagaagtagacataagagactccattttgttctgtataaggaaaattcttctgccttgagatgctgttaatctgtaaccctatcctcaaccctatgctcacagagacatgtgctttgttgactcaagatttaatggatttagggctactcaggatgtgctttgttaaacaagtgcttgaaggcagtatgcttgttaaaagtcatcaccactctctaatctcaagtacccaatacgctgtggaaggccgcagggacctctgcctaggaaagcgaggtactgtccaaggtttctccccatgtgatagcctgagatatggcctcrtgggaagggaaagacctgaccatcccccagcccgacacccgtaaagtgtctgtgctgaggaggattagtaaaagaggaaggcctctttgcagttgagataagaggaaggcatctgtctcctgctcgtccctgggcaatgggatgtcttggtgtaaaacccaattgtatgtttcatctactgagataggagaaaaccgccttaaggctggaggtgagacatgctggcggcaatactgctctttaatgcaccgagatgtttatgtatgtgcacatcaaagcacagcacctttttcttaaccttctttatgacacagagacatttgttcacatgttttcctgctgaccctctacccgctattaccctatcatcctgccacatccccctctctgagatggtagagataatgatcaataaatactgagggaaatcagagacttgtgccagcgcaggtcctctgtatgctgagcgctggtcccctgggcccacttttctttctctgtactttgtctctgtgtctctttcttttctcagtctcttgtcccacccgatgagaaacacccacaagtgtggaggggcaggccactccttcaatgaataagcaagatctcaacactgtgcagtaactctggactgaacactacagacatataagagagggcttgcgtcctggatgtggctgtgaaataaaggcttgagatggagctggagggttgataagaagtcagtctctgatctgtgatgctgtgattcttaagcccgctgcagatgatgctgttggctctgtgtgtggcttattttcagccacattcagtggcaatgtgcctgccagtcatgtttgacatcaactagcacactcaagccatgaatactgaagtcactaaaaaactacacatgttttgaaacatcaaagataggaatataggatgta

SEQ ID NO: 726611 - DNA, 1356 bp, Homo sapiens
actgaaatgtttggtaccaaagcctagttaaaaaattattcctggtttcacccatgaatgtggggaaaagaaagagagatcagactgttactgtgtctatgtagaaagaagtagacataagagactccattttgttctgtataaggaaaattcttctgccttgagatgctgttaatctgtaaccctatcctcaaccctatgctcacagagacatgtgctttgttgactcaagatttaatggatttagggctactcaggatgtgctttgttaaacaagtgcttgaaggcagtatgcttgttaaaagtcatcaccactctctaatctcaagtacccaatacgctgtggaaggccgcagggacctctgcctaggaaagcgaggtactgtccaaggtttctccccatgtgatagcctgagatatggcctcatgggaagggaaagacctgaccatcccccagcccgacacccgtaaagtgtctgtgctgaggaggattagtaaaagaggaaggcctctttgcagttgagataagaggaaggcatctgtctcctgctcgtccctgggcaatgggatgtcttggtgtaaaacccaattgtatgtttcatctactgagataggagaaaaccgccttaaggctggaggtgagacatgctggcggcaatactgctctttaatgcaccgagatgtttatgtatgtgcacatcaaagcacagcacctttttcttaaccttctttatgacacagagacatttgttcacatgttttcctgctgaccctctacccgctattaccctatcatcctgccacatccccctctctgagatggtagagataatgatcaataaatactgagggaaatcagagacttgtgccagcgcaggtcctctgtatgctgagcgctggtcccctgggcccacttttctttctctgtactttgtctctgtgtctctttcttttctcagtctcttgtcccacccgatgagaaacacccacaagtgtggaggggcaggccactccttcaatgaataagcaagatctcaacactgtgcagtaactctggactgaacactacagacatataagagagggcttgcgtcctggatgtggctgtgaaataaaggcttgagatggagctggagggttgataagaagtcagtctctgatctgtgatgctgtgattcttaagcccgctgcagatgatgctgttggctctgygtgtggcttattttcagccacattcagtggcaatgtgcctgccagtcatgtttgacatcaactagcacactcaagccatgaatactgaagtcactaaaaaactacacatgttttgaaacatcaaagataggaatataggatgta

SEQ ID NO: 726612 - DNA, 2232 bp, Homo sapiens
tttataaaatgaatgagggatgttttatctttcaatttccctatttggatttgttttcaaattagtttgggtttacatttcacattgtaataaacaaccatgcatttacatagttataaatctgatgatctccttttcagaaattcctggaagtattacaatacataacattttttaagttcttgatgtttattgacaaattactttctagaaacttacygctttctactctcaccggaaactggaaactatttttatcctcttgtcattgaaatgggacactatctcattctgatatttgctaatttggtaaattaatatgtttaaatttatatttgcatattaataagctcatgtagtttgagtgagtttgttagtttttcaaatggtcttggtaggtttacaatagatttgtatgagcttttgtatattaatggataatgaatatcacgaaaggtttcagatatattaaatagggatatcttcacataactgtctttgaaagggtttctgtcagtcttaaatgaaataacttctttataacccctggaagagttccttgcatttagaagtattatatgtgttagctttttattgctgttagtacttcacttacaaattcatcaactataaaaaataattcacggatgcttacagctaaaaagagcttagcaattacgaagaaaagtggtaatagaaatttttactggtggatcacttattctaatgatataaaatgcatttttaaaaaagaactacaagtataacccttccggctcaagtgggcaggggttccagggtaccaccaacttgacttggcttttcctttgttcccagagtgacccatcttcaaagcatctctgaagggactttggtgccattgaacatcaaagactgaacactgttaccacagaccaagtcccttatttttttaaaaagacacacccaacccagagaggcaaattagcccttggttatacaagaagttgtaagaagcagcatatctcttatgtcttttctttgcagttgctacagagtaaaagaaaatcaattcggtgtattctccaggagtatggaggaaaacagcccttatttcaaaaaattttggaaggaagaaaaccaaaataatttgtgtggtcattgttttgtaatactgatggtgaaatgcatgtgaattatccagacacatctttatttcagccatcctaaaattttgactagaattacatattaaactctaattgcataaatgtaattaaaatatcagctcatcaatgattcatatttaaaacacacaaatctttcaaagaagtatcaattatatgaacttacatgacaagaataaaaaaatgacaattaggtatcagaagaaatctcaaagtcacatgaatggcaatatttttcttttcctaaggaagctaagaacatttattattacctgattactaaccttttattttcatgacttagaagaaaactagttaagaaatcatagtacttttgcttactcttcccaaacacagtgtgtcaataaacatttattgctatatttcttacataaaagggatattttaggtgataagtgtttgttttaatgttgcatacatacacaacaaacaaaatgctaattttcagcaagtttgatatgctttatttttgcttcctcccctgaatttgctttgtgagattattatacaggttatgattttgggggccttggaaacctaagtaggactttattcttttctttgaatttgagagtttaactacatgtacgtaacaatgtgcaatccatctttatgcaaatagtctaaaaaggcaatgtgcctgaagggctgttttatggcattatttggttttatatctttgcaatcaacactatgcagctaacatggccatgtaaattcatgagagatttttctattgaaacccaaacaaggtcacctgcttttgaagatcagagtgagataaaagtgacactgtttctacagtggtactaaaaaataatgtgtaaagcctctttaaaaaaaaatactattgattttgtctgtgaaaatatgtcattgatttttttttttcaagtttggattttcattgctaattctaatgagggaatttgagatgagttgtgcaatgagctatttatacttatttccttttacatactattccctaaaacatttaaaaaggttcaaaacctgtattcttttcaatggccacagatttttcagg

SEQ ID NO: 726613 - DNA, 2232 bp, Homo sapiens
tttataaaatgaatgagggatgttttatctttcaatttccctatttggatttgttttcaaattagtttgggtttacatttcacattgtaataaacaaccatgcatttacatagttataaatctgatgatctccttttcagaaattcctggaagtattacaatacataacattttttaagttcttgatgtttattgacaaattactttctagaaacttactgctttctactctcaccggaaactggaaactatttttatcctcttgtcattgaaatgggacactatctcattctgatatttgctaatttggtaaattaatatgtttawatttatatttgcatattaataagctcatgtagtttgagtgagtttgttagtttttcaaatggtcttggtaggtttacaatagatttgtatgagcttttgtatattaatggataatgaatatcacgaaaggtttcagatatattaaatagggatatcttcacataactgtctttgaaagggtttctgtcagtcttaaatgaaataacttctttataacccctggaagagttccttgcatttagaagtattatatgtgttagctttttattgctgttagtacttcacttacaaattcatcaactataaaaaataattcacggatgcttacagctaaaaagagcttagcaattacgaagaaaagtggtaatagaaatttttactggtggatcacttattctaatgatataaaatgcatttttaaaaaagaactacaagtataacccttccggctcaagtgggcaggggttccagggtaccaccaacttgacttggcttttcctttgttcccagagtgacccatcttcaaagcatctctgaagggactttggtgccattgaacatcaaagactgaacactgttaccacagaccaagtcccttatttttttaaaaagacacacccaacccagagaggcaaattagcccttggttatacaagaagttgtaagaagcagcatatctcttatgtcttttctttgcagttgctacagagtaaaagaaaatcaattcggtgtattctccaggagtatggaggaaaacagcccttatttcaaaaaattttggaaggaagaaaaccaaaataatttgtgtggtcattgttttgtaatactgatggtgaaatgcatgtgaattatccagacacatctttatttcagccatcctaaaattttgactagaattacatattaaactctaattgcataaatgtaattaaaatatcagctcatcaatgattcatatttaaaacacacaaatctttcaaagaagtatcaattatatgaacttacatgacaagaataaaaaaatgacaattaggtatcagaagaaatctcaaagtcacatgaatggcaatatttttcttttcctaaggaagctaagaacatttattattacctgattactaaccttttattttcatgacttagaagaaaactagttaagaaatcatagtacttttgcttactcttcccaaacacagtgtgtcaataaacatttattgctatatttcttacataaaagggatattttaggtgataagtgtttgttttaatgttgcatacatacacaacaaacaaaatgctaattttcagcaagtttgatatgctttatttttgcttcctcccctgaatttgctttgtgagattattatacaggttatgattttgggggccttggaaacctaagtaggactttattcttttctttgaatttgagagtttaactacatgtacgtaacaatgtgcaatccatctttatgcaaatagtctaaaaaggcaatgtgcctgaagggctgttttatggcattatttggttttatatctttgcaatcaacactatgcagctaacatggccatgtaaattcatgagagatttttctattgaaacccaaacaaggtcacctgcttttgaagatcagagtgagataaaagtgacactgtttctacagtggtactaaaaaataatgtgtaaagcctctttaaaaaaaaatactattgattttgtctgtgaaaatatgtcattgatttttttttttcaagtttggattttcattgctaattctaatgagggaatttgagatgagttgtgcaatgagctatttatacttatttccttttacatactattccctaaaacatttaaaaaggttcaaaacctgtattcttttcaatggccacagatttttcagg

SEQ ID NO: 726614 - DNA, 1412 bp, Homo sapiens
tgtcacatctgcccaggtccaatgtcatgagagtagaatcagagtgccacaggcatggcctgagactaggaagagagccatgctcactgacccatcccatgtctgggcttccagttagaactagagtttcattcaacctacatgtgcctataggtcctcactgcagcaatgacatctctcagctcagtaatggccacttggagcaggaatatgatctttatatggaagactcagtggatccttatcaccttcatagaaaggtactcacctcccacgtcaagagaaaagccaacatgtttttcctccaatgcataaaaggaacttccatagggcaggcaggagtcaggctgttcaagacaactggaaggagttgaataacatctatccagtgagtccwgcaagacttcaggctctactgcctccagcagctccctgctgagcctggaaaaggaggaaaaagtaaagaataagccaggggaaatcagacacaacagagccccaactaggtttcatgggtagcataaggaagtggttaaaaaagtaaaaggatagatccattaatgaggtaacaaattattgccttcatgttgggacagaacagggccaaatggaaaagaatgaaagagaaagacagatagacacacacacacacacacacacacacacacacacacacagagagagagaatgagctcagtgaattgtccaggtgacacactgatgagggagtaacaggacactctgagttagtgccctcaggacacacagcatacagtgatcaggaaaggactgtgctcaataattttccataaaatgtgctcaagtttccatgcagtcgccatgagaatacagtttttgaagtctggtccacctacagtaggttagtaaatgataaggggaggaagaaatggaaacctaaatatctactgcaatgaaaaccaacagcaatgttagtaggaataattcaggctcggttgaaaagatgtaatcgataatgtcagcccgccctgttttccctgaaccaggagtctccagatgtcaacacagaagaagctgttcacaattgctcagttacctggggcatggtgggccttggtcttcttcctcttcttggtcctttttaattcctgcaatacattcagacagggacagacaaaataagccaattcacctacacccgtaacagtccactgtctaatccccacacagggatctcaggctcctcagcaagagaacaggacaatgtgagagatatacttcaggaggcctgaaagctggtcatgatattctttggtttgcatctcagaaccaagggtgaaatatccctattctggtagatcgttatcccaaaatcatttatcccaagtttgtgcaaacagttatgccttattgttcccatcagttcaaagaca

SEQ ID NO: 726615 - DNA, 589 bp, Homo sapiens
agagaagacaggacttcgttcatcactttcgtgatggtgagcctatagatcttactgtatttgttctgctggttggccaggaagcaggccagttgagttacaaaacatttctctttgaggtttctgaactgctgtttcttctctgccagctggggatgcaatttctcgttgatttctagaatgttcatctctgccttctcgctggacaaggggccggctgataccaccatgctgacgtttgtggcagaagaggtggggccagggactggggagaagaaaggcaaacacatgatgggttaaaarctggtgaaatcaaataggtttaatcacactgagggatgtcagtggcagccttgtctacttatttgaagatgatgtttccctggtttcactcttgtcatctccagtcttgatctcctttaagtcaacttatcttagctatgcagtcaccttgaaaccaggacataaacacttctacacttttcttgcttataagtttctataaagcaaggcttggccctgagatttttaccccatgagtggccaatgtttctgtgtagcacaaaaggtttcattttgcctttttaat

SEQ ID NO: 726616 - DNA, 745 bp, Homo sapiens
atcgcttgaacctgggaggtggaggttgcagtgagccaaaattgtgccactgcactccagcctggccgacagagtgagactccatctcagagaaaaaaaaaaaaaagactgagtctcactatgctgcccaggctggacttggactccttcattcaagccatcctcctgcctaggcttcacctgggactacaggcccaatatttttgtcttaagtttctaagcagtcccaagactttgcacagtagctgttcaatgtattttgagtgaatgattaaaaacaagcttgatgtcgattttattggtacaatttatatttacatatgtaatatttatatgcttttatatatttatgtgtgcatgtatataattggtactaacttagcactgctgtgcctaagtgcctgagatgcatctcaaatgaataggcctgaggagagaagcttgtgtcattagctctgaccctgcagcactaatcctrgtttacccctttctttcagtctccctgagcacaatttatttgctgaaaggccacatctcactatggagtgaggatcaagaagtaaaggtctgaaagagagaagctgcggggctggggagactgttggttggagaggcgtcgggggcccaaggaaaagggaggattgtggggaggaatcggcgtagagatgagaggagcagcagagacagagtctcacgcagaggtgtgcccagacaccctgaaccaagttacttaacctcgtccacc

SEQ ID NO: 726617 - DNA, 745 bp, Homo sapiens
atcgcttgaacctgggaggtggaggttgcagtgagccaaaattgtgccactgcactccagcctggccgacagagtgagactccatctcagagaaaaaaaaaaaaaagactgagtctcactatgctgcccaggctggacttggactccttcattcaagccatcctcctgcctaggcttcacctgggactacaggcccaatatttttgtcttaagtttctaagcagtcccaagactttgcacagtagctgttcaatgtattttgagtgaatgattaaaaacaagcttgatgtcgattttattggtacaatttatatttacatatgtaatatttatatgcttttatatatttatgtgtgcatgtatataattggtactaacttagcactgctgtgcctaagtgcctgagatgcatctcaaatgaataggcctgaggagagaagcttgtgtcattagctctgaccctgcagcactaatcctagtttacccctttctttcagtctccctgagcacaatttatttgctgaaaggccacatctcactatggagtgaggatcaagaagtaaaggtctgaaagagagaagctgcggggctggggagactgttggtyggagaggcgtcgggggcccaaggaaaagggaggattgtggggaggaatcggcgtagagatgagaggagcagcagagacagagtctcacgcagaggtgtgcccagacaccctgaaccaagttacttaacctcgtccacc

SEQ ID NO: 726618 - DNA, 674 bp, Homo sapiens
ctttgggaggtcaaggcagggggatcacttgggctcaggagttcaagaccagcctgggcaacaaagtgagacctcgactctacaagaaataaaaaaatcagcaagcctggtggcatgcacctgtggtcccaattgcacaggatgtgaggtaggaggattgcttcagaccaggaggccgaggctgtagtgagccataaagaaaagaaaagattactaactaaaatgttcttaacgcactaaatgaaataccttggcctcctgccttggggctctctccgcagcctccccgacactactgttgagctgactgctcacaccaatcagacacccctgctcaaagatcaggcaggcccaagctcccccgctgaggcaggctctcctttccctgtaccagctcttccttgcaaccccctggctgtcatgggctcccacctccatgcctttgctyatgccttgctcctgcttggagcgcctgctgctctgcttcaaccctacccatcccttgatgctctgagcaaattccatctccacaaattggtttttctgacctccccacccctcccatccttctgagcctccaggacattccttctgtcccacgtacatatcactgaccactcgcttcctcagtctagaattttggggatctacatcttttcatcacaagaggctgt

SEQ ID NO: 726619 - DNA, 626 bp, Homo sapiens
tactacaatgcttatcaatgatggtacagagaccgcctgagatacttgtttgaaatgaagattgctaggctacatgcccagaaattctggtttactagatctcggttggtgtttagaaatacttaaaaattgtctcaggtaattttaatgtcaattaaaattgcaagaccattggttttcaacccttttttttcttayggatctcataataaagacatatggtaaaacaaaacatatctattttttctttttttttttattaaagttctgggatacatgttcagaatgtgcaggtttgttacataggtatacatgtgccacggtggtttgttgcacccataaacccaaaatctacattaggtgtttctcctaatgctctccctcccctagtcccccatcccccaacaggccccagtgtgtgatgttcccttcactgtgtcaatgtgttctcattgttcgattctcacttatgagtgagaatacacagtgattgattttctgttcctgtgttagtttgctgagaatgatggtttccagcttcatctatgtccctgcaaaggacatgaactcatccttttttatggctgcatagtattccgtggtgtatatgtgccacattttcttca

SEQ ID NO: 726620 - DNA, 645 bp, Homo sapiens
tgatgcaaaatggaattttgttttgtttgttggtagattcacatactaaaactttgcaggtaaagttgcttgcctcatgttagaatttaattagaaaactgaggctgccttttttttttttttttttttttttttaagacagrgtcttgttctgtcgcccaggccagttttttttttcttgtacagatggggttttaccatgttgctcaggctggtctcaaactcctggagtcaagggatctatttgcctcagcctctcaaagtgctgggattacaggtgtgagccacggctcctggctccttgctccagaatcagttttttaatggaagatagctcatactttgtttttgtttttaaagagacagggtctcactctgttgcccaggctggtagtagcgtgatcatagctcactgcagtctcaaactcctggactcaaatagtgctctggagtacctagaactacaagtgcctaccaccacacccagctaatttatttgtttttttttttttagagatggggggggtctccctatgttgcccaggctggtctcaaactcttcacctcaagcaaaactcccactgcagaaagctttgggattacaggcatgagccaccatgccaagcccatacttattgttaataa

SEQ ID NO: 726621 - DNA, 645 bp, Homo sapiens
tgatgcaaaatggaattttgttttgtttgttggtagattcacatactaaaactttgcaggtaaagttgcttgcctcatgttagaatttaattagaaaactgaggctgccttttttttttttttttttttttttttaagacagagtcttgttctgtcgcccaggccagttttttttttcttgtacagatggggttttaccatgttgctcaggctggtctcaaactcctggagtcaagggatctatttgcctcagcctctcaaagtgctgggattacaggtgtgagccacggctcctggctccttgctccaraatcagttttttaatggaagatagctcatactttgtttttgtttttaaagagacagggtctcactctgttgcccaggctggtagtagcgtgatcatagctcactgcagtctcaaactcctggactcaaatagtgctctggagtacctagaactacaagtgcctaccaccacacccagctaatttatttgtttttttttttttagagatggggggggtctccctatgttgcccaggctggtctcaaactcttcacctcaagcaaaactcccactgcagaaagctttgggattacaggcatgagccaccatgccaagcccatacttattgttaataa

SEQ ID NO: 726622 - DNA, 721 bp, Homo sapiens
tataatgcaaaacatggaataacattataaaacagaattagaaaaactcaaaaattaggcactataccatagggaaaaatagaaatgaaagaaaataataatttcagaaatgaagactaaactagaaatatcaaaagaacaaataaacacatggataatgctttaagaaaaaccgaagttgaaagtagaaaaaaattgagaaagagaaatgcagaaagaaatacawataatttgagagagaaattgaaacgtggaatatgaataaagaacttcttaaatatggttaataggcatctctaaagaaaaaaaaagcaagggaaagaactgatactaaaatctataattcagaaaaagtttctgcagtgagaaaaagatgaaaaagatttcaaactacgtgttgaaacagcataccaaatgccacattgaccagaattaaccaagaccaaaatatgttctaataaaactaccagattctaaagaaaaagaaagaaaaaataacaactgggcatccagaaagaacagtaagtgacactggaaaaagaaaactatgttagcatccctatttttggcaagtatagtttactccagaagaaaatgaggctacatagttcatgtggtttggctctgtgtcaccaccttgaattgtaatccccacgtgttgagggagaaacccagtgggaggtgattggatcacgggggtggtttccctcatgctgttctc

SEQ ID NO: 726623 - DNA, 603 bp, Homo sapiens
aggctaattaaaggctttgtcatcattaagataattaaagtatcaattagctttttaaaaggaagcttagccttaatcagaaatcctctattcacacagcagggcctcagatatggcagatattcctgaaatggaaaaacagtacttcaaagttkaggctctgtggaacttcgtcatgatttttcttcatcaatctctattcttttttgtagacggcatatttggtttttttttcccctgctttttgtctaactagttatatattgcttattgtagatacttttgcaaataccaaaaaaaatgaaactcccagaagcaacattttagctaatttttcccagcatttttctaagttttatttttatttttgtggttaaaagggataggtaaaaacccatcagcataaaaaatttacttctctaataccctaggaaaacaagagaattacaaaatacctagaactgaatgataatgatttctggtttcaaatatttcctgccatgaatttagttttatttatcctatcagtgattatgtatagcttttctacatggtttatttaattcttaaaaattctcagtgatttttctattccaacattgt

SEQ ID NO: 726624 - DNA, 603 bp, Homo sapiens
aggctaattaaaggctttgtcatcattaagataattaaagtatcaattagctttttaaaaggaagcttagccttaatcagaaatcctctattcacacagcagggcctcagatatggcagatattcctgaaatggaaaaacagtacttcaaagttgaggctctgtggaacttcgtcatgatttttcttcatcaatctctattcttttttgtagacggcatatttggtttttttttyccctgctttttgtctaactagttatatattgcttattgtagatacttttgcaaataccaaaaaaaatgaaactcccagaagcaacattttagctaatttttcccagcatttttctaagttttatttttatttttgtggttaaaagggataggtaaaaacccatcagcataaaaaatttacttctctaataccctaggaaaacaagagaattacaaaatacctagaactgaatgataatgatttctggtttcaaatatttcctgccatgaatttagttttatttatcctatcagtgattatgtatagcttttctacatggtttatttaattcttaaaaattctcagtgatttttctattccaacattgt

SEQ ID NO: 726625 - DNA, 645 bp, Homo sapiens
aaagtttccccagaatgagaaaggaaaggaacatatggaaacaaatttatttgtattacaaattttaaatttgcaaaacataaacctccctcataaggttctcagagtcttcaatatattttgaaacacaatgctaaaactgacatcgcatgttcttgatatcataaacccccacaaaagctgctcagctctctgagcctcatatacatattgttacatctgaccttgtgactcaccatgttcatgttcttgaggtaggtgatcaatgccctaggagggactgggtgtagtggctcacatcgcctgtaatcctagcactttgggaagttgaggtgggaggatccttgaagcccagtggtttgagaccggcctgggcagcatagcgagacctgctccctactaaaaattttttaaaaattgccagacccagtggtgggtgactgtagtgccagctatcaggaggctaakacaggaggctcatttgagcatgggagattgaggctgcagtgagctatgatcaggccactgcactccagcctaggtgagagaattagaccctgtctcaaaaaaataaaataaaaaattccctgggagcagagagccccgttatcattctttgggggaattccctgtctgcaaaattat

SEQ ID NO: 726626 - DNA, 631 bp, Homo sapiens
tgagacaatgccactgacgatccatctaacagcagagaaatctcattcaaatacattttcattgtgtgaatgcactcactgttaatkttggccttttgtaaaggtctcagctttaaatgtttataataaataagtagggaggcttgagagatggtaacagcttaaagcacaacacgaacacccaaaacgcctcagtattaaacacttcctggagagatgacctgctgaatgttctattttgcccttcccttcttccacttaggtagaattatccctaattgtacaaaaaggctgtgtgatgctggttttttctttgacattatgtgaagatttcattttctccaagtatggtgcaatgcacattagaggaatttgccaggtatattttccccctaaaacacaggcaagacagaagcagcagctaccaaagcaagtcatagcagtgagtcagccagccagctatcatttgcaagggctatttcaccttctttaaattatctttccacagaataggtataaaaagctaaggagagacactcatgcaacgtttctgacttcactattaatactttcacataaaatatatatacaggccgtgtttcaattaatttacctaaaattaacttactaa

SEQ ID NO: 726627 - DNA, 579 bp, Homo sapiens
gactcagcaggggcctggggccccagaagagatattggaaaggggacttaaaaaatgagtagagtggagccagatgaaaggggtgccaggatgcagccataaaaagaataaaatcacgtccttttcagcracatggatgcagctggaggccattatcctaagtgaattaacacagaaacagaaaaccaaatactgcatgttctcacttataagtgggagctacacttggggtgcacacagacaccaagagaaccataaacccgggattcataaagaggggcaggagggaagaggcaagggctgaaaagctacctatcgggtactatgttcactacttgggtgatgggatcattagaaatccaaacttcagcaacacactatttacccatgtaacaagcctgcccatgtattccctgaatctaaaatttaaaattaaaataaaaagaaaggagtgccagcggaaggtatccaggctggggtaggaagagatggtctgttggtaacggaaagcctttcaattccagggccttggcttcatggttaaaagcgcagaccctgaaactggacaatctgggtttg

SEQ ID NO: 726628 - DNA, 1021 bp, Homo sapiens
taataatataatagttaatatttacatagcattttctgtgccaggaactgttctaagtctttacatatattagctcatttaagtctcatgatgactggctgcataattagtgaggtcagtccagtgaaaaataatgcaaagctgcttgttcaaaaattattaagaattttaacatggtgatgccagagcattaaactaagagtggggcctttctgattacagggcagtgtacaaatacccaagtgacatatctcaatcttcatatcaactctatgagataaacaccattattaattgcagacaaaataattacgaagtggggaaaagctaactcacacaaggctacagggacaggaaggtttggagctgggattctacccaggtaattagtgttcagagtctatgttcttacctactggaaaaaaaaaagaaaaaagtcttttgtttatgtactaacctttattttataaattgcactatgtattttatttcagagctatgatatcaaaatatctattttgatatgatcatatagtataccatattcatctatatcaatgccatggtttgtacaaayagaaaaagatctgatgggaagcattatccatgtagctagttacaccaaaactaatatgaattttaccaatcaccaaacactattctaagccctttacttatattaacatcatataactgttaataccaccctatgaaataggtactattgttgcaatcatagtattttagatgaggacattgaggaatggaagacatatatcttgagcaatgcctcacatctaataactgctaaggtgaaatttgaaccccaacaggctggttggggtcttcaaggtactttatgttagtctcttgactgtgatgaatgaaatgtgccattgttttaattttatccactgctaaatcaccaataatcagcagaatgcctgacacattaaataaccaatcaatgtttgatgaagtaatgaatgcactgagtcctttgaaaattaaaattttaatc

SEQ ID NO: 726629 - DNA, 1688 bp, Homo sapiens
ctccatcactgcatccctgcttgtaattattcttcatgccacctttgtttcctcaaccatcaggaatatatcaataggtcaaatcgttttagtacttctgacttagctcttctttaagcttcataattattagatataaactgcagataatacagatctcttatttcagcagattctgtgattctgctttttgtttgtttgtttttgtcaggagagaaattggactaaattctgaagagtggccatggtttgggaagatagaagagggtgctgcatatagggatattaggagcagagctaaaaggcaggaatcaagttgcatgttggtgaagatatgtgatgtgttcggtgtagagaggtacacccttgaatttgaaatgtaatatggtggggggaggggtggaataatataaacctagaataagagtaggtctaggaagctggtccccacatcttcaactcaccttacagccacccagcaggcagacttatctcccaaatctggtccttttactctcttactctggttctttcaatgagactccagtgccttcagctaaatttcaaatgatttctcctgccattctagacattgcaggtcccagcacacatgagtttcctaaactaatcttcagtccttgctctcctgccaggcacctcacatttcagccacattcagtacatccttgaactcaccatgaacactcatttccacattaccacccatgtgctcacctgctcttatcttccacctccagtgcacttataaactcctacacagtatataagatacaggtaaaatataagtcattgtttgtatcattcctcagtcatagctatttacttcactacatgtacatccgatacccttgaacatatctgtattacaccatttaccacaacgtattatatttatgtacttacatgtctaatctgccacctagacttgagctcagcrtttttatttatccatgttccccttaaagattctcatatgcctgatagatggcaggtacctaatcgatgtttgttaaagtgttttggatggagaatcactaccatgttctttcctaaaaaatcccaggaattggtggtataacatgactggtcattgttaattaatgttttctactagagattgttcttagtcagtcttcatgattttttttggttaacaaatatttttgggattttaatggccaaaattatttctaaaaaattgcttctgtggttgttggtcattcacttagaaaggatttactgaacacttccaattaatgagctaatttcagttttctgaatcacaacaatatttatttcccaagaagtaaacaaatttctgcatataaattagaattttattaggtagcagttttataaatcatgtagtttagaatggcattctcctagaacaaatccataggtcttttttagaaaaaaaaaaaagaaaagaaaagaaaatgtcgcctcaataattttagatgtaatttccatacacattttattgttgtgtattataggttgattactgctcctgatagatttttaagttgcttaagcatataaaagccccaatataattttccacagatagatggagagaaagaactttttaaacgcaactctataatttgtatatctgaatcctgatcttttaaagctttcttagtgttttccttagcagaaaa

SEQ ID NO: 726630 - DNA, 642 bp, Homo sapiens
agtcaataaaactctagtattgacaaacattttggaagatgtttaaagtgctcaataagatgaattcaatattaatttaaaacaaaaacaaccaaagcaactttcttgtcttatgaaaaagaatcataaacaaatcatagaaataaaaagtatacatatagtattaagtaattgtaatataaattaaaaagtgcatcagatgggatgatcataactggatacaatttaaaaacaaatttgtaaatcgaaaggtggtaccgggagtgaaacattgaatacacatggacacaaagaagggagccacagacmccagggcctacttgaggatggcaagtgagaggagagtgaggatcacaaaaccacctattgggtactatgcttattacttgggtgacaaagtaatctgtacaccaaactcccacaacacataatttactcatgtaacaaatctgcacctgtacctcctgcacctaaaatacatgttggaaagataaaagaaaagagaaaaatggtcctgggaaactcacctataaccatagtcagagggacaaagggatatatcatacaaaacacttaggacagaaggagaggatatagcatatgcttcacagtaatcccacaaaaataaacggaaaaaatagc

SEQ ID NO: 726631 - DNA, 642 bp, Homo sapiens
agtcaataaaactctagtattgacaaacattttggaagatgtttaaagtgctcaataagatgaattcaatattaatttaaaacaaaaacaaccaaagcaactttcttgtcttatgaaaaagaatcataaacaaatcatagaaataaaaagtatacatatagtattaagtaattgtaatataaattaaaaagtgcatcagatgggatgatcataactggatacaatttaaaaacaaatttgtaaatcgaaaggtggtaccgggagtgaaacattgaatacacatggacacaaagaagggagccacagaccccagggcctacttgaggatggcaagtgagaggagagtgaggatcacaaaaccacctattgggtactatgcttattacttgggtgacaaagtaatctgtacaccaaactcccacaacacataatttactcatgtaacaaatctgcacctgtacctcctgcacctaaaatacatgttggaaagawaaaagaaaagagaaaaatggtcctgggaaactcacctataaccatagtcagagggacaaagggatatatcatacaaaacacttaggacagaaggagaggatatagcatatgcttcacagtaatcccacaaaaataaacggaaaaaatagc

SEQ ID NO: 726632 - DNA, 698 bp, Homo sapiens
aggctggttaatggatacagaattattgtatatttttaaaaagccagaagattttgaatgttcacaattcaaagaaatgaaaaatggttgaagtagtaaatgtgctagttagcttgatcattacacactatatacatgtataaaaatatcactctatagcccataattatgtatatatgtgtcaattaaaacaagagaagctacattcatcccatttaaaaaacagaatatgggccagccttactgacttccttctaatgagtagaatgtagtgaaagggataccatgtggcttccctatttcagactgttttcccttggaacccagctccaattgtgagagccatcaggccacaaagagagcctgaaagtgcctgtgtcagtgttcatgctgctgtcccaaccaagtttacagccgctggccagcatcaaccatcaaacatgtgggagagcaaagcttcagaggattccatttccccaactgatcagctattcctagggaagctgaagggagcagagacaagctgtcctggccaagtttttcccaaaccacwggttcatgaacaaaataaatgtttttctttcaagccacaagactctgggtaattgttagaaaaataacttttaaaaagagacaacaggaaacataacttatgcagcagaaaagtctcctttaaagtaggatctaataaatgttga

SEQ ID NO: 726633 - DNA, 567 bp, Homo sapiens
cgtggaatttctggatcatatggtagttctatttttaatatcgtgaggaatcttcatacatttgcccatgatgggtttgctaatttacattcccaccaacagtgtgcaaggcttcccttttctccacacgcagctgagaatgattctccagagggggcaactgagtgcttagcagccaacactcatggcagccggggacaggtgtccagcatgtgtttctttgttcctagggtcaaccattgcacagctccacaggtacaaacatgtgcatgatacctcctagagctgtgtaacaccacaaccctgtttataycaatctttctaaatagagaaagtgttttaaaatgtaaaaattagctaatgtttctttccagtatatggattctagcaaaaccataagtacatgaacagacagtccaagttgacctcagcagagctatctgccctttattcacatctgtagctaaaacattaaaagtattagatgtgcttgtttaaaaattagatgtatttatgacatctgttaacatggccagcaatggaaaaatcttctgaggagactacaag

SEQ ID NO: 726634 - DNA, 643 bp, Homo sapiens
tcaatctttgtcagccactagaagtctatgccacattttttttcccccacatttgagattacttcaggcaaatagctgctctaaataaataatctgttgctttctttctctccttttccatttttccaacctcagtgcagtttctttcaggtctaagatgacaggtcaatatcatttctaaatctaaggtcgttcattctcttccacacagagggcctctcttattttgtctgtagccactacatttctcaatattaagttgaacaaacagggagataatgctcatgcctgtattacctttattctgaactcttcccttagttacttgtggagtcatatcacagtctttgacttattgtcaatgatttcccccacagtggtcaaatttttaaaaattattttgctcagtatcaatcttggaaaatatattttaaattgaagtgttttttaaggtaacatatggtactgcatgtgttgaattatagttattttctgcaagacacaygcgcatgagcacacgcgcatgcacacacacacacacacgcacatactgattttagttttgttaatctatattccatgaatagaagcaaatgggaatgcaagaaattagagcaccagagaacataaattttattcctcc

SEQ ID NO: 726635 - DNA, 1741 bp, Homo sapiens
gggatttcaccgtgctagccatgatggtctcgatctcatgacctcgtggtccacttgcctcggtttcccaaagtgctgggattataggagtgagccaccgtgccggccgcaagattttcaaaacggataattttcttcttttacacaactttatttttacactttgatcatcctctgcttycttaaagcatgttctatggcaaaacacagtattatttttaaatatcagattattttcttctttcaaattgaaatttgtgtatctatgtgtccacaagtgcatgtgtttgcagatctttctctcttatattgataaacataaggcattgcatatatttatcacaatttatttgtttatatcttataaaacaaagtgataagaaaaatagcttagatgatgccaacttctccactgagaaagtaaagtctaacatcatcaaaatacgtaaaaactggccatacacggtgactcacgcctgtagtctcaacactttgggaggctgaggcacacagatcaatcgaagtcaggagtttgagaccaacctggccaacatggtaaaatcctgtccctactaaaaaatacaaaaattagccagcatgatgctgcttgcctatagtcccagctacttggcaggcagaggttgcagtgatccaagatcacttaggagatcaatataattttgaaaataattcatattaggaaacatgagatatatggagaatagatgctaacattctgagaaaaacatttaaaattcaattttaatgtagtaaaagatgcaattggttgattaaatatatacttgacaagcaagtgtatagtgggcttttttccccgaaaacaaaaatattcattataacaaaaaagtccacaatatagtgatgtgtggcttgtcagtcagatcctcattttattagcttgccttaataacgatctcaatgaggataatgaactttcttcagaccttcaactatgtgtcttaatattttctagataatgtatattatctggagaacagttttccaaaatatgttatcggaatatatcacaaccttaggacttcatgaattacataaaacacaatttttcaggtatttgagggtttgaaatttgttctgatgggtatttttcattttcattttattcttatgagaggaaatacaaataatgatgccatttaaaaatattattaaagcagtggtacaatcagattattaaattagcttccgcaatcagacagaaatatattgaaagctgccttcatttattttctctgctagtttgagcttcagtttccttatatctaaaatttataataataataacaataatagtatctaattcataaggatgttttgaggatttgatgaagtaataaaagtaatctcagtaactgtttcacaggactaaataattttgaatgaataggtttttcatttacattattgataaggattgcgtaaatgtatctctctaattattcatttatttatcatattggagaccaactgggctagttgaatatatagatactaatggaagggtagtagttcttttctatataatagcctaataaagaattttttaaatgtcatctggaatggaggctaataaccatgaaaggtgtctggtaattctattgatgaggtctttccattaggctcttgcaaagaggaaaatgtgaggctctttatgcaggatagagaaacttgtgctttcactcccccccttacaatatgg

SEQ ID NO: 726636 - DNA, 1741 bp, Homo sapiens
gggatttcaccgtgctagccatgatggtctcgatctcatgacctcgtggtccacttgcctcggtttcccaaagtgctgggattataggagtgagccaccgtgccggccgcaagattttcaaaacggataattttcttcttttacacaactttatttttacactttgatcatcctctgcttccttaaagcatgttctatggcaaaacacagtattatttttaaatatcagattattttcttctttcaaattgaaatttgtgtatctatgtgtccacaagtgcatgtgtttgcagatctttctctcttatattgataaacataaggcattgcatatatttatcacaatttatttgtttatatcttataaaacaaagtgataagaaaaatagcttagatgatgccaacttctccactgagaaagtaaagtctaacatcatcaaaatacgtaaaaactggccatacacggtgactcacgcctgtagtctcaacactttgggaggctgaggcacacagatcaatcgaagtcaggagtttgagaccaacctggccaacatggtaaaatcctgtccctactaaaaaatacaaaaattagccagcatgatgctgcttgcctatagtcccagctacttggcaggcagaggttgcagtgatccaagatcacttaggagatcaatataattttgaaaataattcatattaggaaacatgagatatatggagaatagatgctaacattctgagaaaaacatttaaaattcaattttaatgtagtaaaagatgcaattggttgattaaatatatacttgacaagcaagtgtatagtgggcttttttccccgaaaacaaaaatattcattataacaaaaaagtccacaatatagtkatgtgtggcttgtcagtcagatcctcattttattagcttgccttaataacgatctcaatgaggataatgaactttcttcagaccttcaactatgtgtcttaatattttctagataatgtatattatctggagaacagttttccaaaatatgttatcggaatatatcacaaccttaggacttcatgaattacataaaacacaatttttcaggtatttgagggtttgaaatttgttctgatgggtatttttcattttcattttattcttatgagaggaaatacaaataatgatgccatttaaaaatattattaaagcagtggtacaatcagattattaaattagcttccgcaatcagacagaaatatattgaaagctgccttcatttattttctctgctagtttgagcttcagtttccttatatctaaaatttataataataataacaataatagtatctaattcataaggatgttttgaggatttgatgaagtaataaaagtaatctcagtaactgtttcacaggactaaataattttgaatgaataggtttttcatttacattattgataaggattgcgtaaatgtatctctctaattattcatttatttatcatattggagaccaactgggctagttgaatatatagatactaatggaagggtagtagttcttttctatataatagcctaataaagaattttttaaatgtcatctggaatggaggctaataaccatgaaaggtgtctggtaattctattgatgaggtctttccattaggctcttgcaaagaggaaaatgtgaggctctttatgcaggatagagaaacttgtgctttcactcccccccttacaatatgg

SEQ ID NO: 726637 - DNA, 1741 bp, Homo sapiens
gggatttcaccgtgctagccatgatggtctcgatctcatgacctcgtggtccacttgcctcggtttcccaaagtgctgggattataggagtgagccaccgtgccggccgcaagattttcaaaacggataattttcttcttttacacaactttatttttacactttgatcatcctctgcttccttaaagcatgttctatggcaaaacacagtattatttttaaatatcagattattttcttctttcaaattgaaatttgtgtatctatgtgtccacaagtgcatgtgtttgcagatctttctctcttatattgataaacataaggcattgcatatatttatcacaatttatttgtttatatcttataaaacaaagtgataagaaaaatagcttagatgatgccaacttctccactgagaaagtaaagtctaacatcatcaaaatacgtaaaaactggccatacacggtgactcacgcctgtagtctcaacactttgggaggctgaggcacacagatcaatcgaagtcaggagtttgagaccaacctggccaacatggtaaaatcctgtccctactaaaaaatacaaaaattagccagcatgatgctgcttgcctatagtcccagctacttggcaggcagaggttgcagtgatccaagatcacttaggagatcaatataattttgaaaataattcatattaggaaacatgagatatatggagaatagatgctaacattctgagaaaaacatttaaaattcaattttaatgtagtaaaagatgcaattggttgattaaatatatacttgacaagcaagtgtatagtgggcttttttccccgaaaacaaaaatattcattataacaaaaaagtccacaatatagtgatgtgtggcttgtcagtcagatcctcattttattagcttgccttaataacgatctcaatgaggataatgaactttcttcagaccttcaactatgtgtcttaatattttctagataatgtatattatctggagaacagttttccaaaatatgttatsggaatatatcacaaccttaggacttcatgaattacataaaacacaatttttcaggtatttgagggtttgaaatttgttctgatgggtatttttcattttcattttattcttatgagaggaaatacaaataatgatgccatttaaaaatattattaaagcagtggtacaatcagattattaaattagcttccgcaatcagacagaaatatattgaaagctgccttcatttattttctctgctagtttgagcttcagtttccttatatctaaaatttataataataataacaataatagtatctaattcataaggatgttttgaggatttgatgaagtaataaaagtaatctcagtaactgtttcacaggactaaataattttgaatgaataggtttttcatttacattattgataaggattgcgtaaatgtatctctctaattattcatttatttatcatattggagaccaactgggctagttgaatatatagatactaatggaagggtagtagttcttttctatataatagcctaataaagaattttttaaatgtcatctggaatggaggctaataaccatgaaaggtgtctggtaattctattgatgaggtctttccattaggctcttgcaaagaggaaaatgtgaggctctttatgcaggatagagaaacttgtgctttcactcccccccttacaatatgg

SEQ ID NO: 726638 - DNA, 1741 bp, Homo sapiens
gggatttcaccgtgctagccatgatggtctcgatctcatgacctcgtggtccacttgcctcggtttcccaaagtgctgggattataggagtgagccaccgtgccggccgcaagattttcaaaacggataattttcttcttttacacaactttatttttacactttgatcatcctctgcttccttaaagcatgttctatggcaaaacacagtattatttttaaatatcagattattttcttctttcaaattgaaatttgtgtatctatgtgtccacaagtgcatgtgtttgcagatctttctctcttatattgataaacataaggcattgcatatatttatcacaatttatttgtttatatcttataaaacaaagtgataagaaaaatagcttagatgatgccaacttctccactgagaaagtaaagtctaacatcatcaaaatacgtaaaaactggccatacacggtgactcacgcctgtagtctcaacactttgggaggctgaggcacacagatcaatcgaagtcaggagtttgagaccaacctggccaacatggtaaaatcctgtccctactaaaaaatacaaaaattagccagcatgatgctgcttgcctatagtcccagctacttggcaggcagaggttgcagtgatccaagatcacttaggagatcaatataattttgaaaataattcatattaggaaacatgagatatatggagaatagatgctaacattctgagaaaaacatttaaaattcaattttaatgtagtaaaagatgcaattggttgattaaatatatacttgacaagcaagtgtatagtgggcttttttccccgaaaacaaaaatattcattataacaaaaaagtccacaatatagtgatgtgtggcttgtcagtcagatcctcattttattagcttgccttaataacgatctcaatgaggataatgaactttcttcagaccttcaactatgtgtcttaatattttctagataatgtatattatctggagaacagttttccaaaatatgttatcggaatatatyacaaccttaggacttcatgaattacataaaacacaatttttcaggtatttgagggtttgaaatttgttctgatgggtatttttcattttcattttattcttatgagaggaaatacaaataatgatgccatttaaaaatattattaaagcagtggtacaatcagattattaaattagcttccgcaatcagacagaaatatattgaaagctgccttcatttattttctctgctagtttgagcttcagtttccttatatctaaaatttataataataataacaataatagtatctaattcataaggatgttttgaggatttgatgaagtaataaaagtaatctcagtaactgtttcacaggactaaataattttgaatgaataggtttttcatttacattattgataaggattgcgtaaatgtatctctctaattattcatttatttatcatattggagaccaactgggctagttgaatatatagatactaatggaagggtagtagttcttttctatataatagcctaataaagaattttttaaatgtcatctggaatggaggctaataaccatgaaaggtgtctggtaattctattgatgaggtctttccattaggctcttgcaaagaggaaaatgtgaggctctttatgcaggatagagaaacttgtgctttcactcccccccttacaatatgg

SEQ ID NO: 726639 - DNA, 1054 bp, Homo sapiens
ttgccagagttatttaatacaacaattagacaataattttagaactctattaggcatctttgataatttgcaagattccatggcttttgagaaagrgaactaacattttatttttgagacagggtcttgctctatcacccaggctggagtacactgcatagctcactgcagcctagaactcctgggtgcaagtgagcctcctgcctcagccttcaagttgctggaactacacgtgcgcaccaccacacctggctaagaattaaccatttaaagagaatatacagtaaggtaaggagccaagataagtgaaaattggaaatggtaaacagaaagcaccaattacctaaaaagtccaacagcaaaatttaaaaaacatgatataagttgtaaaattaatactgatagataaaatatgaatcaggaacatgcagaagagatctctctaaatgcaagtagaaaatctttttgaaaagaaggagggatgaggtgatatatacgtaaaaaagcagaactctaacataagaacgcaggcactttggaaaaatgagtaagtgtaatcacaatgaaagctataaaccaaatatttccaagatgattaaggagccacgttttaaagaagcaattattactatatttccccgaaaaaagcaattgagatctttagagggcctggaaatatatcacatatacatttttacatagttggataaaatatcataatatgtcaagtaaaattttttttttatcaaataacaagtactggattgctgatttctcaacaatatttatataagaatgtcgggaatatttatataagaatgttatcagatctttaaataacaaagtttatgacacacgaaattaacatccagccaaattctctttcataaatggaggccacgaaaatgtttttataaatgcaagaacctagaaaatctaacatttacatatggtatcatatggtatttgaagaaaatggagagtatgataaaggcaaacgggttataaactgtgagtactaactcaggattgagaaatggactataactgggca

SEQ ID NO: 726640 - DNA, 607 bp, Homo sapiens
ataggaacatgggttatttcactgtatatttcttgcctggattagtataatgtttaaagagatcacacttatgtgtcaggagcctttatgatagttctttgatctccaaagctttaaggctgaaaagatttggaagctgttgtcagtaatggcagagaaaaagctgccatcgtatttgatatccctttgatatttggcctctttttagttgtatggattcagaaatcttttagggtcatgcagtgatatacagtggacaatacttttgtcttaaaatctagataaaaagtatatttttwaaatttattattgaatatctttagtcccaaattataaaaacctaatattatttaaaatatagtttttcttgtatgccttggtcttttaatgagtatagatgaaataaaatagttctctgtcacaattccagttttgttataattccagacaaaaagactggagtacataatttttgctgagtaaattatgtaatataaataaaacataacaacaatgtactaatgaagtatcaatggctaagcaaatgtttctcccttagttttatttatctaattcatttagaactaatcaaagttgaattagaagg

SEQ ID NO: 726641 - DNA, 1971 bp, Homo sapiens
agtgtccaccaaagcatcacccccatgcctgtgagtgtggagggtccttggcatttggacaaacactgtgtgtaagaacacttcaagagaaggaaacagtgttttggtggcagaacctgccatccttctaggaacacgaggtggcagacccctccatcacgtaggggttggggcacacagaaccaaagggaattctagtcccagagctgtgctgtgcctctgggtttctgcatgcttaaactctgtttatgcaaaggctagaatgctggacagtctttctaaccagccctgattcttgaaccctgttttttatccacgacaggtgtgtctgacctacatgaggttaggctataagccctatgaagtccttgatagcaccttctagagcatgggttcctgatagggaatttcaactgtttacttattgccttagggtgaaaatgaaagtaaatttatacacatgtctacatttccttcacattgtctatacttgagtgttttaaagtaattaatagatgagataatagggtcttaattcaactctgacttcacacatggggaaactaaggctgaagaaggcaagtaacttgcccaaggttacatggccactaagtgggattctggaattgaaacctaggtctctgctgcccaaagcctaggcctctgccctgcccaactttccccgaacaagacttagagctctcacagtcctagtccaaagtctctcagtaatgtctgatgtaaggtctctgacttagggtgtcttcagacccttggttatgggtccctgaaagctggtccctgaaggactgaaggaactggggggtaggagcccaggcccagattcaggccctgcagtcaggccttctatgtccagctgtgtgatctgaggcaggttacttcatgtcctgagccttaggtttcccttctgaagagtgagaaggatgattcctgcatgaaacagtgtgtatcaagatttaattcagtgcccagtacatactagatgtccacaaactgttgctgtcatcagaaggaatagagcactcaacacaaacaggtttaatcacatgaaaggtgatgtttggttcatgcaactggaaagtccagaggtgggtgggttgcaggattcgttggtccagggcctcagtgctgtcaccagagacccagtcctttccatccctctattcttgtctacaatgactgccagtaggcccatgcttcgtggctgaactcatagactgagccagggcctggtgatccctctgagtagatgggcttcagtcacaggctgtctttgggaccaatgaccctggccaggagatggaatatgccggttggtgtgagccattggggcctaccccttgaactggaggcttcacttcctccagagcacatgagtgtgtgtgtgtacatggaaagcaggtggctgttccaaggccaaccagggttcagttaggaagaggaaaagagggctgggagctgagtgggctgctaaaaaatactgcggtttttcttatcctttccctcttcttcagaaagtacaaggaaggttcctcctatgaccccatccctaccttgtggcgaaccagtttcttctctgctgcacagacagccaggggccactgctgtcttttgttgctcgcatctgtttgacacctccaacctgtccaaatggggtcctccaggaggtttctctaagaagtcttctggagacccccagccctcagggagctgtcctcctctgaggacctcggcctcacaagttggcgctcagggacactttgtcccaccatgcttttctaccctgtggtgactgactcctcccagatgagtggacacttaggagccattgttctgaccatgcctgtgatcccactcttgaccctttgcccagcagacgtcaccccagccttgggttgagctgctcctcacaccagygcagggctgggcactggccttgctgcctaaatc

SEQ ID NO: 726642 - DNA, 621 bp, Homo sapiens
ctgggggtctggggtaaggacaggccagtgttttcatggggagcaggctgtttggacactgccacttccctggccagcttatgcattgattctttttcccatttggctcccacagggcttggtaatggaactgaagaaatctgaatgaattgtctgatgcatcgtgactaagcttggaatgtgccaactgtcccccagsagtggcccttggacagcagagctggagcgccgggactctgagtgcaggaaggaggccgtgctccaggagagccattgacagagctgctctggagttctggaagtgcttggagggtgtgggcgttgtcacatgaatctgtggcaccagcctgttggctttctggtgaaggggtggtggcacagtctgctgtcgtgcctctggtggtccacacaaccttcacacaaccttcttcatttctggtcagctttggatactcccaagctttgtcactgatctcattttgacttaccaggaagctccacatcttgttctttgttaatttcatggaggcttgcaggataactctcactttatttccatgaacgctccatttcaagaatgttcaggaagactttcatcacctcttttgggcctccacttcc

SEQ ID NO: 726643 - DNA, 554 bp, Homo sapiens
tttgacaggttctctctctgttttccaagctggagtacagtggtgcaatcacagctccttggactcctgggtcaagggatcctgccaccccagcctcctgagtggctgggactacaggcatgtaccaccatgcccagctaaattttaattttctaattttttttttttttttttttggkatagagggtcttgctaagttgccagagtgatctcaaactcctggcttaaagtaatcctcccacccaggcttccaaagtgctgggattataggcatgatccaccgtgcccaggcttgttttttattgtacacttagggacttgcctatggtaggtactcagtaaatgtttcttgaaataattaatgacttgggttgatttggatgaaagacggaatggacggagggcattttttagtagcctggagacttggtttccatgcaccatgctgggatgtccctggcagcccatctactgagctggcaccagcatgcttaccagtctcctttgtgacagtcccaatggatatttttattagccagcatgatttatttcat

SEQ ID NO: 726644 - DNA, 357 bp, Homo sapiens
tgtgtgtgagctgcaaaaggggtacgtgagctccaggaacaggtagcatcatttccatcagctcagccagactctgttgtgcatatgcggcatgctgrggattgagacgagagctacagacacaaagctcaaacagctccagttgttgctctggaggagcttgtagtctgcgtcagtgctacttagagtggggtctgtggaccagcagtatcagcatcacctggacatttattagaaatgcagaatctcaggactcaccccagatctcttgaatccagatctgcattttaacaagatgtccagtgattcctctgcacattaatgtttaagaagttttgctggctgggcacggtggct

SEQ ID NO: 726645 - DNA, 643 bp, Homo sapiens
taattctgcttacctctaaggttgttgtgaagaagcttcgagctggttactcagcacggtgccggctacatggcagttgctcatggatgycagctatgttagtagtgatcgtacattggggggggtctccaccagtgtccccaccctgacactcagaacacatgatattaataagtggggagagggaacagagaatgaaagtaaagatttgccacctgttggaaacctgagatcttcccttgtctcccaaatagagaattgggacctaaaggtgggacctcagtcttgccacctgtgtaatgggaacagcatttctgcatggtgcctttcctgagccaggcttgcttttctggcccatctctggccccctggagaaagaagacagaaaggccacttattcacttaatcatgcagttataatctgcagccagggaggagggcgaatgggtacaggcaactccccaagagtcccttaactgtaactcagctgtttctgtcctccctagaaagcccatgagtgcaagtgagggctgagcacaatcatctggggacagcctggcctctaacttttttttaaagcaaatcattcatgcaaactggcacttgtggtggactggacatcagtcatcatccttcatgccct

SEQ ID NO: 726646 - DNA, 1888 bp, Homo sapiens
  misc_feature 957, 958, 959, 960, 961, 962, 963, 964, 965, 966, 967, 968,969, 970, 971, 972, 973, 974, 975, 976, 977, 978, 979, 980,981, 982, 983, 984, 985, 986, 987, 988, 989, 990, 991, 992,993, 994, 995, 996, 997, 998, 999, 1000, 1001, 1002: n = A,T,C or G
  misc_feature 1003, 1004, 1005, 1006, 1007, 1008, 1009, 1010, 1011, 1012,1013, 1014, 1015, 1016, 1017, 1018, 1019, 1020, 1021, 1022,1023, 1024, 1025, 1026, 1027, 1028, 1029, 1030, 1031, 1032,1033, 1034, 1035, 1036, 1037, 1038, 1039, 1040, 1041: n = A,T,C or G
  misc_feature 1042, 1043, 1044, 1045, 1046, 1047, 1048, 1049, 1050, 1051,1052, 1053, 1054, 1055, 1056: n = A,T,C or G
taccctgaaactaatgaatcttaagcttcagagtcctttacttatagggaccctttccagtgttccagatatgtgttcacagggccattttataacatttttcctcaggaggacaccccaaattatttaagtttcaggtcccacaagatctaaacccccctcacagacttaacagtgagcctaaactgggggcgagagtggatttcaaatctcatctgcagctgacttaagagcaagggttcctatgatatttaatgactgagacaaaatgaaaacgctactttgatcgagagagaggtccctcccctgattgggatcaataacccacacaggtagttagctgtctacgcagagccttctatattttccctctacttttgagggcgggaaataagtcttggctgacaccagtgtttccagcaaacagctgaagacttgacacttggatggcactcaggacaaaaatctgaacagattacagaaccgttgttgttttttttttttttaaggggagggtgtgttacaccaggaatgggtattcaaggtagacacatcccaaaacagacacttcagtgagaagaggcagaggtgtttcctcacctgtaaaaacaggataataaaacctactcttgtggggtttggttaggattaagcaagatcatttatataaagacctaacccagtgccagactctcgggagaaggggcataaaggacagaaaataaaatgagttgatctttgagcacagcgacagggattttttgtacatcgtgccttacagagcgagcgctgggaggaggaatcatcaccctgctgagaagtaatgggtgcagaataaatcgagtaagaaggaatggacttttctggcggatgcttactgatctaacaactggatgactgaggaatgcggtcctaagtgaccccgggctgtctgtggggccaacattttgcgggatnnnnnnnnnnnnnnnnnnnnnnnnnnnnnnnnnnnnnnnnnnnnnnnnnnnnnnnnnnnnnnnnnnnnnnnnnnnnnnnnnnnnnnnnnnnnnnnnnnnnggaaatgaaaatatatttgagtaagctgatagaagtgtgagatttttctggaaagtaaactacaggaaagatcattatctggtaggaatcttgcttaaccataaatttattgtgaccttttgtaattttgaaaaaaaagattatttcttattaagagtaaaacttctatttaataaaacgtacacacaagatgtgagagatttactgaattttaatatcacactaaatgattacataaaataataataggaagaagactgccaatatgaaaattattactcccttccctcttctaaatttacttaatggaattcagaatttgattatttatgcttttactatcccatgtgtttaaatttggcatttcaggtggacagaggatcctttgtatattccagttctcctgtttgggatgaacttccctctttgcaaatctgtctctggccttcttaaaaagcattttgccttgtatttgttttattacttactatgtccagatggggctttattttctcgacatatttaacctctttaagtagagaagtcttactcatttttacatattacctgatctgatgctctgtccaccccaagtgcctatkaatttatatgaaataaataaacatgtttttgaggcaataactcagtacacttctttcagttactaataacacttcacatttgtgaaactctctgttgttttttgtttgcttgccttttgttttgagacaaagtcttgccctttcacccaggctggaatgtggtggcacgatcatgactcactgcagctttaggactacaggcgcaggccaccatgcccagctaattttta

SEQ ID NO: 726647 - DNA, 1838 bp, Homo sapiens
tgagaatgtctggaatgactgtatcaggttttctcaaggactgagaaccttgtgttgataagagagatatcacaatgtggccctgaggctgctatgtgacagtatcagaagaatgtaggggctttatctggaataatattaaaaacaaacaaaacaaagcttatatgatgattatgtgaactacaaaatatgattgttttagttctcatattggttatcattgaatgtttatcgaatatttttgaggaatcattataaggtgtctttacctcattttcttttcccagcagattgaaacctactctcccctttcagaagcccatagtcattttttcaggcctccatatgtcagacatacaagagatatgaattaaaaagctgtattgcccttgctttaatggacctgcaggaaccagtcatcttggaaatatacctgtatgtcctgtgctaataggttgcaggcatttgcttgcccttgatttcaatgcagaggtactatttctggttcaccagaaaacagttaaatgaggccaccagagttgctgtcagccaacagggaacttgtatctcccacatcattagcttagctctgtgagtagctacttataccatattcccaaaggcgaatgttagcccccaggaaaacaatgcaattaatctaatctcaacatttctcaatttcagggtaagacaagtttgtggagacaatgtgatgtggtataaacagtgaagaatgctgtagtcagaaaagtaaagtatatacctagggtctactctgtattcactgagtgactgtagtatctcacttaatgtgtgacccttccgtttattcacttacaaaatgtgatgataataataataatgacagcctcacatatatttcatctataagaaaaagtggaacaaaaactagaatagtttaagtgtattttaactttataacagcattttgctcttgcacatagagttcaaagtaattctcacacagttccataagggtcatgtacatgtatattggtttcagcatcatttggggtgcgataactggaggtaatattggtcaacatcactgggagagtatgtagggaaaatgtgcacattgtgtagtggttagaggcaagggattatatgtacacacagcaacatgcatggctcttaaaatatggtccaaggaaaataaaatctaaaatggattgaattttatgatgtgatattatttatgtaaatttgatgtacacaaaaatatgcattttgcaagaacacatgcaaacaraaaggtacacatttaatatattagaagagctacctgtggggaggtggaatgggaatgaggaacggaaataaaatggaaaaaaatttttacaaataaagccttgctgcggccagtgatgataatgacccacgaattgaatcacgaactcaattatctgcatctgatgtccagaagggaaaaagaattataatataaaaatgtttgttaagataattgttttctctcactacaaattcttcagctttctttcaatgtttcattgaaggattttccttcctctgatccttaatcaactattgcatttcctctagtagagaaactgatatgaataattaatttgtgttacgttatttcgaatcccactatcttatttcctctatcttttattattagataaaaagaaatgcttaaaataaaagactcccccttcatggtggaatttaaggccaaggcaaatggggggactatttggaagaatggaaggtactccactagagccaggtcaaaggcatcaaaggtcctcagaggtcagtgacagtggattgaaaatttggataggatctca

SEQ ID NO: 726648 - DNA, 654 bp, Homo sapiens
tgtttcctgaactctttgcatagcctcaaaaatattttcagcttctctccattgcatcctttagttagctttccaaatctctagtggtttataatttcctgcttaatagactctaaattcccaactttgaaatgtggacctaattatccaccaaaagtggacttttcactcttttttttagtacattttttgtttgagtaccttcatatctttttaaatactcttctattcacctyttgtccagttccacttggcaaaatcttacttttcatgtccaatttaaagaacacatcttttattaatccttctgtgactaatcttagtccaaagaaatctctcctccctcacctctataacatgttgcttgcaccttttttttattgtatttctttgtgtatagcttacttcctcaactaaattttaagttctttaaaaaataaggatgacttctctggtaaattatattattattcccaaagattcatggcctttctcatgggagaattatccttgtctgccctccacggcaggcgtggctacatgactagtttgggccaacgaaatttgagcagaagtgatgttgtttgtttgtttgtttgttttttgacagagtctcgctctgccgctcaggtggagggtggtagcgcaatctta

SEQ ID NO: 726649 - DNA, 1429 bp, Homo sapiens
tgttctgggactctgctttttaccgtaactgaaaaagggaaggtctaaaatgcgatttttagcttcttgttaaaactcagacttacttacttattactttcctttaatgtagtcctaaggaggaaaaggtttttagcggacaagatgaaagacatttcaaagggtagttttccagttaaaagtcaagtgtacttaggtaaaattctcacctcaggcttgttttctgcttagaagctggaagaatgaggccattcagggatattatccccttttcaaagaaaggtgtgtggccatgtctctcatttttcatttttcatattctctgtctctctttgcttctgacacacacacacacacacayacacccctcctttattccattgaggtaaatgttcctagggcttcctcctactttagatgaaatgcattcccagatctgcataccctattctattgagcagaaaccaggaaaagaattgtgattaaaaaaaaaaaaaaaagccattgaagcctatctaatcgcagcacatagtggaattatctggtatagacaaagtaaagctttctttgaactttgaggtcaaagacccagccaatatttaatttttttaaatattttcttgggcattattctaagtgtatgcgtccaggagaccttgagatatagaaagctgattaacagcaggatctaggcatcccaggcttccataattacaggttccatgtctcacatttgacatagttcaagcaggactactaatatatctgaatttaaaaaggccattaggacaatgattctcaattcagatgacaatatcttcaggagaaactttttcaaacacttctcaaatcttaagaatttcataggcatttattcacaatgttgcttccttccctatcattgtttgtcttaactgtgtttaacagatttttctgtgggaaatgtgatgcttggctcccgaaaaatagttaaaactcactcctgacctggcgcagtagctcacgcctgtaatcccagcactttgggaggccaaggtgggcggatcacgaggtcaggagatcgagaccatcctggctaacacagtgaaaccccgtccctactaaatatacaaaaaattagctgggcgtggtggccggtgcctgtagtcccaggtactcgggaggctgaggcaagagaatgacatgaacccaggaggcggagcttgcagtgagccgacatcgcgccactgcactccagcctggaaaacagagcgagactccttctcaaaaaaaaaaaaaaatcactcttttaggttttacagttccaccactatcaaacctagcgggatatttattaatttaacaaacatatatttagtactacagtactatttccctgacactgctctaatgactttatagtattaattcatttaattttataataatc

SEQ ID NO: 726650 - DNA, 1429 bp, Homo sapiens
tgttctgggactctgctttttaccgtaactgaaaaagggaaggtctaaaatgcgatttttagcttcttgttaaaactcagacttacttacttattactttcctttaatgtagtcctaaggaggaaaaggtttttagcggacaagatgaaagacatttcaaagggtagttttccagttaaaagtcaagtgtacttaggtaaaattctcacctcaggcttgttttctgcttagaagctggaagaatgaggccattcagggatattatccccttttcaaagaaaggtgtgtggccatgtctctcatttttcatttttcatattctctgtctctctttgcttctgacacacacacacacacacatacacccctcctttattccattgaggtaaatgttcctagggcttcctcctactttagatgaaatgcattcccagatctgcataccctattctattgagcagaaaccaggaaaagaattgtgattaaaaaaaaaaaaaaaagccattgaagcctatctaatcgcagcacatagtggaattatctggtatagacaaagtaaagctttctttgaactttgaggtcaaagacccagccaatatttaatttttttaaatattttcttgggcattattctaagtgtatgcgtccaggagaccttgagatatagaaagctgattaacagcaggatctaggcatcccaggcttccataattacaggttccatgtctcacatttgacatagttcaagcaggactactaatatatctgaatttaaaaaggccattaggacaatgattctcaattcagatgacaatatcttcaggagaaactttttcaaacacttctcaaatcttaagaatttcataggcatttattcacaatgttgcttccttccctatcattgtttgtcttaactgtgtttaacagatttttctgtgggaaatgtgatgcttggctcccgaaaaatagttaaaactcactcctgacctggcgcagtagctcacgcctgtaatcccagcactttgggaggccaaggtgggcggatcacgaggtcaggagatcgagaccatcctggctaacacagtgaaaccccgtccctactaaatwtacaaaaaattagctgggcgtggtggccggtgcctgtagtcccaggtactcgggaggctgaggcaagagaatgacatgaacccaggaggcggagcttgcagtgagccgacatcgcgccactgcactccagcctggaaaacagagcgagactccttctcaaaaaaaaaaaaaaatcactcttttaggttttacagttccaccactatcaaacctagcgggatatttattaatttaacaaacatatatttagtactacagtactatttccctgacactgctctaatgactttatagtattaattcatttaattttataataatc

SEQ ID NO: 726651 - DNA, 1429 bp, Homo sapiens
tgttctgggactctgctttttaccgtaactgaaaaagggaaggtctaaaatgcgatttttagcttcttgttaaaactcagacttacttacttattactttcctttaatgtagtcctaaggaggaaaaggtttttagcggacaagatgaaagacatttcaaagggtagttttccagttaaaagtcaagtgtacttaggtaaaattctcacctcaggcttgttttctgcttagaagctggaagaatgaggccattcagggatattatccccttttcaaagaaaggtgtgtggccatgtctctcatttttcatttttcatattctctgtctctctttgcttctgacacacacacacacacacatacacccctcctttattccattgaggtaaatgttcctagggcttcctcctactttagatgaaatgcattcccagatctgcataccctattctattgagcagaaaccaggaaaagaattgtgattaaaaaaaaaaaaaaaagccattgaagcctatctaatcgcagcacatagtggaattatctggtatagacaaagtaaagctttctttgaactttgaggtcaaagacccagccaatatttaatttttttaaatattttcttgggcattattctaagtgtatgcgtccaggagaccttgagatatagaaagctgattaacagcaggatctaggcatcccaggcttccataattacaggttccatgtctcacatttgacatagttcaagcaggactactaatatatctgaatttaaaaaggccattaggacaatgattctcaattcagatgacaatatcttcaggagaaactttttcaaacacttctcaaatcttaagaatttcataggcatttattcacaatgttgcttccttccctatcattgtttgtcttaactgtgtttaacagatttttctgtgggaaatgtgatgcttggctcccgaaaaatagttaaaactcactcctgacctggcgcagtagctcacgcctgtaatcccagcactttgggaggccaaggtgggcggatcacgaggtcaggagatcgagaccatcctggctaacacagtgaaaccccgtccctactaaatatacaaaaaattagctgggcgtggtggccggtgcctgtagtcccagstactcgggaggctgaggcaagagaatgacatgaacccaggaggcggagcttgcagtgagccgacatcgcgccactgcactccagcctggaaaacagagcgagactccttctcaaaaaaaaaaaaaaatcactcttttaggttttacagttccaccactatcaaacctagcgggatatttattaatttaacaaacatatatttagtactacagtactatttccctgacactgctctaatgactttatagtattaattcatttaattttataataatc

SEQ ID NO: 726652 - DNA, 1429 bp, Homo sapiens
tgttctgggactctgctttttaccgtaactgaaaaagggaaggtctaaaatgcgatttttagcttcttgttaaaactcagacttacttacttattactttcctttaatgtagtcctaaggaggaaaaggtttttagcggacaagatgaaagacatttcaaagggtagttttccagttaaaagtcaagtgtacttaggtaaaattctcacctcaggcttgttttctgcttagaagctggaagaatgaggccattcagggatattatccccttttcaaagaaaggtgtgtggccatgtctctcatttttcatttttcatattctctgtctctctttgcttctgacacacacacacacacacatacacccctcctttattccattgaggtaaatgttcctagggcttcctcctactttagatgaaatgcattcccagatctgcataccctattctattgagcagaaaccaggaaaagaattgtgattaaaaaaaaaaaaaaaagccattgaagcctatctaatcgcagcacatagtggaattatctggtatagacaaagtaaagctttctttgaactttgaggtcaaagacccagccaatatttaatttttttaaatattttcttgggcattattctaagtgtatgcgtccaggagaccttgagatatagaaagctgattaacagcaggatctaggcatcccaggcttccataattacaggttccatgtctcacatttgacatagttcaagcaggactactaatatatctgaatttaaaaaggccattaggacaatgattctcaattcagatgacaatatcttcaggagaaactttttcaaacacttctcaaatcttaagaatttcataggcatttattcacaatgttgcttccttccctatcattgtttgtcttaactgtgtttaacagatttttctgtgggaaatgtgatgcttggctcccgaaaaatagttaaaactcactcctgacctggcgcagtagctcacgcctgtaatcccagcactttgggaggccaaggtgggcggatcacgaggtcaggagatcgagaccatcctggctaacacagtgaaaccccgtccctactaaatatacaaaaaattagctgggcgtggtggccggtgcctgtagtcccaggtactcgggaggctgaggcaagagaatgacatgaacccaggaggcggagcttgcagtgagccgasatcgcgccactgcactccagcctggaaaacagagcgagactccttctcaaaaaaaaaaaaaaatcactcttttaggttttacagttccaccactatcaaacctagcgggatatttattaatttaacaaacatatatttagtactacagtactatttccctgacactgctctaatgactttatagtattaattcatttaattttataataatc

SEQ ID NO: 726653 - DNA, 502 bp, Homo sapiens
aaaaaccagaaaaggaagaatggcacataaaggaactcgaagcaggtcttggtggctgaagcagagattaccaagagattattagatcaaccttttcatacagacgagaaatgcttctttctaggactaaggaytgagcactggctacttcctctgtctgcctggttcatatcttccacccgaagtgataccttctcaataacggcctaccctggtttcctcgtttaaatcatgatctttcctctaaacttgcactctcagacttcaatatttgctccattttttcccctcaacatttgtaaccttctaatatgctaaatagtgtatttattttgtctttctttactgcacatccccaccctagaatgtaaattcaacgagcgcacagattttgtttttgttctgcattgtatcctccagcactaacaacagtatctgacacttcaaagaggtgcttcacatttatttgctgagttaaaatgaattaatcaatttacaaaaa

SEQ ID NO: 726654 - DNA, 502 bp, Homo sapiens
aaaaaccagaaaaggaagaatggcacataaaggaactcgaagcaggtcttggtggctgaagcagagattaccaagagattattagatcaaccttttcatacagacgagaaatgcttctttctaggactaaggactgagcactggctacttcctctgtctgcctggttcatatcttccacycgaagtgataccttctcaataacggcctaccctggtttcctcgtttaaatcatgatctttcctctaaacttgcactctcagacttcaatatttgctccattttttcccctcaacatttgtaaccttctaatatgctaaatagtgtatttattttgtctttctttactgcacatccccaccctagaatgtaaattcaacgagcgcacagattttgtttttgttctgcattgtatcctccagcactaacaacagtatctgacacttcaaagaggtgcttcacatttatttgctgagttaaaatgaattaatcaatttacaaaaa

SEQ ID NO: 726655 - DNA, 2156 bp, Homo sapiens
tagatacacttactgtatagatataagtaagtatagatatacttaactgttgtgttacaattgtctacagtattcagtacagtaacatgctgcacaggtttgtagcctaggaggaataggctataccacctaacctagatatgtaatcagctatagcatctaggtttgtgtaagtaaactctgtgatgttcacacaataataaaatcgtccagcaatgcatttctcagacacacccctgtcattaagtgacacatgactgtattagttaacactatgggaacttcatgggaaatggacactctagctccaccataaatagaaactgtttatgtcaaaaaacacataaaagcatagttgcaagattacatttccttccagatatttcatttagtatctccacagatcactaacttcctgaatagcattcttgtgtctccactgcctcacatttgatttcaggtcattccatcaattgtcaaagacgcatccaacattaacttcccaactactggtttggattgtgtcaacattgtcattctgggccacaacaacacaaaaggctaactcagtgaggtaacatagacactgatcagtgagattttgctgacgggtggtaccattttttaccaagatcaagggtattcataccttcaggcatctagataacattgaaaagggcaggttcatagataaaaagggaaagaggacgggtttttgcactatacatgagctamcgtgtctcctgtttaacctgagtctgaagagattcaaagtgcaggtgccatgaatgcctctttaatagctccatgtcgattgattttctgggctacacttcccagcattcaaattgctaaatgcatataaactactagtgaatattattacctggatttgtgcttttgagtgatcttatgtatagttatgtgcttcagtgatccaacttggggtgcactccaaactttgataaattaaagaccctgcttattccttgagtaatgctacactgacaactgatttagtgaatgccactgtgaaaataataaacctcttggtgaatatatttagacatgtcttggaacctgtacacatcttaaccagggatgttacttggtctttctatgttcaggagtgtgtggagatagaaaatcatacaggattgtaattgttgcctgtgagactaacagaaaattcaagctagtgaagtacgcttatgcatggcacacttctcgccagcaattttaggaagttctacccacaacccatatgtcttttgatatgtgggttaccttggagagagaaaaagaaactctgaacacaagcatgaaatactttagaattttatctagagttggacttgtccgaaagcttttgtataaacttgcttgatgagcaactgttgtccactggtaccttcactgtacaatccacacacaacaaaacttcacaactggacacctaaatttgcactttgtttggtaaagttgaatgaaaaatgttgtcttttaagcttatgctctcttatgaaagctgttattagattaattttacgccaagatatgccagttaggaaataacttccaatttaatttcaccagctccctgtgggtggactaattactcacacatcacacttactctggtggtgaaatgcctcaaaagaaggtctccagagtgttgctctacctagaaggacaagaatgaagagacataaaaatcattcattaagaaggaagaagattttccttgcctagatttgcacttgtaggatccaattaattttatcacttaatattttgtcctggtgggcattcactttacaaatttgtaaggtcagtagaaatggaaacttttagaaatcaaactgtaaatgttctgtagacgttgacagaaatagctatttggagctgtgcttttgccaactagacactctgagaaaatctgtgagaggatattttcaggaagtcattgaaccccctaaaaatcaagtttattgcttttaccataaatataaataatttatttattatcaaccactttcaatattccaataagtaactttattgtttatttcattgacatgatctacatagacatgcaatttatcttcttttgcgatacattcagaaaatttgctgcctggaaaagccatgttttg

SEQ ID NO: 726656 - DNA, 2156 bp, Homo sapiens
tagatacacttactgtatagatataagtaagtatagatatacttaactgttgtgttacaattgtctacagtattcagtacagtaacatgctgcacaggtttgtagcctaggaggaataggctataccacctaacctagatatgtaatcagctatagcatctaggtttgtgtaagtaaactctgtgatgttcacacaataataaaatcgtccagcaatgcatttctcagacacacccctgtcattaagtgacacatgactgtattagttaacactatgggaacttcatgggaaatggacactctagctccaccataaatagaaactgtttatgtcaaaaaacacataaaagcatagttgcaagattacatttccttccagatatttcatttagtatctccacagatcactaacttcctgaatagcattcttgtgtctccactgcctcacatttgatttcaggtcattccatcaattgtcaaagacgcatccaacattaacttcccaactactggtttggattgtgtcaacattgtcattctgggccacaacaacacaaaaggctaactcagtgaggtaacatagacactgatcagtgagattttgctgacgggtggtaccattttttaccaagatcaagggtattcataccttcaggcatctagataacattgaaaagggcaggttcatagataaaaagggaaagaggacgggtttttgcactatacatgagctaccrtgtctcctgtttaacctgagtctgaagagattcaaagtgcaggtgccatgaatgcctctttaatagctccatgtcgattgattttctgggctacacttcccagcattcaaattgctaaatgcatataaactactagtgaatattattacctggatttgtgcttttgagtgatcttatgtatagttatgtgcttcagtgatccaacttggggtgcactccaaactttgataaattaaagaccctgcttattccttgagtaatgctacactgacaactgatttagtgaatgccactgtgaaaataataaacctcttggtgaatatatttagacatgtcttggaacctgtacacatcttaaccagggatgttacttggtctttctatgttcaggagtgtgtggagatagaaaatcatacaggattgtaattgttgcctgtgagactaacagaaaattcaagctagtgaagtacgcttatgcatggcacacttctcgccagcaattttaggaagttctacccacaacccatatgtcttttgatatgtgggttaccttggagagagaaaaagaaactctgaacacaagcatgaaatactttagaattttatctagagttggacttgtccgaaagcttttgtataaacttgcttgatgagcaactgttgtccactggtaccttcactgtacaatccacacacaacaaaacttcacaactggacacctaaatttgcactttgtttggtaaagttgaatgaaaaatgttgtcttttaagcttatgctctcttatgaaagctgttattagattaattttacgccaagatatgccagttaggaaataacttccaatttaatttcaccagctccctgtgggtggactaattactcacacatcacacttactctggtggtgaaatgcctcaaaagaaggtctccagagtgttgctctacctagaaggacaagaatgaagagacataaaaatcattcattaagaaggaagaagattttccttgcctagatttgcacttgtaggatccaattaattttatcacttaatattttgtcctggtgggcattcactttacaaatttgtaaggtcagtagaaatggaaacttttagaaatcaaactgtaaatgttctgtagacgttgacagaaatagctatttggagctgtgcttttgccaactagacactctgagaaaatctgtgagaggatattttcaggaagtcattgaaccccctaaaaatcaagtttattgcttttaccataaatataaataatttatttattatcaaccactttcaatattccaataagtaactttattgtttatttcattgacatgatctacatagacatgcaatttatcttcttttgcgatacattcagaaaatttgctgcctggaaaagccatgttttg

SEQ ID NO: 726657 - DNA, 2156 bp, Homo sapiens
tagatacacttactgtatagatataagtaagtatagatatacttaactgttgtgttacaattgtctacagtattcagtacagtaacatgctgcacaggtttgtagcctaggaggaataggctataccacctaacctagatatgtaatcagctatagcatctaggtttgtgtaagtaaactctgtgatgttcacacaataataaaatcgtccagcaatgcatttctcagacacacccctgtcattaagtgacacatgactgtattagttaacactatgggaacttcatgggaaatggacactctagctccaccataaatagaaactgtttatgtcaaaaaacacataaaagcatagttgcaagattacatttccttccagatatttcatttagtatctccacagatcactaacttcctgaatagcattcttgtgtctccactgcctcacatttgatttcaggtcattccatcaattgtcaaagacgcatccaacattaacttcccaactactggtttggattgtgtcaacattgtcattctgggccacaacaacacaaaaggctaactcagtgaggtaacatagacactgatcagtgagattttgctgacgggtggtaccattttttaccaagatcaagggtattcataccttcaggcatctagataacattgaaaagggcaggttcatagataaaaagggaaagaggacgggtttttgcactatacatgagctaccgtgtctcctgtttaacctgagtctgaagagattcaaagtgcaggtgccatgaatgcctctttaatagctccatgtcgattgattttctgggctacacttcccagcattcaaattgctaaatgcatataaactactagtgaatattattacctggatttgtgcttttgagtgatcttatstatagttatgtgcttcagtgatccaacttggggtgcactccaaactttgataaattaaagaccctgcttattccttgagtaatgctacactgacaactgatttagtgaatgccactgtgaaaataataaacctcttggtgaatatatttagacatgtcttggaacctgtacacatcttaaccagggatgttacttggtctttctatgttcaggagtgtgtggagatagaaaatcatacaggattgtaattgttgcctgtgagactaacagaaaattcaagctagtgaagtacgcttatgcatggcacacttctcgccagcaattttaggaagttctacccacaacccatatgtcttttgatatgtgggttaccttggagagagaaaaagaaactctgaacacaagcatgaaatactttagaattttatctagagttggacttgtccgaaagcttttgtataaacttgcttgatgagcaactgttgtccactggtaccttcactgtacaatccacacacaacaaaacttcacaactggacacctaaatttgcactttgtttggtaaagttgaatgaaaaatgttgtcttttaagcttatgctctcttatgaaagctgttattagattaattttacgccaagatatgccagttaggaaataacttccaatttaatttcaccagctccctgtgggtggactaattactcacacatcacacttactctggtggtgaaatgcctcaaaagaaggtctccagagtgttgctctacctagaaggacaagaatgaagagacataaaaatcattcattaagaaggaagaagattttccttgcctagatttgcacttgtaggatccaattaattttatcacttaatattttgtcctggtgggcattcactttacaaatttgtaaggtcagtagaaatggaaacttttagaaatcaaactgtaaatgttctgtagacgttgacagaaatagctatttggagctgtgcttttgccaactagacactctgagaaaatctgtgagaggatattttcaggaagtcattgaaccccctaaaaatcaagtttattgcttttaccataaatataaataatttatttattatcaaccactttcaatattccaataagtaactttattgtttatttcattgacatgatctacatagacatgcaatttatcttcttttgcgatacattcagaaaatttgctgcctggaaaagccatgttttg

SEQ ID NO: 726658 - DNA, 2156 bp, Homo sapiens
tagatacacttactgtatagatataagtaagtatagatatacttaactgttgtgttacaattgtctacagtattcagtacagtaacatgctgcacaggtttgtagcctaggaggaataggctataccacctaacctagatatgtaatcagctatagcatctaggtttgtgtaagtaaactctgtgatgttcacacaataataaaatcgtccagcaatgcatttctcagacacacccctgtcattaagtgacacatgactgtattagttaacactatgggaacttcatgggaaatggacactctagctccaccataaatagaaactgtttatgtcaaaaaacacataaaagcatagttgcaagattacatttccttccagatatttcatttagtatctccacagatcactaacttcctgaatagcattcttgtgtctccactgcctcacatttgatttcaggtcattccatcaattgtcaaagacgcatccaacattaacttcccaactactggtttggattgtgtcaacattgtcattctgggccacaacaacacaaaaggctaactcagtgaggtaacatagacactgatcagtgagattttgctgacgggtggtaccattttttaccaagatcaagggtattcataccttcaggcatctagataacattgaaaagggcaggttcatagataaaaagggaaagaggacgggtttttgcactatacatgagctaccgtgtctcctgtttaacctgagtctgaagagattcaaagtgcaggtgccatgaatgcctctttaatagctccatgtcgattgattttctgggctacacttcccagcattcaaattgctaaatgcatataaactactagtgaatattattacctggatttgtgcttttgagtgatcttatgtatagttatgtgcttcagtgatccaacttggggtgcactccaaactttgataaattaaagaccctgcttattccttgagtaatgctacactgacaactgatttagtgaatgccactgtgaaaataataaacctcttggtgaatatatttagacatgtcttggaacctgtacacatcttaaccagggatgttacttggtctttctatgttcaggagtgtgtggagatagaaaatcatacaggattgtaattgttgcctgtgagactaacagaaaattcaagctagtgaagtacgcttatgcatggcacacttctcgccagcaattttaggaagttctacccacaacccatatgtcttttgatatgtgggttaccttggagagagaaaaagaaactctgaacacaagcatgaaatactttagaattttatctagagttggacttgtccgaaagcttttgtataaacttgcttgatgagcaactgttgtccactggtaccttcactgtacaatccacacacaacaaaacttcacaactggacacctaaatttgcactttgtttggtaaagttgaatgaaaaatgttgtcttttaagcttatgctctcttatgaaagctgttattagattaattttackccaagatatgccagttaggaaataacttccaatttaatttcaccagctccctgtgggtggactaattactcacacatcacacttactctggtggtgaaatgcctcaaaagaaggtctccagagtgttgctctacctagaaggacaagaatgaagagacataaaaatcattcattaagaaggaagaagattttccttgcctagatttgcacttgtaggatccaattaattttatcacttaatattttgtcctggtgggcattcactttacaaatttgtaaggtcagtagaaatggaaacttttagaaatcaaactgtaaatgttctgtagacgttgacagaaatagctatttggagctgtgcttttgccaactagacactctgagaaaatctgtgagaggatattttcaggaagtcattgaaccccctaaaaatcaagtttattgcttttaccataaatataaataatttatttattatcaaccactttcaatattccaataagtaactttattgtttatttcattgacatgatctacatagacatgcaatttatcttcttttgcgatacattcagaaaatttgctgcctggaaaagccatgttttg

SEQ ID NO: 726659 - DNA, 1604 bp, Homo sapiens
ggtacagattgaaagattaataaaatttgggcactgttctcaatttgctcagcttaatgggaagaggacataggaaggagagcctcctcctcagctggtttagcttctgggtatgctcctaacaatgtaaatgctagcctagaggaaatacattcacccctttattaattccagtgtccacagatttatttggaatctctttgcagggcttacagaatatgtgtctgttaaaattccagaaggaatgcagactcaaactgggtgattaaagaaaaattgaaggattcattataaaggtatagggatgttgtatggaaacctcaaggatagtgcaatgcccttgggccaacaacagctccctatttttaaccttgtgtgtgagacacaatgggagggaacagttaacagaatctagagacagaacatgttatggagaagaccatctggcaggagatgcgcccttatgccaaggatgcagcagcctgagatgaatgcaaaggagcaagattgacctcactttccttctctctggtctcctrcagtgccctccattgcttgactcaactggaaatcagagagggagccctttggtaaagtccaaacaggtcaggctccaagggcacagagctggtgatgaggggttgggaatggatctcggagaacaaatgggagatagacacttcattatattagataagttaagtcctacaaagatatgcccaaggcactcctctccgatccacacacttcacctacccttatgcatcctccccttacccccaacatcatttacgagaacagactgatgccggagactgtagggagcacatcatccactttattttctcatttcaactttacaatcatgcctgagtaggtgaagacacagaccaaaaaaggagagtaaaatctctctgactcacaagtccatgtggcatgttgaattcctgaacattattagcacatctaatttggatagttcactggggcagtagcttcaggaggaaaaactgcccaaactcccatctgcctggacacctttccaacctccatttacttgactagccatgaatctttactcctgactcagataagctttctttcctagcaagcttttatagaacctcccatctggtggtatggtcctctcttggaattctcattatcactacttttgcttctaatatagcactaatcacattgaacttaatcatctttgttgtttttctcatgagactgttaggtctttgagatcagggaccatttcttttttcatttatatgtctgtaaaatacacagtggctggaatgcactagggctcagtaaatatttcttacctgaaagattaaaaaataaggatgactttgtctataactaaaaaaagatcaggtgaaggacagtaaaggaagataaagtacagaatatcctttattcttcaatgcttcaggaagattcgatactcaggaaacctagaagtttgtataaccagataggctaaaatgatgtcgtgaaaatcctactgttatcacccacgtgaacaccatctcattgcagttaatggaaataaatgtaccattcagtactttaaatcatgaaacaacata

SEQ ID NO: 726660 - DNA, 650 bp, Homo sapiens
cttaaagggcgtgaatgttatttgcaaagacatcaggctgtggatgatcagcagcacaaggcagatggtacaaggtggggctaaagagagtgggatctcagagctttcctgctgttcctttgctgccttggctttcttattagcatgaaatacttgctttatgcccagtgtttgtttggagttggatggcactcatgtagaagagagatggataagaatatgatgctggtggaagtaattttaaagatgaagagcagagaatggcaaaatcatygctgtaagaatgtgccccctttgtacaagagatattccatttgcatatttaggtttcatgcttcattgtgtgcttatgttgtgtgggtgagataaagttgcagaaggaacttagcattgcctgacttgtgaaaattaagtcagccgtgtctttccactaataaagtatcttcatgggcttaattttcttgcagctgtgtgtgtgcgtgtgtgtgtgtgtgtgtgtgtgtgtgtgtgtgatactaagtgaagagaaagtaaataggcagtgtatttattgcaagcaatgtgtttacctgcatgtatcatcactgaaattatcagttattagaagtggaaagtcatgtgttttaagtgtcagttccagtcaacttctt

SEQ ID NO: 726661 - DNA, 657 bp, Homo sapiens
ttctcttattggatgaataatttgcaaatatttcctctcattctctaggttttctctccattttgttagttgtttcttttgaatgaagctggtaaactgaaatgccaaccagcaacagatgaaaaaatggcccaacaaatgtcagccttctctagccagagaatctagagagagtagaataggaagacggggaagaaaaagtttagaaaataaccattctacttcaaccaaataacaaaaacaaacaaactaataaaaccctgtgggtttacccttgcccaaattaacaatagctgagtgtggaatttagactttgaccagcactatactgtaacaatgttaagaggcacagaagaagtttcctctgacattggggtgaattagaagaagattgagtaggaatctcagacttttatccccattggacactaagtatatatttgaacacccaataaactgttctctttaactgtttgacctgcttttcaattgtttttcataaaaaattatctaacttctacttcaactattttgctaattattttaatgtctatyaaattagctgaccacaacattcagaaaagagatgaatataaaatatataacttctatattataagtaaatctaatgatagctatatatctgagaaaatagtt

SEQ ID NO: 726662 - DNA, 587 bp, Homo sapiens
tcatggtatagaatatttttatcatcctccaaaaagttattttatgccctcttggagtcagtatcaatcctcacttcattctctggaaaccacagattttggtagattaaatacacagagtgcttgctctgaagccactcccttttcatttgtctcaagtaccttggtatcttttttgatcattcactttataagaaagaaaaaaaaacttttacaatctatcatgtgtatccatgttttctttggtgtttttattaatatagatcatttatttatatctttgtttccagaaactaatacatttagcacagttgaagccccgatgctttggttctattataaacatacatgacaagatagaacctaacaatcatttgtaaatttaaragtaatgttagcaatttacatatattcatcacatactatgaagggaggtaaacatttataatctctatatacacaagagtctcttctttgaactgctttaaactttgaaggcaagtaatattgggtgaatatatactcttaggtattttgtaaccactaagttgggaattagtctaagcatgaggaatgcagcagtgaat

SEQ ID NO: 726663 - DNA, 1825 bp, Homo sapiens
aatataataagagtagcatccaattctgcatmccttaacctgctttacttttctgcagggcccttctcaccactggctatagcatatgttttatttaactttcacagcaaccatacaaagtaggtactattattgttctttgcctttacaactctttttgcctgaaaggctctcctccccaggtatgtgatataattccctatggtctttctggactccactgaaataccattgataatagcagcaacgttaatttcttccttgactaggctgcaaacttcatgggaggagactttgtttcgttcacttctaattcctcagtggcttcaacagtacctggcacaaagtaggcactcaataaatatgtgttgaatgaaatatctagatgttagagaagggtaagcttaagaagaacagcaggtggtagaatcagactttgcatacaagaagaatgattctagaactactaactactgtgctcttctcgggctgcttttccaggcaacccccaggttttccccatttcaagacaagaccactgtggtagtcagcttccgatgtggctcccagtaactctcacctcctggattcatgcctttgtgtgttcccctctcctggggctggaccttgtaactcacttacagcaaataaaatatgacaaaaatggtggggtgccacttccatgattaggttatctacaaaaaagattgtgccttccatcttgctagcagactcttgctggcacgttttcttgccttcttgctgctatgttgtgagatgctccctggagagcaacaaggaacaaggcgaggcctctagccaatagcgtgaaaagaactgaatcttgccaacaaacacaagagtactcactttagaagcagatcctccccagtcaagccttctaataagactgcagccctagaagacccttggactgcatcctgtgagagaccctaaagcaaagaagccagataagcaatgcccaagaaactgtgagatcataagtgttattgttttacactgatatgtcttggagtaatttgggacaccaagcagtagataattaacactacaaccctctgcatctccatggcacctggaaaactatgatagtagaaacatttcatagtatatttgtatctctcaccctccccatcacccatactgtaaactttttgggcacagtctatgatgtatttaccattaaatctatgggtaatggctatctcataggtggagttcaacagatgctgggtaaaaatttttgaggaccaggcacagtggctcatgcctgtaatcccaccactttgggagaccaaggtgggtggataacgaggtcaagagttagagaccagcctggccaatatggtcaaaccctgtctctaataaaaatacaaaaattagcctggtgtggtggtgtgtgcccgtagtctcagctactcaggaggctgaggcaggagaattgcttgaacctgggaggcggagactgcagtgagccaagatcatgccactccactccagcctgggcaacagagcgagactctatctcaaaaaaaaaaaaattattgaggagtctctcattagaaataaattacagttgggtttatgcattaacctgtgaattaggtcagttctgaggatctgataaagttttcaaatttgcaaaactcagaagcagaacctgagctgagggcactttactgtggctctgatcctctcaaggccccatttgggtggccagctagtctctacacagtatctgtatctcagctacttcaacatcataattcttgaaaatagtatttgtaacactaaaccacgtgag

SEQ ID NO: 726664 - DNA, 1825 bp, Homo sapiens
aatataataagagtagcatccaattctgcatcccttaacctgctttacttttctgcagggcccttctcaccactggctatagcatatgttttatttaactttcacagcaaccatacaaagtaggtactattattgttctttgcctttacaactctttttgcctgaaaggctctcctccccaggtatgtgatataattccctatggtctttctggactccactgaaataccattgataatagcagcaacgttaatttcttccttgactaggctgcaaacttcatgggagsagactttgtttcgttcacttctaattcctcagtggcttcaacagtacctggcacaaagtaggcactcaataaatatgtgttgaatgaaatatctagatgttagagaagggtaagcttaagaagaacagcaggtggtagaatcagactttgcatacaagaagaatgattctagaactactaactactgtgctcttctcgggctgcttttccaggcaacccccaggttttccccatttcaagacaagaccactgtggtagtcagcttccgatgtggctcccagtaactctcacctcctggattcatgcctttgtgtgttcccctctcctggggctggaccttgtaactcacttacagcaaataaaatatgacaaaaatggtggggtgccacttccatgattaggttatctacaaaaaagattgtgccttccatcttgctagcagactcttgctggcacgttttcttgccttcttgctgctatgttgtgagatgctccctggagagcaacaaggaacaaggcgaggcctctagccaatagcgtgaaaagaactgaatcttgccaacaaacacaagagtactcactttagaagcagatcctccccagtcaagccttctaataagactgcagccctagaagacccttggactgcatcctgtgagagaccctaaagcaaagaagccagataagcaatgcccaagaaactgtgagatcataagtgttattgttttacactgatatgtcttggagtaatttgggacaccaagcagtagataattaacactacaaccctctgcatctccatggcacctggaaaactatgatagtagaaacatttcatagtatatttgtatctctcaccctccccatcacccatactgtaaactttttgggcacagtctatgatgtatttaccattaaatctatgggtaatggctatctcataggtggagttcaacagatgctgggtaaaaatttttgaggaccaggcacagtggctcatgcctgtaatcccaccactttgggagaccaaggtgggtggataacgaggtcaagagttagagaccagcctggccaatatggtcaaaccctgtctctaataaaaatacaaaaattagcctggtgtggtggtgtgtgcccgtagtctcagctactcaggaggctgaggcaggagaattgcttgaacctgggaggcggagactgcagtgagccaagatcatgccactccactccagcctgggcaacagagcgagactctatctcaaaaaaaaaaaaattattgaggagtctctcattagaaataaattacagttgggtttatgcattaacctgtgaattaggtcagttctgaggatctgataaagttttcaaatttgcaaaactcagaagcagaacctgagctgagggcactttactgtggctctgatcctctcaaggccccatttgggtggccagctagtctctacacagtatctgtatctcagctacttcaacatcataattcttgaaaatagtatttgtaacactaaaccacgtgag

SEQ ID NO: 726665 - DNA, 1284 bp, Homo sapiens
ggactagtagttagttctaggaagaaaagagagacattggagagtaacagtcaccagaatttctgtactccattatcaacatatttttgagaatataccccaaatatattcaaacaaaaagtaagcagtaacaactgatgaactaaaataaataggatttctgaaactgtctccatctttccacttaggcaatcactaattcagaacatagcaaagggtgggktggaaaaaagggcgactggaagagaggaaagaacagggagaatgaagtgaagcagagaaagaagcaagagagaaaaggcgaaggagaagtggagggagaaggaaagaacaaataagagaacgaaaaatgagaaaaggggcaatggcaaaagagaaagggcaagatgagagaaaaggaagagaagacaggagagagaaccaatggttagcaagcaccccactttctcccgaactctttataataggaaaacacaaacacagaactcctccagtcgagtaacctatatctgtgcgctgtttctcaagttgcatctataaagaggatctctactaagttttaactttcttcctaattcttcatatttcttttgtgaattctgaggagactccagcaaggctcctgaggtccagtgtgcctggtataggagtcacagttgtgctctggctctaaaacctgaggagccctcctgacgaagtggctaccatggacgccacttccgcctccggcagctgctggcagacacgactccaggcactgcagctctgaaccagctcaagtgctgcactcacgtgattatggccactactgcctctgacaagccatcaagaatactaaccaccctttcccacaaaggctcctctttcccgtttcttctgtaacaacattccccccacccgcgaagctctggaggcctgttggctagcacaggttgattgataataactgtgtcttccagcaaaagattccacccctgaggatcacagatggcgaatgacttgcggtaattttcttaccaaagaacacggggctcaggcatctaagccatattcagcagagaatcctttccagtcagatccacagaggaggcttttcgcagccataagctttcacttgagttgttatcaaagttttccatcactgactgtttaagaaaacattaaaatgactccacacagactgctgctctacaatttcagttcccctgcctggctgtgtgtgtccaaatgcagtctaggggaagcatgttggtgctgtctgctgtctgtttcctcaggtgtgca

SEQ ID NO: 726666 - DNA, 1284 bp, Homo sapiens
ggactagtagttagttctaggaagaaaagagagacattggagagtaacagtcaccagaatttctgtactccattatcaacatatttttgagaatataccccaaatatattcaaacaaaaagtaagcagtaacaactgatgaactaaaataaataggatttctgaaactgtctccatctttccacttaggcaatcactaattcagaacatagcaaagggtgggttggaaaaaagggcgactggaagagaggamagaacagggagaatgaagtgaagcagagaaagaagcaagagagaaaaggcgaaggagaagtggagggagaaggaaagaacaaataagagaacgaaaaatgagaaaaggggcaatggcaaaagagaaagggcaagatgagagaaaaggaagagaagacaggagagagaaccaatggttagcaagcaccccactttctcccgaactctttataataggaaaacacaaacacagaactcctccagtcgagtaacctatatctgtgcgctgtttctcaagttgcatctataaagaggatctctactaagttttaactttcttcctaattcttcatatttcttttgtgaattctgaggagactccagcaaggctcctgaggtccagtgtgcctggtataggagtcacagttgtgctctggctctaaaacctgaggagccctcctgacgaagtggctaccatggacgccacttccgcctccggcagctgctggcagacacgactccaggcactgcagctctgaaccagctcaagtgctgcactcacgtgattatggccactactgcctctgacaagccatcaagaatactaaccaccctttcccacaaaggctcctctttcccgtttcttctgtaacaacattccccccacccgcgaagctctggaggcctgttggctagcacaggttgattgataataactgtgtcttccagcaaaagattccacccctgaggatcacagatggcgaatgacttgcggtaattttcttaccaaagaacacggggctcaggcatctaagccatattcagcagagaatcctttccagtcagatccacagaggaggcttttcgcagccataagctttcacttgagttgttatcaaagttttccatcactgactgtttaagaaaacattaaaatgactccacacagactgctgctctacaatttcagttcccctgcctggctgtgtgtgtccaaatgcagtctaggggaagcatgttggtgctgtctgctgtctgtttcctcaggtgtgca

SEQ ID NO: 726667 - DNA, 649 bp, Homo sapiens
tgatgcttcctaaatatttagcagcttaagatacacaggtcaggtgctttttcctgaaaaactaaggcttcaaactcctcttcaggatccaacaactgagaatctaaactccaagccatcaggaagtatttttcaaacaatcaaaaaaacagaagctgccaaaataaggcttttgattaaaaatcaacatgatgtctacaagcacaggctgggggccccagcctgccgagccctttgagaatgctgcttatgggacaaacatggtccagaaaacaccaatttaattttaacaaaatgagattgtctggaagcgtttcactatayttaacataggggagcagtttccaaaaatgaggcttagatttttggaaataacaattaggaagctgtctaaggggcaagatccaaagtataattattgctaaatggaatgtttttctgaggatggaaatgaagtctttaacatagctccatgagcccaaatggacagaaaaggtataaattaaacgttgtttttgttctaatatctactggatatgcttaaataagaaagtctggcaagtgaaaattgttatgaactgaattatgccccccaaaattcgtatgttgcagcattaattcccagtatgactatgttggagatggggac

SEQ ID NO: 726668 - DNA, 938 bp, Homo sapiens
tattttatttttatttttatttatttattttattttattttattttttgagacagagtttcactcttgctccccaggctggagtgcaatggcacaaccttggctcatcacaacttccacctcctgggttcaagcgattctcctgcctcagcctccagagtacctgggattacaggcgcccaacaccacgcccggctaattttttatatttttagtagagacggggtttcaccatcttggccaggctggtctcgaactcctgacctctggtgatccacctgccttggattcccaaagtgctgggattacagacgtgagccaccacgcccagccaggggttgatttttaatcarccaggcttagtccaggttgcaaggagcagcaaaatggtcccatttcagtgtgcctaagaattacccggtggggttgcttaaaatgtccatcccagcacccaccttcagaaggtcgaattcagtcagcccgggatgggctccagaatctgcattttgataagtccctcaggtcatcctcatctcatgctggtcttcagaaacgctcccagacacatgccatttcgagcggcccgtagaaatagctgtgcctctctgaaacagttccactctggacctgcggctgtgaaatgtgggctgcattcagtcattggtgtgtaatcactatagacagacccttttcagccctatggactgaaaacatgagtttgtttttcagcaacctgttccacgcggggatggggttggaggggtcaggcagtccccgccctgggagggccaccgtgtcaccagctgctgccctccctgcctgccctgcgcatctccccagcgaggacttctccagcctccatctctaggcattggatgggcccttagatatccagccgtaagagatcgaaagaacgataagtcgttctttctttttttt

SEQ ID NO: 726669 - DNA, 625 bp, Homo sapiens
ctttcactttcaatctcttcatttttagtttctttctgctctttaacctctctaaaagctccttccctctygagctacagcctggtctctccataccctgccatcaagattctgagaatggcaggcacttacttcctctttccccaactattccacagcaatgaatctgggtccaccttcaccactgaactgaagccattatcaacaccaatgactttctgaatgccacatctgatggcttcttctcaggtgtcttcttccaacaattcttttaaaaatcttttactggctgggcagggcggtttgcgcctataatcccaacgtttcatgaggccaagacaggaggatcgtttaaggccaagagtttgagaccagcttggattcttttgtacagcaagtcccagtctctacaaaaaaaaacaaaaacaaacaaacaaaaaaaacttgtaatcccagctactcaggaagctgaggtgggaggatcgcttgagaccaggagattgaggctacagtgatctatgatcacgcccctgcactccagcctgggtgatagaacaagaccttatcacaaaaaaattaaaaattaaataaaactaatattttactagattcccacacactgccc

SEQ ID NO: 726670 - DNA, 625 bp, Homo sapiens
ctttcactttcaatctcttcatttttagtttctttctgctctttaacctctctaaaagctccttccctcttgagctacagcctggtctctccataccctgccatcaagattctgagaatggcaggcacttacttcctctttccccaactattccacagcaatgaatctgggtccaccttcaccactgaactgaagccattatcaacaccaatgactttctgaatgccacatctgatggcttcttctcaggtgtcttcttccaacaattcttttaaaaatcttttactggctgggcagggcggtttgcgcctrtaatcccaacgtttcatgaggccaagacaggaggatcgtttaaggccaagagtttgagaccagcttggattcttttgtacagcaagtcccagtctctacaaaaaaaaacaaaaacaaacaaacaaaaaaaacttgtaatcccagctactcaggaagctgaggtgggaggatcgcttgagaccaggagattgaggctacagtgatctatgatcacgcccctgcactccagcctgggtgatagaacaagaccttatcacaaaaaaattaaaaattaaataaaactaatattttactagattcccacacactgccc

SEQ ID NO: 726671 - DNA, 625 bp, Homo sapiens
ctttcactttcaatctcttcatttttagtttctttctgctctttaacctctctaaaagctccttccctcttgagctacagcctggtctctccataccctgccatcaagattctgagaatggcaggcacttacttcctctttccccaactattccacagcaatgaatctgggtccaccttcaccactgaactgaagccattatcaacaccaatgactttctgaatgccacatctgatggcttcttctcaggtgtcttcttccaacaattcttttaaaaatcttttactggctgggcagggcggtttgcgcctataatcccaacgtttcatgaggccaagacaggaggatcgtttaaggccargagtttgagaccagcttggattcttttgtacagcaagtcccagtctctacaaaaaaaaacaaaaacaaacaaacaaaaaaaacttgtaatcccagctactcaggaagctgaggtgggaggatcgcttgagaccaggagattgaggctacagtgatctatgatcacgcccctgcactccagcctgggtgatagaacaagaccttatcacaaaaaaattaaaaattaaataaaactaatattttactagattcccacacactgccc

SEQ ID NO: 726672 - DNA, 664 bp, Homo sapiens
ttaaagacataaacccacaaggacaaagaccacaagaagagatgacaacaaaattttggaagctggaaaacaaaaggatggtggtggtaacagatttagcatatccaagaaaggtgaatcctaaaccatctataaggaaagctaagaagcagcttgatttgtatctcaggagccctgaaatgatcaggaattggcagcacagcttttacccacccaggcaggagattggaagatttttctctgaagtctatatggccagctccaaagcaaagacttaaagatattgacatgggttatcttacagccatatcattttatagaagtaaattaaaagtacaaaagagtaagaatacactggacaagataccttgggaaaggtttgtgatcctaacttccacaagcccttcttcccttctgtacctgcccccatcccaaactgcaaattaagagaggtattttgggaattagggctggttaggagcagcagaggtactaacttacataaatagtatttcaagactyccacaccattgggaaaataatcaagggtttaaaccatttctcatcatctgtagtcccagaaatacagatctggccatgatctttgaggtcttgactgaagtccttgactccccagatatagatgtctaaaccttccaagatg

SEQ ID NO: 726673 - DNA, 1805 bp, Homo sapiens
aattctcatttctccctaactgcacaaactcctctctgaaaacattgttgctacatgatttccctacgtcggcatttcatgcgggattgtttcacggttcatctgctattctgtgagatgttaataattattaagccaaagcaaacagacaaaggatgtgtggccaaataagtctgacaaaccttgcatcaaacaagttttcagtcttttttcttatagtacttctcagggcttttattatattcttggtctgcattgtggatcttccagagcagcacagtccaacatgtggccacaaataccaggcacgtgtatacttttccaatttatgctaaccatgttaaaaaaaaaaaaaagcagcaggtggtgttatgtttaataagatattttaacctaggccaggcgcagtggctcacacctgtaatcccagcactttgggaggccgaagggggtggatcacctgaggccaggagttggagaccagcctggtgaacatggtgaaaccctatctctactaaaaatataaaaattagctgggcgtgttggtgggcgcctgtaatcccagttactcaggagaatctctggaatcctggaggcggaggctgcagtgagctgagatcatgccattgcactccatcctgggcgacaagagtgaaactctgtctcaaaaaaaaaaaaaagatattttaacctaatatatccaaaatattatttcaatatgtaatcaatatcagaaagttattcactgtcattctttttatatatacttgttctaatttgccaaaatcccatacaggcaacacatctcaatttaggatagccacactccaagtactcaaacactacctgtggctggacaccagggcagcatagcccaagacagagtattcagcattactctagtctttggcaatggaacagtttttttagggagtatatcccaggagtaacgttctacaaaaaattatttaggatgcaaaatactatatacttatgtaaaaaataaacataattttttaaaaaagtttttttcacaaacacatgttatgtttctaaaatatatccttagtatatcaggtcaattctgattacttcaaagttatttgccaaactacttcttctacatagatgaatttctttggtttagggtctctcagattttgcaagaaagttaaaatcttcaaaccccaaatcaaactgaaacaaaaaagagtaaaataagacaagattgagatgaagagaggagataagtacaggcaggaatagaactcctgccttattttccccatttttttcaaattcaacattctttttatttacgtttttgacatataaaaactgtacataattaatgtgtacaacttgatgagtttggtccttaattttttcactttgtgtgatctcaggcattttacctttacttccagaatcttagttactccytttttaagatgaaggattttgaactaaatcatctctgaagtctattccagctctaacacctgtattctgatttatacctttaagaacaataaataggctatatttatagatgaatacatgagcattaatagggacaaaatcacattttactgttgtaacaagggcataattaatagttcataaattgaaattcactcaattctctagagtgctagcaggcaaaacagaaaattacgaaaataatttgtttcagtttattgagaggtttcaaagcttcttactcattttccccctaactattccagtgtttgatttcaaagagatttaaaatcaacaatctctatttgtgacaacttcaatca

SEQ ID NO: 726674 - DNA, 628 bp, Homo sapiens
  misc_feature 332, 333, 334, 335, 336, 337, 338, 339, 340, 341, 342, 343,344, 345, 346, 347, 348, 349, 350, 351, 352, 353, 354, 355,356, 357, 358, 359, 360, 361, 362, 363, 364, 365, 366, 367,368, 369, 370, 371, 372, 373, 374, 375, 376, 377, 378: n = A,T,C or G
  misc_feature 379, 380, 381, 382, 383, 384, 385, 386, 387, 388, 389, 390,391, 392, 393, 394, 395, 396, 397, 398, 399, 400, 401, 402,403, 404, 405, 406, 407, 408, 409, 410, 411, 412, 413, 414,415, 416, 417, 418, 419, 420, 421, 422, 423, 424, 425: n = A,T,C or G
  misc_feature 426, 427, 428, 429, 430, 431: n = A,T,C or G
tttttatgtcatatgtcacctggattacattttcactctgatgtacatgtcattgacagcagtaggctgctagaatttgacaccatgaatttatctgatgaagtgcacagaaagagatctgtttattaattcgtaagcacaatctagagccattttataatacagtatttcccccttcacagaatgaatcagtacttgactgatttaagtataaaatgccttggtttgttaaacacaaccccatattggggagaattggacttgggttctactagcagttgtcccaaaatttgctattcttaaacaagttgtcttcctctcaggackcaaannnnnnnnnnnnnnnnnnnnnnnnnnnnnnnnnnnnnnnnnnnnnnnnnnnnnnnnnnnnnnnnnnnnnnnnnnnnnnnnnnnnnnnnnnnnnnnnnnnnagcaaacaaatgttaacgctagtagaaaacaaaaaataaccaatatcagagctgaactgaaagagatagaaacacacacaaaaaaaaaaatttataatatcaacacatccaggagctattctttttttaataaaaataaataatatagatcactagctaaactaataaggctgaaaagagagaagattcaaataaac

SEQ ID NO: 726675 - DNA, 628 bp, Homo sapiens
  misc_feature 332, 333, 334, 335, 336, 337, 338, 339, 340, 341, 342, 343,344, 345, 346, 347, 348, 349, 350, 351, 352, 353, 354, 355,356, 357, 358, 359, 360, 361, 362, 363, 364, 365, 366, 367,368, 369, 370, 371, 372, 373, 374, 375, 376, 377, 378: n = A,T,C or G
  misc_feature 379, 380, 381, 382, 383, 384, 385, 386, 387, 388, 389, 390,391, 392, 393, 394, 395, 396, 397, 398, 399, 400, 401, 402,403, 404, 405, 406, 407, 408, 409, 410, 411, 412, 413, 414,415, 416, 417, 418, 419, 420, 421, 422, 423, 424, 425: n = A,T,C or G
  misc_feature 426, 427, 428, 429, 430, 431: n = A,T,C or G
tttttatgtcatatgtcacctggattacattttcactctgatgtacatgtcattgacagcagtaggctgctagaatttgacaccatgaatttatctgatgaagtgcacagaaagagatctgtttattaattcgtaagcacaatctagagccattttataatacagtatttcccccttcacagaatgaatcagtacttgactgatttaagtataaaatgccttggtttgttaaacacaaccccatattggggagaattggacttgggttctactagcagttgtcccaaaatttgctattcttaaacaagttgtcttcctctcaggactyaaannnnnnnnnnnnnnnnnnnnnnnnnnnnnnnnnnnnnnnnnnnnnnnnnnnnnnnnnnnnnnnnnnnnnnnnnnnnnnnnnnnnnnnnnnnnnnnnnnnnagcaaacaaatgttaacgctagtagaaaacaaaaaataaccaatatcagagctgaactgaaagagatagaaacacacacaaaaaaaaaaatttataatatcaacacatccaggagctattctttttttaataaaaataaataatatagatcactagctaaactaataaggctgaaaagagagaagattcaaataaac

SEQ ID NO: 726676 - DNA, 628 bp, Homo sapiens
  misc_feature 332, 333, 334, 335, 336, 337, 338, 339, 340, 341, 342, 343,344, 345, 346, 347, 348, 349, 350, 351, 352, 353, 354, 355,356, 357, 358, 359, 360, 361, 362, 363, 364, 365, 366, 367,368, 369, 370, 371, 372, 373, 374, 375, 376, 377, 378: n = A,T,C or G
  misc_feature 379, 380, 381, 382, 383, 384, 385, 386, 387, 388, 389, 390,391, 392, 393, 394, 395, 396, 397, 398, 399, 400, 401, 402,403, 404, 405, 406, 407, 408, 409, 410, 411, 412, 413, 414,415, 416, 417, 418, 419, 420, 421, 422, 423, 424, 425: n = A,T,C or G
  misc_feature 426, 427, 428, 429, 430, 431: n = A,T,C or G
tttttatgtcatatgtcacctggattacattttcactctgatgtacatgtcattgacagcagtaggctgctagaatttgacaccatgaatttatctgatgaagtgcacagaaagagatctgtttattaattcgtaagcacaatctagagccattttataatacagtatttcccccttcacagaatgaatcagtacttgactgatttaagtataaaatgccttggtttgttaaacacaaccccatattggggagaattggacttgggttctactagcagttgtcccaaaatttgctattcttaaacaagttgtcttcctctcaggactcwaannnnnnnnnnnnnnnnnnnnnnnnnnnnnnnnnnnnnnnnnnnnnnnnnnnnnnnnnnnnnnnnnnnnnnnnnnnnnnnnnnnnnnnnnnnnnnnnnnnnagcaaacaaatgttaacgctagtagaaaacaaaaaataaccaatatcagagctgaactgaaagagatagaaacacacacaaaaaaaaaaatttataatatcaacacatccaggagctattctttttttaataaaaataaataatatagatcactagctaaactaataaggctgaaaagagagaagattcaaataaac

SEQ ID NO: 726677 - DNA, 628 bp, Homo sapiens
  misc_feature 332, 333, 334, 335, 336, 337, 338, 339, 340, 341, 342, 343,344, 345, 346, 347, 348, 349, 350, 351, 352, 353, 354, 355,356, 357, 358, 359, 360, 361, 362, 363, 364, 365, 366, 367,368, 369, 370, 371, 372, 373, 374, 375, 376, 377, 378: n = A,T,C or G
  misc_feature 379, 380, 381, 382, 383, 384, 385, 386, 387, 388, 389, 390,391, 392, 393, 394, 395, 396, 397, 398, 399, 400, 401, 402,403, 404, 405, 406, 407, 408, 409, 410, 411, 412, 413, 414,415, 416, 417, 418, 419, 420, 421, 422, 423, 424, 425: n = A,T,C or G
  misc_feature 426, 427, 428, 429, 430, 431: n = A,T,C or G
tttttatgtcatatgtcacctggattacattttcactctgatgtacatgtcattgacagcagtaggctgctagaatttgacaccatgaatttatctgatgaagtgcacagaaagagatctgtttattaattcgtaagcacaatctagagccattttataatacagtatttcccccttcacagaatgaatcagtacttgactgatttaagtataaaatgccttggtttgttaaacacaaccccatattggggagaattggacttgggttctactagcagttgtcccaaaatttgctattcttaaacaagttgtcttcctctcaggactcarannnnnnnnnnnnnnnnnnnnnnnnnnnnnnnnnnnnnnnnnnnnnnnnnnnnnnnnnnnnnnnnnnnnnnnnnnnnnnnnnnnnnnnnnnnnnnnnnnnnagcaaacaaatgttaacgctagtagaaaacaaaaaataaccaatatcagagctgaactgaaagagatagaaacacacacaaaaaaaaaaatttataatatcaacacatccaggagctattctttttttaataaaaataaataatatagatcactagctaaactaataaggctgaaaagagagaagattcaaataaac

SEQ ID NO: 726678 - DNA, 628 bp, Homo sapiens
  misc_feature 332, 333, 334, 335, 336, 337, 338, 339, 340, 341, 342, 343,344, 345, 346, 347, 348, 349, 350, 351, 352, 353, 354, 355,356, 357, 358, 359, 360, 361, 362, 363, 364, 365, 366, 367,368, 369, 370, 371, 372, 373, 374, 375, 376, 377, 378: n = A,T,C or G
  misc_feature 379, 380, 381, 382, 383, 384, 385, 386, 387, 388, 389, 390,391, 392, 393, 394, 395, 396, 397, 398, 399, 400, 401, 402,403, 404, 405, 406, 407, 408, 409, 410, 411, 412, 413, 414,415, 416, 417, 418, 419, 420, 421, 422, 423, 424, 425: n = A,T,C or G
  misc_feature 426, 427, 428, 429, 430, 431: n = A,T,C or G
tttttatgtcatatgtcacctggattacattttcactctgatgtacatgtcattgacagcagtaggctgctagaatttgacaccatgaatttatctgatgaagtgcacagaaagagatctgtttattaattcgtaagcacaatctagagccattttataatacagtatttcccccttcacagaatgaatcagtacttgactgatttaagtataaaatgccttggtttgttaaacacaaccccatattggggagaattggacttgggttctactagcagttgtcccaaaatttgctattcttaaacaagttgtcttcctctcaggactcaawnnnnnnnnnnnnnnnnnnnnnnnnnnnnnnnnnnnnnnnnnnnnnnnnnnnnnnnnnnnnnnnnnnnnnnnnnnnnnnnnnnnnnnnnnnnnnnnnnnnnagcaaacaaatgttaacgctagtagaaaacaaaaaataaccaatatcagagctgaactgaaagagatagaaacacacacaaaaaaaaaaatttataatatcaacacatccaggagctattctttttttaataaaaataaataatatagatcactagctaaactaataaggctgaaaagagagaagattcaaataaac

SEQ ID NO: 726679 - DNA, 832 bp, Homo sapiens
ttttccctgttctaatcagaattgggagtgtcttctgggttcttagtacaaacatatttgagggacattgtctaaatatatggagataagtgtgtgtttatgtgccatctgtacatatagtttccataaygatttttaaaactatttataaatgccccggatattgggtcaagaaaaagtagcatgagtagagaaaaagcttgagatttgagctaggatctgagtctctcccttaccatctggttcaccctaattatataatttagcatcttacaagtgagaactctggagccgtaccacctgcattggattcccagctctgctctttactcactgtataatcttgggcaagacacttaacctctctgtgccttgatgtccttatctataaaatggaatcaaaatagtacctatacctcacaaggttgatgtggaaattaaatgggttgaaatgtagattgtttcaactaatccttggcatttagaaaacaataaaagtaattaatattatgtaaagggggtaaaagaatcatacatacaacaaataggtaatgtcagaactaacataagacaatgcatataaccactttgtacaaggcaatctgctattcaaatgctactaaacccctgaactaaagacagctcctcaaaatttccatgtatcccgctagtactggatgctgtgactagataggatttcacaacttttttaaccgaactgtgaagaaatatggcaggtcttcctatcttcacttaacatatgaagacactaaaggtcaaaaataaaacaaagttacttactcaatgtcacatagctcctcagaatatagta

SEQ ID NO: 726680 - DNA, 639 bp, Homo sapiens
agtgcagacctttctggagaagcagcacatgctaactaagggaaatgcraaaatgtgaaatatccccggggaatgtggaaagggaacgaaggaacgcagggcgatgtgtaggtttaatgtgtggctcagtcaaatagtacgttttactaatccaatgatcataatgatgtccatgtgacttaaaatatatggtgccttaaaattaatgagagtaacttgagaatcacaaggagggtaaatggaattaagatgttccagacttctagcattgtgtaggaagagtaaaaaggtctaatttactccaaactttattatacagattttacagtatgtatataagtaaaaaatatatctcagggttaaaccaatactaaaacaagtattcattttgggattttggcagtttaaaaataattaacattatttttatattaaaaatgtaaatgtaaaaagtgtaccatgaagcttaataaatgtatagacccttgtaagtatcaactagaccaagccacatagaacatttccatcaacccaggaagttttccatcaaagtacctcaaagagggagccactgttgagtcctgatgcttcatataaatggaattacacaggagtatcagacaggtacattaagataaa

SEQ ID NO: 726681 - DNA, 639 bp, Homo sapiens
agtgcagacctttctggagaagcagcacatgctaactaagggaaatgcgaaaatgtgaaatatccccggggaatgtggaaagggaacgaaggaacgcagggcgatgtgtaggtttaatgtgtggctcagtcaaatagtacgttttactaatccaatgatcataatgatgtccatgtgacttaaaatatatggtgccttaaaattaatgagagtaacttgagaatcacaaggagggtaaatggaattaagatgttccagacttctagcattgtgtaggaagagtaaaaaggtctaatttactccaaactttattatacagattttacagtatgtatataagtaaaaaatatatctcagggttaaaccaatactaaaacaagtattcattttgggatttyggcagtttaaaaataattaacattatttttatattaaaaatgtaaatgtaaaaagtgtaccatgaagcttaataaatgtatagacccttgtaagtatcaactagaccaagccacatagaacatttccatcaacccaggaagttttccatcaaagtacctcaaagagggagccactgttgagtcctgatgcttcatataaatggaattacacaggagtatcagacaggtacattaagataaa

SEQ ID NO: 726682 - DNA, 2408 bp, Homo sapiens
catgtatacacctatatatagtatgtatatacacacacaacatatatatacacactatatgtaggtgtatatatatgtacacacacatacacacacacacacacacacacacacacacacatatatatatatatatatatatatatatatatatatatatatatatgagagagagagagagagaaattgaaaaactcagttataatccctggtctaatgtgcccaactcgcattctcacatgctaccaaaaggcctcctccttctcctctttcatttttgagagtgaagactgtgaaatctctttctccctcatcccctacccttctctagctcagtactgacgttctaccttggaggaccctatactttagcctacaggactaaggttactatggagatgaaatatggacttatccttatctgccaatcaaatgctctataggtgcatgtgtgtaacttaaaccgcaaggaagtttcagactggatgtgtgccatctcagtgccatcccccggccacacacagaaatggtgacatctccatcacagatgggttgcatgagactcagatgatagtggggtccttggcagaaaagaatgtcacagaggagggttctgacaagtgcttggaaatacttgggtcaatgttaccagactcctcttctctcttagcttacagcctggatgtctgtcaccaaatccctttgagcagtgacttgagccacctggtggcagaggtatgaggtctgagagggcagctggagaagagcattcaggggaacaattgtctgtgactgcagctgcaacagcagctggatagcctgctggcaaagccagcctcagcccctcctctgttaaccagaacttcccagccagcgctgaccctggaaacaagcagctgctcctccaaggtaggaaggaaaagggacttagaaagcccttggccagtggggagatcaccaggatgtctgcctggtccatgctccttatggtcaggttgaaatcagagatgctctagtctagcagcctgagtgaaagcgtgggatttaggtcagactgggctccagattctgagtttaccgcttagaggtcgtttgatttgggcaaggtgtttaaagtctcagaggtttaagccttagtttccttacatttaagatgaggataataataatatataccttatatgattttgaccattaaatgagatcatttacaagtgcttggcacactaagaattgctcaataattagcagctgtatatgttcatatctttttcttggatttgcttggtgctttagttttagccaagtgttttcacatatataatttcacctgaagtaaagcaggttttgctatctctgtatttcacatgagaaaatttaggtcctgagatattaacagacaagcgaggctttagagaagttatagacaaagccaggatcagaaccagatgttgtgattttcagtctgtgttccttccagctcattgtgccctgtctcagtattgccgaccttcccagattctctagtccccctttccctcacaggtggggaactcaactgtgtggcaaaatgttcctgcccctaaggaaacagggctctggggaagtcctggatggtgggtgatttatttcgggyggtcatcattcgctttctctaccccaccccttgcctgccttttcagataggcgtgtttgaccaggtcccccttctcttctcaatatcccccatcaatctcacttctcccagttttcattgaaatgtcaatggtgtccccctagtctcttaaatcattcaatttctacttcctctgtccttttctccttttgatacaccgtttagtacaccatctccactcacctccatggccataccttcaattttattcaaatcaggaaccacttctgttcagtttctctaaagctgagctttcaaactctcctgccagctatttctgggtcatgttaatcattatttttctctggttcttgtagatgctcatttatctgacagtaaccttatttgtcaaatgaaggtgacaataacatgattatgctgttttcagcttacattaggtggatgccttgcccttctctgggctgccctgatggttgtggtgttcagtgatgtctccaactcttccttctttctaaccaggccttcctctctctctggcttcccacacagcagccaagactcagccccactggtgcagtccctgcccatctttctctagcacccctgaggcctgagctggaaagcaggcactgggccacacttgcctgagtaggaccttttctaccttctttgtgatattttccaattcctccaccatagggttgctttttagtctccagcaagatgttaacccaccaagccctctctctccgttcttctcatacaagtcaat

SEQ ID NO: 726683 - DNA, 1372 bp, Homo sapiens
ttcctagtgatccttcctgacagtgttcttgagcttttttgagctccatgcataaggggctttagccccatcgtggtcatcatacgggacatagccatttgcatatgttttaagcaacttgggtgggttcacatctaaccattaggacctcctgaggataccatttcccttcagggtatcccaaaatgacaatcttctttccaaacacaggttttgtccaaattcattttaaatctcgggttattttgttcttcctatagtgatgtttaaaaaaatttttaggcaatgaactttttaaaagcctcttatcttgatcaggctcaggtaatgtaaaaatacaaggatgttattccatttgaaattttaaacaagacatttatttaacattcttgtatgttttacagaaatgttaatttgacatttggttttgtgttccatgtattgttacataaattgtgtatgtattgttttttaaaatagaccataaactcctaagaactatgtaaaaggcctctgttgaattcctgattagtccagggtcttgcacataaaggaaaacacaaatgtttactagattaagaaaagtaaatarttgttgaacatagtaagcattaaataaatcattgtcattaaataagtcattataatactttattaatgaatttaaaagagcagaatctaatagctattgcattctttaaaaactcaggctcatacttcaaatcaatattggacctgttatgataataaattattatatcttccctgctctaagacattcatagccattaggagacttgatttagagtcttggctttgacactcagtaggtgggacacttcggcatgcaatagaattgtaaaattttactgctgtccttttttaaaagcagtaattcttgaacttgtttctctttgcccatgaataactttgaaatgctggtagaagtcatggaacttctaattagaaaatcgcatatacattatgcacacaagattttgcatacaaatcagagatttgtgaactccctgaaacctgttcataggtccatggactgtctctaaggttgcccagttgtgctatccatgaaacacaaaattgtcctacaatgaagatgtttacagctccatattgagatcatttgattctttaatgacaaattttcttagatgggagatcatcctgcctcagcaaataatgtcaagatcaagctccactgtatgggctacagaaaaatatgaccataaactcattgaaacttctgacatattaagagacgaaatgccatatatttaaaattgccaggtagtaaattgattatcactttccctttctcttgccatactcaaatttctctcttggctctttataa

SEQ ID NO: 726684 - DNA, 1358 bp, Homo sapiens
agtgccagaaatgctctccacaccatgtcccacctgcagaggaagaggtgagagaggagtggtgctgagaattcaaaactgtttttttttttaatctcttcagtgtttcagcaatatgtagttaaaaccaagaactacgaatgctcacctgattttcgttcttatgaagctgtttttctgtgtaggtagtcgttaacttgatgtccttattggagggacaattattctgccatcttgctccaccttcttctctgaatctgcactggtgttttgagaaatacagattttaagtccctgatgtcatctgaaggtaaccatccataaatattttagatattgactatattgactatattatggtaataattccatgctgataaaatctactgatttatgtatttagatatggcaatgtagggaataggctacgtgactgaagaggtatccaacctgggaagaagccaaatgcaataaagtaatattaaataagaatgaatgtaaaaccttacatttaagtctcaaaactgaatttctaatataaaggagagaggatacaaccaaaacaccacatgtgatgcaaaaaaaaaaaacaaaacaaaaaactaaaacagacttggacattttaattaactgtcattgaaatatttatcaatgctgttaagtttgcaataaaggttgatataaacttagatgcaagaaaagtaattttctcagcattttctaggctgctcatgctgtacttaaataattctagctttcagactttaagagagatattaactaacctgatgaggtcgagatgacaggcctactggtactaggaggtacggctttaacatgaattttggatggacaaaattcagcccgtaataagtcctaaggtggacaacagaatgtgaagctagagaattacagaaataaaataaggtagagaagaagaataaaaagagagggagagattaatggcttgagcaagcaagcagtcagaagactaattgagtagactcaataccattgtatgcaaggaaagatctagggtaattttgtattaaagatgaaaaaaataaagtatctccataacagrtatcttgaaatatttaagggtctttattcaagaaagaaatccaatttttttttctaagcagtcataaaacaaatctttagacctatagggaaatcttattatagtagaatggtatatttaagagtttattaagaaatatttccagcactttgggaggctgaggtgggcggatcacttgaggccaggagttcaagacaagcctggccaacatggtgaaaccctgcctctactaaaaatacaaaattagctggaaatggtggcgcacacctgtaat

SEQ ID NO: 726685 - DNA, 821 bp, Homo sapiens
acacacacacayacacacacacacacacacacacacacacacacagagagagagagagaaacgacaaaaaaaatagaagccctttagggtgtctaaagtattaaaatatttttatactgatatgtgtatgggcagtttaaaaaacctacattggatctaagcaagtttgagtctacattcaatcttggatctataactttattgctgtgctccaaataacagtcaaaaatggaataaaataacatcatattaacaatatcaaagaaaatgactttctgagttgtttaccccaaactaaaatgatggggcttgcaggttaggtgggtgaagaaaaggccataattacacaacacagtagaggtggcacaatttggagattaaaatagtccttagagttcttaatcagttattctttagtagggactctgattcaattgatttttctccgtattgaggggctaagtcaatgatggaatcacctgcaagaatattttgggacagagacttttttttagaagaagcaatgttactcaactaccatgataagagaagaaaggagagcttattgaccatttctgactttagacatgaaaaataaatgaactaattctttaaagactttctaatcatcagtcactgctgtgaggtagtcacttcctctcccagaagtagaatatgtggattaggacgtttatctatcagaaatattaatgcttatacttctaagcaacagagacagaaatgctgctactaattaattcagttactctaaattataatagtcataaagtacacatccaatatctaaaattatacatttt

SEQ ID NO: 726686 - DNA, 821 bp, Homo sapiens
acacacacacatacacacacacacacacacacacacacacacasagagagagagagagaaacgacaaaaaaaatagaagccctttagggtgtctaaagtattaaaatatttttatactgatatgtgtatgggcagtttaaaaaacctacattggatctaagcaagtttgagtctacattcaatcttggatctataactttattgctgtgctccaaataacagtcaaaaatggaataaaataacatcatattaacaatatcaaagaaaatgactttctgagttgtttaccccaaactaaaatgatggggcttgcaggttaggtgggtgaagaaaaggccataattacacaacacagtagaggtggcacaatttggagattaaaatagtccttagagttcttaatcagttattctttagtagggactctgattcaattgatttttctccgtattgaggggctaagtcaatgatggaatcacctgcaagaatattttgggacagagacttttttttagaagaagcaatgttactcaactaccatgataagagaagaaaggagagcttattgaccatttctgactttagacatgaaaaataaatgaactaattctttaaagactttctaatcatcagtcactgctgtgaggtagtcacttcctctcccagaagtagaatatgtggattaggacgtttatctatcagaaatattaatgcttatacttctaagcaacagagacagaaatgctgctactaattaattcagttactctaaattataatagtcataaagtacacatccaatatctaaaattatacatttt

SEQ ID NO: 726687 - DNA, 821 bp, Homo sapiens
acacacacacatacacacacacacacacacacacacacacacacagagagagagagagaaacgacaaaaaaaatagaagccctttagggtgtctaaagtattaaaatatttttatactgatatgtgtatgggcagtttaaaaaacctacattggatctaagcaagtttgagtctacattcaatcttggatctayaactttattgctgtgctccaaataacagtcaaaaatggaataaaataacatcatattaacaatatcaaagaaaatgactttctgagttgtttaccccaaactaaaatgatggggcttgcaggttaggtgggtgaagaaaaggccataattacacaacacagtagaggtggcacaatttggagattaaaatagtccttagagttcttaatcagttattctttagtagggactctgattcaattgatttttctccgtattgaggggctaagtcaatgatggaatcacctgcaagaatattttgggacagagacttttttttagaagaagcaatgttactcaactaccatgataagagaagaaaggagagcttattgaccatttctgactttagacatgaaaaataaatgaactaattctttaaagactttctaatcatcagtcactgctgtgaggtagtcacttcctctcccagaagtagaatatgtggattaggacgtttatctatcagaaatattaatgcttatacttctaagcaacagagacagaaatgctgctactaattaattcagttactctaaattataatagtcataaagtacacatccaatatctaaaattatacatttt

SEQ ID NO: 726688 - DNA, 821 bp, Homo sapiens
acacacacacatacacacacacacacacacacacacacacacacagagagagagagagaaacgacaaaaaaaatagaagccctttagggtgtctaaagtattaaaatatttttatactgatatgtgtatgggcagtttaaaaaacctacattggatctaagcaagtttgagtctacattcaatcttggatctataactttattgctgtgctccaaataacagtcaaaaatggaataaaataacatcatattaacaatatcaaagaaaatgactttctgagttgtttaccccaaactaaaatgatggggcttgcaggttaggtgggtgaagaaaaggccataattacacaacacagtagaggtggcacaatttggagattaaaatagtccttagagttcttaatcagttattctttagtagggactctgattcaattgatttttctccgtattgaggggctaagtcaatgatggaatcacctgcaagaatattttgggacagagacttttttttagaagaagcaatgttactcaactaccatgataagagaagaaaggagagcttattgaccatttctgactttagacatgaaaaataaatgaactaattctttaaagactttctaatcatcagtcactgctgtgaggtagtcacttcctctcccagaagtagaatatgtggattaggacgtttatctatcagaaatattaatgcttatacttctaagcaacagagacagaratgctgctactaattaattcagttactctaaattataatagtcataaagtacacatccaatatctaaaattatacatttt

SEQ ID NO: 726689 - DNA, 639 bp, Homo sapiens
tagcctgcagcccatcccctttctttctctctcctctatctcccaatcttgtacatagtgtggacacccttgcccacatgtctaaggcccagtgaccccttccaaacagctgttccttgaccacgcccaggtctaatgtgcacaccagaagggcagtttagtccagtctagcttccagagaacagacccaagagagagtcccgctcaggccctggcacttccatgggcttgtggtgatctagccagggagtttgagggtctcaggtactcaggatcaaggtgtacgcaggggacggctccagctgggcttttttcccttcacactttgagtgggatctttgtgctacgtataccttctaaagcccacagccttcaggcaagggcttttcttgtctgaggctaaagtggcattaatgtgagcctaaatctcaccttaaacatggggcattaagattagtcattttcctgcaagccatatgctaaaggcatgcgggcatagcccttggatctgatgcaaycaactgctttactacactgaattgtatgactccttcctgaagcaggcagtgtagtcctagaggatctttcctggtgttgcatttcttttgccatcatgtgctgtttcagtcttagaatgtt

SEQ ID NO: 726690 - DNA, 2659 bp, Homo sapiens
actggctccattattgtttcatataccatgagtaccacttgacatcttcagaagtgctttcttttttttttttttttttttgaagccattactcttaaagtaagcactgtcacctgtatttgaaaacttggatctttgctgattataatcaaggtttttttttgagcaaacagtattaggtaaggtagtaaaatttttaagaggtcgtatacacaactggattagacataggaaaggtggtatcatgtagtatttaagataatttggaatcctgtctctacaatttactattataaactaaacaatttattaactctttcaaatattgattaattatatgttaaatatagcatcatttgaatggagctgctcattatagtctttagacaagcaaaatttaggatgtaattaatttactggctgggcgcagtggctcatgcctgtaatcccagcactttgggaggccgaggcaggcagatcacttgaggtcaggagttcgagaccagcctgaccaacatggtgaaaccctaactctactaaagatacaaaaattagctgggcttggtggcaggcgcctgtaatcccagctacttgggaggctgaggcaggagattcacttgaacccgggaggcggaggtgcagtgagccaagattgtgccactgcactccagcctggtcaacagagtgagactctgtcttaaaaaaaaaagaatgtaattaatttgcaaaagtgaattgaggaacaaattcaacatttcatatcctttcacacctgctggaattttgttttatttttagttacagattttgccatcttccttctttcccatccaaagttctttaaattatttttaaaacatttactcagttttagctcctctttcaaattagcaactttagttcttttttatataccataaccctaaaaaaaaaaatctggctttggtatctgaaatattttccaaggcatttccattttgagtatctcagtactctgtttggcagctgtgtgtaaatggttagtagatgttataaagtatgctgaattggtatgaaaaacatagtcttgtggattgctgaacttctttatgtgtaatagagtgggatgaagagtgtggactttggatatagacagtcctgtatttaaatataggctctcccacataactgatgggtaaccttgagcaagagaccagttaacctctctgtcagttacattctcagtaaaattgggacaataggtaaagtatctagctctacaaattatagctgttttgcatgactttgagccctttactcagtttawgaaaggagttctctgctatcatatatatgattttctttcttcgtttacttgaaaagctgcagactagtataccctctgcgtaattgttctctccacagtcctttccttcccagtttaattagctataaaaatctcctgtgctatctctgtaatgagcaactagcccgggttaaataccgagtccattaactaaagagaggcccccagtttgatttcacatgtctcagttgtcctgtgttcacagtgattcatctcattcctgtgccgtaaaatcccttgggctctgtcacataagttccagctgtaggcttgtgaattgttaatagcatccatttttcagtcaagaaattttacaatgctattcagtgtggttagaataggatggtaaatataggtcaaattttatttcctggtcagtgaagtttatttattgaaaaaaatctttaaaaccatttgatatttgaaaatagtttggagtggtacccagctaaattagctaacaacaactgcttgtccaaatgccagccttcaggatgactgcttttttttttttaataccaatgtgggtatcactttatttaatgcagcataattttggaggagacctttttctaaggagccattatgtactctttcttagagtagttactaattatctgaactcatccatatttgattgcctatattaatatgagtggcaaagcaactatttgccatgaagttaaaaaaatattatatatagaaacagtaatgagacatccttgttttgttttgtgcctagcagataatatctaaaacatttctatgtattcctcatttcctacttccaggtgttcagtgatattattacaggttttaactgtttctttgtatattatgttttgtgatatgtatatttgattagtttgttcatataatcaaacaatgtcaatgttttttctttttctcatcttctgattaggatttctggcaggtactgactcagcagcatgtgctttaaattacttaatgctccaaaatccatagtaatgcttcaggaacaaaggttcagcgcatgatgcatatgtccttgccctgctcccttcagaatgatttcgttcctgtcactttaaattaacatactttatctttaatatgacaatccaagcactgcacaagtcccagagaatttgatacccagcatgatttaaaaggaagttttaacattatgtgttacacaaaaggttaagaaattttgttgtaatcactcttgttaagcataagagatacttaattaattgagtcacttaaatagtcttacttggaggccgggtctggtggctcatgcttgtaatcccagcactttgagaggca

SEQ ID NO: 726691 - DNA, 2659 bp, Homo sapiens
actggctccattattgtttcatataccatgagtaccacttgacatcttcagaagtgctttcttttttttttttttttttttgaagccattactcttaaagtaagcactgtcacctgtatttgaaaacttggatctttgctgattataatcaaggtttttttttgagcaaacagtattaggtaaggtagtaaaatttttaagaggtcgtatacacaactggattagacataggaaaggtggtatcatgtagtatttaagataatttggaatcctgtctctacaatttactattataaactaaacaatttattaactctttcaaatattgattaattatatgttaaatatagcatcatttgaatggagctgctcattatagtctttagacaagcaaaatttaggatgtaattaatttactggctgggcgcagtggctcatgcctgtaatcccagcactttgggaggccgaggcaggcagatcacttgaggtcaggagttcgagaccagcctgaccaacatggtgaaaccctaactctactaaagatacaaaaattagctgggcttggtggcaggcgcctgtaatcccagctacttgggaggctgaggcaggagattcacttgaacccgggaggcggaggtgcagtgagccaagattgtgccactgcactccagcctggtcaacagagtgagactctgtcttaaaaaaaaaagaatgtaattaatttgcaaaagtgaattgaggaacaaattcaacatttcatatcctttcacacctgctggaattttgttttatttttagttacagattttgccatcttccttctttcccatccaaagttctttaaattatttttaaaacatttactcagttttagctcctctttcaaattagcaactttagttcttttttatataccataaccctaaaaaaaaaaatctggctttggtatctgaaatattttccaaggcatttccattttgagtatctcagtactctgtttggcagctgtgtgtaaatggttagtagatgttataaagtatgctgaattggtatgaaaaacatagtcttgtggattgctgaacttctttatgtgtaatagagtgggatgaagagtgtggactttggatatagacagtcctgtatttaaatataggctctcccacataactgatgggtaaccttgagcaagagaccagttaacctctctgtcagttacattctcagtaaaattgggacaataggtaaagtatctagctctacaaattatagctgttttgcatgactttgagccctttactcagtttaagaaaggagttctctgctatcatatatatgattttctttcttcgtttacttgaaaagctgcagactagtataccctctgcgtaattgttctctccacagtcctttccttcccagtttaattagctataaaaatctcctgtgctatctctgtaatgagcaactagcccgggttaaataccgagtccattaactaaagagaggcccccagtttgatttcacatgtctcagttgtcctgtgttcacagtgattcatctcattcctgtgccgtaaaatcccttgggctctgtcacataagttccagctgtaggcttgtgaattgttaatagcatccatttttcagtcaagaaattttacaatgctattcagtgtggttagaataggatggtaaatataggtcaaattttatttcctggtcagtgaagtttatttattgaaaaaaatctttaaaaccatttgatatttgaaaatagtttggagtggtacccagctaaattagctaacaacaactgcttgtccaaatgcyagccttcaggatgactgcttttttttttttaataccaatgtgggtatcactttatttaatgcagcataattttggaggagacctttttctaaggagccattatgtactctttcttagagtagttactaattatctgaactcatccatatttgattgcctatattaatatgagtggcaaagcaactatttgccatgaagttaaaaaaatattatatatagaaacagtaatgagacatccttgttttgttttgtgcctagcagataatatctaaaacatttctatgtattcctcatttcctacttccaggtgttcagtgatattattacaggttttaactgtttctttgtatattatgttttgtgatatgtatatttgattagtttgttcatataatcaaacaatgtcaatgttttttctttttctcatcttctgattaggatttctggcaggtactgactcagcagcatgtgctttaaattacttaatgctccaaaatccatagtaatgcttcaggaacaaaggttcagcgcatgatgcatatgtccttgccctgctcccttcagaatgatttcgttcctgtcactttaaattaacatactttatctttaatatgacaatccaagcactgcacaagtcccagagaatttgatacccagcatgatttaaaaggaagttttaacattatgtgttacacaaaaggttaagaaattttgttgtaatcactcttgttaagcataagagatacttaattaattgagtcacttaaatagtcttacttggaggccgggtctggtggctcatgcttgtaatcccagcactttgagaggca

SEQ ID NO: 726692 - DNA, 2659 bp, Homo sapiens
actggctccattattgtttcatataccatgagtaccacttgacatcttcagaagtgctttcttttttttttttttttttttgaagccattactcttaaagtaagcactgtcacctgtatttgaaaacttggatctttgctgattataatcaaggtttttttttgagcaaacagtattaggtaaggtagtaaaatttttaagaggtcgtatacacaactggattagacataggaaaggtggtatcatgtagtatttaagataatttggaatcctgtctctacaatttactattataaactaaacaatttattaactctttcaaatattgattaattatatgttaaatatagcatcatttgaatggagctgctcattatagtctttagacaagcaaaatttaggatgtaattaatttactggctgggcgcagtggctcatgcctgtaatcccagcactttgggaggccgaggcaggcagatcacttgaggtcaggagttcgagaccagcctgaccaacatggtgaaaccctaactctactaaagatacaaaaattagctgggcttggtggcaggcgcctgtaatcccagctacttgggaggctgaggcaggagattcacttgaacccgggaggcggaggtgcagtgagccaagattgtgccactgcactccagcctggtcaacagagtgagactctgtcttaaaaaaaaaagaatgtaattaatttgcaaaagtgaattgaggaacaaattcaacatttcatatcctttcacacctgctggaattttgttttatttttagttacagattttgccatcttccttctttcccatccaaagttctttaaattatttttaaaacatttactcagttttagctcctctttcaaattagcaactttagttcttttttatataccataaccctaaaaaaaaaaatctggctttggtatctgaaatattttccaaggcatttccattttgagtatctcagtactctgtttggcagctgtgtgtaaatggttagtagatgttataaagtatgctgaattggtatgaaaaacatagtcttgtggattgctgaacttctttatgtgtaatagagtgggatgaagagtgtggactttggatatagacagtcctgtatttaaatataggctctcccacataactgatgggtaaccttgagcaagagaccagttaacctctctgtcagttacattctcagtaaaattgggacaataggtaaagtatctagctctacaaattatagctgttttgcatgactttgagccctttactcagtttaagaaaggagttctctgctatcatatatatgattttctttcttcgtttacttgaaaagctgcagactagtataccctctgcgtaattgttctctccacagtcctttccttcccagtttaattagctataaaaatctcctgtgctatctctgtaatgagcaactagcccgggttaaataccgagtccattaactaaagagaggcccccagtttgatttcacatgtctcagttgtcctgtgttcacagtgattcatctcattcctgtgccgtaaaatcccttgggctctgtcacataagttccagctgtaggcttgtgaattgttaatagcatccatttttcagtcaagaaattttacaatgctattcagtgtggttagaataggatggtaaatataggtcaaattttatttcctggtcagtgaagtttatttattgaaaaaaatctttaaaaccatttgatatttgaaaatagtttggagtggtacccagctaaattagctaacaacaactgcttgtccaaatgccrgccttcaggatgactgcttttttttttttaataccaatgtgggtatcactttatttaatgcagcataattttggaggagacctttttctaaggagccattatgtactctttcttagagtagttactaattatctgaactcatccatatttgattgcctatattaatatgagtggcaaagcaactatttgccatgaagttaaaaaaatattatatatagaaacagtaatgagacatccttgttttgttttgtgcctagcagataatatctaaaacatttctatgtattcctcatttcctacttccaggtgttcagtgatattattacaggttttaactgtttctttgtatattatgttttgtgatatgtatatttgattagtttgttcatataatcaaacaatgtcaatgttttttctttttctcatcttctgattaggatttctggcaggtactgactcagcagcatgtgctttaaattacttaatgctccaaaatccatagtaatgcttcaggaacaaaggttcagcgcatgatgcatatgtccttgccctgctcccttcagaatgatttcgttcctgtcactttaaattaacatactttatctttaatatgacaatccaagcactgcacaagtcccagagaatttgatacccagcatgatttaaaaggaagttttaacattatgtgttacacaaaaggttaagaaattttgttgtaatcactcttgttaagcataagagatacttaattaattgagtcacttaaatagtcttacttggaggccgggtctggtggctcatgcttgtaatcccagcactttgagaggca

SEQ ID NO: 726693 - DNA, 2659 bp, Homo sapiens
actggctccattattgtttcatataccatgagtaccacttgacatcttcagaagtgctttcttttttttttttttttttttgaagccattactcttaaagtaagcactgtcacctgtatttgaaaacttggatctttgctgattataatcaaggtttttttttgagcaaacagtattaggtaaggtagtaaaatttttaagaggtcgtatacacaactggattagacataggaaaggtggtatcatgtagtatttaagataatttggaatcctgtctctacaatttactattataaactaaacaatttattaactctttcaaatattgattaattatatgttaaatatagcatcatttgaatggagctgctcattatagtctttagacaagcaaaatttaggatgtaattaatttactggctgggcgcagtggctcatgcctgtaatcccagcactttgggaggccgaggcaggcagatcacttgaggtcaggagttcgagaccagcctgaccaacatggtgaaaccctaactctactaaagatacaaaaattagctgggcttggtggcaggcgcctgtaatcccagctacttgggaggctgaggcaggagattcacttgaacccgggaggcggaggtgcagtgagccaagattgtgccactgcactccagcctggtcaacagagtgagactctgtcttaaaaaaaaaagaatgtaattaatttgcaaaagtgaattgaggaacaaattcaacatttcatatcctttcacacctgctggaattttgttttatttttagttacagattttgccatcttccttctttcccatccaaagttctttaaattatttttaaaacatttactcagttttagctcctctttcaaattagcaactttagttcttttttatataccataaccctaaaaaaaaaaatctggctttggtatctgaaatattttccaaggcatttccattttgagtatctcagtactctgtttggcagctgtgtgtaaatggttagtagatgttataaagtatgctgaattggtatgaaaaacatagtcttgtggattgctgaacttctttatgtgtaatagagtgggatgaagagtgtggactttggatatagacagtcctgtatttaaatataggctctcccacataactgatgggtaaccttgagcaagagaccagttaacctctctgtcagttacattctcagtaaaattgggacaataggtaaagtatctagctctacaaattatagctgttttgcatgactttgagccctttactcagtttaagaaaggagttctctgctatcatatatatgattttctttcttcgtttacttgaaaagctgcagactagtataccctctgcgtaattgttctctccacagtcctttccttcccagtttaattagctataaaaatctcctgtgctatctctgtaatgagcaactagcccgggttaaataccgagtccattaactaaagagaggcccccagtttgatttcacatgtctcagttgtcctgtgttcacagtgattcatctcattcctgtgccgtaaaatcccttgggctctgtcacataagttccagctgtaggcttgtgaattgttaatagcatccatttttcagtcaagaaattttacaatgctattcagtgtggttagaataggatggtaaatataggtcaaattttatttcctggtcagtgaagtttatttattgaaaaaaatctttaaaaccatttgatatttgaaaatagtttggagtggtacccagctaaattagctaacaacaactgcttgtccaaatgccagmcttcaggatgactgcttttttttttttaataccaatgtgggtatcactttatttaatgcagcataattttggaggagacctttttctaaggagccattatgtactctttcttagagtagttactaattatctgaactcatccatatttgattgcctatattaatatgagtggcaaagcaactatttgccatgaagttaaaaaaatattatatatagaaacagtaatgagacatccttgttttgttttgtgcctagcagataatatctaaaacatttctatgtattcctcatttcctacttccaggtgttcagtgatattattacaggttttaactgtttctttgtatattatgttttgtgatatgtatatttgattagtttgttcatataatcaaacaatgtcaatgttttttctttttctcatcttctgattaggatttctggcaggtactgactcagcagcatgtgctttaaattacttaatgctccaaaatccatagtaatgcttcaggaacaaaggttcagcgcatgatgcatatgtccttgccctgctcccttcagaatgatttcgttcctgtcactttaaattaacatactttatctttaatatgacaatccaagcactgcacaagtcccagagaatttgatacccagcatgatttaaaaggaagttttaacattatgtgttacacaaaaggttaagaaattttgttgtaatcactcttgttaagcataagagatacttaattaattgagtcacttaaatagtcttacttggaggccgggtctggtggctcatgcttgtaatcccagcactttgagaggca

SEQ ID NO: 726694 - DNA, 2659 bp, Homo sapiens
actggctccattattgtttcatataccatgagtaccacttgacatcttcagaagtgctttcttttttttttttttttttttgaagccattactcttaaagtaagcactgtcacctgtatttgaaaacttggatctttgctgattataatcaaggtttttttttgagcaaacagtattaggtaaggtagtaaaatttttaagaggtcgtatacacaactggattagacataggaaaggtggtatcatgtagtatttaagataatttggaatcctgtctctacaatttactattataaactaaacaatttattaactctttcaaatattgattaattatatgttaaatatagcatcatttgaatggagctgctcattatagtctttagacaagcaaaatttaggatgtaattaatttactggctgggcgcagtggctcatgcctgtaatcccagcactttgggaggccgaggcaggcagatcacttgaggtcaggagttcgagaccagcctgaccaacatggtgaaaccctaactctactaaagatacaaaaattagctgggcttggtggcaggcgcctgtaatcccagctacttgggaggctgaggcaggagattcacttgaacccgggaggcggaggtgcagtgagccaagattgtgccactgcactccagcctggtcaacagagtgagactctgtcttaaaaaaaaaagaatgtaattaatttgcaaaagtgaattgaggaacaaattcaacatttcatatcctttcacacctgctggaattttgttttatttttagttacagattttgccatcttccttctttcccatccaaagttctttaaattatttttaaaacatttactcagttttagctcctctttcaaattagcaactttagttcttttttatataccataaccctaaaaaaaaaaatctggctttggtatctgaaatattttccaaggcatttccattttgagtatctcagtactctgtttggcagctgtgtgtaaatggttagtagatgttataaagtatgctgaattggtatgaaaaacatagtcttgtggattgctgaacttctttatgtgtaatagagtgggatgaagagtgtggactttggatatagacagtcctgtatttaaatataggctctcccacataactgatgggtaaccttgagcaagagaccagttaacctctctgtcagttacattctcagtaaaattgggacaataggtaaagtatctagctctacaaattatagctgttttgcatgactttgagccctttactcagtttaagaaaggagttctctgctatcatatatatgattttctttcttcgtttacttgaaaagctgcagactagtataccctctgcgtaattgttctctccacagtcctttccttcccagtttaattagctataaaaatctcctgtgctatctctgtaatgagcaactagcccgggttaaataccgagtccattaactaaagagaggcccccagtttgatttcacatgtctcagttgtcctgtgttcacagtgattcatctcattcctgtgccgtaaaatcccttgggctctgtcacataagttccagctgtaggcttgtgaattgttaatagcatccatttttcagtcaagaaattttacaatgctattcagtgtggttagaataggatggtaaatataggtcaaattttatttcctggtcagtgaagtttatttattgaaaaaaatctttaaaaccatttgatatttgaaaatagtttggagtggtacccagctaaattagctaacaacaactgcttgtccaaatgccagccttcaggatgactgcttttttttttttaataccaatgtgggtatcactttatttaatgcagcataattttggaggagacctttttctaaggagccattatgtactctttcttagagtagttactaattatctgaactcatccatatttgattgcctatattaatatgagtggcaaagcaactatttgccatgaagttaaaaaaatattatrtatagaaacagtaatgagacatccttgttttgttttgtgcctagcagataatatctaaaacatttctatgtattcctcatttcctacttccaggtgttcagtgatattattacaggttttaactgtttctttgtatattatgttttgtgatatgtatatttgattagtttgttcatataatcaaacaatgtcaatgttttttctttttctcatcttctgattaggatttctggcaggtactgactcagcagcatgtgctttaaattacttaatgctccaaaatccatagtaatgcttcaggaacaaaggttcagcgcatgatgcatatgtccttgccctgctcccttcagaatgatttcgttcctgtcactttaaattaacatactttatctttaatatgacaatccaagcactgcacaagtcccagagaatttgatacccagcatgatttaaaaggaagttttaacattatgtgttacacaaaaggttaagaaattttgttgtaatcactcttgttaagcataagagatacttaattaattgagtcacttaaatagtcttacttggaggccgggtctggtggctcatgcttgtaatcccagcactttgagaggca

SEQ ID NO: 726695 - DNA, 2659 bp, Homo sapiens
actggctccattattgtttcatataccatgagtaccacttgacatcttcagaagtgctttcttttttttttttttttttttgaagccattactcttaaagtaagcactgtcacctgtatttgaaaacttggatctttgctgattataatcaaggtttttttttgagcaaacagtattaggtaaggtagtaaaatttttaagaggtcgtatacacaactggattagacataggaaaggtggtatcatgtagtatttaagataatttggaatcctgtctctacaatttactattataaactaaacaatttattaactctttcaaatattgattaattatatgttaaatatagcatcatttgaatggagctgctcattatagtctttagacaagcaaaatttaggatgtaattaatttactggctgggcgcagtggctcatgcctgtaatcccagcactttgggaggccgaggcaggcagatcacttgaggtcaggagttcgagaccagcctgaccaacatggtgaaaccctaactctactaaagatacaaaaattagctgggcttggtggcaggcgcctgtaatcccagctacttgggaggctgaggcaggagattcacttgaacccgggaggcggaggtgcagtgagccaagattgtgccactgcactccagcctggtcaacagagtgagactctgtcttaaaaaaaaaagaatgtaattaatttgcaaaagtgaattgaggaacaaattcaacatttcatatcctttcacacctgctggaattttgttttatttttagttacagattttgccatcttccttctttcccatccaaagttctttaaattatttttaaaacatttactcagttttagctcctctttcaaattagcaactttagttcttttttatataccataaccctaaaaaaaaaaatctggctttggtatctgaaatattttccaaggcatttccattttgagtatctcagtactctgtttggcagctgtgtgtaaatggttagtagatgttataaagtatgctgaattggtatgaaaaacatagtcttgtggattgctgaacttctttatgtgtaatagagtgggatgaagagtgtggactttggatatagacagtcctgtatttaaatataggctctcccacataactgatgggtaaccttgagcaagagaccagttaacctctctgtcagttacattctcagtaaaattgggacaataggtaaagtatctagctctacaaattatagctgttttgcatgactttgagccctttactcagtttaagaaaggagttctctgctatcatatatatgattttctttcttcgtttacttgaaaagctgcagactagtataccctctgcgtaattgttctctccacagtcctttccttcccagtttaattagctataaaaatctcctgtgctatctctgtaatgagcaactagcccgggttaaataccgagtccattaactaaagagaggcccccagtttgatttcacatgtctcagttgtcctgtgttcacagtgattcatctcattcctgtgccgtaaaatcccttgggctctgtcacataagttccagctgtaggcttgtgaattgttaatagcatccatttttcagtcaagaaattttacaatgctattcagtgtggttagaataggatggtaaatataggtcaaattttatttcctggtcagtgaagtttatttattgaaaaaaatctttaaaaccatttgatatttgaaaatagtttggagtggtacccagctaaattagctaacaacaactgcttgtccaaatgccagccttcaggatgactgcttttttttttttaataccaatgtgggtatcactttatttaatgcagcataattttggaggagacctttttctaaggagccattatgtactctttcttagagtagttactaattatctgaactcatccatatttgattgcctatattaatatgagtggcaaagcaactatttgccatgaagttaaaaaaatattatatatagaaacrgtaatgagacatccttgttttgttttgtgcctagcagataatatctaaaacatttctatgtattcctcatttcctacttccaggtgttcagtgatattattacaggttttaactgtttctttgtatattatgttttgtgatatgtatatttgattagtttgttcatataatcaaacaatgtcaatgttttttctttttctcatcttctgattaggatttctggcaggtactgactcagcagcatgtgctttaaattacttaatgctccaaaatccatagtaatgcttcaggaacaaaggttcagcgcatgatgcatatgtccttgccctgctcccttcagaatgatttcgttcctgtcactttaaattaacatactttatctttaatatgacaatccaagcactgcacaagtcccagagaatttgatacccagcatgatttaaaaggaagttttaacattatgtgttacacaaaaggttaagaaattttgttgtaatcactcttgttaagcataagagatacttaattaattgagtcacttaaatagtcttacttggaggccgggtctggtggctcatgcttgtaatcccagcactttgagaggca

SEQ ID NO: 726696 - DNA, 875 bp, Homo sapiens
aaaaaaaaaaaaaaaaagaactgttatagttcttttacacacatgcacgtgtgctcgcacgygcacacacgtatacatacacacatacgtatacacattaggttaaataatgcttgctgtggcatttcctcaccagatttttgcaaggagaaagcagtacatgttgactaaatgctttatgtttttctaaaaatactgtactagtaaaatacagtaattatttcagtacagtaacatgctgtataggtttgtagcgtagaagcaataggctataccatatagcctatggtatacctatataccatatagctataccatccaggtttgtgtaaatgcactctacgatgtttgcacaatgatgagatcatctaacaatgcatttctcagaatttatcattaagcaatacataactatatagtattttcagtttgactttacaaccagagaacctataagccagaaatgatagcaaacttgagctggagagaataaagggaattgcaagaaattaaatcagagtttggctttggattttatacattttctcattaaactggctcaccctgagagctaacctgatctcatcagggcaagatattggacctaccccatgaagtgtatatatagagaaaatagaattagtttcaaagaatgttgatatcaagacatgggtgattgacataaaagctcctgaggaaaaaaaaatttttttgagatggagtcttgctctgtcgcccaggctggagtgcaatggtgtgatcttggctccccgcaacctccacctcctgggttcaaatgattctcatgcctcagcctcccgagtagctggaattacaggtgtgcaccactacgcctggctaattttttgtatttt

SEQ ID NO: 726697 - DNA, 875 bp, Homo sapiens
aaaaaaaaaaaaaaaaagaactgttatagttcttttacacacatgcacgtgtgctcgcacgcgcacacacgtatacatacacacatacgtatacacattaggttaaataatgcttgctgtggcatttcctcaccagatttttgcaaggagaaagcagtacatgttgactaaatgctttatgtttttctaaaaatactgtactagtaaaatacagtaattatttcagtacagtaacatgctgtataggtttgtagcrtagaagcaataggctataccatatagcctatggtatacctatataccatatagctataccatccaggtttgtgtaaatgcactctacgatgtttgcacaatgatgagatcatctaacaatgcatttctcagaatttatcattaagcaatacataactatatagtattttcagtttgactttacaaccagagaacctataagccagaaatgatagcaaacttgagctggagagaataaagggaattgcaagaaattaaatcagagtttggctttggattttatacattttctcattaaactggctcaccctgagagctaacctgatctcatcagggcaagatattggacctaccccatgaagtgtatatatagagaaaatagaattagtttcaaagaatgttgatatcaagacatgggtgattgacataaaagctcctgaggaaaaaaaaatttttttgagatggagtcttgctctgtcgcccaggctggagtgcaatggtgtgatcttggctccccgcaacctccacctcctgggttcaaatgattctcatgcctcagcctcccgagtagctggaattacaggtgtgcaccactacgcctggctaattttttgtatttt

SEQ ID NO: 726698 - DNA, 875 bp, Homo sapiens
aaaaaaaaaaaaaaaaagaactgttatagttcttttacacacatgcacgtgtgctcgcacgcgcacacacgtatacatacacacatacgtatacacattaggttaaataatgcttgctgtggcatttcctcaccagatttttgcaaggagaaagcagtacatgttgactaaatgctttatgtttttctaaaaatactgtactagtaaaatacagtaattatttcagtacagtaacatgctgtataggtttgtagcgtagaagcaataggctataccatatagcctatggtatacctatataccatatagctataccatccaggtttgtgtaaatgcactctacgatgtttgcacaatgatgagatcatctaacaatgmatttctcagaatttatcattaagcaatacataactatatagtattttcagtttgactttacaaccagagaacctataagccagaaatgatagcaaacttgagctggagagaataaagggaattgcaagaaattaaatcagagtttggctttggattttatacattttctcattaaactggctcaccctgagagctaacctgatctcatcagggcaagatattggacctaccccatgaagtgtatatatagagaaaatagaattagtttcaaagaatgttgatatcaagacatgggtgattgacataaaagctcctgaggaaaaaaaaatttttttgagatggagtcttgctctgtcgcccaggctggagtgcaatggtgtgatcttggctccccgcaacctccacctcctgggttcaaatgattctcatgcctcagcctcccgagtagctggaattacaggtgtgcaccactacgcctggctaattttttgtatttt

SEQ ID NO: 726699 - DNA, 1495 bp, Homo sapiens
tttgtaaaatatataatcacatggttaattttttatttataaataaaatttaaattaggcaaataaaatttaatgctcccctagggattttatttaaactttttcatttaagtaaaaataaaggcaggcccagaaggcagttgttgcattcccctcagccaggaactgtcacttaccagccccaccactgagctcaggcccaataatgtctcaacaatcaaggcacattatggcaagcttccctagtgagataaactttatgtaaatcaagctcatatccttttattttgagtactggcacattcttacacaaattagcaaactattacaattccagaccatatccttatcctgacttaaaatttctgcttgcctttttatatttgatttacccccttatatttctgacccctgacaactgcacatttagagaatgactacttggctcttccaatccttgcactggcctaaataaacctctcctgtactattaaccaactattacccgacactgttgttgaaagcagcacctgctaactctgtggccaagaaacatatctgagatctacccagatctggccaccaattaaagtgagaactcagttaaataaaatgtcagccgggcgtggtggctcacgcctgtaatctcaagtactttgggaggctgaggtaggtggatcacctgaattcaggagttcaagaccagcctgaccaacatggtgaaatcccatctctmctaaaaatacaaacatggtagcacatgcctgtaatcccagctactcgggaggctgaggcaggagaatcgcttgaacccaggaggtggaggttgcagtgagctgagattgcaccattgcactccagcctgggcagcaagagtgaaactccatctcaaaaaaataaaataaaataaaaaataaagatggggaaataatgagataataatgataataatgatttattggacattatgcaggtttttgtgtggcacaagcaagaagagtatgtcagtctaaaaaaaagatactaaggaaaattatccccaaatatgttgaatttattcgggaatgagaaatgagaattataatctagaatgcatgggatggcaagtcaccagcgtatccagtgaggaaaggataaagggaagctttattaggaaacaggcagagattcacttaagctgcttagaaacagagttcacttgttccagaggcccaaagccattgctgttgttagttcactggtggagatgccattactgggcaagtgttcttttgagagcactggacaagtgcgctcaaaaaaaggactaggtttattactagttgtaaagaatgtctagtaataaaccttctcaaaataggagatgcccggatgatgtcaaagagtttcttgtgggatttttagaaagttcctgaaaatggttctgtcttttctctctctctcaatttttacggagatggggtcttgctgtattgctaaggctagttttgaactc

SEQ ID NO: 726700 - DNA, 1365 bp, Homo sapiens
caacagcttttccttctttgtgcctcctcaacttctcaatttgaatttatgtttacttttttctttatattgttctttaagaatatatacgtgggtatttaccaatacctaggatgatggattcttcttttatagcaggtttgaacttccttctttcaggctgttggagtcagtactagtctagacccagttgaagcaagtttacagggtgtcaagtccatggaccatggagaggtagtgtgtgcaaggggcgtgaattcacattggaactggatctttgccacaactactgaggttatttcccttttcctattttactgtgctccttcagaatcaaattatagtggctgtcattgatgttctgatcacatcccatcaaaactcatttccattcctgaagtggttcttactccatgacccttgatattcctgggatcatggaagagtgctggcatattttccaggcaggctggtgatgctcgggacatgacagtggacagtcctgagaacaactctcaattgatgatgaatgaaagttggggccgggtgctcacgcctgtaatcccagcactttgggaggccgaggcgggtggatcacgaggtcaggagatcgagaccatccaggctaacactaaacctgtccctactaaaaatacaaaaaattagccgggcgtggtgtcgggcacctgtagtcccagctactcggcaggctgaggcagaagaatggcgtgaacccaggaggcagagcttgcagtgagctgagattgtgccactgcactccagcctgggcgacagagcgagactccgtctcaaaaaaaaaaaaaaaaaaagaaagttggtgaaaaatagtcaaatgtccttgtccctctgaggcatgttctgtgccatctcacagggctctgcagtgggattgagctgcagtttccccgagcagtaatcggttgcctaacayaatctgttcatctacttccctttcttagcttatatccacattctctggaattgtttcttgtcatttggttccccaggaaacaaactccaagtctctgagattttatataaaagaggcttattgaaggatctgtgaaggcagattaagcagaattgagcagagagaaaaactaaaccacaatgcagtttcagcagaggcctcaaatgaccccacagggagcttcagaataggaatgaccttcagagatttctcaccttcagacaaggaggccaggcctgtatatcccctgcaaaaacaagtcactggatgtggctgataccatggaaggggtgaccatggatgaggagctctcttcagctgagggcaagtcctagagaggcattcacctgagagacagctgcaacccacactca

SEQ ID NO: 726701 - DNA, 1737 bp, Homo sapiens
taggcaaataggttgaagattcaaattctactgatttctaaggatcattagtgcattacagttaataattaaattttgtgtacattacctttatccttataaaaataatgttatcatcctcctcaacatggaaatagaaaaatagaagctcaggaaaatagtaacttgtccaggattgcagagtagaaattggaaagccagatgttacactctactttttttagtactcttctttgccacatagtagccttctcaagtcaattcccttccccatgtcatattgtgttaatgattttagtacagaattgctcccttttttttttggttatgtttttaagcaactcttactgattaattatttttaaataaggtgtggtaaaaatcttaagtactccaaagcatgttttatgtttaaagaaaacaatgaaaattccactaatattgttaatcaattagactcccaagctgcaatagatgatacattgttttgaaggggatgaaaataccagctaatatgtaccttggctgttttaaatatggttaaaatttgtccttaaataatgcccccaaaaacctgcagaagttactatattctataaagtggtgaatcacccccatgaataactctgatcttaattctagccctacatgaggattttactcatacattttaaagagatggaacttttagtctccatcatttaccttaagagacttgagagactcaaattaggtaaatgactggaaatgtcaagtaattaaacatctggtttttaatatgaaacaaatcacttcatgcctgtggtctctgtcacttgatccctcccagtgctctgtgtttaagctgcttctggctatatttaacctctttgccaagccagacataactccatgcttcccatggtaggcctggccattcttgtccccaaggacttcttctaggattgctgggtctgtggctcaggcctgagtttagagtctagtttctttcttgctctacttaggataaaatatagctgaaggaagtgatactgatatatgtttaacttcaactgggacttttaattttktgtgtgtgagtgaacagagaaactccctctgctacctgtcccctgaaagctggtactaagtctttctcatggaaagaacactgtctcatctgatttttgagatggcatatttggacctcttattcattttctttttaaaactctttaataggatatattttttcaagggctgcaccaaccactgaaaaacaaagtgttttttcgtgtatgcctaatgcaaatgaggaagatttgggtttttagggtaccccatatatgaggcaaagtggacagacaagatttcttcttcatcctaaagccaccacatctatacgattggtagcaacatcttgccactaatagtaaacaactgttgttttcgtctctgcagaatctgtgatccctcctctaatttatacttagagtcctcccctcctcagtttcagtccatgagctcaggtgtgaccatctccaactttgtttcagggctaggcctagctaattagcttgttccattccctagagatagtcactagtttaggtcagagcaagtatagacccatgacatttcaattctggaattttcctggaaaaattaagcagaagaatcaatctctttttctgctgaacttgcttaaagaagagaatacaagcttgaagtttctgccggctattttttcaccactga

SEQ ID NO: 726702 - DNA, 438 bp, Homo sapiens
tgtrtgtgtgtgtgtttcttaaactttgtgaagaccaatattttaagacaggaataaaatatgacagattcaacacagctgcttatcttggctcctctaagaaactcccctaaatggcaaaaagtaaattaatttttaaatacataaacatataaaccaaaagagaataaaaaatgtgacaacagcaaatgagagacatcaacaattttgtgaggatggaaatcagatgtaagaatgctctatgacttaatagagaagaagaaattgaaatcaaagttcgtgcagaagcatattgcttcttcctgaaaaatcatggaaaggctgtaaatttggaggactcagaacagtaaatgtaaaagtgattcacagccctgaaaacatgggaatgagttcaaagctgtgtaaagacttatccctcaactctccccaccacacaaa

SEQ ID NO: 726703 - DNA, 610 bp, Homo sapiens
atactagcagcttcaagtgtgggaaaggattaggaataagtctcataaaaagtaacacgtttaagaacggcatccaattactcaagaaaaagactggaagccagaaggtagtaattgaattcctttaaaattcagtggggagataatatacctggctaacctgtgaataaattatgttaacatcaaaacattttcagacataaagcattttttaaagttttactccaatgtgtcctttcttagaaagtttctggaggttctgattctgcaaagtgaaatcacactaagaaacgagaagagaaattatccagggaacaacatccaacacaggagattgctgattgagaacaaccaggagaacaaatgtgtacttcaaccagcaagcaaccaggatacattggagcagtaggctcagaaatgatcaatatataaatcaagttatatacatgttctcctactgatatcaaatctcagatattacaccttaatcccaaatagaaaaattaattgtttcaaatttttwaaaagaaaatggttaattatagaggatgtggcataaatttccctgcaatttattattatttgttcctctaatctcgtaagaaatatc

SEQ ID NO: 726704 - DNA, 830 bp, Homo sapiens
gagtgtttatccgaaattttaggttaattggatgtctgttatttttatttgttaaatctagcaattctcctcattgtgctcatacaaacacatgaaagttctagcactttctctggtttcatttgaattaaatgctacacattccttaattatagacttagttccactattatctatgccagcagtatttatctgactattgcttttatttatatttgttgtggtttaatgaagcctaactgtggatcattccaggaaatatgaaaaaggtgaaaaaaaattggaggttctttgacattcaaggagtatttagtttgaaaaagtctaagggctagagataggggagaagtttcattccataatcaaatatgtcttaaacagaagagacaacaaatataatccatacttatccagaatatacagcttgaatgatagggaaagttatagggtagcacgttagatttcatataagtctaactagaaagaaaattagtgttataatcagcatttcctatggaatgaaatagaatacatttctgcctatagagacggctggtgtttgagaaaggaagatatttgttaagaacatcatgaaagatactcttgcattgttgttttctgcaggtgggtcatgaaatataattttgggaggtccatggacctgaggaaagaagacagatggcgaaaagttatggagtcatagtgagtgagaatggtttccagagaaagacacgctcatgaggttgtagtggaaaatccacagtgacaaatttgtcacagcaaggtagcaagataattttaagagagagatagactaatackcaactttg

SEQ ID NO: 726705 - DNA, 1655 bp, Homo sapiens
tgtaatactaatactaattgtaattgtaatactaatcacaaatctgcacatgtgctaaaatttatataactgacaccaaamgggagaaaagggtcaattttatagtatcttaatattttcaaataaaattttaaaatttatattatggaaaggatgaagagagcaatagatgaaacaagatagggcatgacttgctaatatttggagctgggtgatggcacagaggtattcattatgccattctgtgtactaaaattcttacatataattatttagaatataatgtaaaagcttagaatatttgaaatcatagatggcaaatttaggaaaataaccatgaaatgaaggtatcctagtattgcagacttgtttagtgtggtagtcactggaatgtaactggacaaagctataagcaaatggaagtgttatgattaaacacattttatctcatataaatttatatgtgaagttattctcataaagctttgtttgcatttttgtttgtttgtttttttaggatgagagaagctgcaagaaaaatagaagaaaggcatttttccaaccatgcaacacatgttgaatttctgcctgttgagtggcggtcaaaacttactcttgatggaggtatatttatttaaaaattgaatgatttagccaatggcaaacttttaccaaaataaatgcagaaagttttagaaaacactttttgttaattgagaatgtagtgtcttcaatttaattgtcttgagatatgctcaccctttgttctagattaagaaaataaaatccattgatttctagaataattatactgactaatatcatttggaccattacatagatttcatagatagcactgttttcatgcatgccctctggattgtggcaggtggagggatatagtgggaacaaaatgttttctaaagtttttgacacgaagttgatttgtcagtactttaaaaatatttgttttccataattccatacgagcttacatttttctttctaataattttctccccataatcggaagataaaaatctcaggttttttgttttcctttgttgtttttcgtacattccctgggctggtgaattacaatctagcatagataatttgtatatttgtttaaataaaatcagtttagttgtcttccttaaagagctgtcatcaaccaaaatatgtgtctttctttacacaaagttatgtctgttaaatattaaaaccataaaaacagaatgtttagattatttacataatctgcaaaatgagagagttgttatactggatataatattagcagctgccatttgggattgtgttttgacacctgttctaaatatgtggcctcattttgctctgagtatccctgaatttcatgcaaaagccagtacatacaaaaaagggtgacgctttatagatttgataatggctttcatcctttaatgtttcttttcatctcctatgttgtcttttactgttttttttttcttgaagtattttataggaagggaagatccattagagccaaagctggtcttgaatatttaaatgttaacttaaatagttactatttcaggcaacgtaattttcttcactattactttcctgtaacagagactttctataagttaacttgctttttttgtttgttt

SEQ ID NO: 726706 - DNA, 1655 bp, Homo sapiens
tgtaatactaatactaattgtaattgtaatactaatcacaaatctgcacatgtgctaaaatttatataactgacaccaaacgggagaaaagggtcaattttatagtatcttaatattttcaaataaaattttaaaatttatattatggaaaggatgaagagagcaatagatgaaacaagatagggcatgacttgctaatatttggagctgggtgatggcacagaggtattcattatgccattctgtgtactaaaattcttacatataattatttagaatataatgtaaaagcttagaatatttgaaatcatagatggcaaatttaggaaaataaccatgaaatgaaggtatcctagtattgcagacttgtttagtgtggtagtcactggaatgtaactggacaaagctataagcaaatggaagtgttatgattaaacacattttatctcatataaatttatatgtgaagttattctcataaagctttgtttgcatttttgtttgtttgtttttttaggatgagagaagctgcaagaaaaatagaagaaaggcatttttccaaccatgcaacacatgttgaatttctgcctgttgagtggcggtcaaaacttactcttgatggaggtatatttatttaaaaattgaatgatttagccaatggcaaacttttaccaaaataaatgcagaaagttttagaaaacactttttgttaattgagaatgtagtgtcttcaatttaattgtcttgagatatgctcaccctttgttctagattaagaaaataaaatccattgatttctagaataattatactgactaatatcatttggaccaytacatagatttcatagatagcactgttttcatgcatgccctctggattgtggcaggtggagggatatagtgggaacaaaatgttttctaaagtttttgacacgaagttgatttgtcagtactttaaaaatatttgttttccataattccatacgagcttacatttttctttctaataattttctccccataatcggaagataaaaatctcaggttttttgttttcctttgttgtttttcgtacattccctgggctggtgaattacaatctagcatagataatttgtatatttgtttaaataaaatcagtttagttgtcttccttaaagagctgtcatcaaccaaaatatgtgtctttctttacacaaagttatgtctgttaaatattaaaaccataaaaacagaatgtttagattatttacataatctgcaaaatgagagagttgttatactggatataatattagcagctgccatttgggattgtgttttgacacctgttctaaatatgtggcctcattttgctctgagtatccctgaatttcatgcaaaagccagtacatacaaaaaagggtgacgctttatagatttgataatggctttcatcctttaatgtttcttttcatctcctatgttgtcttttactgttttttttttcttgaagtattttataggaagggaagatccattagagccaaagctggtcttgaatatttaaatgttaacttaaatagttactatttcaggcaacgtaattttcttcactattactttcctgtaacagagactttctataagttaacttgctttttttgtttgttt

SEQ ID NO: 726707 - DNA, 2798 bp, Homo sapiens
tgagtgatcaaagtttataattgttaacctcagaagcagagtaatatgaataatcaaatgaaggactatttgtgagttcttacagatgattaagaattagtatgaatctgatgttctaaactttagaagtgaaggagtcacaaatgcagggccattgttactaatttctcatatttaaaatatatgttgctgaatcttgaagataaaatttctgaagaattttgcttttctaccatgccatttacatttattaatggtattatcctaatggctatctagtatggttcaagtaacccaatgggagacccacaaaaagaatttgggagcttgtgagtctagaatcatatatatgtatatataatgattattatatgtatgattattatatatatatatatattttttttttttttgagatggagtttcgctcttgttgcccaggctggagtgcagtagcatgatctcggctcactgcaacctctgcctcctgggttcatgtgattctcctgcctcagtctcccgagcagctgggattacaagcacgcaccaccgcgaccagttaattttgtatttttagtagagatggggtttcaccatgttgggcaggctggtctcgaactcctgaccttgtgatccacccgccttggcctcccaaagtgctgggattacaggcgtgagccaccgtacccggcctagaatcatattttattcaagctgaaactttaaatgagttgctgacttatgatgtaaggataaacatacttttttaagcagcagttgcaaaaacagtaaatcaattctgctgttcagtcttttaaatgctcagcaaattactgacagttacattagtggaaataaatccttattggaacaaagcttctcttttctttcctttttaacttatatatgacaatacacatacgcaaggtgctgcctctaagtcttgctcagcaccatattatgattatcaattactttttattgaaggctcatatgagtctgtgaacaaatatgtactttcaacttacctgtggaggtaggaaaaaatcctagagcgcagaagtcattaaatacatctacaatgggtgcataatgtgggcctcacagcagccaatagctatggcccaactcacttttctataatgaaagggcaggaagatggccaaatctgtctgatataaacaagctgatgaggattttgtggctgcctccacagagtatgcatcaatgttgtattgatttatactttctttcatttgaatatataccttcaccaccactgacctttatttccaaaaggaatagaaaacatttttatagggttttggtaagtatggttttgtggataggcctcttataaatctttaaataaatgcatttcataattctaaattttaagtgtaatttcagttaaaaataaaaacacaatagcactagacaataaatatttgttgaatgaataaatggaaggattaatgactttattcatcatgaatccctacgttatttctgcccaccttgcttcctttggattgtaatttgattttgtttattgatctgtctgtagggagagaatgaccccatggtagtgatgcagctatagtggcattacaattatattcctcataggaatttaaaagttagcattttggttttatttatagacaccactagactgtgaatgcttcactgtagagcctagcacagtgcctgaaatgtccagcgaatgttccctgcttcagtctaggttgttgtttcatttggtcagggcatcagataaaacactctcatctttaaaaaccagataagtagtaatcctaaaaataaaaagtgaaataaaatttaagttgtggtggatggcttatcgaacacgagatacagcagatgggggcatggttatgtctgccctctttctttcattctaaataggggtcttccatcatacactttggatgaagctatttcaagtgcaggtgtgggatgttggctcaggataaattacttggcatcaagcattccctaatgttacaaasgtgaagacaggttaaaatgaacaacatggtggcttgtgcctgtaatactagctactggggaggctgcagcaggaggattacttgaggccaggagttcaaggctgcagtgagctaggattggcctactatacttcacccgggcaacagcaagaccctatctctaaaataataaaatgaataacagggacaaactttaagaaaagaagaaaagggaaagacagcacacaattgcacgaaaacatctttgagacgcgggaggagatggccgttgttaccagatagctcttgccatatgcctaatggggacaggaaggtggtaggatacacagacgagctgttttagtcttttgtagtacaaaccaactggcttacctttttttttttctgcacaccaataactccgtcaggcttgattccacatgcacctgtttcttgcggcagcatggcccagtaatgccagaagtctgaatcaatcacacttatttgccttatgtgaaagaggccttgtcttgcgtaattattaaaatacaatggaatgctttacatagagccatggaagttcagataatgctgtgtccattgtacacactaatgatgtagagtggtgaggagccacctgacacctattctggcaggtggggactagaatagatgccccaacccatctccctctggtcaggatcatattacctgagaagatgatctagaaaacaaaaggagagcaggaacaggaggcattagataaaacatgactttttaaagcag

SEQ ID NO: 726708 - DNA, 2798 bp, Homo sapiens
tgagtgatcaaagtttataattgttaacctcagaagcagagtaatatgaataatcaaatgaaggactatttgtgagttcttacagatgattaagaattagtatgaatctgatgttctaaactttagaagtgaaggagtcacaaatgcagggccattgttactaatttctcatatttaaaatatatgttgctgaatcttgaagataaaatttctgaagaattttgcttttctaccatgccatttacatttattaatggtattatcctaatggctatctagtatggttcaagtaacccaatgggagacccacaaaaagaatttgggagcttgtgagtctagaatcatatatatgtatatataatgattattatatgtatgattattatatatatatatatattttttttttttttgagatggagtttcgctcttgttgcccaggctggagtgcagtagcatgatctcggctcactgcaacctctgcctcctgggttcatgtgattctcctgcctcagtctcccgagcagctgggattacaagcacgcaccaccgcgaccagttaattttgtatttttagtagagatggggtttcaccatgttgggcaggctggtctcgaactcctgaccttgtgatccacccgccttggcctcccaaagtgctgggattacaggcgtgagccaccgtacccggcctagaatcatattttattcaagctgaaactttaaatgagttgctgacttatgatgtaaggataaacatacttttttaagcagcagttgcaaaaacagtaaatcaattctgctgttcagtcttttaaatgctcagcaaattactgacagttacattagtggaaataaatccttattggaacaaagcttctcttttctttcctttttaacttatatatgacaatacacatacgcaaggtgctgcctctaagtcttgctcagcaccatattatgattatcaattactttttattgaaggctcatatgagtctgtgaacaaatatgtactttcaacttacctgtggaggtaggaaaaaatcctagagcgcagaagtcattaaatacatctacaatgggtgcataatgtgggcctcacagcagccaatagctatggcccaactcacttttctataatgaaagggcaggaagatggccaaatctgtctgatataaacaagctgatgaggattttgtggctgcctccacagagtatgcatcaatgttgtattgatttatactttctttcatttgaatatataccttcaccaccactgacctttatttccaaaaggaatagaaaacatttttatagggttttggtaagtatggttttgtggataggcctcttataaatctttaaataaatgcatttcataattctaaattttaagtgtaatttcagttaaaaataaaaacacaatagcactagacaataaatatttgttgaatgaataaatggaaggattaatgactttattcatcatgaatccctacgttatttctgcccaccttgcttcctttggattgtaatttgattttgtttattgatctgtctgtagggagagaatgaccccatggtagtgatgcagctatagtggcattacaattatattcctcataggaatttaaaagttagcattttggttttatttatagacaccactagactgtgaatgcttcactgtagagcctagcacagtgcctgaaatgtccagcgaatgttccctgcttcagtctaggttgttgtttcatttggtcagggcatcagataaaacactctcatctttaaaaaccagataagtagtaatcctaaaaataaaaagtgaaataaaatttaagttgtggtggatggcttatcgaacacgagatacagcagatgggggcatggttatgtctgccctctttctttcattctaaataggggtcttccatcatacactttggatgaagctatttcaagtgcaggtgtgggatgttggctcaggataaattacttggcatcaagcattccctaatgttacaaacgtgaagacaggttaaaatgaacaacatggtggcttgtgcctgtaatactagctactggggaggctgcagcaggaggattacttgaggccaggagttcraggctgcagtgagctaggattggcctactatacttcacccgggcaacagcaagaccctatctctaaaataataaaatgaataacagggacaaactttaagaaaagaagaaaagggaaagacagcacacaattgcacgaaaacatctttgagacgcgggaggagatggccgttgttaccagatagctcttgccatatgcctaatggggacaggaaggtggtaggatacacagacgagctgttttagtcttttgtagtacaaaccaactggcttacctttttttttttctgcacaccaataactccgtcaggcttgattccacatgcacctgtttcttgcggcagcatggcccagtaatgccagaagtctgaatcaatcacacttatttgccttatgtgaaagaggccttgtcttgcgtaattattaaaatacaatggaatgctttacatagagccatggaagttcagataatgctgtgtccattgtacacactaatgatgtagagtggtgaggagccacctgacacctattctggcaggtggggactagaatagatgccccaacccatctccctctggtcaggatcatattacctgagaagatgatctagaaaacaaaaggagagcaggaacaggaggcattagataaaacatgactttttaaagcag

SEQ ID NO: 726709 - DNA, 597 bp, Homo sapiens
tgaatatttcaatgttaccaaattcttcaacttcagttttcattattgttgatcttgtccttctgggtgggcatggatagtattaaaacactttgtagatatgaagattggtttgaaaattttggctactttagtgcaatgcaatctgtcagttttcctaaagacttgttaggcatgatctaacatcacacctagaggaactggagtaacaagaataaactaatcccacagctagcagaagaaagtaaataacgaaaatcagaacagaactgaatgaaattgagacccaaaaaattgatacaagaatcaacaaaaccaaaagtggaaaggataaacaacatgaatagaccacttgctagattaacaaagaaaaaaagagagactagatccaaataagcaccatcagaaataacaaaagtgacattgcaactgatcccacaaaaatacaaaagatttgtagaaactattrcgaacacctctatgcacacaaactaaaaaatctagaggaaatgaaaaaatacctggaaacacagtctcccaagattgaatcaggaagaaattgaaatgctgaacagaccaatatcgagttccaaaatt

SEQ ID NO: 726710 - DNA, 935 bp, Homo sapiens
ttgttcctcctgaccgcctgacattttcccttgtggtcctgcttggctgccatgcacctgtttctaagaaaataatacgattttgtttcctggattctctccttcgtaccctcttatggacacccgactgaccatcatataaaagagcaggtaacagcttgtgtggttggacttattatcttgtgcctctgcccttcttcatgagaagatcatgtctccaggagagctgatattctaagaacaatgacagacatatatggagagcctgggactcaacctaaagcttgagccaactcctgtcaagcccagccaagattagccaaacccaagtctacatatttatgtatgagcaaaaaataaattcctatttttataaactaacgagttctagaatggagtgttttgaaaaattattgtggaatagcacctttctactaccatataaaacatcatttaatgatgaaaatgagactgctggttagagattttgctcagagcatctgacttttggaaagaattgctgatgttcaacaggagatacagctcctatcctatcctatctctaacaggagatagagttccaatccaaccatctcttatccttgccatcagcatagggattctaacttctcttttacatgtgtttacttgtcttctgatctcctgaactgtgctgaggtctctatgcccattttttttcatagcaccctgtctttttctatattatagcacttagcaaattttactcttatttttatctatactattcacttgaatatyacaacttggagggtggaaacaatatgtatttccagcacataacatgatgcctggcatgcattaggcttttacaaattattgttactgaatcaaatgaattatctcagctcagctctgtttccaaataatgtgtgactttaaacaagatactttat

SEQ ID NO: 726711 - DNA, 659 bp, Homo sapiens
acaattattaaaaatgttttgacaaagtcggtaaggacaattgacaatttgcagtttggcagcattgcattttattgagcacaggactagagtcacctttaggagattcacaggactcagcacaggactttttttgggtttaggagaatgacctagaacaggtggaaaccagagtaaagtttggtcaaatctgttagcacagtgttcaaaaaagtccctgatgccatgtgggagttcaggtttacattgataattgactgacagcagaatttttatcaacaataaataccttaaaattaaggagtaatatcatccacaatgtccaatagatatttttttaaaccgagctagacatgcaaaagaaaatttaatgactaggaacagacctaaaaagtactcagatgtttcattaatataatctgatgaaggaattatttggaaactatattaaagcacctatatattatacctgaaagcatattaaaaataagatagaagaatgaatttgaaaaagcatcagrttaaaacaaagataagaaaaattagaatttcagatggacaaaacagaaaggatattatatggaaaatacttgaagaaatattgtttgaacaatttcaaatttgattaaaagcattagcaccttcatttaggaagttca

SEQ ID NO: 726712 - DNA, 763 bp, Homo sapiens
taagtcagtctgagttgctttccttttaagtgaaacacagagccctaacagattaaaaaaaaaaaaaaaaaaaaaaactggctccattgttgtgggatagaaaaaaatcaaagggtgaatatatttttcatgccttttattcagccaggtggcacaaattaaaggaccaagttaatgccaatatgtatgctcaaatctgtatattgagccaatctcagacttatgacattaacactgtacaagcctgtattacttcatgaaatgagaatgctgagtctttgattacagggccactttagcctttaaacactgcttaccaatatttatgcaatcaaatgctgaaatttaaagtctcaatcttggggtcttttcccctttgcatgtgaaaattgcggtggggaaatagtaaaatggctcactaccaaagacatcgttttatgtttgaaaccatttcagaaagttttagcctaacttataactttttwaaaaattgttggcatgtgatttttttgttgcctcttacttgaacaggaatatattaataatgttacagaactgacatcatcttcttatctccaagtaacctgtggtgtttgtatgtatgtttgtttttgctgcagtttcctaaatacaccgaaatggaattctgatgtgggttgactcacataattgcaaaggttcttgtgtgattttttttcagttaaacatgtcagggaagaaatataaaacaaataataaaatggatgcaaacactcatcaatca

SEQ ID NO: 726713 - DNA, 566 bp, Homo sapiens
tcctcagggagaggcctatatccagagagctgacactgctagagagtgacctcaactgagccctcagttaggactccacgtgagctctcatttgagccttcagttgatttcagccatcccgagcaacccaagcatagggtttattcataatttgagcagagctcagctgggatagcttatctctccccaacatggcaccggctgggccagcttcactggggatggagaatcttccacccccattaactaagagttcagcacaggctgttggctaaggacctcaattttcctccatatgggcctatccatatagctgctggcttttcttataccatggcaattkttttaataggaggcagcttctagtccttttatagactagacctataatttccacagtgtcacctgcacctgtattatattggcaaaatcagtataggaccaggtcagacataaacgtgtggaaaaatggattgtcctgctttttcatggaaggaaggagtgatgaagaatttctatctttgatctgccacacatttaaatatttgcttcaacttaccgttttc

SEQ ID NO: 726714 - DNA, 636 bp, Homo sapiens
gaaagaaatgaagcacagcattaggttcaagtgtatctggctattctcagtttttctctgtctacaatagcatacagcagttccaggccccttctaataaaactggaaactgcaggggtgcccaatcttttggcttccctgggccacagtggaagaaaaagaattgtcttaggccatacgtaaaacacactaacgatagctgatgagctaaaaacaaaaaaacaaatcgcaaaaaaatctcataaygttttaagaaagtttacaaatttgtgttgcactgcattcaaagctgtcctgggctgcatgtggcccatgggctgcaagttggacaagcctggtttctaggaaaaggaataagcacaaaggagaatcattcttaagtgatgtagggcaactggtcttcacatggcttgctctgtatcatgtaggtctcaccgtaaatattgcacttcttaaagacactcatgtaaagtaatttaccacccccttactctatagtattgtataaaactatgcttttcaaactacaatctaaaattattttattttactggttgatcattagttaaaatgtcttttccccactaaaatgtaagctcctcgagaacagtagccttgttcatattgttcacagca

SEQ ID NO: 726715 - DNA, 636 bp, Homo sapiens
gaaagaaatgaagcacagcattaggttcaagtgtatctggctattctcagtttttctctgtctacaatagcatacagcagttccaggccccttctaataaaactggaaactgcaggggtgcccaatcttttggcttccctgggccacagtggaagaaaaagaattgtcttaggccatacgtaaaacacactaacgatagctgatgagctaaaaacaaaaaaacaaatcgcaaaaaaatctcataatgttttaagaaagtttasaaatttgtgttgcactgcattcaaagctgtcctgggctgcatgtggcccatgggctgcaagttggacaagcctggtttctaggaaaaggaataagcacaaaggagaatcattcttaagtgatgtagggcaactggtcttcacatggcttgctctgtatcatgtaggtctcaccgtaaatattgcacttcttaaagacactcatgtaaagtaatttaccacccccttactctatagtattgtataaaactatgcttttcaaactacaatctaaaattattttattttactggttgatcattagttaaaatgtcttttccccactaaaatgtaagctcctcgagaacagtagccttgttcatattgttcacagca

SEQ ID NO: 726716 - DNA, 636 bp, Homo sapiens
gaaagaaatgaagcacagcattaggttcaagtgtatctggctattctcagtttttctctgtctacaatagcatacagcagttccaggccccttctaataaaactggaaactgcaggggtgcccaatcttttggcttccctgggccacagtggaagaaaaagaattgtcttaggccatacgtaaaacacactaacgatagctgatgagctaaaaacaaaaaaacaaatcgcaaaaaaatctcataatgttttaagaaagtttacaaatttgtgttgcactgcattcaaagctgtcctgggctgcatgtggcccatgggctgcaagttggacaagcctggtttctaggaaaaggaataagcacaaaggagaatcattcttaagtgatgtagggcaactggtcttcacatggcttgctctgtatcatgtaggtctcaccgtaaatattgcacttcttaaagacactcatgtaaagtaatttaccacccccttactctatagtattgtataaaactatgcttttcaaactacaatctaaaattattttattttactggttgatcattagttaaaatgtcttttccccactaaaatgtaagctcctcgagaayagtagccttgttcatattgttcacagca

SEQ ID NO: 726717 - DNA, 653 bp, Homo sapiens
aatatttgatagcatgtaattgcatatttagaataagataaaaatttatgccaagtatagaaactcacaaaaataaagggattaaaaacttttgtggtttctgagaattaaaatcaaggatgtttaaagatttcatatttgaatttcagaggtagatctaggcgtattatcaaaaggagattagataaaaatgacacttctctgcatagtagcctaaaatagtattcatttttttcagactatattaaagaaccatgaggctaaaatagaaagaaaatatgtaatagaacaattgtttctacaaatgtttttactataatagaatacaaatgtggtctgtgagaaaaggggagagaaggggagaaaaatcagaacacatagctttattaagctgtgtatatcttttatacatattgtatgatttgcttcagaaattattgtgaatmttagcaagaaaatgaaaagtcctttggaatactttagtgaaggttaaaccaaagtcatgaatgagaaaaagttgatgggatgtgataacatgataaaaatctttgcaaagtttcagtactacactcttcaatacagtaaaacagagaggtatatgagaagttactgggtaatcaatactatgattgggaactgcttagaaattgaat

SEQ ID NO: 726718 - DNA, 2872 bp, Homo sapiens
ccttgtcattttaaccaagcccttccctcccagggtggataacctggcattttgttttaaagcggggagtgggcaagcaggaaacttaaatgagcttgttaaactccgtctctggactgaccactctccggcagccaactctgccgagccatctgtggatataaacggggtctgggcaccctgggcaaagcgtcacactgctcttggcgcttcccaccaactttacatcccagtggatctaatccaattagaatgatcactcgtggctcaaatacagcctctgccgtgatctgtgtgtaacaaagaaagtgaaagatggtctccccaccctgcccctgccaacatgcacatatccacataaatgcacaccctcagtagattcagtagatttatcttaatttttttttttttttttttgagacaaagtctcactctgttgccaggctggagtgcagtgttgcaatcttggctcactgcaatctccacctcccaggttcaagcgattcctctgcctcagcttcccaagtagctgggactacaggcacacaccaccatgcccggctaattgyttgtattttagtagagacagggtttcatcacgttgggcaggatggcctcgatcgcctgacctcatgacccgcccacctcggcctcccaaagtgctggaattacaggcatgagccaccacccccagcccaattcttaagttttgaataatcaatatcaagactcttagccttctgggcctgattaaaggcataagaaaaaggagattcttgaagtcagaagctccttatttattcacacttagtagaaaaataattaaaatattatgagtttgtatatattatgaaaataggatttaaaagccaaagaaaataacaagttaaaaatcagtaatacttacaattccagagtcatgtcttggttttattttataaagtgattttcctttcttctgtctacacacctcttcggcttcttttactctgatggggagaagacacatgtatttaaacaaaacctacttagatcacctcattctaccttatagtaagtgagcaaacctcaactcaataaagatttgaattactgcagaaaataatacaatacacagaagaatgttatctgacatttgaattgaaagcctcaactgttacagctacagacgctaatttatctaggagttcttaacttggaatcatagtatgattgaatggagtaatatacaaacacataagaatttctatgcagagtgtgtatgcatttcatcctatataaaaggaatcttatatacaagtaaaaaatgaaatacccctcattgtcagctgagagtatgagattgattctattatataaataggattggcaccatgacgtaagttagaagcattagaataattaaagagtatcacagccagggcggagtagctcatgcctgcaatcccagcactttgggatgccaaggcgggtgaattgcttgagcccaggagttccagaccagcatgggcaacagagtgagaccctgactccacaaaaaatacaaaaacttagccgggcatggtggtgcgtgccctgcagtgagctgtgatcagcacctctgcactctagcctgggcaacagtgagaccctctcccctgccaccccccaccaaaaaaaaagtgtcacataaaaatttacatgccggctgggcgcggtggctcatgcctgtaatcccagcagtttgggagactgaggcaggtggatcacaaggtcaggagatcgagaccatcctggctaacacggtgaaatcccatctctactaaaaatacaaaaaaaattagctgggtgtggtggcgggtgcctatagtctcaggtactcggaggttgaggcaggagaatggtgtgaacccaagaggctgagcttgcagtgagccgagatggcaccactgcacttgtgccactgcactccagcctgggtgacagagcgagactccgtctcaaaaaaaaaaaaaagaaaatttacatgccatgcttacttaaaattatttcagattaacttcctataccacacacactcatgcatacaaatcacttgcaataaatacttgagcagtttctaaaaactgagcttcatctagcatgggaaccaatcatttgataacaaaaaagagagtgagcagtaataacattttaatgtttctagtatttcttgttaagcatatatgacaaggaaaacaacattgaactgaccagaggtatagttaaaagaagatgctatttggagcaaagtcctgtatgaagttctggctctgctatttgacaccggtaatgttcttgtacccctgaacctccctattccctcacagagtgaaaagtttccattatatattaaattatcttcattatcactgcacagagttgcaaagacggagtaaaattttatttaaaaagttctttatgcattgtaaaaggctataaaatttattattgttttaattaaacaaatagtaagaaatctgtaaattggattttttttttttaataaaaaggggagctatgacaaggaaaataatctaacaggtaaaatttattttttattactgtgacttttccttgggaattaaaaatgaattatttctggagaaaccaaagaggctgtggcttggtcttaataaaatgcatttcatatagaccttatagcctaatttcctgaaagaagtgaattataaatatatttcttgatccctgtggcaaaaaatctaatgacagaattcatctcctttacaactaaatcaattcctctttttaaacaatagaatcaaacaaacaactcagtattgcagctataagattgatgttatagtttatattaaagcatgacaaatgaaag

SEQ ID NO: 726719 - DNA, 2872 bp, Homo sapiens
ccttgtcattttaaccaagcccttccctcccagggtggataacctggcattttgttttaaagcggggagtgggcaagcaggaaacttaaatgagcttgttaaactccgtctctggactgaccactctccggcagccaactctgccgagccatctgtggatataaacggggtctgggcaccctgggcaaagcgtcacactgctcttggcgcttcccaccaactttacatcccagtggatctaatccaattagaatgatcactcgtggctcaaatacagcctctgccgtgatctgtgtgtaacaaagaaagtgaaagatggtctccccaccctgcccctgccaacatgcacatatccacataaatgcacaccctcagtagattcagtagatttatcttaatttttttttttttttttttgagacaaagtctcactctgttgccaggctggagtgcagtgttgcaatcttggctcactgcaatctccacctcccaggttcaagcgattcctctgcctcagcttcccaagtagctgggactacaggcacacaccaccatgcccggctaattgtttgtattttagtagagacagggtttcatcacgttgggcaggatggcctcgatcgcctgacctcatgacccgcccacctcggcctcccaaagtgctggaattacaggcatgagccaccacccccagcccaattmttaagttttgaataatcaatatcaagactcttagccttctgggcctgattaaaggcataagaaaaaggagattcttgaagtcagaagctccttatttattcacacttagtagaaaaataattaaaatattatgagtttgtatatattatgaaaataggatttaaaagccaaagaaaataacaagttaaaaatcagtaatacttacaattccagagtcatgtcttggttttattttataaagtgattttcctttcttctgtctacacacctcttcggcttcttttactctgatggggagaagacacatgtatttaaacaaaacctacttagatcacctcattctaccttatagtaagtgagcaaacctcaactcaataaagatttgaattactgcagaaaataatacaatacacagaagaatgttatctgacatttgaattgaaagcctcaactgttacagctacagacgctaatttatctaggagttcttaacttggaatcatagtatgattgaatggagtaatatacaaacacataagaatttctatgcagagtgtgtatgcatttcatcctatataaaaggaatcttatatacaagtaaaaaatgaaatacccctcattgtcagctgagagtatgagattgattctattatataaataggattggcaccatgacgtaagttagaagcattagaataattaaagagtatcacagccagggcggagtagctcatgcctgcaatcccagcactttgggatgccaaggcgggtgaattgcttgagcccaggagttccagaccagcatgggcaacagagtgagaccctgactccacaaaaaatacaaaaacttagccgggcatggtggtgcgtgccctgcagtgagctgtgatcagcacctctgcactctagcctgggcaacagtgagaccctctcccctgccaccccccaccaaaaaaaaagtgtcacataaaaatttacatgccggctgggcgcggtggctcatgcctgtaatcccagcagtttgggagactgaggcaggtggatcacaaggtcaggagatcgagaccatcctggctaacacggtgaaatcccatctctactaaaaatacaaaaaaaattagctgggtgtggtggcgggtgcctatagtctcaggtactcggaggttgaggcaggagaatggtgtgaacccaagaggctgagcttgcagtgagccgagatggcaccactgcacttgtgccactgcactccagcctgggtgacagagcgagactccgtctcaaaaaaaaaaaaaagaaaatttacatgccatgcttacttaaaattatttcagattaacttcctataccacacacactcatgcatacaaatcacttgcaataaatacttgagcagtttctaaaaactgagcttcatctagcatgggaaccaatcatttgataacaaaaaagagagtgagcagtaataacattttaatgtttctagtatttcttgttaagcatatatgacaaggaaaacaacattgaactgaccagaggtatagttaaaagaagatgctatttggagcaaagtcctgtatgaagttctggctctgctatttgacaccggtaatgttcttgtacccctgaacctccctattccctcacagagtgaaaagtttccattatatattaaattatcttcattatcactgcacagagttgcaaagacggagtaaaattttatttaaaaagttctttatgcattgtaaaaggctataaaatttattattgttttaattaaacaaatagtaagaaatctgtaaattggattttttttttttaataaaaaggggagctatgacaaggaaaataatctaacaggtaaaatttattttttattactgtgacttttccttgggaattaaaaatgaattatttctggagaaaccaaagaggctgtggcttggtcttaataaaatgcatttcatatagaccttatagcctaatttcctgaaagaagtgaattataaatatatttcttgatccctgtggcaaaaaatctaatgacagaattcatctcctttacaactaaatcaattcctctttttaaacaatagaatcaaacaaacaactcagtattgcagctataagattgatgttatagtttatattaaagcatgacaaatgaaag

SEQ ID NO: 726720 - DNA, 2872 bp, Homo sapiens
ccttgtcattttaaccaagcccttccctcccagggtggataacctggcattttgttttaaagcggggagtgggcaagcaggaaacttaaatgagcttgttaaactccgtctctggactgaccactctccggcagccaactctgccgagccatctgtggatataaacggggtctgggcaccctgggcaaagcgtcacactgctcttggcgcttcccaccaactttacatcccagtggatctaatccaattagaatgatcactcgtggctcaaatacagcctctgccgtgatctgtgtgtaacaaagaaagtgaaagatggtctccccaccctgcccctgccaacatgcacatatccacataaatgcacaccctcagtagattcagtagatttatcttaatttttttttttttttttttgagacaaagtctcactctgttgccaggctggagtgcagtgttgcaatcttggctcactgcaatctccacctcccaggttcaagcgattcctctgcctcagcttcccaagtagctgggactacaggcacacaccaccatgcccggctaattgtttgtattttagtagagacagggtttcatcacgttgggcaggatggcctcgatcgcctgacctcatgacccgcccacctcggcctcccaaagtgctggaattacaggcatgagccaccacccccagcccaattcttaagttttgaataatcaatatcaagactcttagccttctgggcctgattaaaggcataagaaaaaggagattcttgaagtcagaagctccttatttattcacacttagtagaaaaataattaaaatattatgagtttgtatatattatgaaaataggatttaaaagccaaagaaaataacaagttaaaaatcagtaatacttacaattccagagtcatgtcttggttttattttataaagtgattttcctttcttctgtctacacacctcttcggcttcttttactctgatggggagaagacacatgtatttaaacaaaacctacttagatcacctcattctaccttatagtaagtgagcaaacctcaactcaataaagatttgaattactgcagaaaataatacaatacacagaagaatgttatctgacatttgaattgaaagcctcaactgttacagctacagacgctaatttatctaggagttcttaacttggaatcatagtatgattgaatggagtaatatacaaacacataagaatttctatgcagagtgtgtatgcatttcatcctatataaaaggaatcttatatacaagtaaaaaatgaaatacccctcattgtcagctgagagtatgagattgattctattatataaataggattggcaccatgacgtaagttagaagcattagaataattaaagagtatcacagccagggcggagtagctcatgcctgcaatcccagcactttgggatgccaaggcgggtgaattgcttgagcccaggagttccagaccagcatggrcaacagagtgagaccctgactccacaaaaaatacaaaaacttagccgggcatggtggtgcgtgccctgcagtgagctgtgatcagcacctctgcactctagcctgggcaacagtgagaccctctcccctgccaccccccaccaaaaaaaaagtgtcacataaaaatttacatgccggctgggcgcggtggctcatgcctgtaatcccagcagtttgggagactgaggcaggtggatcacaaggtcaggagatcgagaccatcctggctaacacggtgaaatcccatctctactaaaaatacaaaaaaaattagctgggtgtggtggcgggtgcctatagtctcaggtactcggaggttgaggcaggagaatggtgtgaacccaagaggctgagcttgcagtgagccgagatggcaccactgcacttgtgccactgcactccagcctgggtgacagagcgagactccgtctcaaaaaaaaaaaaaagaaaatttacatgccatgcttacttaaaattatttcagattaacttcctataccacacacactcatgcatacaaatcacttgcaataaatacttgagcagtttctaaaaactgagcttcatctagcatgggaaccaatcatttgataacaaaaaagagagtgagcagtaataacattttaatgtttctagtatttcttgttaagcatatatgacaaggaaaacaacattgaactgaccagaggtatagttaaaagaagatgctatttggagcaaagtcctgtatgaagttctggctctgctatttgacaccggtaatgttcttgtacccctgaacctccctattccctcacagagtgaaaagtttccattatatattaaattatcttcattatcactgcacagagttgcaaagacggagtaaaattttatttaaaaagttctttatgcattgtaaaaggctataaaatttattattgttttaattaaacaaatagtaagaaatctgtaaattggattttttttttttaataaaaaggggagctatgacaaggaaaataatctaacaggtaaaatttattttttattactgtgacttttccttgggaattaaaaatgaattatttctggagaaaccaaagaggctgtggcttggtcttaataaaatgcatttcatatagaccttatagcctaatttcctgaaagaagtgaattataaatatatttcttgatccctgtggcaaaaaatctaatgacagaattcatctcctttacaactaaatcaattcctctttttaaacaatagaatcaaacaaacaactcagtattgcagctataagattgatgttatagtttatattaaagcatgacaaatgaaag

SEQ ID NO: 726721 - DNA, 2872 bp, Homo sapiens
ccttgtcattttaaccaagcccttccctcccagggtggataacctggcattttgttttaaagcggggagtgggcaagcaggaaacttaaatgagcttgttaaactccgtctctggactgaccactctccggcagccaactctgccgagccatctgtggatataaacggggtctgggcaccctgggcaaagcgtcacactgctcttggcgcttcccaccaactttacatcccagtggatctaatccaattagaatgatcactcgtggctcaaatacagcctctgccgtgatctgtgtgtaacaaagaaagtgaaagatggtctccccaccctgcccctgccaacatgcacatatccacataaatgcacaccctcagtagattcagtagatttatcttaatttttttttttttttttttgagacaaagtctcactctgttgccaggctggagtgcagtgttgcaatcttggctcactgcaatctccacctcccaggttcaagcgattcctctgcctcagcttcccaagtagctgggactacaggcacacaccaccatgcccggctaattgtttgtattttagtagagacagggtttcatcacgttgggcaggatggcctcgatcgcctgacctcatgacccgcccacctcggcctcccaaagtgctggaattacaggcatgagccaccacccccagcccaattcttaagttttgaataatcaatatcaagactcttagccttctgggcctgattaaaggcataagaaaaaggagattcttgaagtcagaagctccttatttattcacacttagtagaaaaataattaaaatattatgagtttgtatatattatgaaaataggatttaaaagccaaagaaaataacaagttaaaaatcagtaatacttacaattccagagtcatgtcttggttttattttataaagtgattttcctttcttctgtctacacacctcttcggcttcttttactctgatggggagaagacacatgtatttaaacaaaacctacttagatcacctcattctaccttatagtaagtgagcaaacctcaactcaataaagatttgaattactgcagaaaataatacaatacacagaagaatgttatctgacatttgaattgaaagcctcaactgttacagctacagacgctaatttatctaggagttcttaacttggaatcatagtatgattgaatggagtaatatacaaacacataagaatttctatgcagagtgtgtatgcatttcatcctatataaaaggaatcttatatacaagtaaaaaatgaaatacccctcattgtcagctgagagtatgagattgattctattatataaataggattggcaccatgacgtaagttagaagcattagaataattaaagagtatcacagccagggcggagtagctcatgcctgcaatcccagcactttgggatgccaaggcgggtgaattgcttgagcccaggagttccagaccagcatgggcaacagagtgagaccctgactccacaaaaaatacaaaaacttagccgggcatggtggtgcgtgccctgcagtgagctgtgatcagcacctctgcactctagcctgggcaacagtgagaccctctcccctgccaccccccaccaaaaaaaaagtgtcacataaaaatttacatgccggctgggcgcggtggctcatgcctgtaatcccagcagtttgggagactgaggcaggyggatcacaaggtcaggagatcgagaccatcctggctaacacggtgaaatcccatctctactaaaaatacaaaaaaaattagctgggtgtggtggcgggtgcctatagtctcaggtactcggaggttgaggcaggagaatggtgtgaacccaagaggctgagcttgcagtgagccgagatggcaccactgcacttgtgccactgcactccagcctgggtgacagagcgagactccgtctcaaaaaaaaaaaaaagaaaatttacatgccatgcttacttaaaattatttcagattaacttcctataccacacacactcatgcatacaaatcacttgcaataaatacttgagcagtttctaaaaactgagcttcatctagcatgggaaccaatcatttgataacaaaaaagagagtgagcagtaataacattttaatgtttctagtatttcttgttaagcatatatgacaaggaaaacaacattgaactgaccagaggtatagttaaaagaagatgctatttggagcaaagtcctgtatgaagttctggctctgctatttgacaccggtaatgttcttgtacccctgaacctccctattccctcacagagtgaaaagtttccattatatattaaattatcttcattatcactgcacagagttgcaaagacggagtaaaattttatttaaaaagttctttatgcattgtaaaaggctataaaatttattattgttttaattaaacaaatagtaagaaatctgtaaattggattttttttttttaataaaaaggggagctatgacaaggaaaataatctaacaggtaaaatttattttttattactgtgacttttccttgggaattaaaaatgaattatttctggagaaaccaaagaggctgtggcttggtcttaataaaatgcatttcatatagaccttatagcctaatttcctgaaagaagtgaattataaatatatttcttgatccctgtggcaaaaaatctaatgacagaattcatctcctttacaactaaatcaattcctctttttaaacaatagaatcaaacaaacaactcagtattgcagctataagattgatgttatagtttatattaaagcatgacaaatgaaag

SEQ ID NO: 726722 - DNA, 888 bp, Homo sapiens
ctacagaggccaggcctgagggcgttcacttaaaaggaaagcacttccactacctctctctttgcacaaccaactttggccaacccagtctgcttagaccatcagcatttacagtcctggcaccccttgtaaattgagaacatggtcaggccagaaagatggttaataaaaccaacaggatttatttatgagtttcttctgatacaagccaaatacaagatgtgagaataaaatgaagtatcctcgtgctgtcgttaccggcaggggtggcaacattcctgaaaggttaattgtgtgccaaccatttttctgattagcaaagtggttcaggacagagtgggactttctataaagtgctaaattcagctcctggcggggccgctgacatgcttgtgcagggatgatgagcgaacggacagaggcaagcaagagaacggacgttctctcccctggtgaactctgcacagccaagggccagcagtgtaggtgccgttagcagttgctggctcaactgcctgaatgctctgaagtaggaggatacagcctcacagtcactgtgggtcaccatggccgaacacctcttgcctacttacctgtctgacagtgagatgccagatccttggccatcttactattgctatgtgtgaagragaaaagaaatgagatgtaggaaaggaaaaagagaagagactgacttcgccccagtcatcgagatttcctcaaccacttttcccccttcctgaaagttgaaggtttgcatttttgcttagcttcccgtgagacctaacttctaaggatgattgccagatgttttgaaaacatgttaatgagttcaaagaatgcccagcaccacatctaatactattggccctaagaggttttgcctca

SEQ ID NO: 726723 - DNA, 888 bp, Homo sapiens
ctacagaggccaggcctgagggcgttcacttaaaaggaaagcacttccactacctctctctttgcacaaccaactttggccaacccagtctgcttagaccatcagcatttacagtcctggcaccccttgtaaattgagaacatggtcaggccagaaagatggttaataaaaccaacaggatttatttatgagtttcttctgatacaagccaaatacaagatgtgagaataaaatgaagtatcctcgtgctgtcgttaccggcaggggtggcaacattcctgaaaggttaattgtgtgccaaccatttttctgattagcaaagtggttcaggacagagtgggactttctataaagtgctaaattcagctcctggcggggccgctgacatgcttgtgcagggatgatgagcgaacggacagaggcaagcaagagaacggacgttctctcccctggtgaactctgcacagccaagggccagcagtgtaggtgccgttagcagttgctggctcaactgcctgaatgctctgaagtaggaggatacagcctcacagtcactgtgggtcaccatggccgaacacctcttgcctacttacctgtctgacagtgagatgccagatccttggccatcttactattgctatgtgtgaaggagaaaagaaatgagatgtaggaaaggaaaragagaagagactgacttcgccccagtcatcgagatttcctcaaccacttttcccccttcctgaaagttgaaggtttgcatttttgcttagcttcccgtgagacctaacttctaaggatgattgccagatgttttgaaaacatgttaatgagttcaaagaatgcccagcaccacatctaatactattggccctaagaggttttgcctca

SEQ ID NO: 726724 - DNA, 888 bp, Homo sapiens
ctacagaggccaggcctgagggcgttcacttaaaaggaaagcacttccactacctctctctttgcacaaccaactttggccaacccagtctgcttagaccatcagcatttacagtcctggcaccccttgtaaattgagaacatggtcaggccagaaagatggttaataaaaccaacaggatttatttatgagtttcttctgatacaagccaaatacaagatgtgagaataaaatgaagtatcctcgtgctgtcgttaccggcaggggtggcaacattcctgaaaggttaattgtgtgccaaccatttttctgattagcaaagtggttcaggacagagtgggactttctataaagtgctaaattcagctcctggcggggccgctgacatgcttgtgcagggatgatgagcgaacggacagaggcaagcaagagaacggacgttctctcccctggtgaactctgcacagccaagggccagcagtgtaggtgccgttagcagttgctggctcaactgcctgaatgctctgaagtaggaggatacagcctcacagtcactgtgggtcaccatggccgaacacctcttgcctacttacctgtctgacagtgagatgccagatccttggccatcttactattgctatgtgtgaaggagaaaagaaatgagatgtaggaaaggaaaaagagaagagactgacttcgccccagtcatcgagatttcctcaaccacttttcccccttcctgaaagttgaaggtttgcatttttgcttagcttcccgtgagacctaacttctaaggatgawtgccagatgttttgaaaacatgttaatgagttcaaagaatgcccagcaccacatctaatactattggccctaagaggttttgcctca

SEQ ID NO: 726725 - DNA, 2255 bp, Homo sapiens
atggcatatatctagcaccatcattctaaatgcataagaaatagcgaattcattacatacagtggagcgatcagggattaattctttcgctgactctcatgctgccaggacagtattatatgtgattattgagcagttctttgaaattcctaaattcacaaaaacataagttgttgtaaaagcaacctttccctttttttaaatgggggtggggaatacttggaagaaatacagcgtcatgtagcagtttgttaatactctaaaatagaaccattaccccaattaagtgattctcaactttttcattctgaaagattgttttagatgggcattatgccctgaagaccatctcttccatgctcagtcccatatgggcccgaaaactatctccttagaatgaatgggattaagctgtttgttttaagtaagattataagtcaatatctggttttttaagtttcaaacattcattgaactggattttgaaatctataaagtttcaaaactagtttttttctaatactgattctaaaagtgaaaaaaaaaaatagtattagagcccagaaatttgggggaatgctttttgtctgtatattttggaagttgacattacattttagtttattgaagaccgatacattttgaagaagaaagacggttttattgaaatccaactctttcatcatataatacctgttactgacctggagaaccagtgttccttgaaacacagattgagaaatgttcgtttgcttcattttatatatgagaaatgtcgttggtcatgtatagtcaagtgacggcaggcctcaactgcagcccatctctacatttattattctgctgtaacagttccctttctgtttaccaccttattttcgttttgtttgtttgtttgtttgttttgagatggagtckcgctatgtcgcccaggctggagtgcagtggcacgatcgcggctcactgcaagcttcgccttccgggttcacgccattctcctgcctcagcctccggagtagatgggactaaaggcgcctgccaccacacccggctaattttttgcatttttagtagagacagggtttcaccatgttagccaggatggtctcgatctcctaaccttgtgatccgcctgcctcggcctcccaaagtgctgggattacaggcgtgagccaccacgcccggcctaccaccttattttctattagtattcaattcatattagaaataaaagtataattattgtcatgtgagagtgtttgtaacaagtagagatctggcagatgttaaagaacacattttgagaagtgcggcactgacatatttgcaggctcttttaattggccctgtctttgtaaatggtttgcagaccttagtgggggaatagactttctatgtggtagcatattcctgacggaaatcttgtacataagttagaaagaactagttaacttcataaatgtagggaaatgatcagtttgttacgtgcttcaattgccatcagtatgggatattttactagctttatgttctctgttcctcatgttggagagttaacccttgatggtgttcgtgaagtaaaggagccaattgaacattcttgtctattatttatccatttcctaggttatgcttatcagaaaaatgaaatatgaagtacagaaagggttgtcaaaaatggagaaaccttgaagtcattttgagaataagatttgctaaaagatttggggctaaaagatggttattgggagacatttctgaagatatacaggtaaattagggaatgaattcatggttcttttgggaattcctttacgatggccagcataaacttcatgtggggataacagctacccttgtaaaggagagaggtgtataatgcacctagtgaagttcttggtcgttcgtaaatggtgtctgctcttactactgtgccaaataagagtgattgaaagtgttggtcttttttttgtttttttacttttaatttttagacacagggccttgccctgttgcccaggctagagtgtagtggcacaatcatagctcactgcagcctcgaacacctgacctcaagcattcctcccaactcagtctcccaaagtgttgggattacaggtctgaaccactgtacccagcctatgtcaaaatctttaaaataccagctgatggcggccgggcacgatggctcacacctgtaatcccaccactttgggaggccaaggcaggtggatcgcttgagcctaggagttcaa

SEQ ID NO: 726726 - DNA, 2255 bp, Homo sapiens
atggcatatatctagcaccatcattctaaatgcataagaaatagcgaattcattacatacagtggagcgatcagggattaattctttcgctgactctcatgctgccaggacagtattatatgtgattattgagcagttctttgaaattcctaaattcacaaaaacataagttgttgtaaaagcaacctttccctttttttaaatgggggtggggaatacttggaagaaatacagcgtcatgtagcagtttgttaatactctaaaatagaaccattaccccaattaagtgattctcaactttttcattctgaaagattgttttagatgggcattatgccctgaagaccatctcttccatgctcagtcccatatgggcccgaaaactatctccttagaatgaatgggattaagctgtttgttttaagtaagattataagtcaatatctggttttttaagtttcaaacattcattgaactggattttgaaatctataaagtttcaaaactagtttttttctaatactgattctaaaagtgaaaaaaaaaaatagtattagagcccagaaatttgggggaatgctttttgtctgtatattttggaagttgacattacattttagtttattgaagaccgatacattttgaagaagaaagacggttttattgaaatccaactctttcatcatataatacctgttactgacctggagaaccagtgttccttgaaacacagattgagaaatgttcgtttgcttcattttatatatgagaaatgtcgttggtcatgtatagtcaagtgacggcaggcctcaactgcagcccatctctacatttattattctgctgtaacagttccctttctgtttaccaccttattttcgttttgtttgtttgtttgtttgttttgagatggagtcgcgctatgtcgcccaggctggagtgcagtggcacgatcgcggctcactgcargcttcgccttccgggttcacgccattctcctgcctcagcctccggagtagatgggactaaaggcgcctgccaccacacccggctaattttttgcatttttagtagagacagggtttcaccatgttagccaggatggtctcgatctcctaaccttgtgatccgcctgcctcggcctcccaaagtgctgggattacaggcgtgagccaccacgcccggcctaccaccttattttctattagtattcaattcatattagaaataaaagtataattattgtcatgtgagagtgtttgtaacaagtagagatctggcagatgttaaagaacacattttgagaagtgcggcactgacatatttgcaggctcttttaattggccctgtctttgtaaatggtttgcagaccttagtgggggaatagactttctatgtggtagcatattcctgacggaaatcttgtacataagttagaaagaactagttaacttcataaatgtagggaaatgatcagtttgttacgtgcttcaattgccatcagtatgggatattttactagctttatgttctctgttcctcatgttggagagttaacccttgatggtgttcgtgaagtaaaggagccaattgaacattcttgtctattatttatccatttcctaggttatgcttatcagaaaaatgaaatatgaagtacagaaagggttgtcaaaaatggagaaaccttgaagtcattttgagaataagatttgctaaaagatttggggctaaaagatggttattgggagacatttctgaagatatacaggtaaattagggaatgaattcatggttcttttgggaattcctttacgatggccagcataaacttcatgtggggataacagctacccttgtaaaggagagaggtgtataatgcacctagtgaagttcttggtcgttcgtaaatggtgtctgctcttactactgtgccaaataagagtgattgaaagtgttggtcttttttttgtttttttacttttaatttttagacacagggccttgccctgttgcccaggctagagtgtagtggcacaatcatagctcactgcagcctcgaacacctgacctcaagcattcctcccaactcagtctcccaaagtgttgggattacaggtctgaaccactgtacccagcctatgtcaaaatctttaaaataccagctgatggcggccgggcacgatggctcacacctgtaatcccaccactttgggaggccaaggcaggtggatcgcttgagcctaggagttcaa

SEQ ID NO: 726727 - DNA, 2148 bp, Homo sapiens
cctgccaggtttctaaactatcaagttactgtttttcactttgtaattaacacrtgtcttgggaatattttgagactgtgtaaataatcttatttctcatcatacttccattaattttagtatccattgatgattcttgcttgatcagaatcttttacatttaattatttaacatctttttttgtttcattgactgatacattattttccttgtcataaatggataaagacccaaaggaattaatgtaaaggcagcctaattcgcaaaacgtaagtggttttgttgctatggtctttcttttcttttttatctatttgtatttgtatttttatttatttatttttttttttgagacggagtctcgctctgtcacccaggctgtagtgcagtggcgcgatcttggctcactgcaacctttgcctgctggattcaagtgattcttgtgcttcagcctcccaagtagctgggattacaggcatgcaccatcacacctggctaatttttgtatttttagtagagacggggtttcaccatgttggccaggctggtcttgaactcctggcctcaagtgatccacccgccttggcctcccagaatgctgagattacaggtgtgagccagcacgcctggcctggtctttcatgttttctgagttttctaagtgcactcttatgaacgtaacgcaacccaagatcctagaatgaaaaaatacagtaggaagattatccttttttttttttttttcagtaccttataggtccaaaatgtgctgctggccattataagaataaagctaaatatttcatgctagcaagacgaagaagacactagcgaggtaaaagtaatggataggttaattatgaaaaaagtatttgttagagcaatttagagatcttcttaaaattactaaggtttttttaatgacatatactagcctttttcactttaaggagtcagtggcaaatttaagctttatttatttatttattttttgagacagaatctcgcttgttgcccaggctagagtgcagtggtgtgatctcggctcattgcaacctccacctcccgggttcaagcgattctcttgcctcagcctcccacgtagctgggactacaggcgtgtgccaccacacccggctgatttttgtattttttattagagatgggttttaccatgttggccaggctggtcttgaactcctgacttcaggtgatccgcctaccttggcctcccaagtgctgagatttcaggcgtgagccactgtgccctgccaaatttaatcatttttatatttagttttcttgacccttaggttgccttatccttttttatagtcaatatagtttatgcaactgtgtttctatgattgccttttatcttttattctatagtgaattaactactctaaaatatatatattgtagattgtttctttttcatctgttttacttcatcttctacctcagtggagcatgaacacatttgggttatctgttggttgtcttttaacaaatacttgatatttatatctagtggactaacttgaataccggtaacattttcagatggtatattttccaaaaggttgaagagaaaatatacagataatggaatttggctagatgttgagctctaaaaatgctttaatagttaggtttttctgttttcattacagctttcttctcttttaggaaattactgtccatgattaagcacatatcctcttgatggtattcagccccttaagttcagacttccttcccgttggttttttttttttttaattaaaaaaaaaattctttttaacacacaactttgctcagagtcttccctattttttttcaaaaaatgtgtattccatttgataatacacacaagatttatggtttagaaataatctttacctccagtgtcagtacaataccttagttaactaattccgaagaacttgggtgggttttttttttttgcctttttgttttgttatcgggtaagatctctccctttttgaaattggatattctggcagtatctggtttttgtactacttttaaatctctgaaaaagaatattagaaatctgtaattgttgcaatttggctaacatttgtatcatctctcaggataatacctttgaaatttctgct

SEQ ID NO: 726728 - DNA, 2148 bp, Homo sapiens
cctgccaggtttctaaactatcaagttactgtttttcactttgtaattaacacatgtcttgggaatattttgagactgtgtaaataatcttatttctcatcatacttccattaattttagtatccattgatgattcttgcttgatcagaatcttttacatttaattatttaacatctttttttgtttcattgactgatacattattttccttgtcataaatggataaagacccaaaggaattaatgtaaaggcagcctaattcgcaaaacgtaagtggttttgttgctatggtctttcttttcttttttatctatttgtatttgtatttttatttatttatttttttttttgagacggagtctcgctctgtcacccaggctgtagtgcagtggcgcgatcttggctcactgcaacctttgcctgctggattcaagtgattcttgtgcttcagcctcccaagtagctgggattacaggcatgcaccatcacacctggctaatttttgtatttttagtagagacggggtttcaccatgttggccaggctggtcttgaactcctggcctcaagtgatccacccgccttggcctcccagaatgctgagattacaggtgtgagccagcacgcctggcctggtctttcatgttttctgagttttctaagtgcactcttatgaacgtaacgcaacccaagatcctagaatgaaaaaatacagtaggaagattatccttttttttttttttttcagtaccttataggtccaaaatgtgctgctggccattataagaataaagctaaatatttcatgctagcaagacgaagaagacactagcgaggtaaaagtaatggataggttaattatgaaaaaagtatttgttagagcaatttagagatcttcttaaaattactaaggtttttttaatgacatatactagcctttttcactttaaggagtcagtggcaaatttaagctttatttatttatttattttttgagacagaatctcgcttgttgcccaggctagagtgcagtggtgtgatctcggctcattgcaacctccacctcccgggttcaagcgattctcttgcctcagcctcccamgtagctgggactacaggcgtgtgccaccacacccggctgatttttgtattttttattagagatgggttttaccatgttggccaggctggtcttgaactcctgacttcaggtgatccgcctaccttggcctcccaagtgctgagatttcaggcgtgagccactgtgccctgccaaatttaatcatttttatatttagttttcttgacccttaggttgccttatccttttttatagtcaatatagtttatgcaactgtgtttctatgattgccttttatcttttattctatagtgaattaactactctaaaatatatatattgtagattgtttctttttcatctgttttacttcatcttctacctcagtggagcatgaacacatttgggttatctgttggttgtcttttaacaaatacttgatatttatatctagtggactaacttgaataccggtaacattttcagatggtatattttccaaaaggttgaagagaaaatatacagataatggaatttggctagatgttgagctctaaaaatgctttaatagttaggtttttctgttttcattacagctttcttctcttttaggaaattactgtccatgattaagcacatatcctcttgatggtattcagccccttaagttcagacttccttcccgttggttttttttttttttaattaaaaaaaaaattctttttaacacacaactttgctcagagtcttccctattttttttcaaaaaatgtgtattccatttgataatacacacaagatttatggtttagaaataatctttacctccagtgtcagtacaataccttagttaactaattccgaagaacttgggtgggttttttttttttgcctttttgttttgttatcgggtaagatctctccctttttgaaattggatattctggcagtatctggtttttgtactacttttaaatctctgaaaaagaatattagaaatctgtaattgttgcaatttggctaacatttgtatcatctctcaggataatacctttgaaatttctgct

SEQ ID NO: 726729 - DNA, 607 bp, Homo sapiens
aagtggaattaaatttcacgttcaaatcacttgtcagcgcttaaaaaaaaaagacttctaaacgacctctcagatatatgacccggatgctgccagaccaaacgacttttatccaggtggacccttcgggggtactgggtcacctgcagggtaaccgggcaggatctcagatttggtgaccgtcccagaagctggggagaaggtgccgccagagagtgagcggaaatctcccttggaggcctggaggcagcaatacgaacccctcaagcygggagagggcaccctggctggctggggccggcagcgctgcagcctcacgtccgcaggtgaagatgcgctcccgctgggcatgcgcgccccctggggccaggagcaggtgggaggttcctaccttccgccccagcaccgcctgaggtcagagggactgtcctttcttgcactgcccaatttgtcaaggtcccgtatcgaataaatagctgtctccccagacctttatactgactaatccaaataaatcgcagtcacttttactgtgcgtttcagcgggcagcctggctttaatggctctgcctcctagacctccgggggagactcgccgcggcttctg

SEQ ID NO: 726730 - DNA, 1369 bp, Homo sapiens
taggaattgataccttgctgatttttttttatgaagaatgaaactttcttacctttgtttaaggaagaatcatcttcctttattgatatgacttgtagttaaactaagcaatgcactttttcaactacattttccatcataagctattatgaatgaataaagtgaaaaatacttgtgtggaaggatagaaacaagtatgactggaatatagtgaaaccttaagatgagagaatgatctaagagtgactactttggaagataatgttgagcaatcaggctaaggaaaggtcatgattcasagcacaggagtgtgtgtggcgggagggagggtcagagtccacaccagctaaatatctagtcttcacctgagtgaaaattatgttatcacctctgcccagggcttgtagcagtaaattttcctatctccatctggaagtcatgatcattgcttggtagaagacatcatttatggttcatcactatctacatataatataaaaacatatcaaaatatgtgctttatattatatgctgcagagaacctccacctctctctgcagcacaatagtgagaatattctgcacaagtatttgtgttgagctaagtaaagaggcaaaatgagaatgaaagatctctggcaagtaaatattcaacaagttgttgacaaatataagtataaataagtactctagatcaatccataagtatagaataagtacttcatgtcattctctaaacaaatacttgaaagttttatgtgtaatcactatagcagttttttatccatgatattttccttttatttaatactttttatttctcaagtatcatcaatctttatccattttaaatctatgagattacattgtacacattatatttcttttctatatcttttttctctatagtcacatttgttatattgtaacagtaaattttcaacttattttacaaagcaattaataaacatttatttatgtgtttgctttacagcttaactaatgcttgtgatgtttaacgcctgtcttttcaacttggtctactgagtcttcaatactggtgactgagctgcttgaagtgaactctggacaaggtggagagcatcttcttgatttaaggtctgataaaaactagcagtctttcaatttatccagtaaaatgggtcataacaatacaactatatggtatattttgtttccaaaattaaaaacgtcctaacaatcactgtgcttctattttagcagtagtgggtaaatggagctacgatctttattttttttaccttggaagaaatatcacacacatacatgtacacacaatgactccttgaaactttatttagaaggcagactctgagacttatctctct

SEQ ID NO: 726731 - DNA, 1369 bp, Homo sapiens
taggaattgataccttgctgatttttttttatgaagaatgaaactttcttacctttgtttaaggaagaatcatcttcctttattgatatgacttgtagttaaactaagcaatgcactttttcaactacattttccatcataagctattatgaatgaataaagtgaaaaatacttgtgtggaaggatagaaacaagtatgactggaatatagtgaaaccttaagatgagagaatgatctaagagtgactactttggaagataatgttgagcaatcaggctaaggaaaggtcatgattcagagcacaggagtgtgtgtggcgggagggagggtcagagtccacaccagctaaatatctagtcttcacctgagtgaaaattatgttatcacctctgcccagggcttgtagcagtaaattttcctatctccatctggaagtcatgatcattgcttggtagaagacatcatttatggttcatcactatctacatataatataaaaacatatcaaaatatgtgctttatattatatgctgcagagaacctccacctctctctgcagcacaatrgtgagaatattctgcacaagtatttgtgttgagctaagtaaagaggcaaaatgagaatgaaagatctctggcaagtaaatattcaacaagttgttgacaaatataagtataaataagtactctagatcaatccataagtatagaataagtacttcatgtcattctctaaacaaatacttgaaagttttatgtgtaatcactatagcagttttttatccatgatattttccttttatttaatactttttatttctcaagtatcatcaatctttatccattttaaatctatgagattacattgtacacattatatttcttttctatatcttttttctctatagtcacatttgttatattgtaacagtaaattttcaacttattttacaaagcaattaataaacatttatttatgtgtttgctttacagcttaactaatgcttgtgatgtttaacgcctgtcttttcaacttggtctactgagtcttcaatactggtgactgagctgcttgaagtgaactctggacaaggtggagagcatcttcttgatttaaggtctgataaaaactagcagtctttcaatttatccagtaaaatgggtcataacaatacaactatatggtatattttgtttccaaaattaaaaacgtcctaacaatcactgtgcttctattttagcagtagtgggtaaatggagctacgatctttattttttttaccttggaagaaatatcacacacatacatgtacacacaatgactccttgaaactttatttagaaggcagactctgagacttatctctct

SEQ ID NO: 726732 - DNA, 641 bp, Homo sapiens
aagagatgctttcctttctataggacctccatttagaggagaaaaggaaatcattaagtcaatagatgagttattaaagtataaagtaaaaatggaaaatgaaaacacactcagtgatttttttggaaatcatttgggcaaaagtatcaagaaagaattgtctcaaagttactaaatggaatagtctccttatggaattatgtgctattttgggaggtgatagccagaatcaaaggaaatgaaagaaggactttcatcccttctttcacctcattcccatgtagctctgctgtgttgttccatccatccccaacactaacctgrtaattcggagacaccttgccgcatattgtttcacctttaattcttgaataaactctgattcttacttataacttttcccatgtttgttgccaataaaatttcccatctcatttgaagagttgctatttctgtcacctgttcaaaggatagcacttcttttattactacctctttctttttccttttccaactatttctcctttgactttgtttttcccaataatgatttgtttttatcttctttcctagtaaccaaaaattaaaacaggacagagtttccaaaggaaatgtctgtagatgttaaccaaactgattga

SEQ ID NO: 726733 - DNA, 628 bp, Homo sapiens
tatgtcagcagaaactgtatcttcccaccaggaaagacagttgcatatgcaataaaccaatagcctttgacatgtcagttaattacatcagttagccactatctcctgagcatgatcgctgtgttaatgaaactattttggtgtggaaatgaaacaggtcaagacaagtagatcaggaaatagaagggatttagggtcatatagaaagtcaatgtgctgagtcacacagaacttaaccttggccttcagaaaggatataaaatttttccctctgctgtgagtaatgttagtattcctttttcttggcatcacttcgtgctaaatagctcaaaactctttagaaattatcaagtttaacagtattgcctccccttcaagggctgttaacaatcgagttattggagataaaccaaagaccagtattataggcgctgactttaaaagacatggtttttttttccccctgagtaaaggggaccagtcaaagatgatgcccggtttctggtttggacgacagrgttaagaatggtgacagctacttgttttgaaacaagatgagcagatgtattggaaaaacagatcagatattgcaaggagatgttaactcgggtttctgttggttttttca

SEQ ID NO: 726734 - DNA, 2093 bp, Homo sapiens
cctggctaacacggtgaaaccccgtctctactaaaaatacaaaaaattagctgggtgtggtggcaggcgcctgtggtcctagctactcgggaggttgaggcaggagagtggtgtgaacccaggaggcggagcttgcagtgagcaaagaccgcgccactgcactccagcttgggagacagagcgagactccgtctcaaaaaaaaaaaaaaaaaaaaaaaaaaaaaaaaaaaaaaagcctatgaagtatgccagttcatctagacttgacttttatgaagtgttaagcagcaaatgttaagtaacagattgtcagagataagaattgggccttacacagttttgaagctgacttcataagaaatcagttcatttttattgtatgatgctcctagattttttttctttaggttatttttgcagcattgaatgatattttcttggtattttagaaagtgagaaaaataaaaacagctagaaaaaaatcaataagaactcttttaaaatagtgtttctagtcaggggtgaaaagggcaggttattgacctattggtaatggtttaacatattcatggaagaatccaaaagtgctagaatcaacatgtctcagtgtgacaagatgacaatcatctctgttacctccaaagtactcatagttaaaagatttagtgagatctctccttctccatgtgatatcaaaagtaatttcatgttgagaatgcatctgcaggtgttggtgattaattatagaatctaatgatgtaccatcagccaaatctcaatgacatcaatgctagctgtacctgatttgtgaaggtagagaatttaaatctttcatttataatttttagacaatcccacatgaactgataagcatagttttaatttattaaaaatgacgtattaggagaattaagcattkgtattcatttgtattttatgactcatttagatctagtttctccctctaagaaaaaaaaaagtcttcagcttttaagttcggggtacatgtgcagcatatgcaggtttgttacataggtaaatgtgtgccatggtggtttgctgcagagatgcataccatcacctaggtattaagcctagcatccattagctattcttcctgatgttctccctgccccccaccccttggacaggccccagtatgtgttgttccccatgtgtccgtgtgttctcataattcagctcccactttaaatgcttgcttttctgttcctatgatagtttgctgaggataatggcttccagctccatccacgtcccttcaaaggtcatgatctcattcctttttatgctgcatagtattctatggtatttatgtaccacattttccttctccagtctatcattgatagtcatttatgttgattcaatgtctttgctattgtgaatatggctgcaattaacatatgcatgcatgtgtctttatagtagaatgatttatattcctttgggtatatacccagtaacaagatttctgagtcaaatggtatttctgcctctaggtctctgaggaatcgccaccctgtcttccacaatggttgaaataatttacactcccaccaacagtgtaaaagctttccctttcctccacaacctcaccagcatctgttgtttctttgaacgttaataagagccattccgactggaatgagatgttatctcattgtggttttgatttgcatttatctaatgatcagtgatgttgagctttttttcatatgtttgttggacgcatgtatgtcttcttttgagtggagcttctgcacaacaaaaagataagacaaaattttaaggtgatttttccaagccataattgtattatacattctgaatgcagttataatacaaggaatgtcttaaattatttattttacaaagactttacttttacatattgaaaaatatgtttgaacatgaacattacaagtaggaaaatatgcctgagaacgtgcatttaatggctcttcctaaattaacttgcttaagttttggaatgtagccgaagagccaataaaatacaagtaactatttaaatgtatgtaatattatatagctataaaaatatgtatgtttca

SEQ ID NO: 726735 - DNA, 2093 bp, Homo sapiens
cctggctaacacggtgaaaccccgtctctactaaaaatacaaaaaattagctgggtgtggtggcaggcgcctgtggtcctagctactcgggaggttgaggcaggagagtggtgtgaacccaggaggcggagcttgcagtgagcaaagaccgcgccactgcactccagcttgggagacagagcgagactccgtctcaaaaaaaaaaaaaaaaaaaaaaaaaaaaaaaaaaaaaaagcctatgaagtatgccagttcatctagacttgacttttatgaagtgttaagcagcaaatgttaagtaacagattgtcagagataagaattgggccttacacagttttgaagctgacttcataagaaatcagttcatttttattgtatgatgctcctagattttttttctttaggttatttttgcagcattgaatgatattttcttggtattttagaaagtgagaaaaataaaaacagctagaaaaaaatcaataagaactcttttaaaatagtgtttctagtcaggggtgaaaagggcaggttattgacctattggtaatggtttaacatattcatggaagaatccaaaagtgctagaatcaacatgtctcagtgtgacaagatgacaatcatctctgttacctccaaagtactcatagttaaaagatttagtgagatctctccttctccatgtgatatcaaaagtaatttcatgttgagaatgcatctgcaggtgttggtgattaattatagaatctaatgatgtaccatcagccaaatctcaatgacatcaatgctagctgtacctgatttgtgaaggtagagaatttaaatctttcatttataatttttagacaatcccacatgaactgataagcatagttttaatttattaaaaatgacgtattaggagaattaagcatttgtattcatttgtattttatgactcatttagatctagtttctccctctaagaaaaaaaaaagtcttcagcttttaagttcggggtacatgtgcagcatatgcaggtttgttacataggtaaatgtgtgccatggtggtttgctgcagagatgcataccatcacctaggtattaagcctagcatccattagctattcttcctgatgttctccctgccccccaccccttggacaggccccagtatgtgttgttccccatgtgtccgtgtgttctcataattcagctcccactttaaatgcttgcttttctgttcctatgatagtttgctgaggataatggcttccagctccatccacgtcccttcaaaggtcatgatctcattcctttttatgctgcatagtattctatggtatttatgtaccacattttccttctccagtctatcattgatagtcatttatgttgattcaatgtctttgctattgtgaatatggctgcaattaacatatgcatgcatgtgtctttatagtagaatgatttatattcctttgggtatatacccagtaacaagatttctgagtcaaatggtatttctgcctctaggtctctgaggaatcgccaccctgtcttccacaatggttgaaataatttacactcccaccaacagtgtaaaagctttccctttcctccacaacctcaccagcatctgttgtttctttgaacgttartaagagccattccgactggaatgagatgttatctcattgtggttttgatttgcatttatctaatgatcagtgatgttgagctttttttcatatgtttgttggacgcatgtatgtcttcttttgagtggagcttctgcacaacaaaaagataagacaaaattttaaggtgatttttccaagccataattgtattatacattctgaatgcagttataatacaaggaatgtcttaaattatttattttacaaagactttacttttacatattgaaaaatatgtttgaacatgaacattacaagtaggaaaatatgcctgagaacgtgcatttaatggctcttcctaaattaacttgcttaagttttggaatgtagccgaagagccaataaaatacaagtaactatttaaatgtatgtaatattatatagctataaaaatatgtatgtttca

SEQ ID NO: 726736 - DNA, 2093 bp, Homo sapiens
cctggctaacacggtgaaaccccgtctctactaaaaatacaaaaaattagctgggtgtggtggcaggcgcctgtggtcctagctactcgggaggttgaggcaggagagtggtgtgaacccaggaggcggagcttgcagtgagcaaagaccgcgccactgcactccagcttgggagacagagcgagactccgtctcaaaaaaaaaaaaaaaaaaaaaaaaaaaaaaaaaaaaaaagcctatgaagtatgccagttcatctagacttgacttttatgaagtgttaagcagcaaatgttaagtaacagattgtcagagataagaattgggccttacacagttttgaagctgacttcataagaaatcagttcatttttattgtatgatgctcctagattttttttctttaggttatttttgcagcattgaatgatattttcttggtattttagaaagtgagaaaaataaaaacagctagaaaaaaatcaataagaactcttttaaaatagtgtttctagtcaggggtgaaaagggcaggttattgacctattggtaatggtttaacatattcatggaagaatccaaaagtgctagaatcaacatgtctcagtgtgacaagatgacaatcatctctgttacctccaaagtactcatagttaaaagatttagtgagatctctccttctccatgtgatatcaaaagtaatttcatgttgagaatgcatctgcaggtgttggtgattaattatagaatctaatgatgtaccatcagccaaatctcaatgacatcaatgctagctgtacctgatttgtgaaggtagagaatttaaatctttcatttataatttttagacaatcccacatgaactgataagcatagttttaatttattaaaaatgacgtattaggagaattaagcatttgtattcatttgtattttatgactcatttagatctagtttctccctctaagaaaaaaaaaagtcttcagcttttaagttcggggtacatgtgcagcatatgcaggtttgttacataggtaaatgtgtgccatggtggtttgctgcagagatgcataccatcacctaggtattaagcctagcatccattagctattcttcctgatgttctccctgccccccaccccttggacaggccccagtatgtgttgttccccatgtgtccgtgtgttctcataattcagctcccactttaaatgcttgcttttctgttcctatgatagtttgctgaggataatggcttccagctccatccacgtcccttcaaaggtcatgatctcattcctttttatgctgcatagtattctatggtatttatgtaccacattttccttctccagtctatcattgatagtcatttatgttgattcaatgtctttgctattgtgaatatggctgcaattaacatatgcatgcatgtgtctttatagtagaatgatttatattcctttgggtatatacccagtaacaagatttctgagtcaaatggtatttctgcctctaggtctctgaggaatcgccaccctgtcttccacaatggttgaaataatttacactcccaccaacagtgtaaaagctttccctttcctccacaacctcaccagcatctgttgtttctttgaacgttaataagagccattccgactggaatgagatgttatctcattgtggttttgatttgcatttatctaatgatcagtgatgttgagctttttttcatatgtttgttggacgcatgtatgtcttcttttgagtggagcttctgcacaacaaaaagataagacaaaattttaaggtgatttttccaagccataattgtattatacattctgaatgcagttataatacaaggaatgtcttaaattatttattttacaaagactttacttttacatattgaaaaatatgtttgaacatgaacattacaagtaggaaaatatgcctgagaaygtgcatttaatggctcttcctaaattaacttgcttaagttttggaatgtagccgaagagccaataaaatacaagtaactatttaaatgtatgtaatattatatagctataaaaatatgtatgtttca

SEQ ID NO: 726737 - DNA, 590 bp, Homo sapiens
ttttttaagtgataatgcttcagatttcttcctacataattagaaaaaataatcacaacaaattggagaggaaatacaataaccttaaagataatctgggtcttatctaattccaaccaaaaatttcatatctagccaaactaagtttcataagtgaaagagattaagattcttttcagataagcaaatgttaaggaaatttgttagcacrtgacctgccttaaaagaggtccttaaaggagtgttaaatatggaaaggaaagactgttacaagacattataaaaacacactttagtacataaatcgacattctaaagcaactacacaatcaagtctgcataatggccagctaaaaacatgattaaaggatcatatctgcacatatcagtattaaccttgaatgtaaatgagctaaataacctaattaaaaggcatagagtggcatgctgaataaagaagaaagacccaactgtatgctgtcttcaagagaactatttcacaagcaatgacacacagaatctcaaattaaagggatggagaaaaatcaatcagacaaacagaaaagagaaaaaagcatgggttgctattt

SEQ ID NO: 726738 - DNA, 1169 bp, Homo sapiens
tttttctttcttgggttgcacttttcatgttatatccaaaaaactcattgccaaatccaaggtcacctggattttctcccttttcatattataggaattttatagtttcgcattttgcatttaggcctttgatccattttgacttaatttttgtgaaagatttaaagtcattctttttgtttgtagatgtccatttctagtctcatttgttgaaaagactatcttttatactctgttttgaattgcctttgctcctttgtcgaagatcaattgactgtgtatatgtgggtctatttctgagctctctattgtattcagttgatatgtcggttcttttgccaataccacacatgccattttgatgactgtagctttgtatagtaagtcttgaagttgagtagtgttaggccttcgacttycttcttcttcaatattgtttcggatattttgggtcttttgcctgttctaataaagaatttagaatcaccttgccgatatcctcaaaataacttgctgaaattttgattgggattgtcttaaaatgttaccacaaacataaaaatacgtacatttaacttttagtataaagtttttattaatggtgatgaaacactaatgattttatgaaatcaaaactgtgactcaggttacataagaaatgaagaagaaaaatctccccaccccacacacatacacacacacacacacatacacaagtatacacacacagatatacaaacatctgcacttgccagtctaacctataaatcacaaacttttagattagcatgaaatcacacatcttagtaatcaagaagttctgttgggagtgggaagaataaagttatttgtaagtatatgggtgtagccatagaatttggagaaattcctttaaaactgcattaaataattatgcaacaatgatttgtatgcttgtgggtttaatatcaggttctgctactgtatgtgaattcagtttaagtgggtaaagacggttatctcttcaagattcttttctctagtttgcatctttttttttatcttgttgattttattggcagcacttaaagagcaaggttagataatattggagacagtgggctttcattctcatgcctttgaaaccactgaactcatttttgccttcacccatatctctaatggttcat

SEQ ID NO: 726739 - DNA, 1169 bp, Homo sapiens
tttttctttcttgggttgcacttttcatgttatatccaaaaaactcattgccaaatccaaggtcacctggattttctcccttttcatattataggaattttatagtttcgcattttgcatttaggcctttgatccattttgacttaatttttgtgaaagatttaaagtcattctttttgtttgtagatgtccatttctagtctcatttgttgaaaagactatcttttatactctgttttgaattgcctttgctcctttgtcgaagatcaattgactgtgtatatgtgggtctatttctgagctctctattgtattcagttgatatgtcggttcttttgccaataccacacatgccattttgatgactgtagctttgtatagtaagtcttgaagttgagtagtgttaggccttcgactttcttcttcttcaatattgtttcggatattttgggtcttttgcctgttctaataaagaatttagaatcaccttgccgatatcctcaaaataacttgctgaaattttgattgggattgtcttaaaatgttaccacaaacataaaaatacgtacatttaacttttagtataaagtttttattaatggtgatgaaacactaatgattttatgaaatcaaaactgtgactcaggttacataagaaatgaagaagaaaaatctccccaccccacacacatacacacacacacacacatacacaagtatacacacacagatatacaaacatctgcacttgccagtctaacctataaatcacaaacttttagattagcatgaaatcacacatcttagtaatcaagaagttctgttgggagtgggaagaataaagttatttgtaagtatatgggtgtagccatagaatttggagaaattcctttaaaactgcattaaataattatgcaacaatgatttgtatgcttgtgggtttaatatcaggttctgctactgtatgtgaattcagtttaagtrggtaaagacggttatctcttcaagattcttttctctagtttgcatctttttttttatcttgttgattttattggcagcacttaaagagcaaggttagataatattggagacagtgggctttcattctcatgcctttgaaaccactgaactcatttttgccttcacccatatctctaatggttcat

SEQ ID NO: 726740 - DNA, 956 bp, Homo sapiens
tgtaggtgttgctgattgaccctctcagtagataggcctgggaaatacttcatctttatatgtagatatttacatatctaactataaacatatttatttttctatatatatctttacatagttctatctctgcatgttttaaaccatgagttgactccaatatctgcaatttaaatccaacacaacgggattaattctcattttctcccttttttgacaatgagaaacttgattcccattatccttaatattgttgtttacttgatccagttttcattttggttacatattcaagcarttattgtaactgccattgccactgcttcatccacgtcaccttacacctaaatgctccctcaccttgcttaagcgctggcactctgcgccaaagccttacattacctctccacttgagtgaacactctccttacctcattcatgctctgaacatcaggctgcttgcactattgccctttgagtgggaatgctcaccacttgcttgggctctgaaaacccaccttagggtgcccttctgtaaggatacccactcacttttctcttcagagctctgtaccacagacgtcatagtcatccctcttgggttccagcatcccaggctaggctactgtgacctccctaggatgtgggtgcctactttccttggatccactgaatggcctttggactgcaacggaggggagagaagagaagagaatgaaagggaagagggaagaagaagagggggagatgtacaaattcttaagaaaatctgtatcagaattagaattcaaagaatggcgatactccttgatttctgattatttagcattttgtttttgtcttggtgtgcatagagctagttgagggatttggaactatgggtaaagtaaatctggcagccaaaattaaggcctgttaacgaaatgcttactgatataggtggcactctaacccca

SEQ ID NO: 726741 - DNA, 956 bp, Homo sapiens
tgtaggtgttgctgattgaccctctcagtagataggcctgggaaatacttcatctttatatgtagatatttacatatctaactataaacatatttatttttctatatatatctttacatagttctatctctgcatgttttaaaccatgagttgactccaatatctgcaatttaaatccaacacaacgggattaattctcattttctcccttttttgacaatgagaaacttgattcccattatccttaatattgttgtttacttgatccagttttcattttggttacatattcaagcaattattgtaactgccattgccactgcttcatccacgtcaccttacacctaaatgctccctcaccttgcttaagcgctggcactctgcgccaaagccttacattacctctccacttgagtgaacactctccttacctcattcatgctctgaacatcaggctgcttgcactattgccctttgagtgggaatgctcaccacttgcttgggctctgaaaacccaccttagggtgcccttctgtaaggatacccactcacttttctcttcagagctctgtaccacagacgtcatagtcatccctcttgggttccagcatcccaggctaggctactgtgacctccctagkatgtgggtgcctactttccttggatccactgaatggcctttggactgcaacggaggggagagaagagaagagaatgaaagggaagagggaagaagaagagggggagatgtacaaattcttaagaaaatctgtatcagaattagaattcaaagaatggcgatactccttgatttctgattatttagcattttgtttttgtcttggtgtgcatagagctagttgagggatttggaactatgggtaaagtaaatctggcagccaaaattaaggcctgttaacgaaatgcttactgatataggtggcactctaacccca

SEQ ID NO: 726742 - DNA, 956 bp, Homo sapiens
tgtaggtgttgctgattgaccctctcagtagataggcctgggaaatacttcatctttatatgtagatatttacatatctaactataaacatatttatttttctatatatatctttacatagttctatctctgcatgttttaaaccatgagttgactccaatatctgcaatttaaatccaacacaacgggattaattctcattttctcccttttttgacaatgagaaacttgattcccattatccttaatattgttgtttacttgatccagttttcattttggttacatattcaagcaattattgtaactgccattgccactgcttcatccacgtcaccttacacctaaatgctccctcaccttgcttaagcgctggcactctgcgccaaagccttacattacctctccacttgagtgaacactctccttacctcattcatgctctgaacatcaggctgcttgcactattgccctttgagtgggaatgctcaccacttgcttgggctctgaaaacccaccttagggtgcccttctgtaaggatacccactcacttttctcttcagagctctgtaccacagacgtcatagtcatccctcttgggttccagcatcccaggctaggctactgtgacctccctaggatgtgggtgcctactttccttggatccactgaatggcctttggactgcaacggaggggagagaagagaagagaatgaaagggaagagggaagaagaagagggggagatgtacaaattcttaagaaaatctgtatcagaattagaattcaaagaatggcgatactccttgatttctgattatttagcattttgtttttgtcttggtgtgcatagagctagttgagggatttggaactatgrgtaaagtaaatctggcagccaaaattaaggcctgttaacgaaatgcttactgatataggtggcactctaacccca

SEQ ID NO: 726743 - DNA, 2075 bp, Homo sapiens
tgaaaacaacttgtgtggaaatctctattaaaaaacctctcctgagcttggcatacagaacactattcagggctgccctgattcagtgtacctgagttgcaattatttatttcccagaaatgctataacctttgacctctgtgttaatccccctttttttagttaaaaacaccattttcaattagcaacatggaggacctagaaatacactaagtgtagagaacatctaaacaaaagataagaatatctgcttttaaaacacatcatactacacctgcatactcatacgcacaggcacacatacacaaatacacatgcagcttccttcatatataccacgttgaaccactcctaaaaataaagaaatctccaggttcctttaaatgactttaattctgatatttgaactattcagtctgtagaaatggagtcacatgcttatgggacaaggctggccctgagaaagatccaaatacaggacaagatctgaaataaaagcatgatgatgggagccaatggaaacaggcaaaatagagacagtcccaaattctgtactctaatgcatttgccttttctttcccagtcactgctaaatgctttcaagttttattttgctttctcaaaaaaaaaaaaaaagaattggaagaaaaataattaattttgtaatataatctttcaaatggtttattttgatgaatatttactcaacattttggttgactaatcagttttcaaaattaaaaacctcttaaatcccttttgaaaagtattaaaatataatttcatatagatatgatgtgcttttccttttactaaagtgaagtttgagaaaaatattttattcagccacctcaaatattagtctgctatgtttctcaaaaatttatgtaaggattacctatatcagaaatacctgtggtgcttgctgaatactcacatactagccattcaactactcaatcagatatctgggaaatagttcagaaatttttttgtttttgtttttgagacagagtcttgctctgttgccaggctggagtgcagtgtcrtgatttcagctcactgcaacctctgcctcctgggttcaagtgattcccctgctcagcctcttaagtagctggtactactggcgtgcaccaccacgcccggctaattttttgtattttagtagaaacagggtttcaccatcttggccagaatggtctcgatctcttgacctcgtgatctgcccacttcagcctcccaaagtgctgggattacagacataagccaccgcgcccggccagaaatttgcatttttgataaatgattcaactcattctcatttaagtaaatattttagacatagtttcctaagaaactcagaactgactttaatacattttgaggctgtagtagattggtgacccccacgcacaaagatatgtccacttgaagcctacacatgtgaccgtgtgtgggaaaaaggtctttgcacatgtaattacattgaggatcttgagacgagatgatgctggattactgtgtgggccctaaatccagtaacaagtgtccttataattaaaagaaaagacaaacacaaaggaaacggcaatttgaagacagcagcacaaattgaaatcatgggtctacaagataaggaacaccaaaaagtgccaccagccacgaagagcttgaagagaaacatggaatagagtcatcctcagagcctccagaagtaaccaaccccacagacacctggatttcagacttctgcctccagaatcatgaaagaataaatttctgttgttttaagccaacttatttgtgtatatttgttatggcagttctaggaaatgaataaagtctttcaaaatatatagataatgctcattaataatataactaatagtcggttacatttgttcagcattagtgtgccaggcgcaacgcctaggacaaacaaccatggctgtaagtacatgtctggttaattttaacattaatagtctcttccacttcaatatttcctggatcttgcctaggattccctgccaataacagcctcttccccaaactgctcccttacttattta

SEQ ID NO: 726744 - DNA, 2075 bp, Homo sapiens
tgaaaacaacttgtgtggaaatctctattaaaaaacctctcctgagcttggcatacagaacactattcagggctgccctgattcagtgtacctgagttgcaattatttatttcccagaaatgctataacctttgacctctgtgttaatccccctttttttagttaaaaacaccattttcaattagcaacatggaggacctagaaatacactaagtgtagagaacatctaaacaaaagataagaatatctgcttttaaaacacatcatactacacctgcatactcatacgcacaggcacacatacacaaatacacatgcagcttccttcatatataccacgttgaaccactcctaaaaataaagaaatctccaggttcctttaaatgactttaattctgatatttgaactattcagtctgtagaaatggagtcacatgcttatgggacaaggctggccctgagaaagatccaaatacaggacaagatctgaaataaaagcatgatgatgggagccaatggaaacaggcaaaatagagacagtcccaaattctgtactctaatgcatttgccttttctttcccagtcactgctaaatgctttcaagttttattttgctttctcaaaaaaaaaaaaaaagaattggaagaaaaataattaattttgtaatataatctttcaaatggtttattttgatgaatatttactcaacattttggttgactaatcagttttcaaaattaaaaacctcttaaatcccttttgaaaagtattaaaatataatttcatatagatatgatgtgcttttccttttactaaagtgaagtttgagaaaaatattttattcagccacctcaaatattagtctgctatgtttctcaaaaatttatgtaaggattacctatatcagaaatacctgtggtgcttgctgaatactcacatactagccattcaactactcaatcagatatctgggaaatagttcagaaatttttttgtttttgtttttgagacagagtcttgctctgttgccaggctggagtgcagtgtcatgatttcagctcactgcaacctctgcctcctgggttcaagtgattcccctgctcagcctcttaagtagctggtactactggcgtgcaccaccacgcccggctaattttttgtattttagtagaaacagggtttcaccatcttggccagaatggtctcgatctcttgacctcgtgatctgcccacttcagcctcccaaagtgctgggattacagacataagccaccgcgcccggccagaaatttgcatttttgataaatgattcaactcattctcatttaagtaaatattttagacatagtttcctaagaaactcagaactgactttaatacattttgaggctgtagtagattggtgacccccacgcacaaagatatgtccacttgaagcctacacatgtgaccgtgtgtgggaaaaaggtctttgcacatgtaattacattgaggatcttgagacgagatgatgctggattactgtgtgggccctaaatccagtaacaagtgtccttataattaaaagaaaagacaaacacaaaggaaacggcaatttgaagacagcagcacaaattgaaatcatgggtctacaagataaggaacaccaaaaagtgccaccagccacgaagagcttgaagagaaacatggaatagagtcatcctcagagcctccagaagtaaccaaccccacagacacctggatttcagacttctgcctccagaatcatgaaagaataaatttctgttgttttaagccaacttatttgtgtatatttgttatggcagttctaggaaatgaataaagtctttcaaaatatatagataatgctcattaataatataactaatagtcggttacatttgttcagcattagtgtgccaggcgcaacgcctaggrcaaacaaccatggctgtaagtacatgtctggttaattttaacattaatagtctcttccacttcaatatttcctggatcttgcctaggattccctgccaataacagcctcttccccaaactgctcccttacttattta

SEQ ID NO: 726745 - DNA, 2075 bp, Homo sapiens
tgaaaacaacttgtgtggaaatctctattaaaaaacctctcctgagcttggcatacagaacactattcagggctgccctgattcagtgtacctgagttgcaattatttatttcccagaaatgctataacctttgacctctgtgttaatccccctttttttagttaaaaacaccattttcaattagcaacatggaggacctagaaatacactaagtgtagagaacatctaaacaaaagataagaatatctgcttttaaaacacatcatactacacctgcatactcatacgcacaggcacacatacacaaatacacatgcagcttccttcatatataccacgttgaaccactcctaaaaataaagaaatctccaggttcctttaaatgactttaattctgatatttgaactattcagtctgtagaaatggagtcacatgcttatgggacaaggctggccctgagaaagatccaaatacaggacaagatctgaaataaaagcatgatgatgggagccaatggaaacaggcaaaatagagacagtcccaaattctgtactctaatgcatttgccttttctttcccagtcactgctaaatgctttcaagttttattttgctttctcaaaaaaaaaaaaaaagaattggaagaaaaataattaattttgtaatataatctttcaaatggtttattttgatgaatatttactcaacattttggttgactaatcagttttcaaaattaaaaacctcttaaatcccttttgaaaagtattaaaatataatttcatatagatatgatgtgcttttccttttactaaagtgaagtttgagaaaaatattttattcagccacctcaaatattagtctgctatgtttctcaaaaatttatgtaaggattacctatatcagaaatacctgtggtgcttgctgaatactcacatactagccattcaactactcaatcagatatctgggaaatagttcagaaatttttttgtttttgtttttgagacagagtcttgctctgttgccaggctggagtgcagtgtcatgatttcagctcactgcaacctctgcctcctgggttcaagtgattcccctgctcagcctcttaagtagctggtactactggcgtgcaccaccacgcccggctaattttttgtattttagtagaaacagggtttcaccatcttggccagaatggtctcgatctcttgacctcgtgatctgcccacttcagcctcccaaagtgctgggattacagacataagccaccgcgcccggccagaaatttgcatttttgataaatgattcaactcattctcatttaagtaaatattttagacatagtttcctaagaaactcagaactgactttaatacattttgaggctgtagtagattggtgacccccacgcacaaagatatgtccacttgaagcctacacatgtgaccgtgtgtgggaaaaaggtctttgcacatgtaattacattgaggatcttgagacgagatgatgctggattactgtgtgggccctaaatccagtaacaagtgtccttataattaaaagaaaagacaaacacaaaggaaacggcaatttgaagacagcagcacaaattgaaatcatgggtctacaagataaggaacaccaaaaagtgccaccagccacgaagagcttgaagagaaacatggaatagagtcatcctcagagcctccagaagtaaccaaccccacagacacctggatttcagacttctgcctccagaatcatgaaagaataaatttctgttgttttaagccaacttatttgtgtatatttgttatggcagttctaggaaatgaataaagtctttcaaaatatatagataatgctcattaataatataactaatagtcggttacatttgttcagcattagtgtgccaggcgcaacgcctaggacaaacaaccayggctgtaagtacatgtctggttaattttaacattaatagtctcttccacttcaatatttcctggatcttgcctaggattccctgccaataacagcctcttccccaaactgctcccttacttattta

SEQ ID NO: 726746 - DNA, 2075 bp, Homo sapiens
tgaaaacaacttgtgtggaaatctctattaaaaaacctctcctgagcttggcatacagaacactattcagggctgccctgattcagtgtacctgagttgcaattatttatttcccagaaatgctataacctttgacctctgtgttaatccccctttttttagttaaaaacaccattttcaattagcaacatggaggacctagaaatacactaagtgtagagaacatctaaacaaaagataagaatatctgcttttaaaacacatcatactacacctgcatactcatacgcacaggcacacatacacaaatacacatgcagcttccttcatatataccacgttgaaccactcctaaaaataaagaaatctccaggttcctttaaatgactttaattctgatatttgaactattcagtctgtagaaatggagtcacatgcttatgggacaaggctggccctgagaaagatccaaatacaggacaagatctgaaataaaagcatgatgatgggagccaatggaaacaggcaaaatagagacagtcccaaattctgtactctaatgcatttgccttttctttcccagtcactgctaaatgctttcaagttttattttgctttctcaaaaaaaaaaaaaaagaattggaagaaaaataattaattttgtaatataatctttcaaatggtttattttgatgaatatttactcaacattttggttgactaatcagttttcaaaattaaaaacctcttaaatcccttttgaaaagtattaaaatataatttcatatagatatgatgtgcttttccttttactaaagtgaagtttgagaaaaatattttattcagccacctcaaatattagtctgctatgtttctcaaaaatttatgtaaggattacctatatcagaaatacctgtggtgcttgctgaatactcacatactagccattcaactactcaatcagatatctgggaaatagttcagaaatttttttgtttttgtttttgagacagagtcttgctctgttgccaggctggagtgcagtgtcatgatttcagctcactgcaacctctgcctcctgggttcaagtgattcccctgctcagcctcttaagtagctggtactactggcgtgcaccaccacgcccggctaattttttgtattttagtagaaacagggtttcaccatcttggccagaatggtctcgatctcttgacctcgtgatctgcccacttcagcctcccaaagtgctgggattacagacataagccaccgcgcccggccagaaatttgcatttttgataaatgattcaactcattctcatttaagtaaatattttagacatagtttcctaagaaactcagaactgactttaatacattttgaggctgtagtagattggtgacccccacgcacaaagatatgtccacttgaagcctacacatgtgaccgtgtgtgggaaaaaggtctttgcacatgtaattacattgaggatcttgagacgagatgatgctggattactgtgtgggccctaaatccagtaacaagtgtccttataattaaaagaaaagacaaacacaaaggaaacggcaatttgaagacagcagcacaaattgaaatcatgggtctacaagataaggaacaccaaaaagtgccaccagccacgaagagcttgaagagaaacatggaatagagtcatcctcagagcctccagaagtaaccaaccccacagacacctggatttcagacttctgcctccagaatcatgaaagaataaatttctgttgttttaagccaacttatttgtgtatatttgttatggcagttctaggaaatgaataaagtctttcaaaatatatagataatgctcattaataatataactaatagtcggttacatttgttcagcattagtgtgccaggcgcaacgcctaggacaaacaaccatggctgtaagtayatgtctggttaattttaacattaatagtctcttccacttcaatatttcctggatcttgcctaggattccctgccaataacagcctcttccccaaactgctcccttacttattta

SEQ ID NO: 726747 - DNA, 669 bp, Homo sapiens
gtctaagatgacactttggacttggacttctgagttaatgctggaataagttaaagctttgcagaactattggaaaggcatgattggttttgaaatgtgaaaaggatgtgcaatttaggaggggccaggggcagaatgatatggtttggttctgtgtccccactcaaatctcatctcaaattgtaattcccacatgttgagggtggtgtctggtgggaggtgattggctcatggtggcagttccccccatgctgttcttgtgatagtgagggaattctcatgacatctgatgatttaaaagtgtcaatttcccctgtgctctctctctctcctgctgccacgtaagacatgccttgcttccccttcaccttctaccatgattgcaagtttcctgaggcttccccagacatgtggaactgtgagtcaattacatctcttttcttcataaattacccagtctcaggcagttctttataacagtgtgagaatggactaatacaagcgtcaagcaaagaaaaacagctctgaaaatgacaagtgtcatagccgctgatgtagagacttgtattcctttgacaagtccctcaktccctttagaaaggcaagataccttgccaatcacataaagctaagataaaagcaaaaattaaatataagttctaggctcaa

SEQ ID NO: 726748 - DNA, 1249 bp, Homo sapiens
ttgtattacaaaatatatacaaaatataaaagattttgactttatttatgtggatttttctttttttggtctcacatgaaccacatgtaagaaggatatttgggtttcaatctcaaatccgttgttatttacttcaatgtaacactgggtgaagtagcctttctgagtctcawtttctccactattaaaatgaagtgattccctccttcgaagattatcagcacaagataggtcaactggggttttaaacttggggtgattttgctccctggggggacatttagcagtgtctggagacactttgggctgtcatggctgggaacggggaaggggctactggcatctagtgggtagatgtcaagatgctgcgaagcatcctaccatacacaggacagtccctcacaacaaataattacctggtcccagtgtcaatagtgccatgttgaaaaagccatcaaacaatgcaggtatgcttttagcatatcacatgacctattttttagtgcttggtacatgacagtaattgataatagcagattcgtttatttccagcctcttacaagatttgaaattgtgtttttccttcatcacatttcttatgtggcagattagatcactggtcagcaagcactgactctgcattctctagctccatgggagaaatatgcactgcccctctccaccaatgtgctttgaccaatcaaatacagacagaatttaccgtgtaccaattctgagcctcatctttaagaggcactttatctttccacttgctctctcacagtcctgccaacaactgtaagaagagtcctctgaagtagctgcctccccttcatctgggccccaaaatggatacaccaggaagagttctacacacatccccaccagccaggccctggagcagttgtgtctgcttggactcagaggtcagagccaagccaagatgaaccaagcctcgatcagccaaaccttaatggatgtgcagacgcatgaacaagaaataaatgctttcagccatatgcctctgagattttgtggttgttatgcagtgataattgaccaataaaccatatgctttttgaccactatttttacacaattttttccacactaagaaagctaagaaaacttaaccccaagacatctttctgaccagaatcaaatctctcatagaggaatgcacaataacagcatcggcattgcctactaagtgctttttttcttcactttgtgttcaagtgtatatatt

SEQ ID NO: 726749 - DNA, 416 bp, Homo sapiens
cttgcgatgaacctctgggatcctggctacagaaagcctcrcatcccccatggacatctaggctgatgtgggtatctgcccagagaataggcacagatgggtcttcagccggtatggaactaggaacctttgtgaacagcacagctccaggagagcatagacaggggcacccctggcccagggtccccatctccctctgagaatgtcttgcctcagctgaccgccatgccaggacttacttccccatgggactggggaacagctattcttcaggccccttgcctgccagcccctcccacggcacctgcctggctgccccacagggttgtgtgcatggtgcagcctccactgcccagcctggatgctttcctgcacctgattatgtttccagcaacctaggaaggctttggatcccc

SEQ ID NO: 726750 - DNA, 416 bp, Homo sapiens
cttgcgatgaacctctgggatcctggctacagaaagcctcgcatcccccatggacatctaggctgatgtgggtatctgcccagagaataggcacagatgggtcttcagccggtatggaactaggaacctttgtgaacagcacagctccaggagagcatagacaggggcrcccctggcccagggtccccatctccctctgagaatgtcttgcctcagctgaccgccatgccaggacttacttccccatgggactggggaacagctattcttcaggccccttgcctgccagcccctcccacggcacctgcctggctgccccacagggttgtgtgcatggtgcagcctccactgcccagcctggatgctttcctgcacctgattatgtttccagcaacctaggaaggctttggatcccc

SEQ ID NO: 726751 - DNA, 416 bp, Homo sapiens
cttgcgatgaacctctgggatcctggctacagaaagcctcgcatcccccatggacatctaggctgatgtgggtatctgcccagagaataggcacagatgggtcttcagccggtatggaactaggaacctttgtgaacagcacagctccaggagagcatagacaggggcacccctggcccagggtccccatctccctctgagaatgtyttgcctcagctgaccgccatgccaggacttacttccccatgggactggggaacagctattcttcaggccccttgcctgccagcccctcccacggcacctgcctggctgccccacagggttgtgtgcatggtgcagcctccactgcccagcctggatgctttcctgcacctgattatgtttccagcaacctaggaaggctttggatcccc

SEQ ID NO: 726752 - DNA, 416 bp, Homo sapiens
cttgcgatgaacctctgggatcctggctacagaaagcctcgcatcccccatggacatctaggctgatgtgggtatctgcccagagaataggcacagatgggtcttcagccggtatggaactaggaacctttgtgaacagcacagctccaggagagcatagacaggggcacccctggcccagggtccccatctccctctgagaatgtcttgcctcagctgaccgccatgccaggacttacttccccatgggactggggaacagctattcttcaggccccttgcctgccagcccctcccacggcacctgcctggctgccccacagggttgtgtgcatggtgcagcctccactgcccagcctggatgctttcctgcacstgattatgtttccagcaacctaggaaggctttggatcccc

SEQ ID NO: 726753 - DNA, 1037 bp, Homo sapiens
ggacatgaagcaggcatttggatttactactgaaaaaaacagactctttgaaattcaataccttgcccaaggagtcatgcactgaaaggggtggacccatgattcagccctgagttctgctgatgtaacccaaattcataccttctccaccttcttcatgtaccacattacagaaaaaagggtcaagaacctccggctaaagaagccctaaaacataagcaaatggaagtatcaaatgatmgtttccacgatttgagatgatatcacgtggggaatttgatcaccctttagaagagggaatctactgccttttgacaaaggtccatcagataagaaacttaccacagtccaataaaatttgcagaccagcactggcactcggttctactatcattgggtgctaacaattagttcacagcctgtattagtccattttcacactgctaataaagacatacccaagactggggaatttataaagaaaaagaagtttaatggactcacagttccacgtggctggggagacctcacaataatggtggaaggtgaaaggcacatcttacatggtggcagacaagagagagaatgagaaccaagagaaaggggaaaccccggataaaaccatcagatctcgtaagactcattcactaccatgagaacagtatgggggaaacctcccccatgattcatttgtctcccaacaggtccctcccacaacaggagggaattatgggagctaaaattcaagatgagatttgggtggggacacagccaaaccatatcacatcccatatgtctgagccataaaaataaaataatagcaggaatgggaatgcagggtggtgatgcctgctgctgtgcctgaggatgagtgagtgaatgcaggggcagcatgccactgcagatgctctagaacagtgtttcctagactttctcctgggcagcttcccaaagtgccttttcagacatgtttttatttttgtcttcattttgagacagggtctcactctatggcccaggctggactgcagtggcat

SEQ ID NO: 726754 - DNA, 1738 bp, Homo sapiens
ttgtatcaatgttgtactacataaaaggaaaaacataagtttctatttgacttttgtctaagttaggaagttttttaatgtatggggaccagcttaatccatgcaaataatacctagtttattctttcatactgttcatcagtcatttttaatttaggtatttttcattatattaataatgaaacttttaacagaggttttccagtaaaacagattataataaactatataattattgatgataaaatgataaattgataaaatgataaattgttttgaaaaccacatagaaaataaaacagtttctttaaatgtagcagaattatgaaaaattaatttttttctgaacttattggaaagtcattcatttaattgaaaatcattttcattaatttggattttaactgtttatgatactaagacattttatcttaattcaagctaattttagatggtactaccactgctaactytagcatttaaaaatatacacaaagctataggcccacttaattaagaaaatttctctattttcagagaggagaaactttttaagaagctagtaacaacatttcattagtttctataattcagttccaacattttggaatttaaacatttaaaaaatctaggatatttttagaataatcataagctattatcatcattaaagctctagaattaaagaaatgaggaagtagtatggcaaagattaagatatcttaaaagtttttccttgattagttgtgtaagacattttttagtgatattatagaagttcacagaatcagttttcccagctagctactgggcttggatggtgactggcactaattaatagatgtagcatgaaaatgggattatgggctctatacacccagttctttttaagcaaaagagatgactttaaatgtgttctattttatatgtgaaaatggcagtaacctatgtctgtggggcatgtgttatgatattctgctgacagtggtgggaatgaatttaatacaataattcagccacatctcatgccaagatcccaggtatatccaagttagccagggttaggggctgctagctatatatatgagttagagaaaaactaaatgccttacttgggtttgaaccttttcccccaatctgatgttataaccaaccagaatctttataaatatagtacttattctgaatagtagagccaaaggagaaaaattgtagctatggccatataggtataccatgcctacagccaggcttagtcttcctggcataacttctgaaagtagaaacatatcacataggagagctcagtaccaaagtatttcatgtttgaggagctattccaggcatgaataatgcctgccagcctatcaacaatataagtgcttttggaagagtttgacaaaatctaaaaaatattcttaaacaaatgataagaaaatacaaatagaatatataggatatatatgtatatttgcatatatatgcaaatatgtacataatatattcatatatcaatgtaatatttatctattaaatatgcagctaaaacataacagctagatataaaaattatttaacttgccacaactcttatgctagaagtacttctcagtaacagattttatggctattgttggtcaatgtgtaaaacaaataaggataatacaaattttggaaaccattttagatagaatatttatttaaagtaaactctaagttactttgaaaacagatttca

SEQ ID NO: 726755 - DNA, 1738 bp, Homo sapiens
ttgtatcaatgttgtactacataaaaggaaaaacataagtttctatttgacttttgtctaagttaggaagttttttaatgtatggggaccagcttaatccatgcaaataatacctagtttattctttcatactgttcatcagtcatttttaatttaggtatttttcattatattaataatgaaacttttaacagaggttttccagtaaaacagattataataaactatataattattgatgataaaatgataaattgataaaatgataaattgttttgaaaaccacatagaaaataaaacagtttctttaaatgtagcagaattatgaaaaattaatttttttctgaacttattggaaagtcattcatttaattgaaaatcattttcattaatttggattttaactgtttatgatactaagacattttatcttaattcaagctaattttagatggtactaccactgctaactttagcatttaaaaatatacacaaagctataggcccacttaattaagaaaatttctctattttcagagaggagaaactttttaaraagctagtaacaacatttcattagtttctataattcagttccaacattttggaatttaaacatttaaaaaatctaggatatttttagaataatcataagctattatcatcattaaagctctagaattaaagaaatgaggaagtagtatggcaaagattaagatatcttaaaagtttttccttgattagttgtgtaagacattttttagtgatattatagaagttcacagaatcagttttcccagctagctactgggcttggatggtgactggcactaattaatagatgtagcatgaaaatgggattatgggctctatacacccagttctttttaagcaaaagagatgactttaaatgtgttctattttatatgtgaaaatggcagtaacctatgtctgtggggcatgtgttatgatattctgctgacagtggtgggaatgaatttaatacaataattcagccacatctcatgccaagatcccaggtatatccaagttagccagggttaggggctgctagctatatatatgagttagagaaaaactaaatgccttacttgggtttgaaccttttcccccaatctgatgttataaccaaccagaatctttataaatatagtacttattctgaatagtagagccaaaggagaaaaattgtagctatggccatataggtataccatgcctacagccaggcttagtcttcctggcataacttctgaaagtagaaacatatcacataggagagctcagtaccaaagtatttcatgtttgaggagctattccaggcatgaataatgcctgccagcctatcaacaatataagtgcttttggaagagtttgacaaaatctaaaaaatattcttaaacaaatgataagaaaatacaaatagaatatataggatatatatgtatatttgcatatatatgcaaatatgtacataatatattcatatatcaatgtaatatttatctattaaatatgcagctaaaacataacagctagatataaaaattatttaacttgccacaactcttatgctagaagtacttctcagtaacagattttatggctattgttggtcaatgtgtaaaacaaataaggataatacaaattttggaaaccattttagatagaatatttatttaaagtaaactctaagttactttgaaaacagatttca

SEQ ID NO: 726756 - DNA, 1738 bp, Homo sapiens
ttgtatcaatgttgtactacataaaaggaaaaacataagtttctatttgacttttgtctaagttaggaagttttttaatgtatggggaccagcttaatccatgcaaataatacctagtttattctttcatactgttcatcagtcatttttaatttaggtatttttcattatattaataatgaaacttttaacagaggttttccagtaaaacagattataataaactatataattattgatgataaaatgataaattgataaaatgataaattgttttgaaaaccacatagaaaataaaacagtttctttaaatgtagcagaattatgaaaaattaatttttttctgaacttattggaaagtcattcatttaattgaaaatcattttcattaatttggattttaactgtttatgatactaagacattttatcttaattcaagctaattttagatggtactaccactgctaactttagcatttaaaaatatacacaaagctataggcccacttaattaagaaaatttctctattttcagagaggagaaactttttaagaagctagtaacaacatttcattagtttctataattcagttccaacattttggaatttaaacatttaaaaaatctaggatatttttagaataatcataagctattatcatcattaaagctctagaattaaagaaatgaggaagtagtatggcaaagattaagatatcttaaaagtttttccttgattagttgtgtaagacattttttagtgatattatagaagttcacagaatcagttttcccagctagctactgggcttggatggtgactggcactaattaatagatgtagcatgaaaatgggattatgggctctatacacccagttctttttaagcaaaagagatgactttaaatgtgttctattttatatgtgaaaatggcagtaacctatgtctgtggggcatgtgttatgatattctgctgacagtggtgggaatgaatttaatacaataattcagccacatctcatgccaagatcccaggtatatccaagttagccagggttaggggctgctagctatatatatgagttagagaaaaactaaatgccttacttgggtttgaaccttttcccccaatctgatgttataaccaaccagaatctttataaatatagtacttattctgaatagtagagccaaaggagaaaaattgtagctatggccatataggtataccatgcctacagccaggcttagtcttcctggcataacttctgaaagtagaaacatatcacataggagagctcagtaccaaagtatttcatgtttgaggagctattccaggcatgaataatgcctgccagcctatcaacaatataagtgcttttggaagagtttgacaaaatctaaaaaatattcttaaacaaatgataagaaaatacaaatagaatatataggatatatatgtatatttgcatatatatgcaaatatgtacataatatattcatatatcaatgtaatatttatctattaaatatgcagctaaaacataacagctagatataaaaattatttaacttgccacaactcttatgctagaagtacttctcagtaacagattttatggctattgttggtcaatgtgtaaaacaaatraggataatacaaattttggaaaccattttagatagaatatttatttaaagtaaactctaagttactttgaaaacagatttca

SEQ ID NO: 726757 - DNA, 1041 bp, Homo sapiens
acttttcttagatatttggggacacaacctatctgaaccacttttttattcatgtgacagtaactcctatgttaataggggtaaaaatttctaacaccatgtgaatgcacatgaaaattttctgagatcctcmacccttttttctgtcttttccagagccatccttaaaaacctcaagtacaatcccatcattctcaaaaacattctgttcatttgtctttatatggagagtatcagatcagatcttccacctggcttgttacacaagtttaatatcctgtcactttgggctatttaaaccccagatccaaggcagcagatatccccagaggccttgaagacactagttcttcagtgtcttttcttgtttctaaatctgctttatttttgtttctcatctccaatgacttttaaaatttccactgaggtcaactatatgttttgtttttattttatatttttttccagaattaaatatataatataataagagtatttgcttagacaataatttccaattatttaaaaagaactactcaataatatttcattttaaaatagatgaatgacatgttttctgggaattttgtcagggagggtcttgctggatcaatgtttgtgaagaaattgttgtaattaagaaaatctgtaagagttatcatattaggttgaataatataatattgccatttttgaatccacaaaaagttgaatttcagcaatttcatatgatttaatttaagtaccttttatttacatattgaaatgcaatagcatcaaatcaattgaattattaatagaatgctaaaacaataagttggttatttgttctgttatacattacttttcagtacatgcaataaatttagaaatcacataaatatagtattgtgatctaatcagatgacagattaacctttaccttttttctagtgcccctctctctaccccaggagatctatcataaacactaaataggcatgcttttgtgtttttttctgtatatctatacacacacacacacacacacacacacacaca

SEQ ID NO: 726758 - DNA, 2933 bp, Homo sapiens
  misc_feature 2125, 2126, 2127, 2128, 2129, 2130, 2131, 2132, 2133, 2134,2135, 2136, 2137, 2138, 2139, 2140, 2141, 2142, 2143, 2144,2145, 2146, 2147, 2148, 2149, 2150, 2151, 2152, 2153, 2154,2155, 2156, 2157, 2158, 2159, 2160, 2161, 2162, 2163: n = A,T,C or G
  misc_feature 2164, 2165, 2166, 2167, 2168, 2169, 2170, 2171, 2172, 2173,2174, 2175, 2176, 2177, 2178, 2179, 2180, 2181, 2182, 2183,2184, 2185, 2186, 2187, 2188, 2189, 2190, 2191, 2192, 2193,2194, 2195, 2196, 2197, 2198, 2199, 2200, 2201, 2202: n = A,T,C or G
  misc_feature 2203, 2204, 2205, 2206, 2207, 2208, 2209, 2210, 2211, 2212,2213, 2214, 2215, 2216, 2217, 2218, 2219, 2220, 2221, 2222,2223, 2224: n = A,T,C or G
aattaaatcactagactggtttgaatctgcagcaatactcagccaacaccctgtaaaattccagttgtaacacaatttgctagatctcaaagtaatttcaaagagatggcagaaacttctcttaaatgactttgttaattcttaagaacagctcagttcaccattatctgagtacttgtttatacctggccttatgctgagagtaggtataaaataagtaaaaacagactcttcccccaaggaagtcccagttgaataaaagtcaagaggctgaccctgcctgctcaggtaaaattcaagagggattgagacaaaattaatcttgagaaagaaactacccaaagtcacagaactaacttaaaccacactttgagtcccaaaatagcaaatttgttcccacagctccagcataaacaaacttagccaccagaattcctactttctagtatcagactagggtcctgatttattgtgttctctaactgcaaacaactctgttagtaaaaagttaccacttagactttgctatgccagccactctacacagattatctctaatttttacaactttgaaacattgctgttactattaccattttacaaacaaaactgaaattcagaaaagttatttgctaagaaaatctggagggtttaaacttcggaacaatatgttttaactgctggttatctctcagcaaacttgggacatgaccaaaatgagagactctctaaccacacttggatcctcctgcttaactagaaatcaagagactccactcctttctgtagtggagcaatggcacagagatcactgtggagattccatagacaagcctgctttctcagctgaaccaaaaattaaatgagattcttaacaatatgacctactgattctacaaccacgattacactcctaaagccccatcacaacttccctgcctttaggcacctgtctaataagttgtttcttctttgctgactctggcatatcatgaacgtgttgaaacagctctctcagtgcctcttccgtatggtgctgggtctcctcctggtgagggcaggaatctacccggttccgtttctgagactttgccagctgaaaggacttagtatgacatgaagctatgaggtcaaggtcatcctaaggaaaatttaaaagaagagtaaattaatatatcctgccaactttgttttggggttcttacaaaaacctggaacaaaaaaagggagagtggggacatggtatactcctatactcaggaacaagaaaaatcttaacactattatcagataacaaggaacctattaatataggttatattaatagcccactcccatgacctgcccagagaacctaagtgcatttggaatactgccaccaagagttatatttgtataagagtttagtttttaaagcatcttttaatttcattaatttattcaacaattcaacaaggtaagcatggaaagtatcatgattcccatctgacagaggaaaaaaactgaggttaaactgtaagtttaaagtcatctggatactaaagtgacagacccacctgggagcccaagggctctgactcttggctaatactccttcccacacatggcaacttaatacgacaactagacagcagtgctagaggaacaaaaacagctctctaacaaaaaccacactccagttaaactagttgaaaccaaatactgttttcctggtaacaatgaatatttgctgaataagagggagaaacaaataggagcagaaaaaattgcacaagcggacagcttaagtttctaaccaagacaggatgaacagaacttgaaaattttaagcaytcaaaaagtgcttgtaaaatttttaacttctcactttttttttttttttttcagagcaggagtggaagtttatttaaaaaggcttagaacaggaaagaaaggaaagtatgcttggaagagacccaagcaggcacataaaggtcaagtgcctaacttcttttttcatttttttgagatggggtctcactctgtcacccagactggagtacagtgtcaccatcttggctcactgcaacctccgcctcctgagctcaagtgatccgcccacctcagcctcccgagtagctgagannnnnnnnnnnnnnnnnnnnnnnnnnnnnnnnnnnnnnnnnnnnnnnnnnnnnnnnnnnnnnnnnnnnnnnnnnnnnnnnnnnnnnnnnnnnnnnnnnnnttcttggtagagactgggtttggccatgttgcccaagctggtctcaaactcctgatctcaagtgatccgcctaccttggcctctgaaagtgctaggattacaggcatgagccaccacactcggccataacttcttacttttaaaactcaatactcatatctaggctggatgtggtggatcacgcctgtaatcccagcactttgggaggctgaggcagtcggactacttgagcccaggagtttgagacctgggcaacatggtgaaaccccatctctaccaaaaatacaaaaattagcgggcatggtggtgcatgcctgtagtccccagctactcaggaggctgaggtgagagaaccagggagccaagatcatgccactgcactccagcctacccgacagagcgaaaccctatctcaaaaaaaaaaaaaaaaaaaaaatcatcattatcatatctgatcttgtgaataagcattatacatttccctatctatctaagctcatgtggtctcaagtcttttagccatttgatagagttttgccataccaatgaacctaaaataggaatgaattacataaaattgtcctttcgttcctataaaatatgtaacacatttgctattcacagattatttctatcagaaggactttatgaaaaaccttgaaacacagggtctgtgtcatcactcttacacagaggacaccatctatca

SEQ ID NO: 726759 - DNA, 592 bp, Homo sapiens
cgaagtataagtgcagctatccttattttacagatggggaaactgaggcacagagaggttaagtaacttgctcagtatcacacacttagaaagaagaagagccaggacttgaacctaggcagtcaggctccagagtccagcccctggcaatcaccattctactttctgtttccgtgaatttgaccgtgctgggtaccttggataagtgagatcatacaatatttgtccttttgcgactggcttatttcacgaggcataatgtcatcaagtttcatccacattgtggcatatgtcagaatgtccttcctttttaaggctgaataatattccacattaaataccacgtttgttatccatttatccgtggatgaacactgaggctgcttccaccttttggctgttgtgaataatacttccatgaatgaaggcgtacaagtatctgtttgagtccctgtacattcctcttcggtatgtacccagaagtggaattgctggatcatgtggygattctatgtttaatttttgagaaatcgccataccagctagactttttaataccagtaaatccctgtatctgagcacatgcttgatt

SEQ ID NO: 726760 - DNA, 1037 bp, Homo sapiens
gggtgaggcccaagcatcaaatttatcttagaagccccgtagttaattttgtgtatggccgagatggagagtcaccattgtatgcgtgcataaataaatagaatattgatgcttaaaaggtwgtgcattgtatcttatgaaaagccgttagtttttaagggtcttccaagcttatatttaaagttcttttatctattaagacagttattaattttattcacatgaataagtgataaaccaaatgcctttatttaaacattatctaaatctagcatcagattgcataacagagacagccttatcccatgtggctgaaaggagagtggcttagaagctttcacaattcccaaacttcataaagatttgaaggcacatgaatcaaaatagaacctacatgcctagtaaaaattctcattattaaatattatcagtctgaattaaaagtctgaaattttcctgtttcttcattatccaatagcagtagcctcccagtgagtgcagacactttattggttttgacaaaatatatttaatattacactcaaaatattcaactgcatgaatgaaatttttgtattgcaaacattcttttataaagaccacagaaaataagagggaaatggacatcccatagaagcgctaaggccaaggactgagaccttgggcaaatcccactgtcaatctatgtccagtcatgactggacaacatatgcaaggcagcagcactggcactgccaatattgactttcccatcccatctctgagagataatcgccctttaaatcaaaacctacaaggtgtgagaactgcaggaactcaccataatctaagaacttggttcttttacatcccaagggcatcatacatttccctgaaatgacctttactattccatgtcactttaaccagttctcaaaagtgaaaaaaaaaaaaacaaaaacaaaacaattttcagattagaagagaagaggctaagaagcatgtaattctgctcataatggatttttacaggcctcactggagttaattactgaaaa

SEQ ID NO: 726761 - DNA, 433 bp, Homo sapiens
atatatttaggtatcaatataaatatatacccgtatatttttatgtatcaatataaatatatacaggtatatatttatgtatcaatataaatatatacacgtatatatttatgtatcaatataaatatagacacgtatatatttatgtatcaatataaatatatacacgtatatatttatgtatcaatataaatatatacacgtatatatttatgtatcaatataaatatatacacgtatatatttatgtatcaatataaatatatacacgtatatatttatgtatcaatataaatatatacacgtatatatttatgtatcaatataaatatatacacgtatatatttatgtatcaatataaatatatacacgtatatatttatgtatcaatataaatatatacatatatatttmtatatcaatatcaagata

SEQ ID NO: 726762 - DNA, 433 bp, Homo sapiens
atatatttaggtatcaatataaatatatacccgtatatttttatgtatcaatataaatatatacaggtatatatttatgtatcaatataaatatatacacgtatatatttatgtatcaatataaatatagacacgtatatatttatgtatcaatataaatatatacacgtatatatttatgtatcaatataaatatatacacgtatatatttatgtatcaatataaatatatacacgtatatatttatgtatcaatataaatatatacacgtatatatttatgtatcaatataaatatatacacgtatatatttatgtatcaatataaatatatacacgtatatatttatgtatcaatataaatatatacacgtatatatttatgtatcaatataaatatatacatatatatttctrtatcaatatcaagata

SEQ ID NO: 726763 - DNA, 433 bp, Homo sapiens
atatatttaggtatcaatataaatatatacccgtatatttttatgtatcaatataaatatatacaggtatatatttatgtatcaatataaatatatacacgtatatatttatgtatcaatataaatatagacacgtatatatttatgtatcaatataaatatatacacgtatatatttatgtatcaatataaatatatacacgtatatatttatgtatcaatataaatatatacacgtatatatttatgtatcaatataaatatatacacgtatatatttatgtatcaatataaatatatacacgtatatatttatgtatcaatataaatatatacacgtatatatttatgtatcaatataaatatatacacgtatatatttatgtatcaatataaatatatacatatatatttctatatcaatatmaagata

SEQ ID NO: 726764 - DNA, 433 bp, Homo sapiens
atatatttaggtatcaatataaatatatacccgtatatttttatgtatcaatataaatatatacaggtatatatttatgtatcaatataaatatatacacgtatatatttatgtatcaatataaatatagacacgtatatatttatgtatcaatataaatatatacacgtatatatttatgtatcaatataaatatatacacgtatatatttatgtatcaatataaatatatacacgtatatatttatgtatcaatataaatatatacacgtatatatttatgtatcaatataaatatatacacgtatatatttatgtatcaatataaatatatacacgtatatatttatgtatcaatataaatatatacacgtatatatttatgtatcaatataaatatatacatatatatttctatatcaatatcaakata

SEQ ID NO: 726765 - DNA, 1197 bp, Homo sapiens
tgagcttccaattccaaataaaggtaataatgtaatttatttatctcaaagcctcagtgaagtgggggtataaatgtaaaagagctttatttttgtccaatcaccacttttagcactgatttgggcaaatctgctgttctcatttgagagctaaaattcttatmatttcttgtccctgtgttaaaacagtactgagatcaggaataattctctctccctgtgttcaacaatactgagaccaagcaaaataacatggctgcttgatctagaagaggactgttctgaaagagagtactataaaccagttctagaaggtgagctgtcaactaaacagtttacagattaagactagcaacttcctcagaggattcacttcaagcccctaaccttgctttaaactgatcaaagctattatgtcacactgcccaagctcatccagttactcccacccctgccttgcaatatctaccttaaaacaaccaaccaaggtcccagcaccttttcctcattccctcactttaaggtaccactaagactctgcagatctaataaacttcttttcacttgatctacagatttttctgttttttctttaagagggtttatggtagacacatcccttaacaatatcttcaacaggtttcataatattctgagcacactggaattaaaacacatacatatctgttcaggcttacaaagttcaatttatatcctctcgaaagcactcgcccaatcttacttcaccctcgatgggtggctcaaggaacttggaatggggaggtagcgtggtcttctctttaaatgggagtgggacaggaggtggaggggatatttggtttgagatgaccctacttcctttggagacctaacacttccagagaaaagggatcttcttgggtaactggttacttaattgtcagcagtgtggagggctgctttttcatttggctgctctggctggttccatatgttcttaggtcatagtgagcatcatgctggcctctccatcactgatggctcactcctttttttttttttttttgagatgaagtgttgccctgtcgcccaggctgaagtgcagtggcatgatcttggctaactgcaacctccccctcccaggatcaagtgattcttctccttcagtctcctaagtagctgggattacaggcacccgccccatgcccagctaatttt

SEQ ID NO: 726766 - DNA, 1197 bp, Homo sapiens
tgagcttccaattccaaataaaggtaataatgtaatttatttatctcaaagcctcagtgaagtgggggtataaatgtaaaagagctttatttttgtccaatcaccacttttagcactgatttgggcaaatctgctgttctcatttgagagctaaaattcttatcatttcttgtccctgtgttaaaacagtactgagatcaggaataattctctctccctgtgttcaacaatactgagaccaagcaaaataacatggctgcttgatctagaagaggactgttctgaaagagagtactataaaccagttctagaaggtgagctgtcaactaaacagtttacagattaagactagcaacttcctcagaggattcacttcaagcccctaaccttgctttaaactgatcaaagctattatgtcacactgcccaagctcatccagttactcccacccctgccttgcaatatctaccttaaaacaaccaaccaaggtcccagcaccttttcctcattccctcactttaaggtaccactaagactctgcagatctaataaacttcttttcacttgatctacagatttttctgttttttctttaagagggtttatggtagacacatcccttaacaatatcttcaacaggtttcataatattctgagcacactggaattaaaacacatacatatctgttcaggcttacaaagttcaatttatatcctctcgaaagcactcgcccaatcttacttcaccctcgatgggtggctcaaggaacttggaatggggaggtagcgtggtcttctctttaaatgggagtgggacaggaggtggaggggatatttggtttgagatgaccctacttcctttggagacctaacacttccagrgaaaagggatcttcttgggtaactggttacttaattgtcagcagtgtggagggctgctttttcatttggctgctctggctggttccatatgttcttaggtcatagtgagcatcatgctggcctctccatcactgatggctcactcctttttttttttttttttgagatgaagtgttgccctgtcgcccaggctgaagtgcagtggcatgatcttggctaactgcaacctccccctcccaggatcaagtgattcttctccttcagtctcctaagtagctgggattacaggcacccgccccatgcccagctaatttt

SEQ ID NO: 726767 - DNA, 634 bp, Homo sapiens
ccaatttcctgccctctttgctttackttccaattgaatgagaactttctcatggaaaatatatgattgttgtatactaggctattggagcacagctggaaaatatagtaccactatcaatgattaataatgctcttaactctccttgcagctactgaagtaagaagataccagtcctcgtcccctgacacacacagaaagtcactgatggcattcagatacaaacagagcaaagggatcaatggtccacggaccctgctctttcccggggtgctattccagtggccagaggaacctcccatcacttcagacttttgttttatttgttgttgtcgttatttttggtcttctatcattgactcatagctctctcacacattttaatgtattcgctgcatcagacccagaaaaacatttgcctggtgtgtgaaagagcctctgattacagaatgaactttgtctctccataatttgaagaagttaaggaaggtccccacccaaatgttatgtcctattttgatgctcaaaatcttagtaaaatcacagtgcaaaggaaagagcactgactttggcatcacacagatgaaacttggctctgctattctcttgtattattgtgggtatggcatctctg

SEQ ID NO: 726768 - DNA, 869 bp, Homo sapiens
tgcaatgaacatttgttctgcaaatgttctatcagcacctactatatgtcaggcacataaaaacaaatggcatagacactgttgtcaagaagcctgcaatacagtgaagaatattatgcactttgtaatattcaatgtgacatggaattaaagagaatggagctcaggctgggtgcggtggctcactccagtagtcccagcattttgggaggctgagatgggcagatcacttgagcccaggagttcgagaccagcctgggtaacacggcaagacccgatctccacagaaaatataaaaattagcatgcacctgtagtcccagctactcaagaggctgaggtgggaggattgcttgagcctaggaggttgaggctgcaataaaccaagatggcaccactgcactccagcctgggtaacatagtaagactttgtctttaaaaaaaaaaaaaaaaaaaaaaaaaaaaacccagctcattggacttaaaggggagagaaggaaaaaaaaaaaaaaacaacaccaacaacaacaaaaaacttcactgagagagaatgctggagccgaccctgaggaagagtagttagttgaccagtagacagcaggacaagaaggtagccmgttccaataataagagcctggagcaaaagcttcatgaaagctggtgaggactggaactgtgagaattgccagaaaatacagcaagcataatagtgtggaagttgggagtggtttgtgaagagaaaaatcctagtcaggcaagctggcagaagagtccaaaacaaaggaaaaactaagctcttttaagtggtaagaaaatgttttttaaaagggggagagaagaaattcatttcttgtctgtgagctctaacta

SEQ ID NO: 726769 - DNA, 2447 bp, Homo sapiens
ggtggctcacacctgtaatcccagcactttgggaggccgaggcgggagaatcacgaggtcaggagatcaagaccatcctggctaacacagtgaaaccccatctctactaaaaatacaaaaaattaaccaggcgtggtggcgggcgcctgtaatcccagctactcgggaggctgaggcaggagaatggcgtgaacccaggaggcggaggttgcagtgagctgagatcatgccactgcactccagcctgggtgacagagcgagactcggtctccaaaaaaagaaaaaaaaacaaagaaagataaataagctaagttaaaataaaagacataattagcagaatctagtagaataaataaaaaatatgcaaatataacattactggtattatcattagatcaaagtgatatagaaaatatatgtatggccaggaactgtggctcacacctgtaatcccagcacttggggaggctgagactggtggatcgcttaaggtcaggagttcaaggccagcctggccaacatggcaaaaccccacctctactaaaaatacaaaaaaaattagctgggcatggtggcgtacatgtaatcacagctatttgggaagttgaggcatgagaattgcctgaacccaggtggtggaggttgcaatgagccatgatggtgccactgcactccagccagggtgacagagggagactccatctcaaaaaaataaataaataaaayacacacacacacacacacacacacacacacacacatatgcatccatgtaatagtgaggttaagttcctcataaagtactaaaattcaaactcaacataaacttcctgtttgtagtgctcaaagtcacatactgaataagcatttttaaattcaaatctaattttcttctctaatgttggggtgacatcttaccagtcttactcctacacaggaaattgtgtaggagtcacacatttctgaatgtaatacaaacaacaggtacctgaaggtgctgcagagtgaacagaattagacagacctttgtggggtgcacacactgagaggagaggaggtttacaaattgatttcatgttgtcattggcttttaggtttgagccaagagcattcactgtggggtgggagacgaagagggtaccattggaaaaaccactatcttttggacctgcctacccatggcctctaaagaaagtagaggaatcccataagagaaagggacaatgaggggattacctaattctctgaccaaacacacacgggagactcaaagctagttagctatatatattcacaggcgtttaccttttcaaaaatgttataaactacacgttttaaagtatatttaaaagcaatgaatacttgctgaaaaaaatctaaaattacagaaatagatacataaaataaagataattttcctataatttgatttattccaattgtctgagaaattaattaaaattaagaattcaaggtatggaagccatggtatatacttcctttctttgctaatcccaagaaactggaaaaagtgttgtttgtaacttggctttcactatccagttaaatgtgtttgctgcttagcttcatgatcacttaagacaattcatgctcctctctttaacacttaacagaaaatttaaactttttacatactcagtagattgggcctatagaattactaatcctaaggaagtgttttcctgagcagaagtaactgtggagagcaacataattgatatagtcaaggacaagaaatttgagaaaaggttttctgagtattcaaattgaatatctttttattttaacttttattttttgtagtaacaaggtcttgttcttttgctcaggctggtctcaaactcttgatttcaagcaatcctcctgccttggcttcccaaagtgctgagattacagtcatgagccaccatgcctggcttaattttatttttatattggtaaattttttatttgtcagcagacttcttttctaaaatttttttaaggaccatagttaagcctcacaatctagtgggttaactatgaatataagaatacagtatgtatagtatatttccaactattatataaattaaagcaaaatgattacatgaaaagcatctaagcgataaattattgattgtaatggatggcacactaacgttaaagaagtatgaattaactttattaaaaaataataagtgtcagtaattctgaattctgtttaaaacttatttgtttccaagttctattatggtgtttcaggtgaagtctacccgaaaccaaaatatatttttcttccactgctagaattgtccatttcaataattccgtttgatcttttaaaagagagcattgtttgaggtggctgttcgttggctctctgacaaatggcccgtgtccatacggagcaataaatggcaaaatatctgcctgttcattttcct

SEQ ID NO: 726770 - DNA, 2447 bp, Homo sapiens
ggtggctcacacctgtaatcccagcactttgggaggccgaggcgggagaatcacgaggtcaggagatcaagaccatcctggctaacacagtgaaaccccatctctactaaaaatacaaaaaattaaccaggcgtggtggcgggcgcctgtaatcccagctactcgggaggctgaggcaggagaatggcgtgaacccaggaggcggaggttgcagtgagctgagatcatgccactgcactccagcctgggtgacagagcgagactcggtctccaaaaaaagaaaaaaaaacaaagaaagataaataagctaagttaaaataaaagacataattagcagaatctagtagaataaataaaaaatatgcaaatataacattactggtattatcattagatcaaagtgatatagaaaatatatgtatggccaggaactgtggctcacacctgtaatcccagcacttggggaggctgagactggtggatcgcttaaggtcaggagttcaaggccagcctggccaacatggcaaaaccccacctctactaaaaatacaaaaaaaattagctgggcatggtggcgtacatgtaatcacagctatttgggaagttgaggcatgagaattgcctgaacccaggtggtggaggttgcaatgagccatgatggtgccactgcactccagccagggtgacagagggagactccatctcaaaaaaataaataaataaaatacacacacacacacacacacacacacacacacacatatgcatccatgtaatagtgaggttaagttcctcataaagtactaaaattcaaactcaacataaacttcctgtttgtagtgctcaaagtcacatactgaataagcatttttaaattcaaatctaattttcttctctaatgttggggtgacatcttaccagtcttactcctacacaggaaattgtgtaggagtcacacatttctgaatgtaatacaaacaacaggtacctgaaggtgctgcagagtgaacagaattagacagacctttgtggggtgcacacactgagaggagaggaggtttacaaattgatttcatgttgtcattggcttttaggtttgagccaagagcattcactgtggggtgggagacgaagagggtaccattggaaaarccactatcttttggacctgcctacccatggcctctaaagaaagtagaggaatcccataagagaaagggacaatgaggggattacctaattctctgaccaaacacacacgggagactcaaagctagttagctatatatattcacaggcgtttaccttttcaaaaatgttataaactacacgttttaaagtatatttaaaagcaatgaatacttgctgaaaaaaatctaaaattacagaaatagatacataaaataaagataattttcctataatttgatttattccaattgtctgagaaattaattaaaattaagaattcaaggtatggaagccatggtatatacttcctttctttgctaatcccaagaaactggaaaaagtgttgtttgtaacttggctttcactatccagttaaatgtgtttgctgcttagcttcatgatcacttaagacaattcatgctcctctctttaacacttaacagaaaatttaaactttttacatactcagtagattgggcctatagaattactaatcctaaggaagtgttttcctgagcagaagtaactgtggagagcaacataattgatatagtcaaggacaagaaatttgagaaaaggttttctgagtattcaaattgaatatctttttattttaacttttattttttgtagtaacaaggtcttgttcttttgctcaggctggtctcaaactcttgatttcaagcaatcctcctgccttggcttcccaaagtgctgagattacagtcatgagccaccatgcctggcttaattttatttttatattggtaaattttttatttgtcagcagacttcttttctaaaatttttttaaggaccatagttaagcctcacaatctagtgggttaactatgaatataagaatacagtatgtatagtatatttccaactattatataaattaaagcaaaatgattacatgaaaagcatctaagcgataaattattgattgtaatggatggcacactaacgttaaagaagtatgaattaactttattaaaaaataataagtgtcagtaattctgaattctgtttaaaacttatttgtttccaagttctattatggtgtttcaggtgaagtctacccgaaaccaaaatatatttttcttccactgctagaattgtccatttcaataattccgtttgatcttttaaaagagagcattgtttgaggtggctgttcgttggctctctgacaaatggcccgtgtccatacggagcaataaatggcaaaatatctgcctgttcattttcct

SEQ ID NO: 726771 - DNA, 2447 bp, Homo sapiens
ggtggctcacacctgtaatcccagcactttgggaggccgaggcgggagaatcacgaggtcaggagatcaagaccatcctggctaacacagtgaaaccccatctctactaaaaatacaaaaaattaaccaggcgtggtggcgggcgcctgtaatcccagctactcgggaggctgaggcaggagaatggcgtgaacccaggaggcggaggttgcagtgagctgagatcatgccactgcactccagcctgggtgacagagcgagactcggtctccaaaaaaagaaaaaaaaacaaagaaagataaataagctaagttaaaataaaagacataattagcagaatctagtagaataaataaaaaatatgcaaatataacattactggtattatcattagatcaaagtgatatagaaaatatatgtatggccaggaactgtggctcacacctgtaatcccagcacttggggaggctgagactggtggatcgcttaaggtcaggagttcaaggccagcctggccaacatggcaaaaccccacctctactaaaaatacaaaaaaaattagctgggcatggtggcgtacatgtaatcacagctatttgggaagttgaggcatgagaattgcctgaacccaggtggtggaggttgcaatgagccatgatggtgccactgcactccagccagggtgacagagggagactccatctcaaaaaaataaataaataaaatacacacacacacacacacacacacacacacacacatatgcatccatgtaatagtgaggttaagttcctcataaagtactaaaattcaaactcaacataaacttcctgtttgtagtgctcaaagtcacatactgaataagcatttttaaattcaaatctaattttcttctctaatgttggggtgacatcttaccagtcttactcctacacaggaaattgtgtaggagtcacacatttctgaatgtaatacaaacaacaggtacctgaaggtgctgcagagtgaacagaattagacagacctttgtggggtgcacacactgagaggagaggaggtttacaaattgatttcatgttgtcattggcttttaggtttgagccaagagcattcactgtggggtgggagacgaagagggtaccattggaaaaaccactatcttttggacctgcctacccatggcctctaaagaaagtagaggaatcccataagagaaagggacaatgaggggattacctaattctctgaccaaacacacacgggagactcaaagctagttagctatatatattcacaggcgtttaccttttcaaaaatgttataaactacacgttttaaagtatatttaaaagcaatgaatacttgctgaaaaaaatctaaaattacagaaatagatacataaaataaagataattttcctataatttgatttattccaattgtctgagaaattaattaaaattaagaattcaaggtatggaagccatggtatatacttcctttctttgctaatcccaagaaactggaaaaagtgttgtttgtaacttggctttcactatccagttaaatktgtttgctgcttagcttcatgatcacttaagacaattcatgctcctctctttaacacttaacagaaaatttaaactttttacatactcagtagattgggcctatagaattactaatcctaaggaagtgttttcctgagcagaagtaactgtggagagcaacataattgatatagtcaaggacaagaaatttgagaaaaggttttctgagtattcaaattgaatatctttttattttaacttttattttttgtagtaacaaggtcttgttcttttgctcaggctggtctcaaactcttgatttcaagcaatcctcctgccttggcttcccaaagtgctgagattacagtcatgagccaccatgcctggcttaattttatttttatattggtaaattttttatttgtcagcagacttcttttctaaaatttttttaaggaccatagttaagcctcacaatctagtgggttaactatgaatataagaatacagtatgtatagtatatttccaactattatataaattaaagcaaaatgattacatgaaaagcatctaagcgataaattattgattgtaatggatggcacactaacgttaaagaagtatgaattaactttattaaaaaataataagtgtcagtaattctgaattctgtttaaaacttatttgtttccaagttctattatggtgtttcaggtgaagtctacccgaaaccaaaatatatttttcttccactgctagaattgtccatttcaataattccgtttgatcttttaaaagagagcattgtttgaggtggctgttcgttggctctctgacaaatggcccgtgtccatacggagcaataaatggcaaaatatctgcctgttcattttcct

SEQ ID NO: 726772 - DNA, 2447 bp, Homo sapiens
ggtggctcacacctgtaatcccagcactttgggaggccgaggcgggagaatcacgaggtcaggagatcaagaccatcctggctaacacagtgaaaccccatctctactaaaaatacaaaaaattaaccaggcgtggtggcgggcgcctgtaatcccagctactcgggaggctgaggcaggagaatggcgtgaacccaggaggcggaggttgcagtgagctgagatcatgccactgcactccagcctgggtgacagagcgagactcggtctccaaaaaaagaaaaaaaaacaaagaaagataaataagctaagttaaaataaaagacataattagcagaatctagtagaataaataaaaaatatgcaaatataacattactggtattatcattagatcaaagtgatatagaaaatatatgtatggccaggaactgtggctcacacctgtaatcccagcacttggggaggctgagactggtggatcgcttaaggtcaggagttcaaggccagcctggccaacatggcaaaaccccacctctactaaaaatacaaaaaaaattagctgggcatggtggcgtacatgtaatcacagctatttgggaagttgaggcatgagaattgcctgaacccaggtggtggaggttgcaatgagccatgatggtgccactgcactccagccagggtgacagagggagactccatctcaaaaaaataaataaataaaatacacacacacacacacacacacacacacacacacatatgcatccatgtaatagtgaggttaagttcctcataaagtactaaaattcaaactcaacataaacttcctgtttgtagtgctcaaagtcacatactgaataagcatttttaaattcaaatctaattttcttctctaatgttggggtgacatcttaccagtcttactcctacacaggaaattgtgtaggagtcacacatttctgaatgtaatacaaacaacaggtacctgaaggtgctgcagagtgaacagaattagacagacctttgtggggtgcacacactgagaggagaggaggtttacaaattgatttcatgttgtcattggcttttaggtttgagccaagagcattcactgtggggtgggagacgaagagggtaccattggaaaaaccactatcttttggacctgcctacccatggcctctaaagaaagtagaggaatcccataagagaaagggacaatgaggggattacctaattctctgaccaaacacacacgggagactcaaagctagttagctatatatattcacaggcgtttaccttttcaaaaatgttataaactacacgttttaaagtatatttaaaagcaatgaatacttgctgaaaaaaatctaaaattacagaaatagatacataaaataaagataattttcctataatttgatttattccaattgtctgagaaattaattaaaattaagaattcaaggtatggaagccatggtatatacttcctttctttgctaatcccaagaaactggaaaaagtgttgtttgtaacttggctttcactatccagttaaatgtgtttgctgcttagcttcatgatcacttaagacaattcatgctcctctctttaacacttaacagaaaatttaaactttttacatactcagtagattgggcctatagaattactaatcctaaggaagtgttttcctgagcagaagtaactgtggagagcaacataattgatatagtcaaggacaagaaatttgagaaaaggttttctgartattcaaattgaatatctttttattttaacttttattttttgtagtaacaaggtcttgttcttttgctcaggctggtctcaaactcttgatttcaagcaatcctcctgccttggcttcccaaagtgctgagattacagtcatgagccaccatgcctggcttaattttatttttatattggtaaattttttatttgtcagcagacttcttttctaaaatttttttaaggaccatagttaagcctcacaatctagtgggttaactatgaatataagaatacagtatgtatagtatatttccaactattatataaattaaagcaaaatgattacatgaaaagcatctaagcgataaattattgattgtaatggatggcacactaacgttaaagaagtatgaattaactttattaaaaaataataagtgtcagtaattctgaattctgtttaaaacttatttgtttccaagttctattatggtgtttcaggtgaagtctacccgaaaccaaaatatatttttcttccactgctagaattgtccatttcaataattccgtttgatcttttaaaagagagcattgtttgaggtggctgttcgttggctctctgacaaatggcccgtgtccatacggagcaataaatggcaaaatatctgcctgttcattttcct

SEQ ID NO: 726773 - DNA, 983 bp, Homo sapiens
ataatttatgtcattcacctgcttaaaggctctcagaggctccctatcactgaaagaataatatgtaaaccttttaaatgactcccaaggccagctttctcaactgtaaaatgsggttcaaaacacctaatttgtggggtggttctgaaaagtaaataattaaatatgcctaggtttctgtgtagtaaatagggtacaaaacaattatcagttttcttccccttcctgatctggtccttatctatgttataggattatctcttattactctcattcttcatttcagttatccagtctactttcattcttcaagtattctttaatatttttattcagattgtatgtgcctgttcatatacaatctttcttgaaacttatgcttcccttttcttttcagaaaaaacagctcataccacagcactcattttcactctctttcaaagtataggtagtccctctcttcttttcctccagtgttccactgccctggtacagttctgtgaccgtgtttggtattttgtcattaatgtaatgataataatagctatcattcctaacatgcttattatatacccaagactgcattttccctttacaaacattagctttacttttcaaagccagcctacaattgttgatatttagcctccaatttagatgagaaaaatgacactgaaaggggatgatgttgcccaaatatacagcctagtttgacatgtgccatgttgactagacagtacttcttaaataactatataagagacctggccctcagcaaataactgctaagagatgaatgactcagaaaagtctcccctttgattcttgattcttttctcaccagcatcatgagcttctcttttccttaaaggacacatctgttcaacccagtcgtgtttcagtatgtaccatcaaagaattgcagaggaatgcaatagatcattcaaataaaacttttgtttgtattacagacattgaaacag

SEQ ID NO: 726774 - DNA, 629 bp, Homo sapiens
atgaagtgtgttctctatactagaaataaaattcaaaagtttatatttttaaaaagcattttagaagaaaataaatatctagaattaaatctaaccaagttgtgtcagatatcactatgaaaatatataaaaatcattgacaatagtttaagaactaaataaatggagaagtatcccctcttaaaaatcttttcaagtgacatataataattgcatgtatttatggggcacagtgtaatgttttgacctaacattttagaaacattaaatcaagataattaatttattcatcacctcatcaacttattttttttctggtgagaacattaaaaatctgcttttagtaaatttgaaatataaaatacactattattaactgtggtcaccaygcaatacaataacttacttaaacttattcttccattctaactgaaaatttgaaccctttgattagcatctacactttccccatccctttctgtaccaagaaacttcccactttctgtttctatgaaattgacattatactaagtgaaataaccccggcacagaaagacaaatattgtttaatatcactgatatgtggaatctaaatagaatttagatctcatagaaacagaaagttgaaa

SEQ ID NO: 726775 - DNA, 629 bp, Homo sapiens
atgaagtgtgttctctatactagaaataaaattcaaaagtttatatttttaaaaagcattttagaagaaaataaatatctagaattaaatctaaccaagttgtgtcagatatcactatgaaaatatataaaaatcattgacaatagtttaagaactaaataaatggagaagtatcccctcttaaaaatcttttcaagtgacatataataattgcatgtatttatggggcacagtgtaatgttttgacctaacattttagaaacattaaatcaagataattaatttattcatcacctcatcaacttattttttttctggtgagaacattaaaaatctgcttttagtaaatttgaaatataaaatacactattattaactgtggtcaccatgcaatacaatarcttacttaaacttattcttccattctaactgaaaatttgaaccctttgattagcatctacactttccccatccctttctgtaccaagaaacttcccactttctgtttctatgaaattgacattatactaagtgaaataaccccggcacagaaagacaaatattgtttaatatcactgatatgtggaatctaaatagaatttagatctcatagaaacagaaagttgaaa

SEQ ID NO: 726776 - DNA, 629 bp, Homo sapiens
atgaagtgtgttctctatactagaaataaaattcaaaagtttatatttttaaaaagcattttagaagaaaataaatatctagaattaaatctaaccaagttgtgtcagatatcactatgaaaatatataaaaatcattgacaatagtttaagaactaaataaatggagaagtatcccctcttaaaaatcttttcaagtgacatataataattgcatgtatttatggggcacagtgtaatgttttgacctaacattttagaaacattaaatcaagataattaatttattcatcacctcatcaacttattttttttctggtgagaacattaaaaatctgcttttagtaaatttgaaatataaaatacactattattaactgtggtcaccatgcaatacaataacttacttaaacttattcttccattctaactgaaaatttgaaccctttgattarcatctacactttccccatccctttctgtaccaagaaacttcccactttctgtttctatgaaattgacattatactaagtgaaataaccccggcacagaaagacaaatattgtttaatatcactgatatgtggaatctaaatagaatttagatctcatagaaacagaaagttgaaa

SEQ ID NO: 726777 - DNA, 601 bp, Homo sapiens
aaaggctctgtgctcagtgtggcattagtacatgaatgaatcccagtctttcccacccgttttgatgtggatatgttctcagtcatttagtttgtaggagtctttcaactacactctggctttctcttggagataactgatccatgtgtagatgtcaggaggcttctgttctgccatgttgctcatgccatcttcagaaatataccatttttatagtaggaaagtcgaatactgtaaaggtctcaattctcctcaactttatttataaatccaacataattagaataaaatcttagcagatttttaaagtcaaaattgacaattgatttttaaatctgtaaggttctaaaatagtttaaayaatcaaattgaaagaagaagttcagagaatgtacattactactaatatcaagatacttataaacctatagtgacaaagacagcatgaaaatggacaagaaaagacaaataggccaatggagcagaatagaattcagctattgttacctgaaacttagctgtaatgaggcaaggctgcagttttcaaaacctggtgtttggttaattggccattcttatgagaaagaaaaaaaattcttta

SEQ ID NO: 726778 - DNA, 629 bp, Homo sapiens
ggtaggaacttggttttttatttattttttggaatagaaccagcaaggaaagttacatgatctgtgtgggattatgataattttcctttgtttagcccctgagatttttattttattttattttttccataagttattgggatacaggtcatatctggttacatgagtaagttcttttagtggagatttgtaagaacctggtgcggccgggagcggtagctcacgcctgtaatcccagcacttcgggaggcccaggcaggcggmtcacgaagtcaggtgatcgagaccatcctggctaacacggtgaaaccctgtctctaccaaaaaatagaaaaaattagccgggcatggtggcgggtgcctgtagtcccagctactcgggaggctgaggcaggagaatggcgtgaacccgggaggcagagcttgcaatgagccgagatcgcgccactgcactccagcctgggagacagagcgagacaccgtctcaaaaacagaaacaaaaacaaaaaaacctggtgcacttatcacccgagcagtatacactgcaccatatttgttgtcttttatccctcaccccactcccactcttcctcccaagtctccaaagtccattgtatcattcttaagcc

SEQ ID NO: 726779 - DNA, 629 bp, Homo sapiens
ggtaggaacttggttttttatttattttttggaatagaaccagcaaggaaagttacatgatctgtgtgggattatgataattttcctttgtttagcccctgagatttttattttattttattttttccataagttattgggatacaggtcatatctggttacatgagtaagttcttttagtggagatttgtaagaacctggtgcggccgggagcggtagctcacgcctgtaatcccagcacttcgggaggcccaggcaggcggctcacgaagtcaggtgatcgagaccatcctggctaacacggtgaaaccctgtctctaccaaaaaatagaaaaaattagccgggcatggtggcgggtgcctgtagtcccagctactcgggaggctgaggcaggagaatggcgtgaacccgggaggcagagcttgcaatgagccgagatcgcgccactgcactccagcctgggagacagagcgagacaccgtctcaaaaacagaaacaaaaacaaaaaaacctggtgcacttatcacccsagcagtatacactgcaccatatttgttgtcttttatccctcaccccactcccactcttcctcccaagtctccaaagtccattgtatcattcttaagcc

SEQ ID NO: 726780 - DNA, 1054 bp, Homo sapiens
gaggagaaaagataactattgggtactggacttaatacctgggtgatgaaataatctatacaacaaacccctttgacacaaatttacctatataacaaaccttcacaaacctaaaatgaaaataaataaaaaaaaaagaacaagaatatgagttgagtgtaacaagcatacccctaacagagagataactaacagactatttttgcttattggatttaggtattagataattcattcaatacctgacttatttctcttagcataatgccctcaaggtgaattcatattgccaagaatgacaggatatgtaagttttatttgtaacataccttaattaaaaaaaaaaacaaaataaaatatttctcataaaaataatagtctgtaacccagaccagaytcaaaggaagtaaagttgagagtcaaataaatcaggctataaacacataagaattttgataaaactgggaattaagactcagttctggaattcagatttctctaggcatagaagttaaccacgttcagggacatcttcattaggtcaccacagagtatacagatagaagatcagttttgagggcagcttatagatagattcatgcaatcaggactggagagaaatgcaatagattatctctatccaagcccctctcttccaacaggtaacattctaaaccatttaaaacagagggaggacaatgagttccatttttatcatcctttgcctgcatgctagtgcaatcctgctgaggcaccagagttgcaacccaaacacagaaaagggaagcatgctcccctaagtttttgctaaaagtcggggccactaactaaaatgtccaaggctttgtataaatgtgtggtgtagacaaggctttagatcttttttgacacatgcatacatacatatacctcctcctcaacttcattcatgatatcaagatgaaactttgtgatattaactacagatctgcccccaacaccagttatccagcatccctcttcctactgaagcagaaacatctattgcctcaagactgagattgtttaaacagga

SEQ ID NO: 726781 - DNA, 649 bp, Homo sapiens
cactattgttagcttaggcttgcagagaaggtggcatcacacttctagttagagaaaagacctttgttgagatagaaattacttatccagtgggatgagactgatacataatgtgagcatgaagggctctttatactctattttgagcactgaattctgatagaagagttagacagggcagagacaagggcaataggaacttattaagggaaagccttcattagtgaaaatagctagggctttaagtctcattaagagttgtctatttctaaagacccaacctatctgaatatgatatatgaactggagaatagtcaaggcatagtccaacagattccagacgcatgatttgaacgtttggtgaccagaagtagaattggactaccactcagagaaatctatttttaaggatgtggtccagtattgaatgttagtgacagtttccccgcatcccrtctgggatcccttctttaattcatagcatcctgtgcaagacttagacataacatttttataatctatgtgtttctaactttcctactggattaggagcatctcgagatgagagacatttttttacctctgttctcagcaactaatgttgtgcctgggatagagcagatccttaataaatgttgattgaacaagt

SEQ ID NO: 726782 - DNA, 1080 bp, Homo sapiens
actccacccacccccagggaatgcccatttcaaatgtgcactgaaacaggaaatgatctctacctttaaaacaaatatgtacagggacataaaaaggacgagtcagcctgttttatatctcgtaaggtagcccatttgtgagtaagttgcctgcccaggcaaacagcatgggtgcatccatgtttatgcccattttagaaggtttaatgcaaagcccttgaatcctcgtggaggtttatagttgttgaatcttggttttatagcatctcatgtgtgggtcatctggcaagtaggcacttgaagtggtgccctgtagggcctgctcactctctggtcacttttatggccctttctttgcagctaagggtctgtaaccttcttagacgctcagaacccatagccaggccaacctccatccaggtctgctaatccctgggtcctgtgggagatggcccctccatgtcactcattagactcttgcycacccaatgaccactaaagtgacacccagcctgaggcttgttcaagtgcaggaggcagattcaggcctggagttaaggtctggacagtgcttgcgatgggaccaggcatatgatagtgctatgtaagtgttagctattatcattaagttaaaaggaaagaggtgagagaaaaaggaagataaatgtagaacttatttaacaaatatttacatagtgttgaccatatgccaggaactgactctttaattctgataagaattacagatgaagaaacccaggcacagggaggttaagtaacttacccaaggtaacacagcttgtaagtggcaatcaggatttaaattcaggcagtctgaccctagagtcccaatgcattaattcctcagacatgtgttaagggcctgctctgtgcgaagtgcttgggggaagggaggtgggctaaaaaccgagcaagacacattctctatccagaagaagctttgacataaaaggggaagagggaggagacagacaagggtgctgatatcgaaaggagagaaactgaacacaaggtggaatgatactgagactttgcaaacactttgcaaactgttaaatg

SEQ ID NO: 726783 - DNA, 589 bp, Homo sapiens
aagcagaatcatggtgtcctgactccctgtatgtatagagttggtcttgcgtgttgctgtgtctagtatgtttgcgttaggcatacctgtgccatgaaggrccacatcatgtttcccttaatttaaactaccatcaagaaatcctggtggcctgacagaacctgtgctttcaagtaagtacaagtagttaaatgtggctgtagcttagggcataaaagagcatgatgtgacaagggaagaagaaggacaaggaggcagggactcctccataaacaacctctgggttgctcgtctaaatgcaataagaatttttatcagggcttaacatagaggtttttaaaaattgttttgttataaggcaaaagaaaattatagaggacaaacaacaaattaataatgctaatagaagagaaaccaagactcaaccatcctgtttttaaaagggtaatgtgtttactcttggaaaacctctaatattatataataatgcacattattggtttgacagttataaaaactctagtatggaattcaatttggttttgccttggttttcccatttctaaaatgaagctaagtatctcatttg

SEQ ID NO: 726784 - DNA, 1428 bp, Homo sapiens
atttggaacaaaagaagtgaggaaaagtctcttaaatccagagagaaggagagagacagagagaaaatgttcggggctggaggattcccaagaagagaacactggagaaggggactcatctaattctggatatgaaacagcagaagtaccaggatcatgctggagttacctgcaggcaaaagagacccaaagaagcacagaaaagtatttaagaattgaaatgtgataaaaccatgggccaagtcccaaactaatttctgagtggtacatgtactgggtagactcaaactttaaacagaactgacattgaaaccaccatgcatgggagatgagaccaaatttacagtctgaacataaccacattgatcccatacttttaaaaaaaatgggacacaggttctgacaatgtaacattcaaaatgtccagaatatgattcatattaagccacatgaaaaaaataataaaacaaaacaaaaagaaartctgaccaattctcaagagaaaagacaatcagcagaggacaatcctgagatgatccagacattgtattatcaaataataataacaattatcaaagacttgaaagcagccagtatagccatcacccatgatgtagtgatgaacatgttttaaatgaataaaatatgcctaagaactagaaaccataaaatagaaccagatgaaaattttagagctaaaatatataatatttgaaataaaacctttacttgatgggcctaataccagaacaaaaatgacagaagaaaaaaatcaataaacttaaagataaaacaggagaaatatacaatttaaagacagatttttttttaatgaacatagtctcagtgaactgtgagacaatatcaaaaggtttaagactcatgtcattggcatcccaaatgagaaaagaaagacattactacaggaaaaaaacatttaaagaaacagtagttgaaaacttcccaaatttgatttaaaaaataaacttaacaaaatcaagattctcagtgactctcaaaacaatgtaaactaaaaaccaaaacaaaacccatacatacccagacacataatcataaaactgattaaatccaagtataaagaaaaaaaatcttgaaaatagccagagaaaagcaacatattacatataagagaaaaatgatttaaatgatcatgtacttctcatgtgttctcttctctggaatcttctgccagctctcaaacattttctctatctggatttaaaagactcttttcctcacttcttttgttccaaatatatatttttctgacgagaaaagagggtttttttcttatatatttatcataagaaactatggagatcagaagaaagtgaaatatcttcaaagtgctgaaaaagaaaagactatatctagagaatatatttttcaggaataaaggtgttacaa

SEQ ID NO: 726785 - DNA, 976 bp, Homo sapiens
caacaattgtgtgccaggctattgagaataaagtgtgtgggacagagacatccaccgattcatgtgaacaccaacaagcgtttgtctgaatctggccttgaatgtacttggtggtttccttccctgccagcagtaaatttcaatgcttgtaacaaatgatctttaatggcttcattgcaataaaggcagcccattttgttctgtgcagccagacccaagtcttgcttaaagtaggccaccttcccttggagcatttatcccactatttcaaagtgcttggtatatattatagaactttctccatggttttagaagacatctgaacaatggttaagaacaaagtttttagatgggagaactgactcagcagatctcctcccaaggtcagcctcattagcagccaatcagatgtgtgcctgctgcttgttcctttgcatattcaacacatatttatcatgtatttattatgtggtacagtacaggcatacttcctgccctccgagagtttacagcctggtaagaatatgagatagtcaagtaataatgtataaaaccctattagaataaaatatgctgcttcgacacttaggagagtgactccattccagtttggggcatgagggatgatatgggacagtaactgctttctacactgagatctgaaaggcagtatgtgttagtaagctagagggagaggcagaaaagagagctgcaggccaacgaagtagcttgcatgaaagcctggaagcaacagagtgtgcagagtgatggggtgagtggatttcactctatcaggaccaaggtaggaaaagagaaggcaggagatgcagctatatatatacttgaaccaggttttgctggttttgtaagccatggtaaggactttggactttttcctgagagtaatggggaaaactttgaaggscttgagcaatagcatatcaggactggttttgtatcttttaaaatatcagcc

SEQ ID NO: 726786 - DNA, 942 bp, Homo sapiens
tgtgattttcattattcacattttgaatttaatattcttttttctggatgcaaaaatgtctacaggtacttggctcgttcaccagtcccaggcagtttacttatattgttcaatggctgaaattctaaagaacagggttcctgccatgacagcagagtgaagggaccagtcttcaggaggaggagactatcctccttttgtacaggagaaaagcacaaaagaacaggcacagaggcaagctggtaaagtgccaatctcatggtctccattttctctattgaggtgccatcacctctttgtgtgtgtctgtagtgtgtgcgtgtgtgtgtgtgtgtggtgtgtatagtatatgtagatgtctgtagtgtgtatatgtgtgtatgtttgtagtgtctgtatgtgtgcatcctgtatgtgtatagtgtgggtgtagtatgtgtatgtagtatgcatgtgtgcatgtgtatagtgtgtatgtgtgtaaatatatatatatttatatatggtgtgtatatagtgtgtatatatgtggtgtgtgtgcatgtgtgtagcgtgtatatgcatagtatgtgtatgtgtggtgtgtgtgcatgtgtatagtgtgtgtgtagtgtgtgtcgtgtgtgtatgtgtagtgtgtgyagtatgtaggtgtgtttgtgcatagtatgtatatgtgtgtgtagtgtgcgtatgtgtctacgtgtgtgtgtgtagtgtgtgtgtgagtagtttatgtgtgtagcatgtatgtgcatgtgtagtgtatgtgtgtggtgtgtatatgtgtctatgttgtagtgtgtctatcttcttgagagatggggcattgatattccttttagaaattcttaaaaaagccaacatcttgaaaatgagcctgctgatggtattcagagctggccagctcttccccttctcttcaaaccgggcacgcccacc

SEQ ID NO: 726787 - DNA, 661 bp, Homo sapiens
tcttgctggctctgtcccttgcttgttgttttttgttattgttgctggtaaatcacttgactacttgctcctgtataaaattaggactagatcttctctctctacttcttaagatggttgaaatgataaaacaaacaaaccaaatgcacacaaaaatgctttgcatatggtgagatactaaaagaataaactaatgattttgttattggtatctgtaattcaaattagacaaattcaattagatatcaaaaaatattttagtggyttaaatgccaatactggccgcccagaagtgagtggctggaatccccttctttagtataggaatccgtctctgtaggatggtatagatggagagggaaaaaattggataagaaaggtagaaatgttttaaggtctctatcaattatatagattcaagtcttactcttatgttcaagggacaatagagcatttaaaaacttttagggccagtcgggcacagtggctcacacctgtaatcccagcacttagggaggccaaggtgggcagattacctgaggtcaggaattcgagaccagcctggccaacatggtgaaactctgtctctactaaaaatgcaaaaattagctgggcatgatggcgtgcacctgtaatgctagctactcaggaggctgagata

SEQ ID NO: 726788 - DNA, 717 bp, Homo sapiens
gctttttttttttttaatttattctatagagcctattctgtctctccccccttcctatgtgaagtcttccctgactcaagtggtctcagttttccctgaactcttgttgacttcatcttccttaactgtcaaccatgccttgtcttccagcttgctttaatatcttctttgtccatagccaaggctgatcagcataggacaatcaggacaatatgaatgatgctcaaatatgtgctaacagtcattttgctgwctgttctggagactcccattccttttgaaaacaaagatgggcttttcaaatgaggttatagttcaggggctttgttttgaattattttgtaagacctgaactaataaaagccctatacagagagacattcggtagctattagtattggttatctttaatgtgtacaatgctttgagcgtgatggctcaaaattactattcttagtatttataagttctactgacattagattttgaatctgtcatctcagttcatatagtatatattatcaattgaatcaataaaggtaaggctcattaggagattatttgccatgattaatgattgtggaagaaagaaattcatattttttccacatatttcatcttattttaatagtaatgtccttaaactttactataaaaaaatataatgtctccacgtggagggtaggtattgttgcgtagtgttgaagatcacagacc

SEQ ID NO: 726789 - DNA, 717 bp, Homo sapiens
gctttttttttttttaatttattctatagagcctattctgtctctccccccttcctatgtgaagtcttccctgactcaagtggtctcagttttccctgaactcttgttgacttcatcttccttaactgtcaaccatgccttgtcttccagcttgctttaatatcttctttgtccatagccaaggctgatcagcataggacaatcaggacaatatgaatgatgctcaaatatgtgctaacagtcattttgctgactgttctggagactcccattccttttgaaaacaaagatgggcttttcaaatgaggttatagttcaggggctttgttttgaattattttgtaagacctgaactaataaaagccctatacagagagacattcggtagctattagtattggttatctttaatgtgtacaatgctttgagcgtgatggctcaaaattactattcttagtatttataagttctactgacattagattttgaatctgtcatctcagttcatatagtatatattatmaattgaatcaataaaggtaaggctcattaggagattatttgccatgattaatgattgtggaagaaagaaattcatattttttccacatatttcatcttattttaatagtaatgtccttaaactttactataaaaaaatataatgtctccacgtggagggtaggtattgttgcgtagtgttgaagatcacagacc

SEQ ID NO: 726790 - DNA, 600 bp, Homo sapiens
ccaacagcaattgcactaagagttagcactagaatgagacaaatataggaagaaggaaatgtgcaagcaaaccaggaaaaaaaacagtgtmagtgaaatatcacaaattgtatacttcctatcagtttttactataataacttaaagactgtcgtcgtatttttatctgtgtagttttgtaaacatacctattctataatattagatacagaataatcaggtacaatctatcttgcctattttgttttatatattaacttgttcatttttaatttttatatcttctttatagatataagtattaagagagaagggaatacattattttgtctaattactgtagaagtgtgcctggtagaagaagaaattgtgaatgttagtcgaatatgcaaataaataaggaaaatattatgacttttgtgcttcagagattatggtattgtgtcaaggtataacgtttccaagaacctatatttaaacagcaaacaataaacatagtaacaatataaacatataaacaatataaacatagtatattttactatatttaaaatatagtaaactatatttaaatagcatcctttaaatgtttttctaaca

SEQ ID NO: 726791 - DNA, 600 bp, Homo sapiens
ccaacagcaattgcactaagagttagcactagaatgagacaaatataggaagaaggaaatgtgcaagcaaaccaggaaaaaaaacagtgtaagtgaaatatcacaaattgtatacttcctatcagtttttactataataacttaaagactgtcgtcgtatttttatctgtgtagttttgtaaacatacctattctataatattagatacagaataatcaggtacaatctatcttgcctattttgttttatatattaacttgttcatttttaatttttatatcttctttatagatataagtattaagagagaagggaatacattattttgtctaattactgtagaagtgtgcctggtagaagaagmaattgtgaatgttagtcgaatatgcaaataaataaggaaaatattatgacttttgtgcttcagagattatggtattgtgtcaaggtataacgtttccaagaacctatatttaaacagcaaacaataaacatagtaacaatataaacatataaacaatataaacatagtatattttactatatttaaaatatagtaaactatatttaaatagcatcctttaaatgtttttctaaca

SEQ ID NO: 726792 - DNA, 564 bp, Homo sapiens
atatatcattaaaaatgctttcaaagctaaatgttaaattatgatctattgattccaaacagctagtgtgaaaaataatttcatttggtctatgtcacgtcattagagcaaagaaaacaatataaaatcagtactgaagttcaaatttttacgtacctgtggcttgttattttcacttccttcaagcctttctggctcttgctctgacgtcacttctaaatcttgttctgctgacaaatccacagttagttaaaatgaactacttagaagagttagataaaggctaaagtcattataaaaatagatggaaaataacacatagtattttataaattgagagttttaaatgaagcctaatgtttagtgaaatatttatttctttaagaaatacttccagttatccaaaacttcaacaaaccactcgastacactagatatcaccagtgcaagccgtacaaaacatctcaaagattttctcaccaatgtatctacccaacataaataaacaaaaccattggaaatgaaacaaagtgtaaaatacactaagaacatctatggtaacac

SEQ ID NO: 726793 - DNA, 564 bp, Homo sapiens
atatatcattaaaaatgctttcaaagctaaatgttaaattatgatctattgattccaaacagctagtgtgaaaaataatttcatttggtctatgtcacgtcattagagcaaagaaaacaatataaaatcagtactgaagttcaaatttttacgtacctgtggcttgttattttcacttccttcaagcctttctggctcttgctctgacgtcacttctaaatcttgttctgctgacaaatccacagttagttaaaatgaactacttagaagagttagataaaggctaaagtcattataaaaatagatggaaaataacacatagtattttataaattgagagttttaaatgaagcctaatgtttagtgaaatatttatttctttaagaaatacttccagttatccaaaacttcaacaaaccactcgackacactagatatcaccagtgcaagccgtacaaaacatctcaaagattttctcaccaatgtatctacccaacataaataaacaaaaccattggaaatgaaacaaagtgtaaaatacactaagaacatctatggtaacac

SEQ ID NO: 726794 - DNA, 652 bp, Homo sapiens
agagagaagtgatgttcaaagagataatatctgaagttttccagtattaaagttagaattcactagatatggatacatagaaacttgtattttcactgtgatatagctaagtgtctatatattacagtgaaactgtgagacatctcaggataaagaaaaaaaatctcattgggggaaaaaaaagattatctacaaamaaaaagaacactgatgggaggaacatcatcagaaacagatgccagaaaacatgggaggaactcacaaagtgccaagagaaagttactatcaatatagaattttatacctagctaaactgttactcattcaagagtgagaggaaaatatatatacttttctataataattaaaagaaattatagcccatgttccaggtaaaaaatttatgtggaatgacatcacattgaaaattacaaaagtttagaactaaactacaaaagcactaaatatctaagcaataatgactattgctatgatgtattgcttccagctgtgagccaggcattatatcatattagacatttcccaactagcatatctcttagccctcaaagtcatgttattaactagttagtgttaactcctttgtaagaattaaaaaagcttttgggagaacaaggtaactatactctta

SEQ ID NO: 726795 - DNA, 652 bp, Homo sapiens
agagagaagtgatgttcaaagagataatatctgaagttttccagtattaaagttagaattcactagatatggatacatagaaacttgtattttcactgtgatatagctaagtgtctatatattacagtgaaactgtgagacatctcaggataaagaaaaaaaatctcattgggggaaaaaaaagattatctacaaaaaaaaagaacactgatgggaggaacatcatcagaaacagatgccagaaaacatgggaggaactcacaaagtgccaagagaaagttactatcaatatagaattttatacctagctaaactgttactcattcaagagtgagaggaaaatatatatacttttytataataattaaaagaaattatagcccatgttccaggtaaaaaatttatgtggaatgacatcacattgaaaattacaaaagtttagaactaaactacaaaagcactaaatatctaagcaataatgactattgctatgatgtattgcttccagctgtgagccaggcattatatcatattagacatttcccaactagcatatctcttagccctcaaagtcatgttattaactagttagtgttaactcctttgtaagaattaaaaaagcttttgggagaacaaggtaactatactctta

SEQ ID NO: 726796 - DNA, 1195 bp, Homo sapiens
gatgttctgtgggtttgatgaggtgtttaagactgttttattgatcatctaaacagtagtaaccaacaaaacatgaaaaagccaccatctaatcttctgtaattctcttttggcttctactgtagctaagccttctaggtcatgaatctttaatagctttggatttcgagtaataatgtagagtgtagctcaaccaaggacctgagttggacatgaagaacaaataaaatatgtgtttattttaagccactaatacttttggtttctttgatactaagcattatctggcattgcctgcctaatacaggtcttgctttcagtagaatgccacctcaattaagtgattgtgtgacacagcttctccttagggagtggaggatacaatcaggaaaagctgtagatgtcactcttgagcagtagtggaatggttggcaacaacatatctgtgaaatatcttgtgaggcagattgcatgtccaattattttgtagctgtagggaaagagatcaaaaaacaaagtttgtgttttggggttttattgactaaattttatcaagcattaccagaaagatgagtgaagaaagggattgctgaacagcagaaataaaatgaagtaaacacattctgtaactttgggccttgatgcgatgaagctcaaacagtaaaagctataattgagaggcarcactctatcaaaactcagcattttgtccaagacaaaaatgagagtgtacctttcccatttattgctaaaaattctcagaagcttcaaatgcctcagggcaaagatcagattactctcatagagaacagttaaatcataaaaccaaattaatttatttagagaatttcaggctatagcttttccccagaagccaaagaatttgtgttatcaacttcaaatttgaagacagagtgaaagatcgggggataagaaattacatatagaaaaaaaatagatatgaaaggaaaataaaatatcgggaccccaaacttactatgccaaaaggaacagttaagcttggaggctgaggcttgcagaaaactgcctttccttttgttcctaaatacacagctacaagatagaaggctacgtatctccccagatagcttccctcaccctgacaatgtaaaactaacagcttatcttcatgaggcaagaggagactaggaatcctccctccaccacctgtaga

SEQ ID NO: 726797 - DNA, 538 bp, Homo sapiens
agatagcaaactaagcactggtatttaaattttcttactttcaaaatccccttagatgatgaaaaaatttaaaaatcaaaataaaatccaccaccacttggaaaacaagaagtggggaatactagttctggcaggtttggktagactaaaacacctgaaaattctcccactttaaattctcccacttaaatgcttataagtgatgaataaatattacataatttttaaatacataactatatatgtaagaaaggagagaaatccccccattgtagataaatgatgaagtgaaagcagagtgttaaacatgtaaattggcattactgatcccctgggaggtgtaacggaggaaattaaacagtagctatgtatttttttttttttagatggaggcttgctctgtcccccaggctggagtgcagtggggcgatctcagctcactgcaacctctgcctcccaggttcaagatattctcttgcctcagcctcacaagtagctgggattacaggcgcccgcctccacgcctggctaatttttg

SEQ ID NO: 726798 - DNA, 584 bp, Homo sapiens
tcaaaataaaatattttgttgaggttttctttctgtagattatatgacaataataatacaggaagtttttttcccaaaataaaattagagtataacattgaatgtgggtttttaaagtatacatgtgtactttccacactcaagagattaaaatacacccccatggatgatatggccccagattgagaatcatagatttgctgggtgtttaagaagcaaaatgtaccatagagaatgacattgaaaaaggaaatacaactgagctacatttgatttagaactattaataatacccttgaatcattaagaagttcatctcatgtgaaacgaatacaaatccactggctgcaccaggagccatatgcagttttaaagtgagtgctggactaaaggcatcaattcttttgtatgtgacagcaacagtcataaatgtatctactttagtgygagaaaggaatgtactttattatcttgccaccccttatagagtcatacaagcaggcacctgccatagatttcagttgagtaagtcagtgacttttaaagacctgccagtgaactggtgccagactggctagagaaga

SEQ ID NO: 726799 - DNA, 625 bp, Homo sapiens
tctttccatatctgactttttctgatccactggagtaacccacatgaaagtgaaaacccctagttttgcttctgtaccttttatttcagggcagaggaattattttctaagaaattccttttatttgaatttgtaaatttctatttcaaaaaacaatagttttcatttttctttgaaatatcaaacatgttgctcactgaaccttgcttcaaactatcaggaaatactttgttagaaagtagggaggattaaaaagccattaattttagatgaatgaagattatacaagacagtcttgtgayaggaagtcttcataaaatattaaaaatacaggaagatgtttttatcaagtaagttttctattgctcatgtttcttagctttcttaaaggaattttgggcaggccttaaattggcgagttttttcattcatttatgcttaaaagatgttagtttctttgagtgaattcattgcaaatagtcacaggcattgcattccaaggaagaatctgctgtagcagaactagatttgacagaatatactttgtagcttactttgtgggaaaaattatgaagatttttacagatattaaaataagtaaaagaataagaaacaaaacatatat

SEQ ID NO: 726800 - DNA, 662 bp, Homo sapiens
aaacagaattgaaaaaggtatggatttttttaaataataggtgatgttgkgggtccagtggaaagtatggtatacctggaatcaaagacaaatgatgacgggtgtgaatgaataataagagatgagactggactaactcagtagatcaggacatattataaaggcctttatgtggcacattagaggctttttattttattttataatcaaatatctagaagaggattttcagcagattttgtttttagtaagattgctatggtagcactgtaaagtttagactggtatagaaaaatgttggtaacagtgaagggagaaaattccaagaaaattctgtaaaggttttttttaaaaaaaaaaaaaaaaacctgttattgtgttgaattgagatatgacagatgcaagaaaaaatcataaagtaaaactgacagaatttggtgaccagtaatgtataaactgagaaatagaataaagtaataactctgtgacttgtagcttgatggtggatggtgatgccattaactgaggtaaagaatacaagaataggagtagactttggaggtggtggtaaagggaaagcatgaaagtactccttggtacccatagtatttgaggaacctgtggtatgtgcaataagcaattagatgtaactatgtatagca

SEQ ID NO: 726801 - DNA, 613 bp, Homo sapiens
ctgtcagccacagcaatgttaaaggccaaagaggttgatgagacccaattcgggattcactgatgatttcacggagacaaccagttgacctgccagcggacattcctcccattttctctgtggtgcaatggacacagaatgagtagatcagaaattttttttttaattatcaagaaattagtacaacgatcctttttgctttgtaaaataattgtcctataaaggagagcaaagtatttatctataggtatttgtatgtttttcataaatgcttaagtgagctattgatataatactatagatagggtgggatgtatatcagacatatctattcttactccctcagccatctattttaaccctgaaatagcatgactggctacttctgtttgggcacccacatattctttgctcacagagcacaaatggatgtggcctctatccccctttactctcaagggggctcctctcagaccacagcatctcaaagtaggggtgcatccctctaggaatgtgactattactraggaattactgcacaatttctgcctcacttcatactcctaggcttcacattatttttgttttgcatgttatctcaactatctggtca

SEQ ID NO: 726802 - DNA, 1013 bp, Homo sapiens
tggctcatcacaggtagtaatgttcaatgactagtttattaaaatgtttttcagatacaaagttctgttttgcacagggtgagaatcttaggaaattttctgattgctttatatttttatttttattttttttaaagctgtgttattttttagttcttcatgctttggaagtaacagttgaagagaggtgaggaaagtttgtgaaaattgtgatcggtgattagctgccacctgcctgaggtgtcttctgagaggaactaacctctttgtggtgctagagcaaggtcactggataaaaaaaagaacaggtaaccatcttattccttgtctgaaaagttctgttttaaaattaataaatgcaaaatgtgcaaggtaaaatgaattattgtttaaataaagtttttaattttctcctcagaaactagtaaagtggactatgtcctctttcaagctgccacagccataatggaagcagttgtccgagagtggattctcttggaaaaaggtagcatcgagtctctgcgaacattccttttaacctatgtcttacaaaggcccaagtaagtacatggagggggactgctgaaatacttttgctgagcttatgtgtatctttttagagctttttttgtttgcattttaaaaacttttgggtggktatagtggctcacacctataatctccactttgggaggctgagagggaggatctccttgagcccaggagtttgagatcagtctgggcaacatagtgagaccccatctctactaagtacaaaaaaagaaaaaaaatttaaaaagctctagatgtttaaggttaagttttgtgtggggctcatattttaaacacttgtatacacgtgattgtaggtagttttggtgcttaatgaaataataccttttatttaagcttttggtactatgttttgtttctttgaaaaggttgtgttggatattagttttttgttgttgttgttgagttgtgaagaacttagttataaataaaagttgacc

SEQ ID NO: 726803 - DNA, 827 bp, Homo sapiens
aaaatacaaaaatacaaaaaaaaaaaaattagctgggcgtggtggcgtgcacctgtagttccagctacttgggaggctgaggcaggagaatcgcttgaacccgggaggcagaggttgcagtgagctgagattgcgccactgcactccagcgtgggctacaagagtgaaactctgtctcaaataataataataataataataataataataataataataataacaaatcyaagtgagaatacaaagtgatttaatatgtacagttcattttttaaaacctttcagctgtatgttgtgactatataatagctaacatttactgggtgcctaccaggtaacaagcactgtcttacgtgcttaagatgtattaaaaattaggtacacgggaggaaatggaaatacagagtaattagggaactcccttagaccacatagggagaaagcagctggtccaggattcaaacttaggatgtctggttcccacgtacagagctactgggccatttacaggacaggggcgtgagagagtggctgcagaaaagtagaaaggaaaattagtcgtaaagagggactcgggtccaggcacagtggctcacacctgtaatcccagcacttggggaggccaaggcaggcggattatttgaggtcgggagttcaagaccagcctggccaaaatggtgaaaccctttctctactaaaaatacaaaaattagctgggcatggtgctgcatgcctatatactcaggaggctgaagcaggagaatcacttgaacccaggaggtggaggctgcagtcagccgtgatcgagccactgcactccagacagg

SEQ ID NO: 726804 - DNA, 827 bp, Homo sapiens
aaaatacaaaaatacaaaaaaaaaaaaattagctgggcgtggtggcgtgcacctgtagttccagctacttgggaggctgaggcaggagaatcgcttgaacccgggaggcagaggttgcagtgagctgagattgcgccactgcactccagcgtgggctacaagagtgaaactctgtctcaaataataataataataataataataataataataataataataacaaatccaagtgagaatacaaagtgatttaatatgtacagttcattttttaaaacctttcagctgtatgttgtgactatataatagctaacatttactgggtgcctaccaggtaacaagcactgtcttacgtgcttaagatgtattaaaaattaggtacacgggaggaaatggaaatacagagtaattagggaactcccttagaccacatagggagaaagcagctggtccaggattcaaacttaggatgtctggttcccacgtacagagctactgggccatttacaggacaggggcgtgagagagtggctgcagaaaastagaaaggaaaattagtcgtaaagagggactcgggtccaggcacagtggctcacacctgtaatcccagcacttggggaggccaaggcaggcggattatttgaggtcgggagttcaagaccagcctggccaaaatggtgaaaccctttctctactaaaaatacaaaaattagctgggcatggtgctgcatgcctatatactcaggaggctgaagcaggagaatcacttgaacccaggaggtggaggctgcagtcagccgtgatcgagccactgcactccagacagg

SEQ ID NO: 726805 - DNA, 670 bp, Homo sapiens
taacataatgatgctgattaaaatgtaatagtgtgtgtatatatgtgtatacatatttaaataaaaatgatcttaaatattaccaacccccaatttataaaatgttacttttaaaatggagtattattatcctggttatctctgagaggtgttttagtagttttaaaatgtaaataaattatttgtacaacgtgaaagtttattgattttatagtctgttatgtagactagctaggctatgtagctctgatcatttgaatttattaaatgagctatttatcactaccttttttctgagatttaagaaagattgacagagtacagtcgtggcacatgtgaggcsacggtgttaagtgtatcatacacgttaattatttacgtgtaacatccactaaatattgtgtctgtctgattcagcaaaaacattaaagatgaaaagaacagaggacttaagtacaatatttgaagatataactgctgtataactttaaaagtttactgtaagatattttaacacatgtggatggatgcctgcttgctagtcaatttggaagcatattgtcatgaaaggaagttttaataccagagacactgaacctgttagcaaaagattacgtcaacaaaaacgaagattttagcttatgtgtacttttggaatagaattgtgcaa

SEQ ID NO: 726806 - DNA, 2130 bp, Homo sapiens
actaaatgtctttcttttccttcagggagatttgtacatgttttgatggacacttagtgtcatgatgaaaaataaattgtctctatttttcctttccaatgtcaataattttgtatgattatatgccttctgaaattgctgttgttctattgcattttcaaggtccacttaagtactcaaatctactcacagttatatccctgggtggcagtttaaaaaatgtaaaatattacatagcaaaacaaagtctgtctttaaagaaagacggcatttttatctccatttaaaggaaagttatagagcttttacccatctcaaaagcccagaaaggttaaataactacccaaggtcacataacttgtaaatggcagatctgcccgactccaaacttctcagcctcccactgacatcccagggcctcagttcatatcagcgtgaagcaactgatgcttcaacatgggtacccctggatgcctggcctcaggcagatgaggagctgaaatgctgtctttttctacacttattcattcaaaaaacatttttcaagtaccagatgcagggccctatgtttgcaacaataaatcctgttcttggcccgagaaaggctttgccaaatgagggatggaatcttatgaattaaaaaaagaagaaagaaaaagcacaattacacgttaagtgctgtaaaaaggaacgtggaagaatagagaaggaacggaatcttctactgcgatagggtgtggggtaggatggtgagatgggcatggggcccgcctgtccctggaagctgtgcaaaagagatgggtagacagagataagtgtccaccacaatcaggaattagatgaaatccaaactccttttttaaaaaacttaaatcctcaagattgctcaaatccgatttttatttttacttttatatccgatacactacctactcctgcttatatttctcaaatcaagctctcctttcaatacccattttcaccatcttatccaaagataccactaccctaataacacgttacaaggatggaatattaccttaaaaaggtttaacttcttcaacccttctaatctgccctacttactgccgccggatctatcttcttggaatgcattcttgaccatgttatttttattctcaaaactttttaatggcttcttaggaccaaagtaattggttgcaagttatgtttgcaatccactccacttttgtaagtaaaatcttagacatagaactccaacgactaaagtacattaaaatgtaatttatttgcagaagaattgtctccagccctgtgggccttggggattgggaaaacatcgtttttaaacacaaaggatcaagaagtactccttggagcagcattaataggcaccaatactacgaactagaatttagagccttgccactggccagcgctggggtcagtcgggagcatgccagcaaggctgaccctcagtttcactgaggccggagtcataagcagcactttaaagatccctgggtaatttggatgcattttgagaggtgagccgcatagatttaaggtactttagcattctgcagctttcacttattgattgtatgattcccaccgtctgaccccagcagtcttcaccgaaggtgaacacccactagaagcatacattactatatttcatgttgacaagtgaggccagctggacttcctgggtcgagtggggacttggggaactttcctgtgtcttacaagagaattgtaagacgcaccaatcagcactcagtaaaacacaccaatcaggactctgtaaaacgcaccaatcagcactctgtaaaatrcaccaatcagcaggattctaaaagtagccaatcatgggaaggattgaaaaaaaggcactctgataggacagaaacgctgataggacagaaacggaacatgggaggggacaataaggaaataaaagctgcctgccccccacaccatcagccagcagcaacaacccgttctgatacccttgcaagctgtggaaggtttgtccgttggctcttcacaataaaccttgctactcatcactgtttgggtccctaccatctttaaaagctgtaatactcacctgctatctttaagagctgtaacgcttattgtgac

SEQ ID NO: 726807 - DNA, 1421 bp, Homo sapiens
tgcaaggtgaatgaagactgccgtcaaaagagctattagatgtttattctacagaagacaggaagtctgaattttggccattttctgaggggaaaaaagacaaattaataaagatgaattgcctagagattttaatgaaagtgaacatacaacagcagcatacttattaccttgaattggtgatttaatagaggcacagctggtagcacaatacatattgtttaaactatttgagcacatctggtcatatcctattaaatcatttaaatccaggtaaaattggrgacctccccacgtccatgggaattatgacagaaaactttccgaacagcaaaacacatgcaaggagacacagtaatacctacagaaaaaccttactagtattcaagttaaattaggtatttgttggaccctgggataaatgtggaaattgacaaacacaattaaaagacttactttggccaggcgcggtggctcaggcctgtaatcccagcactttgggaggccgaggcgggtggatcacaaggtcaggagatcgagaccatcctggctaacacggtgaaaccccatctctactaaaaaatacaaaaaatcagccaggtgtggtggcaggcgcctgtagtcccagctactcgagaggctgaggcaggagaatggcgtgaacccaggaggccagagcttgtagtgagcggagatcgcgccactacactccagcctggacgacagagcgagactccatctcaaaaaaaaaaaaaagacttactttgcttcaggaatactgacatttttaaatgaaggagagaatcataaagttgtaactacattctaagagcagacagcttttaagtgacaggtcttacagaggcatatctttagtcatacatgcaaccattcactaaccaaacactttttacagaactagtatgtatgtgcctgccactgatgcacattggtgatgaagtggtgaacccggtaattacagagcttacagtcaaaggtggagaggagcagatagtacactaaagtgtgatgtgtgcttgtgatacaataaaataaatatttggtttttgtccctagttcccagcataccgctcttaaaagccttggagatctccagagtaataagacagtctttgatatactgatgagtgattggtggctggggaccccagagggtttcaaggttgggacagttcactagaaagatcaagacatgattagagggtgggaaatttcagccccaaccccaaactccagggataggagaggagccagaggttgagttcaatcgccaaaggcaaatgatttaatctatcatgcctacataatgaaacccctccatgacttggagttcctgggttggtgaacacattcacatgctgtagggtggtgaacctcaactccacagggacagaagctcc

SEQ ID NO: 726808 - DNA, 666 bp, Homo sapiens
atagatttctaatagcattctcttttaaagacatttatattttgcaggaacttccctataggattttccacattctagatttgactgactatatcttcatagtgtttgccaaacagattcttctatstataatatttttcaaaaactgctatgactcacagatctaaaggcttgatgggattcagaaaagtaatatttataaaaataatatttataacaatgttataaaattccgttcaattcatcaccctaaaagacactcagtactcgccacataatgaatttctgagccttgagaaagagaaacaatacttatctagttggcttcatgggtaatcaggtattgtagatgtcaacaataataaccacagcaatagcaaaatcttatcccaaatttctaaactggtgatttagctttaacatatttaaattaaaaatgtagataaaatatgtgtgcttcagctagtactcaacattaaacaagatacaacctcattaccatccctagagtcacatgatactcatttagttttttctattagcataatactttgactataaaatctatatatttaataaagaatcattttataatgcatgctataaaagaatcctcaagtattagttgtaaatttaatctcaaatattttaatcttgacttccacc

SEQ ID NO: 726809 - DNA, 1056 bp, Homo sapiens
gaaattaaaattagcacttcatagacatatcagcccttccatgtttactgcagtgtcattaataacagacatgatatgaaaacaacctaagcatctatgaacaaataaattatcatatgtccaaaatatataccatggaatattattcagctttttaaaaaggagttactgctatttgcaacaacayagataaacctggaagacattatattaagtgaaataaggcagacataaaaaggaaatcacctcattattatacttatgtgtaaaatctaaaaaagctgaatgcattaacacagagagtggaacattattactgggggcagggaggaagaggaaatcaggataagtagaaagggtataaacttgcagttatataagattaataaatctagagatctaatgtacagcatgaggactatagttaataagggtgatacactgaacatttgataaaacagtagattttaggagctcctactacacacacacacaagagaaactatggaaggtgatggataggttaatttgcttaagtgtagtaatcatttcattatgtatattatgtgtatatcaaaacagcatggtgtgcaccttaaatatatacaattaaaaatccaaattgaaaatctgctttcccagaaaagttctctatatacatatatttatataatatatacataatatattatatgtaatttctcatgaaacttacaatctagtagggaagataattacttcaaattttaacaaaatcaatgtcatcaagatatagtgtgctctgagcagagcagtgtgaggtaatataggcaaacatactagaagcaacaaacacagaagtggtgagtcaagaggattaataatatctaaattgagacgtgtgattggaatagtttatcttgcgaatgagtaggcgacttcagatttttctaaacagttaaaggctccaaagccagaattagcatgatccactatttgggacaacagtgggtctggaaaaactgctttgtgaaagtgcaaattatcgatgtgcctgttttgatggaaaaaagagca

SEQ ID NO: 726810 - DNA, 1056 bp, Homo sapiens
gaaattaaaattagcacttcatagacatatcagcccttccatgtttactgcagtgtcattaataacagacatgatatgaaaacaacctaagcatctatgaacaaataaattatcatatgtccaaaatatataccatggaatattattcagctttttaaaaaggagttactgctatttgcaacaacatagataaacctggaagacattatattaagtgaaataaggcagacataaaaaggaaatcacctcattattatacttatgtgtaaaatctaaaaaagctgaatgcattaacacagagagtggaacattattactgggggcagggaggaagaggaaatcaggataagtagaaagggtataaacttgcagttatataagattaataaatctagagatctaatgtacagcatgaggactatagttaataagggtgatacactgaacatttgataaaacagtagattttaggagctcctactacacacacacacaagagaaactatggaaggtgatggataggttaatttgcttaagtgtagtaatcatttcattatgtatattatgtgtatatcaaaacagcatggtgtgcaccttaaatatatacaattaaaaatccaaattgaaaatctgctttcccagaaaagttctctatatacatatatttatataatatatacataatatattatatgtaatttctcatgaaacttacaatctagtagggaagataattacttcaaattttaacaaaatcaatgtcatcaagatatagtgtgctctgagcagagcagtgtgaggtaatataggcaaacatactagaagcaacaaacacagaagtggtgagtcaagaggattaataatatctaaattgagacgtgtgattggaatagtttatcttgcgaatgagtaggcgacttcagatttttctaaacagttaaaggctccaaagccagaattagcatgatccactatttgggacaacagtgggtctggaaaaactgctttgtgaaagtgcaaattatcratgtgcctgttttgatggaaaaaagagca

SEQ ID NO: 726811 - DNA, 985 bp, Homo sapiens
tttccatcatcaatgattgttttttggtcattctctacctttattaaaaatgttagtttagttctcacagtgttaatttttattacatgtgacatgaacataaatatgtgttccacaacacatgcttatgtctattctccttctcttccttcttcttcttcttttcttcctttcttcttcttccagataacccttccctacgggaaagtaattgcacatgttctgatgaagcccaatatgctacatcaccaattaagtgtaaattacaattttcaaactctatttaaaattgtcttataatctaagcctaggtaattcaaactctcttattttctacagatatttgggactacatttgtttcatttttaattaggataaataagtttttatgatgtaaatccaatgctatgatcgttatcctgttatcctacagagaaggcttattacaatgacactaatcagagcaatcagagttcagaggtatagagaagaataatagagcactggcttaaacacagcccctgatacaagcagtgccaaaagccagawttttttttttttttagtttccaattacatgagccaatgcatttagaatgccagtttgaattatttttcactgttacaacatttttgaacaaaattgcatgcaataaaatgcgcaaatatacagattagtaaatgtttgcatatgtaaaagcacttaaataaatatggctttacatcattagatgcaggcagacatcccccctcacacatacacacaaacacacacacacacacacacacacacacacacacacacacacacacgcaggtaaactgtattctaacttttattaccaaagattgactatttgtgaacaccatgtaataggaattttagaatataaattattttttgttaccttatttgctgatgtttttgagattcaatgatgctgttaaatacatcatcaatctattctctttaattgataagtag

SEQ ID NO: 726812 - DNA, 985 bp, Homo sapiens
tttccatcatcaatgattgttttttggtcattctctacctttattaaaaatgttagtttagttctcacagtgttaatttttattacatgtgacatgaacataaatatgtgttccacaacacatgcttatgtctattctccttctcttccttcttcttcttcttttcttcctttcttcttcttccagataacccttccctacgggaaagtaattgcacatgttctgatgaagcccaatatgctacatcaccaattaagtgtaaattacaattttcaaactctatttaaaattgtcttataatctaagcctaggtaattcaaactctcttattttctacagatatttgggactacatttgtttcatttttaattaggataaataagtttttatgatgtaaatccaatgctatgatcgttatcctgttatcctacagagaaggcttattacaatgacactaatcagagcaatcagagttcagaggtatagagaagaataatagagcactggcttaaacacagcccctgatacaagcagtgccaaaagccagatttttttttttttttagtttccaattacatgagccaatgcatttagaatgccagtttgaattatttttcactgttacaacatttttgaacaaaattgcatgcaataaaatgcgcaaatatacagattagtaaatgtttgcatatgtaaaagcacttaaataaatatggctttacatcattagatgcaggcagacatcccccctcacacatacacwcaaacacacacacacacacacacacacacacacacacacacacacacacgcaggtaaactgtattctaacttttattaccaaagattgactatttgtgaacaccatgtaataggaattttagaatataaattattttttgttaccttatttgctgatgtttttgagattcaatgatgctgttaaatacatcatcaatctattctctttaattgataagtag

SEQ ID NO: 726813 - DNA, 985 bp, Homo sapiens
tttccatcatcaatgattgttttttggtcattctctacctttattaaaaatgttagtttagttctcacagtgttaatttttattacatgtgacatgaacataaatatgtgttccacaacacatgcttatgtctattctccttctcttccttcttcttcttcttttcttcctttcttcttcttccagataacccttccctacgggaaagtaattgcacatgttctgatgaagcccaatatgctacatcaccaattaagtgtaaattacaattttcaaactctatttaaaattgtcttataatctaagcctaggtaattcaaactctcttattttctacagatatttgggactacatttgtttcatttttaattaggataaataagtttttatgatgtaaatccaatgctatgatcgttatcctgttatcctacagagaaggcttattacaatgacactaatcagagcaatcagagttcagaggtatagagaagaataatagagcactggcttaaacacagcccctgatacaagcagtgccaaaagccagatttttttttttttttagtttccaattacatgagccaatgcatttagaatgccagtttgaattatttttcactgttacaacatttttgaacaaaattgcatgcaataaaatgcgcaaatatacagattagtaaatgtttgcatatgtaaaagcacttaaataaatatggctttacatcattagatgcaggcagacatcccccctcacacatacacamaaacacacacacacacacacacacacacacacacacacacacacacacgcaggtaaactgtattctaacttttattaccaaagattgactatttgtgaacaccatgtaataggaattttagaatataaattattttttgttaccttatttgctgatgtttttgagattcaatgatgctgttaaatacatcatcaatctattctctttaattgataagtag

SEQ ID NO: 726814 - DNA, 985 bp, Homo sapiens
tttccatcatcaatgattgttttttggtcattctctacctttattaaaaatgttagtttagttctcacagtgttaatttttattacatgtgacatgaacataaatatgtgttccacaacacatgcttatgtctattctccttctcttccttcttcttcttcttttcttcctttcttcttcttccagataacccttccctacgggaaagtaattgcacatgttctgatgaagcccaatatgctacatcaccaattaagtgtaaattacaattttcaaactctatttaaaattgtcttataatctaagcctaggtaattcaaactctcttattttctacagatatttgggactacatttgtttcatttttaattaggataaataagtttttatgatgtaaatccaatgctatgatcgttatcctgttatcctacagagaaggcttattacaatgacactaatcagagcaatcagagttcagaggtatagagaagaataatagagcactggcttaaacacagcccctgatacaagcagtgccaaaagccagatttttttttttttttagtttccaattacatgagccaatgcatttagaatgccagtttgaattatttttcactgttacaacatttttgaacaaaattgcatgcaataaaatgcgcaaatatacagattagtaaatgtttgcatatgtaaaagcacttaaataaatatggctttacatcattagatgcaggcagacatcccccctcacacatacacacmaacacacacacacacacacacacacacacacacacacacacacacacgcaggtaaactgtattctaacttttattaccaaagattgactatttgtgaacaccatgtaataggaattttagaatataaattattttttgttaccttatttgctgatgtttttgagattcaatgatgctgttaaatacatcatcaatctattctctttaattgataagtag

SEQ ID NO: 726815 - DNA, 893 bp, Homo sapiens
ggactgcttgaggtcaggagttagagaccagcctgggcaacaaagtgaaactccctgtctctacaagaaaataaaaaaaattagccaggcatggcggcatacgcctgtagtcccagctatttcggaggccaaagtgagaatatcccttgagcccargaggtggagcctgcagtgaggcatgttcgtgccactgcaccccagcctggacgacagagtggagactgttaccaaaaataataataataataaaaaggccaagtgtggtggctcatgtctgtaatctccacactttgggagactgaagcaggcagatcacttgaggctgggagttcgagacccgcctggctaacacagtgaaaccctgtctctattttaaaaaaagaataataataaaaaaaagaataaaatgattattgctaaatttttatcgactcctaattcagatgaatttaagagctagactccacagaaatgattccttatttagcagagggaacaaaatccagagaagtagggagtttcaacaggacgcttctgcaacagtttagattggaggtaataagataaagaagcaaaaatgggaatggaaaggaggtatcaatggcaaagagtgcagatctaagactgcaagaattctttcatgtatttccaactctggaactatcaccagtacccagagagaggtatatgaaaacaaaataaactgttatccttcctctacacctcaataattcatctaaaatccctagaagccacacataactaattcagatatcaagtgggtttcctatcccccagattatatccccaagtaaattaagagttttttttaaaggattatacattatccaagtaagaaaatagtgaacaatcgtatttacttttttttcatc

SEQ ID NO: 726816 - DNA, 893 bp, Homo sapiens
ggactgcttgaggtcaggagttagagaccagcctgggcaacaaagtgaaactccctgtctctacaagaaaataaaaaaaattagccaggcatggcggcatacgcctgtagtcccagctatttcggaggccaaagtgagaatatcccttgagcccaagaggtggagcctgcagtgaggcatgttcgtgccactgcaccccagcctggacgacagagtggagactgttaccaaaaataataataataataaaaaggccaagtgtggtggctcatgtctgtaatctccacactttgggagactgaagcaggcagatcacttgaggctgggagttcgagacccgcctggctaacacagtgaaaccctgtctctatttwaaaaaaagaataataataaaaaaaagaataaaatgattattgctaaatttttatcgactcctaattcagatgaatttaagagctagactccacagaaatgattccttatttagcagagggaacaaaatccagagaagtagggagtttcaacaggacgcttctgcaacagtttagattggaggtaataagataaagaagcaaaaatgggaatggaaaggaggtatcaatggcaaagagtgcagatctaagactgcaagaattctttcatgtatttccaactctggaactatcaccagtacccagagagaggtatatgaaaacaaaataaactgttatccttcctctacacctcaataattcatctaaaatccctagaagccacacataactaattcagatatcaagtgggtttcctatcccccagattatatccccaagtaaattaagagttttttttaaaggattatacattatccaagtaagaaaatagtgaacaatcgtatttacttttttttcatc

SEQ ID NO: 726817 - DNA, 842 bp, Homo sapiens
ctccatctaatctgaatattgttttcttgtttaatttctacttattatttttcttaaatgtaaaatgtgtcaggaaactttttctagctcctgattcttggtttggttgttcaacgtgtgtatgcaacgtgtcaacttgccctgtctttgaacctcccacagtgaattgaaactatctattttcttggctctctctctctcatcaagccataagcgtcttgaggtcaagcatatggccttgctcagcactgaatttttggcacaagtatttgcacaatactgtttttgaacaaatattgtttaacatttaaataataataattattatgactttttgttttatttgcattcattaattcagatatattcagtgcaagaaatggtagtggtggtggggatgtaagaaggaatgctgtaccatttttggatttaaggtgtacacattgtagtgtcwttaaaccataaatcaaatctagcgcacaattgtgataatgggctcatctttgctgacttacgacatccactgcaatatactcacctctgattttctgtttcatgtgattcccaaattatgctaaatagaaacaagtaaatgatttcaaatccattagaaaacaagcttgataaaaaaataagaaatagtaaaataaagaatattactgcaaaatagtttgcatcccttgacttataaaacagttaagcttgaaataacattctgctaacattttatcttgtttttcactcccttttacaaatataaggagttcacttggaatgattttgttgattcctgctgggtttaaaacttcaattaaatgacaaccattctatttcctatgaga

SEQ ID NO: 726818 - DNA, 600 bp, Homo sapiens
  misc_feature 499, 500, 501, 502, 503, 504, 505, 506, 507, 508, 509, 510,511, 512, 513, 514, 515, 516, 517, 518, 519, 520, 521, 522,523, 524, 525, 526, 527, 528, 529, 530, 531, 532, 533, 534,535, 536, 537, 538, 539, 540, 541, 542, 543, 544, 545: n = A,T,C or G
  misc_feature 546, 547, 548, 549, 550, 551, 552, 553, 554, 555, 556, 557,558, 559, 560, 561, 562, 563, 564, 565, 566, 567, 568, 569,570, 571, 572, 573, 574, 575, 576, 577, 578, 579, 580, 581,582, 583, 584, 585, 586, 587, 588, 589, 590, 591, 592: n = A,T,C or G
  misc_feature 593, 594, 595, 596, 597, 598: n = A,T,C or G
tattgaagaagtttccgatatgtttaaattttctaattctgcacatttgtctgtatgtcttatatgctggtttagttacacatcactcatatgtagttaattcccttttttatttctcagcatttgccatacatgtgtagaagcagagcaaatacttttcagctaatgataattatgtcaattgttcagctactgatacttaaacagcagtacatcattatgcatattaagccacacatcattatatctgttaggactgtaaagctgaaaatttactaaaaaacaactaaaaagtagcttgccaataagatagtcatttattcaagtaacaagttttatggaaatagggtcagtccaagtttggataacttagaaaaacagcaacatttcaaccttttttcttatcaatttgctgygcaatcctaagaatgcccttcagtcttgttttaatatggtagcattgcatatttcgggcctagtgaaaatgtgaaaatatgannnnnnnnnnnnnnnnnnnnnnnnnnnnnnnnnnnnnnnnnnnnnnnnnnnnnnnnnnnnnnnnnnnnnnnnnnnnnnnnnnnnnnnnnnnnnnnnnnnntt

SEQ ID NO: 726819 - DNA, 2551 bp, Homo sapiens
agtatcttttccctctcatgcattatcttctcactctcttaatagtgtcttctgatgaacagaaagttctgagttttaacattgtactttatcaattttttattgttagttattactattttatctttaagaaatatttactcttctaagctaatgaacgtattctactaaattttctactaaatattattgttttaacttctgcattttgatttgcagtccgtttgaaagtgtgtgtgtgtgagtttgtgtgtgtttgatgtgaggtagaaaacaaggttcatttttttctacatatgtatttattcagtagctttttattgcaaagaccataccatttccattgcatttccatgactcattttaaatacactcacttaaggtttggacgattcaaaatatatttttactgaagagttttctagacagagtgttcataaattgattctgttttatagtaataatgttttcagaaaaaaatttgtgagaattgggagaatctggatgtctagaaagaaattataatttttgatatacattcaatttgcatgtatctatataaagtagtatataacatttctaatgtccaggtagttagatatctttagcaaagtttgatgtgtcaaataataaccaatatcttcaggtcattattactttcaaactaagtgtacaacagagaacagatagtatttcctcaatattatctcctatgatttcagatttgccacctgtgtacattttgaaaaaataatattataccaaataaaattgttttctctttggaatatcgttatagaagtagtagcatgggccttacatttagatagatctgtttccactatgaatttgttgggggggcgggaaataacacacactttctgagccctggttttccataactgtaaaaatgaaaatgcgtttaaaaattgaaaacaacgttaagacctgcctaacaacattattgtgataataaaatgagatgtttgtaaaacacctcttcaaataagaggttctgaggaaataatttttttgaaagggtgaaaatgtagggaaatgcaaattgcttgaacttgaacgtcaaatttactaatttcaaatgtcaactctgaattttccgtttaaaatatgtttggctcttaactcacaaatcacatcgcttctcctctcccagaacatctatgaaaatgcagaaaatgccacaacttaaaaatactgaaaaaaatctaacattatcaacttatcatagtcattggaatttgattaagaaaagcaataagcattgtactcaggtttgcctcatgaaagaaagttaggaaaatacttcttcctcctgcctctcttcccaagactcagaaatcaaggatgggtacccaccagaaaactagacacctgttcttcaacttcatggatattttattgtgctctgttgtgtcccatcacatagcatcctattctgtactgtagtgtatcaaattatattgttttgtatagaggggccaggataagaatcttgccttcacacatctttacatatcatttcttagaaattttcatgctcccagaactcaacagagcaaaatatggaaagacagagtagagactgatagaatgctgtgagctcactgaattctgagtatccttaagcaacgttctgaaagaagacccttgctagcaatatttgggaattttagtttttcataaattatagcaattctcagtgccagagaattagacaacctgttaatagctgccaagtcagcccagcagaaacaagctagaaaaattatttctagattctgcacatcggcagaaaagttgtgaaatccagtctgtcttccatatgtagatcataaaagtcagctattaaacaagtagatattgagcaagatcaagggcaatccaaaatcagggttgggtatgaatacattcatccttctggaagtaacaatagctagaaaaaatataatttattccagygtatagcaaaagtaatcattttggatgcttagaagagaaaaacattcattccaaagtcgttattaaatatcggcacaagaagtctataatactctttggtattctcagcaaaatgcacttaaatatggccataaaaaaggagaccaaatgctgctaaaatgagaaggaaaaactggataatatgcaaatactattcttcaatgcaagattaaattatccatgtaggcagtcaaagagcagaaatagtactgaataaaactgaaacaagatgcccaggatatacttgtgaactgttcttagaaccaagaggagaaacagaagagtttcaaatgatgagaaatattttgatagatataaaattggagaaaatatatgtagcatattttaaattattaaattaatattaactttgttatatgtgctaatgatattatagttatatcagaaaatgtcattattcttataaaatgtactcaaaatgcttatggataaaattccataatgtctgcaacttacttgcaacttattgagccttatgtatattgagccaatatacataagcgtgtatgtg

SEQ ID NO: 726820 - DNA, 1132 bp, Homo sapiens
tgtattatttcttaattgagcctcatattacttttgccccaattgttagggattgtgatatttgtatttttttgtctttatttatgcatagtgttttcatttcattttcttccaaacgtcaagggcaaatgcattgtttatccatagagacaacagaagcattttgtcatgtggaaatttattgtgatataataatacatttgtataccccagtgagataaatttgaactcatagtcaccccataccagaatcaaaatactaaatgtgtgaagcttgtttattcttacatgtcaacatgtgccagattatcctacacaaagtatgtaaaattcatttgcacaagaaccatcagattcagaataaacagtttcaaaatgcattagggttaacacagcaaagaatttggtactcagtagagatgaacagcattgaaatgcctgttaactgcctctttactgaggaagcacgtgctatttggatgctttttagcatagtaaatctatttctatgcttcaaacataacataacaagaaagacaacatgctctactcttaagttaagaaaacatatgggcatgatgckgagttttgatgatccattcaacctggaatttagcctagacatgattcactaaatcttagattgaaaagaaacaaaacaaacctcatcctccacagacttgtgttaagttttgctttagaaacagatggcaaagtagaaaagctggctggaaattgattgaatttgaaaaatcagatgaggaaaaatcaagtaattcacaagtccaatagattgttttgaggtttcaggactattcttcacagaataccctcaagagtgttttggcttatgtcattaggaacaacaggtgattatcattatttctttatcctttctttcgggaatctttctttctattctgaaggtctccactctccaaagtatttccagaaacaaagcacatattttattgtctctttactttatgccttgaattctacttggatattattctgactccttaatgtgcatgccttacaacacttgtagatagttatcatgtctgtcaactttaatcactgcatagccagactgcatacacacacatgcatgcgtgcatgtgtgtgtgca

SEQ ID NO: 726821 - DNA, 1132 bp, Homo sapiens
tgtattatttcttaattgagcctcatattacttttgccccaattgttagggattgtgatatttgtatttttttgtctttatttatgcatagtgttttcatttcattttcttccaaacgtcaagggcaaatgcattgtttatccatagagacaacagaagcattttgtcatgtggaaatttattgtgatataataatacatttgtataccccagtgagataaatttgaactcatagtcaccccataccagaatcaaaatactaaatgtgtgaagcttgtttattcttacatgtcaacatgtgccagattatcctacacaaagtatgtaaaattcatttgcacaagaaccatcagattcagaataaacagtttcaaaatgcattagggttaacacagcaaagaatttggtactcagtagagatgaacagcattgaaatgcctgttaactgcctctttactgaggaagcacgtgctatttggatgctttttagcatagtaaatctatttctatgcttcaaacataacataacaagaaagacaacatgctctactcttaagttaagaaaacatatgggcatgatgcggagttttgatgatccattcaacctggaatttagcctagacatgattcactaaatcttagattgaaaagaaacaaaacaaacctcatcctccacagacttgtgttaagttttgctttagaaacagatggcaaagtagaaaagctggctggaaattgattgaatttgaaaaatcagatgaggaaaaatcaagtaattcacaagtccaatagattgttttgaggtttcaggactattcttcacagaataccctcaagagtgttttggcttatgtcattaggaacaacaggtgattatcattatttctttatcctttctttcgggaatctttctttctattctgaaggtctccactctccaaagtatttccagaaacaaagcacatattttattgtctctttacttyatgccttgaattctacttggatattattctgactccttaatgtgcatgccttacaacacttgtagatagttatcatgtctgtcaactttaatcactgcatagccagactgcatacacacacatgcatgcgtgcatgtgtgtgtgca

SEQ ID NO: 726822 - DNA, 1956 bp, Homo sapiens
  misc_feature 1072, 1073, 1074, 1075, 1076, 1077, 1078, 1079, 1080, 1081,1082, 1083, 1084, 1085, 1086, 1087, 1088, 1089, 1090, 1091,1092, 1093, 1094, 1095, 1096, 1097, 1098, 1099, 1100, 1101,1102, 1103, 1104, 1105, 1106, 1107, 1108, 1109, 1110: n = A,T,C or G
  misc_feature 1111, 1112, 1113, 1114, 1115, 1116, 1117, 1118, 1119, 1120,1121, 1122, 1123, 1124, 1125, 1126, 1127, 1128, 1129, 1130,1131, 1132, 1133, 1134, 1135, 1136, 1137, 1138, 1139, 1140,1141, 1142, 1143, 1144, 1145, 1146, 1147, 1148, 1149: n = A,T,C or G
  misc_feature 1150, 1151, 1152, 1153, 1154, 1155, 1156, 1157, 1158, 1159,1160, 1161, 1162, 1163, 1164, 1165, 1166, 1167, 1168, 1169,1170, 1171: n = A,T,C or G
tgatcacaactcactgcagccttgacctccagggctcaagtgatcctcccacttcacactatcaaagtgttgggattacaagagagagccatccttcccagccaatatttgcattttaaaatctactggtgaaaataacttttactgactctctctgtttctactcttggatgacaaaaattcattctttaagtagtaggtaaattgcatgtaaaaatataaatcaatgtagtctacatctctgctaaaaataacaacaacatcaagttcttctgtttttagaataaaatccataaattttctgtgtcttatgaaacatggtcccagttaactttcactttttcatagtgctctttttcaaccactgtaagaatgaaccagtctcaccaccaacattctaccaccactttcaacacatacacactcccactacacacacgcatttcacactatacacacacatgcacacaaatgcaggctcatcagcaagaccaccactactttttgttagtcctagtaacctgctaaagagcatgtctcagtttgctattttgtggtttatttatgtgtttgctgaagtattattttcatcccccttagaaaataaagtccagctgggctcggtggctcacacctgtaatcccagcactttgggaggctgaggcaggcagatcacttgaagtcaggagttcgaggccagcctggccaacagggcgaaccccatctctactaaaaatataaaattagctgttcatggtggcacacagctgtaatcccagctactgggggaagctgaggtgggaggattgttggaacctgggaggcagaggttgcagtgagctaagatcacagcactgccctccagcctgggtaacagagcgagaccctgtctcaaaaaaaaaaagaaaaaccagattaaccaattttcaaggccagtttacttaaaattaatgaatagtaatttcgagtgtggtagctaagtaaatgttgttcttgaaaaagccaagaaggaaataatggtcatatagtattcataaaaaaggcagccttttgatttactgggggttttagnnnnnnnnnnnnnnnnnnnnnnnnnnnnnnnnnnnnnnnnnnnnnnnnnnnnnnnnnnnnnnnnnnnnnnnnnnnnnnnnnnnnnnnnnnnnnnnnnnnnaggcaaaagttgcagtgagccaagatcacgccactgcagtccagcctaggtgacaagaatgaaactccatctcaaaataaaataaaataaaataagctccataaaattaggaattctgattttcttgttcatcaatctattatctaagacaaagcctgacacatgacatgtaatatataaatatacattaaacaaaagaatataaataacaatagcttttttgtgggttgcctaataattttgttataggagactccatataatagtacaattatggccatgaactgagatagccattaagcttgatccatccgaaggtggactggttttaacttttcaaacctttctgtagtgaggaacatgagatagagcaagagaatcatacagatacaaatcagacaatataaaattattttctactaagtttatatttatttcttacattgcaactacctaaaaagttgtatttagaaataattggtaagtatatccagatctccaaaatcaaatttttaataagtttagtraaaaacctatgttttcacaaatttgcacagattatcatgctttgtattatgcctataaatggggcaatgttgagtccaaataatagctggcactgaaaacgagattgaacaacacaacctgatacttatgttaatccgttgaatatgaaatatctgctgagactccccaaagcaatcaattcagaataatctatacttcccaatggacgtatcaaatcagagtgaattagatgagttggaagtgctatgcaaaagcca

SEQ ID NO: 726823 - DNA, 1344 bp, Homo sapiens
cttctgcagaaggatcatacagagagtgatgtggtgataggggacagttggctcggtttctcctaattggtgggtcatcctttggacagcagtagtgatgttgtccagggaccaggtaaattgcttcagcaattagttgattattctgttgttgagtcaaacttttccaggcaggtaaaagatgccttcagatgggattcaaatgtggtaaacctctcccgaaaaggtcgtggatccagatcgtgtctcattctataagtccagctttttcccattcagtgctctttgactctgtggccattatttgggccatgcacatttctgtcataatttcctctgggaatatgttaaggaaattgcaattgcaatttattggcaaggggaagtaatcctacagtgagtctcagtgtcccacagaaaatctagaagagaagttccatgatttagagattgcctggggactgctgctctagtacatctcattggagtaaacgtagacacataactacaaatttatagggtaccgacttcctgttcaaaacttagtcaataacatgaaaacacactctattctttaatatgaataaaaatataatttgctaatgtttcaaagttttatttcctttacttttaatgtctgtttcatatatccccagatactttctcttcactttcaagtattcaatggaaattgcatttgggctatacaagtgttaattctcattttaccagagcttataataatatttcacatttttgtctatttttaaaaatttgggctggacacagtggctcattcctgtaatcctagcgctttgggaggccaaggcgggcagatcatttgaggtcaggagtttgagacaagtctgggcaacaygggaaaaaccttgcctctaataaaaatacaaaaattatccaggcctggtctacttgggaggctgaggcaggagaatggcttgaacctaggaggtggaggttgcagtgagccaggatcgtaccactgcactccagcctgggcgacaaagtgagactccatctcaaaaacaaacaacaacaaaaaagtttgattttcttcttggtacaggaaaagaatgtgtgaatgatcaaggttgctctagggagttttaaagaacagtttttgtttagccatttttggaaaggagttggaatctgtaagaatttcaaaggaagagaagctgtctatattttttgtgtgtgtattttctagtttatgaatcttggtctatgaatttctatgtgcaagtcagattagaagaaatatgactgaaactagtaaaagcctatttaattatagtttattttaaaattattaaaaatttctct

SEQ ID NO: 726824 - DNA, 1344 bp, Homo sapiens
cttctgcagaaggatcatacagagagtgatgtggtgataggggacagttggctcggtttctcctaattggtgggtcatcctttggacagcagtagtgatgttgtccagggaccaggtaaattgcttcagcaattagttgattattctgttgttgagtcaaacttttccaggcaggtaaaagatgccttcagatgggattcaaatgtggtaaacctctcccgaaaaggtcgtggatccagatcgtgtctcattctataagtccagctttttcccattcagtgctctttgactctgtggccattatttgggccatgcacatttctgtcataatttcctctgggaatatgttaaggaaattgcaattgcaatttattggcaaggggaagtaatcctacagtgagtctcagtgtcccacagaaaatctagaagagaagttccatgatttagagattgcctggggactgctgctctagtacatctcattggagtaaacgtagacacataactacaaatttatagggtaccgacttcctgttcaaaacttagtcaataacatgaaaacacactctattctttaatatgaataaaaatataatttgctaatgtttcaaagttttatttcctttacttttaatgtctgtttcatatatccccagatactttctcttcactttcaagtattcaatggaaattgcatttgggctatacaagtgttaattctcattttaccagagcttataataatatttcacatttttgtctatttttaaaaatttgggctggacacagtggctcattcctgtaatcctagcgctttgggaggccaaggcgggcagatcatttgaggtcaggagtttgagacaagtctgggcaacatgggaaaaaccttgcctctaataaaaatacaaaaattatccaggcctggtctacttgggaggctgaggcaggagaatggcttgaacctaggaggtggaggttgcagtgagccaggatcgtaccactgcactccagcctgggcgacaragtgagactccatctcaaaaacaaacaacaacaaaaaagtttgattttcttcttggtacaggaaaagaatgtgtgaatgatcaaggttgctctagggagttttaaagaacagtttttgtttagccatttttggaaaggagttggaatctgtaagaatttcaaaggaagagaagctgtctatattttttgtgtgtgtattttctagtttatgaatcttggtctatgaatttctatgtgcaagtcagattagaagaaatatgactgaaactagtaaaagcctatttaattatagtttattttaaaattattaaaaatttctct

SEQ ID NO: 726825 - DNA, 1660 bp, Homo sapiens
tattcaaaagaaacaaaaagaaaaaaaaagctgtgatttgcatggctgattttaagctatcaacaagttagcaactggttagccaaatttctcaatatttaagaagttggtattcttggtcatcaggagcttgctccagcacaccactgggcctaatcttcagggaggtagacccttgtggcctggggcaaatcccagtgagggttgcagttgccagccatctgcctgcagtattcttagcagctggcagatgggcgtctcagcattgaggatggaatcagattttgtaggcgtagtccccactacattctcaattgcttatccttctgacaatttgacaatcgtgaactcttttaatatttacattgttcttgtaagctttattatctctgttgaaaaggaaaccatatgtagacttcacaacaggcagaattctatgtatgaattatggaaaataacttaaacaataaatcttagacaaccaaatctttagaagccataaaaagaagatattaaagtaggtcagcttattgtagtatgttactgtcattactggaagttttcaagtagtgactattttgcaattttatggaatattttcatggatatttgtgtgtagagcagataatttctaaggtaactactgtgaagcaaagaaacactacaataataggcaaatgctagactcttttttatatcaatcattcgacaaggaaggaagaaaggaagcaaggaaggaagcaaggaaggaaggaagggaaagagggaggcaaatgtgcccaataatcccatagacagttgtttttagataaacatagaaatggatccacctgttgttaaagatcgatatttgtatttgttttatctgagctccttcctcaggaaaggacattcacacttctcccaaaagtattaaagaactgaaactcaccagatcaccacaccagatgcctccttgctcctccctagttcctgttttcttacacattgttacatttcttccctgctataaaaccccctagttttagtcagggagatgggtttgagactcagctcccatctcctccgctgcagcatcctattaaagcctacttcctggcaatacttgtcatctcaatgattgacgttccgtgtgatgagcgacagaacctaacccaaaaccttgatttttcagtagcagaaagaaggaagggaaggagggagggacagaggaagggagaagagaagaaaggaagaaaaagataaagaaataaagataaaaatttaaaaaaccattatttgtacttaatttagctggatggtaagcatgaaacaaatgtcgaagcctgattcttctgtaataagccaaacattggttttatatgaaaatctgattggtttgtactttccactttcttagaacatgattattatataggattatagtgcttttatgatgaaattatatatgtwaatatttagtacacttatgatttacttcaagggaattcaagtttatctaatttatttctcaaagtcatgagacccattaagaactggtaaatggatcttgaatgtgaaggagtctttaaatattatgtgcatgataaaagttttatcagaaatacttatatatcttagacaaatttctaagataaatatttcaaatgttcttttctcc

SEQ ID NO: 726826 - DNA, 634 bp, Homo sapiens
aattttgaaagaactgaaaatcctgataacggatgatgactaaacaactaacatgaaatttgaatgcagccccaggaagcaaaacaataatcacaccagcactaatattcccaagccacccttccctccactcctgtgtccatcttgccaaaaaaaaaattcacaccaaaatgcattactgtaaaagttcagaacaccagggataaaagattaaggtgcagatgttaaaaacttccaggtggggaaaattagatttcttacaaagaaatcaacccagttagcctcagatccatttacaaagtagagtaatgtcatcaaaactttaagtgaaaatgattttcaatctacaattctattcccagcttatcagaccatgcaagaactaaaacatcacaatgttttaaagagttattagaatgtatgcctcaaaaaaacaagaaatacaccaagaaaaatgaagacataaaatccagaaaacagactaagagagaggcaaaagtaatatataatgatatctgttcaatttcccaggaaraaaaaagtccctattggagcaggagaggaacattttttggagaagttctctagaaaagtcagagctgctccatatgaatccatggacaaatttttaaaa

SEQ ID NO: 726827 - DNA, 651 bp, Homo sapiens
tgcctataatcccagcactttgggaggccaaggcaggtggatcacttgaggtcaggagttcgagaccagcctggccaacatggcaaaatcctatctctactaaaaatacaaaattaaccaggcatggtggcgccccccctgtaattccagctacttaggaggctgtggcacaagaatcgcttgaacccgggaggacccgggaggtggaggttgcagtgagccaagattgtgccactgcactccagcctgggtgacagagtgagactctctgtgtcaaaaaaaaaaaaaagtttattggaccccattctagatacagtgccctgagatgaaggctaggatacaacaaataggataggcctctgccctcaatggacttgaaaatttaattagaaagatagcctatatgaaatacagttatccctcagtatctgagggggactggtttcaggacactacrcctccataacaaaatccgcagatgctcaagtcccttatataaaatggagtagtagagttggccttttgtgcctgcaggttcaaccaaccacagatcaaaaatagtattttccgcagatgcagaacccttgcataaagagggccgactataataaaacagaggatttctttgagctggagctgcaaagaaaaaaa

SEQ ID NO: 726828 - DNA, 1270 bp, Homo sapiens
aagatatagtacctgcctccaagatcttagactctaataagaagtttatcgttcctataaatgcctttttaaattataagcattctgtgctgttacttccatcactagcaagatttacatctgagtagcaaagaacacctcatccaaccttaggccaggtgatgtcaagggagagaaatttgtttctttttcatcttcttccagaaattataaggacgtttatccaataccatttattaagtaccaattagatgtatgggtgagagagatagatgactatagatgactcccaaattcctgacttgtgtccctgagtggtacatgcaacttatcagcaagaaacagaatgtgtgagaggggaaagggcagatcaggcttctggggaaagaaaaatgttgaattctgaacatggtgagcttgagattgtgtgattatagttggatatacggatctgagggtcacaaaaaagtttgggtttaaaatcyatagatgaaaaccatcagtcatataattgataagtaaagccattgcaatggatgagattgctcttttaacatatgaacatgcattctttggagactttcaagtagctgaagacagtaacaggtgtgtagtaagtaacctcccaacccgcagcccccctccccagtcccactgcaccctaccaaacgatacaaaattgcgtcagaactatgaaagtactatgcaaaaccacactctcaatattgcttggagagaatgccaagtgtatttttttaagtgagtaaaaaggaaaaagaaacaaatcctccctttctccacttatagagctttgctgcaagcagaggcccaccaataaaaattgctaggaagacagaggaggtacacaggcaagaggactttagagagagttggagagggcaccagaaagcttacatagagcaggacttcaggaatagaatttcaaagtgtgtgctttttaaagggcaggcagctacttaaagggccaggcacacaattaaaagggacagacagtacccttttgaattgagtaagcatgatttaaagggacagttctccaaacacatagcttctgtgacatggagaaaggaaaaaaagaaaaaggagaaagaggtatcctttaaaaaaaaaaaaagtaagttttattgtttatgtttgagatttacccacatgatgttacaggatacatatagacgtacaatggttactatagtgaagcagattaacacatccatcaccttacatagttacttttttgcgcattatagga

SEQ ID NO: 726829 - DNA, 594 bp, Homo sapiens
ggctccttttatttctccgtgccggactgtaatggcatctttgctagaatgcttacccataggcagaagtgcttggaagagaaacactcatagtggaaccaagatatggcaagttttatgttattttaactttgaagtttcctgcaggctgtctcaaagaagcagaaacaggccctttcccagactgccttccaacccagagccagttacaatatatgggggttatgggggttactgcgctggacagtaaaatagactattaaaagtaattgttcctcactcgagctactccagcaaaaaaaacaaacaaaacaaaacaaaamaaaaggtaattgtctcaattttggctatatctgtccttatgtacttgaatttgcaagagctccaaagcaagagtctggtatattctgttttttcaaagccccaacctgccagaggctgaaaccaaatccttcaacctgcaatttgtcacttttaggtaaatgtcggtcagctttcttacatctgtctaacagtatgttggagtgaccaaatcaaagggctgtaatgggcccaccattcctggtaattatctttgcatggggccctcctgct

SEQ ID NO: 726830 - DNA, 594 bp, Homo sapiens
ggctccttttatttctccgtgccggactgtaatggcatctttgctagaatgcttacccataggcagaagtgcttggaagagaaacactcatagtggaaccaagatatggcaagttttatgttattttaactttgaagtttcctgcaggctgtctcaaagaagcagaaacaggccctttcccagactgccttccaacccagagccagttacaatatatgggggttatgggggttactgcgctggacagtaaaatagactattaaaagtaattgttcctcactcgagctactccagcaaaaaaaacaaacaaaacaaaacaaaaaaaaaggtaattgtctcaattttggctatatctgtccttatgtacttgaatttgcaagagctccaaagcaagagtctggtatattctgttttttcaaagccccaacctgmcagaggctgaaaccaaatccttcaacctgcaatttgtcacttttaggtaaatgtcggtcagctttcttacatctgtctaacagtatgttggagtgaccaaatcaaagggctgtaatgggcccaccattcctggtaattatctttgcatggggccctcctgct

SEQ ID NO: 726831 - DNA, 988 bp, Homo sapiens
atattatcctaaagcatgcttctttataaaagctcagaaagacttaatttctcacaaacacaagcaatgcaaaagtgttgagatcaaatcttccgcaagattattgcaagagaaaagagaataataacacccccacagacaagaaagcatgccagaaagagaagcactcaaaagagatgaaaactgtaatctactatttcaaaacagattaaaaaaaatggctgggctgggtgcagtggctcacacctgtaatcccagcactttgggaagccaaggcgggcggatcacatgaggtcaggagttcgagaccagcctggctgacagcaatagcaaaatcccgtctctactaaaaatacaaaaattagccgagcgtggtggcacatgcctgtaatcacagctacttgggaggctgagggaggagaatcgcttgaacccaggaggtggaggttgccgtgagccgagatcgtgccattgcactccagcctgggcaacaagagcgaaactccatctcagaaaagaaaaaaagaaaatggctgggtgtgctgactcacgcctgtaatcccagcactttgggaggctgaggcagaagcatcacttgagcccaggaatttgaggccagcctgggcaacatgctgagaccttgtctctacaaaaaagaaaagtagccaggcatggtggcacaaacctgtggtcccagctaattgagaggctgaggcgggacaatcacctgagcccgggagtttgaggctgcagtgagccatgattgcaccactgtctccaggcttggcaacagagtgagaccctgtctcggaaaaaaaaaaaaaaagawacaagacatgaaaaaacagcataagtcagaattagaaaaacatagaaatgaggtgatagtacttaggaaaatattaaaatttaaaaaatcatctcataaatgaaaattaagctagcagacaggaaggcaattttaaaaacgaaagatgaattaagaaaa

SEQ ID NO: 726832 - DNA, 1387 bp, Homo sapiens
atggcacatgcctgtgatcccagctactcgggaggctgaggcagaagaatcgcttgaacccaggaggttgaggttgcagtgagcagagatcgcaccactgctctctagcctgggcaacagagggagactttgtctcaaaaaaaaaaaaaaagaaaaaaaaagaaaagaaagaaaaagaaataaagaaatattatttagcaataaaaaagcatgaaattctgtcatttgcaacaacatgaatggaactggaggatattatgctaaatgaaataaaccaggcacagacaaggcagatacaaatattgcacgttctcacacacatgcgggagctaaaaagaaaagaccagccatgttgaccaggctggtcttgaactcctgacctcaagtgatccatccacctgccttggcctcccaaagtgctgggattacaggcatgagccactgcgcccagcctgaacctactgtcttctgggataaaattcttcctgagaccattctgtctgtttaaaagtagctagacatggatgtcaggagttcagaatctaattatttaaaaaaacaaacaaacaaatgccatcttgtcttcttggtttacagagacttaacagaaatatacaaagtacgctttcctctcattactttactttcaaagtttgaccagatctttacaaaggttgttccgtatgccacaccacctgataagggagaagtgatagtttaaaatagagaactgggttgggcgtcgtggctcacacttgtaatcccagcactttggtagactgaggtgggtggtcaggttgagctcaggagttcaagaccagcctgggtaacatggtgaaaccccatctctactaaaaatagaaaaactagctgggtgtggtggtgtgtgccttgtagtctcagctactcaggaggctgtggtgggaggatcgcttgagccctagagaagaaggttgcagtgagccaagatcgcaccactgcacttgaacctgggcaacagaatgagaccctgtctcaaaaaaaccaaccaaccaaccaaccaaccacccaaccaaccaaccaaccaaccagagaactgaattgttggtgttaccatctagtttataamcttaaagcttgagacagtctttcccttgggattttatttttttcttagttgaaagaatgaccttataataaaatggtaacaataatgacagaaatagctaacatttttgaagcacttgctacaagccagccattgtgcaaagtactttcttgagtaaaactaggatcacaaactggggtgttatgagcccatctattctatgaggtagatctctttgttaggcccattttacagatgtggaaattgaaatttagagagggtgggtaataatattggaag

SEQ ID NO: 726833 - DNA, 1420 bp, Homo sapiens
tttatccaatgttatttcagcaccaattgaaataatcatatggtttttatccttcattctggtgatatgatgtatcacattgattgatttatgtatgttgaaccatccttgtatcatagatataaatcccactttgtcatggtaaatgacctttctaatatgtttatgaattcagtttgctagtattttgttgaggatttttgcatcagtacttatcagatatatttgcctgtagttttccttcttcatgtttgtctacttttggtatcaggataatactggccttatagaatgaatttggaggtattccttcctcctctatttttccaaatactttgagtaggattgccatcagttcttacaaccatggggaaagcgaacaggaaggaggcatgtcttatatggcagtatcaggagaaagagagagacacacttttaaacagccagatctcttgagaactcagtcactatcacaggacagcaatgggggaaatccacccccatgatccagtcaccttccaccaagccctttcttcaacattgaggattaaaattgacatgagatttgagtggagacttgaatccaaaccatatcacagagtttaaccaaacatactggtcagggcaaaagtacttaaattcagcatggggcatactgtagaaggttcatcgcatccaagtcagctgcatagctgtaatcccatgagaatgtaactcatgaaagcagaacatgtatctacattattttttaccatctttctaatgtctagaacagtgcttggtgaaaagtgtctttcaaatcaatatttcatactttttccaatagctgactatttaattatgtaaccactggtagaaagtatttcacatgccatgctcttgtttgtgatcaaacagacaaaataaacaaaaaaagaaattattttacaagaataaatttgccagttattttctagtctccacattctctttgagaaaagttgttctgaaagcagatgggaataatcgttaaatgtgaagccctcaattgtatcctacccactatttcctcttttctccttcttttagtgacagctggcactgagacaagctcatcaaataataaacatatttgtacctaaagttacatacaaatgttggactatatggtataaacatttaataatgatatctttttgtctttgtacagcttgcaaatggatcttacagacgttgtcacagagacaagaaaagtaagrtgctgtcttctccaatcttttaaaaaaaaatttaggtgacagtaactactatgtactggtgtaattaccttagaagaaaacaacaaattaaatatcagtcagagtagttattagtcccaggagcaaagctgctcagttcacacaattctgaaagggtagaggggaaggatgcagagacccac

SEQ ID NO: 726834 - DNA, 978 bp, Homo sapiens
tatttttaatttactaaaatttgattttttatactttagaaaactgaaattgttatcaggatcaattaagttttatgtaagtcatttgtccacataatttactgactatatattctctctttttaagtttttttggaatcattctttctaccttttcatgtgcccggggtcaaataatacatgtcaaaatgttttttaagtatttttttctttcatcagttctttgtcagtgataaattttaccatgtggagttttcaaccattattagttgtattttgtgtggactgtttttgctgtaatactcacaatagaggtcaaggtgttccgggggccatggtgaggtcaaagcattccacttcgttcatytacagagcttcaattgtgacccggtttaggaacatgctgcttgcccaaaattctccacaatcctccacctccgctcttccatttaggatataaaagagggttttctcagaccttctgccaatgcgcagacagatgaaagacgacacagaggttctcatcattctgctgaggaactgaaagcgggtttcccactccaatgtcttagtttggaatcacggcttttgtcccctctccgagaatgaataatcaccaagaaaagagaggccgtggtaggtgaaggaatgcccaattcagccgaaaagaagtcaatccctcctgcctccttcagcttggagtttagggtagggagagagctttgttcgtgtacacgcggttttcattcttgtctctttcttcgaaacagagactcagttttattaggaaaacaatttgccaaacaaactaaaaggctattattcctaacttctcctgcagctaagagggaccagacaaagttcaagctgatgagctgtgagcagaaggactgagagggtctttggggagggtgcttaggtggaactgacacagctgtgcggcccctttgtccttctttcctcctcctttccctctga

SEQ ID NO: 726835 - DNA, 2191 bp, Homo sapiens
caaaacaacaaaaagtatcaatttaatctttgttaaaacaaagaagtattgtgtgcctacatatgccaagcaccgttctaggcatgtaaggtacatctgttaacaggcaatgttcctgcctctgagcagcttattacggaatggggggagtctcatttaygatgaaaaaataaaataacttaactaataatcttcctcaaaaataatatcctcccaatagataatatgggtgataaaagtaccattcaattttatagaaggcagttaaattaaattccaaatacagaatgaactacaaatccaagtttaataggaatgatatagaaacttatacaacccaggccctagcaaacacctaataaatgtgcattactatagtaggtgataggtttgaattcgtgtccctgcccaaatctcatgtccagtcggtaatccccaatgttgggggaggagcctggcaggaagtgactggatcatgggggtggatttctcccctgctgttctggtgatagtgagttctcactatctggttgtttaaaagtgtagcacctcccgcttctctctcttcctcttgagcccatcatgtaagacgtgccggcttccccttcgccttccgccataattgaaagtttcctgaggcctctccagccatgctacctgtacagcctgtggaactgtgagccaattaaacctctttctttataaattacccagtctagggtatttctttagaggagtgcaagaacagactcatacagtaggtgactcactgactgaagaagaggaaggttcctgaagccatacctggaaagctaccacacagctgtagctgcagaagttgcgtatacttccatctgacatggctaggtgatactgaggaattgctgaggttttacaactgttacactgaacttgtacaccttagcaaatcaaaataaaaaccaatgagtaatatgtacaaatgtacacaaaagtatgagaaattaaataatactatacaatataagaaaatttaagagccagggtaagttgtaggaactgaaactaaatcatgtcacatatagacaaaaactaacataatactgaaaatgtttctttccaatttaaattggtcaaagtctaccctgaaactaccagataaatgaaacttcaaagaaattaggtagggaaaaagaaaatatattaaagaagccatatgaaattcttttggtaagggggaaatgcataaataggtatgcaagtaaataaataagcaatcaaggtaacaggtgatattttacaacaaatatctgaaatatgttaaatgtgccttaaaaatcaaccaaaaaaaaccgttaaaaacaaagcaataaccattatttttcaaccattgcatttcatagtttgtgaaaccaatattacctgcagaagtaaccattttaactctgtaagcagataagcaattaacagaacagaaaagctctgtcttccccaagctattggtattttcaatcatttctgctgaggatctcaatgatttgcaaagcgcacacggtgtaattttggctgatttctattaagagaataaaacaacattcatttttaacaaattcctagtaaaagcataattcttcgaaatgtttatactcaacacttttgaaatatttgaaatcagtgattttcaaacttttatgattgtaatcctcaataggaagtttcatggtacacatgtacttctgagattttgcatttgtgtatgatgcatgtatgtaataaaactaaaaagttttatagaggaataaatatcatgataacatgtaatgcactttgatattttccaatctattctatttcattgaaaaagtaatgcggccaggcgtagtggctcacccctataatcccagcacatcgggaggccgaggtgggtggatcacctgaggtcaggagttcaagaccagcaaggtcaacatggtgaaaccctgcctctacaaaaatacaaaaaaaattagccaggcatagtggcaggcgcctgtagtcccagctattcaggaggctgaggcaggagaatggcgtgaaccaggaggcagagcttgcagcgagctgagatcgtgccactgcactccagcctggcgacagaatgagaagattccacctcaaaaaaaaaaaaaaaaaagaaaaagaaaaaaataataatgctggttataacctagta

SEQ ID NO: 726836 - DNA, 1047 bp, Homo sapiens
agtatagtatactaagtatagtagcatagtgctaagtatatactatcttgtgagtataagttttaggatgtgaagatgggggtagcatagaggcaaagtgatggaaggagatgagttaaaggaattgagaacctaggagactgaaaggattatctaaatgaattttgaaatctcaacaagagctgtgctgagtgcttgtagtcattattttatgtttactactctgtgagaagacagcacttccttttgtgagtaatggaaagttctttcatgtgtcaattgtaagatactttattaggttcaattatctttagtaatgcatactaaaaaatagtgagctcagtgggattattcagtagatatgtgagctaaccccctctgtcagacacctaagaggtagaactgatggtcttcaagaggaatagagacttctcatcctaagtgtgtaagctgtgaaatatcccaccctatgttttctgaaaacaaacgttatatagagtgtccacataaaagctaacaggaaatctcacacacacacagacacacacacacacacacacacacacaaaacattgaaaaacttcaggaaagatataccctgtacccaacatgaacraggtcaaagcaatgaagaaaaagctaggaaatcaaataagtctagaacaactgtgactaatatataaagatttgaggtggttatatccatttaaatggtatcaattagaaaggaaaaaaagaggccaggcacagtggctcatttctgtaacgccagtactttgggaggccaacacaggcaaatcaacctgtggtcaggggttagagacaagcctggccaacacggtgagaccccgtctctactaaaaatacaaaaatatttgctggacttggtgtcgcgtgcctgtgctcccagctgcttgggaggctgaggcaggagaattgttttgacccagaaggggagattgcagtgagctgagattgcgccattgcattccagcctgggtgatggagtaacatccaaaaaaaggtattttacataagaaattttat

SEQ ID NO: 726837 - DNA, 651 bp, Homo sapiens
gccaaggcgggcggttcatgaggtcaggagatcgagaccatcctggctaacatggtgaaaccccatctctactaaaaaaatacaaaaaattagctgggcgtggtggcaggcacctgtagtcccagctacttgggagactgaggcaggagaatggcatgaacccaggaggcggagcttgcagtgagccgacaycacgccactgcactccagcctgggccacagagcgagactccatctcaaaaataaataaatgaataaataaaaaataaaatataagaacattttacatatccccttgctcccaccacagatgggaaaaactggagtttataaggctgccaggagagaggaaactaataaaaatggctctcatgccagctgattcattcacctattttcttaaattctgctcatttaattgaaattgaaattgaaataaatgaaaatatttacattatagcaaacttaaatatataaaatataaaaattaaatccagaaaggtaaaatacttcaaaggtatttttcccttgattttgattctgctcctattctctccaccttcatacagtcactagataacttgagtcttaaactagcaacataagaaaacattacaggaaaaaaaattacgggctagcaaaaaataaaaa

SEQ ID NO: 726838 - DNA, 624 bp, Homo sapiens
ttttaaactctctgaacagtctcctttggtaaaagcataaaataatttaatccagtatagatatctgatttgtggtttagagtgcaaaatcttttcataaattattcatagaaagcaaaatatccttttctcctaatggtattaaatagaatagttttctgctctgctaggaatgcatattccggactccrtttgtttccttaccatgttattgtcagaggctctttagggcatcatctcttttatatatttatttatatatatataatatatattataatagattatattataataatatataatatacaaaatatataatatactttataatatgttatatataacatatatcatattatattttaatatgattatattatattatattatatataatataatattgtatatttcaatcatatatatgttatatataatatattttgttgaattatataattatatatatatatgacatatatcatatatcatataattatatataatacataatataatatatacattatatacatatggaagagcacccttttgtgctcagtcaagctatataatgctactggcttaaaatcataacaaaaataacttttaacaggtttt

SEQ ID NO: 726839 - DNA, 1368 bp, Homo sapiens
tttgtcaattagagctaactttttaatttttttaaaagagataaggtatcactatgttacctaggctgattgtgaactcctgagctcaagcaatcctcctgcctcagcctccggagtagctgggactacaggtacacatcattgtgcatggaaaagctaactaattttaataacattaattctcactcatatttaaatatactttgtggagtaggaatatccatgggagtagtatgttgtacatgttaatgtaatttcatattgcagcagaaaaactgctaactgctagcatacagtactgttatcattttaaagcattttataccatagaaagtacagtatcagaaatgctaactatgaccgcaggctaagaattaagtactggaagctagagaaatcacagctattattttaattaatacacttaatctgtttcaaaaataaaactaaygagcagagactttattttgaacttttaggacatgaatgccaaaaaaagcttcattagaaagtagtacaaaaaataagatttgaccaggtgcagcggctcacacctgtaatcccaacattttaggaggctgaggtgggaggatcacttgagcccaggggttcgagaccagcctgggcaacatagtgacactctgtctctacaaaacaaattttaaaattagccaggcatggtggtgtgcgcctgtagtacacctgtgctttagtagagacagggtacttcctgtactcaggaagctgatgtgggaggatcacttgagcctaggatttcaaggctacagtgagcagccataatcacaccactgtactccagcctgggtgacagagcaaaagcctgtctctaaaataaataaataaaattttaagttctcaatccatacctcatgtctatcttgctggttatgctaattttgaacttaagtgacactgtggggtcaaactaagaggaaaagaatgtcaatgaatgggaccacaccagaaaagtggttttaaaaataacagcatcctcatatatgtatatccattccaggctcctaattctagtcaacgtggaaaaggaggaaagttttaaaggtagtacatgctagtcccatgcaccactgttaaaagcagtatattccaacattagctttatgctatattgaaaccaataccaccgaagaaaataatatagttctataacctaaggaggaaaactgtatcactagaatgttttgcaacttccactgaatttccaacaaaaatataaaatacttactttttcattttttttgaattgtatttgacttggtaagctgcttggattagcttgtctgggacaccatcaaactgatgtggaatgaccttttgaaagtgctaaga

SEQ ID NO: 726840 - DNA, 1368 bp, Homo sapiens
tttgtcaattagagctaactttttaatttttttaaaagagataaggtatcactatgttacctaggctgattgtgaactcctgagctcaagcaatcctcctgcctcagcctccggagtagctgggactacaggtacacatcattgtgcatggaaaagctaactaattttaataacattaattctcactcatatttaaatatactttgtggagtaggaatatccatgggagtagtatgttgtacatgttaatgtaatttcatattgcagcagaaaaactgctaactgctagcatacagtactgttatcattttaaagcattttataccatagaaagtacagtatcagaaatgctaactatgaccgcaggctaagaattaagtactggaagctagagaaatcacagctattattttaattaatacacttaatctgtttcaaaaataaaactaatgagcagagactttattttgaacttttaggacatgaatgccaaaaaaagcttcattagaaagtagyacaaaaaataagatttgaccaggtgcagcggctcacacctgtaatcccaacattttaggaggctgaggtgggaggatcacttgagcccaggggttcgagaccagcctgggcaacatagtgacactctgtctctacaaaacaaattttaaaattagccaggcatggtggtgtgcgcctgtagtacacctgtgctttagtagagacagggtacttcctgtactcaggaagctgatgtgggaggatcacttgagcctaggatttcaaggctacagtgagcagccataatcacaccactgtactccagcctgggtgacagagcaaaagcctgtctctaaaataaataaataaaattttaagttctcaatccatacctcatgtctatcttgctggttatgctaattttgaacttaagtgacactgtggggtcaaactaagaggaaaagaatgtcaatgaatgggaccacaccagaaaagtggttttaaaaataacagcatcctcatatatgtatatccattccaggctcctaattctagtcaacgtggaaaaggaggaaagttttaaaggtagtacatgctagtcccatgcaccactgttaaaagcagtatattccaacattagctttatgctatattgaaaccaataccaccgaagaaaataatatagttctataacctaaggaggaaaactgtatcactagaatgttttgcaacttccactgaatttccaacaaaaatataaaatacttactttttcattttttttgaattgtatttgacttggtaagctgcttggattagcttgtctgggacaccatcaaactgatgtggaatgaccttttgaaagtgctaaga

SEQ ID NO: 726841 - DNA, 568 bp, Homo sapiens
catcgaccgctggttctatcagtggccagtgttctggaaacgcttccccgacatcaaggaagccggatcctccccacacagtgatgggttctaggccatttttgctgcctcggtctgggagctcaccatcctcagaagctcccagcacctggagatgtctcgcatcctggctgagcctgctccctttagcaaacaaggtcaggatttataactgcttttgtggcaacatctggcttatttccctcaagtccccctgccactttttttttttttttttgagacaagagtcttgctctgtcgcccaggctcaagtgcggtggcgcgatctccgctcactgcaagctccgcctcccgggctcacgccattctcctgcctcagcctcccgagtagctgggactacaggcgcccgccaccacgcccggctaatttttttgtatttttagtagagacggggtttcaccgtgtttgccaggatggtctcgatctcctgacctcgtgatccgcccgcctcggcctcccaaagtgctgggattacaggcgtgagccacagcgcccggcycccccgcc

SEQ ID NO: 726842 - DNA, 997 bp, Homo sapiens
gctagctgtgtgatagtggcaaggtacttaaccagcagaagtctctgacctcatccataaaactgatataaacatgactgcttcaaaggattgctctgaaatataaatgaaataatgtaggtgaaaagcttagcacaggtcctggctgataaacaatagtactttataatcaccattgaggagtttattttattgtttatttccgggattatcagggtttggccacttgcagacagcagccaggtctcttcctggcacacctgtcagcagcaaacctgagatttttcaaggcctcctgggataccagcctcaggctgtgtttagggcttggtgtggtggctcacgcctttaatactagcactttgggagaccgaggtgggcagatcacttgaggtcaggagtttgagaccagcctggccaacatggtgaaaccccgtctctactaaaaatacaaaaattagccagaaatctcttgaacccaggaggcagaggttgcagtgagtggagatggtaccactgcactccagcttggacaacagagcaagactccatctcaagaaaaaaagaaaaagaaaaaaaccgtgtttagaggcycccggtcctcacacttgcagaggctcccctcctaatgccaagagtgttgggggatcgaactgcttggagatggagattgagcttctgttgtccagacaagttcatgcctctgtgacccccgccttcccagaggcaggcctttaggatgctgagattgagcttctgttgtccagacaagctcatgcctctagaccctgcttcccagaggcaggcctttagggtgccccaaggcaggaaaatgcaatcatgtgatccagaggaagtcccatagagctgaggcatccctgagagagggagggagttcaggcacccgcccctgcagcccctcagcctcagagaagggagaagggagagtgtccaaggcaaacctgacctgaggctttgggtggcaggggagtgcata

SEQ ID NO: 726843 - DNA, 997 bp, Homo sapiens
gctagctgtgtgatagtggcaaggtacttaaccagcagaagtctctgacctcatccataaaactgatataaacatgactgcttcaaaggattgctctgaaatataaatgaaataatgtaggtgaaaagcttagcacaggtcctggctgataaacaatagtactttataatcaccattgaggagtttattttattgtttatttccgggattatcagggtttggccacttgcagacagcagccaggtctcttcctggcacacctgtcagcagcaaacctgagatttttcaaggcctcctgggataccagcctcaggctgtgtttagggcttggtgtggtggctcacgcctttaatactagcactttgggagaccgaggtgggcagatcacttgaggtcaggagtttgagaccagcctggccaacatggtgaaaccccgtctctactaaaaatacaaaaattagccagaaatctcttgaacccaggaggcagaggttgcagtgagtggagatggtaccactgcactccagcttggacaacagagcaagactccatctcaagaaaaaaagaaaaagaaaaaaaccgtgtttagaggctcccggtcctcacacttgcagaggctcccctcctaatgccaagagtgttgggggatcgaactgcttggagatggagattgagcttctgttgtccagacaagttcatgcctctgtgacccccsccttcccagaggcaggcctttaggatgctgagattgagcttctgttgtccagacaagctcatgcctctagaccctgcttcccagaggcaggcctttagggtgccccaaggcaggaaaatgcaatcatgtgatccagaggaagtcccatagagctgaggcatccctgagagagggagggagttcaggcacccgcccctgcagcccctcagcctcagagaagggagaagggagagtgtccaaggcaaacctgacctgaggctttgggtggcaggggagtgcata

SEQ ID NO: 726844 - DNA, 858 bp, Homo sapiens
atttggtatagcaaataatgaagcatttcaacatatattatctagtttaatcatattgtaggaggatgagcaatggtttttttcccactttaatctactttttaatacrtgaatgaacaaccaccttgtgggaaaaaagcagaggcttagagatggttagaaaatatggctaaaggtggaatcttggactttttttttttttttttttgagacgaagttttgtgttttgctcttgttgcccatgctggagtgcaatggcgcaatcttggctcactgcaacctctgcctcctgggttcaagagattctcctgcttcagcctcccaagtagctgggattacaggcgcctgccaccacgcccagctaatttttgtatatttagtagaaacgggatttcaccatgttgaccatgctggtcttgaacttctgacctcagatgatccacccacctcagcctcccaaagtgctgagattacaggcgtgagccactgcatttggccctttctacatacagtctatcacacagtacccgctgcttcactttacatgggtatgttttggtactctgcagaaattcatctgcctgctctcccctaatcttctaaacagatctgcaactttcaaccaaattacagagtgctttttttaatttagaattttttcatggtagcttacttttttattattgctttctttgctgtacaatgtgggtttatgtaatacatagttcacatatttaaaaacgaggtatactgaaacaatgtatcaatgctgactactttgatacatagtacatgttccaagaacaaggtgtagtcaaatgcatcctaattcatgaataccaatttattttgtaataa

SEQ ID NO: 726845 - DNA, 858 bp, Homo sapiens
atttggtatagcaaataatgaagcatttcaacatatattatctagtttaatcatattgtaggaggatgagcaatggtttttttcccactttaatctactttttaatacgtgaatgaacaaccaccttgtgggaaaaaagcagaggcttagagatggttagaaaatatggctaaaggtggaatcttggactttttttttttttttttttgagacgaagttttgtgttttgctcttgttgcccatgctggagtgcaatggcgcaatcttggctcactgcaacctctgcctcctgggttcaagagattctcctgcttcagcctcccaagtagctgggattacaggcgcctgccaccacgcccagctaatttttgtatatttagtagaaacgggatttcaccatgttgaccatgctggtcttgaacttctgacctcagatgatccacccacctcagcctcccaaagtgctgagattacaggcgtgagccactgcatttggccctttctacatacagtctatcacacagtaccmgctgcttcactttacatgggtatgttttggtactctgcagaaattcatctgcctgctctcccctaatcttctaaacagatctgcaactttcaaccaaattacagagtgctttttttaatttagaattttttcatggtagcttacttttttattattgctttctttgctgtacaatgtgggtttatgtaatacatagttcacatatttaaaaacgaggtatactgaaacaatgtatcaatgctgactactttgatacatagtacatgttccaagaacaaggtgtagtcaaatgcatcctaattcatgaataccaatttattttgtaataa

SEQ ID NO: 726846 - DNA, 644 bp, Homo sapiens
gtaatgtagtacagttcacatgcaatatctgctccggaattcccaatgctgagtacaattctatttaaaaacatttgtacaaatttatggggtacatgtgcagttttgttacatgcatggattgtgtagtggccacatcagggattttacagtattcatcactcagttaacgcacatggtacctattaactaattattaactaatttctcaacaaatacaccccttcatgccctcacccttccaagtatgcattgtctatcattccaatctctacatctatttttacacagttttcagcacccaattatgagtgagaacatgtgaaagttgactttctgtgcttggtttgtttcacttaaaataatgacctccagtttcatccattttgctgcaaaatcatgatttcattctttttaatggctgaatagtattccattgtacatctatacccgactttctttatgcattcatctgttgatggacacttaggttgattccatgtctttgctattgtgaacagtgctgtgataaacaaaccagtgcagatatgtttttggtacattgatttcttttccttttggtagacacccagtagtgagatttctggactgaaytgttgtatctttagttccttgagaaattg

SEQ ID NO: 726847 - DNA, 596 bp, Homo sapiens
gcacagataaatgtcagcagctattaatgtgtgattgacaaaatcattagtagaataattcttcaaacacctaaattaaaacaaagttgtttaaaatatgtgtactactctgtaaaacccagcatactctgactgaaagccagaagatagcagcattctgtagagggygttccatacctaccccaaactccagaccatgactatggtcatcaggtgggcgcttactggcccaggtatttgactgcatcagtgacacatgagttctttgtgagacaacagagggattagctgcaaatgatggaatccacactttgggataagaattatctatggtttattttacagttaaatcaagcatgaatgccatattttccaggtctgctgttgtacagagctaaattaagcaaaaaagagggcattttgataagcatgcaggactaataggccaggcacagtctagcctcaaggactggctccagaaactggaaaactgcttgaaacccaggcaggaccctctccctctcaggtctctgttctgacagctgtttccttctctactttctgcctagagcagcttcctctgctcccagcctgca

SEQ ID NO: 726848 - DNA, 596 bp, Homo sapiens
gcacagataaatgtcagcagctattaatgtgtgattgacaaaatcattagtagaataattcttcaaacacctaaattaaaacaaagttgtttaaaatatgtgtactactctgtaaaacccagcatactctgactgaaagccagaagatagcagcattctgtagagggcgttccatacctaccccraactccagaccatgactatggtcatcaggtgggcgcttactggcccaggtatttgactgcatcagtgacacatgagttctttgtgagacaacagagggattagctgcaaatgatggaatccacactttgggataagaattatctatggtttattttacagttaaatcaagcatgaatgccatattttccaggtctgctgttgtacagagctaaattaagcaaaaaagagggcattttgataagcatgcaggactaataggccaggcacagtctagcctcaaggactggctccagaaactggaaaactgcttgaaacccaggcaggaccctctccctctcaggtctctgttctgacagctgtttccttctctactttctgcctagagcagcttcctctgctcccagcctgca

SEQ ID NO: 726849 - DNA, 1585 bp, Homo sapiens
gatatattttgacgatacagcttataagatttggattaaattttgtttatatatataaaaaactaaatatattcatatatgtatataagagtcaaggttgagtccatgtcttttgattggagcagccaaatgaatgaaggtgacttttactgatatttgcatgttttctaattaaatgcataacctttaacctctctaaaacctgttttcctcatttgaacaaaacggtaacaaagatatctactccacagatatgacaatttcctctctcgaactccagcttcactttctacttactgctatcaataataactamctttcattttgcattttgcgctttaaactgctttcgaatatatttctcccaggattgctatgagatgcatttgattataataacaataaactcacaaacaaaagacaacaaaatcaaactgaggctgagaaaagtacagtgcccacaggcttatagtctttagagagactgaagtgcagttaattccacagctctcaagtggaattgctggcttgaaatctgtcttccatttcaagtcctgtgctccctccactatctgctttcttctcctggaatgatatcactgctgtttacctgggtgaatataaaacaaaaagagtctaaaaaattaggagcctatttgaccttcctagatttctattgattgattgattaggttcaaaaacagggatggggtcttgctatgttgcacaggtcttgagctcctaggctcaagtgatgctcctccctcagcctcccaaagtgctgcgattataggtgtgagccactgtgccaggccagttccctagatttgaaattactttggggtacaattaacttgagttacatcagtaacttgagttacatcaactgtaaagagtaacgtaggcagaatttcccttcattattttcattatttttgttttagcctggacgtttttctttctgtccgatgcaaacaatctctttttctcaggtactcaggtatctcttatttgttgcctttttcttgggtaaacaaatagatggctatgtgggactagccttagcaagaaaacatacctgaaattataaatagttgattggaatgaaattataggatattttctctgtgccgggcagtatgttgctcattctaaataagctaaatataataggataaattaccacaatacattattatatgtgttggctccagagctaatgataaattataaaataagatccatttctgccttcaaagagcccctggtttgtaataaacaatattctccatgtcaacaggggagaccatctttgtttaaatgctagccaacgttggagtttaatatggaagtcttgacttgatcagaaatccttagtattcaagaattttacatctttcccttaatcttgtctggattcatatggcaagccagatgtcctggaaatgcccaaagggcggaggctgccttcccaccatctggagatggtcctttgtaatattgcaacaacactatctcccctttccctatacccatatcaaacaccagactcaacagctggatgttcaattattcaggcctcata

SEQ ID NO: 726850 - DNA, 636 bp, Homo sapiens
attcatgtgattgcagtccaagaaatagaggaaaaagactacaggactaaaaaatatacagagaataacagctgaaatgttgacaaattatgcaaaaggtataaacctgcagattaaagaagctaagtaatacaccatgacttagctaaatcaaaagtgtgatttatccaggaatgaaagaatggttcaacgtaagtgaatcaatcaatgaaatataccacatcaacagaacaaaagagctggaaaggcaggggaaatacatgattatctcaatagatgtagaaaaaaaatttgacacaatcsaatacactttcatgataaaaatactaaaaaaatactagctattaccaaacaatgtgggaatcacattctccatcctcatttagtccaagagatcaacacagaaaaaacattttgtttttatacaccaacaataaataatccaaacaggaaatcaataaatcaattccattacaatagcattcaaaataataaaatgcctagaaagacttttacactgaaaactacaaaacattgctgaagtaaattaaatacctacataaatagaaagacatctcatgttcatattgctcaacacaatttctaccaaaatttcaaaagctttcttacacaaat

SEQ ID NO: 726851 - DNA, 2513 bp, Homo sapiens
ggcactggaagtcgagtgaaaggctattcatcataatgtacaaattatttgataaatatgctattgctaagcagtagtggctctgcaataactgagttgaggagatcaactaattacaatatagaaaatgctttcttttaatccttctctccagagcatgtaataaactaaatgccaataaatattgctcttctcagtattaaagtcaaatggttatattggaagtataattttagttttataatacatcttttttttaacagccttggctatttgtaaattagaaatgctgtacttttaaaatgtcatactctcaactagtttttgttcttttcttcaccatactcagagttgtgatgccatttttgctttccactttcaggtcaagcttttatgatataaaaaagttcaggattgagtctgttcaataactgtaaaagttaaatgactatcttctatgttaatcactgtgttaagtgctgtggctacacagacaatatgatgatctctattctcatggagtgaaaagctaattaatacctgcaatcattcatttacttattcaacaaatatctattaaatccctattaaatgctcttcctgaattctaaactaattcattcatttcattgccacgttcgacaagtacaggttaaaagctcattatatgctaaaggtagttggtgggcaaagatagttataatcctgcctcgtagtgattatggtctacttgaggagacagtaattaatcaaatagtggtacaagtaaatataaaactacagctatgctagatgctttgaaggagaggtgtatggttcctggagaatacaaaacagaagtttagtaaagtcgaagaaaacttccctgagaaagtaccaattgagcattgattaattaactaaagtgaagaggaaagagcattccaggaagtgatgtgaaggcctttatgaagggaggatgacaccataagggacttgaagaaaggacttgaaaaatggcagtatgtctggagaagaagcagtggggataaaacgtgagatggtgctggggaagaaggcgggggacacataacacaagatcataaagatagatttttctgcatagcatggaaacatgtcactaattaaaaagtacaaggaaactgccaagttagcagggtcagtgcatacttcgatatcaacacataactaggttgtcccagttgattcctaccattggatcctctgacagtcagtgaactggggccatgytgttttttctggaatagccaaccctactgtcaaatcacttggggttctcaacagtaattagtacatttaagtcacactttatatggagctatggtcatgtagtcttgcaaaatatataagtaaacttccacttcataagggagtatgagaaaaatgttaaaataaaatctgctataagacaaaaacataacttagcatttctaaaccttatgtgactgttcttgttattaaccaaagtatatcagcttttagaacaaaaattgcaaacaatgatttttgtttcttaagattaatatatgaggtcatgatctctattttgattatttgagatgaccaattgtttattgtcagcatttttttaagtcttaaagttctctttcagtggaaattattcaaatagaattttaaagtaatcatgtcattgattgattaattgtagctctggatagcattggtaggctgtcaactcctaaagttttatttctatcctgctttaccctgaacttcagacttgcatacttgactgcctactcaatgatttctaacagtatttattaagtcatctcacatttagtatacccaaaactgaattgcagaactcctctcctgaaacctgttcttctcacagccttctccatctcacttaatggcaacccaatcaatcatgatgttccagctacaaatcttgaactaagctttactcattttctctcttatctccttttctacctatcagcaactcctatctgctccactttcagaatatatgtagaatctgacccttactttctgtctcagtctaagaaagcaacattttatatctggaaaattgcagttacttcctcactgccgcctgattccactcgagtgagcctagagtttcttctcaacacagcagacccagtggtctgaaagcataaaatgaatggaaactatctgcaccttcctctcaatttttctgtaaacctaaaactggtctaaaaaaaaaagttgattcaagtcatccttctcccctaaccttccaatggtttttaaatctcatttagaataaaatccagtctccctgaacattccacaggacctatacagcttgttatcagtgtatcctcacttttacttctctgaccacagctctttcactcttgttttgtccatgcagtcaatcttttttatagcagtattcacatattcacatagagtacatagaaagattttggcttttatataatacagagtttaaaataactttacagggaactaaa

SEQ ID NO: 726852 - DNA, 1049 bp, Homo sapiens
tctattaaaaaaggcataacacttagctttcttaaaatacttataataaattcacactggaaatagtattttatactaatttcttctgtattaaaagattttaattaaggagagatatgtttcttaatagagggagttaaaagacaattgtacatattaaataatgagcaaaatagtgtgctcaaatccaaagctcaatatctttataaaaattttaattttcaatcaagatatagatattattaaacataagttaaattcagtttttaataaaaataactaaatayactaagtcatatgtagcataaaaagcagtaaactcaacaagttaaaactctaatatatatatatatatatatatatatatatatatatatatatatatatgcatgcatgccggggcaatttatatataattgcctagggcaaacatatatgataatacatataatatgtatacttaatatatattttccaggggcaatctacacataattccttaagtagtgtatttgatacgattccaattatgtctcaactggatctctctttgcattttaaccattcccttttaatcttccagcaaaagaactgttgaccacaaatgttttagaaaattgtgatcacagtgccttctaataataagctctagtagcttaagaggagttatgaattacaaaaacaataagtaaatgcataaagggccaattttaaacctggacaacttaaacgtattttaattgaaatctgctattcaaggatatatacagacctgtaccaaagtagtcaattttatatcattttttctcttataggacaaattatcttctaactttcataattctgtcctttatttaaactctccaaatgttgactaaccaggctggttttgaaataatggaggaaataacatgttaactgccctagacactacagcacatctttctgttttttgtttgtttgttttttgttttgttttgttttgtttttgagatggagtcgcgctctgtcgcccaggctggagtgcaagtggcatgatctcggctcac

SEQ ID NO: 726853 - DNA, 736 bp, Homo sapiens
tcatatagatttaacatctaattttttataagataggaagataatttcacttgataagaaaatcccaactccatcataattttaatattagcttgtcacctatttaaatggcactgtgtaggttcaaataaaattaaaatgtgatgatattatgattaaattaaaatctgtctacattatagatctctttctccatggtgatggttgtaaagttatgtcaagcatataacaatgtgaatcttaagaatagattaggatatgctacttagaggatactaagtagacaaaattataagctgaaaaaagcatatcggttgacttataaaataaattgacatatttattaatccaaattagaataataaacatgcaatgccagaagtttattagtgaacaagtaagtaatataaagtacatgtatggctgatgctccatattgcactttatgttctttattcattggcaaccaacattgcattattaatttatataggtagaacttctgaagatgaattatktatatgcgttatcatataatgacatattaatagatatagtttaaaattaatataagcactacttactaattcaattaagtagtttttgatgctggtatagatgcttatcttattattgaaggatcaacataatttagagttagagaaaaaagggaaagctaattctttcttaaagaaaaaactttttcattatgacttactcaatctaaaaaaaggta

SEQ ID NO: 726854 - DNA, 590 bp, Homo sapiens
ggattacaggcrtgagccaccttgcccagccatattatttacttggttcagatttgttataccaagtaattcagaggttttttcaagagaagaaatgtagaggataaaatgttaataccttaacaattatcagactcattattgagcaagactggagtagcaacagaaggaagtctatttctaatatcctattctgaagaagtatctcatttctttatttttagaatgcttaaaaagttattctatcacaaaggaaaacatagtcctaccatatgatttaccaattgtatttccaggtatttgctaaaatgagtagaaaacttattttcacacaaaaacctgcacacaaatgtttatagtagccaaaggggatcagactatgtcagcccaaaatatgccacttcggcataagtattattttgggctcaaggcaattatacgaggaattctctgacatctctctttctgcctaaagcatgacataaatttccctttgtgaaggcatcctccctctgctctcccatgccaggaggcggtaaacaactctcatcacaggagacagaaagctggcatgagatgtgtctgcataa

SEQ ID NO: 726855 - DNA, 590 bp, Homo sapiens
ggattacaggcgtgagccaccttgcccagccatattatttacttggttcagatttgttataccaagtaattcagaggttttttcaagagaagaaatgtagaggataaaatgttaataccttaacaattatcagactcattattgagcaagactggagtagcaacagaaggaagtctatttctaatatcctattctgaagaagtatctcatttctttatttttagaatgcttaaaaagttattctatcacaaaggaaaacatagtcctaccatatgatttaccaattgtatttccaggtatttgctaaaatgagtagaaaacttattttcacacaaaaacctgcacacaamtgtttatagtagccaaaggggatcagactatgtcagcccaaaatatgccacttcggcataagtattattttgggctcaaggcaattatacgaggaattctctgacatctctctttctgcctaaagcatgacataaatttccctttgtgaaggcatcctccctctgctctcccatgccaggaggcggtaaacaactctcatcacaggagacagaaagctggcatgagatgtgtctgcataa

SEQ ID NO: 726856 - DNA, 590 bp, Homo sapiens
ggattacaggcgtgagccaccttgcccagccatattatttacttggttcagatttgttataccaagtaattcagaggttttttcaagagaagaaatgtagaggataaaatgttaataccttaacaattatcagactcattattgagcaagactggagtagcaacagaaggaagtctatttctaatatcctattctgaagaagtatctcatttctttatttttagaatgcttaaaaagttattctatcacaaaggaaaacatagtcctaccatatgatttaccaattgtatttccaggtatttgctaaaatgagtagaaaacttattttcacacaaaaacctgcacacaaatgtttatagtagccaaaggggatcagactatgtcagcccaaaatatgccacttyggcataagtattattttgggctcaaggcaattatacgaggaattctctgacatctctctttctgcctaaagcatgacataaatttccctttgtgaaggcatcctccctctgctctcccatgccaggaggcggtaaacaactctcatcacaggagacagaaagctggcatgagatgtgtctgcataa

SEQ ID NO: 726857 - DNA, 590 bp, Homo sapiens
ggattacaggcgtgagccaccttgcccagccatattatttacttggttcagatttgttataccaagtaattcagaggttttttcaagagaagaaatgtagaggataaaatgttaataccttaacaattatcagactcattattgagcaagactggagtagcaacagaaggaagtctatttctaatatcctattctgaagaagtatctcatttctttatttttagaatgcttaaaaagttattctatcacaaaggaaaacatagtcctaccatatgatttaccaattgtatttccaggtatttgctaaaatgagtagaaaacttattttcacacaaaaacctgcacacaaatgtttatagtagccaaaggggatcagactatgtcagcccaaaatatgccacttcggcataagtattattttgggctcaaggcaattatacgaggaattctctgacatctctctttctgcctaaagcatgrcataaatttccctttgtgaaggcatcctccctctgctctcccatgccaggaggcggtaaacaactctcatcacaggagacagaaagctggcatgagatgtgtctgcataa

SEQ ID NO: 726858 - DNA, 724 bp, Homo sapiens
tattttggttctcatattaatcttgcttttacattttttggttcataaaaataaaaaatgtttttttgaatatcagtgttttcctgtcaagtaaatgctttcagtatttttaggccatatctgaatgaaaagagccttttcaaatatttattccctaaatgtccttccccccagtatctattgtctgtcttcwtatattttggaagaaaggaactaaagatagagtggagaaaaaagataagctatgagtcattgacaaaaaactggggaagcaaaatacaaggcaggcaaacacaaagcttcaaatataacacattgagcaacaatcagtggtttctagttcaaggtaaaaaaaaaaaaagtgttatttccaaatccaagagttttcagacaaaggacactggagcagttgagaagtttttagcaaatgatgaatgctgcaagcaatgctttggcataacagacattgtgtaaagcattgatggcttactcttgcctaaattttgtacagcatgagtttaaaatgtaaaagaatatgggaaaattgtgtacactttaagagctgctaagagtgatgaacaaagcatatttaatttagtatgatgtaatacacagctatataattaacaaatgcattcatttattgaggtcagcaacagaaatgattacacaactagaaagccagtcctatgagaaaaacccagagcctgggcacggtggctca

SEQ ID NO: 726859 - DNA, 724 bp, Homo sapiens
tattttggttctcatattaatcttgcttttacattttttggttcataaaaataaaaaatgtttttttgaatatcagtgttttcctgtcaagtaaatgctttcagtatttttaggccatatctgaatgaaaagagccttttcaaatatttattccctaaatgtccttccccccagtatctattgtctgtcttcttatattttggaagaaaggaactaaagatagagtggagaaaaaagataagctatgagtcattgacaaaaaaytggggaagcaaaatacaaggcaggcaaacacaaagcttcaaatataacacattgagcaacaatcagtggtttctagttcaaggtaaaaaaaaaaaaagtgttatttccaaatccaagagttttcagacaaaggacactggagcagttgagaagtttttagcaaatgatgaatgctgcaagcaatgctttggcataacagacattgtgtaaagcattgatggcttactcttgcctaaattttgtacagcatgagtttaaaatgtaaaagaatatgggaaaattgtgtacactttaagagctgctaagagtgatgaacaaagcatatttaatttagtatgatgtaatacacagctatataattaacaaatgcattcatttattgaggtcagcaacagaaatgattacacaactagaaagccagtcctatgagaaaaacccagagcctgggcacggtggctca

SEQ ID NO: 726860 - DNA, 724 bp, Homo sapiens
tattttggttctcatattaatcttgcttttacattttttggttcataaaaataaaaaatgtttttttgaatatcagtgttttcctgtcaagtaaatgctttcagtatttttaggccatatctgaatgaaaagagccttttcaaatatttattccctaaatgtccttccccccagtatctattgtctgtcttcttatattttggaagaaaggaactaaagatagagtggagaaaaaagataagctatgagtcattgacaaaaaactggggaagcaaaatacaaggcaggcaaacacaaagcttcaaatataacacattgagcaacaatcagtggtttctagttcaaggtaaaaaaaaaaaaagtgttatttccaaatccaagagttttcagacaaaggacactggagcagttgagaagtttttagcaaatgatgaatgctgcaagcaatgctttggcataacagacattgtgtaaagcattgatggcttactcttgcctaaattttgtacagcatgagtttaaaatgtaaaagaatatgggaaaaytgtgtacactttaagagctgctaagagtgatgaacaaagcatatttaatttagtatgatgtaatacacagctatataattaacaaatgcattcatttattgaggtcagcaacagaaatgattacacaactagaaagccagtcctatgagaaaaacccagagcctgggcacggtggctca

SEQ ID NO: 726861 - DNA, 751 bp, Homo sapiens
cattgatgagcccaaccctgatcaacagacccccaaccaagccgctgacaagtaaactatgattataaataatcattgtgttaagcctatgcactctggggtaatttgtaatgcagtaacaggtaactggcacagagaataatcayacatattcatgcccaatgcgtggcatatagtagctgttggaaaaaaagaatagtcccctttcataccttttcaaccaatcagaaaagtcccagctcatcccagtgaaagttgcaaaattatgttaagatcattagtcacaaagatggaggaagcaagttcaggaataccatttatcaatgcttctactttggctccttgctgagaggagagaagcaaagcaacggctggaacatggacctcctgcactgggggcatgcagctccaccatcgacacgcaggtggcctgacagcctcagagcaggttttcctggaataattattcccattgccatgattggttatttctatgtcaaagtcacttccccttttcactcctgatttttcatttttgtaaaaatgacagtgcttgatttagctcttggaagaggatagggaatttggggaggtgtagagacatggagcagaaagttgaggaagggaacaaaattagtcatcaaaatgggctttacaaatataaagtgctaatgaaatttgaaataacaacaataattatgcttccaaggccgaagcctcacatttctcaccatgaatattcattcctgtt

SEQ ID NO: 726862 - DNA, 587 bp, Homo sapiens
ctggggaggtgattaagaggctgtacaggagggagttacagagcccaacattaagtatgaaggtaccaaatataaggtgaagctggaagtagagaaataggtaaagaagttggcttttgcttagtacttagctttgtccaaaccgagtgtctttccatttcttaaatgtaacaggttctcctttgttgcctagatgtattacttggaacattctgcctttctaaacagactttcacctaattaacaccttctcagcccatagatctcatatatctcatactggaccctttttgaaaatttccctataaattccttagtttgaagattgaaattgtttaattgtttatagcctcattaggttctaatcttcaagagagcaaaagacatgaattattgtccattaccgtaccccataatttagcacactcctagcaaatagmaagtgcttggtaactatgtattgacttggctggaagttgcaaggcaggagaatacaaatagggtgaaatctaatctgaggaatgactcagggtcaggccagaatttcagaactgaggctgcagactctaagagagctggaatcctat

SEQ ID NO: 726863 - DNA, 1864 bp, Homo sapiens
  misc_feature 1120, 1121, 1122, 1123, 1124, 1125, 1126, 1127, 1128, 1129,1130, 1131, 1132, 1133, 1134, 1135, 1136, 1137, 1138, 1139,1140, 1141, 1142, 1143, 1144, 1145, 1146, 1147, 1148, 1149,1150, 1151, 1152, 1153, 1154, 1155, 1156, 1157, 1158: n = A,T,C or G
  misc_feature 1159, 1160, 1161, 1162, 1163, 1164, 1165, 1166, 1167, 1168,1169, 1170, 1171, 1172, 1173, 1174, 1175, 1176, 1177, 1178,1179, 1180, 1181, 1182, 1183, 1184, 1185, 1186, 1187, 1188,1189, 1190, 1191, 1192, 1193, 1194, 1195, 1196, 1197: n = A,T,C or G
  misc_feature 1198, 1199, 1200, 1201, 1202, 1203, 1204, 1205, 1206, 1207,1208, 1209, 1210, 1211, 1212, 1213, 1214, 1215, 1216, 1217,1218, 1219: n = A,T,C or G
ggggaaggagggtgctggccatggatacaggcagcaccaggagatctgctcacactaccaacagaattcttatctggtttggaagttatctgaaattaaaatcatgcctgacatatgaggccctgggagaaatgcattgtgcctttcttacctgagattatctctgtctagttcctgtgcaataaggaggctgacagggaaagcacggttggtacccttttctccctggcaggaaagtcatcttcctctaagccatggcttttggagaaaatttttctcggggtggcattcctgctaagaaagtgaaacactggcttttgtttggaagaggtcmtatctgtatccggacctggagtaaatgtcatttgtcctggtccctaaggcttcacttgaaagtagcatggtggctctttatggcaccatgctagtcatttatacatatattttcttattcttgcaaaaacctataatatagacaaaactatgaatcctgctttacagctgaaggtactgagtctcagatggtacagagactattaaacacaaacaaactttgattctaactaaagtcttttaactctggctcaatacggaaatgacaaacttatctttccaacttttattttggattcgagagtacacatgcaggtttgttacatggtatattgcatgatgctgaggttaaacttaaagggccaaatagcaaatatttgaggtttgcagcccataagatcactatagcacctactcaactctgtcattgaagtgtgaaaacagccacaaacaatacataaacaaatgaatttatagccgtgttccagtaatgtcccattgtgtttataatacaggcagccagctcataggccacagtttgcagacggctattgtagaatgctctttggactcccgcccttgatacctggtgataagtaaggtaaacaggcaaataagcattagtgacctctgagttctcattctgtccaacaaataccttgtgacccaggcctgttaccaggtcctaagtctctatgttttatttatgtcagacatagcccacatgagtcattgattctgccatatattaaaatttgggcatggacataacggtagaacatagatnnnnnnnnnnnnnnnnnnnnnnnnnnnnnnnnnnnnnnnnnnnnnnnnnnnnnnnnnnnnnnnnnnnnnnnnnnnnnnnnnnnnnnnnnnnnnnnnnnnnacatcacggtagaacatagatcacacactccttacttagcttcatggtacaacccattatttaattttaagattgtatcacatatatagagaatttgaggtccattgcattaaatagtggaagtaatctttattcgcagtttctaaaaaatacatgcttttttctactgggcagtttttctatcaaccctctataaaggcaaagagaaaaatattaagtcgtagctcagggaaagcatttctgctatggacttagataatgtgactcaggtattgcctttcaggtaaaaactggagatgaatggatagttagcatgtctattagactttctctatcaaacatcagatagggtaaacgagcctctgagaagtgctgactctcattcgattcacaatcaaatactctaacaaggacttaaagtgcagataatctctattgtggattaaagtaaaagccatagactttggccgctatgtgatgcagataggtaaaatgccattcttttggaaacacttaagaactgattatttattgcgttctcagggaaataaccaaagcacttttgtacaaatgtgatcagaatatcattccctgtggggtgctttggctgcagttctcagaggccaccctcattaaaaactagtg

SEQ ID NO: 726864 - DNA, 1897 bp, Homo sapiens
gaacatcattaccccgaccacttgcttctgtgatagcaaattcattttactttatatcttgactcttactgaattttaaagctttctggctatgaaagatgcttaggtcttgctgagactatggaaaaaaatgtcatgactatttagcaaggtcttacatagacataggaaaggtgtgtagcagtatctaccaggtatatgccaagctaattcttaggttacttactcttcccttgaagagtttattagcaagtgagacacgcactgggggacttgaaccacataactgctgctttctcctcttaggctcagcctataagctagtgtattactttaccaactggttgctgtattgaccagaaccagccaagttatttcctaagaatgtgaacccatatctgtatacaattgatgtacgccttcgccactgtgaatgacaaaattgcttcttatgaatggaatgatagtgatgtcctatatcctcagttccaagccctgaaagaacaatctgtaggaattgagtctacagtgagtgagagacagggagggataatggaaagtccaagctcagtctccagttcattctcactagcataaatttctgagaggaaaagtcctttgcagacagtttgttcctgaaaagaatatgcacatttctgacagttatggtaaaatataacataaacacyacctgggcagttggggaggaatgcttgccatggggactttagaagttgtgcttggcagctgcccattccccagagagtcacgaatgagggcaagaaaagttgctttctgtgatatctgcatcctgcaggctcacagagttctcacggagatctcacagaagcacattttgtttctttctgcagcaatggtgacctggtcaacttgctggccactggtagagggaactttggtactcagaagtagagcctcctcatggccaggggatgagggtggaggcaagagagtccccaaggctgaggtgggaaacaataatgccagagaaggaggtgaagatggttattctagaggagaaaaaggttggcacctgcaaagatgatatctgagtgggaagggctggctacagcagctatggagagatagcaacggtgcagtgagaatcaagtacttaaaagaatatagagaatgatgcatggtagggaggaaggttggtggtaaagaagagctattgtctgctgatgagaatggaagagccctgggctgagtcataggctttgctgctggaaagtagtaagaaaagataatcagcatcacagacatgtggactctggggttggaaaaggagatggtgaaatagatttgacttgtatataaaaaagccatttaagctactttttagattatgaaagtaatgcattcccataattattttaaaaatcagataactcgattgtttgacataaaaagtaacttgctcctcttccttcttcccctccccaattatctagaggtagcagtgtgatggttagaacaagttgcagttaagtttttaaattctcactgtaatagtcagtagactttctgatggttacctataagttaacaggctaatgcttacttgtggtatttgaccaatatttcttcttcctgagatgtcctttccaccaacatggctttttctgcctccacaactcgaataaataagagtctttgcacccacaactccaaactgcatcttttcttccccattttaaattatccagtttgatgctagtcaatttacttccaccaaacaaacaaacaaacctttctagctattaaatacctgaacttaaaaaacaaaacagataaattagagaagttgtgatatggtttacgaaacattaattacaggcttatcataatcaggaacaaacctggagtgtttaaa

SEQ ID NO: 726865 - DNA, 1897 bp, Homo sapiens
gaacatcattaccccgaccacttgcttctgtgatagcaaattcattttactttatatcttgactcttactgaattttaaagctttctggctatgaaagatgcttaggtcttgctgagactatggaaaaaaatgtcatgactatttagcaaggtcttacatagacataggaaaggtgtgtagcagtatctaccaggtatatgccaagctaattcttaggttacttactcttcccttgaagagtttattagcaagtgagacacgcactgggggacttgaaccacataactgctgctttctcctcttaggctcagcctataagctagtgtattactttaccaactggttgctgtattgaccagaaccagccaagttatttcctaagaatgtgaacccatatctgtatacaattgatgtacgccttcgccactgtgaatgacaaaattgcttcttatgaatggaatgatagtgatgtcctatatcctcagttccaagccctgaaagaacaatctgtaggaattgagtctacagtgagtgagagacagggagggataatggaaagtccaagctcagtctccagttcattctcactagcataaatttctgagaggaaaagtcctttgcagacagtttgttcctgaaaagaatatgcacatttctgacagttatggtaaaatataacataaacaccacctgggcagttggggaggaatgcttgccatggggactttagaagttgtgcttggcagctgcccattccccagagagtcacgaatgagggcaagaaaagttgctttctgtgatatctgcatcctgcaggctcacagagttctcacggagatctcacagaagcacattttgtttctttctgcagcaatggtgacctggtcaacttgctggccactggtagagggaactttggtactcagaagtagagcctcctcatggccaggggatgagggtggaggcaagagagtccccaaggctgaggtgggaaacaataatgccagagaaggaggtgaagatggttattctagaggagaaaaaggttggcacctgcaaagatgatatctgagtgggaagggctggctacagcagctatggagagatagcaacggtgcagtgagaatcaagtacttaaaagaatatagagaatgatgcatggtagggaggaaggttggtggtaaagaagagctattgtctgctgatgagaatggaagagccctgggctgagtcataggctttgctgctggaaagtagtaagaaaagataatcagcatcacagacatgtggactctggggttggaaaaggagatggtgaaatagatttgacttgtatataaaaaagccatttaagctactttttagattatgaaagtaatgcattcccataattattttaaaaatcagataactcgattgtttgacataaaaagtaacttgctcctcttccttcttcccctccccaattatctagaggtagcagtgtgatggttagaacaagttgcagttaagtttttaaattctcactgtaatagtcagtagactttctgatggttacctataagttaacaggctaatkcttacttgtggtatttgaccaatatttcttcttcctgagatgtcctttccaccaacatggctttttctgcctccacaactcgaataaataagagtctttgcacccacaactccaaactgcatcttttcttccccattttaaattatccagtttgatgctagtcaatttacttccaccaaacaaacaaacaaacctttctagctattaaatacctgaacttaaaaaacaaaacagataaattagagaagttgtgatatggtttacgaaacattaattacaggcttatcataatcaggaacaaacctggagtgtttaaa

SEQ ID NO: 726866 - DNA, 1897 bp, Homo sapiens
gaacatcattaccccgaccacttgcttctgtgatagcaaattcattttactttatatcttgactcttactgaattttaaagctttctggctatgaaagatgcttaggtcttgctgagactatggaaaaaaatgtcatgactatttagcaaggtcttacatagacataggaaaggtgtgtagcagtatctaccaggtatatgccaagctaattcttaggttacttactcttcccttgaagagtttattagcaagtgagacacgcactgggggacttgaaccacataactgctgctttctcctcttaggctcagcctataagctagtgtattactttaccaactggttgctgtattgaccagaaccagccaagttatttcctaagaatgtgaacccatatctgtatacaattgatgtacgccttcgccactgtgaatgacaaaattgcttcttatgaatggaatgatagtgatgtcctatatcctcagttccaagccctgaaagaacaatctgtaggaattgagtctacagtgagtgagagacagggagggataatggaaagtccaagctcagtctccagttcattctcactagcataaatttctgagaggaaaagtcctttgcagacagtttgttcctgaaaagaatatgcacatttctgacagttatggtaaaatataacataaacaccacctgggcagttggggaggaatgcttgccatggggactttagaagttgtgcttggcagctgcccattccccagagagtcacgaatgagggcaagaaaagttgctttctgtgatatctgcatcctgcaggctcacagagttctcacggagatctcacagaagcacattttgtttctttctgcagcaatggtgacctggtcaacttgctggccactggtagagggaactttggtactcagaagtagagcctcctcatggccaggggatgagggtggaggcaagagagtccccaaggctgaggtgggaaacaataatgccagagaaggaggtgaagatggttattctagaggagaaaaaggttggcacctgcaaagatgatatctgagtgggaagggctggctacagcagctatggagagatagcaacggtgcagtgagaatcaagtacttaaaagaatatagagaatgatgcatggtagggaggaaggttggtggtaaagaagagctattgtctgctgatgagaatggaagagccctgggctgagtcataggctttgctgctggaaagtagtaagaaaagataatcagcatcacagacatgtggactctggggttggaaaaggagatggtgaaatagatttgacttgtatataaaaaagccatttaagctactttttagattatgaaagtaatgcattcccataattattttaaaaatcagataactcgattgtttgacataaaaagtaacttgctcctcttccttcttcccctccccaattatctagaggtagcagtgtgatggttagaacaagttgcagttaagtttttaaattctcactgtaatagtcagtagactttctgatggttacctataagttaacaggctaatgcttacttgtggtatttgaccaatatttcttcttcctgagatgtcctttccaccaacatggctttttctgcctccacaactcgaataaataagagtctttgcacccamaactccaaactgcatcttttcttccccattttaaattatccagtttgatgctagtcaatttacttccaccaaacaaacaaacaaacctttctagctattaaatacctgaacttaaaaaacaaaacagataaattagagaagttgtgatatggtttacgaaacattaattacaggcttatcataatcaggaacaaacctggagtgtttaaa

SEQ ID NO: 726867 - DNA, 619 bp, Homo sapiens
ttatttaggttagaatgcaattatatattaccattataaagtcttatactagtatgccatggacacaaaaataaattcagaaaattattctaagacactccccactggccagcaagctctttaataataattatctgagaatagaaggagactccatttgaaaccgtttttctaaatatttgcaaactatgcatctgacaatggtctaatatccagattctataaggaacttaagaaattagcaagcaaaaacctaacaatctcattaaaaatgggcaaagaggccaggtatggtggctcactcctgtaatcccagcactttgggaggccgaggtgggtggatcacctgakgtcagatgttcaagaccagcctggccaacatggtgaaaccctgtctccactaaaaatacaaaaaaaataaataaataaaattagctgggtgtggtggcaggcacctgtaatcccagctactcaggaggctgaggcaggagaattacttgaacccaggaggtggaggttgcagtaagctgagaatgtgccattgcactctagcctgggtgacaagagcgaaactccatctaaaaaaaaaaaaaaaatccacatcccatatcagtcagaa

SEQ ID NO: 726868 - DNA, 619 bp, Homo sapiens
ttatttaggttagaatgcaattatatattaccattataaagtcttatactagtatgccatggacacaaaaataaattcagaaaattattctaagacactccccactggccagcaagctctttaataataattatctgagaatagaaggagactccatttgaaaccgtttttctaaatatttgcaaactatgcatctgacaatggtctaatatccagattctataaggaacttaagaaattagcaagcaaaaacctaacaatctcattaaaaatgggcaaagaggccaggtatggtggctcactcctgtaatcccagcactttgggaggccgaggtgggtggatcacctgaggtcagawgttcaagaccagcctggccaacatggtgaaaccctgtctccactaaaaatacaaaaaaaataaataaataaaattagctgggtgtggtggcaggcacctgtaatcccagctactcaggaggctgaggcaggagaattacttgaacccaggaggtggaggttgcagtaagctgagaatgtgccattgcactctagcctgggtgacaagagcgaaactccatctaaaaaaaaaaaaaaaatccacatcccatatcagtcagaa

SEQ ID NO: 726869 - DNA, 619 bp, Homo sapiens
ttatttaggttagaatgcaattatatattaccattataaagtcttatactagtatgccatggacacaaaaataaattcagaaaattattctaagacactccccactggccagcaagctctttaataataattatctgagaatagaaggagactccatttgaaaccgtttttctaaatatttgcaaactatgcatctgacaatggtctaatatccagattctataaggaacttaagaaattagcaagcaaaaacctaacaatctcattaaaaatgggcaaagaggccaggtatggtggctcactcctgtaatcccagcactttgggaggccgaggtgggtggatcacctgaggtcagatgttcaagaccagcctggccaacatggtgaaaccctgtctccactaaaaatacaaaaaaaawaaataaataaaattagctgggtgtggtggcaggcacctgtaatcccagctactcaggaggctgaggcaggagaattacttgaacccaggaggtggaggttgcagtaagctgagaatgtgccattgcactctagcctgggtgacaagagcgaaactccatctaaaaaaaaaaaaaaaatccacatcccatatcagtcagaa

SEQ ID NO: 726870 - DNA, 645 bp, Homo sapiens
aaaatatgtagtgtgtgttcgtttggtatgcttgtgcacgtgcgtgctgtgtgttgtgtgctgtcaccagcatcaacatctcaaattagcacttggagaatgagattccaggaaaaaatatccagaaatgcctaaaattgctaaaactctgcaaaagaaatattgaaaaaaaaaatgcaccattgcataatgaatcctgagtaaytggctgaagctctgaatgacacacccacatacattgacagttttccactgggctcatatcattcatccattttccctcagaatctgaaagataaatctgacaagctctggataaacactggctaagactctatagtttctgggtatggagaggtgacatgacttattctctgttatcatcgggtctcctgttaggcagcttcagcaaagactctggatagatcaacatgtcaggctggaggcttagtgataattcagactgcggttgagttgaagcgactgctcaggcaatcaggagaatatagcaatgcatagttccttccaaactacaagaaaactgagaagagaaatagaattttgaactctttggtataatgaataagatcacaaaactggaaactcgcctactaaattaagccaattattttgttcccccctaga

SEQ ID NO: 726871 - DNA, 1053 bp, Homo sapiens
gctaaggatagttactgcctggcaaacccctacatgagatcaaggaccttcccaaatacactactgcataatcttccttgactctgtcaggcagagttatttactcccatgatgcttcatatatcctacatgctccatcttacaaactttgtttgtttgtttgagatggagtctcactctgttgcataggctggagtgcagtggtgcgatctgggctcactgcaacctccgcctcccaagttcaagcgattctcctgcctcagcctcctgcatagctgggattacaggcacgctccaccacgcccagctaatttttgtatttttagtagagacagggtttcaccatgttggtcaggctggtctcgaaatcctgacctcgtgatccacccgcctcagcctcccaaagtgctgggattaccggcatgagccactgtgcccggccctcatcttacaaacttttaagcatctgttttccctgcaaaaccatatgtgaatcatcaagaacaggatctgtaattcattcatctttggttctacggtacccagcacagggccagcctcagtgtttatgaagtaaaggaagtcctagctctgagcttcctagcaaccaggtcagaatgggaaagaagacatattttgtggctcagcttttttatctaatcaaaggacaccaacagtggttggtgttaaatgttgctagcagggcaaatgtgagtaagactgaaatattgacagaccttgtaaattcccatatctgatttgaaggaccaggagagggaaaaaggtattaatgatcaggttccatagcaagtcttatggaaaggcatttgttgagcagccacagaggctctcaacaagaaaaacttaccaacagcaggaagaaactgggggaaaccacttcacagaaagtgagatccaggagatctttctgtaaaatagctataaaagttaccatagtaggctgggtgcagtggctcatkcctgtaatttcagtactttgggaggctgaggtggggagatcacctgaggtcagcagtttgagaccagcctagc

SEQ ID NO: 726872 - DNA, 579 bp, Homo sapiens
tgaaaatccttgttttgaagtttctccccaaaacaattgaggtctgggaaggggtaaatgtgtcaagagatgtgtatgctgtcttggccacatttaattcaaggattgcyccacgaatcaagggctgtaaatttgtaccatttacatttttattactctaagcaatctctgcaaaatgaaaaagaacataattttaaaagttggtgtttattatcatttttatatgtagtcccataatgaataggctgtttggacagaatcaaaagccttccctgaggtccccgagctggcatagccccgtagactggtactctctattactcaagggcatcaactggccagtacacttcttcttctccaagtcactgtaaattaccacccaaagcctgatgctgatatagggatgtaaaaaagaccaatgctgatcatgttccctgggcacttctcaggaaagaaaagctcatctggagcccaccctgctgaagcaggtgggtgagattctaacaccagcatcatcctttactgtgacccagcaggcactccaccaattggcaggccagtttctcctctgcttgggca

SEQ ID NO: 726873 - DNA, 1055 bp, Homo sapiens
aggtaaataggctcagaggaagttcatttaactcagcaattttaactgatctttcttcccaacacgctcttcctggtcatttcctacttgttcttcaagtgcctacttagattttatttcccctgagaatctaactttgctcctaaacaatagactgcctgcctctataagtcaagagttttctagctataagtgatggacacccaattaaatgtaggtattaaaggatatggtatgggtagatgttgattcacatcrttgaaacactccagaggagaatctggacaggtgtagctgcctccgagatgtaacaaatctgtgcctctctgccctctccctctttcacacagtctctgcactctactttcctctgtgtgcttcattctcagtctcttccaaagtgttaataaacatgaccaggtattcataagacctggcaaatcaaatttttaaaaaacatccttttcctcacaatagttctagaatagatcccaggggtgacctatttgcttgctttggatcaattgtccatcaaatgtcctttgaaggataggctattctgaatgactgtatgcctgcatgtagagtagaaaggcgtagtgagccacagatgaaagtcacgaaccaggaattagaaactcattctaggcaggttaaaacatagcttctccatattgtccctccaatagaataccaacacacttgatatgaaccttgtattaatacttacaggtaattgttgttattactatgtgttaaatattatgctggaatataacaaacagtattttgattaatcttcatgaaaacactatgaggaaggtgttagatctgttttacaaaagagaaaactaaagctcagaacaggtgtaacacattcatggtcaggcaatttgtgaaatgtggaccagtggagggaaagtacaattccgaacctgttggtcattctgggactcttctcactatgcatttttaatggtctaggtaggtggtctgtcctttggggctttctatggaaacataattatttgatatttatttaaatttttatagca

SEQ ID NO: 726874 - DNA, 582 bp, Homo sapiens
tccttttcttgtactttttggtctgttgtctgttttgtctaatgcatgtccagggttctaaggttagtattacttttgtagtaattttcagctttcagtttcaagttttatttttacttatttatgaaatttttgacttggttatattttgagttttcatatcatctttaacatgagacatatcttttgtatatttaaaagagtcattgaaaggattattttcccaatrcattgatgtattactattttattatgcacaataatccctagattaaactatcatattgaacacaatggtgttacagtcatatgtacaatcagattttaattggttctaaggaaagtaaattggatgaaatatattattttaagatttaataattgtatgagagtgatctatattatttagccctatcttttgatgcttacatacttcattttttaaataacttttatataaaatggaatacaaattctctgttagactgtatgtgtagaaagtgccttttactctaaaattgaattttttcagtcaaaaaaacactttgatggattatatggacaccttaataattctattta

SEQ ID NO: 726875 - DNA, 609 bp, Homo sapiens
ggttagtaagtatcaaagcagcaagatagctaacatttattgggtttaacatatgcctattttatacatattgtcacatttaatgctcatttgaaaaaccagttgacatccactgggcccctcctcactgacaactgaatgcttggttcctggcacagctgcttctctggagacaagtgcccctgaagactgcaatccttcttgcatctgggcttctgggcacctgcccaccaacgtgctagtgcatttcccagctagggtcacagcttcaactgaagctctgatgcccactccagtgaaagctgtgagactgaagaaaagctaacagctcacttcatattaaacccttcactttggaacacagaacgctcaaggatgggaggttctctgttatagacacaaaaggtgccccagggttgctcacatgagtgctgaacagcgtycctaagtcagagatgcccatccaggaacagtggggatgccctggtgctatttgattccatggcacctcttttcttttttcctgagagttttgtctatttttaaaattaaaattaaaatgatttgtgtcaagattgctgtaacttttgtgtcccctgcgagatttca

SEQ ID NO: 726876 - DNA, 646 bp, Homo sapiens
gctggtccaggagaggcctgagaatcttacccttggtaaatgtggctgttgagctcaacatagttcactgtcagagcttgggaggaatgggaggttaagttggagccatggcctgtctgctgtgrcgctgtgtccctgggggaaagggaagcctctctgtgtcctacaaaccctctccagagtccagtggggtgaggcctcatgtgcccagccactaagcgggcatgacacatggggaagacagtaaacaaaaacaaaaaccatgtcaagcaaatccacgttggcttcagggttagggcgtcctggttatcctggcagtttgagagagaggctgtcagcatggggtacacagggggtttttaatttgggattagatcccttttgttctcatttactttgttgatctttttattcttttttcttgtcctcctcatagtgttcattgcaaagcattagttttcttctccatgtttttctattccttgactaaaaattagtttagattattaatagagatatcatatcttcaaagttcataatgtttaactagcattggcttatggtagggcaggctccaagatctcctctgctgcagggacagatggtggtggtcaggtaaacccaaacagcaccgataacctcacca

SEQ ID NO: 726877 - DNA, 527 bp, Homo sapiens
agtttgttttctttcttatttttactattttatttaccttcatcttaatggtttagaaataaagtcytcatctaaactatggacattaaaactaacttgcaaatattaaacaataaaaatggtttcgtgcagcagtcctcaacctttacatcatgcctcctgttttttttcacgaagacagcaaactcctattggtaatgcttcctgttagaagcaggtattcttcaagggagaatagtaagtaggactcactcccacctgcacccaatgctgagtgtattctagttgtaccagctaatttttaacattctgtaaaatatttggctgaagtctgaattctgtgaatggccaaattgctactctagtgtggaggcaaagggtaaaaagaaaaaaaaaaattacatcaccagaaaaggagcccattactgctcttatcctgatatcttaatcttattttgccactttcgaaccaaaaagagctctaaaaaacttttgttgttattgtttttcaagccatactcagattg

SEQ ID NO: 726878 - DNA, 1525 bp, Homo sapiens
ctatactctcactatttaatcaaaagtatttctaatggccgagcgcagtggctcatacctataaataatcccagcactttgggaggccaaggtgggtggatcacttgaggtcaggagttggagaccagcctggccaacatggtgaaaacccatctttagcaaaaatacaaaaattagccaggcgtggtggtgtgcgcctgtaatcccagctactcggaggctgaggcgcaagaatctctgcaatctggggaggcagaggttgcagtgagcagagactgtcattgcactccagcctgggtggcagagcgagactctgtctcaaaaaaaaaaaaaagaaaaaaaagtatttctaagcttctgtcattgagactagcctaattacatcttctaaatgattagatatattgataataaagtacaagagggcaaataaaatgctctccaacatatatttggggaaattagaggaactaatgattagaacacagatgtaatatgattaaaataaattaacaaatgcatttattcaatcaggcagtcactctctcattatgagctcctgttttacaccaggcattaaactaggtatagggacttcaaagattacaatatctacttcttgcttcaaaagagctaacagtctattgaaaaagtgatgtaaaaacaaactaaagcactagagttaactttcaacatggagttatacataaagtgcataaataaaggaccacacatataaaatatctggaggactcagcacattcaatctaaaaggtaacagaaaacctgaaaattagagtatgagtaggaatatgccaaacattcaaaaaaaggtaagtggtttaaataatgaagtatcctatgctggaataggtgatacatgatgagtgacaacacatcaaaggtgagatgagagggtggcttggtggaacagggagcaagcaaatatgaggctggacaaattggaaagagccagaccatagaaggctttttaggcttggcaaatgagctcaagttacacctagtaaatgatgaggagccatgagcaaagttctgaaaaaaatcatactagaaagaaggtgaatgtaggagagagatgttaggagtaggacttcagtgaggggattattaggaaagccagggaacgatcataactaagataaagttctgggttgaaaagatgaatgtagttaagaaaaatattgatacagtaaaattgacagtgcttaatgatttttgaggtgaaaggaaatggagayagcggttggtgtccagggtttaaacttctaaaacagtaatatccctatagaaacccaaatgatatagtctatcaatatgattattattgatttgtgtaatacatttatattatcaaggaaatatgtggtattatctatcagcacaagaaaaaaaatactgataattaaattaagctactgaatggattacaggtacattggtattaatatgcatatgtatattagaaccactgggaaggatttctgggatatagctagactgttta

SEQ ID NO: 726879 - DNA, 1525 bp, Homo sapiens
ctatactctcactatttaatcaaaagtatttctaatggccgagcgcagtggctcatacctataaataatcccagcactttgggaggccaaggtgggtggatcacttgaggtcaggagttggagaccagcctggccaacatggtgaaaacccatctttagcaaaaatacaaaaattagccaggcgtggtggtgtgcgcctgtaatcccagctactcggaggctgaggcgcaagaatctctgcaatctggggaggcagaggttgcagtgagcagagactgtcattgcactccagcctgggtggcagagcgagactctgtctcaaaaaaaaaaaaaagaaaaaaaagtatttctaagcttctgtcattgagactagcctaattacatcttctaaatgattagatatattgataataaagtacaagagggcaaataaaatgctctccaacatatatttggggaaattagaggaactaatgattagaacacagatgtaatatgattaaaataaattaacaaatgcatttattcaatcaggcagtcactctctcattatgagctcctgttttacaccaggcattaaactaggtatagggacttcaaagattacaatatctacttcttgcttcaaaagagctaacagtctattgaaaaagtgatgtaaaaacaaactaaagcactagagttaactttcaacatggagttatacataaagtgcataaataaaggaccacacatataaaatatctggaggactcagcacattcaatctaaaaggtaacagaaaacctgaaaattagagtatgagtaggaatatgccaaacattcaaaaaaaggtaagtggtttaaataatgaagtatcctatgctggaataggtgatacatgatgagtgacaacacatcaaaggtgagatgagagggtggcttggtggaacagggagcaagcaaatatgaggctggacaaattggaaagagccagaccatagaaggctttttaggcttggcaaatgagctcaagttacacctagtaaatgatgaggagccatgagcaaagttctgaaaaaaatcatactagaaagaaggtgaatgtaggagagagatgttaggagtaggacttcagtgaggggattattaggaaagccagggaacgatcataactaagataaagttctgggttgaaaagatgaatgtagttaagaaaaatattgatacagtaaaattgacagtgcttaatgatttttgaggtgaaaggaaatggagatagcggttggtgtccagggtttaaacttctaaaacagtaatatccctatagaaacccaaatgatatagtctatcaatatgattattattgatttgtgtaatacatttatattatcaaggaaatatgtggtattatctatcagcacaagaaaaaaaatactgataattaaattaagctackgaatggattacaggtacattggtattaatatgcatatgtatattagaaccactgggaaggatttctgggatatagctagactgttta

SEQ ID NO: 726880 - DNA, 2827 bp, Homo sapiens
gcaatccccatattaatctatcgagataggtacatattattacacccattttatagatgacggaattgaaacaggagtgtggcgttatttgtcctaaacacacacttacccaattatatgatgatagcttaaatcagattctgagtctttctgattttaactgcatagataatctgctacgtggaatatgtcacatagagtttatagcattaacgaacattacatttgattgcagtggattcaacttttatttgaactctccacttattcaatgcactgtggaaaatacacagggacacaaaaacatgactaagacaaaagcatgttgttagggaatgcacgcttgggttagaaccgtactctcctttaaaaggcaaatattccatatgagataaaacttgattcttatctctagctgaatctgttttattagtgtgctttcctctaactcttagctaaataaactggtttctaaagaggtataactcattgatagccatacaactttctgaatataattagggaatgtaaatttagctattaggagggtaaagggatatgggtttgaaatgagaataataacattagagaaagaacagaatgtgattctgggctgggcctaaggaatgcagcatgagtgctttaggagtctatgtaaatgagaaaataagaggtaagaaaagaccaagaaattgaatgaggagaccctccacagcaaactagcctaatggatgatttaatgaaaatcaagctggatgggtgatttgatgtgagaaggtgagtgagtgcaatggcagcttcaacaatttctacaccgtgttgctaaatttgaagagtccagttgattcgagggctgtatcaggtcctgaatccatgaaacacactctgtgatgtagctccagcaaatgaaccgataacaagggtaacacaatrccacctccagggatgcctctggtggagcagtttggagatgtgatcacctgggtgagtgaatacttgtcctgcaagcaaccctacttgtctggcaggaagatcactcctcatctccagtctgaattatcctgggacacagttcacaggtctacccctcagcaacaatgaagccttctttgggcttagaactcgcccaagccttctctactcagaaaatttcaagtcattaaaggagaaaatgtgttcttttatgctgccaaccttcatttgtcctgatgtctttacctgcagtatcctaggtctcatcaagagatgccaatctgaacataagggctttaaacccaccaagaccttctttaaaattaatgaaaagaaggaaaaaacaaaacttcaatgagaaaagtgtacagtactgaagccatcaggagaagtgaagactggcagtttaattttactaaataccgtgagagaaaagatgtcagccacgatggctggtattcccgctctgggtgacagcaagacactctgctggagaaaattaatagttatttttttaaaaaatttcaagatgaaaagccctgggagtgacccctgtgagtaaagacttcaggctacactttgcccctttttccctaatttctcccatataggttgagctgggcttatttatttgctaatgcataaaacagaattccaaaatgcctcttcgtgttcatcttacttaggtggcgtgccctctgtgcatcctcagctcatgctgtctttgaggatgatgtctcagcagtgacaagtacatttacaaggctcaggtcttctcaattcaaatgcttctcaatttagaatccgtcaaacacatcaggtgcaagaggtttgacattattgaaacgggcaaataatgcataccatgtttttactttcacttggacacaggcactacaaccttggaattaattgcaaagggcaagtttactgaacagagaaagcaaaatcagtaccacaaattaaaaacgaaccttcacttagtgggaaggcagggaaagaaattaggaattttagactattcagcctgtgtgcaagtatgttagggggcagtagaagagtgagttttaaggtagggatggtgcagtttggggagggaagctgtcaaaactcagggcacccaggaagtagactctggaaacaattttaaggaaaggtctcaggatcaacacccacagaaaaagtgaaggaagtagaattgttaagaagaaatttcagttgtgatgcagtcataacaaaggactcagctgatcttaaggggaaccctgagattggaaagactctctgaagtttttctaaatttgggtacagctgtgttgggcctttatatttccacatttgcccccagagaagagggtacgatgttgggcaaggtgtttctattcagccgaaggcaagatctggaggatacacgtgtaaaatattagtctccaaaaccatgtgcagttagaggaataagaacttcagttctgaagtggggggattagaaggtgccacacagcatccacagcagcttttcccatgagtcacttggattcacttgcttcatatatgttctggaagccacttcttcaggattcaggtgacgtctttcattaaagtaaacttacaagaggaagtataggaaaaattacccctgccactgcctcttgtcttgaggccacaactacactcatcacctcctttctttttgttttaccttttttttttttttagagacagggtcttgctgtgttgcccaggctagtcttggactcctagcctcaagcgatcctcctgccttggcctcccaatgtgttgggattacaggcgtgaaccaccatggctggccatcacctcctttttatactatgca

SEQ ID NO: 726881 - DNA, 583 bp, Homo sapiens
tctagaattattagtttaatatttgttctctcctaccctatattaattatttattgccatataataaattaccccaaaactgagcagcttgaaagaacaagcacttattacctcacaatttctatyggtcaggaatccagctgccacttagctgggtgcctctggctgaagttctctcatgaggtaatagttaggtgtcagctggggctgtgggctcatctgaaggttcaactgaaagatgattcacttccaaactgttggcaagattcagctcctcatgggttaatgggccaaaggcctcaattctcaactggttaccggccagagacctccctcagttaccacaaggcctctccatagggctgctcacaacatggaggctgatctccctcagggtgaacatgtgagaaagcaaaacagggaagcccaaagcagaagccacagtactttgtataatctaatcttgggagtgacatgccattacttttgctgtgttctatttattagaagcaagtcaaaatgtctagcccacaaccaaaagagaagagtttataagagtgtgatatcaggagacagaaatcat

SEQ ID NO: 726882 - DNA, 629 bp, Homo sapiens
tacyttttaaaaaaataccagtctgacagcaaagacagaccgaaacctcaacactgtatttaaaacatttaaagtattaagcttgtagtaacatctttcactgtaattagagataagtatttgtggagagtctatttatttatttttaacatttttttaggtgcaagaaagattttatggcagtcgagagatcagggttatacagcatattactttttaatttcttagagataggatcttgctctgtcatccaggctagagtagagtggcacaatcaattcactgtaacctcaagctcctgcatcagcctcctaatcagcctcctgagtagctaggactacaggttcctgtcaccacatccagctaataaaaaaatatttctttttagagatgggggttttgctatgttgcccaggctggtcttgaactcctggcctcaagcaatcctcccactcctgcctcccaaagctttgggattacaaatgtggaccactgcacctggctctatggagagtattttaagtgccttaatggaatgaaaaggaaaataccctaaaactgtaggaaagtctaggatgtgtccaaagcttcaggatgatcaaggccctagccattctttattatttgga

SEQ ID NO: 726883 - DNA, 649 bp, Homo sapiens
gaatatatactaaaatatacataagagtaacatatatcacatttgtggatacttctgaggggaaaaaacattattttccccaaaaagatttacagaaaataaggtttggtgacatgtacataagtgcttcactactgtccatactttctatttgaaatttttcataaataattttcaaagcaaattaaaaaaaaaagttggattctcaagaaaatatgcaaccaatgcaactcattaggaaaaaatctgctgttgagaaaaaatgtgaaccactgaaatctgagtggtagggagggactgtgaagtctaggattcagcaattttacaagtgtttttaagctttgcaaaattaaaaaaaaaacaaaaactggagagaaatcttaaacacattttgatatggtttctgcagagaaaaacaataatcagcaaaatcatataaaaagaagactctggcctcaggtaacaaaaaatggcgaataaatgtctgtgttttaggtcaaaatactrtatttacaaagttaaaaaataaaatacactttaaagtgttaaaatatgttactgaacattttaactgaaaaaagttttaaagctggtaaaaacagagtatatttatattcatttactgtgttttagtcagtttttaaaatga

SEQ ID NO: 726884 - DNA, 649 bp, Homo sapiens
gaatatatactaaaatatacataagagtaacatatatcacatttgtggatacttctgaggggaaaaaacattattttccccaaaaagatttacagaaaataaggtttggtgacatgtacataagtgcttcactactgtccatactttctatttgaaatttttcataaataattttcaaagcaaattaaaaaaaaaagttggattctcaagaaaatatgcaaccaatgcaactcattaggaaaaaatctgctgttgagaaaaaatgtgaaccactgaaatctgagtggtagggagggactgtgaagtctaggattcagcaattttacaagtgtttttaagctttgcaaaattaaaaaaaaaacaaaaactggagagaaatcttaaacacattttgatatggtttctgcagagaaaaacaataatcagcaaaatcatataaaaagaagactctggcctcaggtaacaaaaaatggcgaataaatgtctgtgttttaggtcaaaatactgtatttasaaagttaaaaaataaaatacactttaaagtgttaaaatatgttactgaacattttaactgaaaaaagttttaaagctggtaaaaacagagtatatttatattcatttactgtgttttagtcagtttttaaaatga

SEQ ID NO: 726885 - DNA, 426 bp, Homo sapiens
actaagtcataaatggctagatgcttgctagcatttttaaaaaacctcaatataccacaattcactaagcaatcctgaatacctctcttaatgccaaaattcaatttgtattttatccagaatcttgtagtctccatttacatggtaccagtactgctactattggttactttatcttatgtgacaaaataaccaatttaattttcaattaccttcaagaccaaataataaatttggggtgtcagaatataacaaaaaacaatttaatttgcatttttcaaattcttcagcgtaactgattgcttgttaacaaagggaaacttagccaatttgttaagtttagcaatgtttgcaaacattagttttartaagtctatttattataaaacgtatcttaggcttcaaaacctaagataggataggtag

SEQ ID NO: 726886 - DNA, 2537 bp, Homo sapiens
  misc_feature 139, 140, 141, 142, 143, 144, 145, 146, 147, 148, 149, 150,151, 152, 153, 154, 155, 156, 157, 158, 159, 160, 161, 162,163, 164, 165, 166, 167, 168, 169, 170, 171, 172, 173, 174,175, 176, 177, 178, 179, 180, 181, 182, 183, 184, 185: n = A,T,C or G
  misc_feature 186, 187, 188, 189, 190, 191, 192, 193, 194, 195, 196, 197,198, 199, 200, 201, 202, 203, 204, 205, 206, 207, 208, 209,210, 211, 212, 213, 214, 215, 216, 217, 218, 219, 220, 221,222, 223, 224, 225, 226, 227, 228, 229, 230, 231, 232: n = A,T,C or G
  misc_feature 233, 234, 235, 236, 237, 238: n = A,T,C or G
acacaagaaattagccaaaaaaaatttgcatgtaattgacttagatgatgccacttttctgagtgctaaatttggaagacagcttgtacctggttggaagctttgtccaaaatgcacacagataatcaatggaagtgtnnnnnnnnnnnnnnnnnnnnnnnnnnnnnnnnnnnnnnnnnnnnnnnnnnnnnnnnnnnnnnnnnnnnnnnnnnnnnnnnnnnnnnnnnnnnnnnnnnnnaaaatcatatttacattattactaaatttgttagcrtacagtgaattaaaaggaggggtgaaagtggatgatgtttctaaatattattcacatatactgaaggtcaagattgggggataaagaaagtaggcctgggaaagtaataataaaatatgcctaagactccaagctacaacttttagtgcgaagactttaggagtgggttttagaatattctggccaagccaggatttagtttcttttctgataccaaagtaactacacgggacatggcaaccaccaagggtctttgcagcaggatgacttcgcctttatatgaaggacttggaaatcactgctttaaaaggaacattagagaggtgacttacagtaattgttttttatttcactctttttttctcctttgacactgtctcgttcttgagttttttaaatgcttgtgaattttctttgcttctagttctgaattcctacttgatatggtcaaggctaattttaggactccttgaggtaaaaaaaaaataatacatttttacattgtaaagtattaaatattttacctctattcctattgacatgcctacatgcatatttaaccatatcagaacaacttaagttttcataaagctatcttttgtgtaggacaagtatatcaaagaagcacatctcagaatttttacttgtaattatttcataattcttactgctggaatatttttctcagttttctcctttttattaaaccaagttaaaagatagttgaaatttgaaattatactattttcctgttgttgtcttctcagaggaacatcttgagggcccagtttatctgtagttcatactagatacttgctgatagtgtcattgtagatgtcttcaccttatctatccaatgttcttgtagaatatatcagctgcagctctttcctccccaaataacaaacataaacccttaaacaccgaaattttgtttcaccaaaacttttcaaaaagattataatactattctagaacttgaaatcatattctctgctcttaaaaatatataaaatacaataataaggacccaggattgttaggaaatcagttatgtgccactggattatatagcagtttttgtgccttctctcctgtgttggcagcagccattgcagttttcacaatgccttcctcctctgctcctaatataccagagactaaaataaaataatggaaatgttactaatacattaaccaatatgctttgaatatggtctagggccatgtaaattttcttgcacttaggctctaaaaccttgttttcttttttgtgtgttccagactgtcttccatgttagggaatcgtctggtttaacattaaataaaatgttaatctgttgtctgttgtcaagatttgagttgataatttgtttacctttcttcagggaagaactgctaaagctttgaggtcattacaatttacgaatccaggaaggcaaactgaatttgctccagaaactggtaaaagagaaaaaagaaggcttacaaaaaatgcaaccgctggttcagacaggtaggctaagtgttactgaagacatgttaacttgctgcttcacatctgcattgttcccctatttttctcttaaattttgaattttctgggttcatattttaaattggataatgtagaattagtaaaaacctatgaaggcctttgtttttattcatataaaattaaggtatccctttcaactacaaaaatttgtttctaagaaggtagcagtgaactgaagaaataattttggcatgagagttaaaataattacaattaaagtaattcacttatttgaaaagcattgttattatatatatacggacatacctcattttattggtgcttcactttattctttacaaggtgctatttatttttacaaattgaaaatttgtggcaactcggtggtaagcaagtctattggtgtcatttttctaacagcatgtactccctatctctgtcgcattttggtaattattgcaatatttccagctttttcattactgtatctgttatgatgatctttgatgttactattataattattttgagtcactaggaaccacactaatgcaaggtggtgaacttagtcgataaatgctgtgggtgttcttactgctccacctactggctgttctctagactctctccctctcctcaggtgtccctattccctgagaaacaaatatattgaaattggtccaactaataaccctgcaatggtctctaagtgttcaagtgaaaggaagagtcaagtttctcatt

SEQ ID NO: 726887 - DNA, 1138 bp, Homo sapiens
tttttgatggaatgaatgactttaaaattgccatattgcagcattttttagaacagacctgtaatttttcaaagactaatacgtttttcaaaggaaaatattcttgagcaattttgctaatatttgttcatcatgcccatttagggaagcaaacttttaatgagcatacaaaatgtttacagagaaaggtgtatctgatttacagtaagctgtaataaagctatgttttggaaaaattaaataatgagcccacttactattttgtaatataaaattacagaaatatggaatataatgaaatcatctagagcctctttatattgtgcataaatattccaggtgactataaattattttagaattaatctaaaaagcaaagttttataaacaatttctgttgtgtgtagatcctagtagagaagttaggtcacaaatgttggtctcacacaatgttggtcacaaatattaaggtagaaatgcatgtatatatttgaataaaatgtcatctcgtgatcttttccttttttttaaaatatggaaatagctatttaccttgtaacatcatatataggattcttctctttttaaagtattatgtttagttctatataacaggctgttatacaacctgacagtctactctaaaactgcctccctggcgtgatttcaagcaagtaatttttagcaagtgaattttgaaatatccatatatatatatacagtgattcattattaaaaamataattttagtgagttctattatagtcttaactttttggaagtaaaagacccctgtgagaaggtgatgaaagctatgaactaacttcccagaaaaatatctgcattcatgtactcacaaatatcgatgttcagaattcctgaacatgtattgcagtacctgggtagtatgaaatattctgtaaaccattttactttttcagttgagtatggctaaagtgtcggttggtttgttaaatagtgttgtgggtggctgttttcaagaaaaacaaaaccagaacagctcagtccttgagctatgactgccctgaaaaatcagatcccactggcctcatataccccttccacctccaaaaggtgattacacattgagtcacaatgtagaaaactgatgtcttat

SEQ ID NO: 726888 - DNA, 629 bp, Homo sapiens
agaactgatagctggcacccaaccaatctctggcatgagcactcatttgaaccgcagaccacattttgctgattatatacctactctgtgtcaccagaaaccctttcatgaacccaacaagataaagttcttgagagtgggaactttgcccttgactttctcttctacgtagtgctagatacacacagtccaaacagtcctttctgagctgaactttaatacaggtgtagatgactttgcaattcacttggttatatcgtagcatttgttaatcattatgcagtttcctgggttagtcataaaccagcagtataaattaatatttatgaattgaaaccttctaccacatgcagccatgcgtttcagtgatggactgcatatttaacaatggccccataagactgtaatggagctgaaacattcctattgcttagtgacatcatagccactgtgccattgtaacatcgtagtacactgtatcatccacatgtttgtggtgatgctggtgtaaacaaacctactgcgctgccagtcatataaaagtatagcatgtataattatgtacagcacataacacttgataatgatcrtaagtgacagttactggtttatgtagttactatactata

SEQ ID NO: 726889 - DNA, 2047 bp, Homo sapiens
  misc_feature 318, 319, 320, 321, 322, 323, 324, 325, 326, 327, 328, 329,330, 331, 332, 333, 334, 335, 336, 337, 338, 339, 340, 341,342, 343, 344, 345, 346, 347, 348, 349, 350, 351, 352, 353,354, 355, 356, 357, 358, 359, 360, 361, 362, 363, 364: n = A,T,C or G
  misc_feature 365, 366, 367, 368, 369, 370, 371, 372, 373, 374, 375, 376,377, 378, 379, 380, 381, 382, 383, 384, 385, 386, 387, 388,389, 390, 391, 392, 393, 394, 395, 396, 397, 398, 399, 400,401, 402, 403, 404, 405, 406, 407, 408, 409, 410, 411: n = A,T,C or G
  misc_feature 412, 413, 414, 415, 416, 417: n = A,T,C or G
gaagaatggagacagggtgagcctggtgtattgggagaagtggggaggctgcgttgactggagtacaagtcagactggtacagatgttggtgaaatcttggggagcacagacctgcatcctcctttactcctgttttccccataggtgaacacatccagctcccaggtggatcgtttggttataccagaagagaaccacttggggtatgtgtgggaataggagcatggaactacccctttcagattgcctcttggaagtcggctccagcattagcctgtggtaagaatgaattatccctccatttgagagccattcgnnnnnnnnnnnnnnnnnnnnnnnnnnnnnnnnnnnnnnnnnnnnnnnnnnnnnnnnnnnnnnnnnnnnnnnnnnnnnnnnnnnnnnnnnnnnnnnnnnnnagaataattaatcctccatttgagagccatcggtcaattctctagttggttctctccccatctactacctttcacttctctataacacacactttaaatcgaaaggggcctgctgtggaatatcaaagcttcagaggacatggctcgttcctgccctgtcttgcccctcaaggagcttatagttaaggttgtacacaatcatgtctagatattctcaggttttatttatttaatttggtatatgaaaagaaatttaattttttcttattaaattgaattagatttgtgctacttataagttctcttcctttctggacaagaattttaaggtaggagttagcacttaggagtttgacttcatttacgaagcagaagataaactcytttcttcatttgggtcttaagagaaatgataagcaaggctttgataagcttcttatcaaagaggagctttggctgattgacataaaatagttttcttacagtatttaaagagaagaatctttgaggaaagaagactaattttatcttagaaaaaattgtaatgttagaaagcattactgttaggacattatattgaaatgcagcttttgtcctgttgccattgcatgttcttgttttagcctatttctctttgagatacagctgtgaaagaggaaaaatagtcactagctttaatagtcaccagaattaagtcactagctttggggactctcatcaagtgaaccattctggtcttcaatgtcaacttttataaaatggagctaatgatacctacttcatactgctgttgaaagtgttaaatgagataatatatgtgaaaaggcctagatatgcaaatgtgagactgggcaactgtagggtttgggatctgtttaatgagagaaaccaagatgaaaaggacaagagttgtttacttattgatatggtttggctgtgtccccacccaaatctcaacttgaattgtatcacccagaattcccatgtgttgtgggagggacccagggggaggtaattgaatcatgggggctggtctttctcatgctattctcctgatagtgaataagtctcatgagatctgatgggtttatcaggggtttccgcttttgctgctgcttcatttttctcctgccgccaatgtaagaagtgactttcacctcccgccatgattctgaggcctccctagccatgtggaactgtaaatccaattaagcctctttctgttcccagtttcgggtatgtctttatcagcagcatgaaaacaaactaatatggttattaataacatttttgatgtaggatttggttggggaagaggaaacaattggaatcatttttgaattgtcctctagtcctgttttcaggggatcactggtcttagaaagtctttttatgtttgtgtcttgggtttatgcaggtaatgccatggtctttaaaccttctccctttacacctgtttctgcatggctactggctgaaatctacagtgaggctggtgtacctcctgggctcttcaatgtggtgcagggaggggctgccacaggccagtttctgtgtcagcatcccgatgtggccaaagtctccttcactggaagtgtgcccactggcatgaaggtgaggacaaaaccag

SEQ ID NO: 726890 - DNA, 2047 bp, Homo sapiens
  misc_feature 318, 319, 320, 321, 322, 323, 324, 325, 326, 327, 328, 329,330, 331, 332, 333, 334, 335, 336, 337, 338, 339, 340, 341,342, 343, 344, 345, 346, 347, 348, 349, 350, 351, 352, 353,354, 355, 356, 357, 358, 359, 360, 361, 362, 363, 364: n = A,T,C or G
  misc_feature 365, 366, 367, 368, 369, 370, 371, 372, 373, 374, 375, 376,377, 378, 379, 380, 381, 382, 383, 384, 385, 386, 387, 388,389, 390, 391, 392, 393, 394, 395, 396, 397, 398, 399, 400,401, 402, 403, 404, 405, 406, 407, 408, 409, 410, 411: n = A,T,C or G
  misc_feature 412, 413, 414, 415, 416, 417: n = A,T,C or G
gaagaatggagacagggtgagcctggtgtattgggagaagtggggaggctgcgttgactggagtacaagtcagactggtacagatgttggtgaaatcttggggagcacagacctgcatcctcctttactcctgttttccccataggtgaacacatccagctcccaggtggatcgtttggttataccagaagagaaccacttggggtatgtgtgggaataggagcatggaactacccctttcagattgcctcttggaagtcggctccagcattagcctgtggtaagaatgaattatccctccatttgagagccattcgnnnnnnnnnnnnnnnnnnnnnnnnnnnnnnnnnnnnnnnnnnnnnnnnnnnnnnnnnnnnnnnnnnnnnnnnnnnnnnnnnnnnnnnnnnnnnnnnnnnnagaataattaatcctccatttgagagccatcggtcaattctctagttggttctctccccatctactacctttcacttctctataacacacactttaaatcgaaaggggcctgctgtggaatatcaaagcttcagaggacatggctcgttcctgccctgtcttgcccctcaaggagcttatagttaaggttgtacacaatcatgtctagatattctcaggttttatttatttaatttggtatatgaaaagaaatttaattttttcttattaaattgaattagatttgtgctacttataagttctcttcctttctggacaagaattttaaggtaggagttagcacttaggagtttgacttcatttacgaagcagaagataaactcctttcttcatttgggtcttaagagaaatgataagcaaggctttgataagcttcttatcaaagaggagctttggctgattgacataaaatagttttcttacagtatttaaagagaagaatctttgaggaaagaagactaattttatcttagaaaaaattgtaatgttaraaagcattactgttaggacattatattgaaatgcagcttttgtcctgttgccattgcatgttcttgttttagcctatttctctttgagatacagctgtgaaagaggaaaaatagtcactagctttaatagtcaccagaattaagtcactagctttggggactctcatcaagtgaaccattctggtcttcaatgtcaacttttataaaatggagctaatgatacctacttcatactgctgttgaaagtgttaaatgagataatatatgtgaaaaggcctagatatgcaaatgtgagactgggcaactgtagggtttgggatctgtttaatgagagaaaccaagatgaaaaggacaagagttgtttacttattgatatggtttggctgtgtccccacccaaatctcaacttgaattgtatcacccagaattcccatgtgttgtgggagggacccagggggaggtaattgaatcatgggggctggtctttctcatgctattctcctgatagtgaataagtctcatgagatctgatgggtttatcaggggtttccgcttttgctgctgcttcatttttctcctgccgccaatgtaagaagtgactttcacctcccgccatgattctgaggcctccctagccatgtggaactgtaaatccaattaagcctctttctgttcccagtttcgggtatgtctttatcagcagcatgaaaacaaactaatatggttattaataacatttttgatgtaggatttggttggggaagaggaaacaattggaatcatttttgaattgtcctctagtcctgttttcaggggatcactggtcttagaaagtctttttatgtttgtgtcttgggtttatgcaggtaatgccatggtctttaaaccttctccctttacacctgtttctgcatggctactggctgaaatctacagtgaggctggtgtacctcctgggctcttcaatgtggtgcagggaggggctgccacaggccagtttctgtgtcagcatcccgatgtggccaaagtctccttcactggaagtgtgcccactggcatgaaggtgaggacaaaaccag

SEQ ID NO: 726891 - DNA, 653 bp, Homo sapiens
tctctaaatttaaattgtgtaccctgtggtgctaacaaaataatcctttataacttgtgcgggttgaagacagttgatgagtgaagatgatttattaactttatagcaatatcctcggagctttcttctatcaccatttttgcagtcaacatgaactttttaaaccataaacatttcttaatggatgaattgagaaatgtatgctcattaaacactgargaggaaaatgagaaaatgggagtcatcttttataactttaattttgaaagttatctttgaaaactttaaaataatttataacaataacatactttgagactccactgagcaaatttactttatcatgcaaaaatataattaagtttaatatatgtgctggacatcagaatttctccttttttcctagtttcttacttgcattgattgtttgctttcaattggcctggattaaaaacttggctatctttttgattggtgcactaaataatgaaaccatcttgcaaaatccaagaaagagccattttatgagattattgtggtcctgagttaatataaatcaccaagttttgttagttttcctgtcccacaaagaaggtgctagtgccttcaatttttgctttttgctattgtttcacattatattgtctttccag

SEQ ID NO: 726892 - DNA, 682 bp, Homo sapiens
taagagtattcctggctaccattgttcttgaaataattttaaattcctatgatgtacaaatatcagacatctattttaaacagatttaattttaaacaatataatttttaattgtttcaaatactgttgatggatggatttatgttagttttcctgcaggagtccagcacaagattaaaaaaaaaacaaaactgtcaatagcagagaaaaacaaataaaatgaatttattccttatataaaacttaaatgtgtactgtttaaaaggaagatagatacataaatagaaaaatattgttttgaaaatgagtgcattgctaacataraataaattgatgattaaccttaaaaaaacaccagcctccggccgagcgcagtggctcacgcctgtaatcccagcacttttgggaggccgaggcgggcggatcacgaggtcaggagatcgagaccatcctggctaatacggtgaaaccccgtctctactaaaagtacaaaaaattagccgggagtcctagctactcgggaggctgaggcaggagaatgacgagaaccccggaggcggagcttgcagtgagtcgagatcgcgccactgagctccagcctgggcgacagagggagactccggcaaaaaaaacaaaacaaaacaaaacaaaacaaaaaaaaaaccagcctgctgtctggttc

SEQ ID NO: 726893 - DNA, 649 bp, Homo sapiens
ctaatctatcagtaaatcctatcggtctcacttctaaatggcatgcggattctgatgaattcttaccacttacattgttaccactctcttagcttgggttcttccagaagcagagcctgagtcaagaaatcaagtggaagtatttatttgggagataatcccaggaaacaccaataggagggtgggcaagtgaaacaggaaacaaaataaagcatgtgttaaaaagtcatgctaaaaattctaggagccaatgtaggacacacacctcaaagctatcctaccccagtggtcaggcagttggtgcatgaagggggcatcattcatcrtttgaaggctgctcacagaggcactagttcttttaacacatcctcctccaatgttgtcatctcttttgcccccttacttagttagatatagccatattttatcagaatacagccaacataactgacactctcacttcttgcagttaactcaaaggtccctccacagacaggccatttctgataatcctatttaaaatagtgtctctccaaaaacaaaaaaaaacaaacaaaaacaaaaatgcataaaatgctagaaatctttgccatatatcaatatattcagcaaattctacgagtggattttagaaattaggatttagaca

SEQ ID NO: 726894 - DNA, 1301 bp, Homo sapiens
gggctcacacttttcatgacattctcctaggatcctgtgactcaaaaataattacagaatcacatttccccactctagcattaaatcaattacactataccatatccaaatgtcttttcaaagtgtacagactatggctgaaaatgccaaatgcactgcgattttccacatctaacaatcactacatacctgttcataaaagaaagaatatctgtttataaaagaagttgtaagaatattgggtccagtgtaaagcggaagcaacagtttttaatatcagacatccttatgttcatatcgatatgtgatatggtttgactgtatccccacccaaatctcatcttgaattgtaatctctgtaatccccattaattctcacatgttgtgggagggacctggtgggaggtactgaatcatgggggtgatttcccccatgctgttctcatgatagtgagtgagttctcatgagatgtgatggttttataagcatctgtgatttcccctgctggcactcactccgtcctgctaccctgtgagtaaggtgcttgcttctcctttgccttctgccatactgtaagtttcctgaggcctccccagcaatgtgaaactgtgagtcaattaaacctctatcctttataaattatccagtcttgggtatttcttcatagcagcgtgagaaccaactaatatactacttcactataaatactagctgtttaaccttgcataatcacagttatttaaattttaagtctcagtctcaactataaaatctgctctgctgggatattaaatgagataatatatctcaatagtatgataattgcttagcatactgactggcatatggaaaatgttaacagatgaactgatcttgatgtacttaaagcttaaaaaatctattattttcatatgcatacctttcttgayattttttcttccttgatatttaacacaattattatataaaacaccataaaaacaactttaacaacaatgaaaactatggacactttaaaacattcagtcccaattgaaatttccttgagtattggtgattaagcatacaaaacttggcagtttcattgtataatcattatatatctagttctgaaatttttgttgcataaaattattttaaaatagtctatcatattcaacttttggatctggaaaccagcttgatgttttaagaatcatgaggacaatcagttggaaatacaaatcctaggtattaatttaaccacttattcattaatatttactgaatgcctactacgtgctaaacaccatattaggtg

SEQ ID NO: 726895 - DNA, 1846 bp, Homo sapiens
ttttctcctgccatctacatgctacctgcaaagccagagcagagctgagggctaggttctccaacctgcagccttctgattgtaaccgtcaccaccccttcttgtcactgccttcacccaccccagcctttgccatgtctccctatcaacgctcagaactaagtaagatttccttggggccttatggaggccgtgacttcatggaagacagcctccatatacacacacacttcatttttgctttccaagggtttgggtgggggggggtcacctacactgaaataaggtagtttgacacagattacaggcaaaaaaagtctttttgaacaattttttaaactaaatttttcccaacattgctaagaagaagggaggaagagccagcaggagaggagaataaataagaaaaacccaactatggcaatacatgtgycattatgagagtaggggaatgggagagaggacccaaaatacaaggaatatactaatggggctttagaagggaatagaacttccctctgcagcttcctgtctgttcctcccactctctggggccacagagaacagaggaaatgaaggctgagtctgagcttcccatctgctgtgagtcaaatgagagcttcccatcttaccgtgagtcaaatgagccagggagggtatgtcaaggaccctcacatggcagagccttgtaaatcatttggaatctctctgccccaggacacttatacatacatttcctctgcctagagctctctcctgcccttccatatacatcccttccttcccttggcataaccaactcccacatgcccttcaggcctcgctcaggtgtcacattctcaagaatgccttccctgacagccccctaccatcaccagtcaatctcagggcattctgcacctctcctttgcagcattcatcacagttctgattactaattgtgtaaatctcccattgaaatgtaagttctataagggttgggaccttgtctccacagttcatcactatatcccagaatctagtacatagtaggtgctcaactaatattgataaatgaataaatgaatccaaacacaatcacacatacaatttacagatgagaaagtaggctgggaagcagggagtggcactatggttcacacacacagtcactggttgagccaagactagaattcaaaccccccagtgaccgagttatgggaccacttcgtctcccacatctggacaagctcctgtggcctccaggcacagagtgaggtaagcaccaaggcagaggctggtgtgaattagggctccttgccttcctgctcccacactgggctctgaaagtctctcctcccccaagtcactgccaagggctgggcctggaaactcctcccagccctaatccactacatccaccatcaaagccccacttgattacctaccgcagaatgacaggcttggatagaaactaacaagcctctgtgtgtcagaaacaactgttctgacaatttgctcctgagcctccacctgccagctggggcagtccagcatcccatcctttggaagcctctcccgcctctcctcactccacatggaggcatctgtctattatgtgccaggccttcaagcgcattattacatttcatcttcacatttctacttcaaaagaagtagatactattattatccctattttacagagtacaaaactgaggcttagagaggtgaagtacttactcagaactatacagcagaaataaacagggtaagatctatctgactacaaaaccagtgtgctttgccactgcactacccaccctcaatcccttcccagtcctagcaccaggccagcatgcagtaa

SEQ ID NO: 726896 - DNA, 1846 bp, Homo sapiens
ttttctcctgccatctacatgctacctgcaaagccagagcagagctgagggctaggttctccaacctgcagccttctgattgtaaccgtcaccaccccttcttgtcactgccttcacccaccccagcctttgccatgtctccctatcaacgctcagaactaagtaagatttccttggggccttatggaggccgtgacttcatggaagacagcctccatatacacacacacttcatttttgctttccaagggtttgggtgggggggggtcacctacactgaaataaggtagtttgacacagattacaggcaaaaaaagtctttttgaacaattttttaaactaaatttttcccaacattgctaagaagaagggaggaagagccagcaggagaggagaataaataagaaaaacccaactatggcaatacatgtgtcattatgagagtaggggaatgggagagaggaccyaaaatacaaggaatatactaatggggctttagaagggaatagaacttccctctgcagcttcctgtctgttcctcccactctctggggccacagagaacagaggaaatgaaggctgagtctgagcttcccatctgctgtgagtcaaatgagagcttcccatcttaccgtgagtcaaatgagccagggagggtatgtcaaggaccctcacatggcagagccttgtaaatcatttggaatctctctgccccaggacacttatacatacatttcctctgcctagagctctctcctgcccttccatatacatcccttccttcccttggcataaccaactcccacatgcccttcaggcctcgctcaggtgtcacattctcaagaatgccttccctgacagccccctaccatcaccagtcaatctcagggcattctgcacctctcctttgcagcattcatcacagttctgattactaattgtgtaaatctcccattgaaatgtaagttctataagggttgggaccttgtctccacagttcatcactatatcccagaatctagtacatagtaggtgctcaactaatattgataaatgaataaatgaatccaaacacaatcacacatacaatttacagatgagaaagtaggctgggaagcagggagtggcactatggttcacacacacagtcactggttgagccaagactagaattcaaaccccccagtgaccgagttatgggaccacttcgtctcccacatctggacaagctcctgtggcctccaggcacagagtgaggtaagcaccaaggcagaggctggtgtgaattagggctccttgccttcctgctcccacactgggctctgaaagtctctcctcccccaagtcactgccaagggctgggcctggaaactcctcccagccctaatccactacatccaccatcaaagccccacttgattacctaccgcagaatgacaggcttggatagaaactaacaagcctctgtgtgtcagaaacaactgttctgacaatttgctcctgagcctccacctgccagctggggcagtccagcatcccatcctttggaagcctctcccgcctctcctcactccacatggaggcatctgtctattatgtgccaggccttcaagcgcattattacatttcatcttcacatttctacttcaaaagaagtagatactattattatccctattttacagagtacaaaactgaggcttagagaggtgaagtacttactcagaactatacagcagaaataaacagggtaagatctatctgactacaaaaccagtgtgctttgccactgcactacccaccctcaatcccttcccagtcctagcaccaggccagcatgcagtaa

SEQ ID NO: 726897 - DNA, 1074 bp, Homo sapiens
ttgatgattttgccaagaccacttaaacctgttaaaatctgacctmttttgcttagatggaccatgagtcctgtaaactccagtgcatctaggataaggatgccaaattcagcaaaaaaaaaaaaaaaaataataataataataataattaataaatacatacagggcttccagtcaaatttgaatttcagataaataacaaattgttttaatataagtatgtctgtacaatatttggggcatacttatgctgaaaatgatttgtaatttatctaaaattcaaatttaactaggcatcctgtgttttatgtggcaaccctaatccatgggtgtgtaagtgtatcatagctctgcagcctcctgagaggggtgatgcttttgttatgatttagactgggagagggcattgggggtctggaaatggagttggcctgagagcctgtctagtctagggcccccatttcacagaccagagaatgaaagaatgtgcccaagttcacacagcagtgggagcagcaaaggggaggctggaactcggggccccagattcccaggccccctcctgtgccagcaactctctgctctgggctgatggaacagctcaggttcccactcccctgcccctgacctgcccttcgctggcttcagagggggggtctgatgacgaaatgtgatcctgccataaaatctataccaaaccaactcttctcacagcccacccgcccgcctcaaaggggggcgcctaatccccatttatggagccaagcagctgggcccggcctgagtctttgaacgtgagcttggggtaccctgggtcagcccagtcttggcaagaggaacctgagagtgagggtatttagggaagctgagcaagctgaggggccagccggtcccacgccacccagcccaaagagcaccagttagggtgagagcataaatcagagtggctgaaggcagagtgtccccgtggacacatctttcagggtgtgttcctgaagactggactttattccagcagccgaggagagacactggaggtttaaaacagaggggaacatggtcctattagaaaga

SEQ ID NO: 726898 - DNA, 1074 bp, Homo sapiens
ttgatgattttgccaagaccacttaaacctgttaaaatctgacctattttgcttagatggaccatgagtcctgtaaactccagtgcatctaggataaggatgccaaattcagcaaaaaaaaaaaaaaaaataataataataataataattaataaatacatacagggcttccagtcaaatttgaatttcagataaataacaaattgttttaatataagtatgtctgtacaatatttggggcatacttatgctgaaaatgatttgtaatttatctaaaattcaaatttaactaggcatcctgtgttttatgtgrcaaccctaatccatgggtgtgtaagtgtatcatagctctgcagcctcctgagaggggtgatgcttttgttatgatttagactgggagagggcattgggggtctggaaatggagttggcctgagagcctgtctagtctagggcccccatttcacagaccagagaatgaaagaatgtgcccaagttcacacagcagtgggagcagcaaaggggaggctggaactcggggccccagattcccaggccccctcctgtgccagcaactctctgctctgggctgatggaacagctcaggttcccactcccctgcccctgacctgcccttcgctggcttcagagggggggtctgatgacgaaatgtgatcctgccataaaatctataccaaaccaactcttctcacagcccacccgcccgcctcaaaggggggcgcctaatccccatttatggagccaagcagctgggcccggcctgagtctttgaacgtgagcttggggtaccctgggtcagcccagtcttggcaagaggaacctgagagtgagggtatttagggaagctgagcaagctgaggggccagccggtcccacgccacccagcccaaagagcaccagttagggtgagagcataaatcagagtggctgaaggcagagtgtccccgtggacacatctttcagggtgtgttcctgaagactggactttattccagcagccgaggagagacactggaggtttaaaacagaggggaacatggtcctattagaaaga

SEQ ID NO: 726899 - DNA, 1074 bp, Homo sapiens
ttgatgattttgccaagaccacttaaacctgttaaaatctgacctattttgcttagatggaccatgagtcctgtaaactccagtgcatctaggataaggatgccaaattcagcaaaaaaaaaaaaaaaaataataataataataataattaataaatacatacagggcttccagtcaaatttgaatttcagataaataacaaattgttttaatataagtatgtctgtacaatatttggggcatacttatgctgaaaatgatttgtaatttatctaaaattcaaatttaactaggcatcctgtgttttatgtggcaaccctaatccatgggtgtgtaagtgtatcatagctctgcagcctcctgagaggggtgatgcttttgttatgatttagactgggagagggcattgggggtctggaaatggagttggcctgagagcctgtctagtctagggcccccatttcacagaccagagaatgaaagaatgtgcccaagttcacacagcagtgggagcagcaaaggggaggctggaactcggggccccagattcccaggccccctcctgtgccagcaactctctgctctgggctgatggaacagctcaggttcccactcccctgcccctgacctgcccttcgctggcttcagagggggggtctgatgacgaaatgtgatcctgccataaaatctataccaaaccaactcttctcacagcccacccgcccgcctcaaaggggggcgcctaatccccatttatggagccaagcagctgggcccggcctgagtctttgaacgtgagcttggggtaccctgggtcagcccagtcttggcaagaggaacctgagagtgagggtatttagggaagctgagcaagctgaggggccagccggtcccacgccacccagcccaaagagcaccagttagggtgagagcataaatcagagtggctgaaggcagagtgtmcccgtggacacatctttcagggtgtgttcctgaagactggactttattccagcagccgaggagagacactggaggtttaaaacagaggggaacatggtcctattagaaaga

SEQ ID NO: 726900 - DNA, 986 bp, Homo sapiens
  misc_feature 727: n = A,T,C or G
aatcagatcgtgcctcccagcatcacctcatctcaaaatccaatcagatcggacctcattatcctatgctcataaaatgcaacccaggccccagctttgggagatagatttgagcatatcttcctgtctccttgtcagtcaattcacaattaaccttgcttgctataaaaacctagtgctttggtgtttggctttctgttgtgaacaggcaaatggacccagtttggttcggtgacagggcttagcctggagaagccacaggcatctcacacgtggagctggtgtgaggactaaggggtaattgccctaagctgacaatccccagtggctggtcagtgaaggcagagctcagagttaacgaggtcatggccatggtttcatgagggtgaccagggagctttgttttgcccaacagccatgggcggcacccccaaaaccggttacttcagcaaagcctggcctgctgtgttaagcaaatctgaaaaacctgaataaaagcatgaatagaatttaaaaaaataggagtatcaaacatttacttcctactagttgtggagcaagagcacctccttcctactttcaagaataaaggatgcaagctttcccttctgagcaagtgattaatgagaaccggagaaatcagtaactgggccataaaatgaggcaagtccctcgttagagcaatttctacctggcttctcctaggttcttccgtccatagactatncgaatgtttttcagcggcccgacccctaaaaaacagaataccacatccatgaaaaacggtttagtgattccaggatattgtgttattatcctgartttggtaaagtagaggaaatcatcttgacagccatgaaacatgattggtaagtgaagatcatggtcaaagaaagtggatttttataaatgaactatctttgtgagctatgatcatgtagatcttggttacaaataacaatcataatcacaattgatctctagtt

SEQ ID NO: 726901 - DNA, 993 bp, Homo sapiens
gacttaagagtctcaatgccaacacagatataacttccctggcaaggaaggtggttgaagaatgtaaactcattcatccttcaaaactaaatgaggtagaacagctgttgtactatctacagaaccgccgtgattcattgtcaggaaaaggtaagtagtagaattcctggcttcctaatgcaaatccaaagttgtttgattatagttcatcaagcaactataaaaaaaagtttatcaaactattgatatttgatgttgggtaggtttttttcaccagtgttatgaatgagtaaacaacaaagaataaacattaattgctttcatggtaggctttatattagatgcttccacataaaatggtctaattctttttcatgttttgtgtgtgtacacatacactgaagtaagaataaaaaaggaaatgtctgtcatattgattctagaataatcaaaggagagactttggggcagaaaacctattttcactgccccaactagactgatgttttataaacttcttttttatatttgtttatcatttggatggattatgtaagtgttaaaatatatatcatatgccttagactatcctaaagatataactttcatgaatctttattttctctgtttcctttttttttttttttttttgcagcagagaaaaaggtttaatctgggggtcaccaaactaggagatgagagaaaacctcaaatccatctccctgagaagtttgggsctagagtttttaagggttttggactgggctgaagtgtggagattgttgattggtcagagtgtaaggtgaagtaatgggacaggatgatgaagaagctgtattctcatgctgatttcattcctctatgagggtcttctgactggttggcatcagctgtttcactgcaactcagggtctgaaaaacattttcaatgatccttaagcaaaatccttatgattctaatgtcagagatcctgtctgtaagaacagtgggga

SEQ ID NO: 726902 - DNA, 704 bp, Homo sapiens
gtccttcttaatctgaataccttcatttttgtaagatagcaatgcagtttaattggaaacagtgaaaactgttaaactcatctatcccattctataagaagactggatgtttgataaaatagatattggcagttggacagtgaatcctgggttttagacatgtgtcactatcagtttgaacctcttggcgccaggatttcccaacatttagagctaatgcaaaatgcattagggctctaaggcaatagctatggagttgccaatcccagagcgtcaaatgtaaatcttcccctcccaaaatctgaactggtgttagaaagtaaagtggaacttgcttttgaagctaattaaaaataataggagcaagactagcttttttccagttatgtataccatgtatctgcaccatatttttggaccatttttttattataacttttacttttcaagactaacaagaaccgcatgttaagggtatttttaaactgcttccagcttttacaaatcagtttttgttgcagtaaaaatggtccatttttcttttataggaatccaattttcataaactggaaaaaaaattgcagagactgcttaggtttccttggggctttgaaaaatatttttcagagagcctggagttcttctttgtggttggcacagtgatgtcatttactgaccatttcagtggrgtcaaagacaaacta

SEQ ID NO: 726903 - DNA, 1359 bp, Homo sapiens
ctttgggatcaggcggtgggagaacgtaacaaggacatttcatgttagtgctgaattgagccagatggctccatcctttgacagttgctgcctctgaaatgaaacatttgatgcagaattccccaacactactgccttttagttgttttttttttgccccccaaataacactcccctgagaccctgcatttcttacccagccaattgtttttcccagaattgtggcatagctgctatgtccttgcaattgtctcttgtagcatttcagtaccttctgtttctttatggattcataaaaaccatatcaggcgcccaggatcaggagcccatccttctcctagccctttcatttcccagtaaaataaattccttcctgcagtcaagcctgggttctgacagtatcccagtgttttgattaatgacagctacctaaagataaatcaacaaagccaatgtctgtagtagctgtagatttctcctctgtcaacagagggaaaagactgaccatcaaatattattttgctggttattacaatttatgttatgaattttgcttaatggtgatttctgctttagataatgaaatgtccatatgtatctcattcattacagcctgtctccaataaggagaaagccatggatggaaattgatgtacaagcagattcaaaactgaagttggccattgccatcttctggaaagtgttaggaagtgtgtaattctagggcttcactcccaaatagctagcatagctactgcaagaattgattttttggccaggcttggtggctcatgcttgtaatcccagaactttgggaggccaatgtggctcgattgcttgagctcgggagttcaagaccagcctgggcaacatggcgaaaccccatctctacaaaaaatagaaaaattagcygggtgtgatgtcatgcacccatggtcccagctattcgggaggctgaggtaggaggattgcttgagccgaagaggttgaggctgcagtgagctgagattacgccactgcactccagcctgggcaactgagcaagaccctgtctcaaaaaaaaggacttccagttcatctactcctgagctagtacatttccttcctcctttgctaactccccaagagatgaaccctaaaatatttcatacaaactccaattgccttctgttaaaaacgttggcatttaccccagttctttatgtttgctgccactccctgcctctgagaaccccttccccctgaaaagacataacctagcaggaactggtttggaaaaaatttttttggtatttttagagcaagcaccagaagcaccaggcttttgaagcagagctgcatgccaacgctgaccggatc

SEQ ID NO: 726904 - DNA, 830 bp, Homo sapiens
ggactctgtacgtcccacccctacaactctgggccctgcagggctagaggtcctggtccccagagggtgcatgctttctcggggagacaccgtagaagtcccattgaataatatgatgtggttgctacctgggcactttcatttctttgtgttgagagaccagtaggcaagaagaacagtcactttgttggcagggttagatgaccctgatcatcaggaggaggtggctggtattaaaaatgagggtatgaggagtsagtgtggaatccaggtgatccactgggtccatcttcatcattatgattgtacatgtacaagtgcaacaaccgcagctggagagcatgtgactagggagcgcagactctttggggatgagggtctagttccaccaccaggaaagccaccaagaccagtagcgagggtaagtgaaggtgaggggattctagattgtacagtggagaagggaagctgcatatcgtttgtggcctggagcccaactgctgaggctggggctgtatcttatcctgctcacgtgcctcttctaggtttctgagcaagagaggccaccagaatcctggacaagccacttcctcagtgagtacggagcaggggtcctgagaagcacaagaagtaggctggtggacatgggggtgcactgcccagaccctcttcaaaaaaaggctgcctgccaatcatagggagaatggcaggcagacagcctgctgcccccagcatcttcagggttttccccagctgtggaaggtgtcttgtctttcccagaacaatccacatctggggaccaggtgtgatgagagtcaacaggcctggcc

SEQ ID NO: 726905 - DNA, 830 bp, Homo sapiens
ggactctgtacgtcccacccctacaactctgggccctgcagggctagaggtcctggtccccagagggtgcatgctttctcggggagacaccgtagaagtcccattgaataatatgatgtggttgctacctgggcactttcatttctttgtgttgagagaccagtaggcaagaagaacagtcactttgttggcagggttagatgaccctgatcatcaggaggaggtggctggtattaaaaatgagggtatgaggagtgagtgtggaatccaggtgatccactgggtccatcttcatcattatgattgtacatgtacaagtgcaacaaccgcagctggagagcatgtgactagggagcgcagactctytggggatgagggtctagttccaccaccaggaaagccaccaagaccagtagcgagggtaagtgaaggtgaggggattctagattgtacagtggagaagggaagctgcatatcgtttgtggcctggagcccaactgctgaggctggggctgtatcttatcctgctcacgtgcctcttctaggtttctgagcaagagaggccaccagaatcctggacaagccacttcctcagtgagtacggagcaggggtcctgagaagcacaagaagtaggctggtggacatgggggtgcactgcccagaccctcttcaaaaaaaggctgcctgccaatcatagggagaatggcaggcagacagcctgctgcccccagcatcttcagggttttccccagctgtggaaggtgtcttgtctttcccagaacaatccacatctggggaccaggtgtgatgagagtcaacaggcctggcc

SEQ ID NO: 726906 - DNA, 1156 bp, Homo sapiens
tgatcttcacaggtagtggagtttaggttctcaatatcttttgggagggggacacagttcagtctgtaacacctgggatgactgctgttccctcgaagaacaattatgtccctaaacaagggtctgccaatgggcaagagtcattcattggcctaatggttccctgccatagacctggctttctcctgggcccccagggacgtgttgtggggtagtagacagtgggcttgggaaggcagtgcccttttctctcctaagaccctcgccctggatcctgtgggggaagtkctaaggccatggatgctgtcttgctctgctagggctcaggcaccagggtgaggcagagcatgtgctgatctctgtccatcttcttcatctgtacctgtagcaggtggtgcctcacccagacctgcattgaagtctagactttgtcatttaccagccatgcgactttagacatgctccttgacctcttctagccttacttttctcatctataaatgggggttaggatgctcacttcttttcacatgttgtggtgagaatgcaggaggtgagcctgtgtctggtacagtgttgctacataataagtggtggcctttgtcactgaggccttgcttagtcagagcctgacttggacaaaccagttccccctctctgagaagccacacagcaggcggcattctgagaccagcattgccagggaccacttcttctggccaatgacattcacacctggcttcaaaccctctggaggagctctccttgcacatccctgtaggcatttgcctttcagaggcaactgtggatgtggcagccctgaagttgggaccagataagcaggaagggagaggaaatgcatattaatgcagagatttgaacccccataaagaacccagttcgtaagaatctaccagaaaaacaaatggctatctgcccaacctcccaggatcccttgtagggggaagccagctgccctgttgtgaagacactcaagcaatcctatagagaggttcacatggtaaagaaaagaggcctctagcaattgccaacaaatttcagtaacttgccaggtatgtgagtgagctactttggaagtaggtcctttagcctgagttaagacttcacttgaacgtagcctcagatgacatcttga

SEQ ID NO: 726907 - DNA, 1607 bp, Homo sapiens
caccaaatttaatggtgagaattatcactcttttaattaaatgcggtgtgcttggcttttttattttaacttccaaattaaggaagtaatctttaaagttcttactagttctgacagtctgcacattttctttgggttttatagtagtaaactttctactgaggatagtgcattttgtacataattcttctactcatcattacttctctcactattcataataaattcatgtattttctccttataggcaggaataatatatttttaactgtttttcttctactggaaacctctggacccaattagcttctattgatagtgattcttccattaatatctttgacagagaaaatccatggtgtataattcttatttccagagcttgggttgtcttagaaagtagcttcttgggattatgtttgataataattgctgtgatgatcatgattaaccagaacatctgaggtcaactcatcagtataaagcctttctgtaaatgctttacagaagcattggacagcgattagattgaggaaaagatcagatatggttgagttttgtcttctttggagtccttattattagtacctgagtgcttcactgccatctagctgtgtggaggtggaagaaaactgcatctgatcccatggcaggaaactatgtgtttgtggagatgaaagagaagagaaactataacttgatgaaatgtttattgccaatttttatgaagtacaattttctggatcctatatccagaaggccatgacaataaatttaaatataattgtacagaattccagtagtgacacaaaaagatgcaaataktctgaatattcatgtgggaaactatgacaacattctttgttcaggatgggatgtgttataatgtttctagagacgttttggctcctaaaccacgtcatttagctccttggataggtttgtcaataattaattaaaacaaaatctggaaaatccaaattttgaaattcggaaatttttttaaaacctaattttattcccaaccacacaaatctctctttattatatagttctgaatatagccccaaatggtgtttatctttttcttccattcactattttctttctttctttttttcaaggtggagtcttgctcagtcacccaggctggagtgcagtggtgcgatctcggctcactgcaacctctgcctcccgggttcaaccaattctcctgcctcagcctcctgagtagctaggattacaggtgcccgctactgcacccagctaatttttgtatttttagtagagacgggatttcactatgttggccaggctggtctcgaactcctgacttcgtgatccacccatcttggcctcccaaagtgctgggattacaggcgtgagccaccgcgcccggcctcattcactattttctaaccaaggagttcaatgaatgtggagccttacaaaaacacctggcaccaaacaaaagtaatatagtacagaactatagttaaaatgaaagaacagacatatacccttactaccaaaagaggagatcatgttaaataccttaatttcatgtatgtgtctcatttcttctctgggttagttcttatcttggg

SEQ ID NO: 726908 - DNA, 1263 bp, Homo sapiens
tgactgcccacgggaggcatcagaccttccctgggatgtggtgtggctgtgatgggaccctgagtgtccagacctatctaccgattgctcgtagtgggatccctgccttcctcttctgcttgaccccgggtgtscacgaatggtgtcctgaccctcttgggacgctgagtgcctggagctgtctcgtgcctgctcgtggtgggatccttgtcttcgtccagtgctggtcctggtccgcccatgggcagactcagactgttcatgagtgctcacctggtagaggaaagaccctgaacgtccagaccttccccctgaccggtcacgtgcggactcttggtggctctgctgatggggcccagcctgtccatggcctgacactgactgtgtgtctgactcttctgaatgtccctcactatcactggcctgactaccactggacccccagtgtctactgtctctgactgcagatgaagcttgtccacgcggaatgcctgagtgtctggagctgtctgctgactgctggtggcgggatccgtgtctctctcctggacttgatcttgcctgttcatgggatgatgcagcctgtccaccagaggaagtctctgcgtgacgagtgcctgattgtctggagcggtctgcagagtgcccgtgaccggctctgtcttcgtgatgggacctggggtgtctggagccgtgccttgactgctcctgaacagatccacgatggtttctggaagcagacccagaccacctctcagagtcttctgaatgtccctcactgtcactgtcctggctcacactggatccctggcgcctgcttctcctggacccctctgattgtccctggactgcctgtgagtgtctagagatgtcggcatgagtggaagcttcatggtgacgtgacactgagtgcctggagctgtctcctgattgttcctcattacgtgttgttctgcttgcacttctggatcctgactgcccacgggaggcatcagaccttccctgggatgtggtgtggctgtgatgggaccctgagtgtccagagctatctaccgaatgctcgtggtggtacccctgccttcctcctctgcttgaccccgggtgtccacgaatggtgtcctgaccgtattgggatgctgagtgcctggagctgtcttgtgcctgctcatggcgggatccttgtcttcctctagtgctgggccccgtccatccatgggaggactcagactgttcatgagtgctcacctggtagaggaaagatcc

SEQ ID NO: 726909 - DNA, 1263 bp, Homo sapiens
tgactgcccacgggaggcatcagaccttccctgggatgtggtgtggctgtgatgggaccctgagtgtccagacctatctaccgattgctcgtagtgggatccctgccttcctcttctgcttgaccccgggtgtccacgaatggtgtcctgaccctcttgggacgctgagtgcctggagctgtctcgtgcctgctcgtggtgggatccttgtcttcgtccagtgctggtcctggtccgcccatgggcrgactcagactgttcatgagtgctcacctggtagaggaaagaccctgaacgtccagaccttccccctgaccggtcacgtgcggactcttggtggctctgctgatggggcccagcctgtccatggcctgacactgactgtgtgtctgactcttctgaatgtccctcactatcactggcctgactaccactggacccccagtgtctactgtctctgactgcagatgaagcttgtccacgcggaatgcctgagtgtctggagctgtctgctgactgctggtggcgggatccgtgtctctctcctggacttgatcttgcctgttcatgggatgatgcagcctgtccaccagaggaagtctctgcgtgacgagtgcctgattgtctggagcggtctgcagagtgcccgtgaccggctctgtcttcgtgatgggacctggggtgtctggagccgtgccttgactgctcctgaacagatccacgatggtttctggaagcagacccagaccacctctcagagtcttctgaatgtccctcactgtcactgtcctggctcacactggatccctggcgcctgcttctcctggacccctctgattgtccctggactgcctgtgagtgtctagagatgtcggcatgagtggaagcttcatggtgacgtgacactgagtgcctggagctgtctcctgattgttcctcattacgtgttgttctgcttgcacttctggatcctgactgcccacgggaggcatcagaccttccctgggatgtggtgtggctgtgatgggaccctgagtgtccagagctatctaccgaatgctcgtggtggtacccctgccttcctcctctgcttgaccccgggtgtccacgaatggtgtcctgaccgtattgggatgctgagtgcctggagctgtcttgtgcctgctcatggcgggatccttgtcttcctctagtgctgggccccgtccatccatgggaggactcagactgttcatgagtgctcacctggtagaggaaagatcc

SEQ ID NO: 726910 - DNA, 1263 bp, Homo sapiens
tgactgcccacgggaggcatcagaccttccctgggatgtggtgtggctgtgatgggaccctgagtgtccagacctatctaccgattgctcgtagtgggatccctgccttcctcttctgcttgaccccgggtgtccacgaatggtgtcctgaccctcttgggacgctgagtgcctggagctgtctcgtgcctgctcgtggtgggatccttgtcttcgtccagtgctggtcctggtccgcccatgggcagactcagactgttcatgagtgctcacctggtagaggaaagaccctgaacgtccagaccttccccctgaccggtcacgtgcggactcttggtggctctgctgatggggcccagcctgtccatggcctgacactgactgtgtgtctgactcttctgaatgtccctcactatcactggcytgactaccactggacccccagtgtctactgtctctgactgcagatgaagcttgtccacgcggaatgcctgagtgtctggagctgtctgctgactgctggtggcgggatccgtgtctctctcctggacttgatcttgcctgttcatgggatgatgcagcctgtccaccagaggaagtctctgcgtgacgagtgcctgattgtctggagcggtctgcagagtgcccgtgaccggctctgtcttcgtgatgggacctggggtgtctggagccgtgccttgactgctcctgaacagatccacgatggtttctggaagcagacccagaccacctctcagagtcttctgaatgtccctcactgtcactgtcctggctcacactggatccctggcgcctgcttctcctggacccctctgattgtccctggactgcctgtgagtgtctagagatgtcggcatgagtggaagcttcatggtgacgtgacactgagtgcctggagctgtctcctgattgttcctcattacgtgttgttctgcttgcacttctggatcctgactgcccacgggaggcatcagaccttccctgggatgtggtgtggctgtgatgggaccctgagtgtccagagctatctaccgaatgctcgtggtggtacccctgccttcctcctctgcttgaccccgggtgtccacgaatggtgtcctgaccgtattgggatgctgagtgcctggagctgtcttgtgcctgctcatggcgggatccttgtcttcctctagtgctgggccccgtccatccatgggaggactcagactgttcatgagtgctcacctggtagaggaaagatcc

SEQ ID NO: 726911 - DNA, 1263 bp, Homo sapiens
tgactgcccacgggaggcatcagaccttccctgggatgtggtgtggctgtgatgggaccctgagtgtccagacctatctaccgattgctcgtagtgggatccctgccttcctcttctgcttgaccccgggtgtccacgaatggtgtcctgaccctcttgggacgctgagtgcctggagctgtctcgtgcctgctcgtggtgggatccttgtcttcgtccagtgctggtcctggtccgcccatgggcagactcagactgttcatgagtgctcacctggtagaggaaagaccctgaacgtccagaccttccccctgaccggtcacgtgcggactcttggtggctctgctgatggggcccagcctgtccatggcctgacactgactgtgtgtctgactcttctgaatgtccctcactatcactggcctgactaccactggacccccagtgtctactgtctctgactgcagatgaagcttgtccacgcggaatgcctgagtgtctggagctgtctgctgactgctggtggcgggatccgtgtctctctcctggacttgatcttgcctgttcatgggatgatgcagcctgtccaccagaggaagtctctgcgtgacgagtgcctgattgtctggagcggtctgcagagtgcccgtgaccggctctgtcttcgtgatgggacctggggtgtctggagccgtgccttgactgctcctgaacagatccacgatggtttctggaagcagacccagaccacctctcagagtcttctgaatgtccctcactgtcactgtcctggctcacactggatccctggcgcctgcttctcctggacccctctgattgtccctggactgcctgtgagtgtctagagatgtcggcatgagtggaagcttcatggtgacgygacactgagtgcctggagctgtctcctgattgttcctcattacgtgttgttctgcttgcacttctggatcctgactgcccacgggaggcatcagaccttccctgggatgtggtgtggctgtgatgggaccctgagtgtccagagctatctaccgaatgctcgtggtggtacccctgccttcctcctctgcttgaccccgggtgtccacgaatggtgtcctgaccgtattgggatgctgagtgcctggagctgtcttgtgcctgctcatggcgggatccttgtcttcctctagtgctgggccccgtccatccatgggaggactcagactgttcatgagtgctcacctggtagaggaaagatcc

SEQ ID NO: 726912 - DNA, 1263 bp, Homo sapiens
tgactgcccacgggaggcatcagaccttccctgggatgtggtgtggctgtgatgggaccctgagtgtccagacctatctaccgattgctcgtagtgggatccctgccttcctcttctgcttgaccccgggtgtccacgaatggtgtcctgaccctcttgggacgctgagtgcctggagctgtctcgtgcctgctcgtggtgggatccttgtcttcgtccagtgctggtcctggtccgcccatgggcagactcagactgttcatgagtgctcacctggtagaggaaagaccctgaacgtccagaccttccccctgaccggtcacgtgcggactcttggtggctctgctgatggggcccagcctgtccatggcctgacactgactgtgtgtctgactcttctgaatgtccctcactatcactggcctgactaccactggacccccagtgtctactgtctctgactgcagatgaagcttgtccacgcggaatgcctgagtgtctggagctgtctgctgactgctggtggcgggatccgtgtctctctcctggacttgatcttgcctgttcatgggatgatgcagcctgtccaccagaggaagtctctgcgtgacgagtgcctgattgtctggagcggtctgcagagtgcccgtgaccggctctgtcttcgtgatgggacctggggtgtctggagccgtgccttgactgctcctgaacagatccacgatggtttctggaagcagacccagaccacctctcagagtcttctgaatgtccctcactgtcactgtcctggctcacactggatccctggcgcctgcttctcctggacccctctgattgtccctggactgcctgtgagtgtctagagatgtcggcatgagtggaagcttcatggtgacgtgacmctgagtgcctggagctgtctcctgattgttcctcattacgtgttgttctgcttgcacttctggatcctgactgcccacgggaggcatcagaccttccctgggatgtggtgtggctgtgatgggaccctgagtgtccagagctatctaccgaatgctcgtggtggtacccctgccttcctcctctgcttgaccccgggtgtccacgaatggtgtcctgaccgtattgggatgctgagtgcctggagctgtcttgtgcctgctcatggcgggatccttgtcttcctctagtgctgggccccgtccatccatgggaggactcagactgttcatgagtgctcacctggtagaggaaagatcc

SEQ ID NO: 726913 - DNA, 1263 bp, Homo sapiens
tgactgcccacgggaggcatcagaccttccctgggatgtggtgtggctgtgatgggaccctgagtgtccagacctatctaccgattgctcgtagtgggatccctgccttcctcttctgcttgaccccgggtgtccacgaatggtgtcctgaccctcttgggacgctgagtgcctggagctgtctcgtgcctgctcgtggtgggatccttgtcttcgtccagtgctggtcctggtccgcccatgggcagactcagactgttcatgagtgctcacctggtagaggaaagaccctgaacgtccagaccttccccctgaccggtcacgtgcggactcttggtggctctgctgatggggcccagcctgtccatggcctgacactgactgtgtgtctgactcttctgaatgtccctcactatcactggcctgactaccactggacccccagtgtctactgtctctgactgcagatgaagcttgtccacgcggaatgcctgagtgtctggagctgtctgctgactgctggtggcgggatccgtgtctctctcctggacttgatcttgcctgttcatgggatgatgcagcctgtccaccagaggaagtctctgcgtgacgagtgcctgattgtctggagcggtctgcagagtgcccgtgaccggctctgtcttcgtgatgggacctggggtgtctggagccgtgccttgactgctcctgaacagatccacgatggtttctggaagcagacccagaccacctctcagagtcttctgaatgtccctcactgtcactgtcctggctcacactggatccctggcgcctgcttctcctggacccctctgattgtccctggactgcctgtgagtgtctagagatgtcggcatgagtggaagcttcatggtgacgtgacactgagtgcctggagctgtctcctgattgttcctcattacgtgttgttctgcttgcacttctggatcctgactgcccacgggaggcatcagaccttccctgggatgtggtgtggctgtgatgggaccctgagtgtccagagctatctaccgaatgctcgtggtggtacccctgccttcctcctctgcttgaccccgggtgtccacgaatggtgtcctgaccgtmttgggatgctgagtgcctggagctgtcttgtgcctgctcatggcgggatccttgtcttcctctagtgctgggccccgtccatccatgggaggactcagactgttcatgagtgctcacctggtagaggaaagatcc

SEQ ID NO: 726914 - DNA, 607 bp, Homo sapiens
ttttaaaaaatttttggtagagatggggacttgccatgttgtccaggccaccttctgtaatactttaaactgtagcaacctggccaggctcatgcctgtaatcccactactttgggaggctgaggtaggaggattgcttgatcccaggagttcaagaccagcctgggcaacatarcaagactctgtctctattaagaaaaaaaaaaaatcagctgggcatgatggtgtgtacttgtagtctcagttgctcggaaggctgaagcaggagaatcgcttgagcccaggagtttgagtatgtagtgagtgtgatcgtgccacttctccagcctgggtaacagagcagaccccatctcctcaatcccccccacccaaaaggaagacaaaaccatcgatattattttgcagccagaagcttgggggtaggggacagtaaggaggttattggagaaagggaagtggagatgaggagggaagggagggagtgggagggagacactggctgattggctgagcagtggagagctaccgatggcaggattctgcagcgcggtgaggcatggggtggatgttgcgaaatgaagctggcggttacaagataagccattta

SEQ ID NO: 726915 - DNA, 516 bp, Homo sapiens
ttatcaatataagacatctacgttgacaaaagaaatcgaatgttgactgagygcggtggctcacgcctgcaataccagcactttgggagacctaggcgggcggatcacttgaagtcaggagtttgagatcagcctggccagcatggtgaaactctgtctctactaaaaacacaaaaaattagctgggcatggtggtgggcacctgtaatcccagctacttgggaggctgaggcaggagaattgcttgaacctgggaagcggaggttgcagtgagccgagattatgccactgcactccagcctgggcgacagagcgagactctgtctcaaaggaaaaaaaaaaagaaagaaagaaaaagaaatcaaatgtctcagcatattttaaatactttatatggaacagttgattttcactttctttcaaaagcctaccaaaattgaggagttagcgtttttttaatcccatgaaatcgatttaaaaggaagaaaattatttttcaaagggacaacattttat

SEQ ID NO: 726916 - DNA, 983 bp, Homo sapiens
aaagtggtatgagtgggcattgttttcttgttcctgatcttataaaaaaaaaagatttctgaaatgtttcaaagtgaattttcctgtttatataaagaattttataactttattttgtacccggctacattgctcacttttatattagctcttttaattagtttttaagttctttggatttttttcatgtggaaaaacatatttgcaattaccatcagttttatttctttaaaagaatctttatatatttaatttatctcttttcttgcctcactgcaatggctaaagctcctagtacaatgttgaataaccataaaagtagtaggtaccactaacttcgttttgatataagataaattattctaacatgtttttatacattattatttattagggtaaatgggttccttttaatttcttgtttgctatgcatttttaaasatcttgcaccttttttgcttgttctattgaaataagagtaagtttatctcattaaatctatttatgtgtatagctattaatatgtgtagtttttaattgattttctaatgttaaaccagctttgcagtattgggttccaaattagtcttggtgtcatttctttaatatattgcaggattatatattgttaggaattgtatctattatcataattgagattagcctatattattttcttgtccttacttgtagtataaagagtatatgagacccataaaatgaatttggaagtggccagattttttttctattttatactttaaaacattgtaaaagggttattttatcactcttcaagtactggtaaaattttctacaactcttatttaaaatagtagttttcataacaaagagtgatgaaaatttcattgttatgtggtcatctctttatttaccattattatttaatatgacagagtaatatgccaaataaacttggaaggcaggtaacagagagttggtagtctagtaaaaatattgaa

SEQ ID NO: 726917 - DNA, 591 bp, Homo sapiens
  misc_feature 17: n = A,T,C or G
atcatctttcctttgantcatatattatcccattcccacattgctataaagaactacctgagactggatagtttataaaggaaaaaggtttaattgacttacagttcttcaggctgtatagaaggcatgactggggaagcctcaggaaacttacagtcatggcagaagacaaaggggaaacaagcgtgtcttactatggtagagaagaagacggagagtgaagggtgatgtgctatacacttgtaaacaaccagatcttgtgagaactcacacaytatcacaagaacagcaaggggaaatctgcacccacgatccaatcacctcccaccaggtccctctcacaagattgtgaataaaattcgacatgggatttgggtggggacacagaaccaaacgatatcaacaagtttacattatctgtctttcccatcactggatacaacttactttataggttaatatgctttcacaatatgaatccctgagtgtcaagtatttacaattcactactgaaaattgcaaggctccaattattagtgtgattttcttcatgaacaagtgcctagatgtggcctataagtggggcagcac

SEQ ID NO: 726918 - DNA, 610 bp, Homo sapiens
caccacgccggctaattttttttttggatttttagtaaagacagggtttcaccgtgttagccaggatggtctcgatctcctgacctagtgatccgcccgcctcagcctcccaaagtgctgggattacaggcgtgagccactgcgcccggccaggcatagggtttctaaggactgggggaggcagggtgtgtttgtcggggggtgcrtgtagggaggaatgttagcctgtacagggtgggactctaggtgtgcagaggcaattcataaacttacgtcttcatgcaacccatgttcacaaaatggcagggaattttagcattataatgatgtgttaatgatctgaaggcaactaggggtcgccagttccagttcgtgcccacttgtggggtcttaattccctctagtatctggtcaagggtaaaaaagctctggtgccatcccaggccatctggtttcttcagcagttgtgcctgtagataaagggactgaagaaaaccagtcagaaaaaaggactctcccagttatttcatcatgggtgccctggtaacaacacccggacacctggactactacaacaaattttttttttttttttgagacagagtctcac

SEQ ID NO: 726919 - DNA, 1292 bp, Homo sapiens
acacaaattttggaagacacattcaaaccacagcctccccttcctcctgatccattccattctccatttttctccaccctgctccatgcctcagttcttaatctctaagagctgcatctttggactcttaccttctggcttccctttgggttcatcaatgttcagggtatttattacccccagattcttcaaggatgggccaagatcagattccaacatcagattccaagttcttcagcttttggacttatatcagtgatttgccagggtctctcaggccttcagccacagacttaaggctgccctgtcggcttccctacttttgaggttttgggacttgaactggctttcttgctcctcacagacacacccaggaacatgccccaaaccagtgagccaaggtcgcaccactgcactccagcctgggcgacagagcaagactctgtcgcagaagaaaaaaaaaaatgttaatctcctttggcaacaccctcacagacacacccaacaccctcacagacacacccaggaacactactttgcatccttcaatccaatcaaattgacactcaatattaaccatcacaagtaggtactcgataagtattttgggggaaaaatggattgatggatgggctattaattttcctttagctctgaggtgattctgctcccccttctctctcttcctagctccttcttttcctccattcctttctcaaacttttgacccttcaggctttggttattgatattgctctgaaattgtcccctgcaactgagaactgataggatagtcacccatcacctcttagacaaaagtaggaatttgacacctggaacatcccaaaacctgatgccccaaaccagtgtttggattcttcctaaaatgtcagtggaaaatgtgacaccagtggttgttgagatgggagacatcagtgcatggaagtcagcagactgatacagkagcagtacaccccacccagcataaatggacacaacagagaataaaatgggcttgggaaggggaattctggattcacactcaccacgccagagagcttctcattcggcattttaacatgctgacccactgggatggaagattgtctcattttctggacccatagtgaaatgataaaagagagaggccagctactcgggggcccttccctacctaaggccacacatgctgattcagggcatctggacagtgaaaggtgattggacgttagcacacatgaagtccaaggtcagggattggaaatgatcagcaatataaccaggtaggaaca

SEQ ID NO: 726920 - DNA, 1469 bp, Homo sapiens
gtagaaggagcttagtagaagtagaataaaatatttaaagcgcggatggaaataaaacgcgcagtgaggtcgcggctggaaggaaagaagtggggagaatatgagagaaaatcatattttgaccggctgggagaaatctagtagatgcccgacgggaagtagaagtcgaggttcaggaccgtggagagcggtgaaggttctgaagaactacaagagcagggtatgggggtggggtatccctgactcctggctaggtgtcacactcccaagagcaactctgacagcatgtgtcggaaaagcagcatctgctctctctgacttcttcagaaggtgtgcctgagccttaggcaaaggtgtaaggaagaaagcacatcgctctgaattcctctgggtaaatagaaaatctgcacctagtacagaagccataggtagagaagagtggtcaattagtctcggatattggaaagcattagaaatatataaaagtgtaaagatggacggggagatttatttggggattgtttctttgtccctactttccttctatgtaatgtggactcagaggctggtattcagttgctgtgttcagcccatttctctccccatcatctaagaattaaaaaaaaaaaggaattaaatgatttagtttcttattgattaaaaaagctaaacatattttcaatgaaagagctatttgtgaacttaacgttgacaagtaataatgaggagatgaatctttaagaacaagacagagtccttatttagtaatgagttttctgccttttatatgttacttttatcataatctcaagctgtgttaagccttgcacaaagtatctatgaagcaaataggtaattggcatgggcccattttaacgactgagaaactgagaaaagtctggggacttgatcaacattggtcagtgtactagtaaaaaagtccacattctggaggatttctgactctacatcattttcactcaactcttgcagctggaaaaatwtgtatttccaatcttcttccacttctgatatatgtgccgagataaaaactaaaatgagtaagggcaatgtacaatgaaaagtttgatagaatctatgcataaattgtcaagggagtactaaagatttctttttctagaagaaaataaatcttacatttttaatcttaggaaggttgagtacaagccatattcagcagttgcccagaagattcctagccgaactacagagatttgatctgtagagtgcaggctaattaacttttatataaaatatttctgtcacctgaatctgaatggtgtaggcagcagatgggaaggcatggaaaacacagatacacaatgctgccaatgaccaaagtgttataaacatgaaattgcatccatagggtgcatcattattaatatacatgcagaatcagatctaacaaaatgcaggagtcagcatcacttgcttcttatcattgc

SEQ ID NO: 726921 - DNA, 1770 bp, Homo sapiens
ttttctacggtcatctttctagatctgtcatacagttatgtaattatttgttaacatgtgtctctctcctcctctctcactagaccaaaccctgtgctcctcacacaatgtctggctcataatagatgctcaatgactattggttaaactgaattaatggtccactttcattcattctagtgtaactgctaaatcacacctgtggaaaacccaccatatgtcaaggtatggtgatgggaacctaaaagagtgcaaggccctgtgaaagagggtcctcattcactgcggtggacagaactcctgaccacctagaatttaccatgttataagatgtagaacaaagctggaaaagtaaggccttggggaaattgattttgtaataaatagaaaacctgtttctactaccctattaaacttttcctacttccttcattctccctaaatcatttccaatttgccacagaccacaaatgacagaaagtgacattgttctcacatctttgaaccactgctttcccaactcctcattcacctcttctgcgaatttctctatatttttgtagccaaasattcttgacatttaaaattagagaaagtcaaagttgatgaaaagtaaatttactggaaataatcatcagtgagaaaggaaaagcctggaactgtattttaccttgttatctcctgtcaaacaaagtatcgggaaatcagacaagagttcagatcttggtaagattagccaagtctattcctaacttcctgttttactcactgctcatccgtcattaagtacgactctttaggtttcagccgccgggtgtggtagccatctgtttgttagcagcacccagataatttcaaaatgtagattcccagatttatcaaatcagaactcctgaggttggagcacagaaatctatttaaaaagcaaacaaacaacttcacacacgatctgagtatcatttgttttttgttttttggaccacattatcctaagagtgtcatccaacgtgattttcaaaatgtgaccaggaaccacctgggaaaaaaaaatcacatttggtagtttttaaagtatagaattttagcctcactgaattccactatattatatgctatgacctcatatatctgttttcttttaacaaactcctccagattattcatatatgcacagtacagtttgagaatcaatgacctggggcagaggtctccaactcagatgccttctagaggccatgaaggtaatggaaatgtccaaaacagtcccaaataatacagtagggagtagtgatatcgtatgtcactgaagagtgcctggcctttctacagcagccagccagctactactcagctgcaaccagctgttactcacagggaacattgccagatattctgacttttcaagggaagccagactggatttttttaatgtaaaaatccccttaaatgttgacaacttactcactttttaaaaaacaaactgcatgcctgctagtgctggagggtcaccagttcaacaccttctggactaggaaatatcaagggatttgtaaagcagacaagtattagccagaaacgcctcactgcctggctgagtaatggaagatggcataggataggcctgtaatcataacaagtacagttcctttaaggtacagctagaaagagctagaataagtatataatgtaaaggacaggtggataccctcatgtgaaagcaagagacaagaaagaaaaaaggctctaaaagataatgaatataatccattc

SEQ ID NO: 726922 - DNA, 1471 bp, Homo sapiens
tgacatttcaaatattgtcatatactctgttatatacaaatctatctctccaactggattgtaaaatttttgagactaggagtcgggttctacccattttgtattcttaatatttagcatatttgggacttaaaacattaagtttaaaaaattgagcttaaatttaataaataatatttttaaataatttaagcaaaatatttattctaatttttaaaaatatttacttgtggatacctgagtgtttttgtgtcatatatacatagtagaatattaagaatgatttattcaatgagataaaattataggttatatcatgtttgctctataactcttctgtgtattgtaacttttctattaagatttttaattttaaaaaagtgttgttttcatatcccaaattttattttggtgactctggccatatttcaagccygatatgatcttttaaaatatttatactgcttatcaaacttctgtctctaattaaaatttagaacatgaaattcctgtggtcccatggtaaccacaaaaaagcctggacaaaatagaaacagtacttttctatggaaatagcaaagaagaggatgcaatgaatctttgttaaactgaatttcagaaaaaaatagcccttcatagtgaggagagagcttcagcatcttctgaacctgagagcaggttccaggtctcagtataggtggatggatggtagaataaaccacatagaaacaaagagattgaagaaaatgaagagaaatcagctgagccttagatgacagtgtgggctggtgacattttttagaatctggaagagtggcaaatgtaaaaataaatcatgtggcccagtaagtctctttccctaaccaaacactgaattttgccatgaaaggaacaataaagggtattctttaaagtagagagaaatagcaatggtcccagacatcctcaaaattcttctattatagaaacctgctggagttgaaaccagggtgaacaaaaaaagggaaaaaaaagctaatatttggttgtctcttaggtcaaatattgtcttggttaacggaagatgcaggtgaagctacaaaagtttagcttggacaaatcacttacttctatctaaattaaagctcagactcaaacttactctagtagccccttaccccaacccctagacagaggaaataacttgcattattttacaagtaaataaagcaataaaaactaaattatatagcaatctccatcatcattttatacacaacctccataatgtaataaaaaattataagacatacaaagaaaatgtgactcacaatcaagaaaaaacatagcaattagaagaaaacccacagttaacccagttaagggcattagcaattattttaaaaccaattttctaaatatggtaaagaatctgcagaaaaatacatatataacaaataaaaagatatggtatttcagaagagatatgaga

SEQ ID NO: 726923 - DNA, 1042 bp, Homo sapiens
tgggtacttcagggttggtcagggacccttaaaggttcagatctgttattttctctaaagttttcattagtccttcatagtagggatgatcctgcacagtcctgcctctttgcaaaaaacaaaatttcaacaaattgagtttaagaatataattgtcttttattagtgactcataaatcgaggaacactctatctataaaatattgaaaggtgcaccattaggaatagtagaacagtcagtttttataagataacttgagcaggaacaaggaaacaatgtaatataaaaaaaagatgactggttaacatcagggtgycttaggttacttgccttgtaagtgttaaagcagaggcgatttctttatcatgctggctaaaactggtctgtttggggatttggctatcatctctctcctgatttctcagaaggtcagataaacaacttaatttcagtttgatgacatggaacttttagcatgagtgactaattttggtttggtcttttggagtctaatgcagatgctcagtctaaattgacaatgaccttccataaattgtatttactattctcatagaactactggtcaaattgaattttaattatttagttagatatctatctctggtcttgttggaaccaacttgaatatccctgtccccacttccaagtcacttttatgtacacaatgacttcaattaagtgacaaaaccaattattccaattcttatctatgtcctgtttttctctcccgttctcaaaagactgtctccaccatgcagaagaaagagtcatatactctgttaaacaatgcatcaacttcagatgtggtccatataaacaagctaaaggttgtcttatcttggagatatttgccccggaaaaatgaggaagtctaaaaacctttccaatgacaaactcaaattacatttattttctgataggagatggttgagtagatagaatcaacaaacactttcatgaagagataaagggacctaagatatcatcattgaatgttgacttggtagaaacattaaaaaa

SEQ ID NO: 726924 - DNA, 665 bp, Homo sapiens
ggatcttttcaatttaggtgactttggcaaaagcaacctgagtagaatgctgacatttctaaggaaaatcacttacagtctcttcaaaaacttacatttgtgaatttccactttagcacacatataactgtgaaatcatgttaaaataagctgtgccatgatgcaggtattttaatgggatacccaatggaagaataagatttctctgtttttttgtcatgacttttgattagcacgactatagattaggcagagctcaaacatcccacgttaccacaacggaagaatcagtatgtgcttggctgcatttaaccatgatactcccctttcagaggcatcttgctttaaaactaagtgagtttcgttactgttgcactttcttgttctggttataccccttcttttctaagtatttttccgcagtcaagaagaaaccctaatgctctttttctctcttgtgctttcacaaaggcaaagaactttttaaaataatgccatgtttcctgggactacacaacttcaaaggaccagttaccggycttttcaaattttactaaaattccatcactattattgagcaacttttgcagtggtgataacactccacaaatttattttattgaatgactatatatgtttttgaatgccataaatctgggcagtat

SEQ ID NO: 726925 - DNA, 653 bp, Homo sapiens
agccattgttttaaactgagatgctgcacatggccgaaagagaccagaccaaatcatgagagtcacttgtgcttggtgccatgtaataaaatgtaacttagaaattggccagttttccaaaaataggacatttatagcaaccaataaaaaggggcccagtcaacatgaatctgcatgataagaaggttccctctgccttagtcctttaaggaaatgcactttgaaagggccagtctcctttctgttcccggttttggctttcttcaaccttttctgtttgtaaaggctcatcctctctattcagctcacaggagcgccattctgttttatagatgacatgctacctgattcatggatcatttaaaaaagccaatttgatcattaaattcaattcgttaacattttgttttttgacatttatttttgaacaataaaattyatagggactctacttgacaggaaaagggtgtgtggatctccttttcttctattcactgtacacctgcctgatagtattcagcaatagaatgctcaaacctcccacctctgaatctttacacttactgttctttccagctagaatgtagtttttgttttgcttcttaatatagaagtccagtggtgctctctctcacctccttccaggtggttca

SEQ ID NO: 726926 - DNA, 669 bp, Homo sapiens
gtggtgatggtttcatggatgtcaaaacttatcaaatttaacattttaaatatgtgctgttgatgaaatgtgaatcatacctcagtaaaacttaaaacaacgatggttttctgctgagcctttcttcctcttcaatattcaataaatgtgtcacagaactacagaaaccttamaggctcaaaatgctaatgccggatgaaagaataatctggcatactttcaacaggcatagagaactggagtgatatggtactttagatttcacggctcttcatgactgggcggatagaaatggacttacttgtggttgatcttgactttgcttttctcattagtctgtatttttatgtaattcataccatattaaaatgatagtttgatattaacaaatatacttttaattattatggactaagtattctagatagtataaaaaatacaatgcatgcaaaacaacccaaaacttttccttgggagatctttgtatgtacatgtacttatagatgatcagataaaaacaaaatgtatgtctaaccaattttgaagaaatgaatcccaattttaaattgagtagaatgctaacaatgcaatctcacccaattaacctgtgatattaattgtaattttctctggaagtttagttgttacatgtctctaattgatctgtat

SEQ ID NO: 726927 - DNA, 610 bp, Homo sapiens
atgctgcccatctctaaaacaatcagacatgatctctctgatagagtagtacactctccaggcccaggctggagctgtagatcacaggcaaccgatgaaatttgcttaattatttgattcaatcagaagttggcttaattattttcttgctctcacctcttttgaatccattctggaaactgattatgtctrtaacaccaacccagagataagcatttcaattgggaaatgtaattagccaaggaaaatgaatgtgggagctgccttttgtcaaagcaccattaaaacccagctctggtcaataccaatgtggtgtgaagacaaaaggctcagtttgctcctcttgtgactggagagggaaggcccagcaggaggtgggaaaataggtatcttgggatcttagcaaaaggaagctcattaattcattcattcagaggcttttctaggccagctctgggatggatgctagagatgcaaaggtgcactggccacgtcccttgcctcgaaagagttctcttcttagaggagggattcacacgtaattatgtggtcaaagtgctacgggaatacagaggaaggagccactgattctgcctctgggaacttcaca

SEQ ID NO: 726928 - DNA, 640 bp, Homo sapiens
gtgtaattgactcacagttctgcatggttggggaggcttcaggaaacttacaatcatggtggaaggggaagcaggcactttcttcacaaggtggcaggaaagagaagagcaaagcgaagtgggaagagtcccttataaaaccatcaggtctcatgagaactcatcatcacaagaacaacayggggaaatagcccccatgatccaatcacctcctggcctcgacatgttgggatttacagtttgagatgagattaaggtggggacacaaagctaaaccatatcaatgatgaataagaagaaagcttcagaaactcttggcattgtatccaagtcacttaaacaagctacagtggacaatggaggccattttaaaagtggtttatgaccaaattctttggtaaatgttaagtaggattttatgaggttcttctcatgatctccaatagtttaaaagcttagaaacaactatattctgaaatgcaaaagtaggagaaattgttattgagcaccatgatacatatatttaaggtcaagataatatattatgaaaaaccccaatttataaatatacttttcattagaaagtatatgggttttgtgctgtactacttttagtacagtaattcactgctgtatgagt

SEQ ID NO: 726929 - DNA, 595 bp, Homo sapiens
gaccatagtggacatctgttgtttttctctgcccaataccactctcacccccttctactgttaatggcattcttttctttttaacttttattttaggttcagggggcacatgtgcaaggtggttatataggtaagttgcatgttatgggggttagtgtacagattatttcatcatccaagtaataagcataatacytgataggaggtttttgatcctcaccctcctcccatgttccaccttcaagtaggccctggattctgttgttcactccttcagttcatgtgtagtcagtgtttagcttcctcttataagaaaatgtgatatttggttttctgttcctgcattagttcgcttaggataatagcctccaggtccatccatattgctgcaaaggacatcatctcattcttttcatgcctgcatagtactccatggagtactttatatggaccacaggtttttttatccagtctactgttgatgagcatttaggttaatttcatgtctttgctactgtaaatagtgctgtgatgaacatacacgtgcatgtgtctttatggcagaaagatctacatttctttgatgatataagtt

SEQ ID NO: 726930 - DNA, 654 bp, Homo sapiens
ctgttcctgtttttcattatcaatatttcattcagcactcatttgataatcacctatttatattacaagaacttaatataaattaatatttatatatatttatattaagagccagggatacaaaaagcattaagctggtccctaaggagcccacctgcagtctggtacagaagaggagaacagagaaaaacaggcatttgccaggcaaagggtaccctcggcagaacgaataacatatgcaatgaccagagctgtgaatgggtctggttcctttccattcttgccttctggtgttccccaaaggcggagctctttccctcttgctatgacaggcagggccaccacatcaggaaactcattttctgtaaccayagcatggcttttgctccaggctctgcccctcctccattcacccctctctcatctgcttcattctccctttctgcttcatctctgtcctctgtgtctcagcccaccctcatctattgtcctatggccattatcactagtcagacacaaccggcatctgtcctagaatctggcaagggcctcctgactgctcttggacaccatctctcctctttgcaaactgcctgaacagaagctatgtgacatggattgcaaatcacttccttatgcccagctgcagggcaa

SEQ ID NO: 726931 - DNA, 815 bp, Homo sapiens
acacatactttagagagtgagcaaaactattagggatagcaaacctatcttatttgagggaaaatgataagaaatggggagtgtttgacctcaaggagagaagactcaaaagggccatgataatgtcttcgtgacgaatgtagtttcatatgttgaagggtgtgatgggttgagatatagatttagctggaaactgctggaatacatgattgtcttcactctgttttggctgccaaccccttctcctaagtaccagagggaaatatatgaaatatattcacagagaacaaagcaaggcaaggcaaatcatgcaattggctcagggatcagcttcaaacaatatgtttcctttcaaaaaaagaagagctccttacctaagttagactggtctgaatgggctgggatcaaggcaagacagaggtcctcttctggtctcttctcttccaaagtccaaacacttaacatagaccttaccactccaatgggaagagaggatgcccatgcccattcaaaccatatggggagaacaatgcaggaataacagatacamgtgtgtctatatcttccccttccactcccgcgtcaagttttcagatgagatcatagccctgatcaacagtagaactgaaacctcatgagagaccttgagccagaggtacctagctaagccatgcagggattcctgacccacataaactgtgagataataaatttttgccatttttaagctatcaagtttcagggataatttgtacacagcaatagataaccaacacaaattggtacacagagtttcattatgtcaatttaggtta

SEQ ID NO: 726932 - DNA, 815 bp, Homo sapiens
acacatactttagagagtgagcaaaactattagggatagcaaacctatcttatttgagggaaaatgataagaaatggggagtgtttgacctcaaggagagaagactcaaaagggccatgataatgtcttcgtgacgaatgtagtttcatatgttgaagggtgtgatgggttgagatatagatttagctggaaactgctggaatacatgattgtcttcactctgttttggctgccaaccccttctcctaagtaccagagggaaatatatgaaatatattcacagagaacaaagcaaggcaaggcaaatcatgcaattggctcagggatcagcttcaaacaatatgtttcctttcaaaaaaagaagagctccttacctaagttagactggtctgaatgggctgggatcaaggcaagacagaggtcctcttctggtctcttctcttccaaagtccaaacacttaacatagaccttaccactccaatgggaagagaggatgcccatgcccattcaaaccatatggggagaacaatgcaggaataacagatacacgtgtgtctatatcttccccttccactcccgcgtcaagttttcagatgagatcatagccctgatcaacagtagaactgmaacctcatgagagaccttgagccagaggtacctagctaagccatgcagggattcctgacccacataaactgtgagataataaatttttgccatttttaagctatcaagtttcagggataatttgtacacagcaatagataaccaacacaaattggtacacagagtttcattatgtcaatttaggtta

SEQ ID NO: 726933 - DNA, 815 bp, Homo sapiens
acacatactttagagagtgagcaaaactattagggatagcaaacctatcttatttgagggaaaatgataagaaatggggagtgtttgacctcaaggagagaagactcaaaagggccatgataatgtcttcgtgacgaatgtagtttcatatgttgaagggtgtgatgggttgagatatagatttagctggaaactgctggaatacatgattgtcttcactctgttttggctgccaaccccttctcctaagtaccagagggaaatatatgaaatatattcacagagaacaaagcaaggcaaggcaaatcatgcaattggctcagggatcagcttcaaacaatatgtttcctttcaaaaaaagaagagctccttacctaagttagactggtctgaatgggctgggatcaaggcaagacagaggtcctcttctggtctcttctcttccaaagtccaaacacttaacatagaccttaccactccaatgggaagagaggatgcccatgcccattcaaaccatatggggagaacaatgcaggaataacagatacacgtgtgtctatatcttccccttccactcccgcgtcaagttttcagatgagatcatagccctgatcaacagtagaactgaaacctcatgaragaccttgagccagaggtacctagctaagccatgcagggattcctgacccacataaactgtgagataataaatttttgccatttttaagctatcaagtttcagggataatttgtacacagcaatagataaccaacacaaattggtacacagagtttcattatgtcaatttaggtta

SEQ ID NO: 726934 - DNA, 673 bp, Homo sapiens
tccttttagtgccccagtattcctcattctctgcttcgaggccgtagtgaataaggaaactgccccttccaaatatttgaaggaagagcgatgtcagctcatgccttcccagtgtctaattcaattgccaaaccakccaggtgttccacgcacaggagtggagctccagctgagaggtcccacagtttacctaggctcagccatgtttacctgagatgggcagatgcagcccggctgagagcagggtcagagtcagctgagaggagccacagtcggagctgagggaaaatcggtgaacatcaagcccagacctagaatagggaacagaagaaggacatcaaacttgctagctcagagcatcaaaagtagaggagaaacagaaagaagggtccagaaaggcagttcagaactaagaccatgaatggtcaatttgtacaggagctcccctctccagggtgagtcacgcacatctcatggccatgcagggcaatcccctctgtcaaacagacgcctggtagctcttcaagtattcattgtgtgacaggcttttgctactccctttattagccattctataatctttcagatcatctcatagaataactggtcattagtaggtggaacccagctgacacttttggatgatgagtgagaggtgcttaaaaatgtatat

SEQ ID NO: 726935 - DNA, 2871 bp, Homo sapiens
caagcttgcactctacgtgagcagtgaccctactatcttagctatgataacactgcaaggagctaaaccatcagtcagggttactgcactggacagcttcagaaccctcttgacactgatttaattgaaataatgatttttttttccttttactatcctgaacatttctgttcttttagagaggtcaagctactgaaataccaatagtatccaaagggtccaaagggtcaaggccaagggcagcaacaaaagtttgtcattgtacagcataagaggatctggtaatgtggaagtacctcactcctgtgccagcttcagtacacggctccttttccctgaggctggcagctctggcagaaattaaagcaaaccttagcctcctaaatccaattgcagtttggattggaggagtttttgttctgaaagaatatgtagtgatctgtgttcatactgtccatcctgtaagcaatgattaaaactaatttagcttggttattcattaagtctccatggacatttttgcataactatggactttatatttctacccaacagtttagcactgactagcccttgggtttattgtaccctacactggcttcttgctgacagtaccatgcttgagactgacttttgagtttgaaaagagcagaaattctagactagaatttctagaggaagagtaggaagtggatcacttcacctctcatttttatttgcactccagtcactcaatacactgctttagatcaaggacaggaaccatagccacagaaaggtcgtgaggaagtacatcatcattccagtctgtagtctacctaattccaaatagcatgtgatatgtgtatgtgtttgggaggtgaaagggtaggatgcccttgccttacaaatagctaaagctcttaagggtagggttgtgcgttttatttctgctatagtcttgtattcatccacacttccactttaatatagcctgaactctcttattatacaccgtaatttttatcacatctttctattatacagtgttttctaagagataaaagtatggtttccactgtttttttctttagcaattgctggagtattatgcttcaaattataggcactctagattgacaattgttcatatatttttgtgccaagtagtcttttatcagttacttacatttagcagaattagaaggtctcatttttctattgctgagtgtctatattcatcttagtcgtagcatattttcttagttatagatattcaatttagattaaaggcttagatgttgtattatcattaataaagagaaatagttggtttcaacctaaaatttttacctcttcaaaataaaagatattcaaggtaatatatgctcatgtgatcagattttttagtattttctaaagatttaaatataagaattctgtataattcagatttttaataaataatattaaagtgcagatggaaagttatgcttttgtgtatttatttatgtttactttcctaatcagctgcatataaaggaagaaatttcagtctatgaagtgtatattctaaagagctatcaaaaatgcccatggatgccagggagaatgtagccttttacatcctgagcttgactggcagacagtagagtggttaagaacatggattctggagtcagtcaccctgggtttgaatctcagctccactacctattagcaggtgactttgaagaagacttttaacttctctatgccaccaattcctcatctataaagagaatataataactatacctatctcataaagtgattgtgaggagtaagaatttatgcataaacagtgcttggcacagaatgaatactatactaatgctaattgttattattcactaatattctcatattgaatatattcatcagagatgaggaacagcaaagtctgcctgccttttaggaagttgtgaaggttgaaattgatatataacttggaatagtgaagttgcaagtcactgggagtcagagttatctaaagaaagggatttagaaggaatcatactcacaaacaaatttagctgaggaccttttagagtggaggaaagaggtgaggtataaaaaatttctcttacattgtctaattttagaaaattgacctrcagaagcagactgaggctaattacagaattcagccatccttcataaaagaccacaaaaatcagcagaatgtcatttcttactcagtatttcttgctttattagaaatcacattcacacacacacacacacacacacacacaaacacacacacatgtacacagagatgacatccagtaatgaggttttaacaattttgaagtcattaaggtacagtgaggagatagacagattgtcatcaaacttcgcttttctgggagaacaagtgataatgacagcatctttaaaggcaagaaaaaaatgcaaacagcttgctctccccctgagctctgatgctgtggtaataacaagctcatgcctttgtatcttttcaaatgtagtcggaaatataatggaatggaaaacatgttttcctggagttaagggaaaaaaactacaagtcaaaggagatattaaaatgccgagtttaaggaacgaaaacatggttcttatagcacttgatagcaatttttaaataatacttcaaaaaaaaaaagccctgcataggggacaattctcagcagtctccttttttgatatttgacaaattatcaaattatttttcttctcctactcttgtgtttctttaatagagtcatcaatgttgtattctccttgatattttttggcaagtgtataataaaaaaattttaatgatataataatttaaaagagaaagtaagaactgatgatctggat

SEQ ID NO: 726936 - DNA, 525 bp, Homo sapiens
agttgggttaatatctagtagaatgattactagaacataaagtaaaattatgtttagttttctaagaatattcacaatataagaattcttaaaaattgagggtatactctacacagtttctcccaaaggtaacattgcaaaacaatcctaaaatatcacaaccaggatatcaccatccatacaatcttattcagatttcaccagttctatttgtacttatttgagttattacttttttaagagtgtaaccaaagaaaaagtaaattattgaatctcactctctataaaatggagagtaatgatataaacctagctaggttcttgtaaagattaaatgagctaatgtttaccacagtacttggcrtatagtgaccatttattaatggaatcattgcatgtttcatgccatcactgtgacctaacttctgtccttatttgcctcttagccttagcctttgctaacttccctgggatttcaccaaaccctgtcctattcctcagcttccgtaagagcccgtatctcta

SEQ ID NO: 726937 - DNA, 426 bp, Homo sapiens
tttgactcattaaaaattcagaatcttacttgttaagattagaacagttactggaagggggccaatttggtcagggagaacctrttttcgttgctgcttccagtgtgatcatatgatccctcccctcctcatctcagatttccagattttcagaatggagtccaattttttgctttggcccagaggagaaagtctaagaaatatgtaaatatactgagtaaacttaaaaatttcacagaagttgtgcctttaccagaagtagtgggttatttaccttcagtatcctctatgaattctataattgtaaactggtgagactagagtgccaattaggtaattgcaaagatatttccctggtgctaaatcttaattagtggagacagctaccagggatcagatgctaactactgattcagtagactattg

SEQ ID NO: 726938 - DNA, 426 bp, Homo sapiens
tttgactcattaaaaattcagaatcttacttgttaagattagaacagttactggaagggggccaatttggtcagggagaacctattttcgttgctgcttccagtgtgatcatatgatccctcccctcctcatctcagatttccagattttcagaatggagtccaattttttgctttggcccagaggagaaagtctaagaaatatgtaaatatactgagtaaacttaaaaatttcacagaagttgtgcctttaccagaagtagtgggttatttaccttcagtatcctctatgaattctataattgtaaactggtgagactagagtgccaattaggtaattgcaaagatatttccctggtgctaaatcttaattagtggagwcagctaccagggatcagatgctaactactgattcagtagactattg

SEQ ID NO: 726939 - DNA, 426 bp, Homo sapiens
tttgactcattaaaaattcagaatcttacttgttaagattagaacagttactggaagggggccaatttggtcagggagaacctattttcgttgctgcttccagtgtgatcatatgatccctcccctcctcatctcagatttccagattttcagaatggagtccaattttttgctttggcccagaggagaaagtctaagaaatatgtaaatatactgagtaaacttaaaaatttcacagaagttgtgcctttaccagaagtagtgggttatttaccttcagtatcctctatgaattctataattgtaaactggtgagactagagtgccaattaggtaattgcaaagatatttccctggtgctaaatcttaattagtggagacagctaccagggatcagatgctaactactgattcartagactattg

SEQ ID NO: 726940 - DNA, 1105 bp, Homo sapiens
ccacctcaacctcccaagtagctgggaccataagtatgcaccaccacacctggctaaaatagtattcttttactttcgaccatttaaaaataaaattctttactcctggggcatacaaaagcaggtggcaggccacaggtagtttatatcagaggataattttacaaatctcaaaaagaaagagtaaaaataagtaagcaaagagtctctaataaaatagtgtctggattcttcacatacaaaaattctttcaagagctttagaaaaaaatacagttaataaggcaggcacggtggctcatacctgtaatcccagcactttgggaggccgaggtgggcggatcacctgaggtcaggagcttgagaccagcctgaccaacatggagaaaccccgtctccactaaaaatacaaaattagccaggcgtggtggtgcacgcctgtaatcccagctactcgggaggctgaggcaggagaatcacttgaacccagaggcagaggttgcggtgagctgagatcgcaacactgcactccagcctgggcaacaaagagcaaaactccgcctcaaraaaacaaacaaaacagtgaaccacaacaccaattgccgctattatagagtagtgttttctgaaatagccgaaataatttacaatattaaaagactgccagtcggtggagaaatacaaagcaaaactacaactaagatagcactactggctgggcatggtggctcacgcctgtaatcccagcactttgggaggccgaggcgggcaaatcacaaggtcacgagttcgagaccagcctggccaacatggtgaaaccccgtccctactaaaaatacaaaaattagctaggcgtggtggcaggcacctgtaattctagctactcgggaggctgaggcaggagaatcgtttgaaccccagaggcggagatttcagtgagttgagattgccccattgcactccaacctgggcgacagggcgagactccgcctcaaaaaaaagcactactaggcgcagtgcagtggctcatgcctgtagtcccagcactttgggaggctgaggtgggcatatcacttgagcccaggagttcaaaactagcctggaca

SEQ ID NO: 726941 - DNA, 1345 bp, Homo sapiens
tgggaggcagaggcaggaggattgcttgagctcaggggtttgagaccagcctagacaacatagtgagaccctgtctctacaaaaaaaaatagaaaaaattagctgggcatggtggtgtgggcctgtagttccagttactcaagaggctgaggtaagaggattgcttgagcccagaaggttgaggctgcaytgagccatgatcgtgccaccacactgcagcctggcaacagaccaagaaaaaaaaaaaaagatagtgtatgtatagtcagtaaatacagcagtggcttctgatctccagacctctcatttgcattgattctttaaaatcatctctaccttaatgttctgtagacatttcaaaatcaacatgttcaaaatcaaatttattatctatctccccaaatctgctctctctacttctgatgtttactgttcattaatggataacagaataaccatcaaatcatgtaagtggagagaactcagtgttaacctttatttactccctcttatttatccccatctaccaactacagtatctataaaacacattcactcctttctaccccattgcttttgttcaagatatcataattcctctctttctttgtggtaaacatgaaggtgtaccatccagttctacctccaaagaaagacttcctgttggccgggcatgatggttcacgcttgtaatcgcagcactttgggaggccgaggtggggggatcacctgaggtcaggagttggagaccagcctggccaacatggcgaaaccctgtctctactaaaaatacaaaaattagccgggcgcggtgatgcacgcttgtaatcccagctactagcaggggctgaggcaggagaatctcttgaacccaagaggcagaggttgcaatgagctgagatctcgccactgcactccagcctgggcaacaagagcaaaattccatctcaaataaataaataaatacataaataagaaaaaaaagacttgccgttcagctatagggggaatagccagcagatagcttccgcttgcttcagttctttcaatgtctgcctcagctgtagaggacagtcctgcacaagatcatgcccatcccagggctgccctcactcggtgcctaagcaaggcaggggtataaaagttcggtcattttggccaactgcaggacaactctgagaataggttggattgacaagggctagccagggctggaaatattcactccagagctccctgccagggaggctgggtctttgtcagatctgcattgccgtttgacttctctcttagctcagccctacttcttccccctggtaagcatcttgcacctcaaactctgtct

SEQ ID NO: 726942 - DNA, 1345 bp, Homo sapiens
tgggaggcagaggcaggaggattgcttgagctcaggggtttgagaccagcctagacaacatagtgagaccctgtctctacaaaaaaaaatagaaaaaattagctgggcatggtggtgtgggcctgtagttccagttactcaagaggctgaggtaagaggattgcttgagcccagaaggttgaggctgcactgagccatgatcgtgccaccacactgcagcctggcaacagaccaagaaaaaaaaaaaaagatagtgtatgtatagtcagtaaatacagcagtggcttctgatctccagacctctcatttgcattgattctttaaaatcatctctaccttaatgttctgtagacatttcaaaatcaacatgttcaaaatcaaatttattatctatctccccaaatctgctctctctacttctgatgtttactgttcattaatggataacagaataaccatcaaatcatgtaagtggagagaactcagtgttaacctttatttactccctcttatttatccccatctaccaactacagtatctataaaacacattcactcctttctaccccattgcttttgttcaagataycataattcctctctttctttgtggtaaacatgaaggtgtaccatccagttctacctccaaagaaagacttcctgttggccgggcatgatggttcacgcttgtaatcgcagcactttgggaggccgaggtggggggatcacctgaggtcaggagttggagaccagcctggccaacatggcgaaaccctgtctctactaaaaatacaaaaattagccgggcgcggtgatgcacgcttgtaatcccagctactagcaggggctgaggcaggagaatctcttgaacccaagaggcagaggttgcaatgagctgagatctcgccactgcactccagcctgggcaacaagagcaaaattccatctcaaataaataaataaatacataaataagaaaaaaaagacttgccgttcagctatagggggaatagccagcagatagcttccgcttgcttcagttctttcaatgtctgcctcagctgtagaggacagtcctgcacaagatcatgcccatcccagggctgccctcactcggtgcctaagcaaggcaggggtataaaagttcggtcattttggccaactgcaggacaactctgagaataggttggattgacaagggctagccagggctggaaatattcactccagagctccctgccagggaggctgggtctttgtcagatctgcattgccgtttgacttctctcttagctcagccctacttcttccccctggtaagcatcttgcacctcaaactctgtct

SEQ ID NO: 726943 - DNA, 780 bp, Homo sapiens
accctgtctccggctgccggggagggagacgctaaggatgtcagcctctctctccatcggcatcctgagcacgacgtctgtcaggctctctggatagtcaccgtcagacttaggcgccagagcctcaggaacctctgggacctgacccaggcctgtgcccagcctggggtcaaattctacctaggtcttagagcctcactcctgtttttttgtggggcttttttgttttcatttttgttttagagtctcactctgtccccaggctggagtacagtggcgcaatcgctgctcactgcagcctttacttgctaggctcaagccatcctcctgcctcaacctctggaatagctgggaccacaggcgagtgccaccacgtccagttaaattgttttcttgtcttatggagagacagggtctcattatgttgcccactcccattctgttttttctttcagggtctcactctggagatacacagtgagctatgattgcaacattgtaatactagagtgcagtattgcagtcatagctcactgtaacttcaaactcctgagtccaagctatcctcccacctcagctgggaccacaggtgcacaccaccatgcccagatattttttttcattttcggtagagacgggggtctcaccatgttgcccaggctagtcttgaamttctgggctcaagcaatcctcccacttcggcctcccaaaggctgggattatagacatgagccaccgcacccggcccactcctgttttttcacaacacagttcatctcc

SEQ ID NO: 726944 - DNA, 1931 bp, Homo sapiens
tgcacatatccttagaatagacgtctcacttctaggctattacatagaaagtaactcagacatatgtagagatataaagtagatttaactctttaagaaatgtaactttttcatttcattttaatattttgacctaagttcaaacttacagaggagtttcaagaataatacaaagaattcacccaggtagaccaaatgttaatccgtttgcctgtgctcttttgctctttctctgtctacaccaaattatttttctgaaccaattaaaaataaactgaaaacatgattttccttcaccctttagatacattagggagtttcctaaaaacaagaatatcttctcacttaatcagactataattaccaaaatcaggaaattaatattggtactacatcactatctaagctactaacctatgcaaattttgtcaattgtccaatcttaatctgtgtagtataagtaggtgccatctcagacactgcacagtaatgtcatgcgtctttatctcctttaatctggaagatttctctctttttcaggacatttcacacctttgaagggtactagtcagttattttgtggaaattcccttcatttgagttctgctgaagtgtcttcataattagattcaacttacatgtttctggcagaaattccacagaagtcatgctatgtcctcagctcatctatcaggcatatgatgtccatttgtctcactagagcatcattcactttgatgacttggataagattatgttggccagctttcttccatttacaagttactacctagctctttgcaattaagaagtattttgggagaggtaatttcagattttgcaaatatgccgttattccccacactcacccactagttttaatatctatttaataattctttcttaaacccattatttttctgatgattgtcaaatcatgcttttctaattatgtacgagatggctttctaatctaggaagagtgtttccttctctctcttttattattcatttatttatattagcattgactcactaattattattttactcaatggcttattatttaatttggagctcaaaatatcccagatttagccacttgaggcggctcccatatccttttgacttgccatgatcattctttaagccctgccttaccttctgtcacaaaaagatgttcagatgtaaattgatagcccttaggcatgataaagcaatgtccattaatgaaatacttgggatgcaatcaagtctaatgatggagattcagcccatgaaatccagaggtttggggttaattttacctcattcctcactgtgtaatgtcagtcccatcttaaatttcattaagcctcatattagttcacagttttgggggactttggggtagaatgcaataggatcatgcttaattaacattgtgtctgacacatggttgaaccaaaattcaaatacattctgagcatcaacaagaagagtaattggaaataaaataagaattactatccatccttaatgtacattcatactcaaggaacactctttgccattctaggcaccagaccttaacagagagatcacagatcttgctaaggtgaaaatagagtacttgtgtatatgatatataaaaagatgggtacaaatatgcatatgacaaatgctgcataaatgacaaatatttttattttctccttaattgattacattaattttttttgtcatattgggctttaggtgtttttttccccctaccygttttcataggcttgattgtagtgaaaaagacaaataaaacataatgataatggaaatatatttgttctattaatttgctgatgtattattacaatattgtattaagaactttattcaattattaaaccctttagtaaagtcaaaggtactttattaaacatttcttaatctaa

SEQ ID NO: 726945 - DNA, 1054 bp, Homo sapiens
cctttactgaaaagagatccccaagtacacaaacaaagtacagagagaagggtaaaattgttttgcaggtggttactatgttttgttgttttatttttgcatgaagtcacctatcggttcatacagaatcaacctcacatgggcctgtgagtatcttttcactttgattgtcctatctcttctcccttggcattgttcttggtcttttaagcctcttgcctcctttcagggctctaaatatctgctagggcattctttggagattcctaaaggcacctaaggggctctgtgggactccttgtatcccaagagttagttgcttggggcagtctttaagtccttcaagttcttcccaaggaaayataccaaagaggacttttttttcctactggcactgaccacttcctgtgagttattatgcttccatcctgttttaccagtgatagagagaggaagaattaacaaagaaggaggcagggaagaaatcccatcttgtcatctatgtatgaaaaggcactgccatggttacactgttttaggttgcagttaataaacactgacaaattgcctatgagcattttattcctgttatgctaatatgtaaatattagattttagtttctctgtttctaatgtatgggggagcctggattcatcataggagggatagaagatggagactgtggtttggaggcacagttcctgtaacagcttactctgttgatttaataatgtattttccccaagcagtatttgccttctgcacctatgccagataccacagtgtgactgtttaatttgcaaaatctataatgaaggtgaatggcaactagcagcatgcaagatagtctagattacagaatcacaattaaggtaaaaaggcctcatcaatattggtcatcacacattgagccatcacttttgagaaagaacataatattcaacccattgtcataatcaccagctgtaattaacattccacaagcctgtttcttcccatgcctaaactctcccagttcacaaaaaaactctacttcctctcctctcaaaaacc

SEQ ID NO: 726946 - DNA, 813 bp, Homo sapiens
atcaccttcttaccccacagagccatcttttcagtttgacttgttattgccactccagagtctttgcatgatattttgtatatcccaaaaacaagccctaagcacataatgatgcattagaagaaacaccttgcatacaacagraaaatattatgtggtcaactcaaggatatttatgcatttatttggtaaatgtgagcttgtgaagtagtctcactttatatttccaacactcaccaacaactctatagtgtagtgattattattcccattctgtaaataaggaaagtgagagtcagagagctcacacagctactaagatggaaagctgcactttaaatctgtgccctttttactaagccacgaattctaagttattataaatttaattccttatatggagttgatacagccaatatgtaaacaagcattgtctagtttgatcaacatagacaatcctgtgagataatctgggcaagcattttattttagagagcaagaaatggagactcagacagattgagaacatgctgatatgaatattatattcagctcttggccctgggagctctgactcctagtcctttgctccttctcctgcgtgtcactgtttctcatgctttcttgtttaaggttttagtaatgacagaaagctggtaaatttactctatcataactctggtctcatgaataaagaaatggtaatgaatgcccttttaataagacattttcatagtccagaaccatttaccaatttaaaatctatatcatggtggaagtcaaacagcctaagtatagtcttaatttttatat

SEQ ID NO: 726947 - DNA, 813 bp, Homo sapiens
atcaccttcttaccccacagagccatcttttcagtttgacttgttattgccactccagagtctttgcatgatattttgtatatcccaaaaacaagccctaagcacataatgatgcattagaagaaacaccttgcatacaacaggaaaatattatgtggtcaactcaaggatatttatgcatttatttggtaaatgtgagcttgtgaagtagtctcactttatatttccaacactcaccaacaactctatagtgtagtgattattattcccattctgtaaataaggaaagtgagagtcagagagctcacacagctactaagatggaaagctgcactttaaatctgtgccctttttactaagccacgaattctaagttattataaatttaattccttatatggagttgatacagccaatatgtaaacaagcattgtctagtttgatcaacatagamaatcctgtgagataatctgggcaagcattttattttagagagcaagaaatggagactcagacagattgagaacatgctgatatgaatattatattcagctcttggccctgggagctctgactcctagtcctttgctccttctcctgcgtgtcactgtttctcatgctttcttgtttaaggttttagtaatgacagaaagctggtaaatttactctatcataactctggtctcatgaataaagaaatggtaatgaatgcccttttaataagacattttcatagtccagaaccatttaccaatttaaaatctatatcatggtggaagtcaaacagcctaagtatagtcttaatttttatat

SEQ ID NO: 726948 - DNA, 663 bp, Homo sapiens
atattagcagacatgatgtgagcagaggccttaaatatgcatcatgaatttggcttgtctctttcattctggtgatctgtcatgagaggagtatgtttcatgtgaacgctccttcttcattgtaagccacataatgaaatatagacagcagaactccttccctaggaagtcaatggtcccaggagtatcaagactcatggtataaacctgagttaaacctgtagcctagaaaccagagcctagctgagccaagtcgccactgacttgcagtcccatgagcaagggaatcagtgtcagttgtttgatgtcactaaaattagggtcattttgttgctaggaactgaatgtttgtctacccatgaaattcatatgttcatatgtgaaagtcttaatctccaatgtgatggtatttggatgtgggggcttttggagatgactcggtgatgasggggcagccctcatgaatgggatttatgcatttataacaacacaagtaaagcgatctctctctctccaccatgtgatgatatagcaagaaggccgctatctgcaaaccaggaagagagccctcaccaggaaccacattggtccacaccttgatcttggacttcccagccttcaggaccatgagaaataaatctctgttgcttaagctgcagtcta

SEQ ID NO: 726949 - DNA, 643 bp, Homo sapiens
catcccagcactttgggaggccgaggcaggtggatcacctgaggtcaggagtttgagaccagcctggccaacatggtgaaaccccatctctactaaaaaaaaaaatacaaaaattaaccaggcatggtggtgggtacctgtaatcccagctacttgggacgctgaggcaggagaattgcttgaacccgggagatggaggttgcagtgagccgagatcacgccactacactccatcctgggtgacaagagcaagactccgtctcaaaaaaaaaaaaataataataataataaaaaataaactgagtctgtttttacctagaattatagcccyagtatctagcataatgtcaggtatataaaagggcctcaatcaatagtagttgaatgaatggataagaacaaacaatgcccaaaatttgtaataagttaataccactaaatcagcactaccctttcattgaattgcccactttggacattgcagttcaaaaacaaagctcaacatgagatctttctcaatagtgaagaaatgttgccttccccaaatcatcatactgaggattggccaaataaggaactgtagctacaatgcagatatatacaagccttagttagcaaagaaagtagataaggcattcaggga

SEQ ID NO: 726950 - DNA, 643 bp, Homo sapiens
cacattaygaatttgtcagcatctccgggatccacagaccttggcataattaaagcccattagattggttcggagtataacagcaccacatgtgctgtgaaaacatattctcctaaaagcccctaggaggatattaaacatttacaacccacaataaaacttagcagaacatgtcaaagtataaaactttttattagccggcagtataacccaccactcagggataatatacttagatccagcccctactattttgtaactttgaactaatggatgtgggaaaagcatcttgggtgtctcaggaaacctcttctggcccagaagtccagcacatcaaaattatctttacagtattgagaattttctctattgcagagctttgatagttgtttcctgttcaaaggccccaccttataattttattttgtataattccttctcttattaacccactgaataactcaaccttataattttattcttccgtattcaaatagggtcagtttcatctccagctctttctctctagcagaaagtcactgtctgggagccacagtagagtgaaaacactctggtcaatgataactcttaattctaccatgagaataaagaagagggaaaagaaaaggcaatagcattttaa

SEQ ID NO: 726951 - DNA, 1005 bp, Homo sapiens
  misc_feature 319, 320, 321, 322, 323, 324, 325, 326, 327, 328, 329, 330,331, 332, 333, 334, 335, 336, 337, 338, 339, 340, 341, 342,343, 344, 345, 346, 347, 348, 349, 350, 351, 352, 353, 354,355, 356, 357, 358, 359, 360, 361, 362, 363, 364, 365: n = A,T,C or G
  misc_feature 366, 367, 368, 369, 370, 371, 372, 373, 374, 375, 376, 377,378, 379, 380, 381, 382, 383, 384, 385, 386, 387, 388, 389,390, 391, 392, 393, 394, 395, 396, 397, 398, 399, 400, 401,402, 403, 404, 405, 406, 407, 408, 409, 410, 411, 412: n = A,T,C or G
  misc_feature 413, 414, 415, 416, 417, 418: n = A,T,C or G
tgaggctatccaagagcctaccaagagtcacctctttcgaacaaaaaaggatatttttacctaggaaattttaagggattttaggagctctgtgtcaggaactagggtcaaagaccaaatatcagaacagatattttccatattctccttgaacttctgtcgagaaggatattaggagctctctcaggaactggggaagtgagcaagtgtacatttcttattatatcacagtatcacaagagttaattcagtctcccatrttcatggagagactgactgtgcttggcattccttttctaattttcctagacacagccannnnnnnnnnnnnnnnnnnnnnnnnnnnnnnnnnnnnnnnnnnnnnnnnnnnnnnnnnnnnnnnnnnnnnnnnnnnnnnnnnnnnnnnnnnnnnnnnnnngttttatagcatcctgttttttatttattgacttatttatttactcactcactcacttgctggctggctgtcattttgctgatttccatgagtttctggaccagatcctagtattcaacttccaataacattttcaggtgtttttttttttttttgaaagattacatgaataacgtaatggcagaatcaaatttagaaactcagcaaaaaaaaaaaaaaagctttgtgtttcaacatgaatttctttttttttttttttttttgagatggagtcttgctctgttgcccaggctggagtgcagtggcacaatctcagctcactgcaagctccacctccagggttcacaccattctcctgcctcagcctcccgagtagctgggactacaggcacccgcaaccacgcccagctaattttttgtatttttattagagacagggtttcaccatgttagccaggatggtctcaatctcctgacctcatgatccacctgcctcagcctcccaaagtgctgggattacaggcgtgagccaccatgcccggccaacatgaatttcaaaggcaaaaatgctttcacatatctcaatt

SEQ ID NO: 726952 - DNA, 1005 bp, Homo sapiens
  misc_feature 319, 320, 321, 322, 323, 324, 325, 326, 327, 328, 329, 330,331, 332, 333, 334, 335, 336, 337, 338, 339, 340, 341, 342,343, 344, 345, 346, 347, 348, 349, 350, 351, 352, 353, 354,355, 356, 357, 358, 359, 360, 361, 362, 363, 364, 365: n = A,T,C or G
  misc_feature 366, 367, 368, 369, 370, 371, 372, 373, 374, 375, 376, 377,378, 379, 380, 381, 382, 383, 384, 385, 386, 387, 388, 389,390, 391, 392, 393, 394, 395, 396, 397, 398, 399, 400, 401,402, 403, 404, 405, 406, 407, 408, 409, 410, 411, 412: n = A,T,C or G
  misc_feature 413, 414, 415, 416, 417, 418: n = A,T,C or G
tgaggctatccaagagcctaccaagagtcacctctttcgaacaaaaaaggatatttttacctaggaaattttaagggattttaggagctctgtgtcaggaactagggtcaaagaccaaatatcagaacagatattttccatattctccttgaacttctgtcgagaaggatattaggagctctctcaggaactggggaagtgagcaagtgtacatttcttattatatcacagtatcacaagagttaattcagtctcccatgttcatggagagaytgactgtgcttggcattccttttctaattttcctagacacagccannnnnnnnnnnnnnnnnnnnnnnnnnnnnnnnnnnnnnnnnnnnnnnnnnnnnnnnnnnnnnnnnnnnnnnnnnnnnnnnnnnnnnnnnnnnnnnnnnnngttttatagcatcctgttttttatttattgacttatttatttactcactcactcacttgctggctggctgtcattttgctgatttccatgagtttctggaccagatcctagtattcaacttccaataacattttcaggtgtttttttttttttttgaaagattacatgaataacgtaatggcagaatcaaatttagaaactcagcaaaaaaaaaaaaaaagctttgtgtttcaacatgaatttctttttttttttttttttttgagatggagtcttgctctgttgcccaggctggagtgcagtggcacaatctcagctcactgcaagctccacctccagggttcacaccattctcctgcctcagcctcccgagtagctgggactacaggcacccgcaaccacgcccagctaattttttgtatttttattagagacagggtttcaccatgttagccaggatggtctcaatctcctgacctcatgatccacctgcctcagcctcccaaagtgctgggattacaggcgtgagccaccatgcccggccaacatgaatttcaaaggcaaaaatgctttcacatatctcaatt

SEQ ID NO: 726953 - DNA, 1803 bp, Homo sapiens
tcattgtagaaaaaaagtctacatcatttctaatagaaagcaaacacctgaatacgaataatggtattaagcaacaatttttaaaatattattttcctgaattaattgtaaataggtattttaattttctaccttaagtattatgatcagaaaagtagctgctttaaattttctctgaaacaagtaagggattatacacaggagtcccctcttatttgcaattttgctttccatggtttcagttacctgtggtcaacctgactccaaaaatgctgttccagaaataaacaactcataagtttaactgtgcactgttccaaaatgcataatgaaatcacgtgccatctcacttgggacacaaatcatccctttgtccagcatatccacattgtctagatatgctacccacccattactgtataggaaaaacacagtgtgaatagggtttggtactttccaaggttttagacatccatttggagtcatggaacatattccctgtggataagaggaggctactgtgtagaaaagctaccactaaaaataagctattcaatattcaattttaaattaaatggtaacatcaaatctagtcataaatcattcaacagtatttttacttccacagagctaccatgctttatcttaaatccttaggtatacagtaagtatgatttgtgtaatattactataaaaatcacataagattttctaagggttaataagcattttctctaaatgttttgagatgatataaaattattaatataaactcaaccaggacataaattttattatataaaatttcactggttaatttgcaattttttaaactaaattataaactactcaatatttactatcataaccttttataccattccaccacaagtaagcaatttaattcttttagtcactaatcttaaagttggggtctttaactgctgagcaaagtggcagggcatatgcctgtagtgccacctgcagttatttagcaggctgaaatgagaggattgtttgagcccacgaattcaaagccagtctaggcaacatagtgagacatttcacccctactctgtaaaaaaaagccccccaaaaactggacaggatctttaataaaaaacattaactacaatcaggtaatataatacatttttaagagccacatgaaagccacagatttgtaccctagataagtacgtattatctatattaaaaaaacattttacataatttcagagtcccactatggataacatcttccatctccagtttatayaccccaagttaagaattccaatctagattgccccaggaggctaagagttatttttttcctgaaatatgcagattttcaaataataagccctattaaagtgagatttaactgctgtcttcaccttcctttccgaaactaagtctccagactacttaacacaagattcttcgaattttatcctgaatgtaaagatgctgattctcacccactccaaaaacatacaacccctaaacatgcattaaaaaaaaataaggacatgatatatagtcatcatactctaccttgtcatatttgctactggacccaaagccaaaaattaaaagatgtccatgagagtctgtgcatgcaaaatgctgaccatcaggagagcatttgcagtcaaatactgcgccatgtccttggccttcaatctgaaatatatttaaccaacagtaagaaaactaccattaaaatgaaaagaattggtcactattattacaataattttaagataaaagcatacatcctaatgaagtgaagattaa

SEQ ID NO: 726954 - DNA, 1113 bp, Homo sapiens
cactatttttctattttatagtttatacatttaattaatgtagtttacctcgtgagctatacaatttggattgcatttgcttaatgcatcatcttacactttagaaattctctttgttccaatgatttgtgtgctctaagtattatattattgaaagtataatttctttaaaaaaattctgaacatctttgatattggcctttgtcttctcggaaacctcacttttagcgtttccttatttcacattgcttctgactcaagtttctcctcaatttgttttttgctgtttgttagattgctgggggtggaggtgattcttactgggttttcaaagggagacttgtaattatttttacttaattctatgttattgcattgtgatctaaggttttactatgatttcaatacaagtgcatcaatgctttactatatactttatgtagaatctacatgtttttcgatgtgaaggcactctgagtatttacattgtactgtgaaatgcagacatcgtctattcccctttttattgtgtgacccaggaaagtgtactatatcttagcttttcatctctaaaatgaacaaaatgattaaagtaatacctaccttataaggtgttgtaactattaaacaarttgccacatgcaaatagcttgcttaagagcaataactatgcgtgcattctcaccgaatcggaactctaagaaaaggagaatgtggtcggatttgtggaatttcaaaaagctttctattgctatggttgtttctgcgccaactaccactgcacaaatttgcataaatgttgaaatttagaaaggtatagctcttcttcaagccatgacctataaaatatctgcttcacatatttgagaatctccatcgctttcctctatcttctctcctactctttaaagtactatgctggttgtagaaacagtttttatagaccgctttaatcttggctgatagggaacaattttcaattgggtaactaaaataggctaccctgctgttctaagggagttttctatgttattaacaggtttttattgttaaatacttcctaacatcctgagtacccgagggttttcaatttaagttcttcatgtctattta

SEQ ID NO: 726955 - DNA, 948 bp, Homo sapiens
ttggactatgaactgaccagttacacattctaactctcatatttaaaataatatagcattatgtacattaatttttggaactcagtttctccggactctaataaaaccatacttgaacatagtaacttacttgctatttgcttatagtcagcaaatctgcatttttcattaaaacgcattccatttcattgacaatgctgacttacaatacatattaaataagtatccacacagaacctgaattctgaggtaataaaactcggaacaatttaccttgcctaacagtaacctcaggttctaatagtttaattaccaatagtaggtatattatttctggctattccatatatgaagatgtatctttcactaatcaacacatttttataragtatttaatattagttacatactccctttttattaaaaatgggattttacattttttaaaatataattcctatcgcttacatctctgacttcttgaggccatggttaattattatagtataaatgggataaaactagcttaaagattatatggtgatgttttttacaggaaactttggcttttctctgcaaatctatttaggaaaaagtaatgagcttgaagaaagaagaactacctcagaaagaattaggaccatgtaaggaactgatttcttgcaaaaaaaaagagttgcatgaaagagattcatgataagatttaagatgacaaatgtttacaaataacattctaaatggctgaagtcaactatgttataaaccatctggcagatttaagtctttgctgaaattcatatgaattattgtcatttaataaactattaaatggacctatggaaaaaactggcaaaacaacaaattttcagtaaaagaatcaatctgcctgaagaccaaacctagagaatatttcctcactcaaatatgaataatgtacaagatcaaatg

SEQ ID NO: 726956 - DNA, 1254 bp, Homo sapiens
aatgttgatatgttgtatttttattattattcaattcaaatatcttctaatatatgtgatttctcctttgacctgtaggttatttagaagtgcatttttagaaggatgagattttctaaaaatgttatttgggtgcataattttattctgttgtggtcagacaatagtccctgtgaaatttcagccttttgaaattcatyaggaatcattttaaggaccagtatatggtctgaattggtgaaaattccatgagaatttgaaaagaaaaaagtgaaatctgcagtttttgagtataatatctataaatgtcaccaaagtcaagttggctgataatttgttctgggtatttctatccttcttggtttttaaaatcagggttgttctagcaattgctgagagagtactattcaattttctagacatgacagaaattttcaatctctcttatttttgtcagtttttgctttctataattttcaactttaattaggcgcataacgtgtcattgtatctttcagatgggctgacctttttatcgtcatgaattttgaatttttttcctaattagcttcgggatgccagggtatatgatgggtcaagaacatgacgtttcaaatttttcagtaatcataactctaaagtaatgtgtaactctgaaataatttattttatttaatcatcttttatcttattaatcaattgatttgttcccacaattacttacgtgtactttagaccattcctggattgacagtaaaagggagcacatgacaaattcttagttttagagcatgggctgcacaatcctgagcccagcctggtggtgatgaaattaagcccagtactaagagcgtaaatgaagaagaaactcagtagtaagagagtgtggaccaactggtcagatgctctaatcagcaactctcattccactgtcaaaaccttggagattttgtatgttttttaaataggtgaagtgaatcaagtggtgcctaccaaatttattttgtcctctgcatcagtgcgtggcatacaacattaacaatgagaagcaactaactcctataagctattttgggggaatagaggatggtacaaatatcacaactttacagcaaatattacaactccttcaaaacacagtttggcagtttttaaaaaaataaaaataaaagagttgatcaagctgggtacagtggcacacacctgtaatctcagcactttgggagactgaggtgggatgatcacttgagccca

SEQ ID NO: 726957 - DNA, 630 bp, Homo sapiens
tgtcattttaagctggattttagattaaggttgtttttgcttcccctatatttctgttttagaaggaaaattaaaaattctgggacattttccattctgaagtcatttggttgttagctttgtacctttcagacacttgagatgctcaataatactgcaaagtacagttcttgctgtgtgctattatttgcagtgccatataaagaaggtttttaaaataggagaatattagagtgggggaggaaaaaaagactctatttttatatcccattagacagtttactgcctttcaagacaccgagtataaggaagggtccattaccagtttttcaggttcttggaatatgtctcaaaagggtttttgttastgactgcagtcagctttcagagctctatccttgttcctgacagatgcccacaatgaactcgcctattatttttttgttttttattcttggaatgcggatagctataaaatctgcttctcttactacatctatccctccttttatttgattctaacaccctattaatacaatatcttgtcgcatatctttttccattgtaataatactttcccagggttagaagaatgggcaatgagatttgccagtctgcagagcaacaccg

SEQ ID NO: 726958 - DNA, 630 bp, Homo sapiens
tgtcattttaagctggattttagattaaggttgtttttgcttcccctatatttctgttttagaaggaaaattaaaaattctgggacattttccattctgaagtcatttggttgttagctttgtacctttcagacacttgagatgctcaataatactgcaaagtacagttcttgctgtgtgctattatttgcagtgccatataaagaaggtttttaaaataggagaatattagagtgggggaggaaaaaaagactctatttttatatcccattagacagtttactgcctttcaagacaccgagtataaggaagggtccattaccagtttttcaggttcttggaatatgtctcaaaagggtttttgttactgactgcagtcagctttcagagctctatccttgttcctgacagatgcccacaatgaactcgcctattatttttttgttttttattcttggaatgsggatagctataaaatctgcttctcttactacatctatccctccttttatttgattctaacaccctattaatacaatatcttgtcgcatatctttttccattgtaataatactttcccagggttagaagaatgggcaatgagatttgccagtctgcagagcaacaccg

SEQ ID NO: 726959 - DNA, 641 bp, Homo sapiens
atagaaaaaaagaggaggatagtgttgtttctgcaattaaaaaacaaaaacaaacaaacaaaaaaccctcatcaagtctagccagagcacacacagtaacatggagcagggtacaaggacatacctctggccagttgagtctgtaattgtagaaggtcttgaatgtaagccaatcagtttgcctatgaatttgaataaaatggagagccactgaaattgtttaatcatagtattgagataaccaaactatagcatctccaaagattagagagattaatttaacagatgtttacaggcttgggcctgcttcctatttccacagtgggaagatattaggtagggtgagcagaaaactcacagataattttactatgaggagcaaaatccaaactgtatgtacgtgatgaaagccctgaactccctgttgctatatggtgaaagtgacttgytgacagtgaacccatagcctacttggactcgaaggccatatacaaatttttgtcagatgaataacatgaaaaacaattcagcaggaaataaaagcattccttatttttaaaaacagggattctcaaagagaacaaagtaggaaaagaggcaaaggactggtgatatttatataaataaaaaccttcatctgt

SEQ ID NO: 726960 - DNA, 528 bp, Homo sapiens
aattaggttcattcctttatggcacctgttggattaaagttcaaattatttagtccaagcaacatggaagcccgaaaacttctggagaaagttctgctggctccctccttcattttagggccctaaactgaacttagcagaatacattacttggaagtgtgctattttgctctctcacccatcaaattcaaactcaagatcatctaagcctttcttagatgcctaagatgagagtcattccctctcttccttcactggcccaacgaaattttctttccaatcttttgttggaacttctgagaaatgacaatgcagaatattggtgccgagaagcattttgctctgcaattgttttcatttttccttttagaagcaatagcaattgaagaaaaatgaagttggattatcttaagataggaaaaaaaatgtatgaccaaataaaaaaaaatcacaaaatgttcytctttgcactgagaaaaacaaatcttttacttctctcttggggtccaaaagccctcatacagcata

SEQ ID NO: 726961 - DNA, 1888 bp, Homo sapiens
gatccttggggcttcagccttgggtggctacctctttccttgtctctcccaatccttcaaaggacacgcaaactcaatttactttctaggccaggaatcctgaactttgggtgagcaatagaattaatttaaataggtgaaaaaaagaaaaagagtgacaggagaagtactccctgttttaaaatttctgaatgctcctggcttcctgaagagacttccgaagctttaaagaaactccagtgatattaaaatgcagcagcagaaggacttgcttgccatttttttttttttcctcaactggacttgcgagattcagattccttcacagggtatggagaagttggttggtttcaggttgtccctccaggaaactcaattaaattgtactaggcagttttttttcttcctcctctattttgtcgacaatttcattcctgggtttgtagtcgagggattggccctataggtaatatagattctagaagaaactttggcttcatttgaagttaaaaactttcttaaaaaaaatgacattctttttttatctgtgctacagccttccccctttctagtgtactttttaaacattttagtttcactttgaaatctaccttttgggctacattcgtttcccttggtttcttgtggttttgtggctgggaagtctctctggtcaccttggcaatgtgaaatatttgcacaaaataaacaaccttcttactttccttttgcaccttcttagaaaaaatactaatctaccaggtacctgtcaaaaacagagactgattctttttcccatcctgtcaatggggaattgttctgtgcaggcttttactctctcaaaatagcagtaatgactgctttaatcactttgttctaatctgagccaaacaatgcctccttcttaccttcatctctccttttccctcttttcccscctctcaaagcaattgttttcatccaagctcagccagaactggcaaaggaatgggttattttcctgatttgattagtgaggatatatatactacatacaatagtataatagggtggccaagagtcaagaatatgaattctggagtcaaaatgacttgaattctgattctgtgactcgctggctgtgtgactttagacttgctatttagcctctcggagcctctgcttcctcttctgtaaaatgaggatatagtaggacctatggatgagggtcattggaaaggttaaatgagatacaatgtgaagtgctttgtatagtgcctggtttagagtaagagctcagacatggtcatcatcatcattattattactttcaatctgaagagcattaggcccatgagatactccttaaaaaagaaacccatgaccaacaaagttagagaaagggtgtacatagagctacttcgtggtgattcataatgaccttaacataataaggctcttcgagtacttacgaaatctattttatttaatctagttatttcccaagttatttggctaaggagtccctctcttctctttgcctgtgttccttgggacacacttggagggaggccgaaccagtgtgctatttaagctccctgcacttcccccaatagttacagaaatctgtactgatcctctgagggattgatgacataagtgtgtaatagatacattccataatttaaacaaaaacatgtcaacccgagaaacacaagggaacacgcattcaagaccacctggtaatatgatgtgttcattggtctgaaatgctttaacctcttttttcctcctcttccttgtaaaattaagtagtttatttcaaaccagatatgtctaaagtgaatatccaattctcatccagtttttgtacgttgatataacctattaccacattttgtactccaga

SEQ ID NO: 726962 - DNA, 1888 bp, Homo sapiens
gatccttggggcttcagccttgggtggctacctctttccttgtctctcccaatccttcaaaggacacgcaaactcaatttactttctaggccaggaatcctgaactttgggtgagcaatagaattaatttaaataggtgaaaaaaagaaaaagagtgacaggagaagtactccctgttttaaaatttctgaatgctcctggcttcctgaagagacttccgaagctttaaagaaactccagtgatattaaaatgcagcagcagaaggacttgcttgccatttttttttttttcctcaactggacttgcgagattcagattccttcacagggtatggagaagttggttggtttcaggttgtccctccaggaaactcaattaaattgtactaggcagttttttttcttcctcctctattttgtcgacaatttcattcctgggtttgtagtcgagggattggccctataggtaatatagattctagaagaaactttggcttcatttgaagttaaaaactttcttaaaaaaaatgacattctttttttatctgtgctacagccttccccctttctagtgtactttttaaacattttagtttcactttgaaatctaccttttgggctacattcgtttcccttggtttcttgtggttttgtggctgggaagtctctctggtcaccttggcaatgtgaaatatttgcacaaaataaacaaccttcttactttccttttgcaccttcttagaaaaaatactaatctaccaggtacctgtcaaaaacagagactgattctttttcccatcctgtcaatggggaattgttctgtgcaggcttttactctctcaaaatagcagtaatgactgctttaatcactttgttctaatctgagccaaacaatgcctccttcttaccttcatctctccttttccctcttttcccgcmtctcaaagcaattgttttcatccaagctcagccagaactggcaaaggaatgggttattttcctgatttgattagtgaggatatatatactacatacaatagtataatagggtggccaagagtcaagaatatgaattctggagtcaaaatgacttgaattctgattctgtgactcgctggctgtgtgactttagacttgctatttagcctctcggagcctctgcttcctcttctgtaaaatgaggatatagtaggacctatggatgagggtcattggaaaggttaaatgagatacaatgtgaagtgctttgtatagtgcctggtttagagtaagagctcagacatggtcatcatcatcattattattactttcaatctgaagagcattaggcccatgagatactccttaaaaaagaaacccatgaccaacaaagttagagaaagggtgtacatagagctacttcgtggtgattcataatgaccttaacataataaggctcttcgagtacttacgaaatctattttatttaatctagttatttcccaagttatttggctaaggagtccctctcttctctttgcctgtgttccttgggacacacttggagggaggccgaaccagtgtgctatttaagctccctgcacttcccccaatagttacagaaatctgtactgatcctctgagggattgatgacataagtgtgtaatagatacattccataatttaaacaaaaacatgtcaacccgagaaacacaagggaacacgcattcaagaccacctggtaatatgatgtgttcattggtctgaaatgctttaacctcttttttcctcctcttccttgtaaaattaagtagtttatttcaaaccagatatgtctaaagtgaatatccaattctcatccagtttttgtacgttgatataacctattaccacattttgtactccaga

SEQ ID NO: 726963 - DNA, 634 bp, Homo sapiens
cgctgtcaatgtcacagagatggttccttagagtttctccaggcccctctctacatgtggaggaatctaatcacagttgtcaactgaggcctggcctatgtgggcagatcctcgaatgttttttcttttctgaatattactttctttcaaatgctaataagggttaggcccaaagcattttgttgtscccttcaaataaagaaaaactacaatgcaaacattaggcattccatgttcattgtgtatgtgtcttgttttatgcattctatcttaaaatatttatttttagtcactgccctgatactcagtggctggcagttggtagactctcagccataactgctgaatgaataaaatgaattctacaacaagcttttgctattgaaaagcattatggtggtatattacatccatctcagaatttttatagctcagtgaataaagaatatggctaatgggtgtagaatttcttacaataacccagacagcactcttcagttattcttttccaatttcgttagctgaaaaccagggacaatacaataaatcacaagatatacaggaggatctaacatttgagtaatgacctgctgctggactgtaacacagcattaggagtttcagtttaatcaaa

SEQ ID NO: 726964 - DNA, 1460 bp, Homo sapiens
tgagctctctttactatctgactggtcggatgtgagctaagttgcaagccccgtgtttaaaggtggaagtggtcaccttcccagttaggcttagggattcttagtcggcctaggaaatccagctagttctgtctctcaccaccataaagagcagcacactcatcatcttccaggcaagcagccatccctcagcacacaccactaccccagtccaatcatgggtactcttgaagacacatagttgtaatgggtaagagrttcggtccttatggtaggacaggagtagatattttagttcacaaaggatttggaattcctcaaatcactttcttggggcatctctttactttgcctacacagtgaccctttgggaaatggcaccaggtgtcccaggctggtgcttaaagtgggaatattaaggtaagatgtggcagattctaccagatagaatatcactatgcttccttccaaagggagccttattcaactcctctctgcaattgtttgtatacagaatgtgccaaaggttccaaggagaatcttaaactctcacaccacatgtgacccagtggaatgcagagggcagggcctccttccggaaacacatcagccctagtcctagctccaatccttcttgctgaggggcctcagatctgttacctaccccctctatgtctcagttttcttacaagtaaaatgataatattaatagtagctagctcatatgattagaaggattaactgagtacataaagcacacagaacatgcctggcacagagtgggtgtaactgtctcatgagcgaccatgacttagaataatcaatttcaggagtcctcctgggtggcaggattatcctttatatatattccaaaactgtttaatgagaagaaatacatttcagttaaaaataatttatattataatatcctttagttgggtttagttaggttcctgttgttaattgaaagtgccccatgtgtgttcactgcagcactattcacaacagcaaagacattgaatcaacctaaatgcccatcaatgatagactggataaagaaaatatgatacatatacaccatggaatactctgcagcataaaaaaagagtaagatcatgtccttcacagggacatggatggagctggaggccattatccttaacaaactaatgcaggagcagaaagccaaatgcctcatgttctcatttataagtgggaactaaataatgagaacacatggacacacagaggggaacaacacacactgtggccttttggagggtggagggagagaatcaggaagaatatctaatgggtactaggcttaatacctgggtgatgaaataatctatacaataaaccctcatgacacaagtttaccaatataacaaacctgcacatgtacccctgaacttaaataaagtgtggttcagggacagtttttatcccaaggggcattt

SEQ ID NO: 726965 - DNA, 627 bp, Homo sapiens
ttgagttaaatgaatcaatgaagttacaaaattgtattgaagtgtttcagagaccttaaaggacagtaagagtaagagtccccattgctccttaaactgtccttcctgacagcagcctatacagaccacaaaaaggaaacaaatatagttaagtatcagtagatttttatctcaattaaatctcacaacaaacaggagatattttattataacctcaattttattgatggcaattgtgaaaataatagtaatgatagccaccatttattgagcacagactgtgtgacaggtatgtttctaaaagctttacatatgttaacgcatttcattttatgaggatagtgcaattatccccattttgtagattaaaaagtgaaacacaaacaagtaacttctacaagttagaagtggtggggctaaaactaaaacaaggtaagtctgagttccgagcatcgtaaccactgtgatacagagtggaaaccaaaggagataaagttaaacaacttgttcaagatcagatctctaatctgggatttgaaccyagactgtctacatctaaagcttgtttgtagctccctcactctgctctttcctccagagaagtgacgagaaacacgagaccaatgc

SEQ ID NO: 726966 - DNA, 608 bp, Homo sapiens
tctctcaatctgttttcccccttttttgttcaagaaatccttcctgaccctaaggtcctattctatcttctgacacttgtcacccacaggaatctgcttcatcaggagttggcctgggcttggcaagagatacggaccagctcctatctgcctgaggcccacccagtgccccaggtcccaggagcatccatggagcagcccgtctctccctgggacccacaggtgcctctggcttactgcaaacctccacgcaggaggcctatcaggggctctccattttgytccattttgagcgttctttatttaaaaacctctgaaattatctgaggccatttccaaaacttttacaaaagctacacactctggccgggcgtggtggttcacacctgtaatcccaacattttggtaggccgaggagggcagatcacctgaggtcaggagtttgagaccagcctgggcaacacagtgaaaccccatctctgctaaaaatacagaaattagcagggcgtggtggcaggtgcctgtaatcccagctactcagcaggctgaagcagaagaatcgtttgaactcgggaggtggaggctgcagtgagccaagatcacgccac

SEQ ID NO: 726967 - DNA, 576 bp, Homo sapiens
taagaagtcaaacttgtcattttggcattatgaaataaactttactataatatttactataatatttaatatttaaatactagagaatcagaaaaccagaccaagaaattagtttagaccaggctataatgaccagaacttgtttttgtttgaaggtccttatcaattttaagctgaaaaaatcatagctttcaaagtgatattcagattatattatagattcaaaataagctaaacttcagcatgaaaatacataaaattccaaagcttatttcattcaataatttaagaattaagttaaaatacttttgataaagccattggttttagggaaacaaacagaagtctcaggctcctattctatgagccataaccaattccctagtactagcccttaaaacatgcgaacgcggagttgcgaattgagagtctaccaatgcaaggccrtgctacacaacctaagggggtcattttcacatggaatgcaatgagaatgctgtacaacaggagttcctgtataaatatttaaaaatggattccacagacagtgttcatacaatgtaagtacgcatgcct

SEQ ID NO: 726968 - DNA, 1549 bp, Homo sapiens
ggaggtcgctctcaccagtccccactctgacgagaagaccgcccagctccaggcaccgtagcgccccagtgacgtaggcgaacacccgcgcctctgacgtcgccaaaggcccaccgctatggtgtcggcgaaggcgcgcccttgtgacgtcacggaaggcgcgcccttgtgacgtcacggaaggcgcgcccttgtgacgtcacggaaggcgccccttgtgacgtcacggaaggcgcgcccttgtgacgtcacggaagcgcaagaaccgcttgaacccgggaggcagaggttgcagtgagctgtgatcgcatcactgcactccagcctgggccacacagcaagactctgtgtaaaaaaaattattttaggccatcgaactgtatacctgaaattagcaaattttattatatgtaaattgtatctcaataaagctattttaaaattataaaacttggctgggcacggtggctcacacctgtaatcccagcactttgggaggagaggcaggtcgatcacctgaggtcaggagtttgagaccagcctggccaacatggtgaaaccccttctctactaaaaaatacaaaaattagctrggcatggtggcgctagcctgtaatcccagctacttgggaggctgaggcaggagaatggcttgaacctgggaggcggaggttgcagagagccgagatggcgccactgcactccagcctgggcaacagagcgacactctgcctcaaaaaaaaaaaaaaattataaaacttaaaaaataatgttaatgataacagaagtttgagaatcagagataaattgtgtaatgatttttaaaaagggggcccaatttttttacggttcagtttctagaacaggagttattcacctgtaagtcatttgacgaatagagagataattttttagcactctttccaattactagcatgtgttttctttgtcccaaatcatgtttaacacatcatttatactaaaaatactaattaaaacaattatggcatacttctaataatgttaaaagtgagtaataatacttaacctaaaagggtacatttataatactacagtttcaagtttcagaaagcagagagggaaggatatttcaagactggaatattcctgccattccttaaatcacattcctcagcatctattcatttaacaaatatttattaaagacctgctacactccaaactctttctatatgcttctgatccatcaatgagcagaaaacacagatatgcatcaattaggttagtttgcagaatctcagtggcttctagcacaatagttcatttctgacccatgagacctgacaattactggttaactacagctctgtgacagattgtcatctttctaggacccagcctgatggagtagccattatctgcaactctgaataaacacattgtagttcagtcacattttggaatactattcagcaatgaaaaggaacaaggtgtcataaactcaaaaatgggtgaactcaaaaatactactgctaagtgaaagaagtcagatgcaaaaggcattatg

SEQ ID NO: 726969 - DNA, 969 bp, Homo sapiens
tccaaattgttactaagaatcaagagagatatctgacatgaaatgacattggaaaacattaaacacgattgaaataatgctagccaatatggttaytattagaaaccaattacattttcaacttaaaaatagtaatacttattgcagactcaaatgtgcttattctaaaacaagtaaatgtttgcctatggtctgagattctaatccacggagttcattctaatccacattcaacactatcatgtaccagtgggcctcatgacccacctagccctgtgatttttcaggttcacttttctaaacttgtgaattaaatacttattttcttagttcagaagaggaaaaaaactcttgtaattgttgcccatttcaggagaaatcttgcatatgaaaacaagagataaatatacacaaccgacggctgtggtttaaacaaaatcttgagaatgttttttgaccttatacatttgtgctttagtataacaaaatgatataaacaaaggtaacttttaatagaaccagtcactaaattaaaaaaatgacaaattcttctgcttagctaagcaacagagaaggtaaaatactaattcaattcatcaatttaagcaatactcattaagagccaagtatgtgcttactgaataagctgctaaggtttggtggttacagagtgtgcggtgaaatgatgtctacatcacagtccaacattcacagagtttaaaagcctaccaagaatcaagacagacacaaatacctaacatagacgtttgtatgtgataagagagccagagtacaatttaggagaagaaaattttatggaaggaagcttcatttccattagaccagaaaagacagcacatttgaaggcctgaataagaaatattctggataagatattgtggctgctaccagaatggctcttgatgatctctacctcttggtatttatacccttatataatctctttcc

SEQ ID NO: 726970 - DNA, 615 bp, Homo sapiens
ctaaagaagtttcctctttttaattcagtgttatttttcacatrgtatttattgtaatatttattacctacataatattgcatctatgcacataatgttccacgcacctagttgttcaaacaagacagctcagagtcaacttttactaccttttcccttaaccttgcatttcaataatacttaaatcctgtcaataatctctggtttttttcaatatcaataaaatgatgatttattgctgccttccaacacaagaaaattattttctctgcttccattctagatcacctaagccctgtaatccagagtcttaaaatcccccgacccatacaaaagctacatgttgaaaatgtgagaatcagcatgccttctaatttttcccattcaggtcctttctgtttcatgttcctttcactttcctgatcttgtggcttttgcggctgctgcgggtaactttctgggcttcagacaattctgttgagatctgcatggatgttggtggaagagctggctccacccggctgactcagttttaggcgacttatacgtcatctctggtctcctgcagtctctgccctttcctccaagtgccttcaagggctgcaccttaatctc

SEQ ID NO: 726971 - DNA, 937 bp, Homo sapiens
acaacatttaaggtgaaacttgaaggatggtgagtctctggccatgtgaagcataaaggaaaagcattccaggtgagaaaacagaaagcacaaacgcgctgggttgggaaagatcatggtgtcttccaggagctgccccatggtgggacagtcacctgggatgagcttgaataggtcatccagagggtggtacatgtcctttggaggtttttctagtcacgtttactcacccagaggtgttttaagtaaatgaagttatacaataaatatttttgcaaaaccagccatttttcattgaacataacttgtcctcctttccaagctagtgcacttaactgtcattactatttttaacagttgtgtagtatttcactataaggatgtaccataatgtatttaactatttttccccatttagtgggagtctttcaaagatacacttaacactcctagtggcctgcccaggggccttggaaaaggtccaagctctggagtttgtggggaggcatggtaatgactaatctttattaagcacttgctgtgtgctagaccttgttctaagcaccttacattttgacctgattgaatcctcacaacaaytctaagtggtcccattttagggaagaggagcctaaggaatagagaggttaggttacagtcccataaaattcctgttgaggcctgagcctgtgctgggcctgctttttctctccgtaaaattctctctcacaattgccacctattcactgatagtatccaaacaaattaggaagggaaaaatgtccaaaccttaataatttggacatttgtcccctcctaatctcattttgaaatctgatctccaatgttggaggtggggcctcatgggaggtgttggcatcataggggtggatccctcatgaatggccctggggccattctggcaggattgagtgag

SEQ ID NO: 726972 - DNA, 3286 bp, Homo sapiens
agcttctctctgattgttccaccatctggctcatttttgtttttgcttgtattgactgttttgtcatttgaccacgaacagctcatcatagcttttacattttcatcttaatgttttattgtaagcatgaaattttatgtaagagaattttttaacctataataaaataattactgccagaaaataacactctccttttaatcaggctactagtattagaattagaatttaaacttgagttagacttagtttaccactgactctcagtatttgagtatggcatcaggtgtttattctcatttttaaatctttgaggacgtctcttacatctccagttccagcctcacattttattatttaggtgatctcatgtcaccctgctaccctgcttgagtcttcagaggatcattttgcttcaaacagtatagacctgagagggatttacctacctatcttgccctgcccttagccttccactgatggcttctttgtactcaatgcaggcgcagagtatctctgaaatacttttctcacctttccctctcatctcccttcagaggatgtctgcaaagcctgtaaagttctagggcaccttaaagggatttatttctttatctcagctctccttaccttctccctttttagtcagaatctgtaacactctcatccactctcatcgaaggcccactttagaggcttttttttttttctagcctgccacacagtcagccttcagtaggccctgcctttactagaggagcgtcccatgtctgtccctcagatggcatctctctcattcttcacaaggccatacctatgtactcaatgagggaccataggaaagaattgaccagtgtttgcagactttctttagctgacccacttctgaccaaaaactaaacaacaatttgtggggcaaaaatgctgatctgggaaaacattatttgctcttttgctaccctttgaaatgagagtttttatattggttgctacctcaacattcataattttacaatatctaaatttataaatatgttaatcagtaatttatattttttccttattgtaaaataaaaatacggaggaactattagggatgtgtacaggccacaaacacagcagagaccaactatagagatggagatagacaacatttagctttctaaggcataaaggcaaacattttaacagagtgattgggagaggcctccccggggaggagacatatattgggagattttttctattttttctatttatttatattctataatttttactatttacacggaattaagttcacaaattttaaatgtgcagcctgagaaatttttataattgtatctaatcatgaagacatcacagatattaatactctaaaaaatttttttgatgtccctttacatccaatcctcaccccacaaccaccacatcagacaaagcccatctgctttctttcacaaagttgtgttttttccagaatttcatataagcagattcatacatagtattttctgtttgatttctttaacttaccatgatgttcttgagattgattaatgttgctgcattatttctgtgtagtattttatgcgacagacatacagaatatgtgtatgcattcacaaatgaatggaaatttgtgttgcctccagattttgatgattttgaataatgctattgtgaacatttatgttcatgtttttctgtggatgtatatttgtatttctcttacataaatatctacaagtgaagctgctttgtccttttgataagtgtgtatttcactttataagatagtacctttcttcattctcatcagcaatgtatgaaatttccagttactacaaattccctgcaacagtagatactattgttttttgtttactcattttagttggtgtgttgtgatattcacttgtggtatgaatttgcatctttctgatgtgttaaattatttgtacattttcacttaagattgttttatttcttattactgactgcagataaaaacacttggtttgaacatattcttcttaaaaaacgtttttcttctagtatctgtcttggttttgtttgtttgttttgtttttgttttaaatatgtcttttcctagcaaatatatttctattcctgaagtccattttatttctttaatttctgcttgtgtatatagtggcctgtttaaaagctattgttaatcaaatgtaacagagattttcttctgtgttttcacctaaaactttaatagtttgagcatattgagttagacctgtaatactcattaagataatttttatatagagagtaagataagacttgaaatttcaagacttgaaattttatttagagagtaagataagacttgaatatcatacagatattcagttgttcaaatagcattttatgaaaagattatctttctccattacattattttggcacctttgccaaaagtcagttggccattgaccacatgagggcagaatatttatggattttgtattctgttccatttatctatatagctatgattatggctataccaatctgtcttgattctggtagcttttataataaatcttaaaattagataaagtattctaattttgttgttcttgttcaaaagtgttttagctattctagctattttgtaaattttaaaattaatttgtaaatttactcaaaaatacttttagggtttcatattttattttttcaagaaatttgtccataatctggagtaaccaatttattggcatagatttgtgttccatattgagtgggacccayattatccttctaattttgaatggcctataataacaacacttctttcatgtctgatagaggtaactgatgtttctttctgtctatttttcctatctttagatatttaataatgttagtgatttttttagaaaaaagaattatcttctgattatattaatttgtttgttgcttttctttttactatttcagtaatttctgcataggcctttactatttctgtctttctgtttgctgagggttttcatctagtttttttctagtttaagtgcacttcataaaatttgaaaaccttctcttctaacacagaatttaaagctataacatttcccactatgtacaaatttggttatgttgaattttttttatcatttagttcaaaatattttctagtttctcttataattttttaacaaacattttgaattccaaatgttagggaattttttatttattttactattagtggtatctaattgtattgacctgtaatgag

SEQ ID NO: 726973 - DNA, 1363 bp, Homo sapiens
  misc_feature 816, 817, 818, 819, 820, 821, 822, 823, 824, 825, 826, 827,828, 829, 830, 831, 832, 833, 834, 835, 836, 837, 838, 839,840, 841, 842, 843, 844, 845, 846, 847, 848, 849, 850, 851,852, 853, 854, 855, 856, 857, 858, 859, 860, 861, 862: n = A,T,C or G
  misc_feature 863, 864, 865, 866, 867, 868, 869, 870, 871, 872, 873, 874,875, 876, 877, 878, 879, 880, 881, 882, 883, 884, 885, 886,887, 888, 889, 890, 891, 892, 893, 894, 895, 896, 897, 898,899, 900, 901, 902, 903, 904, 905, 906, 907, 908, 909: n = A,T,C or G
  misc_feature 910, 911, 912, 913, 914, 915: n = A,T,C or G
tatttttcaagtgctaaaagaaaagaactgccaaccctgaattctatatctggcttaatgattcttcaggaatcaaataaaaacattctcagacaaaggaaaactgaaagaatttgttgctagcagacatacccttaaagattggccatagaaagctcttcatacagaaaggaaatgatacaagaatcttagagcatcaggaaggaagaagaaacaacagaagagcagaaatacaggcgggcgcataaaatgttatttcctttgtgagttttataaattgtatttcatgattgaaacaaaatttataacaccatccgatacctaagcaatgaaacgtaaaagtggacaargtgaatggaagtgaggttttcacacttcactctaaaaaagaaaagaaaacaaaaaaccataaatcaatcaagatagaatttttaaaaatgctgaagtaacctacaggaagggaaaaaaaagaaaaagaactgagaaccagaggaaacaagtagaacacaaatcataaagtggcggtcctaggtgctaatataacaattatcttaagtgtaattggtctaaatacaccaatcaaaaaagcccacagtccatgggccggcagaagatgacaaaggcaatacacctaccatttggccttctggagtttgttccctgcaaatctgaggaaacatgctgctccttctggagggctccgcctagagaccctcctggagatcctctgctgtctcttggctcagggccttgggccacgttgccagcaggaggctgcttgctgggggcccggctctgcctgctgggcacatcctnnnnnnnnnnnnnnnnnnnnnnnnnnnnnnnnnnnnnnnnnnnnnnnnnnnnnnnnnnnnnnnnnnnnnnnnnnnnnnnnnnnnnnnnnnnnnnnnnnnngaaacataacacactcccacggtgtatgtgccccaagcttatgtgtgatccctggagctacctgtaactccacccatttttctcctgtttcagaaagcacaccagaatgctaccgagaatgacagtcaaagggataaccttgaatctgctctattcatttaaaaaagcccatcaaaccttaatgatcatataaaaagtcacttgcaaagtaccttgccagtgattaaaacacacctgtgagttgcagatgctgccgttgacagctctagctaatgagtcagatccactcattttacagatgagacccagaaggtagggtgattttcaaaaagtcacacataagtagctggtggcaaagctggaacccttgggtagcaggagaacagagaagggctggggagcaggggcccgtctaaagatgagtagctgggcgaggcaggtgggtctg

SEQ ID NO: 726974 - DNA, 654 bp, Homo sapiens
tttatgaaacaacaaagttcatttgagagaatactttttaggggggaacaacccaaatcatataagtatggaataatttagtgaataatatagaagacttttttaattgggagagaaaatacggaaaatagtgttgtaagagccaggcatggaacaggttcactggcagatttctttcagaaaacagcacaaaaactagtgtcattaaacaacaacaacaaaaagatgtatgcctacataaaagttcagaaaattctgtagagcagaaacataagtaacatgaaaatagaaaaaataatttgtgtgaaataaaaatggycaatttccctgctaaataatcctcaaaggaaaaaaaaaactataaaaaattggatgaaggacatagggaaataacaagaaaaatcagtagccagtaaaatatgaaaagttgttcaaactttctcataatgaaataaatgcaaataaatgaattacaaaccatctctcagagggagggatgggaggccaatcagattagcaaagaataaaaagaaatgtccagtgtttggggagagtgtgagaaaacaggtgctgttggtggggttgtaaactgtataaagtgttttagaggaaatttgaggattgcccacaattttgctgtaaatattctttgac

SEQ ID NO: 726975 - DNA, 589 bp, Homo sapiens
ggttccagacactaaacatgccttatctgtagccctcacattagggtctctgtagcaacagtttacatttattttgctctttaccaagtcttgaaaatgaaagtaaagttggtttaccactgaagaatactaagttctttggttaaagggcattaaattcagagaaaagtccagatgtcttcaactataacaatagtagtaacagttaatattataataacagtaaccgctaataacaataatagtaacagctaatatttattcaatgcttattaagggacaactgcgctaaatactttaggattctgcataatttgtagagtgtttaatatacaagcttactaaatttttcagttaatgayggtggcatttgctaagctgtaggccaagttattcctttcattcacagtctagggagagatgacacgggcatgctgagtcactcaaaacatgctcaaaccaccctaaggagtttgcctgatgaaaggttttcctttccttcaaagccacttcctgtgtcacgtgacctatatcactccaaagataataacacttcatgtttccagaatacttttatccaaagatctca

SEQ ID NO: 726976 - DNA, 1350 bp, Homo sapiens
atgcaatacacccacacatacacacatggcaatcatatagaaagataatcacacagacacatacacacatacagggaaaaggccaacatgagggaaaaccaggagaaacaacagaaaagagagagacccacaaatacttcagatactaggataatcagagaaaaactgtaaagtatctgtgcaaactatggttaaaggactaaaagacaagctacaaaacattatcaggtaatagaaaactgtaagctacaaaatggaataagcagatctgaaaaagaatatattagaatatcttgtgatgaaaatacaataatgaaaatgagaactagataaagggtttgacagaagaaagcagattcagaatgaagcacagagaaacaaaaagatacaacagagataagaaaatagtttcatgaatgtaagtgaaataaagacattttcagatgagtgcaaactgagttttctattagtaaacacactcaaaaggaaaatattttttaaaaatgtaatttaagcaaaggtaaaataatcccaaacagaatgtttgagataaaagaaaggataaaaagcaaaaagtgaagaaacctaaatgaatactcattacataaaacaataatagtaaatcattaggttcatggaaaaaaaacaaaaaaaaatacacaacaaaaacagcatataattcagcaaaaatcccaacaaaaattgagctaaagtcttctgagattcttagattttaaagaaggaggttaaaatattaattagatttaagctttatcaagttaagtacatatgttgtagtttctagtgtaaatactaactgtatatagaaaaaaaatagatgaaaaaaatcctcaagcaatccgaacaatcaaaaataagataataaaacaggcaggagaagaaagctcaggataagatgtcagagttaaagccaagtatattagtagttacgttacaaataagtgctctacagtagatgcagattataaaactgtatttataaaaaaatttttttaaaaagataatctgattggattttaaagcctagatgayaggttgaaaggtgcagcaaaccaccatggcacatgtatacctatgtaataaacctgtacattctgcacacgtatcccggaacttaaagaaaaaaaaagatataaaaaacaaacaaacaaaaacaaaaactaatgaaaggcacacatagaagagaatactgaaaatctaaagtaaaaagaatggaaaaggtataccatgcgaatgttaactaaaagaaagccagtgcagctatagtaatatcagagaaagtacagtttaaagtaaaaggcattgctagagatgaagatggtctcttca

SEQ ID NO: 726977 - DNA, 1350 bp, Homo sapiens
atgcaatacacccacacatacacacatggcaatcatatagaaagataatcacacagacacatacacacatacagggaaaaggccaacatgagggaaaaccaggagaaacaacagaaaagagagagacccacaaatacttcagatactaggataatcagagaaaaactgtaaagtatctgtgcaaactatggttaaaggactaaaagacaagctacaaaacattatcaggtaatagaaaactgtaagctacaaaatggaataagcagatctgaaaaagaatatattagaatatcttgtgatgaaaatacaataatgaaaatgagaactagataaagggtttgacagaagaaagcagattcagaatgaagcacagagaaacaaaaagatacaacagagataagaaaatagtttcatgaatgtaagtgaaataaagacattttcagatgagtgcaaactgagttttctattagtaaacacactcaaaaggaaaatattttttaaaaatgtaatttaagcaaaggtaaaataatcccaaacagaatgtttgagataaaagaaaggataaaaagcaaaaagtgaagaaacctaaatgaatactcattacataaaacaataatagtaaatcattaggttcatggaaaaaaaacaaaaaaaaatacacaacaaaaacagcatataattcagcaaaaatcccaacaaaaattgagctaaagtcttctgagattcttagattttaaagaaggaggttaaaatattaattagatttaagctttatcaagttaagtacatatgttgtagtttctagtgtaaatactaactgtatatagaaaaaaaatagatgaaaaaaatcctcaagcaatccgaacaatcaaaaataagataataaaacaggcaggagaagaaagctcaggataagatgtcagagttaaagccaagtatattagtagttacgttacaaataagtgctctacagtagatgcagattataaaactgtatttataaaaaaatttttttaaaaagataatctgattggattttaaagcctagatgataggttgaaaggtgcagcaaaccaccatggcacatgtatacctatgtaataaacctgtacattctgcacacgtatcccggaacttaaagaaaaaaaaagatataaaaaacaaacaaacaaaaacaaaaactaatgaaaggcacacatagaagagaatactgaaaatctaaagtaaaaagaatggaaaaggtataccatgcgaatgttaactaaaagaragccagtgcagctatagtaatatcagagaaagtacagtttaaagtaaaaggcattgctagagatgaagatggtctcttca

SEQ ID NO: 726978 - DNA, 566 bp, Homo sapiens
gaaaatgaggaggagcatctgcaggtgttctacattcagatcctctgtctcactgggcaccacaccttgcagggcattctgcttcattgtagacaaaaacctaccagagagaaaagatgactatatctggtgggaaaaagagcattccccaggagttataatrtcaagcactagaagagttaaatttcctaaacccaggcagtaagataacaaattaaggaagaaaaaaaggctacatggtaaagacaagacagaaactaaattttggctaaaaaaagtcagacttggccagccaggcacagtggctcagtctataatcctaacactttgggaggtcgaggggaggattgcttgaggcaagccttaacacaggcgtgttaatgcccaccctgtcatttgtggccatgaaaagtactacaagctcccccacaaaaatgttgctattgttcctttctgattaacaaacttggacaggtgaaccagttcaattacttttccccatattttgattctatcatttaattctagttttgagagtttatactacaggttaaaaatcactgcat

SEQ ID NO: 726979 - DNA, 627 bp, Homo sapiens
tgctggatacctactttaagcctgcatggggatgtgccctgattcctaaaagtgagagtgttgtaggcacgcatcaactggacacctttattgctttgagaacagataactttattgccaataatggtaacactgaaaggaaaaaaattgaagagaacgttctgaaagggcaacatgcacgcccccgcctggtggcctgacccagggaaggcacaccgtggctgtggggcccatcttggctcaggtgtcttcctcgctgccgcccagggtgagcttgtcaaacaggtactctgccaggcctgcttctggggctcacgtcttgcacaggttgctcaggtagtcacccagctttttgatggccttgacctgctggttcaggaagtggctctccaggaagtcgcatagctgggggtcacctttctccatggccagctggtgyagctccaggaggctctggttgacactcttctccaggtggaaggcgcactccatggcctcgagcctgctctcccagtcttgacgctctggcttcctgatgtcgtgaaagcagatgcagccactgtgctggttctgcagcctcatcagctcctggacgtgctccctcttcttgtgcaactggcgcaggaa

SEQ ID NO: 726980 - DNA, 627 bp, Homo sapiens
tgctggatacctactttaagcctgcatggggatgtgccctgattcctaaaagtgagagtgttgtaggcacgcatcaactggacacctttattgctttgagaacagataactttattgccaataatggtaacactgaaaggaaaaaaattgaagagaacgttctgaaagggcaacatgcacgcccccgcctggtggcctgacccagggaaggcacaccgtggctgtggggcccatcttggctcaggtgtcttcctcgctgccgcccagggtgagcttgtcaaacaggtactctgccaggcctgcttctggggctcacgtcttgcacaggttgctcaggtagtcacccagctttttgatggccttgacctgctggttcaggaagtggctctccaggaagtcgcatagctgggggtcacctttctccatggccagctggtgtagctccaggaggctctggttgacactcttctccaggtggaaggcgcactccatggcctcgagcctgctctcccagtcttgacgctctggcttcctgatgtcgtgaaagcagatgcagccactgtgctggttctgcagcctcatcagctcctggacgtgctccctcttcttgtgcaactggygcaggaa

SEQ ID NO: 726981 - DNA, 1796 bp, Homo sapiens
  misc_feature 1090, 1114, 1115, 1116, 1117, 1118, 1119, 1120, 1121, 1122,1123, 1124, 1125, 1126, 1127, 1128, 1129, 1130, 1131, 1132,1133, 1134, 1135, 1136, 1137, 1138, 1139, 1140, 1141, 1142,1143, 1144, 1145, 1146, 1147, 1148, 1149, 1150, 1151: n = A,T,C or G
  misc_feature 1152, 1153, 1154, 1155, 1156, 1157, 1158, 1159, 1160, 1161,1162, 1163, 1164, 1165, 1166, 1167, 1168, 1169, 1170, 1171,1172, 1173, 1174, 1175, 1176, 1177, 1178, 1179, 1180, 1181,1182, 1183, 1184, 1185, 1186, 1187, 1188, 1189, 1190: n = A,T,C or G
  misc_feature 1191, 1192, 1193, 1194, 1195, 1196, 1197, 1198, 1199, 1200,1201, 1202, 1203, 1204, 1205, 1206, 1207, 1208, 1209, 1210,1211, 1212, 1213: n = A,T,C or G
ggttgcctacaggaggggataatgggatgacaaccaataactgcctaccacacatattaccctgttctgcttagcagggtggccagtggctcttaagggacaccaaggggtcctatctcatgagaaaggcagtaattgaacattttccctgtgatgatggggtgctggccctgtgcctgtgtagggcataccaagtaggcaccttggcagcattaggtcctgacccacggagggatgccctatgaaatgacaagtgtgagggaagatgctccatgcactgatctgaccacaccgctgggaagtgcagctgtattgccttagaaaaatagaagtcagctgtttaggaacatcaactgataaggccattagagattgtctaagccaatggtgtgaaatatattatttagcggctgtattagttagccattactgcaaaaccaaaacaaaaaacaaaaatgaaaagacaaaaactccaaatcttggtgacttaaacagaaagcatttactttgttcatgaatgtgcaggttggttgagctgttcttatcgggggctggatttactcatgtgtctgcgatcagttgcctatctgcttctgtaggaggattggctagccatcaggggagtcttttacatgtataggagttcagctgggatgrctggagtggatcatgattgttgtggtctttcatcttcttccagcaggttagcccaggcttcttcatgtagcaactggctttcatgaacacctagagaacaagccccaatgtgcaagcacttttaaagtctctgtgtcatgtttcttaatgtcctattgtccaagtgagtcacatggccaattcagacgaaactgggtatgtgtagggtggtatggatatacacacatgggcaattcagaatcagtgtgaaagggacaaaatctgtagccatttcagaatgtactgtggtagtaaaaccatttttcaaataaaagctgccttggaactacatttactaaagcagatattccctggatagtgcaaggtaggggtgccccttggcagctcctaagcatctgtattagtaaggtttcctagaaggacaaaataatangattgagggttatagaaggggaannnnnnnnnnnnnnnnnnnnnnnnnnnnnnnnnnnnnnnnnnnnnnnnnnnnnnnnnnnnnnnnnnnnnnnnnnnnnnnnnnnnnnnnnnnnnnnnnnnnccactactccctgagctcccgtgatggcatgtgacctggagtgggagctgctgagacacacagtcggtggtccttgtcctcctggaggttcacataatagagtccttggtggcaactcagagccctcgatgtaagtccaaaggtcagggacacaggtcttttctgggattcatgctgcttttccccatgagtgcctgagcctcccggagggatcctgtccagggcaccctcttctccggccgcagctcagacagggacgtcacatctcggtggctgattagtcctggggaacctgccatctgctggcccagtcagggtggagagattacctagctagctggccatgtggtgggggggctttggaatggagcccctagaatcctctgcaatcagggtctcagattaatggacataaacaagatcattgatttcctcaaataagtggattttgaatggctcctctggtaaccaggcctggtcccattcatcatcaggggaagaagattcagcttggtgggatcagggtcttacccggaggttttacaatctgtgagaataggatgtggcatgaggaggggtgtca

SEQ ID NO: 726982 - DNA, 579 bp, Homo sapiens
tgatcaaaatatcagctcccattatttctgtttggggattctcttgaacaatttccccccactgccatcctgctttcaattctctaaattactgggggattgaagtgaccaaataatgcagacccacagggaatccaaacttctggtttctgctatttcaaataccctctcccaagtttctccactagacccctctcttacaaaatagtccacagattgatatattagaatctcctcctatacctgcctcccctttcatgcctctgggcaccagggaagccactgagaaccagcagaagtacgcaaacraagccagagaagacaataatataaactaaaaatctagattatcccaacatatgttacagacactggagaatgcaaagttaaaaaccaaaacttttaccattgcttcccagacgggtgtgctcttcttcctccatcatacctctttctgcgcctttcaggtctcatctattcatccatccatccatccatttatccatcatccaccatgcatcaatggacccctattaagcaccctctcttgtttgctcataatgtggtggacactatgaa

SEQ ID NO: 726983 - DNA, 579 bp, Homo sapiens
tgatcaaaatatcagctcccattatttctgtttggggattctcttgaacaatttccccccactgccatcctgctttcaattctctaaattactgggggattgaagtgaccaaataatgcagacccacagggaatccaaacttctggtttctgctatttcaaataccctctcccaagtttctccactagacccctctcttacaaaatagtccacagattgatatattagaatctcctcctatacctgcctcccctttcatgcctctgggcaccagggaagccactgagaaccagcagaagtacgcaaacaaagccagagaagacaataatataaactaaaaatctagattatcccaacatatgttacagacactggagaatgcaaagttaaaaaccaaaacttttaccattgcttcccagacgggtgtgctcttcttcctccatcatacctctttctgcgcctttcaggtctcatctattcatccatccatccatccatttatccatcatccaccatgcatcaatgsacccctattaagcaccctctcttgtttgctcataatgtggtggacactatgaa

SEQ ID NO: 726984 - DNA, 1038 bp, Homo sapiens
ttcaaaatatttcaacaaaaaataacctgcattcaaatgattgcagcagctttattcataaattccaagaagcgtgatctaccaagatgcccttcaataaatgaatcgataaaccacggtgsattatacccatgcagtggaacactatgcagtgataacatggaatgatctatcaagaaatacaaagatatgaatgaattttaaatgcaaactggtaagtttaaaaaaagtcagtctcaaaggctacacactgtttctaaaatggttccatttatatgatttctgtaaaatgcaaaattacacatccaaaaagcacaacaaactccaagttcaatgaattcaatgacacccacactgagacacattataattaaattatcaaaagagagaatcttgaaagcaggaagaaggaagtaaatcatcatatctaagggatccttaataagtagttgaccaaattcttatcagaagtagttttctgaataagtaattttcaatatatcatcctactgcctcctgatctccaaggcagtggaattctatgttgatagtgatttctttcaacgctgtagaattctagaaagaaaccactttcaacctaaaattgtacagccggcaaaatttccttaaaagtgagggcaaacttatgacatttccagaaatcaaaacttgaggcagttcattgctcctagattttctgtatgagaaatgatacagagagcctctcaggttgaaataaaaggatgctgggccaggcgcggtggctcacacctgtaatcccagcacgttgagaggtcgaggtgggcggatcacaaggtcaggagttcgagagcagcctgaccaacatggtgaaaccccatctgtactaaaaatacaaaaattagctgggtgtggtggtgtgtgcctataatcccagctacttaggaggctgaggcaggagaattgcttgaacccaggaggtggaggttgcagtgagccgagatcgcaccactgcactccagcctgggcaacagagagagacactgtctcacaaaaaaa

SEQ ID NO: 726985 - DNA, 1169 bp, Homo sapiens
tcacaaataatgtctggttttgtgggtgtgtagttctctttttttaggaaaaaaaaaaaaccttctacagcatccattttattagagggagacattctttgtcacttgggttccagattaataattctagaatcctaccatgcaggagttgtgatttggtttcaaagaatcaaagagaaaaattttaagaggagggaacccagagaagggctagcaggtgtaaataacttccatgccctttatttcatctggggatgagggaaaggagaaggatgctaagcaaacttgaaagctcctcaggagatccttaggaaccccgtactgctgggcccctttctcctgcttcccttccagggctcaagcatccttgggcaatgcttcttcaaattttgtgtgtgcagaaaacatgtaccaatcttgtttaatatatattctgatgcagaaggtcaggggtggggtttgtgattctgcatttctaacaggcttataggggaggctgatgctattggttcatactttgggtagcaagctgacaggcttgccatttttcaaatattagggcagatcctgaattcctgttttatcctgacttatggagctactacttttcctataagtagcctggcttaacctatcttataaatacaaatacctacacacacctacataagcacatgcatgaatgctatgacttagaatgtttagtgcttcgaggaagagaaaactctaactcaaactgccttaggtaaggaggacatktattattttatacaacagaaagagcagagggagtcaaaagcaagcttgaggagcagtagagtacatggctccgcaatgtcttcaaagacctgggctttcgtttctctactctgccatcctctgccttcagtacatggctgtgactgtgatggacatcactttcagataaaacaatgtccagaggcagaaaggagctgtctctggtgtctctgtttagaacccagacacatttcccagaagccccaagcaaacatctcacacttcatgtcgctggtctgtttccaacccagttatttagccgggggggtggatgactgggattggcttagcttaatgaagataatcagagtccacttgctggagccagggaggagggggtcaatgtccctttaaacaagtaaatatgcaga

SEQ ID NO: 726986 - DNA, 1169 bp, Homo sapiens
tcacaaataatgtctggttttgtgggtgtgtagttctctttttttaggaaaaaaaaaaaaccttctacagcatccattttattagagggagacattctttgtcacttgggttccagattaataattctagaatcctaccatgcaggagttgtgatttggtttcaaagaatcaaagagaaaaattttaagaggagggaacccagagaagggctagcaggtgtaaataacttccatgccctttatttcatctggggatgagggaaaggagaaggatgctaagcaaacttgaaagctcctcaggagatccttaggaaccccgtactgctgggcccctttctcctgcttcccttccagggctcaagcatccttgggcaatgcttcttcaaattttgtgtgtgcagaaaacatgtaccaatcttgtttaatatatattctgatgcagaaggtcaggggtggggtttgtgattctgcatttctaacaggcttataggggaggctgatgctattggttcatactttgggtagcaagctgacaggcttgccatttttcaaatattagggcagatcctgaattcctgttttatcctgacttatggagctactacttttcctataagtagcctggcttaacctatcttataaatacaaatacctacacacacctacataagcacatgcatgaatgctatgacttagaatgtttagtgcttcgaggaagagaaaactctaactcaaactgccttaggtaaggaggacatgtattattttatacaacagaaagagcagagggagtcaaaagcaagcttgaggagcagtagagtacatggctccrcaatgtcttcaaagacctgggctttcgtttctctactctgccatcctctgccttcagtacatggctgtgactgtgatggacatcactttcagataaaacaatgtccagaggcagaaaggagctgtctctggtgtctctgtttagaacccagacacatttcccagaagccccaagcaaacatctcacacttcatgtcgctggtctgtttccaacccagttatttagccgggggggtggatgactgggattggcttagcttaatgaagataatcagagtccacttgctggagccagggaggagggggtcaatgtccctttaaacaagtaaatatgcaga

SEQ ID NO: 726987 - DNA, 1169 bp, Homo sapiens
tcacaaataatgtctggttttgtgggtgtgtagttctctttttttaggaaaaaaaaaaaaccttctacagcatccattttattagagggagacattctttgtcacttgggttccagattaataattctagaatcctaccatgcaggagttgtgatttggtttcaaagaatcaaagagaaaaattttaagaggagggaacccagagaagggctagcaggtgtaaataacttccatgccctttatttcatctggggatgagggaaaggagaaggatgctaagcaaacttgaaagctcctcaggagatccttaggaaccccgtactgctgggcccctttctcctgcttcccttccagggctcaagcatccttgggcaatgcttcttcaaattttgtgtgtgcagaaaacatgtaccaatcttgtttaatatatattctgatgcagaaggtcaggggtggggtttgtgattctgcatttctaacaggcttataggggaggctgatgctattggttcatactttgggtagcaagctgacaggcttgccatttttcaaatattagggcagatcctgaattcctgttttatcctgacttatggagctactacttttcctataagtagcctggcttaacctatcttataaatacaaatacctacacacacctacataagcacatgcatgaatgctatgacttagaatgtttagtgcttcgaggaagagaaaactctaactcaaactgccttaggtaaggaggacatgtattattttatacaacagaaagagcagagggagtcaaaagcaagcttgaggagcagtagagtacatggctccgcaatgtcttcaaagacctgggctttcgtttctctactctgccatcctctgccttcagtacatggctgtgactgtgayggacatcactttcagataaaacaatgtccagaggcagaaaggagctgtctctggtgtctctgtttagaacccagacacatttcccagaagccccaagcaaacatctcacacttcatgtcgctggtctgtttccaacccagttatttagccgggggggtggatgactgggattggcttagcttaatgaagataatcagagtccacttgctggagccagggaggagggggtcaatgtccctttaaacaagtaaatatgcaga

SEQ ID NO: 726988 - DNA, 2159 bp, Homo sapiens
aagtcacaaaagacagaatctgcagagctcacacctgctcttaaatgctgcagagcgaaaataactcatgtcacttttgctcacagaccactgtctggaacttagtcacatggctccatctgacataagggcctgggatgtcttcctgtgtgcccaggaaggaaaggaaagctgaatgtgataagcactagttatttctatcacaaatcttctgcacagcagctgcaacactgataagaagaacatttaatgttgcaccactagaagggttgtaagatccagttttcagctcaggtctctcttgggaagtgactcttcacaccaaaaaaaagagagaaatgaaataatacattctttaattatagtggaaatatataatctaaacagagaatacacatataaagagataagaacagtcaggttaccaagaatgttgcaggtttaaataaagacatatcattattaagttaaatattagagactagcaagtttcaaagtatgtttggagaaacactctctgaagagatcaactgatgcaaattagtatttgaagtacatattaagtatcagcattaaacagagacatatgcaattcatgctgagtgttttgaaagagcaataataaaatatacttattgtaataacagggtaaatagactcaatatgctcaaaaatggggaaggtaaaaagacattttatctttactaaaaatgcattattaatatcattttatagacgaagaaagaggggactcagaaggtcatatcaggattcttttagctgcaagcaacagaaactcttttgcttaaacaacatagaaatgcactatctcacttaacggtgagtctagaggtccagaggtggggcacactccaggaatcaagtctttaccatgttaccagggccccatattatttccatcwttccattgtgtcacccatagcatcagctgattcctcttttggtcctaagatggctgctaccagaaatgctccccactttatacccagcaggagagagagaaaaaaaaaacctgctttcctcttcttcaaaagccacctgtttctcattaggctagtggttcacaactgggaacaattatgcctccacaaaggaaatttggtgatgtctggagacatttttggttgttgtgactgggagcagtggtgttcctggcatctggtgggtagggttgctacacaggatatgcacaggatagcctcccacaacaaagcatgatccaatacaaaatagcaatagtgctgaggtggagaaaccctgtattagacaaaagcttcctaaggccccaaaacacatctgcgctcatcagtgtacccctaacacctagtggagtgccttacacaactttcctctagacacaggcccacaatcaccttgcaatttattattggggtccatgtttacatagaaagccattttctctggttccagacactttgaagctagtgtagtcttgtctcacagcaggatgaagtctcaactatatgcaagactttagccagaggtctttagagctcctgatcttagtgaattttcttctccaagctgttgaaaagaattctgtggtttgagtgatctacgagaaaggaagacaagttgctcacttcactgagctgattctggtgatccatatctgtataaaagcataggtgagtctccattgcctgggtgccttggagacatcagggatttaaaaggtcctgaggattaggaagggccttcaagacagactgttgagagtagggacttttaattctcatgtgttttgtcaccctagcttctcccaagagactgctggtagggtaggataggataatgtgtataaattatcctttacatagtagcagttaaatagatgctttcttcctgtttctcttttcatccttgagcttttaagtccctattcagttttgcaaccaaaaggtaaagtctgggggggaatacagaaactctgtttttaatgatgttgaagagaggaatctaaaaaagaaccttgtaataatcaaggagccctgacttccaccttcactgctcttcacatttactagatcattagactgttttgttgaaacatagaagctaacatttaaaacagaactggagaaggaagacaggtcctctaaatagtgatgaagaca

SEQ ID NO: 726989 - DNA, 605 bp, Homo sapiens
tcctctcctggtacctagctcaagaccaggtactggataggtttctattaagcctttctgaatgaacaaacaaatgaatgaataacaagtaacatgcacttccctcacaaagaacactggcattttaagaccagccttgatgccttaaaccaaacaaagyagaatgtcaggccctgggtgaggtacatacactgtggagctattttgagaaaatataatccctattctgtcatttcatgtagggaaacaataatctcccaaccctgactgtattccctaccctacccctacatacacacacacacacacacacacacacacacacacacacacacacacacacacgcagacatgtcagctggttctgggtgccaagaattatggaccattcttactggattcctatactttctatactaacagatcttaggcaggtcacttttcctcttagagcctgtgtcctcatttgtaaaactgtcagaataagagctgccttacctaccctgccagactactgtggggctcacaggagataaggagctttaaagtgatatagaatctgtcctctccctatctcctccatatcaacaaatgcgaccatcttt

SEQ ID NO: 726990 - DNA, 1018 bp, Homo sapiens
ttcctggaacttcataatattcataacacacttcctgctgctgtaggtttggatgactgaggcatactttaagaattaaataattgtaygcttctgttttctatactgtggtttctttaacaacgtgctttcctaaaaatagataaataaataactcttgaattatttgtttcaataaatcatgtgaaagaataaatacacaaagatcctttctggacataattctaacctgcaaaatttccaattttgtttgctgcgttttcaggctatgatatctgctacatcacaacactagtgcttaaacactaactaaatgttacacattttacggttttcattacagcaacaacaaactattggttggaatatgtgttatgctgttgcaataaaaataacttaatctataatggccttacaagaagttaaagtttctcttacatgtaacagtctagagttagtagtccaggcctaatggggtggtcattctactcccagtacctaattcccaaggttgtttcacttgttgacatttccctgccagtacaaataaaggaagaagtggcctaaaggtggcactgaattgtcaatataatttgtagatatgtattagctcaatttttagcctggtttaatttttgtagttatttttgtcgttattgttgcctgaaagtgtaaatgcaaagaatggcagatatttttattttacaatcaaggagtgagcattagaagacacttttttttttttttcggaaagacagcacctttatctgctacattttctgtggcttcctcaagttaagaagctaaaactcatttttccagttttccttgcatctacagctcagcaatgcaaattatacttctctagttagatgtatttgttcaagatgcttgtatagaatagttacaacagcagatactcaatcatttccctcttgtgagtgtagcaaagtatgacagaagtattcttcttttgaggcagtgatgcccgaggtggtagcagaattagctcataccc

SEQ ID NO: 726991 - DNA, 1018 bp, Homo sapiens
ttcctggaacttcataatattcataacacacttcctgctgctgtaggtttggatgactgaggcatactttaagaattaaataattgtatgcttctgttttctatactgtggtttctttaacaacgtgctttcctaaaaatagataaataaataactcttgaattatttgtttcaataaatcatgtgaaagaataaatacacaaagatcctttctgkacataattctaacctgcaaaatttccaattttgtttgctgcgttttcaggctatgatatctgctacatcacaacactagtgcttaaacactaactaaatgttacacattttacggttttcattacagcaacaacaaactattggttggaatatgtgttatgctgttgcaataaaaataacttaatctataatggccttacaagaagttaaagtttctcttacatgtaacagtctagagttagtagtccaggcctaatggggtggtcattctactcccagtacctaattcccaaggttgtttcacttgttgacatttccctgccagtacaaataaaggaagaagtggcctaaaggtggcactgaattgtcaatataatttgtagatatgtattagctcaatttttagcctggtttaatttttgtagttatttttgtcgttattgttgcctgaaagtgtaaatgcaaagaatggcagatatttttattttacaatcaaggagtgagcattagaagacacttttttttttttttcggaaagacagcacctttatctgctacattttctgtggcttcctcaagttaagaagctaaaactcatttttccagttttccttgcatctacagctcagcaatgcaaattatacttctctagttagatgtatttgttcaagatgcttgtatagaatagttacaacagcagatactcaatcatttccctcttgtgagtgtagcaaagtatgacagaagtattcttcttttgaggcagtgatgcccgaggtggtagcagaattagctcataccc

SEQ ID NO: 726992 - DNA, 618 bp, Homo sapiens
gcagtcaaatctccttttatcttccatgtctccctgctacacatgcacacacacacacacacacacacacacacacacacacagagcaaaaaggggctgagctatttcctcattctgttcttcatcacaagcttcttttcttccccattctaaagttcttcatctcgaacttatccaatatatcactccttcccaagggagacgaaaccagggtgttgttctactaacagaaatccctcaatagaaaaagaaaccwcaagactggggaagaataggtactatccatatgggtgttataattatgtaccccataacaattttctgaatgcttacttgtagataaattttgtcttaggcatgaaggagaacagcaaaagaagaggaaatagctaatatttgttgaacacctacaaaatgctggacaccatgttaagggttcttacatactcatacatcatctcatttaatccacacaattctaagagaaaagtattagtatctttttttttctgtttgcaaatgaggaaattaacacttggaaaggttatataggagaagatattgcagagcttgcagacagttttcaatgcaaaataaacacaaatgaaataattagaa

SEQ ID NO: 726993 - DNA, 618 bp, Homo sapiens
gcagtcaaatctccttttatcttccatgtctccctgctacacatgcacacacacacacacacacacacacacacacacacacagagcaaaaaggggctgagctatttcctcattctgttcttcatcacaagcttcttttcttccccattctaaagttcttcatctcgaacttatccaatatatcactccttcccaagggagacgaaaccagggtgttgttctactaacagaaatccctcaatagaaaaagaaaccacaagactggggaagaataggtactatccatatgggtgttataattatgtaccccataacaattttctgaatgcttacttgtagataaattttgtcttaggcatgaaggagaacagcaaaagaagaggaaatagctaatatttgttgaacacctacaaaatgctggacaccatgttaagggttcttacatactcatacatcatctcatttaatccacacaattctaagagaaaagtattagtatctttttttttctgtttgcaaatgaggaaattaacacttggaaakgttatataggagaagatattgcagagcttgcagacagttttcaatgcaaaataaacacaaatgaaataattagaa

SEQ ID NO: 726994 - DNA, 627 bp, Homo sapiens
ttttctaagactagtaaagttaagttactaacacttccttgcatatttttttttcaaataaactagccagttgcttagcaaaatacgaagcgaacagggtagaaggcgggcaatatttttagagtagaggtgaagaatcaagaactgtcatccaaggtactgcatgtgagcaccgtgtgcatacatgggcctgcataaaacttccttttccaaatgtttaacagtttaaaaaaacctctaagcttcacttaatgtccacatactccttcctaaatcaagatcctcctatgccgagcacctttctctacttgagagactctctgatgcctcctggtgttccctgggccttgtccagtgccaggcactccactgatgtttgtcagactggcttcatacaggaaattagtatattttagaataaaattagtccagaggtattatataaatataaaattaatgatgataacaatatgaataatgattattgattgagtgcttaccatatgccgggcawcatgtggctttgctttcaatgttatttaattcttatagtgaccctttggaagtaggcatttttattatttctgtttaatggatgaggaaactgaagtgaaagtaattaaaaag

SEQ ID NO: 726995 - DNA, 632 bp, Homo sapiens
attatgcattgatcttacttggattttgcttcaaatgaatatactataaaagcaaataagcaaaaacaaaacaatagcttgcaactaaaaacaactcaaatggccacccaatgggtgagcagttcaacaaattgtggtatatccttataatggaaatgatattcatcaataagaaggaatgaactattgattcacatatggaatgraggaatctcaaaataattatgctgtatgaaaaaagccagtcccttctcctcctccaaaaaagtatatattgtattattttatttatgtaaaattttaggaaatgcaaactgatctatattaatagaaagcaggtgagtggttgctgggagatgagtggggcagttcagaaagtgtagagggagaattacaaagggatctatgcaaacatttgggagtgatgcatgtatttattatcttgattgtggtgatggtttcatgaatatatgtatttgtcaagaactaacaaatgtgtactataaaaacctgttgctagttatatttcaattatatctcaaaagtttatttttttaaaaagtgtaacaaaatcctttcctattatgcatgcatatttgaccttcagttaactttctagctgtgttcctcta

SEQ ID NO: 726996 - DNA, 718 bp, Homo sapiens
tgaaaatcaccaggccacctgttatatcatacttctacatgacacatagtgtagcccctacaagatgctaaaatggacctcatgtctataattaaccttatagccatatctctcataatatattacaaccttagagtaataatctattaatatatatttggagttttatcaactgagagatcattatattagtccactatcacactgctataaagacatacgcaagactgagtaatttataaagggaagaggtttaactgactcacagcttcacacagctggtaaggcctcaggaaacttcagggtggaaggtgagagagaagtaaaggcacatcttacatggtggcaggtgagagagagcaaatgagtgaagggagaggagccccttataaaaccatcagatcttgtgagaactcactatcatgggaaragcatggggaaaaccgtccccaccaaaccaatcacatcccaccaagttcctcccttcatacctggggattatggagattacaatttgagatgagatttgggtgaggacacagagccaaaccacatcattccatccttaccctcccaaatcttatgccttttcatgttttaaaaccaatcatgccttcccaacagtcccctaaagtcttaactcatttcagcattaactcaaaagtccacagtccaaagactcattggagacaaggcaagtcccatctgcctataagcc

SEQ ID NO: 726997 - DNA, 1853 bp, Homo sapiens
tattctattcctatttattaatcaaggaaaataatcatacttctacataaaaattgaagaatgtagatggtgtttaaatgtgacaataaataaacagctggcaatgaaagaaaacagacttctagcaggccatcctaaataaacaaatggctcagtaaaattgtctgtaaatagtaaatctcaaaaacaagaaatgtttttttttggcaattacattaaggaaacaaatagtttgttttttgaattcctttattttttcctctctctttctttattctaccggatcacatacacaactagggtaggaggcagatgagacagattactattaaagggatttagaatatggcatggcaaaatatgctattttggcatgaggattattttgaactgaaggtaactgaagaacagcagatacatgaggagctctctgccctcccccatctgcctcaaagcagagcataaatttccctttgtaagggtgacataaattttcatttgtggagatgtgcccttgcttrtaccaggaagatgaggacaacttcaaagactactcttctcactggagatttgagtctgcataacaaaccttactaaacaacatttatttatcataagtttgctagtcaccttcccacaatttacctcacttagtagcccaagcacccccttcctttgtcatcacttttctatgatgtattacactttttaaaaatgacatagaagcccccaagtctaaccacttctttgggttttcatttttatgtgaagcccctgtgtatatcaaaatgttaataaatttatgtgtgtgtcttttcacctgttaatctgtcttttgtcagtttaatttacaggcttcaggaataaacctaaaaaggtagaggaaacatttatcttttcctctcctatagtattattatttaaccaaggttttacatgatattaatgtcataagatgatgagaacatgttcagatttctataattttgaaacatgtacctagcatacttcacgttaagtatgaggctttcaaaaatcagatgaggaaatgtaaaggattattttataaatgtttaatattttttccctgtagagaacatgatttagcaagtctgatattttgactcatataaccattaaatattttcctttgttgtttatttaaaaaattttctaattagcattgaagatataatatccataaacatcatggattaaatttggttgacatattttcaaatgattttatcttcctgttgattctgtattatattcaccttttaatgaaataaatgctgacaaaaaggcgactgcattatagaaagtcaaaggttagttttcacatatataactggttatttgaaagaaaattaaagtccttatagtaatttatgtacataatatatatgatatatttcatttgtgtatatataacatgaaattatatttacataaatgtatgcaacacatataaagatttatatttgaataatgagtaattaaacacagatacaatcatgtgtctcataatcatgttttggttaatgacagattcatataggataatagtctcataagattataattgaactgaaaaattcctaccacctagcgatgccctagccttcttaatgtggtagtacaatgcactaccttttctatgtttagatatgtttatataaatacttacctttgtgatacaattgcctacagtattcagtacattaacatgttgcacatatttgtagcctaggaacaatatgccataccatttagacttggtgtgtggtaagttataccatctaagtacgctctatgatgtttgcacaacaatgaacctgactaacaatgca

SEQ ID NO: 726998 - DNA, 663 bp, Homo sapiens
tgggtggggtggggtgtgtggggtggagggttagaactaaagaggagaaaagtaaaataaaagaaggcaaaagaagggcttttcatgggtctaagtttgctttgaatgtaggagtgtggtcaagtcaatgctgtgcacctgaggtccattaaaagagaaagaaaggaaagaagttcagcctgaaagattccatgcatttttatggactcagatcaaagcattgtttatctactctgtctcccctactccctcgtcttccactgctgctgataatccaggagatattacaagtaagagttgtgcttgattctggcccatgatgggtgcctccccgctccaccrtggctgagctcaggcagttggtgtagaaccttcttacccactacttgaaggagtttagccctttgcctctctaccaacctccattcagaaagcaaaatcagggtctcgacttgaaatgatcatcttgaaagaagccattggccaatgttcactgcagtgtttctgctccctgaagcatctcccaggcaacttctggagacaggactaaatctgggaaggaagcgtgtctgtgctttccactaggcaccaggtcagtcaccagggttggctggctgctgctctgagtgcatagtttgactataaccattttgttaaaagaga

SEQ ID NO: 726999 - DNA, 612 bp, Homo sapiens
taatttgtttgaatgccctttaactgtagcaaacaccattgtagtgtttgtttgtttgtttagacagggtctcactatgtcacccaggctggagtgcaatggcatagtcacagctcacagcagcctcgacctcctgggctcaagtgatcctcctgcctcagcctcccaagtagctgggaccacagttgtgcaccacctacatcctgctaacttaaattttttgtagagatggagccttgctatgttgcctgggctgatcccatcatagtttttttaatgggctgctccagtgtgtctgaagcagtagtcaaagtttgcatttgaatacctttttccttattaaaacatggtgagctcaaagaagaaaacaagtcgaaatttgtgaaacaaaaatcatgcatctatctctttgtctgatttaggaacagtagtctctgatcactattggttgaaagtctggagttgactcctagattagttactaaaatgccactgttaatgtttgtcatctctcactcctcccctacgatgaaactgggaaagtctctgggtacacaggtcattgctaatggaggtccttctgtaaattcaarcctcacccgttaactgcta

SEQ ID NO: 727000 - DNA, 599 bp, Homo sapiens
tcccaacataaaagtctgtcttgaggcatcctactacagtcttgcctattactctgctgattaaaggaggttgactagagccatgtgggctagaaggagtgaggcctggaccagaagaaaataattgcaaaagtttctctgtcaaacattaaaagtcatcaacatcagaatcacaaatatttcactaatctcttacatcctgcagatgtgcagataagccatttctctctgcccaacacctgaatggaacaatgattatcttccgggatacaaaactatctcctagtttcaccagttatgtgagcgcggatgctgacaaaggagaagtcttatttttcaaacgtcttttgggaacagcaaaggctatgaatattttagaactagtgagagagtgctatgctgagccacggaagcaaaccccttgtgttccgtgtgttgactgcacacgcccatagttttgtggcttggtgaaaagctttcacttgtcacaactcacggttttccacaataacgtgaattgacatcaatgattttgcttgcaatgcgggtggaagtcttgtcttccactgccaagttctcagaaccagagaaccraatca

SEQ ID NO: 727001 - DNA, 1014 bp, Homo sapiens
aatattagaagattctcagtaattcatcacttttgaactcaaaagccacttactttttgttatgttaatatggaaaaaagatggttcataacctggtcatttctgctcacaaaattttttaaaataaacattcatatcacttattttgcaaaacagaatattccagcttgtggcactcaacagttaattactgatactcctcttgtatgtatcagcaaatgggataacagatgggaagtgagtgactgttttatattagtgcctaattagaatggagtttttatttattaatatgaaagattactaatgtgtagttataaattacagacacatggatattttatgaaagtgcagaattgaggtgttatttataaaaatgtatctaccattaatatgactcttataataacattactgaattgcaactggttggaatgtgtctttatttcctagcagtctgtgagttccctgaggcaagaatagacatagtagacrttcagtaaattgtgtagaaatgaattgctttaagttataatgatgtgcttgtcatcacaaaatcacacttagaaatctaagaatttatatttaaattcctcatataatttgtagccagtctgttgttacccgggtggttggataatatggcatatgaattgatttttttttcatatatgactattacttttttcttttccttcaaaattttagcattaaatataatttaattgataatatgcttaacttaaatatactttatttctaatagtctctcaatctaaatttacaggtttcaagaaatttgaatgtttcatgatccctggttgcagtgaacactattcatagtgtcagtatacttttaaaaatgtgattatactgaatatgtgaactttaatgacctgctgtgtacaactgcttaaaggagtggcttttgagtgaagttaacgtgtatttaccttctttccctgattacagttttctcccatcaatctagtctataactcagtgaggactgtg

SEQ ID NO: 727002 - DNA, 2915 bp, Homo sapiens
atctttctcatctcactatgagaattttctttttgtctcttttatcctccctacttagaggagtgcctggaacatggtcttcaaaatacttgataaatgaatgaatgaatgagtgctgactgtgtgtcaggaacctccctgggaacatttgtgtataatatctcatataacagtcacaacaactccaggagaggaatattataatatccattttccgactgagaaaacagagactcagataatcacatgagattatcacataggtaaggagggatagagcccgggtgtgaacccctgttggtccaactcaaagccatattctcacagagactcccctatttcagctaaactactctctttccaaacaaatctaatctaaactaggaaaacaagtctaaacaaggggtgaagattgagtggcacagaaatcatgatcttcatcattttatgaaatgtacatgtgttcactattactgtagatgctctacaagacgagtttacaagttctagctttgtagtaactaaggatctatctgcccaaaaggaacatattaacatgtaggtaactacttgcacacacagagaccttaccaaaagctaattgcattgtcagtagtatttggaccagtaggggggcgggcaaggggtgtacgtgttgatagaaaacaaaagtctgggttttatatctgagttaatggaagaaaataattcactgtcttccacttagcaaaagaaagctttgtaacggaagtgggattataagagctttctgaactccacataggaggaaatccggcaagttgacactatggtcttattcagggctcaacacccactaacttcagagagagcttctagcctggatcagccaggcaggatgcaatgcaaatgggaaatgaacctgaccccaccacaaaagcctttagcttcacacacatgtgaggctgatggaattcactgccataaaaggaaggtgagaacactctaaattggcttttaccttctaaggatgttcacacacaaagcatgcattgtagccactaatgaaagacatgtgttagagtagttacacattgcaactcatagaaaactaatgacatgaaacagccacggtgcctctatgctgacccctgtaacacctcaagaccaacttgtaacaagcagagctaagccaatttatcactgaattatgcgtcatttaataaakacgggtgtgactcaacctgccatgcgggaatgctaaaagcttaaggaaatggccaccaaaactcccccttttccttttccaaagctcatctttaacccttcagtaaatgatggactgattgaagcaaaagtctaaactttataaactatcactaaaaaaatcttagggtagtctgaccagggttcttggggttatttacttgaaaattactactcttgcaggattaactcctgtttctatagctcaatggagtgtgaatgaagtgaaaatggaggggttctcttttttgaaccaccatcagcatcctgaaattgtagttcaaagtatgctttcagaagccaaaagccaagtgatgattttaccagtgtcatttacagtcgtcatcaaaacatattttaatttaaataaaaattaatcctaggggcttttaggttctaccaatagttttacatttccgaggggaaaaaaatccttataatttcatcattgtcatagaaacagaaaaatcaacacattacagaaaaacgtttcatgagggctgagaataaggacatccatatcgagttacacacttagagataattgatttagcaaaaattcagctggaatcatataaattatagcaatttccaccattggtcctatagaaaagctttttagtaataaccagaggacatagttagatattctctagaaagtaaagaaacttctcaaaatctttccttattttatttcccttctcgggattatattctttttatgataacaaatttgtaccactgtagaagcattttagtcccttgaaattttataaaactttttttcttgatggtgcaccaagaatcatgtttctctttaaatgaacaaaaaaagtagatgaagtcaaaatgcattttattattaagttcagcaaccatagattatgttgaagactgaagcacttgcaatgctccttcatctgggaagacattctattaaaaatttgcccattatgcttttgtatttcattccttcttttccttccaccaaggtaatgaaagcatcaagagtccctgaaatattgtataaagaaaaatcgaaaagaacatttacagcccagaaaactgctactaatcattaggggcttgtcgccatctttttattaacctttatttttcttgaactattttattatttaagaagattcagaccatgaaaaacatctgacaaaagagacagacactgttctaagcacttcaagtgtattaactcaatttgtactcacaacagttttgtgataaaggtcctgttattatccccatttgagagctgaagaaaccaaggcacagagctatgtagtaatttacccaaggccaatagctctaagtggtggaggccagattcaaatcagggccgtcatactccagaacccatgcacttacccatgccgaactgtttcaagaaaggcagtgaggaaaacctgaagctttcattttaataataaaccaaaaagaaattcttcagtctctgtgcacttgattaagctcccaaaaggtgagattacacatttcagtgtatttctctcaagtgatataatgtcggtcctaaattcatttcagaattttgtacaaaatgtgaagtattctttttctagggtaaaggtggtttatttccattaagaagaaagaataataataatgagaagagtcaggataagaaatgcaatatt

SEQ ID NO: 727003 - DNA, 909 bp, Homo sapiens
tgtagccaaaagacacatgaaaaaagctatcatatttttgagtattgtttttctgctgttctctcctgtcttaccttctggcagtactattagatatgtattggaacttttatctattctcagtgtttcttaagagctttatttattattctttaaatttatcaggcagcccttgaaccagaacaggttcagagaggctcctaaatgctttttttttaacattaaaaaaaaaacttattgtttttagataattcttcaatattaaatttgtacttaataatttaaaatttatctcctgttctgggatttttaacttaattgactaaattttccaaaattctcatttagtctctctttttaaatatctgccaattttcattcttaccggtatatattgactttatattttgtgactgtgaaatttccctattatttctagtagcacattttgcaataggtcacaactaagawgtttgaaaatacattgttttacttcttccttttcaaactgtgtgccttttatttctttcatttccaaatatctttttcttgtccttctgcactggctggaacctatggtgcattgtggtatagaggtgttgagagtggacattcttaactttttgctgatattaggggcaattattcggtctttcagtgtcaagtatgtttgatatcagatttaggcttttgcatagatattctttttcagttgaggaaatttccttctgagtttgctgagaacatttattatgaatgaggcttaaattttgtcaaatgctttttttccaaacagaaaattaattaaaagaatttcgaagatttaatgctgtaatataccttttagaagtgatttaataagcctggtgcagtggcacatgcttgtaatcccagtgctttgtgaggctg

SEQ ID NO: 727004 - DNA, 658 bp, Homo sapiens
atataaaataaatatatgagtatttctttttttttcttttttgagatggagtctcattctgtcacccaggctggagtgcagtggcatgatctcggctcactgcaagctctgcctcctgggttcacgccattctcctgcctcagcctcccgagtagctgggactacaggtgcccccactatgcccggctaatttttttttttttttgtatttttagtagagacagggtttcaccatgttagccaggctggtatcgatctcctgacctcgtgatccacctgccttaacctcccaaagtgctgggattacaggcgtgagccactgcrcctggccaaaaagagtatttcttatagtcctgtttgattatctaatcctggctatgaagacgtgctagaaatagagcaaatgggtgatgaaagcaggaaaagatggagtgggaggtagggagagggagagggagagagaggaaggtgagggggagagagatgaaagtgaagagaggtggaggaagaatggagacactgaatgatccttttagtcttgcattaaatatgccccaatccagctagatcttccctgttttatgagcaaatagtttctagttgtgtctgccacaacatattaatcactatccttatcctattacttttcctgtcttgc

SEQ ID NO: 727005 - DNA, 638 bp, Homo sapiens
ttcaatttcagttgaaggtaacttaaaagttaaatacttttttagataagcaaaacattggtttgactattggagagtgccagtattttctgtgaaggctgcttttggagcaaggtcagaggcgagcatttattctcttatttatttaactaatttttatattgagtaggttctgtaggtcaggaatatgttccatgaaggataccaaaaagaataaaatgaagtcacagctctcacaaagattacatctagtggaggaactcccaaatagctgaagtgagtaaagaaacctatctacagggctggaggtctcatgtctcaccaaggatgaattatctgggaatgagtggagagaaaggagacaaggaaggaaggaaggaagggagggagggagggagggaggaagggaagaagggaggaagggagggagggaattcaaagtaactgttttgaggaagctaaaaaaaaaaaaatccaagataacatagagaaggaatacagaattctgtcagataaacttaaaaaacaggttgaaataattagaaagaataaagcagaaattctagagctgaaaartgccattgacatgatgaagaatgcatcagtttcttactagcagaactgatcaagcagaagaa

SEQ ID NO: 727006 - DNA, 1170 bp, Homo sapiens
cttatgaaatatagatggtttctgatagggatgcttcacaacaattgattgctttataagccataataatttggaataggaaatagaataacctcataattaagtattgcttcttttyaacctgaaagtagtgattaaaggactactctgattttataattctctgaaatatttagatttgtaggcaatggtgaaatgctttttgatgcatcttctgaaatataaagtgtacaaagcaaagtgtaatcacatccaagaagaacaagctgcatcttttcttttagaatattttgtgtttgtctccagtagcattttaattttattttagtctcgtggactgctctagctgggacactgtttgcaatgtaaggaatttaagattttaattttgttcatgacaaaaaaatggcatttaactgatggcctttgataatcagagtagaaaagagtggccatactgaaaaataaatcactaatcacttcatttaggaaaacactcctgaagcaaagctatagcacggtagaaagtgaatataaatcaataaaatattatgtgaagtttagcttttagggaagagaaaataggtaactttcactgtctatggtatagattttacagtaaacaataatagcacatctaaggaggcaccacttacgttcaggtacgtatatgtacattgtacacattgtaagtgtgtacatttattgcaattttcctaatatatatttttgaaaaggaacactagttgtaatccaatttttttttttacagtttgaaagttccaaaccatttttacaatcaacttcaatctctgtgtatagggtgagagggggtatgcatatgtgtctgtgtgtcagtgtttcttttagccttatgttacctattacctcaacacaatttttaaaataagaacgttaaatactatagaagttaagcgagttaatctatcattaactgggataccacagcaaacatcaaccccaatcatattttaaataaaacttcaaaacaactccttgaaacaagcactgtagagttaatgaaatgaaaatctatacatataaactgcagaaaacaacattttgcattattattttaacgtttaaaatatagaaactatagtatattattttcattcagagaactgttcatgggttaacacaattttt

SEQ ID NO: 727007 - DNA, 1170 bp, Homo sapiens
cttatgaaatatagatggtttctgatagggatgcttcacaacaattgattgctttataagccataataatttggaataggaaatagaataacctcataattaagtattgcttcttttcaacctgaaagtagtgattaaaggactactctgattttataattctctgaaatatttagatttgtaggcaatggtgaaatgctttttgatgcatcttctgaaatataaagtgtacaaagcaaagtgtaatcacatccaagaagaacaagctgcatcttttcttttagaatattttgtgtttgtctccagtagcattttaattttattttagtctcgtggactgctctagctgggacactgtttgcaatgtaaggaatttaagattttaattttgttcatgacaaaaaaatggcatttaactgatggcctttgataatcagagtagaaaagagtggccatactgaaaaataaatcactaatcacttcatttaggaaaacactcctgaagcaaagctatagcacggtagaaagtgaatataaatcaataaaatattatgtgaagtttagcttttagggaagagaaaataggtaactttcactgtctatggtatagattttacagtaaacaataatagcacatctaaggaggcaccacttacgttcaggtacgtatatgtacattgtacacattgtaagtgtgtacatttattgcaattttcctaatatatatttttgaaaaggaacactagttgtaatccaatttttttttttacagtttgaaagttccaaaccatttttacaatcaacttcaatctctgtgtatagggtgagagggggtatgcatatgtgtctgtgtgtcagtgtttcttttagccttatgttacctattacctcaacacaatttttaaaataagaacgttaaatactatagaagttaagcgagttaatctatcattaactgggataccacagcaaacatcaaccccaatcatattttaaataaaacttcaaaacaactccttgaaacaagcactgtagagttaatgaaatgaaaatctatacatataaactgcagaaaacaacattttgcattattaytttaacgtttaaaatatagaaactatagtatattattttcattcagagaactgttcatgggttaacacaattttt

SEQ ID NO: 727008 - DNA, 609 bp, Homo sapiens
acctggctcttctccctaattcaaccaaactctttattgcgtgtgtggagggtctyagaagagagaacattttctatccttccctcagtcatagcagtattggttggtatcagtacagcattctgggtccaagcttctctctcaggggcagatagattttcctgctctctaggtggcaatatacctttgcatgggaccaggatcagaaggatttgttggtcttcccacaaaagtagactacactgagcatacagctcgtgggattttctttccctctcttttttccttccccagcaacagatgacttgcttcgaccccttcccctctgaacaatggatctttgcctgccttctattcccaagttgcttgaggcttttaattcatataataaaagagctcaagacataggcaaggttttgtgcccacactctttttccttccctgcctctaatcttcctcatgagtatatagtggaggcttatgaaaagtacatggcaaatgaatgcacactttcactgggtctggagttctcaaaggttctaaatcgtcatgctagcccacaatcaacttctaataaagtactgaaatgtaattgtttcctctttcctg

SEQ ID NO: 727009 - DNA, 1033 bp, Homo sapiens
ccaaaagctgcaagatgccaaaatcttgtagatgtcaaataaaaagttattttactaaaaaaaaagtgtgcgttggtaatcactactattaataattttaaaaaggataaataaggtcatataaccctgtctctggttcagcaatttggaaaagttgtagttagaacaggagactgttctaatagagagagtgaagagtacaatatgtagttyagttctctcatttggtaggtgcagacacagaaggaatgaaaggctgcatttacacgattagctagatctgtacaaacatttagtactttaacttttctcaaagccttttatgtattatcctatgggtaatgttatcccaaatgtatggataaaattaaaacaagaacactaaatgacttcacaaagacctgaaaggcagatcaacggcataactaatattaaaactcaggactagtgctctgaacatcaaacctcctggatgaggtcttccgtggcacatctctcatttgttgaacagtttttaaaatactgtgtgctgggctttaggttgagagataggacacgtgatttatcccttcagggtgtttgcatcataaagaggcctgtgatcttcaattaatcatgtggccaaagttatttctaggggtcagggagtcattgacaattcattatgccaaatgtgccaaaatgccgaaaaaaaaaaaaccaaaaaccaataatgtaagtctcctgaatataaaattttcaaaaactgaattagaaacatttttttttactctagcaagagcaattcaataaaagcagacatataaaggataattttttaaatctgtgaccaaaattgaatatgagattgattcatctacaaagtgtcttacttttctgtagtacaataaaataaattatactgtcctagacaggcaaacttcaatataagggagatttaatgtcgtctgtcctatcatagtgaaatttgactccactattagtttctgaatactttcatgatttccctcctgctagtttaccatgagacacc

SEQ ID NO: 727010 - DNA, 652 bp, Homo sapiens
gttctagctttttgagcatctgctaatatgtggtgggagatcttaaattcaacagactcatttttaatgaatgtcaaataggaactaatctgtcatgattacattatttattttctaggagagacagcaatttgtcatgtagataagtacatccctctctttatcaagagagggaaacagatgagcaggttttttttgtttgtttgttttttacattctcagtaaacaaagagaccttgggatttggatcttttccctcttctatttttttttatcatctcaacttgcctaaatttaactaagttgcccttcaaaatttttttttatcaaaatgtaagtaggaatttaaaaattaatgagaaaacaaaatgatgtggttctgaataaaaatgaggaagagctgaatgtggaggggttagcagggctgtttaattgacccccatacgcaagtgctgttgatagaaatacaacatgagacacatatagaattttaaattatatagtagccgcattaaagaagtaaatgaaataggtgaacttgacttgaataatatattttatttaactcaatatatctaaaatattatttcaacatgtaatcaatataaaactattaataaggtrttttacatagtttttgtactgtcttcga

SEQ ID NO: 727011 - DNA, 599 bp, Homo sapiens
tgtaaattttatagataattatatgtgcttccttgtttgtagaaatacataactatgcatcctagacaaggtacctctagggagttaaagaagaaaataagaatgaaggcaaaaatatcctattcagattttctaaacagcttatgttgatgctaaataaactttaaaaaatagacacagtggcttaattttgtgatatttaagtgttataattttattctgttaagtgtgtatgattgtaaaagcatcraagttgaaaatctgtgaaattggaggaaaatacaatttcaccttttgttcagaaatttccaaaactacaaagtaaataaattcaaatataagtagaaacattagttctttattttattccttgccatagatgaaggactttatagaatgactatgtttagggtaaagtgactattttcctgtatgagttgtatctacaaagtatgaagtcttgttttaaacaaaatgaagacattgtcattcaaccatttccctgaaattagttgcctaggaaaacaaatttaataacgaagtcaaaataaagttttagtttactatttatatatatatttttacttcaaagggagatt

SEQ ID NO: 727012 - DNA, 599 bp, Homo sapiens
tgtaaattttatagataattatatgtgcttccttgtttgtagaaatacataactatgcatcctagacaaggtacctctagggagttaaagaagaaaataagaatgaaggcaaaaatatcctattcagattttctaaacagcttatgttgatgctaaataaactttaaaaaatagacacagtggcttaattttgtgatatttaagtgttataattttattctgttaagtgtgtatgattgtaaaagcatcaaagttgaaaatctgtgaaattggaggaaaatacaatttcaccttttgttcagaaatttccaaaactacaaagtaaataaattcaaatataagtagaaacattagttctttattttattccttgccatagatgaaggactttatagaatgactatgtttagggtaaagtgactattttcctrtatgagttgtatctacaaagtatgaagtcttgttttaaacaaaatgaagacattgtcattcaaccatttccctgaaattagttgcctaggaaaacaaatttaataacgaagtcaaaataaagttttagtttactatttatatatatatttttacttcaaagggagatt

SEQ ID NO: 727013 - DNA, 599 bp, Homo sapiens
tgtaaattttatagataattatatgtgcttccttgtttgtagaaatacataactatgcatcctagacaaggtacctctagggagttaaagaagaaaataagaatgaaggcaaaaatatcctattcagattttctaaacagcttatgttgatgctaaataaactttaaaaaatagacacagtggcttaattttgtgatatttaagtgttataattttattctgttaagtgtgtatgattgtaaaagcatcaaagttgaaaatctgtgaaattggaggaaaatacaatttcaccttttgttcagaaatttccaaaactacaaagtaaataaattcaaatataagtagaaacattagttctttattttattccttgccatagatgaaggactttatagaatgactatgtttagggtaaagtgactattttcctgtatgagttgtatctacaaagtatgaagtcttgttttaaacaaaatgaagacattgtcattcaaccatttccctgaaattagttgcctaggaaaacaaatttaataaygaagtcaaaataaagttttagtttactatttatatatatatttttacttcaaagggagatt

SEQ ID NO: 727014 - DNA, 1105 bp, Homo sapiens
  misc_feature 533, 534, 535, 536, 537, 538, 539, 540, 541, 542, 543, 544,545, 546, 547, 548, 549, 550, 551, 552, 553, 554, 555, 556,557, 558, 559, 560, 561, 562, 563, 564, 565, 566, 567, 568,569, 570, 571, 572, 573, 574, 575, 576, 577, 578, 579: n = A,T,C or G
  misc_feature 580, 581, 582, 583, 584, 585, 586, 587, 588, 589, 590, 591,592, 593, 594, 595, 596, 597, 598, 599, 600, 601, 602, 603,604, 605, 606, 607, 608, 609, 610, 611, 612, 613, 614, 615,616, 617, 618, 619, 620, 621, 622, 623, 624, 625, 626: n = A,T,C or G
  misc_feature 627, 628, 629, 630, 631, 632: n = A,T,C or G
taccctttgcacataattcaaactgtacaagtctttcgcatcatttacaatcgtgtgtgagggagctcctcagagagaatacttcaacccacagtggatactgatgcctcccaaagggcaagagcaagttttgttttcatttaattttggtcatgtgctcctattaacataactctcaatgaccctgttttattaggtactagattgtttgggcaacatcactactaaagacaaaagaagaaaataccaaatrctggcaaggatgtgctgcagtgatagaaacgctcacacacggctggtgggagtgtatattaatataaaacctttggaaaactgtttgacagcatctaccacagttaaacatgtgcatcctaggtatacacccaagagaaatgtgtgcccacatgctccaaaagacatactaaaaatgtttgtagcagcattaatagcacaaaactggaaacaatccatcagtggcagatcggacacaatgtgtggtacagtcatactataaagcacgatgcagcagtgannnnnnnnnnnnnnnnnnnnnnnnnnnnnnnnnnnnnnnnnnnnnnnnnnnnnnnnnnnnnnnnnnnnnnnnnnnnnnnnnnnnnnnnnnnnnnnnnnnntgtctcaaaaaaaaaaaaaaaaaagaaacaggtaaagaaaatgaagcagtacatgcaacaacatagaggaattgccacccgacaaaagaatatatgctatatgatctcatgcatataaagctccaaaacagataaaaataaacagtagtatttattaactatagtgggtttttttaggaatgcaaaacaaactggtaaaattatgaggaaaagcaagaaagtgatcaccataaaatcaggagatgtcaccctttaggaggagagtgagggacttaggatcaggaaggctttgggggcttctagaggtctggcaagactctatttcttgacacaggtggcgatggcatacagtatcactttatagaaatatgttaagctgtacaaaattgttttgtgtgcttttctatttgtcgtactgaacaattaaaaaggttaaaaggggagaagaatacaatgcaaaacttatcaaaagt

SEQ ID NO: 727015 - DNA, 1105 bp, Homo sapiens
  misc_feature 533, 534, 535, 536, 537, 538, 539, 540, 541, 542, 543, 544,545, 546, 547, 548, 549, 550, 551, 552, 553, 554, 555, 556,557, 558, 559, 560, 561, 562, 563, 564, 565, 566, 567, 568,569, 570, 571, 572, 573, 574, 575, 576, 577, 578, 579: n = A,T,C or G
  misc_feature 580, 581, 582, 583, 584, 585, 586, 587, 588, 589, 590, 591,592, 593, 594, 595, 596, 597, 598, 599, 600, 601, 602, 603,604, 605, 606, 607, 608, 609, 610, 611, 612, 613, 614, 615,616, 617, 618, 619, 620, 621, 622, 623, 624, 625, 626: n = A,T,C or G
  misc_feature 627, 628, 629, 630, 631, 632: n = A,T,C or G
taccctttgcacataattcaaactgtacaagtctttcgcatcatttacaatcgtgtgtgagggagctcctcagagagaatacttcaacccacagtggatactgatgcctcccaaagggcaagagcaagttttgttttcatttaattttggtcatgtgctcctattaacataactctcaatgaccctgttttattaggtactagattgtttgggcaacatcactactaaagacaaaagaagaaaataccaaatgctggcaaggatgtgctgcagtgatagaaacgctcacacacggctggtgggagtgtatattaatataaaacctttggaaaactgtttgacagcatctaccacagttaaacatgtgcatcctaggtatacacccmagagaaatgtgtgcccacatgctccaaaagacatactaaaaatgtttgtagcagcattaatagcacaaaactggaaacaatccatcagtggcagatcggacacaatgtgtggtacagtcatactataaagcacgatgcagcagtgannnnnnnnnnnnnnnnnnnnnnnnnnnnnnnnnnnnnnnnnnnnnnnnnnnnnnnnnnnnnnnnnnnnnnnnnnnnnnnnnnnnnnnnnnnnnnnnnnnntgtctcaaaaaaaaaaaaaaaaaagaaacaggtaaagaaaatgaagcagtacatgcaacaacatagaggaattgccacccgacaaaagaatatatgctatatgatctcatgcatataaagctccaaaacagataaaaataaacagtagtatttattaactatagtgggtttttttaggaatgcaaaacaaactggtaaaattatgaggaaaagcaagaaagtgatcaccataaaatcaggagatgtcaccctttaggaggagagtgagggacttaggatcaggaaggctttgggggcttctagaggtctggcaagactctatttcttgacacaggtggcgatggcatacagtatcactttatagaaatatgttaagctgtacaaaattgttttgtgtgcttttctatttgtcgtactgaacaattaaaaaggttaaaaggggagaagaatacaatgcaaaacttatcaaaagt

SEQ ID NO: 727016 - DNA, 1105 bp, Homo sapiens
  misc_feature 533, 534, 535, 536, 537, 538, 539, 540, 541, 542, 543, 544,545, 546, 547, 548, 549, 550, 551, 552, 553, 554, 555, 556,557, 558, 559, 560, 561, 562, 563, 564, 565, 566, 567, 568,569, 570, 571, 572, 573, 574, 575, 576, 577, 578, 579: n = A,T,C or G
  misc_feature 580, 581, 582, 583, 584, 585, 586, 587, 588, 589, 590, 591,592, 593, 594, 595, 596, 597, 598, 599, 600, 601, 602, 603,604, 605, 606, 607, 608, 609, 610, 611, 612, 613, 614, 615,616, 617, 618, 619, 620, 621, 622, 623, 624, 625, 626: n = A,T,C or G
  misc_feature 627, 628, 629, 630, 631, 632: n = A,T,C or G
taccctttgcacataattcaaactgtacaagtctttcgcatcatttacaatcgtgtgtgagggagctcctcagagagaatacttcaacccacagtggatactgatgcctcccaaagggcaagagcaagttttgttttcatttaattttggtcatgtgctcctattaacataactctcaatgaccctgttttattaggtactagattgtttgggcaacatcactactaaagacaaaagaagaaaataccaaatgctggcaaggatgtgctgcagtgatagaaacgctcacacacggctggtgggagtgtatattaatataaaacctttggaaaactgtttgacagcatctaccacagttaaacatgtgcatcctaggtatacacccaagagaaatgtgtgcccacatgctccaaaagacatactaaaaatgtttgtagcagcattaatagcacaaaactggaaacaatccatcagtggcagatcggacacaatgtgtggtacagtcatactataaagcacgatgcagcagtgannnnnnnnnnnnnnnnnnnnnnnnnnnnnnnnnnnnnnnnnnnnnnnnnnnnnnnnnnnnnnnnnnnnnnnnnnnnnnnnnnnnnnnnnnnnnnnnnnnntgtctcaaaaaaaaaaaaaaaaaagaaacaggtaaagaaaatgaagcagtacatgcaacaacatagaggaattgccacccgacaaaagaatatatgctatatgatctcatgcatataaagctccaaaacagataaaaataaacagtagtrtttattaactatagtgggtttttttaggaatgcaaaacaaactggtaaaattatgaggaaaagcaagaaagtgatcaccataaaatcaggagatgtcaccctttaggaggagagtgagggacttaggatcaggaaggctttgggggcttctagaggtctggcaagactctatttcttgacacaggtggcgatggcatacagtatcactttatagaaatatgttaagctgtacaaaattgttttgtgtgcttttctatttgtcgtactgaacaattaaaaaggttaaaaggggagaagaatacaatgcaaaacttatcaaaagt

SEQ ID NO: 727017 - DNA, 619 bp, Homo sapiens
gtccttatgctgatagataataagtagtaagccaaacaatactacagtattaaaaaaaaatccttgggtgggcctgtttagactgtggtccaatatttaaaagaatataaaggtaaccttttgacatattttcaaatttttcataatttttactaataaagtctttcatttcgtttggtttcggtttataatgagttatatgattcttgagcaaatacaaattgtgacctttatgtgtgtattgtgtgggttttttgtttgtttggaccagaatcccccttacttgggactcagtaagggaaagggctcatagttttgacttacctgaattgtaggtgagattagctgtgttattgtttaggaacttttattctgtgtgaagggaactgtagtcacccaactggctcttcytgtctgctgcacagacaaaactgaaggggtggcctgcccctccacacttgtgggcgtttcttgtcgggtggaacgagagacttgagaaaagaaagatacacagagacaaagtatagagaaggaaaagtgggcgcaggggacccgcgctcagcatacggaggacccgcgccggcaccagcctctgagttccctcagtatttatcgatca

SEQ ID NO: 727018 - DNA, 619 bp, Homo sapiens
gtccttatgctgatagataataagtagtaagccaaacaatactacagtattaaaaaaaaatccttgggtgggcctgtttagactgtggtccaatatttaaaagaatataaaggtaaccttttgacatattttcaaatttttcataatttttactaataaagtctttcatttcgtttggtttcggtttataatgagttatatgattcttgagcaaatacaaattgtgacctttatgtgtgtattgtgtgggttttttgtttgtttggaccagaatcccccttacttgggactcagtaagggaaagggctcatagttttgacttacctgaattgtaggtgagattagctgtgttattgtttaggaacttttattctgtgtgaagggaactgtagtcacccaactggctcttcctgtctgctgcacagacaaaactgaaggggtggcctgcccctccacacttgtgggcgtttcttgtcgggtggaacgagagacttgagaaaagaaagatacacagagacaaagtatagagaaggaaaagtgggcgcaggggaccsgcgctcagcatacggaggacccgcgccggcaccagcctctgagttccctcagtatttatcgatca

SEQ ID NO: 727019 - DNA, 1230 bp, Homo sapiens
tttataatatatttcactgtctggcaggaacatggtcatttcaaatttgactgaatgtttcaaaaaagtattttctatttgtctttaaagttatgggcaacttaccagataagttgaaaagaagttcaatatcctaaattcaaaatcctaaattttcacatgtagaccttcctatcaactcagacaatgccaggcacaaacctatgatcagtaactgctgagtgattgtgaacaagccatccaagaaaagtcaaatgcataggggcatttgtggaagtgtggagttgtctctgaaaagctgttgcactgtgaacttgtttcagcctgagaggcaagaaaggytggcctgtgattacttccggtgtctacctagtgtgaaatgtgttgagtcaatgaagcatctggaacagacttagttcaactggaaggttcatgactgggatgcttcctggagccctcagaccagagggcagacataacccaagaattgcttcttattaaaggaacagagacaaaaacctaaacagagggataacggcagagcattaaatgcagataattccatttgcgactaatttacccaaataaaatagcagaaagcagctttcagtggaataatttaaggcaacaggcaggagagtggcgtgaactattattttcatatttccattgcttacttgtcacttccagtgaatatttaacttttgagcatccactttgtggcttaaggatgttcctaacttccccaaactttgcatccttgaccagtacactacaatatttattcacaaccctgggaaatacctatgggaaagttactgttccctgaacgaaatacatgaaaatccagatttctctactcgctgacagtttatatagataatgctacttccccctcaatttatctctactctgtttcaatctacacactgctgtcagaacagcgttagaccacagatctgagcactttaatccccccctcaaaaatggcccccctctgctcaccagctccatgctgaggctctcacgtccttctcatgatataacccccatctactgagacactcagttctcctcaaatgaatctattctccattccctgactaagctgcagcgttctcacctcagtgcctttgcctaggctgtgtcttccatctgaaatgccctttaccagactactggaatgacaactctccttcaaggcccaagtgcctcctatattaaaacaat

SEQ ID NO: 727020 - DNA, 1144 bp, Homo sapiens
tgctgcatctttgtaatgtgttttggaatatccccttcatttctgaaatgaaatgtattaataatataactgcctctacacataaatttaagtattaaaatagtgttacaattttaatataaagaaaagagaaagatagctttcagtgcattttattatgtaaatgcttacttgttgactattcctggagataaaatgatgtcatcagatgtttggacctacttgcaatgaatatatttggattaaagaggagtaaaacaacattcaactgagtattggcaaaagcttttctttctatttgaagctttgaaataaggagtaaataagtatacacataaacatacatagaatcctataaatgtaacatctgtgtatgtagattgatgcctggttattgtgttggtgattgaaatgccatgaattgtcgacatgatttttcacaatgatgaacaactcttggtacaattgcaaacaaaacaaagtataattcctcttcaatttacatttaaggatgttgcattccttgataattcagtgactactaaacagtgcaagaaacacttgtgtctgtaagtaaaatacagttaggctctatattcaaagaagtaacaggattttctcacctaccrgcaagtctggtggaacatctgaaagacttggaggatactgggtaattatttgttatctaaggctgtcctgtctagcaggcctggctacagtctaccacatgccattgtgacaattgaaaatactgaaaatggtccctagtacccccagtgagaaccactgatctaaagctcctttgcagtgctcatgcccagatggggatcctgtccaagctgcagtgctgtgttgctccatgatttagcttggcacggcactgcgctgtgtgtaagtaatgcttcttagtgctctggaattattctgcttgaagcactttccagatggctggctgatagcttctggggatactgaaatgctgttccgatggtttctaaccctctagtctcttccttccaatacatcttatagattcctcaaagtttgttgtgtataaaatggatacagtggataggtagttgccactcctttttactactactcgaattacaaattatgttttcttggtggtgatgtttcattg

SEQ ID NO: 727021 - DNA, 979 bp, Homo sapiens
atgaatcttcacaaaccttcccagaagcttgttgaagattttgggtttctaaaaatatttctatttcacttgatccagattttcatgtgatatttcttttgcacaccatgaaaacaagttttcaactactcaaccaaaagtctcgggtagaaaactgcccctttatctcatgrtggtatgaacaggagatgagtagacaaaacttttagacctttaccggctgttcctaccccaaatgccagccactcacatgttttctcgccctccaaattgctcagttttcatgatgctgcatttaaaacctatgtctgaaattggtagtttgctttttttttttttttctgggggaggggtgtttttacaagggagatttgggggaaatgtgggtatggagaaattttctttccattttccactggctggcactagaagaatccagtcagtttttctctgttctttttctccctctgtcctcttggtaccaaagcagtcaccatcacaaattccctttctttctattagtggatatggaattatctagcattattaagaataaggtgaaactgtctcagacccaggcttaaattgcaaaatgacaaaatatattaaaatactagagtacaaaagaaaagatacagaaaaattctacaaaggtatatatgaatggccaaactgtccaacatacataatccttgcataagcacccagtatgtcctaacagagaaagaaaccagttccagaaaaattaagtcaaaataatcacatataagagcttctctcttttagcccttcagtgacagctgaacgttggtcattaaatgggcatggaagaaacagagagaacaccatcttctgtttgaacaaaatcctgatctccaccaagaactgaaattgggtcttctccactttggaagactcctctctctatagagaaagaaaaagagctgtttttctttctctctctctttttttttttttt

SEQ ID NO: 727022 - DNA, 979 bp, Homo sapiens
atgaatcttcacaaaccttcccagaagcttgttgaagattttgggtttctaaaaatatttctatttcacttgatccagattttcatgtgatatttcttttgcacaccatgaaaacaagttttcaactactcaaccaaaagtctcgggtagaaaactgcccctttatctcatgatggtatgaacaggagatgagtagacaaaacttttagacctttaccggctgttcctaccccaaatgccagccactcacatgttttctcgccctccaaattgctcagttttcatgatgctgcatttaaaacctatgtctgaaattggtagtttgctttttttttttttttctgggggaggggtgtttttacaagggagatttgggggaaatgtgggtatggagaaattttctttccattttccactggctggcactagaagaatccagtcagtttttctctgttctttttctccctctgtcctsttggtaccaaagcagtcaccatcacaaattccctttctttctattagtggatatggaattatctagcattattaagaataaggtgaaactgtctcagacccaggcttaaattgcaaaatgacaaaatatattaaaatactagagtacaaaagaaaagatacagaaaaattctacaaaggtatatatgaatggccaaactgtccaacatacataatccttgcataagcacccagtatgtcctaacagagaaagaaaccagttccagaaaaattaagtcaaaataatcacatataagagcttctctcttttagcccttcagtgacagctgaacgttggtcattaaatgggcatggaagaaacagagagaacaccatcttctgtttgaacaaaatcctgatctccaccaagaactgaaattgggtcttctccactttggaagactcctctctctatagagaaagaaaaagagctgtttttctttctctctctctttttttttttttt

SEQ ID NO: 727023 - DNA, 877 bp, Homo sapiens
  misc_feature 4, 5, 6, 7, 8, 9, 10, 11, 12, 13, 14, 15, 16, 17, 18, 19,20, 21, 22, 23, 24, 25, 26, 27, 28, 29, 30, 31, 32, 33,34, 35, 36, 37, 38, 39, 40, 41, 42, 43, 44, 45, 46, 47,48, 49, 50, 51, 52, 53, 54, 55, 56, 57, 58, 59, 60, 61,62, 63: n = A,T,C or G
  misc_feature 64, 65, 66, 67, 68, 69, 70, 71, 72, 73, 74, 75, 76, 77, 78,79, 80, 81, 82, 83, 84, 85, 86, 87, 88, 89, 90, 91, 92,93, 94, 95, 96, 97, 98, 99, 100, 101, 102, 103: n = A,T,C or G
attnnnnnnnnnnnnnnnnnnnnnnnnnnnnnnnnnnnnnnnnnnnnnnnnnnnnnnnnnnnnnnnnnnnnnnnnnnnnnnnnnnnnnnnnnnnnnnnnnnnntattgtccagtccctgtctcttatgtgatgtgattcctgtgaaaactggagattgaagaatatagtgaaaaagtaccatctaccccaaaagcaaatctaaaatgagaaaactttcttaagcaaattctcccctaccaggcacatgtgatttatttttcttccttccacttagaattgaaaaaacatgattcatatcccatcgttgttataattttgtagacttcagagcttttcttttttcttttctgttttagttaagttgtacgtttctttgtatgtccttttgtcttttactgtttgtaagtgtccytgatagatattaccataatggccctttcctttagcttatactcctatgttatgatttgttttccacatcacctttatttagtaactcccagtccattgacctttttcactccttatgctgtatttagatggaaataagatgacacgtaccagttccatcttggagcgctaagagatcttcaggctcacaaactaagattaacctactaacatgggccactgataacgatgaaaacgtggaaggagaggcagtgtaagtaaaagagaaacctgcatccagacaataagtaatgaggatctgatggtgataaagatgaatttaaaagacaggagtaaacatatgaatgacctacacacaagaattcagattttctgatgttttatgtgtggtacagcctattcatagagaataggtgtgtcaaataacacatatttaatttttatatccaatatccagtatcttta

SEQ ID NO: 727024 - DNA, 877 bp, Homo sapiens
  misc_feature 4, 5, 6, 7, 8, 9, 10, 11, 12, 13, 14, 15, 16, 17, 18, 19,20, 21, 22, 23, 24, 25, 26, 27, 28, 29, 30, 31, 32, 33,34, 35, 36, 37, 38, 39, 40, 41, 42, 43, 44, 45, 46, 47,48, 49, 50, 51, 52, 53, 54, 55, 56, 57, 58, 59, 60, 61,62, 63: n = A,T,C or G
  misc_feature 64, 65, 66, 67, 68, 69, 70, 71, 72, 73, 74, 75, 76, 77, 78,79, 80, 81, 82, 83, 84, 85, 86, 87, 88, 89, 90, 91, 92,93, 94, 95, 96, 97, 98, 99, 100, 101, 102, 103: n = A,T,C or G
attnnnnnnnnnnnnnnnnnnnnnnnnnnnnnnnnnnnnnnnnnnnnnnnnnnnnnnnnnnnnnnnnnnnnnnnnnnnnnnnnnnnnnnnnnnnnnnnnnnnntattgtccagtccctgtctcttatgtgatgtgattcctgtgaaaactggagattgaagaatatagtgaaaaagtaccatctaccccaaaagcaaatctaaaatgagaaaactttcttaagcaaattctcccctaccaggcacatgtgatttatttttcttccttccacttagaattgaaaaaacatgattcatatcccatcgttgttataattttgtagacttcagagcttttcttttttcttttctgttttagttaagttgtacgtttctttgtatgtccttttgtcttttactgtttgtaagtgtccttgatagatattaccataatggccctttcctttagcttatactcctatgttatgatttgttttccacatcacctttatttagtaactcccagtccattgacctttttcactccttatgctgtatttagatggaaataagatgacacgtaccagttccatcttggagcgctaagagatcttcaggctcacaaactaagattaacctactaacatgggccactgataacgatgaaaacgtggaaggagaggcagtgtaagtaaaagagaaayctgcatccagacaataagtaatgaggatctgatggtgataaagatgaatttaaaagacaggagtaaacatatgaatgacctacacacaagaattcagattttctgatgttttatgtgtggtacagcctattcatagagaataggtgtgtcaaataacacatatttaatttttatatccaatatccagtatcttta

SEQ ID NO: 727025 - DNA, 587 bp, Homo sapiens
gggtcatataactggctttgccattgagtaaatgttgcggtggctggactgtataaccttacagcttgagaatgtcaagctccgggagactcacatactctttaactataggaaaagggtgctataggaagagkaaaagaggagtgtgaggcagggaagctgagacctgtcttccctcttagacctctaataatgacagcccatttagtcccctccaaccccaagatgtgttcatctagtatcatatgaaacagtgtttgagataaggctgttgatgctctgggttttgataattaaagcctaagaatagtgtcctatcttaaaagtcaaagtgagtctccctgaaactttcattcattggttttatctttctcagtggttagtctttttgaaggtcatggtatcctttggaaatatattgtacacatacatacgaaaactcatgtgcaatttcacaggcttggaagactctctggagtctttccatagatccccaagttaagaacccttggcctatagcaactctaataaaggcctacttatactttaatttatagcccttcaaatatttaaaaacagctttcata

SEQ ID NO: 727026 - DNA, 1430 bp, Homo sapiens
gtatctctattcttccacctaactgtgctccccttatttggcaatcttcaaaatacaggctgctgtgtgcatgtgcacacacatgcacacacacacataaagattctcctactcttcaattattagatgcagcaggctgttagggtttttcattctttttccatattcaaccctttgatgtgttgcctgtactattctttccccatgagctaacaaggctgtctctaaggaggggttcaggggcaaccaattagagagagaatgtgagggtgatcagaatagwgcagcctgctgagaggctgtcatttacagacttaaaggcaatgcaatcattgctaaaggcttgggtttcaacaagagctgtagcattccagccatatttccagtcatctgaatttgatgggttgttttttttttgtgctttacattgtttaatttttttctgttttaaaaataaccattgcttacattttaaaatacctaataatagtggtaatctctttgcaataaaatatggatgatggtaacctgctcataaaatgcaatgctgtgaaaagaatctaacaaccatttgaatatatgtatatgtaaattactgatggttgtgaatagaatttcaacatatacatgaagaaaatggaagaaaattgtgccactctctgtgtgtaaaagccagaggtgatgccatgttacagtagtaaatttaggtcctcccaaatcagcatatgtaaaatgtaagcttataataacacagctaagtctccatgataatatttaccgtcctcaaatgtatacgaccagagcagccgcagaagaacagagtgggaaggaacctcttaactttactttgatgcctcaatttgttcacagtaagaaatcaatcctgactttttaaaatttacttgagtcttgaaagaaaagctgatctgatttttttgaaggaattagaaagaataggaacaaaatggagggggatggccctgagaaaagatcactctgtctatctcccacccccaccaactcaataaatgatggccgcattcagcagaccactcccaattcctcccagccagagttcctaagtgtcctggctaactgatgctggattttgtctgtaacaatttccaccaattattaaggggcacacagacaggttttgacacaatcaagtgttaaacagaaacacaaacagaaggattgtgtgtctaaccaacataaacagacgtcaaggagtgaaaaattatgcctttttttaaagtcagtatgtctgtgtgtttgcactaacatatgcctagaacatgtgtattttgaaaggtaagcatgaggagtaacgagttaagaaacaacaaagcttctccttgggaaaaaaaggaaggaaaggaaaggaaaggaaattactgttgtagtttcagtacgtttaaagtgtttta

SEQ ID NO: 727027 - DNA, 1430 bp, Homo sapiens
gtatctctattcttccacctaactgtgctccccttatttggcaatcttcaaaatacaggctgctgtgtgcatgtgcacacacatgcacacacacacataaagattctcctactcttcaattattagatgcagcaggctgttagggtttttcattctttttccatattcaaccctttgatgtgttgcctgtactattctttccccatgagctaacaaggctgtctctaaggaggggttcaggggcaaccaattagagagagaatgtgagggtgatcagaatagagcagcctgctgagaggctgtcatttacagacttaaaggcaatgcaatcattgctaaaggcttgggtttcaacaagagctgtagcattccagccatatttccagtcatctgaatttgatgggttgttttttttttgtgctttacattgtttaatttttttctgttttaaaaataaccattgcttacattttaaaatacctaataatagtggtaatctctttgcaataaaatatggatgatggtaacctgctcataaaatgcaatgctgtgaaaagaatctaacaaccatttgaatatatgtatatgtaaattactgatggttgtgaatagaatttcaacatatacatgaagaaaatggaagaaaattgtgccactctctgtgtgtaaaagccagaggtgatgccatgttacagtagtaaatttaggtcctcccaaatcagcatatgtaaaatgtaagcttataataacacagctaagtctccatgataatatttaccgtcctcaaatgtatacgaccagagcagccgcagaagaacagagtgggaaggaacctcttaactttactttgatgcctcaatttgttcacagtaagaaatcaatcctgactttttaaaatttacttgagtcttgaaagaaaagctgatctgatttttttgaaggaattagaaagaataggaacaaaatggagggggatggccctgagaaaagatcactctgtcyatctcccacccccaccaactcaataaatgatggccgcattcagcagaccactcccaattcctcccagccagagttcctaagtgtcctggctaactgatgctggattttgtctgtaacaatttccaccaattattaaggggcacacagacaggttttgacacaatcaagtgttaaacagaaacacaaacagaaggattgtgtgtctaaccaacataaacagacgtcaaggagtgaaaaattatgcctttttttaaagtcagtatgtctgtgtgtttgcactaacatatgcctagaacatgtgtattttgaaaggtaagcatgaggagtaacgagttaagaaacaacaaagcttctccttgggaaaaaaaggaaggaaaggaaaggaaaggaaattactgttgtagtttcagtacgtttaaagtgtttta

SEQ ID NO: 727028 - DNA, 604 bp, Homo sapiens
aacactgcatgtctttagacatgtggaagctaaaaaaaaaaagttgatctcatagaagtaaaaagtagaacagaaggtactagtggctgggaagggtgtagggaaagagaaataaggagagatttgttaaagcatattacattacaactagataggaggaataagttctaatgttctatactactttaagaggactatagttaacaataatacattatatagctcaaatcgctggaaagataatttgtgttaatgttcctaacacaaacagattataaatgctgattgccctatctgatcattatgcactgyatgtactgaaacatcattatgaacaccataaatatgtaccattatcgtgtcaatttaaaaataaaatccaatttaaataaataaatgaaaatattttaaaggaaaagaacaaaacagacactagaagaaacaaaaatctgaatagtttatctcttttaaagaaattggatgaaagttaaaaccttcaggccaaaaataaattccatgaccaactggctatctgaatactacttgataatggagaacagaaagaatttttaaacagaacccaaaaaagcactaaccataggga

SEQ ID NO: 727029 - DNA, 1055 bp, Homo sapiens
agaaatatggtccccagtgaacctcagctgctttatatataaaatggagactttagagtatcagtcttctggagaactatgacaatgtatgtgaaagcacttcgtaaaacacactgtatacattcatttaaaaaccagtgaccttatgctacatgrttaaagtcatcaatgaataacatgacggctaacttatgattgtgacagctgctcatgatgtaaagcgttttacattatcatttcatttaaccctgacaacaaccctatgagttgattcgtattattacctccatttgcaaatgagaagattgagtctatgagaagttaagtaatgtgctcgagtttgcatcgttagctctatgtggagctatgattcaaacccatatattaaactgtctgtcccaaagtttttccctgccctcagaactaagaatactcaagtaaacatttgctctttttggctgcccggcataccaaacacaccctgagcttgtaggagccctgccttcccctgtggagcccaaagggggccttttctccccattccaagctattagaacgtgtgattgactcaaggaatagatccacatctttaatgagtaactgacatcgaaatgcaaggtggtcttgccttatacaaaatagcaaatcctaagtgcaaactatagtccaatatccttcacatcatgagcacaatatcctttacatcgctgaaaaatatgacaagacacgcagcaaaggagcaaaggcatgcttctatcaggctttgcattctaagaggcagctactgcagtcctggttggaaacaaatgggtagagcagagtaatagccaccttcctacagcagagatgtgacctttcaaggcactgaaagaggtattcatggacataatcgccactctttatggagagccttgtgtctggtactacataagacactttgcctgtgttatttgttgttttttgcttttttgagacagggtctcactctgtcacccaagctggagtgaaatggctcaatcacagctcactgcagccttgacctccctggctcaggt

SEQ ID NO: 727030 - DNA, 1055 bp, Homo sapiens
agaaatatggtccccagtgaacctcagctgctttatatataaaatggagactttagagtatcagtcttctggagaactatgacaatgtatgtgaaagcacttcgtaaaacacactgtatacattcatttaaaaaccagtgaccttatgctacatggttaaagtcatcaatgaataacatgacggctaacttatgattgtgacagctgctcatgatgtaaagcgttttacattatcatttcatttaaccctgacaacaaccctatgagttgattcgtattattacctccatttgcaaatgagaagattgagtctatgagaagttaagtaatgtgctcgagtttgcatcgttagctctatgtggagctatgattcaaacccatatattaaactgtctgtcccaaagtttttccctgccctcagaactaagaatactcaagtaaacatttgctctttttggctgcccggcataccaaacacaccctgagcttgtaggagccctgccttcccctgtggagcccaaagggggccttttctccccattccaagctattagaacgtgtgattgactcaaggaatagatccacatctttartgagtaactgacatcgaaatgcaaggtggtcttgccttatacaaaatagcaaatcctaagtgcaaactatagtccaatatccttcacatcatgagcacaatatcctttacatcgctgaaaaatatgacaagacacgcagcaaaggagcaaaggcatgcttctatcaggctttgcattctaagaggcagctactgcagtcctggttggaaacaaatgggtagagcagagtaatagccaccttcctacagcagagatgtgacctttcaaggcactgaaagaggtattcatggacataatcgccactctttatggagagccttgtgtctggtactacataagacactttgcctgtgttatttgttgttttttgcttttttgagacagggtctcactctgtcacccaagctggagtgaaatggctcaatcacagctcactgcagccttgacctccctggctcaggt

SEQ ID NO: 727031 - DNA, 1407 bp, Homo sapiens
tactaattatactgtctttttaatccatttatagcatatagatctttggatatataaattggtgatgctttgaacagaacatctccagggcagttaatgtgtaaatgcagttggccttggtgttataaaagaggtttctatgtaaacttagtttagtggatgttgattttatgatagacaggaaatgaatataattaaaagtaaggaagggggaggggagaaacaaaaccactggaaagtatcaatgtaaggagaggggcagatagatgggcaggaacctaaaataggaaacagctattaatgaagattccaaaactggtgagcagtggctcacaaattagctggtcatggttagagagcaatgagagaaaccatcttttgtgaacattgactttggctggcagtcgtggcttrggagagtgatttgtattatatgatgagaccaggaccactttcccagattgaattagaatctgtacccaatttttcttcctctctctgggtagagggtacctgagaccgattatagagctgctcttttcagtaggatagctgttacccaatgtgactgtctaaatgaaaatcaactaaaataaaaaaaaaattcagttcctcggttgtactagcaacacttcaagtactcagaagctccatgtggctagtggctacgatattggacagcacagataaagaacattttcatctgtgcatagagttctgttggccagtactggtcgagagggtgtgattgagaataaccagtaagaataaccaataaggataagtatgactgtggccgggtgcaatggcttacacctgtaatcccatcacgcctgtaatctcagcactttgggaggccgaggcaggcggatcacaaggtcaggatatcgagaccatcctggctaacatggtgaaacactgtctttactaaaaatacaaaaaattagctgggtgtggtagcgggtgcctgtagtcccagctacttgggaggctgaggcaggagaatggcgtgaacccaggaggtggagcttgcagtgagccgagatcatgccactgcgctccagcctgggcgacagagtgagacaccatctcaaaaaaaaaaaaaaaaaaaagataagtatgactgtaacctgtgttctttgccaagtcagtgaggccctagtttactgaacaccaaggcatgggcagctgtgttttgaaggttgaaggaggttgagaaatgaacagagttggaattgatgcatgtgttaaatgatgctacctagacttggggttaaatgaagtacctgtcatgaatctatgggcctagagtgcttatgcgcactggtatacctctgagattatttgttgtttattattcacccaaggcaaatcatttaaacatgttatcttttttatgagaagaaa

SEQ ID NO: 727032 - DNA, 608 bp, Homo sapiens
ggtgaataagaaaagcaagctgcagaagtcttyatacaataagaaaccttttttgttaaagtttctatcaggcaggttaggtacagtagctcacatatgtaatatcagcactctgggaagccagggcaggaagatcacttgaggccaggagttcaagaccagcctggacagtatagtaggacctccatctctacaaaaaaaaatttaaaaattagccaggcatggtggcatgtgcctgtagtcccagctactcaagatgctgaggcaggaggatcccttgggcccaggagttagaggctgcaatgagctatgatggcaccactgcactccagcctgggtgacagtaacatgtctctcaaaaaaaaaaaaaaaaagaaagaaagaaagaaaagggatctgccatttgcaataatctggttgaacctagagtaggaagatgattaccaggtgtttggaaggagtgagctatggggaaatgtaggtcaaagagtcaaatggtaggccgagtgcagtggctcacgcctgtaatctcagcactttgggaagccaaggtgggtggatcacctgaggtcaggagttcaagaccagcctgggcaacatggtgaaac

SEQ ID NO: 727033 - DNA, 602 bp, Homo sapiens
ggacaacactgaagtagtcatttcaacaaaaattaactgtggagggtacctaaattcttatgtsgctaatgagcaaattctctttctctctctctctgtctgtctgtctcatagttttttggtgatcttgagtattgccatttagagaggatatcataatgtctattctggtgctattcctttcaaataggcacctttactcatttttactctttagggctctgtcccatctgctcagtggtgtagacacatggacttaattcctttttcgttattgaatacaacttgcctcctctggttgtttaacatatgtttactttgaacataatactctacattctattcagtcttgttagttacaattaaaatcaaattatatattttgtaggttaaaatatgttattttttcattgtgagggctccctaagtttctcagccaaatgtttatatataagctgttgagtttcttgcccattatcatcctagtcaattatctaaggattttattagtttcttgatcagaaggaaatacaacattatttgagagctattcagtttgtctagtgaggactgagtactgaccaatatatgttgccaagatt

SEQ ID NO: 727034 - DNA, 624 bp, Homo sapiens
ctcttcagtgttcaccatccccaaccttactacacagagcttgctgtgttcagtgtggaaactttcagtcttttttgtatgtatgtttatacacacgcaaactcctcctttaaaaaaataacaaaactaggatatcatatatatttgtctataatttcctactttaaaaagcgtattatggtaattagccttctagatagtctccagtgatacccgcttcctggtattcacacccttatgttaactcctcccacgctgtaccagggttggtctgtgtagctaacagaacctggcagaagtgatgacggtcactcctgactttaggttatactgagacttccatcttgtatgtccttttttctcttgtatcattgagtctggggaagccgaatgccacattgtagggacattctgcctatggaraatcccatgtggttgagtaattgaggcctgataaccatgtgaatagctgtgatgtcatgagaaaacctgagctcaaacaactcagttgtttctggattcctgaccatagaaactgtgagatgataaatgtgtgttgtttaaaactactaagttttggagtgattttttacatagaaatagcatattttttcaaatgactta

SEQ ID NO: 727035 - DNA, 584 bp, Homo sapiens
caaatttatatggaaccaaaaaagagcccacatagccaaagcaagactaatcgaaaaggaacaatctggagacatcacattacctgacttcaaatgataccataaggccatagtcaygaaaacagcatggtactggtataaaaataggcacatagaccaatggaacagaatagagaacccagaaaggaagccaaatacttacagccaactgatcttcaacaaagcaaataaaaacataaagtggggaaaggatactctttcaacaaatggtgctgggataattggctattcacatgtaggagaataaaacttgatcctcatctctcaccttataaaaaaatattgatttttttataaggtgagtggcatattcaaaatatgttgttttatttctaagtgtttatggagtttctaaatttccttctactttttatttctattattcaaaatatgttgttttatttttaagtgtttatggagtttctacatttccttctagtttttatttctagtttcattccactgtgattagaaaagatactttgtaagattttaatagttttaaatgtattaagacttgttta

SEQ ID NO: 727036 - DNA, 1195 bp, Homo sapiens
  misc_feature 1187, 1189, 1194: n = A,T,C or G
ctctcccagcctttcctaaagatgctatgaaatatatgcacttattacctttctttgatccaaaatatttgaattgtaaaatgcatctggcttatcaaaagtcagaaatcagtggtactgtgttacatgagatattttcgaagattgataaagaaattaatattattaattttaattgcaatttcaaagtaatttgatattacacatttccctacggaaatttcagatatttggaagaactgaaatcaatttccacatgagaatggttgactaagtgcttttaaattgtaatcccagaatgtttagattgctcagaaacaaagttaagtttaattgtagttacacaatacccaaataataattttgattgatttattgaaataaactttctaaattttttgtcattgtgttgatacagcctagaaatcttactgtgaatattttttcttttttatagttttgcttctgctgagaattttttacataatgccagaattgaagttcataacactcacagataaatcttctacaaaatgacagattataatacaaaaaggaatctatagtgatggtttttatacagatttaaactagtaacctgattttaatatgagctgaagagaatactctaatggcattatcagcaatattattaacacctactgtctgtgaaacactgccccaactttactgttttttaattyatgctttaaaaatttatttaaggaacaataattacatcactgctataggccttgcactatctataaggatctttaagaaatccagaaatgatacagtcttcggtctcaaggagctaacagaccagttacagagataagacatacaaatacagatttatgtaagagtctaaagaatatggtactgaaataaggattacaataaagtactatgactctaaataatataaaacaattatttttgaaattgaatgagatacttttattcacagtagtaactcagatttctactacagaaggtgactgacctgagtgtcttgctaatataatcacaacagcaatgagtacggatgaaataagggaaataagagacattttcgctatcataaatcatttggatcttgcaattatttttgggttaaatttaattatagaatcaattgttattcctggatcactcctctgcatcaactttaaaaatttctntntgagnt

SEQ ID NO: 727037 - DNA, 624 bp, Homo sapiens
tggtctaagattaaattagtaaagatacttctaccatctttttttctgcggacttatacatcatagtaatattgtttttctttactgacaggcttcaaaaccctcattttgttaggtttctacctaagtagctactaaaaatgcttataacggyctttacagttatgttagacataattctataataataattctataataatctttatataaagcataaattctatgatttttcacagatttcacattatatagcatacttttagtatttagaatgtatcattatcatgcaaagtacaaaatatcgttcaaaaagaatagagattcttactacaccaaactaaattgccatttttttgttacatatgaaaattggtaagaggcaaatgtaacttgctttaaaataattttatcttacagatctattatgtaagcaatgggagtactcatagtatttactttttcagaggctgttgaatctaagttttattttcctattgtgtgtggacatggactctggaatatagtatagtgaggactgagtgttaattcccttaagtttcatccattaatttttcctagtgtgatgtgttaattattttttcagttttccaatttcctcag

SEQ ID NO: 727038 - DNA, 624 bp, Homo sapiens
tggtctaagattaaattagtaaagatacttctaccatctttttttctgcggacttatacatcatagtaatattgtttttctttactgacaggcttcaaaaccctcattttgttaggtttctacctaagtagctactaaaaatgcttataacggtctttacagttatgttagacataattctataataataattctataataatctttatataaagcataaattctatgatttttcacagatttcacattatatagcatacttttagtatttagaatgtatcattatcatgcaaagtacaaaatatcgttcaaaaagaatagagattcttactacaccaaactaaattgccatttttttgttacatatgaaaattggtaagaggcaaatgtaacttgctttaaaataattttatcttacagatctattatgtaagcaatgggagtactcatagtatttactttttcagaggctgttgaatctaagttktattttcctattgtgtgtggacatggactctggaatatagtatagtgaggactgagtgttaattcccttaagtttcatccattaatttttcctagtgtgatgtgttaattattttttcagttttccaatttcctcag

SEQ ID NO: 727039 - DNA, 1165 bp, Homo sapiens
gcttttctaacttcataaaataataaagttggctggcagtaagtatgcaaagtttaggacttcagcaaggtttatattggataaaaatgaatgtaggccaaatcctgcactaaatcatggtagctggcaaataaaggaatcaaatgagagagagagaagaagaagaataaaatactaattgaatatcttaatttttgattagtgagcccaattgtgatatcttataaaacaatgcatacatacataccagttactgtaaatatctaccagcctgtctattcttggacaaagcatcagataacygtctttggaaccgaaaaccagaactttaattgaattcccctattactaactttgaggaagttgagtgtgacagttaagagaatcggttctgaagtcatattatatggatgcaaattaataacttgtgtgacctaaggaaaattaattaacctcatccaaaatatagaacacctatctgtggtatggtagtaaagtttaaagaaattactatatacaaagtacttagaacaatgtagtaacaagtgctaaaggtattaggcatcataatttttgccctgatcaaggaattttgatttttaagtttgccaattgtatgactcattaatgtcactgtaggtttttcatttatgagttatcttttgggaacagatacaagaagtggcaattcacatagagctcaagataaaagagtgttgagaatgccctcaatcttgaaacagagggcacagatctaagtttgatgatttgtgtaaaagaatgtgccccaaatcccaactgcacctcaaagtcgagtgaaaataatatttgcttaaatgatattcatgaacttacctctctaaatttctgcttctcatggatcatggatctacatatgcagatgctgatgtggaaacagaaacttccacaatgctgacctggaaacagaaacttctacaggggtaactgctagaaaaagtagatcttaaaatacatagttcatcctctctggcataaccagtatgtatatagttaagtaatccaaaatcctttaaccagtaatttatcaacttgcgtaaccagcaacatgagataaatacttcttttatttcaacttttctatttgttcttggttttatggtaaatatgcacttaaaatggaaat

SEQ ID NO: 727040 - DNA, 1165 bp, Homo sapiens
gcttttctaacttcataaaataataaagttggctggcagtaagtatgcaaagtttaggacttcagcaaggtttatattggataaaaatgaatgtaggccaaatcctgcactaaatcatggtagctggcaaataaaggaatcaaatgagagagagagaagaagaagaataaaatactaattgaatatcttaatttttgattagtgagcccaattgtgatatcttataaaacaatgcatacatacataccagttactgtaaatatctaccagcctgtctattcttggacaaagcatcagataaccgtctttggaaccgaaaaccagaactttaattgaattcccckattactaactttgaggaagttgagtgtgacagttaagagaatcggttctgaagtcatattatatggatgcaaattaataacttgtgtgacctaaggaaaattaattaacctcatccaaaatatagaacacctatctgtggtatggtagtaaagtttaaagaaattactatatacaaagtacttagaacaatgtagtaacaagtgctaaaggtattaggcatcataatttttgccctgatcaaggaattttgatttttaagtttgccaattgtatgactcattaatgtcactgtaggtttttcatttatgagttatcttttgggaacagatacaagaagtggcaattcacatagagctcaagataaaagagtgttgagaatgccctcaatcttgaaacagagggcacagatctaagtttgatgatttgtgtaaaagaatgtgccccaaatcccaactgcacctcaaagtcgagtgaaaataatatttgcttaaatgatattcatgaacttacctctctaaatttctgcttctcatggatcatggatctacatatgcagatgctgatgtggaaacagaaacttccacaatgctgacctggaaacagaaacttctacaggggtaactgctagaaaaagtagatcttaaaatacatagttcatcctctctggcataaccagtatgtatatagttaagtaatccaaaatcctttaaccagtaatttatcaacttgcgtaaccagcaacatgagataaatacttcttttatttcaacttttctatttgttcttggttttatggtaaatatgcacttaaaatggaaat

SEQ ID NO: 727041 - DNA, 1545 bp, Homo sapiens
tatcagaaagattgaattatgtaaaataaggaaaatttaatgaaaagaaacagagaagtagatataccagacatttgycatgctttcttctacatgttaccttgatttaggaagaagtagctttaaagatgaactgattataagacggaggatgcaaacaggaagtatggaatagtaagaaaatgaaggaagaagattggcaaaataatagagttttatttatctaattttcccaggaaattgtgtgtcttgtataaattgtttttccatagaactgaaccctaactttgaaaaaaaatctgatgtaaatctttctttagaaaatatcacctacttctttgcctaatattcaggaaacagggaagaaacagcctttttctaaaacccagggtcattttgctgaacatagttgttgtgccatgcttatgatacagtgaatttcttgttctggtgctgtcaaaagcttaccatttaaaaaggaaatttggtgatgagaaaaatctagtactgagaaacaataaaaaatcttgatgaatgaaagaaagtgacaatgttagagtaggttattaacgatgaccaggacagtcaagttgccgtgatgggtattactcagggtgactttgttatttgtatatctttggacttgcactattttccatttctcattggatttggagagtaaagagaattgtcacagctgtcattctccatccccagttgcagtagaacgtctcataataggtgagaaatgtaaactctcttatctaattagtcttttgagttttggtggcttcaaagttgattttgattgattcaggaatatatgataaaaacctatagtgtttagtttaaaatatgctttaataattttagtagtacacatttgaatgtgaaaaatcatgtctgccttttaagaaaacagaactttttctcagtgaggggtgtcaggtttcatttattcagtggcagtgatccttatggagtgaaaaatctctgaatttgaataggcagaccttagggctttgcctgatgaaaatgggtatattatttaagataacctttaccatatgtgtatatttaggtagctggctggtaatagatttgtcttaaaacagaaaatatgtcataatggatatgagattaagaaagcagattaactgagaaattccatttgatactcaatttttttctataaagtcttgttttaaatttactaaacagataagaaaaaaaatgtagtgtgttgagaattagagtattactaatttctccacttgctaaaacctgattgcttggtctatgtaatataccatatttctcctgaagtagcaatgacaaggggcaagataaagcatctgaagatgtctagcaggcatcttagaattcaaaattttaaacataaaattcttcagttgtaatggtgtccatatgttggggaaaaaagaaaagcaaagatgttttatggaaccagttgcaggtaagactgctaatctctaaggcaaacacactcagctggtagatcacattctactaaaagatcttgaa

SEQ ID NO: 727042 - DNA, 1136 bp, Homo sapiens
ttttcccagcatctataaaatggtcattcaggagagtgtagaaacagcttctctgatgagtggattgctcatcatattctgatagtagtcactggaattaatattggtaagaagcagttgagacctgtaagagcaaagagagacgatttatttcaagagggtgcccagatgacctgcaaacaagtttgctccaatgaggcccctgaatttggagaagcaatgaaggaaggagaaagggctaaaataacatagtcggttgttccaatattccaaacgggaaaaatggaagaaaccactgataacattttgaagtacatccttccrgaactttttaatgtatattaaagtatacattatatatttaatcactataccctaatccatcattctagggaaatgtacacgggatcactataaaagttctagattatctctctcagcccagccccaagtcttcccgaaggcagaaaagttgaccacttgtccgatagtaggttaacctctgctgcgggtgttaggatggcagtaagaactcaggcttgtctctaagcacccagttattgaagcatggagtacatggtacaattccttatctctgttagtggactcctgtatctatcagggttaaagagagaaaccaccagtcacgtgtatgtgcgatgtgtttcagggatctgagttacgcaaccgcgggagtggagggctgcaggaacatgctggaacgcacctcgggtctcatgttctccgcacctctgacctcggcagcgaggacgtcccgcagagggaggggacccttcacagagctgcacacgcctggccccggaaaggcgaaaggaggagccaaaagaggctctcggccgggcgcggtggctcatgcctgcagtctcagcactttgggaggcccaggcgggcggatcgcttgagccccggagttcggcagcagcctagccaacatggcgagacccacgtctctactaaaaatacaaaaaaatgtagccgggagtggtggcgcccgctggtggtcccagctaccgagcggctgaggcgagaggaggctgaggctgcagtgagcggtgatcacgccactgcactccagcctgagccacagagccagactaggtctcaagaaaaaaaca

SEQ ID NO: 727043 - DNA, 1136 bp, Homo sapiens
ttttcccagcatctataaaatggtcattcaggagagtgtagaaacagcttctctgatgagtggattgctcatcatattctgatagtagtcactggaattaatattggtaagaagcagttgagacctgtaagagcaaagagagacgatttatttcaagagggtgcccagatgacctgcaaacaagtttgctccaatgaggcccctgaatttggagaagcaatgaaggaaggagaaagggctaaaataacatagtcggttgttccaatattccaaacgggaaaaatggaagaaaccactgataacattttgaagtacatccttccagaactttttaatgtatattaaagtatacattatatatttaatcactataccctaatccatcattctagggaaatgtacacgggatcactataaaagttctagattatctctctcagcccagccccaagtcttcccgaaggcagaaaagttgaccacttgtccgatagtaggttaacctctgctgcgggtgttaggatggcagtaagaactcaggcttgtctctaagcacccagttattgaagcatggagtacatggtacaattccttatctctgttagtggactcctgtatctatcagggttaaagagagaaaccaccagtcacgtgtatgtgcgatgtgtttcagggatctgagttacgcaaccgcgggagtggagggctgcaggaacatgctggaacgcacctcgggtctcatgttctccgcrcctctgacctcggcagcgaggacgtcccgcagagggaggggacccttcacagagctgcacacgcctggccccggaaaggcgaaaggaggagccaaaagaggctctcggccgggcgcggtggctcatgcctgcagtctcagcactttgggaggcccaggcgggcggatcgcttgagccccggagttcggcagcagcctagccaacatggcgagacccacgtctctactaaaaatacaaaaaaatgtagccgggagtggtggcgcccgctggtggtcccagctaccgagcggctgaggcgagaggaggctgaggctgcagtgagcggtgatcacgccactgcactccagcctgagccacagagccagactaggtctcaagaaaaaaaca

SEQ ID NO: 727044 - DNA, 1814 bp, Homo sapiens
accatttccatcaacaaaacagatggctgccatgcttacctgagcaagaattccctggattgtgaaatagccagtgccaaatcttctgagatgaatgtcctcattcctacagaaggcggtgactttaatgaattcccagttcctgagcagttcaagaccctctggaatgggcagaagtttgtcgccacagtgacagaaattgctggataagcgaagtgccactgggttctttgccctcccttcacaccatgggataaatctgtatcaagacggttcttttctagatttcctctacctttctgctcttaaaactgcttctctgctctgaaaagcacagctacctgccttcactgaaatatacctcagatgtgcagtgggatagcaggtcagttgatcttctgcaggaaggtgcagcttttccaaatcagctcaactgccgacgaggactaatgatgcattttagctttgagctttgggggttattctaccaacaaacagtccactgggaagaaaacagtcccaggaattaacagatcagaacgttcacactggttaatctttttctgacaatgagcatgaaggtagcagaagctggtgtgtttccagatggttcttctaaccaaactaatttttcactattgacaagtgaggcaaggattgcactggaccaaaggctgaggcttggccatctagcattccacgcaaaattgtttcctataagcattccttttattcactattctatcctgggtctgcctcaaccatgagataggagagtctccggtactagctgctgtagcagtgcccttcatccagggcagttaaaggagtattcaaccctttctttctctgggatccctgcccagcaccttcctacagagatgaaaaaaaaaaaaaggaaaaacaacactccattccaaggagtctggtattcctgaatcctccttccctgctaggtgcctgtcacctgtcttcactgcctccttttccctgtcacactcaccagcttatggcttctgtccaagcacctgaacaggggaccaaaacctccactgcaagctgcttttaggtcttgatttatgtaagaatcttscacagcactgctaatgtaaatttcagttttttccctctaggacaaacacttaccaaaatacgcaacttttttggtgggaagagagattgtcctgtgatttctacccatttcctgatcctgtggaaataaatctttatgtacttaaagttatacagaaaatagaatgaaataaataccaaaaaaaaaaaaaagcaaagtgaaggtacctgggtcccagcttcagagattctgaattaattgccctaagtgtggtcctggcattcggattttttaaagcccccaagtggttctaatgtactgcttaggttgacatctgccaccagaaactgatacggaaagtatgagagacatattttatgtgcctttggatagctatttgtttccaaataatcctgtttttatttcatacaaataaaaagcatgttagaaaagtacatcacctagaacactaaaaacattatttcctcactatttgctgacatagaaaatgaaagtaggttgaatctgttttaacaaatgtattattttctaggaaaaacatatgtttctatttattaactccaggaattggaaagctaagggaggaaaatgtatctctctcattcaattagggcctttttttttaagaaaatttctcaggatggtgcattcatttaccaatttaccagtgattgaccaaaggcccactgcgtgctactcacttctggatgctaaggataga

SEQ ID NO: 727045 - DNA, 1814 bp, Homo sapiens
accatttccatcaacaaaacagatggctgccatgcttacctgagcaagaattccctggattgtgaaatagccagtgccaaatcttctgagatgaatgtcctcattcctacagaaggcggtgactttaatgaattcccagttcctgagcagttcaagaccctctggaatgggcagaagtttgtcgccacagtgacagaaattgctggataagcgaagtgccactgggttctttgccctcccttcacaccatgggataaatctgtatcaagacggttcttttctagatttcctctacctttctgctcttaaaactgcttctctgctctgaaaagcacagctacctgccttcactgaaatatacctcagatgtgcagtgggatagcaggtcagttgatcttctgcaggaaggtgcagcttttccaaatcagctcaactgccgacgaggactaatgatgcattttagctttgagctttgggggttattctaccaacaaacagtccactgggaagaaaacagtcccaggaattaacagatcagaacgttcacactggttaatctttttctgacaatgagcatgaaggtagcagaagctggtgtgtttccagatggttcttctaaccaaactaatttttcactattgacaagtgaggcaaggattgcactggaccaaaggctgaggcttggccatctagcattccacgcaaaattgtttcctataagcattccttttattcactattctatcctgggtctgcctcaaccatgagataggagagtctccggtactagctgctgtagcagtgcccttcatccagggcagttaaaggagtattcaaccctttctttctctgggatccctgcccagcaccttcctacagagatgaaaaaaaaaaaaaggaaaaacaacactccattccaaggagtctggtattcctgaatcctccttccctgctaggtgcctgtcacctgtcttcactgcctccttttccctgtcacactcaccagcttatggcttctgtccaagcacctgaacaggggaccaaaacctccactgcaagctgcttttaggtcttgatttatgtaagaatcttgcacagcactgctaatgtaaatttcagttttttccctctaggacaaacacttaccaaaataygcaacttttttggtgggaagagagattgtcctgtgatttctacccatttcctgatcctgtggaaataaatctttatgtacttaaagttatacagaaaatagaatgaaataaataccaaaaaaaaaaaaaagcaaagtgaaggtacctgggtcccagcttcagagattctgaattaattgccctaagtgtggtcctggcattcggattttttaaagcccccaagtggttctaatgtactgcttaggttgacatctgccaccagaaactgatacggaaagtatgagagacatattttatgtgcctttggatagctatttgtttccaaataatcctgtttttatttcatacaaataaaaagcatgttagaaaagtacatcacctagaacactaaaaacattatttcctcactatttgctgacatagaaaatgaaagtaggttgaatctgttttaacaaatgtattattttctaggaaaaacatatgtttctatttattaactccaggaattggaaagctaagggaggaaaatgtatctctctcattcaattagggcctttttttttaagaaaatttctcaggatggtgcattcatttaccaatttaccagtgattgaccaaaggcccactgcgtgctactcacttctggatgctaaggataga

SEQ ID NO: 727046 - DNA, 1852 bp, Homo sapiens
tgcattagaccatctcattctctcctcaatatcccttaactactcttttatatattttttctcctatccactctaaagtatctgtaatatattaaaatccatcttttcattcagtaactctctcttttaatattttgaatctatgctttaggatgtttctttcatttataatttactgtatcatttttaatctgtataaaatttgttgccctttttcatatctggttaattcactttgatgatatcttgttgcttaataacattgtgatatattatatatacttaatattctgtagcagataattctagtgaccatagtcttagcaggtacaattctaaattagtagctctttcaagctatcatttacagttccttgttttctcatgaattcttgacttttctatcatgagctcatattacttccaattttaataatacattttttgagacctcactacaaactatattattgcagagaggatttggtttttcttctcataagtgcttgttagaaacaaacaaaaaatgaccactttagtcatcaacttgtttatttcagaagtacaggatattaagttttctagttccaaatccttttaagagtggacttttcttagaaactgtaaggagatactttcattttttttcaccttcacagtgtgagacaaatatttctctaatcaaagcaaggaattttgtgtatttgttatttattttgtgctagatttgatggtggaaggtgaactatggtttaggaatctctgaatcaaattcacccttatattggccctaggcattgtctcctcctcctgtgcagaacacatcttaatgagagtaatgctctaggatatcaccagaaatcaggtgataagaagcccttagaacaattaccagttcctttacaaattcatttctccccacttacgtttttatcatgcttttgtcctcycatttcttccttattttagacctagtaatacattaaaaaatatgacttcttgtatttcatccagtttgttctcaggacttttgaatcacatgaattaagactcagtttaaaattataaatacagactgcctaggtttgaatcttagctcggccttttgccagctatcagaccctgaacaaattccataattagatgatcctcagtttcttcatctgtaattggattggggggggtggcaaataataatatctgcataatgatttgactgtgaaagatgcattagctaacttatttaaaatacttaggactcaatactgcgggaatacctgagaatattgtagaaagaaaaaggtcctgttattttttttcaataaaataaaataaccagatttcagaatcaaaattagaaaaagtactaattgaataaacataggtgtttaagaaatataaacaatcctctagggattaacgtaaggatgattttaaattggtccattatgtagaatcactgatttcagagaagcacaactgattataattggtaagtcggttgagagttaccatattgcaaaatatcgtaattctgccctttcatcataatgtaaggaaacaggatttttaactttaaagacatggaataaggctttccaatgttagagagttattaagatgcttatggcctttaaatgttggaatcagaactcttgtgtttctttttttcctcaaagtaattaaagcagttgctgtattttatgaaacatgaaaaaaccccaacttctgcagtacattatatttccaaaagaacacttttctaatgaagaaaatatattttgagaatttaatgcctgggtttggaaatcattatctcctctggaatgtcataacatgaaataagtgtatt

SEQ ID NO: 727047 - DNA, 2270 bp, Homo sapiens
tgttcccaatattgcctagtttaatgtgaaagaagaaaaataaactaggaggatagggacctattttctaatactattcactaactttcggacattacagacctctgatttttaatctgtaaaacaaatgggattgactagataatatcaaatgctttttatacattaaacatactattcgtctctgaggctagcaaaacatctcacacaggtgtaacattacttgggtgggaattttggaatgcattctttatggagtgtacatttttcttgctgataggtagaaagaaaatatttgggcgctagaaagacacctgtgctgttttgtatcttaattatttattatttacatgctgagtccctgtaagaagactgcacatccctgaccattgccatcatagggctttcttgtgggaggagtacaattctcttttctgttgttagacttggccacataaatttgtttggggtaagaaaatctgagtggaagtaatatatggcaattctgaagagaacctttaatagtgattatatattttagtaatttagttaaatttttccatatgctataaagagagcatgtccccaataccgttaatcccattgaaaagacatagtgcagaagcacagcaaacttgcagtttacatgtaatgatagagaaaaataaacctttgctttgaaagccactgagattacagttgacatcaattacaggttacttatcaattccagattattcaataaagaatctcaaaaactatatttatacatagcaacagctcagtaatatacatcttaaaggagattcagagttatatgtatctcatttcacaaaaatttataacactgtataatttaacctccccaaaatatacatacttgtatctggacataataatgtaattcagcctgacataataacatagaaataatattaacatttgatattaatgcatcagatgaaagtaagatgcctcagtggattgtagttaaattaataagactttcccatttggatttagtaacctttgaaaaaccacaaactagattgttaaaactggaaggttgaaatagacaaattaatttaaaaatttcctcacttcaataactccctacgattgtcccccaaaaattttgttagcattgttattgttagagattgataaaaattcattagtaatagattataataaaggaatagatatattgaatgttcaatcaatctcagaattcttttacaggctccaaaatgtactcagatgaaacatagacaataacattaagtacatctaatcaataattttaaatggtgcatatacttttggatactttttccagattgtttagaataatacatgatgaaaatactacttgtagatggtatctgaaaatgcagatcttattgtagttattatattgaaaatagtcactttaccggcttasgtataaagataagtataaaagaaatacggatatattactaagtttaaaaattaaaagtaaaacttttattttgaatagtttttctaagtggaaaaaaactgtttttagtacttaaaaattagtcaatattgtatgattttataagtataatataatctttcatccatatgctgttgccacatcaaagtatactcttcagatatatttccagcttttattcttgcatttagtacatgaaaaagacaaatgcctgaatcatttattaatatttcagtaggcagaataattcttcccctcaaagatgtttatgcatctattcctccgtttagactgaaaaaatttctgaggaaaagatcttacccttttaatgcccagaatcttgaatatgttaggttagatggcaaagggaaattaaagtcacagatggaattaaatttgctaatcaactgatgttaaggtacatagattatccttaattatccaggtgggcccatataattacaaggaaacttaaaagtagaagagggaatcaagagggagagccatggctgcatgggaaggatgtgtcctgatattgctgactttgaagatggaaggaagagggcaagcaacgaaaaaaaacgggaggcctctagaaccagaaaaagacaaggaaacagatcctaaagcctcctttcagaaaggaatgcggacatcttaatactagtccagtgagatccatgtcagacatctgatccacagaaccataagataaatttgtgttatgttaagccactaaatttactgtaatttatcccagcaacttcagtaaattaatgcaattatc

SEQ ID NO: 727048 - DNA, 1282 bp, Homo sapiens
ttaactcctgacctcaagttatccgcctgccttggcctcccaaagttctgggatcacaggcttgagccaccatgcccagcctaattttctgtatggttatcataattactgctatcattggaagcttcttttttggggggggtggtagtsgggggattccccactatattatatttgaccataggccaaactagttgtaacaattaagaacaaagtcccttattatgatttaggtgtctcttattctcagctccattttgtgactatgattccaaattttaatcctatttgactgtgtggagtaaaccagtggtagagatggaattgatggagctcagaaacatgtaacggaaaagagaatcggccattttctcctattctctctctttaagtccttgtcctttttcttccttagcctgtgaaatatacttacagctggtctgtttggtttttccaagactatgcatatcaatgataatataaataatgatcaacagtcattgaatacatacgtgcaggcattgctattatcttggtaatgatcttacaatgtcagtaaattattaggcatgttttacagatgaagaaactgaagtttagagaggtttgataacttgctcaagatcacacagggcactagtggcagagagttgagatttgtctagaatgcagagtctgattagtccagttctgaacttctgggttctcaaaggggagactgctcaaatgttttatgtgaaatgatgtgcaggtcacatgtaactaactcaacttcacattaataaacaagtcatagttttgccttagaatgtcaaagcttatccatgtctgggtttaaatatcagttgtaaagtcttcaacatcgagaggatgatgaatgtagtagtctctttgagcatcaatggaaaccatatttgcattattcatagtgaatactaagatgtgaaatgacagtattcctttaattacagtaatgcctctgaaacatcatattctaaaagaaaagattttaaaattactgatgaaatgtaaactccagataatcttcctcctcttagattttatttgatgtcaactacttgacaccttgcatgatgagtcagagtggatccattaaaatacgatttaattgcagacaagtcttctaaataggccttaatattgtctctcctccatttggccatgctattaaggctctgactgtggaagcagatagtacaggagaaaatattaaatatcagtttcgagttgaacatataaaacatgtgaaaaaaaccccatt

SEQ ID NO: 727049 - DNA, 1282 bp, Homo sapiens
ttaactcctgacctcaagttatccgcctgccttggcctcccaaagttctgggatcacaggcttgagccaccatgcccagcctaattttctgtatggttatcataattactgctatcattggaagcttcttttttggggggggtggtagtggggggattccccactatattatatttgaccataggccaaactagttgtaacaattaagaacaaagtcccttattatgatttaggtgtctcttattctcagctccattttgtgactatgattccaaattttaatcctatttgactgtgtggagtaaaccagtggtagagatggaattgatggagctcagaaacatgtaacggaaaagagaatcggccattttctcctattctctctctttaagtccttgtccyttttcttccttagcctgtgaaatatacttacagctggtctgtttggtttttccaagactatgcatatcaatgataatataaataatgatcaacagtcattgaatacatacgtgcaggcattgctattatcttggtaatgatcttacaatgtcagtaaattattaggcatgttttacagatgaagaaactgaagtttagagaggtttgataacttgctcaagatcacacagggcactagtggcagagagttgagatttgtctagaatgcagagtctgattagtccagttctgaacttctgggttctcaaaggggagactgctcaaatgttttatgtgaaatgatgtgcaggtcacatgtaactaactcaacttcacattaataaacaagtcatagttttgccttagaatgtcaaagcttatccatgtctgggtttaaatatcagttgtaaagtcttcaacatcgagaggatgatgaatgtagtagtctctttgagcatcaatggaaaccatatttgcattattcatagtgaatactaagatgtgaaatgacagtattcctttaattacagtaatgcctctgaaacatcatattctaaaagaaaagattttaaaattactgatgaaatgtaaactccagataatcttcctcctcttagattttatttgatgtcaactacttgacaccttgcatgatgagtcagagtggatccattaaaatacgatttaattgcagacaagtcttctaaataggccttaatattgtctctcctccatttggccatgctattaaggctctgactgtggaagcagatagtacaggagaaaatattaaatatcagtttcgagttgaacatataaaacatgtgaaaaaaaccccatt

SEQ ID NO: 727050 - DNA, 1612 bp, Homo sapiens
  misc_feature 716, 717, 718, 719, 720, 721, 722, 723, 724, 725, 726, 727,728, 729, 730, 731, 732, 733, 734, 735, 736, 737, 738, 739,740, 741, 742, 743, 744, 745, 746, 747, 748, 749, 750, 751,752, 753, 754, 755, 756, 757, 758, 759, 760, 761, 762: n = A,T,C or G
  misc_feature 763, 764, 765, 766, 767, 768, 769, 770, 771, 772, 773, 774,775, 776, 777, 778, 779, 780, 781, 782, 783, 784, 785, 786,787, 788, 789, 790, 791, 792, 793, 794, 795, 796, 797, 798,799, 800, 801, 802, 803, 804, 805, 806, 807, 808, 809: n = A,T,C or G
  misc_feature 810, 811, 812, 813, 814, 815: n = A,T,C or G
ggcagatagtgttttctttgtttcagagttagaacagtgtctggcacataagaaagtatgggctaattaggtattgaataaatagattaagttgggaccatcctgaacctracaagattgggacttggagtcaagcttgttttgagactcttggtattagcttgaaaagatcaacttggtacatggctaacacctttgacattgaggatttttgtggcttggtgatgtggtttacttagggctaagtatgaaccctatcagcttcagggttaggccattagggtcaagtttatcggtgccttcatttgtgaggatgatgattagtagccaggaggagtaatgaacaaatgctcactgcagatagccccttccccagtcaagagggttcacattcaataaagtggccttgggccgggcgcggtggctcacgcctgtaatcccagcactttgggaggccgaggcgggcggatcacgaggtcaggagatcgagaccatcccggctaaaacggtgaaaccccgtctctactaaaaatacaaaaaattagccgggcgtagtggcgggcgcctgtagtcccagctacttgggaggctgaggcaggagaatggcgtgaacccaggaggcggagcttgcagtgagccgagatcccgccactgcactccagcctgggcgacagagcgagactccgtctcaaaaaaaaaaaaaaaaaaaaaaaaannnnnnnnnnnnnnnnnnnnnnnnnnnnnnnnnnnnnnnnnnnnnnnnnnnnnnnnnnnnnnnnnnnnnnnnnnnnnnnnnnnnnnnnnnnnnnnnnnnnaaaaaagttacttttagtattattaacatagtatttctttgtaatattaagtcagcaaataacacatatttcatgtttgtcctaatggagaatgtcaggcacacccaaatgtatcactgctttctttgtagactttctgaatcactcagccaagcaaagctgttaacttactctaataccctacagaagcctttggttttaccacctttaaaatgcctgtacagccaatttcccattagcaaatataaaagattttttatattactattaagttgctttaacaaatttaattttaggtccctgaagtctcttacttggttccactgcctgtacaacaggtgttcgtatttttgtgcattgctttctttttacattaagaaagataaacaacaccaaagtgtaatagataatttggttgatataaagaaagtagaatgagggaagaaatgggcttaattcactttcaatgacaatgattagaatttcattttctacactacagacccaatggtaaaggagcaaaagctccagggactttaaaaatataattaaaataatataagcacagaatcatgaactttctggcatgcccatatttgtctgacttatttccatactgagcacaatatccacatccagccttccctcagctactgcatactattatctgtctactcgtaaatcccttcttattctctatcgtttctcacacattctcactttacttgttttccttaaacattagcttatttcttttatttttgcctttgggatcatttgtttaataaacatcttct

SEQ ID NO: 727051 - DNA, 1612 bp, Homo sapiens
  misc_feature 716, 717, 718, 719, 720, 721, 722, 723, 724, 725, 726, 727,728, 729, 730, 731, 732, 733, 734, 735, 736, 737, 738, 739,740, 741, 742, 743, 744, 745, 746, 747, 748, 749, 750, 751,752, 753, 754, 755, 756, 757, 758, 759, 760, 761, 762: n = A,T,C or G
  misc_feature 763, 764, 765, 766, 767, 768, 769, 770, 771, 772, 773, 774,775, 776, 777, 778, 779, 780, 781, 782, 783, 784, 785, 786,787, 788, 789, 790, 791, 792, 793, 794, 795, 796, 797, 798,799, 800, 801, 802, 803, 804, 805, 806, 807, 808, 809: n = A,T,C or G
  misc_feature 810, 811, 812, 813, 814, 815: n = A,T,C or G
ggcagatagtgttttctttgtttcagagttagaacagtgtctggcacataagaaagtatgggctaattaggtattgaataaatagattaagttgggaccatcctgaacctaacaagattgggacttggagtcaagcttgttttgagactcttggtattagcttgaaaagatcaacttggtacatggctaacacctttgacattgaggatttttgtggcttggtgatgtggtttacttagggctaagtatgaaccctatcagcttcagggttaggccattagggtcaagtttatcggtgccttcatttgtgaggatgatgattagtagccargaggagtaatgaacaaatgctcactgcagatagccccttccccagtcaagagggttcacattcaataaagtggccttgggccgggcgcggtggctcacgcctgtaatcccagcactttgggaggccgaggcgggcggatcacgaggtcaggagatcgagaccatcccggctaaaacggtgaaaccccgtctctactaaaaatacaaaaaattagccgggcgtagtggcgggcgcctgtagtcccagctacttgggaggctgaggcaggagaatggcgtgaacccaggaggcggagcttgcagtgagccgagatcccgccactgcactccagcctgggcgacagagcgagactccgtctcaaaaaaaaaaaaaaaaaaaaaaaaannnnnnnnnnnnnnnnnnnnnnnnnnnnnnnnnnnnnnnnnnnnnnnnnnnnnnnnnnnnnnnnnnnnnnnnnnnnnnnnnnnnnnnnnnnnnnnnnnnnaaaaaagttacttttagtattattaacatagtatttctttgtaatattaagtcagcaaataacacatatttcatgtttgtcctaatggagaatgtcaggcacacccaaatgtatcactgctttctttgtagactttctgaatcactcagccaagcaaagctgttaacttactctaataccctacagaagcctttggttttaccacctttaaaatgcctgtacagccaatttcccattagcaaatataaaagattttttatattactattaagttgctttaacaaatttaattttaggtccctgaagtctcttacttggttccactgcctgtacaacaggtgttcgtatttttgtgcattgctttctttttacattaagaaagataaacaacaccaaagtgtaatagataatttggttgatataaagaaagtagaatgagggaagaaatgggcttaattcactttcaatgacaatgattagaatttcattttctacactacagacccaatggtaaaggagcaaaagctccagggactttaaaaatataattaaaataatataagcacagaatcatgaactttctggcatgcccatatttgtctgacttatttccatactgagcacaatatccacatccagccttccctcagctactgcatactattatctgtctactcgtaaatcccttcttattctctatcgtttctcacacattctcactttacttgttttccttaaacattagcttatttcttttatttttgcctttgggatcatttgtttaataaacatcttct

SEQ ID NO: 727052 - DNA, 1612 bp, Homo sapiens
  misc_feature 716, 717, 718, 719, 720, 721, 722, 723, 724, 725, 726, 727,728, 729, 730, 731, 732, 733, 734, 735, 736, 737, 738, 739,740, 741, 742, 743, 744, 745, 746, 747, 748, 749, 750, 751,752, 753, 754, 755, 756, 757, 758, 759, 760, 761, 762: n = A,T,C or G
  misc_feature 763, 764, 765, 766, 767, 768, 769, 770, 771, 772, 773, 774,775, 776, 777, 778, 779, 780, 781, 782, 783, 784, 785, 786,787, 788, 789, 790, 791, 792, 793, 794, 795, 796, 797, 798,799, 800, 801, 802, 803, 804, 805, 806, 807, 808, 809: n = A,T,C or G
  misc_feature 810, 811, 812, 813, 814, 815: n = A,T,C or G
ggcagatagtgttttctttgtttcagagttagaacagtgtctggcacataagaaagtatgggctaattaggtattgaataaatagattaagttgggaccatcctgaacctaacaagattgggacttggagtcaagcttgttttgagactcttggtattagcttgaaaagatcaacttggtacatggctaacacctttgacattgaggatttttgtggcttggtgatgtggtttacttagggctaagtatgaaccctatcagcttcagggttaggccattagggtcaagtttatcggtgccttcatttgtgaggatgatgattagtagccaggaggagtaatgaacaaatgctcactgcagatagccccttccccagtcaagagggttcacattcaataaagtggccttgggccgggcgcggtggctcacgcctgtaatcccagcactttgggaggccgaggcgggcggatcacgaggtcaggagatcgagaccatcccggctaaaacggtgaaaccccgtctctactaaaaatacaaaaaattagccgggcgtagtggcgggcgcctgtagtcccagctacttgggaggctgaggcaggagaatggcgtgaacccrggaggcggagcttgcagtgagccgagatcccgccactgcactccagcctgggcgacagagcgagactccgtctcaaaaaaaaaaaaaaaaaaaaaaaaannnnnnnnnnnnnnnnnnnnnnnnnnnnnnnnnnnnnnnnnnnnnnnnnnnnnnnnnnnnnnnnnnnnnnnnnnnnnnnnnnnnnnnnnnnnnnnnnnnnaaaaaagttacttttagtattattaacatagtatttctttgtaatattaagtcagcaaataacacatatttcatgtttgtcctaatggagaatgtcaggcacacccaaatgtatcactgctttctttgtagactttctgaatcactcagccaagcaaagctgttaacttactctaataccctacagaagcctttggttttaccacctttaaaatgcctgtacagccaatttcccattagcaaatataaaagattttttatattactattaagttgctttaacaaatttaattttaggtccctgaagtctcttacttggttccactgcctgtacaacaggtgttcgtatttttgtgcattgctttctttttacattaagaaagataaacaacaccaaagtgtaatagataatttggttgatataaagaaagtagaatgagggaagaaatgggcttaattcactttcaatgacaatgattagaatttcattttctacactacagacccaatggtaaaggagcaaaagctccagggactttaaaaatataattaaaataatataagcacagaatcatgaactttctggcatgcccatatttgtctgacttatttccatactgagcacaatatccacatccagccttccctcagctactgcatactattatctgtctactcgtaaatcccttcttattctctatcgtttctcacacattctcactttacttgttttccttaaacattagcttatttcttttatttttgcctttgggatcatttgtttaataaacatcttct

SEQ ID NO: 727053 - DNA, 1673 bp, Homo sapiens
tgccaaatatgtttgtaaaggatcctactgactgcacagcttaagggcttagtcccacaggagtgtcctctactgcagataccagctacaatccccaggttgtgacctttgcttctgaccaactagctataaattgggtgcttcccatgacccactcttggggtttgattagtttgctcaaatggctcacagaactcagggaaacacgtttaccaatgtattccaaaggatattgtaaaggatacagatgaacagcctgatgaaagagattcacagggtgaggtatggggaaagcaatgaagggtttccacaccctccccaaatgcactaccctccagacacatccacatgttcttttttatggagggtttatcacgtgggtatgatcaattattagatctccagctcttccctcctcatggcttgttctttctggtgaccagccctgattcagaagcccaccatgtgttaccccattagaacaaaagatgctcctatcacccaggaaattccaaaggattaggagctttgtgccagagagctcctaaaactcttatcattttctgagtgataggagcgctaggtgcatattttattttaatatttgggaaatgattttggctgagttctcggattccccaaagtaagttggcaaaaccacgagtggtcaggcacactggaccaagggaattagcattttatgggacacctgagggatcatcctctctcccttacctctgtccctgactaaggatcaaaaagaaattgagagggtctgaattgtggagtggctggctcattataatctcaaactctgttctactatgaggccaggaaaacacctgtttcagataccaactctgtaccacacaaatatggattataccttcttccgaggggtctgtggttcataaataaaaactgatcattgtaggccatgaagaaattcaatttcaaagagtaagaatttatacagtactttctgagatggctagaaaataaataggatctggaattaataaagttaaactaaaacaaacaaaaatacaaaataattggaaaaaattttccttaaaaatcaggttaaaaaagggattaagggcacaatatcagagtattttgatttttagatagatgatgatgaatgaaaggaccttcagatggaaaaggggtgactgatagatctggatttgcattctagcactgtggcttgctaatttgacctcagaaaaggcttaaaacatctcagtttccttgtgtaggaagtgattgtaagagtgcttcccttatagggttgttctgtagaatagatgaatagttaatgtaaataatttgcacggtgcytggcccttactttatgcaatagaacaatactgaattaaattgatgatttaggaagcttttattctgaagagcaaagagagaataaaaaaatgaaagtgaatttggtatgactcactactacacaagcagtacctaaataggtaggtgctcaataaatatgtataaaataaataagagattattgaacttaaaccttaaggctgtagtatctctcatagcacttaatccattgcatcatcattatctgagcatgattttaggccctggggttacagcagtgtacaaaacagacaaaaatccctattctcaagttgtttaattctagtggg

SEQ ID NO: 727054 - DNA, 584 bp, Homo sapiens
tataagtcatttgtattttaattttgttaattccttctttatgttctatgtccagctttctattagattatcttttttttcctagaatttccaaactgccaaaaaagttccacgttttcaaataatattatttatcttttgctgtatatgaaatttggccaaatctgtcaaattttataacccttggggcttcatggctttcttagaaaataccaaacttttaacctaccaytgcatttagaataactttatccacaataaaataaacctaaaatatttacttatcggttaattagtaaaccaattgcattagtctccttaagctgctgtaacaaataccacacgctgggtggcttaagcaacaggcatttattttctcacagttctggaggctggaaagtccaagaccaagttggcagaagggttggtttctgatgaggtctctttccttggtttgcagaaggccatcttctcattgtatctttataagtcctgctctgtgtgtgtgtggagagagagagagatactgtgtctgtttttattgggacactaatcctaccagattacacatcgttatgacttca

SEQ ID NO: 727055 - DNA, 584 bp, Homo sapiens
tataagtcatttgtattttaattttgttaattccttctttatgttctatgtccagctttctattagattatcttttttttcctagaatttccaaactgccaaaaaagttccacgttttcaaataatattatttatcttttgctgtatatgaaatttggccaaatctgtcaaattttataacccttggggcttcatggctttcttagaaaataccaaacttttaacctaccactgcatttagaataactttatccacaataaaataaacctaaaatatttacttatcrgttaattagtaaaccaattgcattagtctccttaagctgctgtaacaaataccacacgctgggtggcttaagcaacaggcatttattttctcacagttctggaggctggaaagtccaagaccaagttggcagaagggttggtttctgatgaggtctctttccttggtttgcagaaggccatcttctcattgtatctttataagtcctgctctgtgtgtgtgtggagagagagagagatactgtgtctgtttttattgggacactaatcctaccagattacacatcgttatgacttca

SEQ ID NO: 727056 - DNA, 584 bp, Homo sapiens
tataagtcatttgtattttaattttgttaattccttctttatgttctatgtccagctttctattagattatcttttttttcctagaatttccaaactgccaaaaaagttccacgttttcaaataatattatttatcttttgctgtatatgaaatttggccaaatctgtcaaattttataacccttggggcttcatggctttcttagaaaataccaaacttttaacctaccactgcatttagaataactttatccacaataaaataaacctaaaatatttacttatcggttaattagtaaaccaattgcattagtctccttaagctgctgtaacaaataccacacrctgggtggcttaagcaacaggcatttattttctcacagttctggaggctggaaagtccaagaccaagttggcagaagggttggtttctgatgaggtctctttccttggtttgcagaaggccatcttctcattgtatctttataagtcctgctctgtgtgtgtgtggagagagagagagatactgtgtctgtttttattgggacactaatcctaccagattacacatcgttatgacttca

SEQ ID NO: 727057 - DNA, 1951 bp, Homo sapiens
agcaggctgcaaatcctcagctcctgtgcaacacgaacacctgtcaggggaccaggtttgcttctcatgatgaatttcctcttgcaggaatattgtgagttggagccggaagaggggtgcagttgtatggaggcatcaaatgaccttggtccccagctcacagatgacccagactaataccctagcaaggtcagggcacaatctcccccaaaagagaatatgattcattcagctctgaagtcaatgaggcagaaatggtctccctctctggatttactgtttctcctcttgtgttcccacctatcctgggtttcttcacttcccccctaagttgtaactgaagcattcaccgctggcaacactctgctcttaaatcacattgtcctcctcaatcaaattttaccttagaatcttaactttctctcctataaagctccaggtctacctgtagcaatgttgagctccccgaatgttgctctagaatcccagtccccatttctccctgcctaggagccacagtgacggctctgattttccttggatcctttagacaagacactgaacacagaacaacactgcccattacagtagccactggctaccctccaggagcacacctgtggtttaacaagttgggttgaccactcattgcagtgagggagcactcacaccatgagaaccatgggacatctccataaggggatgttagaacctattataggatgagggctttgattgggtgatttgggggagagtctaaggaggcagaggtttgccctagagtaggtatcatcagaaaatacggcaatactctgagtgggtatctcaatcaatctgatctagaggaaggccagactagagtgaggaaaaggctggaattgataaacatgtagtagttactcagtgaacaagagaaggggatgtctggggttttgttggttgcacagtgacctggtctgcatccatgtcctgagagattgtttatgtcaagcaggagaaaatgaggattagctgtgccagatcagtttgcaataacgtatagaccaagctctgaacatcaaatccagtttccaggcatcaaagttgcatttagtttcttttacacactgttctgttaaggaaaaaaaaaatcaaggtgtgtaagttatgaaactgtgtgattttggtgattctgcattcgagttaaatgatatttgcatttaaaattggcattgcacagtataaagacaaacactgaaatccatgctaatcattttaatttttaatttttctttacttcagtcaacatggcaaattttaaaatgccatgaatagttgagagagggagaggctgtgaaagaaaagaaaaagctttacattttagtcccacgaatgacctttttttctgctttttgaacaaggtgaccyccattttcattttgtgctgggtcctccacatgacgtagctgtttctgttccctgttctttatttcttttaacccttgacagtgccctaaacagatattcttaaatgtcctcattttcctttgtttttcagagatcactagctgctgcgtgttccctgtcagcaaatgtcataggggtcaattccctatggatgcttttagcgatgacacttaggttagacagggaggagtcaacccagcctcccattctcttcccggatcctggtccttcttttcactgcatagaagcaggaagagaacagaagctgtcacaaatcagtccccactgaggattcaaagcctcgtgtctggactcccatcggtaagacacattccccaggcattactgtgcttttctggttatttttgtttgtttgttttctttcatttttcctgggtcaaaaatattcaagtgtccattcactcttctgatcaatatcttatttgtaaataattttccagttcttatcgcaagttgccctaatgatcccctggcagaaatctca

SEQ ID NO: 727058 - DNA, 1522 bp, Homo sapiens
ggcaggcatggtggcacatgcctatagttccagctactcaggaggctgaggtgggaggattgcttgaacccgggaggcggaggtgcagtgagccaaggttgcaccacttcacactccaacctgggtgacagagtgagactctgtctcaaaaaaaaagtgttttttgtggtgctgtatatatgtgaagagtcacacattgggattttgtctctaaaaataaggtaacttataatactcaggagactacttctctgcagaagctttaagccaaggatactgggtttgtgtttgtgatgaaatgtacttttctctggaaaaggctgagtagatgggtacttcaaaataacatcaggcctacaggctactgaaaatgtacctactcatggattctgtgtaggcctttaatgctttgaatgtgaactgcatacttagtcattcatttggagccttctctcaagcttttgttctgaagtcaccaaactgagattgagtttcctaatgctgttttcttccttaaatgatccctttcagttgcttctaatagaagattgccttttccaaaatgacttactctcaaaaagggatacttcaagggagttgagttttgctacactacttgccctatagatttgctggtaccttaattcattcccttttttctttatgtttctttttttattctaataggatagtaacaataacatattatgtttatacattgttttatagcttataattttccatatacttgaaaattttaaaaatcacttttttcttttttgccttcaaataacatcttacttggaagttgatacactttggctgtgtccccacccaaatctcattttgatttgtagctcccataattcccatgtgttgtggaagggagccggtgggagataattgagtcacggggtggtttctcccatactgttctcatggtagataagatctgagggttttataagaggaaaccctttttgtgtggctttcattctctcttgtctgctgccatgtaaaatgtgccttttgctttccaccttgactgtgaggcctcccagtcatgtggaactgtgattccattaaaactcttattctttataaattacccagtctcaggtatgcctttttcagtagtgtgaaaacgaactaatacagaagcttaaaataaataaatggattaaagagctgagatgcgcaggttaacatgtgtgtatggtagagtgtgggaaggaaattatgtctcagtggactaagggctctgccacttctagctgcatayatcaaacttcaaagccactgacatatacttttaccactacacttcaaactacatagggcaggcatttttaattcaagtttttcagacaactgaatttaagcaatttgtttaaactcttacacgtgataagtaccagagccaagatgggggctgacacctcatcaaacaaactcaatactctttcacatacacgatagataattatagcctggacagaactgaatctcacatatgacatga

SEQ ID NO: 727059 - DNA, 1171 bp, Homo sapiens
tattgtaattcacatgtgcaccatctcctgagaatacctgcaatcccactttcatttactgaaacttggttacaccatctaaatcctgcttgtacagtgtttggattctcattagctggagaatcacatcctggttaggtttacttttcatagaatatatagcaggtgtttggtaaagtgcaaactgtgtcatgaaaatatgagagcccaaattccaaatataatggaatcataactcctgcaaaactgcatttcttaaatcaaggtatattaatgatattagattaattagacatagatacattctgggtggcagtgcagtggagggctctgatcaaagtttcttaccgtgtggcatattgttctattcttgaatgggtgtcatcatgaaacagttgaggagattgtgaggggctttaaaagaaaaaaacaaagcaataattttatgcccaaatattgataggtgttackattagaaatgttaggttacttaagtaatgaatctgccatgcaaacagaccactaggattgttacccggaacacagaagtattattttagaccaagagtttagtaagacccccatgctagtaccactgatcagaacacctctcctgcacgtgggctatgaatactcactcatagtgctctggccacatactgatgagtgtgataggactgcaaagaggggagagggagacaaaagtcacagaacaaacactttagagcaatttaagacaaaagcagtgggggtgtggggagattctcaattatcttccgctcatatatgtggttgccctgagagccaccatggggaaatcaaaagtaacagaagtcacagtgtattctagagaagtcgccgtgtattcaagagtctgcaggggccttttcacagatattacaggatatttgttcaaggatagcaaacacatctttaaacagtcatactggggaaaaaaccagaatgctcaaaaataactcaaaattatagaataatgtaaagataccattctataatataccaagggggatgcaatcatatttttgtttttcctagagaagaaacttggttagaaagatgaagttaaaaatgaaacactacattatatgttgatggcagaggtgcaataaaattagacttttctgttcttcatgtaattttaaatgtaaac

SEQ ID NO: 727060 - DNA, 1171 bp, Homo sapiens
tattgtaattcacatgtgcaccatctcctgagaatacctgcaatcccactttcatttactgaaacttggttacaccatctaaatcctgcttgtacagtgtttggattctcattagctggagaatcacatcctggttaggtttacttttcatagaatatatagcaggtgtttggtaaagtgcaaactgtgtcatgaaaatatgagagcccaaattccaaatataatggaatcataactcctgcaaaactgcatttcttaaatcaaggtatattaatgatattagattaattagacatagatacattctgggtggcagtgcagtggagggctctgatcaaagtttcttaccgtgtggcatattgttctattcttgaatgggtgtcatcatgaaacagttgaggagattgtgaggggctttaaaagaaaaaaacaaagcaataattttatgcccaaatattgataggtgttactattagaaatgttaggttacttaagtaatgaatctgccatgcaaacagaccactaggattgttacccggaacacagaagtattattttagaccaagagtttagtaagacccccatgctagtaccactgatcagaacacctctcctgcacgtgggctatgaatactcactcatagtgctctggccacatactgatgagtgtgataggactgcaaagaggggagagggagacaaaagtcacagaacaaacactttagagcaatttaagacaaaagcagtgggggtgtggggagattctcaattatcttccgctcatatatgtggttgccctgagagccaccatggggaaatcaaaagtaacagaagtcacagtgtattctagagaagtcgccgtgtattcaagagtctgcaggggycttttcacagatattacaggatatttgttcaaggatagcaaacacatctttaaacagtcatactggggaaaaaaccagaatgctcaaaaataactcaaaattatagaataatgtaaagataccattctataatataccaagggggatgcaatcatatttttgtttttcctagagaagaaacttggttagaaagatgaagttaaaaatgaaacactacattatatgttgatggcagaggtgcaataaaattagacttttctgttcttcatgtaattttaaatgtaaac

SEQ ID NO: 727061 - DNA, 851 bp, Homo sapiens
tatcaaatatttagtagcatctattctagactgcttagaatggcctgcagaaggcagggccagagtgccagctcagaaacaatattctgaaagaatagaattgagtgccagccttcacaatgcattgtgtatatttagtcagagattcctacatggtgttgtatacgcaatagaaagaatatatggggcccagaaccaaggaagagaagctgggtggcctcacttatcatcacacttgatgatccactgatctgcttccctccctgcaactatctgttctctaggcaggtcttggtccacaaagagaatgcatctttgccaggggacccagtataagttccatagacctgcaagctgccctcagggcatctgggacatcttctgttcaaggacaagcaggtaaaaagaagagtcattttggcaggagtaattgaccctggatagcagggggaggtaaggctgctgagccccagtagaggcatggaggattatatgaagaaactagaggattcacttgggagccacttggaaccacccaacacaatcgtaactgtgaatggatatgtgcagcagtgttaacctcctgggatgaagatgcaaaagatttaaaacaaacattacagcaagggctctgggtyctccctgactcccacttttgtcctttttctttttccttcttctctttatttttttaaagttaaaataaaattaatgttataaaggtggggtcttgctatgttgcccaagctggtctcaaagtcttgggctcaagcattcctcccactttggcctcccaaagtactaggattataggcatgagcaaccatgcccagcacccttcccacaacccc

SEQ ID NO: 727062 - DNA, 839 bp, Homo sapiens
cccagaacactctgagatatggatggaagcttcacaacttctaagtctacatgactctctaaaactctctgaaagaaaagttggttgctctgcacagtctgcaccacagaagaagctataaatacgtaaaaattcacagcttcagacgttttacactgtctcattgggatgcccaattttgtccagagcaatgggatcaatcacaatagcagcaagatggaggagctgccttcgaaactgccttaaatcctcattttatgccttcacgaatgtgtgataaattacttcattcccaactctctgtgggtctttcattcaaagtgtgcacctaatgtctccagacaggtggccttaatgctacccgttgacctcttccccatcaacttattaattggtactttctgaatttggttcagggaagcatgaaatatgtgtttaatgtgttgctgtatgaaaagaaatcactgcagcccaaggattaaagattaccagctgaggatgctgcacttccaagaaagagagagagaggggaatagaatcatatcttaaaagagcagagtgccaggcaaacacatggagctttctcaagcatttggaggmaatcatattaaagcctctgaacagttagtgtcatctttgaaagtggtgtcctgtcactgtaaatggcacaaaaggattgcatgccagacactctgcccaaactctgtttatgctatccaggacgaatttaaggttccttgctgttctttcaacctccccttcttgaagaggagaaaagggatgtaatggggtgaaggcaatgctgttgctatcagctacactcccgacaagatgaaaag

SEQ ID NO: 727063 - DNA, 2377 bp, Homo sapiens
  misc_feature 306, 343: n = A,T,C or G
gggctggctcatagctgcacaacaatcccacagcaaatggtaaacattatttgagaaaatacttcctgaaaacaaaataaaactgacaaaagacgtcaaactaatcaccttctttataaacactaaacacacacacgcacacatacacacaaacacagccataccacatacgtaacaatcatagcacaactgttggaaacccaaagacaaagaaaacttataaaagtggtattattactgtttagtttacttattacgttattattttacagctaaaaaacaaaaaatttgttccttttaaaaagnagatgtttttttggggagcagaatttgttctttgttntttgtattcatcactataccctcagtgtttatgacactactcttgggtaagacctccataaatgttttcacataactgaattaatcaactgaaacttttgtttctcatccctatttattaaaatatttttaaactcaaagttatacaatgggtatcaattttgtgaattttctaacaatattttcttctttgaagtttctgttctgatgacttttaatataaaccctcttaatttacaaatgagtttgagggtgttgagctaattgtttatagaaacgtctatgcttttgagccatgattctcaaatgtgagtatatattaaaaataacctgaaggaaatatttaaatttctatgtctaatattggtaatttgattgagtatgactaaggtggggccaaggaatatgaataatgattatataaaccatataattctgatgaagcagtcacttcatagggaaactcagctatcaatggctggctcagagctgcacaacaatctcacagcaaatggtaaatatttctactttttttgaactaataaaaatgtaatcttcacattgtgctttcaaatttgataaattaaaagagtaaaatactatttgttttctatagcatttcttattcttcacatcacgactacattaaaatttaccacacaatttctggttcactggcaatttttttttctttgctttgcctcatgtctatgaataagttgaattcaagttctgcatttagctataaactttttaatttacccccaaatagtggtgttttgagttggtaatcaaaatgcagtcacttactttccagagaataccaatgattggtgcattcaatctaaagatattcttgtcaagactgctttatctgcattaacacaattcatactctcatctcattttaagtagcagttcccaaagtccttctgctttattttgtaggctaaattcttctttatgtgaaacaatagcgattgtaatgaatcttgatgacaagtctgcagactattttctctgctgcaatagacaayttgtcataaagatatatacaaaatatgtgtcttctgggttttactttcaaaatgttttctatttgtactaaaatttaaaaaaaatactagaaaatatgtaactaaaaaaagtaattgtggctaaaaaccagaaatgtgtgccagacaatcttctatttctgtttttaaaattctcaacatgcaacttaattttttatcatactaatctaggaaaccaggaaactgtcaaaggtatgaaatttataagtaaaaagaaaagtatctttatttatctgaagaacattaacagtgcctgtgaactgacttacttcatactgactatggaaatgaaaatgctttctacaaagtaaggaaacaataaaataatttcttctaaaacacactaaggacacaccagaaatcatctcatcccaatatacctgattattgatgaagtgctatttaacttgaagagattattacaatgcatatctgtttgcctatgtgtttagagacacttgaatcataagtttgagatgacttcagctaaattactctgcagggttatgaaaagaccacaccatgaggttggaattcatttcaaaaagtatctcttgaggacataacatatatatacattgtgttcaatgttgacagtgatggggtggcgagggggtgacaacagaaaaagccaagatatgttgctgcaattaaaggctttatcaaagtaggagtaataaaaataattttaaaactgccttggccaaaatgattgttaatgagcatatatgcaagcaagcattgtaattcaagcaagcaatttttttttcatatttttccttcatttatctccaacacaaaagtaaaagagattgagcaagaataaagaatgtatttttagatttgtgatccagatgtaattcagatttggctcgcatcagcagagtttataaattaagtcagaaagagaaaatgagagagattgaaacagtctcaactctgaaagaaaagggaaagat

SEQ ID NO: 727064 - DNA, 2377 bp, Homo sapiens
  misc_feature 306, 343: n = A,T,C or G
gggctggctcatagctgcacaacaatcccacagcaaatggtaaacattatttgagaaaatacttcctgaaaacaaaataaaactgacaaaagacgtcaaactaatcaccttctttataaacactaaacacacacacgcacacatacacacaaacacagccataccacatacgtaacaatcatagcacaactgttggaaacccaaagacaaagaaaacttataaaagtggtattattactgtttagtttacttattacgttattattttacagctaaaaaacaaaaaatttgttccttttaaaaagnagatgtttttttggggagcagaatttgttctttgttntttgtattcatcactataccctcagtgtttatgacactactcttgggtaagacctccataaatgttttcacataactgaattaatcaactgaaacttttgtttctcatccctatttattaaaatatttttaaactcaaagttatacaatgggtatcaattttgtgaattttctaacaatattttcttctttgaagtttctgttctgatgacttttaatataaaccctcttaatttacaaatgagtttgagggtgttgagctaattgtttatagaaacgtctatgcttttgagccatgattctcaaatgtgagtatatattaaaaataacctgaaggaaatatttaaatttctatgtctaatattggtaatttgattgagtatgactaaggtggggccaaggaatatgaataatgattatataaaccatataattctgatgaagcagtcacttcatagggaaactcagctatcaatggctggctcagagctgcacaacaatctcacagcaaatggtaaatatttctactttttttgaactaataaaaatgtaatcttcacattgtgctttcaaatttgataaattaaaagagtaaaatactatttgttttctatagcatttcttattcttcacatcacgactacattaaaatttaccacacaatttctggttcactggcaatttttttttctttgctttgcctcatgtctatgaataagttgaattcaagttctgcatttagctataaactttttaatttacccccaaatagtggtgttttgagttggtaatcaaaatgcagtcacttactttccagagaataccaatgattggtgcattcaatctaaagatattcttgtcaagactgctttatctgcattaacacaattcatactctcatctcattttaagtagcagttcccaaagtccttctgctttattttgtaggctaaattcttctttatgtgaaacaatagcgattgtaatgaatcttgatgacaagtctgcagactattttctctgctgcaatagacaatttgtcataaagatatatacaaaatatgtgtcttctgggttttactttcaaaatgttttctatttgtactaaaatttaaaaaaaatactagaaaatatgtaactaaaaaaagtaattgtggctaaaaaccagaaatgtgtgccagacaatcttctatttctgtttttaaaattctcaacatgcaacttaattttttatcatactaatctaggaaaccaggaaactgtcaaaggtatgaaatttataagtaaaaagaaaagtatctttatttatctgaagaacattaayagtgcctgtgaactgacttacttcatactgactatggaaatgaaaatgctttctacaaagtaaggaaacaataaaataatttcttctaaaacacactaaggacacaccagaaatcatctcatcccaatatacctgattattgatgaagtgctatttaacttgaagagattattacaatgcatatctgtttgcctatgtgtttagagacacttgaatcataagtttgagatgacttcagctaaattactctgcagggttatgaaaagaccacaccatgaggttggaattcatttcaaaaagtatctcttgaggacataacatatatatacattgtgttcaatgttgacagtgatggggtggcgagggggtgacaacagaaaaagccaagatatgttgctgcaattaaaggctttatcaaagtaggagtaataaaaataattttaaaactgccttggccaaaatgattgttaatgagcatatatgcaagcaagcattgtaattcaagcaagcaatttttttttcatatttttccttcatttatctccaacacaaaagtaaaagagattgagcaagaataaagaatgtatttttagatttgtgatccagatgtaattcagatttggctcgcatcagcagagtttataaattaagtcagaaagagaaaatgagagagattgaaacagtctcaactctgaaagaaaagggaaagat

SEQ ID NO: 727065 - DNA, 2377 bp, Homo sapiens
  misc_feature 306, 343: n = A,T,C or G
gggctggctcatagctgcacaacaatcccacagcaaatggtaaacattatttgagaaaatacttcctgaaaacaaaataaaactgacaaaagacgtcaaactaatcaccttctttataaacactaaacacacacacgcacacatacacacaaacacagccataccacatacgtaacaatcatagcacaactgttggaaacccaaagacaaagaaaacttataaaagtggtattattactgtttagtttacttattacgttattattttacagctaaaaaacaaaaaatttgttccttttaaaaagnagatgtttttttggggagcagaatttgttctttgttntttgtattcatcactataccctcagtgtttatgacactactcttgggtaagacctccataaatgttttcacataactgaattaatcaactgaaacttttgtttctcatccctatttattaaaatatttttaaactcaaagttatacaatgggtatcaattttgtgaattttctaacaatattttcttctttgaagtttctgttctgatgacttttaatataaaccctcttaatttacaaatgagtttgagggtgttgagctaattgtttatagaaacgtctatgcttttgagccatgattctcaaatgtgagtatatattaaaaataacctgaaggaaatatttaaatttctatgtctaatattggtaatttgattgagtatgactaaggtggggccaaggaatatgaataatgattatataaaccatataattctgatgaagcagtcacttcatagggaaactcagctatcaatggctggctcagagctgcacaacaatctcacagcaaatggtaaatatttctactttttttgaactaataaaaatgtaatcttcacattgtgctttcaaatttgataaattaaaagagtaaaatactatttgttttctatagcatttcttattcttcacatcacgactacattaaaatttaccacacaatttctggttcactggcaatttttttttctttgctttgcctcatgtctatgaataagttgaattcaagttctgcatttagctataaactttttaatttacccccaaatagtggtgttttgagttggtaatcaaaatgcagtcacttactttccagagaataccaatgattggtgcattcaatctaaagatattcttgtcaagactgctttatctgcattaacacaattcatactctcatctcattttaagtagcagttcccaaagtccttctgctttattttgtaggctaaattcttctttatgtgaaacaatagcgattgtaatgaatcttgatgacaagtctgcagactattttctctgctgcaatagacaatttgtcataaagatatatacaaaatatgtgtcttctgggttttactttcaaaatgttttctatttgtactaaaatttaaaaaaaatactagaaaatatgtaactaaaaaaagtaattgtggctaaaaaccagaaatgtgtgccagacaatcttctatttctgtttttaaaattctcaacatgcaacttaattttttatcatactaatctaggaaaccaggaaactgtcaaaggtatgaaatttataagtaaaaagaaaagtatctttatttatctgaagaacattaacagtgcctgtgaactgacttacttcatactgactatggaaatgaaaatgctttctacaaagtaaggaaacaataaaataatttcttctaaaacacactaaggacacaccagaaatcatctcatcccratatacctgattattgatgaagtgctatttaacttgaagagattattacaatgcatatctgtttgcctatgtgtttagagacacttgaatcataagtttgagatgacttcagctaaattactctgcagggttatgaaaagaccacaccatgaggttggaattcatttcaaaaagtatctcttgaggacataacatatatatacattgtgttcaatgttgacagtgatggggtggcgagggggtgacaacagaaaaagccaagatatgttgctgcaattaaaggctttatcaaagtaggagtaataaaaataattttaaaactgccttggccaaaatgattgttaatgagcatatatgcaagcaagcattgtaattcaagcaagcaatttttttttcatatttttccttcatttatctccaacacaaaagtaaaagagattgagcaagaataaagaatgtatttttagatttgtgatccagatgtaattcagatttggctcgcatcagcagagtttataaattaagtcagaaagagaaaatgagagagattgaaacagtctcaactctgaaagaaaagggaaagat

SEQ ID NO: 727066 - DNA, 1151 bp, Homo sapiens
cccggctaattttttgtatttttagtagagacgggttttcaccatgttggccaggctggtcttgaactcctgacctcaagtgatcagcctgccatggcctcccaaagtgctgagattacaggaatragccaccgtgcctggcctgctttaagtatttacctaggcttggcactgtggctcacacctgcaatcccagcacttttggaggccaagtgggaggatcactcgaggccaggagttccagtctgggcaacagagcaataccccatctgaaaaagaagttcagctagcagaaaaaataaactttaatctaattttcccataatttattttatgaagttataagaggagaatttttaatggcttgcccaaatttcagttgtatgtctttgctttataaaatgacaactgaattcacacgttaagaaagaaatgtattattcgtcatgaaagaaggtgtgactctacaatatcagacagttatttgagaacgctcacacctatttatcgaaaaatctaccctattgtgttgtctatgctggagaacttctttcttttaaactgtgcttttaattcacttctaaggaaccaggcatatattcttcaggacgtggttggtgtaaacaaaataatgtgtgtataatgcctattgttatggttgacacatgcatttaaaatgcatcttgaattaatatctatttgtatggtgtaaagctgtgttctttggatatctgactttagtagcctcaggggctaacttttttatttcgagaaaggtacctgaatttagccaaccatgatatttccattcaacagtcaatcacatttgttgctttcctagaaaaacagtacaatttgttcagaactatttatataaaaatgctcattgtcaagcattttattccacccatgtctacaagtattttgacaataatttataaaattgatatatagagatagaaaagaagaatatctctcttttcaaacccctaattaaatttaataaagcattttctcttcttaggattcctgtgctgacaatgaatatattgagcctgcttcagacgatttcactatcccagcataaataatcaaaatctgaagcactagaatacagaagccttagaagctaaattcaaaattttgagaga

SEQ ID NO: 727067 - DNA, 1151 bp, Homo sapiens
cccggctaattttttgtatttttagtagagacgggttttcaccatgttggccaggctggtcttgaactcctgacctcaagtgatcagcctgccatggcctcccaaagtgctgagattacaggaatgagccaccgtgcctggcctgctttaagtatttacctaggcttggcactgtggctcacacctgcaatcccagcacttttggaggccaagtgggaggatcactcraggccaggagttccagtctgggcaacagagcaataccccatctgaaaaagaagttcagctagcagaaaaaataaactttaatctaattttcccataatttattttatgaagttataagaggagaatttttaatggcttgcccaaatttcagttgtatgtctttgctttataaaatgacaactgaattcacacgttaagaaagaaatgtattattcgtcatgaaagaaggtgtgactctacaatatcagacagttatttgagaacgctcacacctatttatcgaaaaatctaccctattgtgttgtctatgctggagaacttctttcttttaaactgtgcttttaattcacttctaaggaaccaggcatatattcttcaggacgtggttggtgtaaacaaaataatgtgtgtataatgcctattgttatggttgacacatgcatttaaaatgcatcttgaattaatatctatttgtatggtgtaaagctgtgttctttggatatctgactttagtagcctcaggggctaacttttttatttcgagaaaggtacctgaatttagccaaccatgatatttccattcaacagtcaatcacatttgttgctttcctagaaaaacagtacaatttgttcagaactatttatataaaaatgctcattgtcaagcattttattccacccatgtctacaagtattttgacaataatttataaaattgatatatagagatagaaaagaagaatatctctcttttcaaacccctaattaaatttaataaagcattttctcttcttaggattcctgtgctgacaatgaatatattgagcctgcttcagacgatttcactatcccagcataaataatcaaaatctgaagcactagaatacagaagccttagaagctaaattcaaaattttgagaga

SEQ ID NO: 727068 - DNA, 1151 bp, Homo sapiens
cccggctaattttttgtatttttagtagagacgggttttcaccatgttggccaggctggtcttgaactcctgacctcaagtgatcagcctgccatggcctcccaaagtgctgagattacaggaatgagccaccgtgcctggcctgctttaagtatttacctaggcttggcactgtggctcacacctgcaatcccagcacttttggaggccaagtgggaggatcactcgaggccaggagttccagtctgggcaacagagcaataccccatctgaaaaagaagttcagctagcagaaaaaataaactttaatctaattttcccataatttattttatgaagttataagaggagaatttttaatggcttgcccaaatttcagttgtatgtctttgctttataaaatgacaactgaattcacacgttaagaaagaaatgtattattcgtcatgaaagaaggtgtgactctacaatatcagacagttatttgagaacgctcacacctatttatcgaaaaatctaccctattgtgttgtctatgctggagaacttctttcttttaaactgtgcttttaattcacttctaaggaaccaggcatatattcttcaggacgtggttggtgtaaacaaaataatgtgtgtataatgcctattgttatggttgacacatgcatttaaaatgcatcttgaattaatatctatttgtatggtgtaaagctgtgttctttggatatctgactttagtagcctcaggggctaacttttttatttcgagaaaggtacctgaatttagccaaccatgatatttccattcaacagtcaatcacatttgttgctttcctagaaaaacagtacaatttgttcagaaytatttatataaaaatgctcattgtcaagcattttattccacccatgtctacaagtattttgacaataatttataaaattgatatatagagatagaaaagaagaatatctctcttttcaaacccctaattaaatttaataaagcattttctcttcttaggattcctgtgctgacaatgaatatattgagcctgcttcagacgatttcactatcccagcataaataatcaaaatctgaagcactagaatacagaagccttagaagctaaattcaaaattttgagaga

SEQ ID NO: 727069 - DNA, 1151 bp, Homo sapiens
cccggctaattttttgtatttttagtagagacgggttttcaccatgttggccaggctggtcttgaactcctgacctcaagtgatcagcctgccatggcctcccaaagtgctgagattacaggaatgagccaccgtgcctggcctgctttaagtatttacctaggcttggcactgtggctcacacctgcaatcccagcacttttggaggccaagtgggaggatcactcgaggccaggagttccagtctgggcaacagagcaataccccatctgaaaaagaagttcagctagcagaaaaaataaactttaatctaattttcccataatttattttatgaagttataagaggagaatttttaatggcttgcccaaatttcagttgtatgtctttgctttataaaatgacaactgaattcacacgttaagaaagaaatgtattattcgtcatgaaagaaggtgtgactctacaatatcagacagttatttgagaacgctcacacctatttatcgaaaaatctaccctattgtgttgtctatgctggagaacttctttcttttaaactgtgcttttaattcacttctaaggaaccaggcatatattcttcaggacgtggttggtgtaaacaaaataatgtgtgtataatgcctattgttatggttgacacatgcatttaaaatgcatcttgaattaatatctatttgtatggtgtaaagctgtgttctttggatatctgactttagtagcctcaggggctaacttttttatttcgagaaaggtacctgaatttagccaaccatgatatttccattcaacagtcaatcacatttgttgctttcctagaaaaacagtacaatttgttcagaactatttatataaaaatgctyattgtcaagcattttattccacccatgtctacaagtattttgacaataatttataaaattgatatatagagatagaaaagaagaatatctctcttttcaaacccctaattaaatttaataaagcattttctcttcttaggattcctgtgctgacaatgaatatattgagcctgcttcagacgatttcactatcccagcataaataatcaaaatctgaagcactagaatacagaagccttagaagctaaattcaaaattttgagaga

SEQ ID NO: 727070 - DNA, 504 bp, Homo sapiens
gaattgttaagcaaaaagaaaccagaacttaaagatttggaaaattctcagcctattcatactgcaaaaaaaaaagagagtgagagagagaaagaatatttggaaaggaacactgaagtgttgtcaagcaattgtttgaaatatatatatatatatatgtgtgtgtgtgtatatatatatgtgtgtgtgtgtgtgtrtatatatatatatataatatatatatatatataatatatatatatatataatatatatatatatataatatatatatatatatgaactgtagatttaatgaatcacctcaacaaaacctaggaataataatgggattatagcagcagaaatcagcagaaatagttttagttaagactaaagggaacagagaaaattggacaaaatgaaggaagatcttcagacttcttagactgtgcaggactggactaaaaaactatttgtctataagcacatgttattctttatgacaagagaaggacctgaaca

SEQ ID NO: 727071 - DNA, 844 bp, Homo sapiens
taagtttcaaaacacttaaaaatagcattatgtgagttaataaatgaatttttaattattttgctattcatttatttatcactattattttccttcatgtgaaaagttgttcagtgataatcgttggttcatgctctagccaatttcctttagttattttattttattttattttgtttattttattttcttatgttccttggtacatgtgcaggatgtgcaggtttgttacataggtaaatgkgtgccattgtggtttgctgtacttattgacccatcatctagatattaagcccagtgtgcattagctgttttccctaatgctctcccacctcatgccctcccccaacaggccccagtgtatgcttttccccttctgtgtccatgtgttctcatcgttcaggccccacttattaaaaacaggctgcattaggttttctgttcctgtgttagtttgctgaggataatggctgtcagcttgatccatgttcctgcagagaaaatgatctcattcctttttatggctgcacagtattccatagtgtatatgttccacattttctttatccagtctatcattgatgggcatttgggttgatttcatggctttgttattgtgactagtttctctttttaagcttgttgtaatttagatgtagcagacagcaatgtcttcaatacttctatcagtacttgatatggtttggctgtgtccccattcaaatctaaacttgaattgtatctcccagaatttccatgtgtagtgggagggactcaggagggacccatggggaggtaattgaatcactgggctggtctttcccatgctattctagtgatagcg

SEQ ID NO: 727072 - DNA, 2499 bp, Homo sapiens
tgttaaaaaaaactaagacacaagaatcttaacattaaaacagaaagtagctcttcaagagtctaagcattacaaaattacatacactatttaaatctatcaagaattcatccaaattggtaccacatggtcgtgctatacaatccaaaacaaatgtattatttttaaaaggtttagtgaaatgtttattttaaagtttgattacatcagctataggagtaaagtgctaacttacaaagcttacagtttgtgacaccagtgataatgcatgcatactgctattttcaccaccaactggtgaaacaatgaaaagacagtttacttttactgagataccgaaatgagtcaaagactatattagccaatataattcctttgtttttagtgtgaaatactatggtagggcctaattaaaaataaaaacaatatggagaacagtaaaacagtcatcaagtgactctaagcttgtatttactctaagcttgtattaagcttgtattgactctactgcctcttgtattttttttttttaatttctattcagggatccaagaattttagtaattattaactgagcagcagattgccactggactgttttaagatttactatcaccagtcttacatagatacataaattttaaaatctcacccatttcttcttataagactgttagaagatttaacttgccacagactggtcatgctttgttattcttggacccctgctttttcccaaaccactacattcacctttttgctataccaaactggaggtggtaattcttagttgagtcattttacctaggggaccacggtacagcgataagtcactcaattactaccttatgattgacagttcacactggaatcaaaggtgaattcatgggagtagaggtgagatatcgttaggcaagtctacaaagagagatagatgggcatttattcatcacgctgaagtgaaactactgcacaatattattacatcaatagcatatatttacttttgtaagttacacgtaatgcatctctgataagataaatcaagagggctccggggaggttagtttacatttcagcagtagtttcgtgaataatgctaaattaagaaatatataaacctcaccgacatgttttttctcaccttcttgtaaggagcctcaagcattgcttcaatatcaatatcgtctgccattttctctaaacgcctaggaagagaacaagacaatttcttgagtaaacatttctcttacaatgtgaaacaagtttcactcttgttgcctatatcgtctaacattttctctaaacgcctaggaaaagaacaagacgattccgtgagtaaacatttttctttttttttttttttttttttgagacggagtttcgctctagttgcccaggctgaagtgcagtagcgcgatctcggctcactgcaagctccgcctcccaggttccagcgatcctaccacctcacctcccgaatagctgggatcacaggcgcctgccaccacgcccggctaatttttgtatttttggtagagacggggtttcaccatgttgatgaggttggtctcgaactcctaacctcaagtgatccgcctgcctctgcctcccaaactgctgggattacaggcgtgagccaccgcgcccggcctggtaaacgtttttcaaatcgactgaatttttcttctcagccgacacactcgaaaacttaagaaaaacctccaaaagccctacaattaatgactaaagtgacaygcactttaaccaggtttggcttacgtaagtaaatccaaaacgcctcttacacgaaacacacgaaaatgaagacttcaatatccaatatttaaaactctgctgtcaactccaaaaacagaaactgggagacccgaacgagagcgcctctttccgggcaaaaacccgcgctgccattttaggggcaaagagaaactccctccattgggaggggttatgagccaaggcagcgttcaactggcgccatgttgggaggtcgcggccggcccaggcctcgaaggagacaggtcaccattctaccgcggcctctcgggggtccctaccgccccaagaatccagactatacccgactggaaaataagggcgcggtcactgaaacagggccgatttctcgaaaaccaccccccaccccggtcgctaaagacctccaaaagcgcccctcagcccaaaatggagccaaacctcgagaaagctgagataatacgcgggtccgcaacgccccgtacctgttccggccttcgggcgcctgtggtgctcgtgttcgggaagagattgctgctgctgctgctgctgctgccgccgccgccgcttctgttgctactgttaagcccctaggcccaggccgcggaaccgcccagcccgaatatcgggttccaaggacggctaggcccgagagaatctaaaaaaaacaatggaattagagaagcccacgcgggagagcaggacggcggcttcggcagctca

SEQ ID NO: 727073 - DNA, 403 bp, Homo sapiens
ccttcatgaaagagcttgagggagctgattcccctcctgtcccttctgccatgtgagatgcagcacttgtcccctcaggaggatgcagcagccagaagccgtcctggaagcagagagcagccctcaccacacacggagcctgccacaccttgacctggccttcccagcctccagtactgtgattaacaaatttctgttttttcataaattacccagtctcagtattttgttataccaacacaaacagactaagacaccccctcattttctgaatggaaaggtattatatatgaatgaccrtttcagagtctcgatctccataaaaaggtgcacaagtgtcttttttactctctacttctaagtaagtaaaagggaaaactcatataattaattaggattgaaa

SEQ ID NO: 727074 - DNA, 1859 bp, Homo sapiens
ctctcagccctctctttctctctgtcttatttcttctccattcttttctcttttctgtttcagaattcctgagggagggtgtataggaggttgctacttaccaagaatcagatgaaacagccaaagccctggtgctttaggatcagcaactgtgtgagcatctgtgcttgccctttatgtatgtacctgttaccaaacacaccatatcctccagaggatctgaccttcccgaagaactgcccaggactttctcttcagcctccgtctctcccacttctgtttacgtttctaggtcctatgtcccgggttctcctaatgtcatactgggctaatgacagccataggtgggtttagtgccatgtgtccaaaccagtgactttcagttgatttttgacttcaggaatgactgtttaaaataaaattaagggagaagttccgagacaagggttcaagtaccactgagtctgctagccctcacttttgacaacctccaagaaaaaatctatgtaattcttaacagctctgtggtgaataatttaaaaaacaattaatgactatagaatgttataaactgctatgtttaacaacaaagaaggcatgtcctttttcatgaaaaaatagttatgatgtttgatacacatttgtataccttgaaaattttattttaaaaataaatgtatgtgatttaggggaaaactagttttagttttaccataaccataacaatgactgttgtcattattttgttttaaaaatgtttattgagtcttttatagaattttatacagaaatcattttargtgaaaaactactttctttcattgctaaaaacaaatatcacattttcatggaaaatgttcagaagagataacaaaaaagagaaacaagtacaattacaataaatttcagtttcacgatataagtctgtgctcttatttttctctacatactttattaactgggaaaataattttatagcaacaaaaagattttaagtattcatattactttatattattttttgtaatatatttcttatctaaatgcatatgtagtttattaaaattgtagtcataatgcccacgaaattttttttctgtatttttacttaatctgttatacaattttaaaattatttttaataactgcacaaaatattattgaagcaatatgctgtagttaattattcccatatgttggacatttaattttctcaaatttgtcatcactattttgtaatgaactttaaaaaatacatttttctgtattttggattacctccttagattctcagaagtggtactactgtgttaaagactctaatatattttattgtctggacataaactgccaatttgctacccattaatattgtggcaattcatgatgacagctaccctgtagaacaaatcagttttatgaaaaactttcaagtacttattattgttatttccaattttagctaacatagtatggctataatagcgttacatttctggtttttaaaatgtgttttaatacatctaaaattagatatttagtcaactgttcacctactattagtatttcttctcttgttgcatttctgtttaccatatcaattaatatggccttttagtattaaatttatatttcttaatgattccttaatgtcctgtgtaatcttaatagtttattttcacttttatttcagttttatatcaaatttatttacttaatacttattaaaattgtatgtgcaaggtatcatgctagttactttgaataacctggggaactaaatagatgtggctcctccctttccactgtaaagtgggagacaaaaactaaatagccaaacaaataaattgttgtatttt

SEQ ID NO: 727075 - DNA, 1859 bp, Homo sapiens
ctctcagccctctctttctctctgtcttatttcttctccattcttttctcttttctgtttcagaattcctgagggagggtgtataggaggttgctacttaccaagaatcagatgaaacagccaaagccctggtgctttaggatcagcaactgtgtgagcatctgtgcttgccctttatgtatgtacctgttaccaaacacaccatatcctccagaggatctgaccttcccgaagaactgcccaggactttctcttcagcctccgtctctcccacttctgtttacgtttctaggtcctatgtcccgggttctcctaatgtcatactgggctaatgacagccataggtgggtttagtgccatgtgtccaaaccagtgactttcagttgatttttgacttcaggaatgactgtttaaaataaaattaagggagaagttccgagacaagggttcaagtaccactgagtctgctagccctcacttttgacaacctccaagaaaaaatctatgtaattcttaacagctctgtggtgaataatttaaaaaacaattaatgactatagaatgttataaactgctatgtttaacaacaaagaaggcatgtcctttttcatgaaaaaatagttatgatgtttgatacacatttgtataccttgaaaattttattttaaaaataaatgtatgtgatttaggggaaaactagttttagttttaccataaccataacaatgactgttgtcattattttgttttaaaaatgtttattgagtcttttatagaattttatacagaaatcattttaggtgaaaaactactttctttcattgctaaaaacaaatatcacattttcatggaaaatgttcagaagagataacaaaaaagagaaacaagtacaattacaataaatttcagtttcacgatataagtctgtgctcttatttttctctacatactttattaactgggaaaataattttatagcaacaaaaagattttaagtattcatattactttatattattttttgtaatatatttcttatctaaatgcatatgtagtttattaaaattgtagtcataatgcccacgaaattttttttctgtatttttacttaatctgttatacaattttaaaattatttttaataactgcacaaaatattattgaagcaatatgctgtagttaattattcccatatgttggacatttaattttctcaaatttgtcatcactattttgtaatgaactttaaaaaatacatttttctgtattttggattacctccttagattctcagaagtggtactactgtgttaaagactctaatatattttattgtctggacataaactgccaatttgctacccattaatattgtggcaattcatgatgacagctaccctgtagaacaaatcagtttyatgaaaaactttcaagtacttattattgttatttccaattttagctaacatagtatggctataatagcgttacatttctggtttttaaaatgtgttttaatacatctaaaattagatatttagtcaactgttcacctactattagtatttcttctcttgttgcatttctgtttaccatatcaattaatatggccttttagtattaaatttatatttcttaatgattccttaatgtcctgtgtaatcttaatagtttattttcacttttatttcagttttatatcaaatttatttacttaatacttattaaaattgtatgtgcaaggtatcatgctagttactttgaataacctggggaactaaatagatgtggctcctccctttccactgtaaagtgggagacaaaaactaaatagccaaacaaataaattgttgtatttt

SEQ ID NO: 727076 - DNA, 615 bp, Homo sapiens
tcatgcagtaagccattccaagtttctgccaaggtgggacagccaactgatatgattagaaatttagcaattgccagatatgttaagactctaggcactgtactgacttctgctcattagtttgcttccagcaggaccactcatccatgtatgtggccctgcatccttttcaactgggagagcaggtcctcctgaagacctggaaacacacacacacacacacacacacacacaccaaaaataggacctgaacatcagctcactgccggatcaaatggtttcatgccaaaatttccaattcacacccccatccagcaggaagtagccaaactggtatcgatgccccactttccataaaaatggaatgaaaaattgacaatgggaaatttgtaacagaaactacaaccttrtcttgaaaaacaattattatcctttgtttttcttttattaccctcttcttcttctgctgggcttttaataatgcttaatttacgtactttgcttaaagaactccaggaactggccttgagacactaagcatagaatcaaggttgtgaaacattccaccctgggaagaatgctgagcagttaatctgtattccagttgcagtcaag

SEQ ID NO: 727077 - DNA, 678 bp, Homo sapiens
taagactggcttgatggatgaggggcaaatgtcaccatgcacatcactctgaattcccttcattgcagtagcaaaagcatgtttcccagtttggacatagaattaaacagcccatactcttccagtgcccaaagtttttgaatgaattgattcttccttataactgtcatttagacatgcctcctctcctgaccttctcctattctcattgctttggtttgccccaaagaaaaggaagaaaagaaaagcagataaagctctcctttccccattacaactcccaagtaacacttttctcatttcttcctatcaaggcagaataggtgctgcccaccctcgtaccaagagatttcttacggtcacacaaagtaaatcatcattgccaactggcactgaacctaatgttcctcaatgatcagacctgagctctatccctatgtttcttccagaaaagttataaccattctcaaagttttcactggagagcatttaagatttaaggaaatatgycatcattctatttccttccaaaattatattatgcaagatataagcattatgcatcaatttgcattccacttctccccagtgtgagagtctggttaatacaattaaactggatcagtacctactaagcaactagatctctggaaagtctgaatgctgaagatggatgcc

SEQ ID NO: 727078 - DNA, 1460 bp, Homo sapiens
cagattggcaaacatcagaaaagtgaacaacctcctccactggcattcttttttttttttttttgagatggagtttcactcttgttgcccaggctagagtgcagtggtacgatctcagctcactgtaacctccaccttccagtttcaagcgattcttctgactcagcctccygagtagctgggattacaggctcctgccaccacacccgactaatttttgtattttcagtagagatggggtttcaccatgttggccaggcttgtcttaaactcctgacctcatgatctgcccgccttggcctcgggagtataatttgctgtatggagggcaatttgacagtatctgtcagattttataatgtacagagccttgaattcagtaattctacttttaggaacttatcccacagatattccagacatgctcaaagatgtaggtacaaagattttattgcagtattatttggaagagtaaaaaaccagtccatgaggaagactagttcaataagttaataatctagaatatatcgatataatggaatactatcaaagaacaattttcacaatgtattgttaagagggggaaggtacagaaacatatgtaaggagtttcatttgtttaatatataattagtgacacaggttgcatctggggaggaaaattagggaacaattttttgttgtacacctttatctttcattgtatctctttcaaaaccttttgtaccatttgtgtgtattgtgtattttaaaaattaatttaaatttcaacaaccgttatagtgatgcaaaaaaccctatagaaataacagtttacattcaattttgctatatgtcaggtactgatttttcaaccacaaccttgtaagatacgtgctattatcatccccacttcacagggggaaacctgtggtagagagaggctgaataacttgtacaaggattcatacctaatcagtagcagagctcagatttgaacccaggcagcctgtttccagagaccatactttacccaccattctatactgctctgaggtcacagacctccatgatgaactcttaattgagtgcagtcaataggaaactcagataaactcagatgtacaagaaatatctcacttcttcatttgcttttcacctacttaactctgactctgagtccccatccagcttgattggcagaaattgtaatctcagtcattatttggactcgccactgcaaggattttgcaaggtcctggaatcttacatggcaccaaagcctggcagagatcctgccagttgtcaatacatactggttaccactgacatgtccattgcagtccagtactctcctgcggccatgtgtagtcctactcaccctcacccatagactgaaaacttccttatattcttgggaaattttctcctttccttttcctgctgccttcaaagacattgataatactatcttcattgag

SEQ ID NO: 727079 - DNA, 1460 bp, Homo sapiens
cagattggcaaacatcagaaaagtgaacaacctcctccactggcattcttttttttttttttttgagatggagtttcactcttgttgcccaggctagagtgcagtggtacgatctcagctcactgtaacctccaccttccagtttcaagcgattcttctgactcagcctcccgagtagctgggattacaggctcctgccaccacacccgactaatttttgtattttcagtagagatggggtttcaccatgttggccaggcttgtcttaaactcctgacctcatgatcygcccgccttggcctcgggagtataatttgctgtatggagggcaatttgacagtatctgtcagattttataatgtacagagccttgaattcagtaattctacttttaggaacttatcccacagatattccagacatgctcaaagatgtaggtacaaagattttattgcagtattatttggaagagtaaaaaaccagtccatgaggaagactagttcaataagttaataatctagaatatatcgatataatggaatactatcaaagaacaattttcacaatgtattgttaagagggggaaggtacagaaacatatgtaaggagtttcatttgtttaatatataattagtgacacaggttgcatctggggaggaaaattagggaacaattttttgttgtacacctttatctttcattgtatctctttcaaaaccttttgtaccatttgtgtgtattgtgtattttaaaaattaatttaaatttcaacaaccgttatagtgatgcaaaaaaccctatagaaataacagtttacattcaattttgctatatgtcaggtactgatttttcaaccacaaccttgtaagatacgtgctattatcatccccacttcacagggggaaacctgtggtagagagaggctgaataacttgtacaaggattcatacctaatcagtagcagagctcagatttgaacccaggcagcctgtttccagagaccatactttacccaccattctatactgctctgaggtcacagacctccatgatgaactcttaattgagtgcagtcaataggaaactcagataaactcagatgtacaagaaatatctcacttcttcatttgcttttcacctacttaactctgactctgagtccccatccagcttgattggcagaaattgtaatctcagtcattatttggactcgccactgcaaggattttgcaaggtcctggaatcttacatggcaccaaagcctggcagagatcctgccagttgtcaatacatactggttaccactgacatgtccattgcagtccagtactctcctgcggccatgtgtagtcctactcaccctcacccatagactgaaaacttccttatattcttgggaaattttctcctttccttttcctgctgccttcaaagacattgataatactatcttcattgag

SEQ ID NO: 727080 - DNA, 1460 bp, Homo sapiens
cagattggcaaacatcagaaaagtgaacaacctcctccactggcattcttttttttttttttttgagatggagtttcactcttgttgcccaggctagagtgcagtggtacgatctcagctcactgtaacctccaccttccagtttcaagcgattcttctgactcagcctcccgagtagctgggattacaggctcctgccaccacacccgactaatttttgtattttcagtagagatggggtttcaccatgttggccaggcttgtcttaaactcctgacctcatgatctgcccgccttggcctcgggagtataatttgctgtatggagggcaatttgacagtatctrtcagattttataatgtacagagccttgaattcagtaattctacttttaggaacttatcccacagatattccagacatgctcaaagatgtaggtacaaagattttattgcagtattatttggaagagtaaaaaaccagtccatgaggaagactagttcaataagttaataatctagaatatatcgatataatggaatactatcaaagaacaattttcacaatgtattgttaagagggggaaggtacagaaacatatgtaaggagtttcatttgtttaatatataattagtgacacaggttgcatctggggaggaaaattagggaacaattttttgttgtacacctttatctttcattgtatctctttcaaaaccttttgtaccatttgtgtgtattgtgtattttaaaaattaatttaaatttcaacaaccgttatagtgatgcaaaaaaccctatagaaataacagtttacattcaattttgctatatgtcaggtactgatttttcaaccacaaccttgtaagatacgtgctattatcatccccacttcacagggggaaacctgtggtagagagaggctgaataacttgtacaaggattcatacctaatcagtagcagagctcagatttgaacccaggcagcctgtttccagagaccatactttacccaccattctatactgctctgaggtcacagacctccatgatgaactcttaattgagtgcagtcaataggaaactcagataaactcagatgtacaagaaatatctcacttcttcatttgcttttcacctacttaactctgactctgagtccccatccagcttgattggcagaaattgtaatctcagtcattatttggactcgccactgcaaggattttgcaaggtcctggaatcttacatggcaccaaagcctggcagagatcctgccagttgtcaatacatactggttaccactgacatgtccattgcagtccagtactctcctgcggccatgtgtagtcctactcaccctcacccatagactgaaaacttccttatattcttgggaaattttctcctttccttttcctgctgccttcaaagacattgataatactatcttcattgag

SEQ ID NO: 727081 - DNA, 1343 bp, Homo sapiens
  misc_feature 1225, 1243, 1244, 1245, 1246, 1247, 1248, 1249, 1250, 1251,1252, 1253, 1254, 1255, 1256, 1257, 1258, 1259, 1260, 1261,1262, 1263, 1264, 1265, 1266, 1267, 1268, 1269, 1270, 1271,1272, 1273, 1274, 1275, 1276, 1277, 1278, 1279, 1280: n = A,T,C or G
  misc_feature 1281, 1282, 1283, 1284, 1285, 1286, 1287, 1288, 1289, 1290,1291, 1292, 1293, 1294, 1295, 1296, 1297, 1298, 1299, 1300,1301, 1302, 1303, 1304, 1305, 1306, 1307, 1308, 1309, 1310,1311, 1312, 1313, 1314, 1315, 1316, 1317, 1318, 1319: n = A,T,C or G
  misc_feature 1320, 1321, 1322, 1323, 1324, 1325, 1326, 1327, 1328, 1329,1330, 1331, 1332, 1333, 1334, 1335, 1336, 1337, 1338, 1339,1340, 1341, 1342: n = A,T,C or G
atttggtgaaaattttaacaaaagggcttatgatgaacatggactatatatatatatatatatatatattttttttttttttttaaattatactttaagttctagagtacatatgcacaatgtgcaggtttgttacatatgtatacatgtgccatgttggtgtgctgcacccattaactcttgatttacaataagtatatctcctaatactatccctcccacctccccccaccccatgacaggcccctgtgtgtgatgttccccatcctgtgtccaagtgttctcattgttcagttcccacctatgaatgagaacatgccgtgtttggttttttttttccttgcgatagtttgctcagaatgatggtttcatccatgtccctacaaaggacatgaactcatccttttttatggctgtatagtattcaaacatggaatatattttaagatagatataagactaaagcaaaggtaaggaaagggtggaagaataatgtgtgtaaatgatatatgttctgaaaaatagaaataaagccaataaaaatgggagcagaatggaggaaggcagataaaaaggggagaatagaatcagactgtcacaaagttaataaataattgggagtcaaagaattcattattgaaagctgacaaaccagatagtaggagagtaagaacaaaagggggctaaggacattataaaaagtattagtataaagataaccactagaacaaaaatgcggactcccctaaatagaaaaacrggcaaagaaaacaaaccacagagtgaatttaacataatagaaacagtaaaaataatataaaataatatgacaggcttaagactaaatatatcagtaatataaatatataaatgagctgaaaatcacctaataaaaggaaaatattttcagattgactttcaagcaaaaccaattcattgctctgtagaagagacatacctaaaacaaaaggattcagaaaggataaaactagtaggatgacttaaaggcatacagagatgctcttagcagtgttaattataagacccaaataactaccaaaatgctcttcagaagtagaatgaataaacaaagtgtggtgtattcatacagtggaatactacgtatataatgagagtatgaatatgaattttacaaaacaacatggatgaatctcatagtaaggagtgaaagaggcatgaaacaagagtgcatcctatatgattnccatttatatgaaatttnnnnnnnnnnnnnnnnnnnnnnnnnnnnnnnnnnnnnnnnnnnnnnnnnnnnnnnnnnnnnnnnnnnnnnnnnnnnnnnnnnnnnnnnnnnnnnnnnnnna

SEQ ID NO: 727082 - DNA, 1343 bp, Homo sapiens
  misc_feature 1225, 1243, 1244, 1245, 1246, 1247, 1248, 1249, 1250, 1251,1252, 1253, 1254, 1255, 1256, 1257, 1258, 1259, 1260, 1261,1262, 1263, 1264, 1265, 1266, 1267, 1268, 1269, 1270, 1271,1272, 1273, 1274, 1275, 1276, 1277, 1278, 1279, 1280: n = A,T,C or G
  misc_feature 1281, 1282, 1283, 1284, 1285, 1286, 1287, 1288, 1289, 1290,1291, 1292, 1293, 1294, 1295, 1296, 1297, 1298, 1299, 1300,1301, 1302, 1303, 1304, 1305, 1306, 1307, 1308, 1309, 1310,1311, 1312, 1313, 1314, 1315, 1316, 1317, 1318, 1319: n = A,T,C or G
  misc_feature 1320, 1321, 1322, 1323, 1324, 1325, 1326, 1327, 1328, 1329,1330, 1331, 1332, 1333, 1334, 1335, 1336, 1337, 1338, 1339,1340, 1341, 1342: n = A,T,C or G
atttggtgaaaattttaacaaaagggcttatgatgaacatggactatatatatatatatatatatatattttttttttttttttaaattatactttaagttctagagtacatatgcacaatgtgcaggtttgttacatatgtatacatgtgccatgttggtgtgctgcacccattaactcttgatttacaataagtatatctcctaatactatccctcccacctccccccaccccatgacaggcccctgtgtgtgatgttccccatcctgtgtccaagtgttctcattgttcagttcccacctatgaatgagaacatgccgtgtttggttttttttttccttgcgatagtttgctcagaatgatggtttcatccatgtccctacaaaggacatgaactcatccttttttatggctgtatagtattcaaacatggaatatattttaagatagatataagactaaagcaaaggtaaggaaagggtggaagaataatgtgtgtaaatgatatatgttctgaaaaatagaaataaagccaataaaaatgggagcagaatggaggaaggcagataaaaaggggagaatagaatcagactgtcacaaagttaataaataattgggagtcaaagaattcattattgaaagctgacaaaccagatagtaggagagtaagaacaaaagggggctaaggacattataaaaagtattagtataaagataaccactagaacaaaaatgcggactcccctaaatagaaaaacgggcaaagaaaacaaaycacagagtgaatttaacataatagaaacagtaaaaataatataaaataatatgacaggcttaagactaaatatatcagtaatataaatatataaatgagctgaaaatcacctaataaaaggaaaatattttcagattgactttcaagcaaaaccaattcattgctctgtagaagagacatacctaaaacaaaaggattcagaaaggataaaactagtaggatgacttaaaggcatacagagatgctcttagcagtgttaattataagacccaaataactaccaaaatgctcttcagaagtagaatgaataaacaaagtgtggtgtattcatacagtggaatactacgtatataatgagagtatgaatatgaattttacaaaacaacatggatgaatctcatagtaaggagtgaaagaggcatgaaacaagagtgcatcctatatgattnccatttatatgaaatttnnnnnnnnnnnnnnnnnnnnnnnnnnnnnnnnnnnnnnnnnnnnnnnnnnnnnnnnnnnnnnnnnnnnnnnnnnnnnnnnnnnnnnnnnnnnnnnnnnnna

SEQ ID NO: 727083 - DNA, 1249 bp, Homo sapiens
cttcgagtgcttggtttgctgcacagaacattctcatggacactctcctgccccacctgccagccaggccatgccccttgcaggtctgaactgtagagtcctgttgtcacccttctacctggctaacttctgttcctcttgggcgcaacccagctgtcggcttctcctggaagttttctcaagctgcattaggtctaccttactgtgctccctcatttatggaatttcaccccacagaaatccttcctgttcgcccacataaacttcttgaaggctgggcttgtgtcttttccccttgtactcccagcgcccagagcagtgggcaataaacagttctccctccatcatttcagcaccaactttccttcggtcttgctcttgatgacttagacacgtgtcctggacactgatgatggtgattataattacagccctaggggctacagagctgagtaggctatttatctctgccctaaataggcgcagaccactggggctttgaaatggtccctccactctttctgctgtgaattctcacctcttgctgctgactgtgtgtcttactttatgcccaattattgggtgagggcctcgcctgtcttaaaaattaaattgcagggctctgagctgttttccttgacaagcaggagtcttgttctctacctttgtctctgtggtttttgtcctcaaccgttggaatggcaggaatttggcttttggacaagccatgggggccgctgcaagggctgtgtgtgaattgccccctgtagatctggggagtgtggatggacagcacgccagctgcagactcaagagcttccggattgtttcaagggctaatttgattaagaataactttaattcctggaacctgctttgaaaacttgcatctgtgtaaatgtcaagtttcttagtgtcaaattgaaaaccacaaaaggacagatgttttgcttaagctggaggacgactagcccagttggaagaaggacacacagggaggccaaatggggccaccaggacagagcccgggcccggggaagtgcttctcctctgatgcgtgacgtttcccgcaggtgtgccctgtctacaaggcaggtcaacacgaggacccagctgaaggcagtagcgcacccactaggaaaatacctgtatttgtgagtggcacgggcacaggagccaccttgagaaaaatgtgaacattccaaccacccagttacaggaaatacagagctcacagraacatgttaga

SEQ ID NO: 727084 - DNA, 531 bp, Homo sapiens
gaatcacttcaggtcagccctgaatgctgtcatttgcaacttttcttcagccccaatagaatatataacatattgtattcattttctaaagatgctgcaacaaattgctacaaacgcagtggcttaaatcaccaccattttattgcattatagttctggaggtcatgtagaccagaaatcggtctcactgggctaaaatcaaagtgacagcagggctgagctcctttccagaggctctaggggggaatctattccttgccctttccagcttctagaggcacccacattccttggctcatcatcttctaacatcttcaaaaccagccatagtgggccaggtcttttcacgccgccatctatctggttctgaatcctcttctgcctcyctcttctaccctgaagggcccttgtgctaacacaaggagctaatccagagggcgcccatatgttaaggtcagctgattagcaacttcgattccatttgcaatcctcattcccttttgccatgtagcataacatattcatgggttc

SEQ ID NO: 727085 - DNA, 627 bp, Homo sapiens
ggatgatgatacaggtgrcgactggaacctagctcacataggtgctggatgaatggcagctgctgtttcttccacacatcctaggtatgatgagatccttgaaattaagagtcatgtattgccaatctttgtattccatagaactactagttcaatgcttgactcagaatgggaattcaatatatttattgaattaaaatgcaatatatatgatttagtttagacataaaagaaactttttttttttaaattacgtaagttctgcacattcctggactcacttatttgcaggagggctagaattgtccttttaagtttttggaaataggaggtgctgatgtgtttggatatttaggtgtcaacatagagatgtttaatattgttactttatttatattagtgcattttggataaaagcctctcaagtctttaaaactgtggaagagactgcgatagggaacttttttttttttctagagaattaaggtccccaaatgaatcaatgtactatgtgggtagtaacattctgaatatgactttcttctttctattaataaatggaatctagttgacctcttcaacttttgctgggctacagctattatttcaaaatttaaagagatccat

SEQ ID NO: 727086 - DNA, 594 bp, Homo sapiens
tgaaagcagttcctcagagcattacggtatctcactccctttcttctgaccatcttatctaaagttactttcatacccatcatatggtgactctctttcctttagctgcttgattttcttcacattctggcactatccaaaatggttttgtgtatgtgtcaatttatcatctgaatcccacactagaagggaaactccttatgacagagattttctctctcatctgccccatctccttcttggcatataattttagtcacccaatgggctctttctgcccactgcccaggcaaaaccaattcactgagaatgtggtatttccataaagaaagartttagttaacacaaggtagccaagactgaagttatcactcaagtcagtctcctcgaaggctcagaggttagggtttctcaaggatagtttggtgggcaaggttctagggcgtggagaatgctgattggttggggatacaatcataggagtgtgtaaacagtccttctgtgccgagtccatctctgaatggaggcccacaggaccagttgagacatgagtcatgagtccaggtggggttagtcagttaccagaatgcaaaa

SEQ ID NO: 727087 - DNA, 594 bp, Homo sapiens
tgaaagcagttcctcagagcattacggtatctcactccctttcttctgaccatcttatctaaagttactttcatacccatcatatggtgactctctttcctttagctgcttgattttcttcacattctggcactatccaaaatggttttgtgtatgtgtcaatttatcatctgaatcccacactagaagggaaactccttatgacagagattttctctctcatctgccccatctccttcttggcatataattttagtcacccaatgggctctttctgcccactgcccaggcaaaaccaattcactgagaatgtggtatttccataaagaaagagtttagttaacacaaggtagccaagactgaagttatcactcaagtcagtctcctygaaggctcagaggttagggtttctcaaggatagtttggtgggcaaggttctagggcgtggagaatgctgattggttggggatacaatcataggagtgtgtaaacagtccttctgtgccgagtccatctctgaatggaggcccacaggaccagttgagacatgagtcatgagtccaggtggggttagtcagttaccagaatgcaaaa

SEQ ID NO: 727088 - DNA, 594 bp, Homo sapiens
tgaaagcagttcctcagagcattacggtatctcactccctttcttctgaccatcttatctaaagttactttcatacccatcatatggtgactctctttcctttagctgcttgattttcttcacattctggcactatccaaaatggttttgtgtatgtgtcaatttatcatctgaatcccacactagaagggaaactccttatgacagagattttctctctcatctgccccatctccttcttggcatataattttagtcacccaatgggctctttctgcccactgcccaggcaaaaccaattcactgagaatgtggtatttccataaagaaagagtttagttaacacaaggtagccaagactgaagttatcactcaagtcagtctcctcgaaggctcagaggttagggtttctcaaggatagtttggtgggcaaggttctagggcrtggagaatgctgattggttggggatacaatcataggagtgtgtaaacagtccttctgtgccgagtccatctctgaatggaggcccacaggaccagttgagacatgagtcatgagtccaggtggggttagtcagttaccagaatgcaaaa

SEQ ID NO: 727089 - DNA, 632 bp, Homo sapiens
ttaagctttacattttcgaatatttgttgctgcatatgtcaaataattagagtcttttactacctttgagactctaatacaaatgaagaatctaaacaagcaattaaacaatagcaggatattcagctggaaacaattaagtactgccgattagaagctcaatcctctagaataaactcttacactaagagcaaagtttatagccactctacaatttatttaacacttcccatctccttcatttataaaccacatatgtatattttctttctttcttttttgagactgtctcactctgtagctcaagctggagggcagtggtgtgatcacggctcgcttcaggctcaacctcccaggctcctgatcctcctgcttcagcctcttgagtagctgtgactacaagtgtgcaccaccatgcctgsctaattttttattgttatttttgtagagacagggtcttgctatgttgcccaggttgatctcgaactcctgggctcaagcaatcctcctgcctcagcctatcaaagtgctgggattacctgcatgagtcactgtgcccagccccatatattttcttggtaaatgtgcaatactcaagtttcctttctggctatcagccactggatgcttga

SEQ ID NO: 727090 - DNA, 632 bp, Homo sapiens
ttaagctttacattttcgaatatttgttgctgcatatgtcaaataattagagtcttttactacctttgagactctaatacaaatgaagaatctaaacaagcaattaaacaatagcaggatattcagctggaaacaattaagtactgccgattagaagctcaatcctctagaataaactcttacactaagagcaaagtttatagccactctacaatttatttaacacttcccatctccttcatttataaaccacatatgtatattttctttctttcttttttgagactgtctcactctgtagctcaagctggagggcagtggtgtgatcacggctcgcttcaggctcaacctcccaggctcctgatcctcctgcttcagcctcttgagtagctgtgactacaagtgtgcaccaccatgcctgcctaattttttattgttatttttgtagagacagggtcttgctatgttgcccaggttgatctcgaactcctgggctcaagcaatcctcctgcctcagcctatcaaagtgctgggattacctgcatgagtcactgtgcccagccccatatattttcttggtaaatgtgcaatactcaagtttcctttctggctatcagscactggatgcttga

SEQ ID NO: 727091 - DNA, 1518 bp, Homo sapiens
tctttttctttataaattacccagtcttggrtatgtttttatcagcagcatgaaaatggactaatacacttgcacatgtaccctctgaatctaaaataaaagttaaaattatatatataaaaaaagagtgacatgttgctgagaatttctagcactgaggaaagtaaaaatgggtttaaaggagctgttaatcattatttcttgtcaatgaagactggtggtatttctgtgtctgtgcccttcctagttaatcaattatatctgtagaaaacatttctgttgcattgatgagaatttatttcaagatttttttcttaggcaattaggcacaaatgtaacagactgtagcaagtcctataactgtattttttcaccagaccagtgtgcttggattctgtcacatcctatttttctttgtgttaaaggattcgtgaagatgatgattataggaaagaagtatttttcgtaattattcttgcttgttaaacagtctcagagagagggctgggttggggtggggacagtgataaagataggcagaaataagtatgtatgtgtatgtttaatggatagccctgcttaaagaactgtatttttaaaaattttgatgactagaagtatttggcaacaggtagaaaacacttgtttaaaatttacagttaatttcccatcttagaaaacagagcatcaatacagctttggagcacagactcatcttcatttttgcagggaaatcaatagaatagcaaaatgaccattcaaatatattgcaattttacattctttgttattctcaaagaaatcatgaagttaccagaaatacaaatatctacattaagtcttacactttggcagtgaaattgtagcattatattgaaatgagactgcgtctgaaagcttttcacgttgggagtaatggtgttggggaaagcagaggttaattgaggcagagaacctgaaccacagtttgtagagttttatttgggtgtggtggtgggggtttgcgagtggcttgcacaagatgatgaatggacaggatatactaaatactcagtttttgaatattgctttttgtaaaaggaagtttttatctggaaataattttaaagctacagaaatttgtgcaagattgtgcaaagcacatttatattccctttacctagattcacctatttgaactttgctccatttgctctaacatttgttctctctctccatctttatccctgtgtatgtactgtggcaggaagtcagggaccctgaatggagagactggctggagctgtggcagaggaacataaattgtgaagatttcattttaatatggacatatatcagttcccaaaattaatacttttataatttcttatgcctgtctttacttcaatctctgaacataaattgtgaagatttcattttaatatggacatttatcagttcccaaaattaatacttttataattttttatgcctgtcttattttaatctcttaatcctgttatcttcataagctgagga

SEQ ID NO: 727092 - DNA, 1518 bp, Homo sapiens
tctttttctttataaattacccagtcttggatatgtttttatcagcagcatgaaaatggactaatacacttgcacatgtaccctctgaatctaaaataaaagttaaaattatatatataaaaaaagagtgacatgttgctgagaatttctagcactgaggaaagtaaaaatgggtttaaaggagctgttaatcattatttcttgtcaatgaagactggtggtatttctgtgtctgtgcccttcctagttaatcaattatatctgtagaaaacatttmtgttgcattgatgagaatttatttcaagatttttttcttaggcaattaggcacaaatgtaacagactgtagcaagtcctataactgtattttttcaccagaccagtgtgcttggattctgtcacatcctatttttctttgtgttaaaggattcgtgaagatgatgattataggaaagaagtatttttcgtaattattcttgcttgttaaacagtctcagagagagggctgggttggggtggggacagtgataaagataggcagaaataagtatgtatgtgtatgtttaatggatagccctgcttaaagaactgtatttttaaaaattttgatgactagaagtatttggcaacaggtagaaaacacttgtttaaaatttacagttaatttcccatcttagaaaacagagcatcaatacagctttggagcacagactcatcttcatttttgcagggaaatcaatagaatagcaaaatgaccattcaaatatattgcaattttacattctttgttattctcaaagaaatcatgaagttaccagaaatacaaatatctacattaagtcttacactttggcagtgaaattgtagcattatattgaaatgagactgcgtctgaaagcttttcacgttgggagtaatggtgttggggaaagcagaggttaattgaggcagagaacctgaaccacagtttgtagagttttatttgggtgtggtggtgggggtttgcgagtggcttgcacaagatgatgaatggacaggatatactaaatactcagtttttgaatattgctttttgtaaaaggaagtttttatctggaaataattttaaagctacagaaatttgtgcaagattgtgcaaagcacatttatattccctttacctagattcacctatttgaactttgctccatttgctctaacatttgttctctctctccatctttatccctgtgtatgtactgtggcaggaagtcagggaccctgaatggagagactggctggagctgtggcagaggaacataaattgtgaagatttcattttaatatggacatatatcagttcccaaaattaatacttttataatttcttatgcctgtctttacttcaatctctgaacataaattgtgaagatttcattttaatatggacatttatcagttcccaaaattaatacttttataattttttatgcctgtcttattttaatctcttaatcctgttatcttcataagctgagga

SEQ ID NO: 727093 - DNA, 1518 bp, Homo sapiens
tctttttctttataaattacccagtcttggatatgtttttatcagcagcatgaaaatggactaatacacttgcacatgtaccctctgaatctaaaataaaagttaaaattatatatataaaaaaagagtgacatgttgctgagaatttctagcactgaggaaagtaaaaatgggtttaaaggagctgttaatcattatttcttgtcaatgaagactggtggtatttctgtgtctgtgcccttcctagttaatcaattatatctgtagaaaacatttctgttgcattgatgagaatttatttcaagatttttttcttaggcaattaggcacaaatgtaacagactgtagcaagtcctataactgtattttttcaccagaccagtgtgcttggattctgtcacatcctatttttctttgtgttaaaggattcgtgaagatgatgattataggaaagaagtatttttcgtaattattcttgcttgttaaacagtctcagagagagggctgggttggggtggggacagtgataaagataggcagaaataagtatgtatgtgtatgtttaatggatagccctgcttaaagaactgtatttttaaaaattttgatgactagaagtatttggcaacaggtagaaaacacttgtttaaaatttacagttaatttcccatcttagaaaacagagcatcaatacagctttggagcacagactcatcttcatttttgcagggaaatcaatagaatagcaaaatgaccattcaaatatattgcaattttacattctttgttattctcaaagaaatcatgaagttaccagaaatacaaatatctacattaagtcttacactttggcagtgaaattgtagcattatattgaaatgagactgcgtctgaaagcttttcacgttgggagtaatggtgttggggaaagcagaggttaattgaggcagagaacctgaaccacagtttgtagagttttatttgggtgtggtggtgggggtttgcgagtggcttgcacaagatgatgaatggacaggatatactaaatactcagtttttgaatattgctttttgtaaaaggaagtttttatctggaaataattttaaagctacagaaatttgtgcaagattgtgcaaagcacatttatattccctttacctagattcacctatttgaactttgctccatttgctctaacatttgttctctctctccatctttatccctgtgtatgtactgtggcaggaagtcagggaccctgaatggagagactggctggagctgyggcagaggaacataaattgtgaagatttcattttaatatggacatatatcagttcccaaaattaatacttttataatttcttatgcctgtctttacttcaatctctgaacataaattgtgaagatttcattttaatatggacatttatcagttcccaaaattaatacttttataattttttatgcctgtcttattttaatctcttaatcctgttatcttcataagctgagga

SEQ ID NO: 727094 - DNA, 834 bp, Homo sapiens
ccaccaagtatcttctttttaggttcagagtaagcacattaattccagtttattgtcattttaatgcacacacacatacacacacaaaaaaacaataaataaataaataaataaaaataaatatttttttataaacaataaaaaggaataaacagcccagtgagtttactttatagatgaatgtctttgcagttagcaatgagctgaatgtagtacatggctctgggttaaaatcactttgttgttttctaggcacaggaccattcaatcaatcaacttcactcactctccacttcctcagaaaactggatgatgagttgaaggatcatggccttggagacattgctgatgaacatggcagagatgctgtctcccccaaaggacagatagcaacagtctgatataagcaagatttatttttcttatttagtcagagagctacmctactgaaagatacatgtgagttccaggttccttcacacatcccagaacaaaatctcctgcagtctatactgagatggactatagagttctccagaatctgtagagttggactatagagttatccagaatcaacttatccaggtgttagatccagccacttaacaaaagatatgggatggtaccagtctctttccctcttggggtggcagtgttatttacatcagagtgagttggattggaatacaatatacataatttactagtgacatgacattaagcaaattacttaacctctttaaggctcatgtgtaaggtggtgataataatgcctgccccatgaagctattgcattataagaagatgatatgtgcaaagcattcagcacagtgt

SEQ ID NO: 727095 - DNA, 1828 bp, Homo sapiens
  misc_feature 1003, 1004, 1005, 1006, 1007, 1008, 1009, 1010, 1011, 1012,1013, 1014, 1015, 1016, 1017, 1018, 1019, 1020, 1021, 1022,1023, 1024, 1025, 1026, 1027, 1028, 1029, 1030, 1031, 1032,1033, 1034, 1035, 1036, 1037, 1038, 1039, 1040, 1041: n = A,T,C or G
  misc_feature 1042, 1043, 1044, 1045, 1046, 1047, 1048, 1049, 1050, 1051,1052, 1053, 1054, 1055, 1056, 1057, 1058, 1059, 1060, 1061,1062, 1063, 1064, 1065, 1066, 1067, 1068, 1069, 1070, 1071,1072, 1073, 1074, 1075, 1076, 1077, 1078, 1079, 1080: n = A,T,C or G
  misc_feature 1081, 1082, 1083, 1084, 1085, 1086, 1087, 1088, 1089, 1090,1091, 1092, 1093, 1094, 1095, 1096, 1097, 1098, 1099, 1100,1101, 1102: n = A,T,C or G
ggccagtactgctctaccatagagaataacaaagatgtcatcaggtactaccttgcattagagaaatgggtaaatgagggaaacaatgaaaaataaggtataataatcattcatcaactatcagagttggtgaacaaagaaaatgcaacagtaaaatctacctttttaagtactaaaacttttgatgattcttggccaactatttccctgtttccgtgtaataaacattgccacctcttcttgatgactcagagtcatcatgatgaattttaattattgtagtaatctgtaatattgtgctgcttttaaagcttacttaaatatgcagggtcattgtgctgatggatactagaaggagaggggcagtttcccgttagcacaatgaaattcagacaaacatttcaaaaaagggatgggcctatataaggcattcagacatctgaattgactatgcttatcaggcatagagtttggtcaagtttaaaatatattcaaagccaggcatggtggctcactcctgtaatctcagcactttgggaggccgaggcggacagatcatgtcaggtcaggagtttgtgaccagcctggccaacatggtgaaaccctgtctctactaaaagaacacagaaattagctgggtgtggtggctcccagctacttgggaggctagaggcaggagaatcgcctgaacccgggagtcagaggttgcagtaagccaagatggcaccactgcacttcagcctgggcaacagcgtgagactccacctcaataacaacaacaaaaatgtattcgattacttaattgatttaattcaaagatctattggctgtactcaaggcctaattagtcaaataacctactagatatctccacatactatgtcttttttttttttttagttggagtcctgctctgttacaaaggctggagtaagtgcaatggcgtggtctcagcaaactccaacctccatctcccaggtccaagcagattttccggcctcannnnnnnnnnnnnnnnnnnnnnnnnnnnnnnnnnnnnnnnnnnnnnnnnnnnnnnnnnnnnnnnnnnnnnnnnnnnnnnnnnnnnnnnnnnnnnnnnnnnatccgacagatctgagtgacagtctggcgcgtccacttaaagctttgtgactttgggtcattaaatatctctaaatcttagcttattctgtraaatagcgctcaccatagtcatacttcatagagctgtgagggttagtttcgagaatgtatgtagagcctttgctgcagcacgtagaaatgttcattagttttttcttttccttccaactttgtacactcctctgagttatccttgaatgatacctgttttaaatttgttcaagaatatttgggctaaacagccctgctgttacttgctgtgattttcttgctatttacctaagttaacatgtatccaaaacgacagttttagtcattcagagattttgcacacctgctatgcctctagctgtttggactacaaagagtagtttactaggtattgggactagttcacacgttaattgggagcaggcagctaataaaacatgttaattgctatttgcatttgttgctgtttaatgagatacaaaagatagaataatttgtatctttatcaaccagtaaatgatcagaagctttatatgtgacattatatctggaggagtattttaaaaatctacatgggaaacttaagtgtatgtatggtctctttttcttcccaaagtgtccatgggactggacgagggagggtcataattatttgggaggaagaattctttcagtagatggcagagaactgtct

SEQ ID NO: 727096 - DNA, 1828 bp, Homo sapiens
  misc_feature 1003, 1004, 1005, 1006, 1007, 1008, 1009, 1010, 1011, 1012,1013, 1014, 1015, 1016, 1017, 1018, 1019, 1020, 1021, 1022,1023, 1024, 1025, 1026, 1027, 1028, 1029, 1030, 1031, 1032,1033, 1034, 1035, 1036, 1037, 1038, 1039, 1040, 1041: n = A,T,C or G
  misc_feature 1042, 1043, 1044, 1045, 1046, 1047, 1048, 1049, 1050, 1051,1052, 1053, 1054, 1055, 1056, 1057, 1058, 1059, 1060, 1061,1062, 1063, 1064, 1065, 1066, 1067, 1068, 1069, 1070, 1071,1072, 1073, 1074, 1075, 1076, 1077, 1078, 1079, 1080: n = A,T,C or G
  misc_feature 1081, 1082, 1083, 1084, 1085, 1086, 1087, 1088, 1089, 1090,1091, 1092, 1093, 1094, 1095, 1096, 1097, 1098, 1099, 1100,1101, 1102: n = A,T,C or G
ggccagtactgctctaccatagagaataacaaagatgtcatcaggtactaccttgcattagagaaatgggtaaatgagggaaacaatgaaaaataaggtataataatcattcatcaactatcagagttggtgaacaaagaaaatgcaacagtaaaatctacctttttaagtactaaaacttttgatgattcttggccaactatttccctgtttccgtgtaataaacattgccacctcttcttgatgactcagagtcatcatgatgaattttaattattgtagtaatctgtaatattgtgctgcttttaaagcttacttaaatatgcagggtcattgtgctgatggatactagaaggagaggggcagtttcccgttagcacaatgaaattcagacaaacatttcaaaaaagggatgggcctatataaggcattcagacatctgaattgactatgcttatcaggcatagagtttggtcaagtttaaaatatattcaaagccaggcatggtggctcactcctgtaatctcagcactttgggaggccgaggcggacagatcatgtcaggtcaggagtttgtgaccagcctggccaacatggtgaaaccctgtctctactaaaagaacacagaaattagctgggtgtggtggctcccagctacttgggaggctagaggcaggagaatcgcctgaacccgggagtcagaggttgcagtaagccaagatggcaccactgcacttcagcctgggcaacagcgtgagactccacctcaataacaacaacaaaaatgtattcgattacttaattgatttaattcaaagatctattggctgtactcaaggcctaattagtcaaataacctactagatatctccacatactatgtcttttttttttttttagttggagtcctgctctgttacaaaggctggagtaagtgcaatggcgtggtctcagcaaactccaacctccatctcccaggtccaagcagattttccggcctcannnnnnnnnnnnnnnnnnnnnnnnnnnnnnnnnnnnnnnnnnnnnnnnnnnnnnnnnnnnnnnnnnnnnnnnnnnnnnnnnnnnnnnnnnnnnnnnnnnnatccgacagatctgagtgacagtctggcgcgtccacttaaagctttgtgactttgggtcattaaatatctctaaatcttagcttattctgtaaaatagcgctcaccatagtcatacttcatagagctgtgagggttagtttcgagaatgtatgtagagcctttgctgcagcacgtagaaatgttcattagttttttcttttccttccaactttgtacactcctctgagttatccttgaatgatacctgttttraatttgttcaagaatatttgggctaaacagccctgctgttacttgctgtgattttcttgctatttacctaagttaacatgtatccaaaacgacagttttagtcattcagagattttgcacacctgctatgcctctagctgtttggactacaaagagtagtttactaggtattgggactagttcacacgttaattgggagcaggcagctaataaaacatgttaattgctatttgcatttgttgctgtttaatgagatacaaaagatagaataatttgtatctttatcaaccagtaaatgatcagaagctttatatgtgacattatatctggaggagtattttaaaaatctacatgggaaacttaagtgtatgtatggtctctttttcttcccaaagtgtccatgggactggacgagggagggtcataattatttgggaggaagaattctttcagtagatggcagagaactgtct

SEQ ID NO: 727097 - DNA, 1828 bp, Homo sapiens
  misc_feature 1003, 1004, 1005, 1006, 1007, 1008, 1009, 1010, 1011, 1012,1013, 1014, 1015, 1016, 1017, 1018, 1019, 1020, 1021, 1022,1023, 1024, 1025, 1026, 1027, 1028, 1029, 1030, 1031, 1032,1033, 1034, 1035, 1036, 1037, 1038, 1039, 1040, 1041: n = A,T,C or G
  misc_feature 1042, 1043, 1044, 1045, 1046, 1047, 1048, 1049, 1050, 1051,1052, 1053, 1054, 1055, 1056, 1057, 1058, 1059, 1060, 1061,1062, 1063, 1064, 1065, 1066, 1067, 1068, 1069, 1070, 1071,1072, 1073, 1074, 1075, 1076, 1077, 1078, 1079, 1080: n = A,T,C or G
  misc_feature 1081, 1082, 1083, 1084, 1085, 1086, 1087, 1088, 1089, 1090,1091, 1092, 1093, 1094, 1095, 1096, 1097, 1098, 1099, 1100,1101, 1102: n = A,T,C or G
ggccagtactgctctaccatagagaataacaaagatgtcatcaggtactaccttgcattagagaaatgggtaaatgagggaaacaatgaaaaataaggtataataatcattcatcaactatcagagttggtgaacaaagaaaatgcaacagtaaaatctacctttttaagtactaaaacttttgatgattcttggccaactatttccctgtttccgtgtaataaacattgccacctcttcttgatgactcagagtcatcatgatgaattttaattattgtagtaatctgtaatattgtgctgcttttaaagcttacttaaatatgcagggtcattgtgctgatggatactagaaggagaggggcagtttcccgttagcacaatgaaattcagacaaacatttcaaaaaagggatgggcctatataaggcattcagacatctgaattgactatgcttatcaggcatagagtttggtcaagtttaaaatatattcaaagccaggcatggtggctcactcctgtaatctcagcactttgggaggccgaggcggacagatcatgtcaggtcaggagtttgtgaccagcctggccaacatggtgaaaccctgtctctactaaaagaacacagaaattagctgggtgtggtggctcccagctacttgggaggctagaggcaggagaatcgcctgaacccgggagtcagaggttgcagtaagccaagatggcaccactgcacttcagcctgggcaacagcgtgagactccacctcaataacaacaacaaaaatgtattcgattacttaattgatttaattcaaagatctattggctgtactcaaggcctaattagtcaaataacctactagatatctccacatactatgtcttttttttttttttagttggagtcctgctctgttacaaaggctggagtaagtgcaatggcgtggtctcagcaaactccaacctccatctcccaggtccaagcagattttccggcctcannnnnnnnnnnnnnnnnnnnnnnnnnnnnnnnnnnnnnnnnnnnnnnnnnnnnnnnnnnnnnnnnnnnnnnnnnnnnnnnnnnnnnnnnnnnnnnnnnnnatccgacagatctgagtgacagtctggcgcgtccacttaaagctttgtgactttgggtcattaaatatctctaaatcttagcttattctgtaaaatagcgctcaccatagtcatacttcatagagctgtgagggttagtttcgagaatgtatgtagagcctttgctgcagcacgtagaaatgttcattagttttttcttttccttccaactttgtacactcctctgagttatccttgaatgatacctgttttaaatttgttcaagaatatttgggctaaacagccctgctgttacttgctgtgattttcttgctatttacctargttaacatgtatccaaaacgacagttttagtcattcagagattttgcacacctgctatgcctctagctgtttggactacaaagagtagtttactaggtattgggactagttcacacgttaattgggagcaggcagctaataaaacatgttaattgctatttgcatttgttgctgtttaatgagatacaaaagatagaataatttgtatctttatcaaccagtaaatgatcagaagctttatatgtgacattatatctggaggagtattttaaaaatctacatgggaaacttaagtgtatgtatggtctctttttcttcccaaagtgtccatgggactggacgagggagggtcataattatttgggaggaagaattctttcagtagatggcagagaactgtct

SEQ ID NO: 727098 - DNA, 590 bp, Homo sapiens
agctgagcatggtagagcacgcttgtggtcccagctacttgggaggctgaggcaggaggattgcttaaacccaggagtccgaggcagcagtgagctgtgatcacaccactgcactccagcatgcgcaacagagcaagacaccatctcaaaaaaaaaaaaaaaaagaagaaaaagaaaaagtttaaaagaattattgcttttaagtgtgttagactaatgagctaggttktattgatacccaaattagagcttaattattgaactgtgttgtcagagctatagttataggcattatagcccacaatgcctagtaccatcaatttttatagtaaagaggccaagatgagtcagaaaatcactttctgtgataacctcacagtctaataaaggagataactgtaatacaggtgacaggtgtttgaagagattttggagatgtggcaggaaagccacagaagggcaagcttgcagcccagggcagcctgcatttgaggggaagactatgccaggctgggtggctttgcttggaagctctcctgtagaaataggatcagctcctccgtagatgtgtccatttaactaaggggaca

SEQ ID NO: 727099 - DNA, 597 bp, Homo sapiens
gtttttaagtctgcagttgagtggcatgaagaacatcctcattgctggaggaccatggccaccatccatctcsagaactttttcatcatggccaccatccatctccagaacttttttcattttgcaaaacaggaactctgtccgcattccacactaactccccactccccctcaccccagaggccaccagagtgtgagaaacgaaaaagccattctccttccacttgcctgtgtcctgtgatgttgagggctcctgggctttctcaagagggtcctgtgtgtccgggtttctgtctccagccctgatctgaggcagtgagcagggagtgagcctgggtctccaggtatctcgggtctatcagcaaggatacagccacctccaggtccatcagcaaggacacagccacctccaggtccatcagcaaggacacagccacctccagcagctgctgcgagaggagtgtggcttttcatctcgcctcctgctaacatctggtgattcagaaccactggggttttcatttgatgtaatgtctggtttgttctaatgaggctcctagacgccgtagatatgtttaagactcaaaagccacggga

SEQ ID NO: 727100 - DNA, 1533 bp, Homo sapiens
gttctgcattttgctgtgaaagtgctttaaaattgatgagccttcttgggaaaggtccactgtcaggttgtggcagatgttacagcagctgctcccatgttttaaagtgcctttgatgtgatccagccaatgcgatggaaagcagccttcaaagtggaaagagtagcagctgtggctgcagcagaccttccattgatggagcctgttgaggagtctaaatggctccaaaagatcatgaagctgggctgatggacattcaatcaccatacccactccactgttgtgccaartagggagaatagagagagaagcagttgtgccagctgctactattggggttatgatgcatttcattctgtaatgaatattcttagtgttttctttctccgaaatctcatgagattatagtacatgttcctccataggcaaaattcttaaatcaatattcattcactcgactaatatttattgagcttctgatgtggcagtcaccatgaggccctagggattcaataataaataagagaacatttttcctttcaagagcttaaaactaatagggaaaataatatataaggaaaaaggccatgtgccgtcattaagggttatgatattggcaaacggtggttcctaagagagattgtgaatatagatgacatataggaggaatacgggaaagctaaataaagatgtctgcaaagaacaattagactttaatctaaaaacaatgggaaacaattacagcctgaaaacataggagggaaagattttttgttttgaaaaaaagaaaaagatattgattggaagcagaaaacgctaccaacccaagagacaactcttcccagtatgtgcagtgttaacatatactttatttaaaacatattttaaaagccgatcctaagcacaaggaggtttaagcagcattgagaccagcagggcccctgatgaagataatggtgagaaaataataatctctgctcacagctggcaacttggagctctgcagctcccagtagctactggtgatcatgctgaaacagatggcctcacttggcccaactagccattcagtatatcctttgatttcattccttaatctgtagtgtgtcagtgattgagaagaaagatcacagcttactggtgttgttatgagataggatgtaatagtgacatcattctagccttaagacccagctcaaatctggaaaagactgaatgtcaatgatgtcatcctccatccctacttctactcactcatcccttctcctactcacctcttcctcacaaatcttcctacaacaatcatctagagtcacggcctgtttcgtgggcttatgaaccacacagtcccacagggatccatgcccggaagtatgtcccatgcttggggtttgatgctgccttggaattgataataactatctttgtttttggttttgttttgttttgtttttgttttgtttttttttgagacagagtcttgttctgtcgcccagactggagtgcagtggcgccatctcggctcgccgcaac

SEQ ID NO: 727101 - DNA, 1533 bp, Homo sapiens
gttctgcattttgctgtgaaagtgctttaaaattgatgagccttcttgggaaaggtccactgtcaggttgtggcagatgttacagcagctgctcccatgttttaaagtgcctttgatgtgatccagccaatgcgatggaaagcagccttcaaagtggaaagagtagcagctgtggctgcagcagaccttccattgatggagcctgttgaggagtctaaatggctccaaaagatcatgaagctgggctgatggacattcaatcaccatacccactccactgttgtgccaaatagggagaatagagagagaagcagttgtgccagctgctactattggggttatgatgcatttcattctgtaatgaatattcttagtgttttctttctccgaaatctcatgagattatagtacatgttcctccataggcaaaattcttaaatcaatattcattcactcgactaatatttattgagcttctgatgtggcagtcaccrtgaggccctagggattcaataataaataagagaacatttttcctttcaagagcttaaaactaatagggaaaataatatataaggaaaaaggccatgtgccgtcattaagggttatgatattggcaaacggtggttcctaagagagattgtgaatatagatgacatataggaggaatacgggaaagctaaataaagatgtctgcaaagaacaattagactttaatctaaaaacaatgggaaacaattacagcctgaaaacataggagggaaagattttttgttttgaaaaaaagaaaaagatattgattggaagcagaaaacgctaccaacccaagagacaactcttcccagtatgtgcagtgttaacatatactttatttaaaacatattttaaaagccgatcctaagcacaaggaggtttaagcagcattgagaccagcagggcccctgatgaagataatggtgagaaaataataatctctgctcacagctggcaacttggagctctgcagctcccagtagctactggtgatcatgctgaaacagatggcctcacttggcccaactagccattcagtatatcctttgatttcattccttaatctgtagtgtgtcagtgattgagaagaaagatcacagcttactggtgttgttatgagataggatgtaatagtgacatcattctagccttaagacccagctcaaatctggaaaagactgaatgtcaatgatgtcatcctccatccctacttctactcactcatcccttctcctactcacctcttcctcacaaatcttcctacaacaatcatctagagtcacggcctgtttcgtgggcttatgaaccacacagtcccacagggatccatgcccggaagtatgtcccatgcttggggtttgatgctgccttggaattgataataactatctttgtttttggttttgttttgttttgtttttgttttgtttttttttgagacagagtcttgttctgtcgcccagactggagtgcagtggcgccatctcggctcgccgcaac

SEQ ID NO: 727102 - DNA, 1533 bp, Homo sapiens
gttctgcattttgctgtgaaagtgctttaaaattgatgagccttcttgggaaaggtccactgtcaggttgtggcagatgttacagcagctgctcccatgttttaaagtgcctttgatgtgatccagccaatgcgatggaaagcagccttcaaagtggaaagagtagcagctgtggctgcagcagaccttccattgatggagcctgttgaggagtctaaatggctccaaaagatcatgaagctgggctgatggacattcaatcaccatacccactccactgttgtgccaaatagggagaatagagagagaagcagttgtgccagctgctactattggggttatgatgcatttcattctgtaatgaatattcttagtgttttctttctccgaaatctcatgagattatagtacatgttcctccataggcaaaattcttaaatcaatattcattcactcgactaatatttattgagcttctgatgtggcagtcaccatgaggccctagggattcaataataaataagagaacatttttcctttcaagagcttaaaactmatagggaaaataatatataaggaaaaaggccatgtgccgtcattaagggttatgatattggcaaacggtggttcctaagagagattgtgaatatagatgacatataggaggaatacgggaaagctaaataaagatgtctgcaaagaacaattagactttaatctaaaaacaatgggaaacaattacagcctgaaaacataggagggaaagattttttgttttgaaaaaaagaaaaagatattgattggaagcagaaaacgctaccaacccaagagacaactcttcccagtatgtgcagtgttaacatatactttatttaaaacatattttaaaagccgatcctaagcacaaggaggtttaagcagcattgagaccagcagggcccctgatgaagataatggtgagaaaataataatctctgctcacagctggcaacttggagctctgcagctcccagtagctactggtgatcatgctgaaacagatggcctcacttggcccaactagccattcagtatatcctttgatttcattccttaatctgtagtgtgtcagtgattgagaagaaagatcacagcttactggtgttgttatgagataggatgtaatagtgacatcattctagccttaagacccagctcaaatctggaaaagactgaatgtcaatgatgtcatcctccatccctacttctactcactcatcccttctcctactcacctcttcctcacaaatcttcctacaacaatcatctagagtcacggcctgtttcgtgggcttatgaaccacacagtcccacagggatccatgcccggaagtatgtcccatgcttggggtttgatgctgccttggaattgataataactatctttgtttttggttttgttttgttttgtttttgttttgtttttttttgagacagagtcttgttctgtcgcccagactggagtgcagtggcgccatctcggctcgccgcaac

SEQ ID NO: 727103 - DNA, 1533 bp, Homo sapiens
gttctgcattttgctgtgaaagtgctttaaaattgatgagccttcttgggaaaggtccactgtcaggttgtggcagatgttacagcagctgctcccatgttttaaagtgcctttgatgtgatccagccaatgcgatggaaagcagccttcaaagtggaaagagtagcagctgtggctgcagcagaccttccattgatggagcctgttgaggagtctaaatggctccaaaagatcatgaagctgggctgatggacattcaatcaccatacccactccactgttgtgccaaatagggagaatagagagagaagcagttgtgccagctgctactattggggttatgatgcatttcattctgtaatgaatattcttagtgttttctttctccgaaatctcatgagattatagtacatgttcctccataggcaaaattcttaaatcaatattcattcactcgactaatatttattgagcttctgatgtggcagtcaccatgaggccctagggattcaataataaataagagaacatttttcctttcaagagcttaaaactaatagggaaaataatatataaggaaaaaggccatgtgccgtcattaagggttatgatattggcaaacggtggttcctaagagagattgtgaatatagatgacatataggaggaatacgggaaagctaaataaagatgtctgcaaagaacaattagactttaatctaaaaacaatgggaaacaattacagcctgaaaacataggagggaaagattttttgttttgaaaaaaagaaaaagatattgattggaagcagaaaacgctaccaacccaagagacaactcttcccagtatgtgcagtgttaacatatactttatttaaaacatattttaaaagccgatcctaagcacaaggaggtttaagcagcattgagaccagcagggcccctgatgaagataatggtgagaaaataataatctctgctcacagctggcaacttggagctctgcagctcccagtagctactggtgatcatgctgaaacagatggcctcacttggcccaactagccattcagtatatcctttgatttcattccttaatctgtagtgtgtcagtgattgagaagaaagatcacagcttactggtgttgttatgagataggatgtaatagtgacatcattctagccttaagacccagctcaaatctggaaaagactgaatgycaatgatgtcatcctccatccctacttctactcactcatcccttctcctactcacctcttcctcacaaatcttcctacaacaatcatctagagtcacggcctgtttcgtgggcttatgaaccacacagtcccacagggatccatgcccggaagtatgtcccatgcttggggtttgatgctgccttggaattgataataactatctttgtttttggttttgttttgttttgtttttgttttgtttttttttgagacagagtcttgttctgtcgcccagactggagtgcagtggcgccatctcggctcgccgcaac

SEQ ID NO: 727104 - DNA, 1533 bp, Homo sapiens
gttctgcattttgctgtgaaagtgctttaaaattgatgagccttcttgggaaaggtccactgtcaggttgtggcagatgttacagcagctgctcccatgttttaaagtgcctttgatgtgatccagccaatgcgatggaaagcagccttcaaagtggaaagagtagcagctgtggctgcagcagaccttccattgatggagcctgttgaggagtctaaatggctccaaaagatcatgaagctgggctgatggacattcaatcaccatacccactccactgttgtgccaaatagggagaatagagagagaagcagttgtgccagctgctactattggggttatgatgcatttcattctgtaatgaatattcttagtgttttctttctccgaaatctcatgagattatagtacatgttcctccataggcaaaattcttaaatcaatattcattcactcgactaatatttattgagcttctgatgtggcagtcaccatgaggccctagggattcaataataaataagagaacatttttcctttcaagagcttaaaactaatagggaaaataatatataaggaaaaaggccatgtgccgtcattaagggttatgatattggcaaacggtggttcctaagagagattgtgaatatagatgacatataggaggaatacgggaaagctaaataaagatgtctgcaaagaacaattagactttaatctaaaaacaatgggaaacaattacagcctgaaaacataggagggaaagattttttgttttgaaaaaaagaaaaagatattgattggaagcagaaaacgctaccaacccaagagacaactcttcccagtatgtgcagtgttaacatatactttatttaaaacatattttaaaagccgatcctaagcacaaggaggtttaagcagcattgagaccagcagggcccctgatgaagataatggtgagaaaataataatctctgctcacagctggcaacttggagctctgcagctcccagtagctactggtgatcatgctgaaacagatggcctcacttggcccaactagccattcagtatatcctttgatttcattccttaatctgtagtgtgtcagtgattgagaagaaagatcacagcttactggtgttgttatgagataggatgtaatagtgacatcattctagccttaagacccagctcaaatctggaaaagactgaatgtcaatgatgtcatcctccatccctacttctactcactcatcccttctcctactcacctcttcctcacaaatcttcctacaacaatcatctagagtcacggcctgtttcgtgggcttatgaaccacacagtcccacagggatccatgcccggaagtatgtcccatgcttggggtttgaygctgccttggaattgataataactatctttgtttttggttttgttttgttttgtttttgttttgtttttttttgagacagagtcttgttctgtcgcccagactggagtgcagtggcgccatctcggctcgccgcaac

SEQ ID NO: 727105 - DNA, 627 bp, Homo sapiens
gtatttcaatcatgagaacaaaaggcacacaggaaaaaaataaagcaagaacattaaagacatccaggccaccgatgtcatatgatgctaccaaagcaaccttggtctgcttattatttgagaaaagtgatgctgtaaatttttttttgaacttttctgctgtacttttatttcatttcatttaaaaaaataacagctttatttagatataattcacatatcatacaatgcacctatctaaaatgtacaattttaaatcgtgatgtttagtaaattcacaaagtcatgcaatcattattataaccaattttagaaagttgttattatcccaacaccacacacccacccttgtacccattagaagtcacccccacccccacccctaggcagccactaaagaacttgctgtctctataaatgygcctattctggacattttgtataaatggaattatataatatgtggtcttctgtgactggcttctttcactttgtataacattttcaagtttcatctatattgtagaataaattagtatttcatttttaatcatgggataatattctattttatggatatgccaccttttgtttgtccatttataagttgatgagcatttgggttgt

SEQ ID NO: 727106 - DNA, 966 bp, Homo sapiens
attttaaaactctttttaatttttgtgggtacatagtgggtggatatattcatggggtatatgatatattggggtacagccatgcaatgcacaatattatcatagaaaattgggcatccatcccctcaagcacatatcctttgtgttacaacaatccaattatcctttcagttatcttaaaatgtacaaataaattattattgactgtagtccccttgttctgctatcaaatactaggttttattctttatgtctattttttgtaccaattaaccatccccaccttccctgcctcygccaccacccttcccagcccctggtagtcattcttctattctctatctccatgaattcatttgtcttgatttttagaccccacaagtaagccggaacatgtaacgtttgtctttctgaacctggctgatttcacttaacataatgacccccagttctgtccatgttgttgcaaatgaaagaatctcttttttatggctgaagagtactccattgtgcattagtgccacattttctttatccattcatctgttgatggacacttaggtttcagaccacattaacctttgaaaaccactggaagcagctctgttgtcaatttttcattttaccaattgtgccagtttatttaaatcttctcaccccactacagctccatagttctagtgttttcattccggtttttttccttttttttttttttttttttttgagacggagtctcgctctgtagcccaggctggcgtgcagtggcgcgatctcgtctcactgcaagctccgccggccgggttcacgccattctcctgcctcagcctcctgagtagctgggactacagacgcccgccaccacgcccggctaatttttttggatttgtagtagagatggggtttcaccttgttagccaggatggtctcgatctcctgacctcgtgatccacccgcctcggcctc

SEQ ID NO: 727107 - DNA, 996 bp, Homo sapiens
catggtggaaggccaagaaacacattcagagaaggggcgtggacttgtctaaaaggacgttttcctttctgcctgggccagccaggcggcagagccctgcactgcctgygactgaggaagactctgttgctatgcgccggaagcttaattttattattgctctcccctatttaatgtctgtctctcaggcagctggtgatgttttaatgaagctggaattgtatagtctgtagcgctggataatcataagctgccgagtcagaatcaaattaataattcatgaaattaaagtgtataattaatttgaactgtgcagatgagaagaagggccagagcccacagcctggaaggagctgaagtgtggggagtgtttactgaactcagcttctatttccaaataatataatctgcatgcaggttaggggtagtctgtgggtctacctgaacacgtatgcttaccagaaacaaggttctttcaactaaaacctggaatgactttcttagaagttcaaaagcattttaattgattttgatttacccttccctggccccaaaagaatgttgtttgaacagaaaatgtgatactgggttacaagtctttgttgcatggaggtcctgcagaacgtgccatcagaaccgttgcttctgcagttcaaaaggtcgtaagtcaaatccaaacattcaggaactctactgagcttccaggcccatggatttctcacccgtaagtgctctttctctttctccctctctcatatatgtatgtcatacaaacagaaaatacaaatgacttctctagccaggcttcccttggccactcttttggcttccctgggccacaatggaagaagatgaattgtcttgtgccacatataaaaatacactaacactaacaatagctgatgaggtaaaagaaaatcacaaaaaaatcttataatggtttaagaaagtttgtaagtttgtgttgggccacattcaaagctggtctgggccgca

SEQ ID NO: 727108 - DNA, 996 bp, Homo sapiens
catggtggaaggccaagaaacacattcagagaaggggcgtggacttgtctaaaaggacgttttcctttctgcctgggccagccaggcggcagagccctgcactgcctgtgactgaggaagactctgttgctatgcgccggaagcttaattttattattgctctcccctatttaatgtctgtctctcaggcagctggtgatgttttaatgaagctggaattgtatagtctgtagcgctggataatcataagctgccgagtcagaatcaaattaataattcatgaaattaaagtgtataattaatttgaactgtgcagatgagaagaagggccagagcccacagcctggaaggagctgaagtstggggagtgtttactgaactcagcttctatttccaaataatataatctgcatgcaggttaggggtagtctgtgggtctacctgaacacgtatgcttaccagaaacaaggttctttcaactaaaacctggaatgactttcttagaagttcaaaagcattttaattgattttgatttacccttccctggccccaaaagaatgttgtttgaacagaaaatgtgatactgggttacaagtctttgttgcatggaggtcctgcagaacgtgccatcagaaccgttgcttctgcagttcaaaaggtcgtaagtcaaatccaaacattcaggaactctactgagcttccaggcccatggatttctcacccgtaagtgctctttctctttctccctctctcatatatgtatgtcatacaaacagaaaatacaaatgacttctctagccaggcttcccttggccactcttttggcttccctgggccacaatggaagaagatgaattgtcttgtgccacatataaaaatacactaacactaacaatagctgatgaggtaaaagaaaatcacaaaaaaatcttataatggtttaagaaagtttgtaagtttgtgttgggccacattcaaagctggtctgggccgca

SEQ ID NO: 727109 - DNA, 996 bp, Homo sapiens
catggtggaaggccaagaaacacattcagagaaggggcgtggacttgtctaaaaggacgttttcctttctgcctgggccagccaggcggcagagccctgcactgcctgtgactgaggaagactctgttgctatgcgccggaagcttaattttattattgctctcccctatttaatgtctgtctctcaggcagctggtgatgttttaatgaagctggaattgtatagtctgtagcgctggataatcataagctgccgagtcagaatcaaattaataattcatgaaattaaagtgtataattaatttgaactgtgcagatgagaagaagggccagagcccacagcctggaaggagctgaagtgtggggagtgtttactgaactcagcttctatttccaaataatataatctgcatgyaggttaggggtagtctgtgggtctacctgaacacgtatgcttaccagaaacaaggttctttcaactaaaacctggaatgactttcttagaagttcaaaagcattttaattgattttgatttacccttccctggccccaaaagaatgttgtttgaacagaaaatgtgatactgggttacaagtctttgttgcatggaggtcctgcagaacgtgccatcagaaccgttgcttctgcagttcaaaaggtcgtaagtcaaatccaaacattcaggaactctactgagcttccaggcccatggatttctcacccgtaagtgctctttctctttctccctctctcatatatgtatgtcatacaaacagaaaatacaaatgacttctctagccaggcttcccttggccactcttttggcttccctgggccacaatggaagaagatgaattgtcttgtgccacatataaaaatacactaacactaacaatagctgatgaggtaaaagaaaatcacaaaaaaatcttataatggtttaagaaagtttgtaagtttgtgttgggccacattcaaagctggtctgggccgca

SEQ ID NO: 727110 - DNA, 996 bp, Homo sapiens
catggtggaaggccaagaaacacattcagagaaggggcgtggacttgtctaaaaggacgttttcctttctgcctgggccagccaggcggcagagccctgcactgcctgtgactgaggaagactctgttgctatgcgccggaagcttaattttattattgctctcccctatttaatgtctgtctctcaggcagctggtgatgttttaatgaagctggaattgtatagtctgtagcgctggataatcataagctgccgagtcagaatcaaattaataattcatgaaattaaagtgtataattaatttgaactgtgcagatgagaagaagggccagagcccacagcctggaaggagctgaagtgtggggagtgtttactgaactcagcttctatttccaaataatataatctgcatgcrggttaggggtagtctgtgggtctacctgaacacgtatgcttaccagaaacaaggttctttcaactaaaacctggaatgactttcttagaagttcaaaagcattttaattgattttgatttacccttccctggccccaaaagaatgttgtttgaacagaaaatgtgatactgggttacaagtctttgttgcatggaggtcctgcagaacgtgccatcagaaccgttgcttctgcagttcaaaaggtcgtaagtcaaatccaaacattcaggaactctactgagcttccaggcccatggatttctcacccgtaagtgctctttctctttctccctctctcatatatgtatgtcatacaaacagaaaatacaaatgacttctctagccaggcttcccttggccactcttttggcttccctgggccacaatggaagaagatgaattgtcttgtgccacatataaaaatacactaacactaacaatagctgatgaggtaaaagaaaatcacaaaaaaatcttataatggtttaagaaagtttgtaagtttgtgttgggccacattcaaagctggtctgggccgca

SEQ ID NO: 727111 - DNA, 1367 bp, Homo sapiens
cacaactgaacttaacaatgggctccacgtagctttagcctgaaagccactccctcaaagcctctcttgtagctcacatgtggctaaaagggtttgtttttacactgatacctagccactaatcactccctctgatgtgggatcagaccagcaatccaggacaggtccattccagcaatgaggaacaattaaaacctaactacaaaatgattaatcagcaatggcttcagagttaagatcttgatcaagagagaagcgtgaaagttgtcagaatcagaatgaagttacctgatttaaaaccctgaaaaytggagccagagaaggccatgaaggaagggttctcatgcacatacacctgataacaataactatcacaaaggctttgcagaaaacacaaccttgcataggcttgatatgcaaagatagtcttcatagactcaaagagatttgactccaacatggaaatgagacatcctgcacaatggccaactctactctttgcctacccaatggtcatctctccttcttccttgctaatagaattataactttgtttttaggtagtgagtgataatccattgatttccaggaagcctagcctctccataggaatgagttatggtaggtcaaatccattcacaataatactatttctttttcccatggattggtccagaaatcaacacatgatccaatgtgaaccaatgaggcatgagggaagtctcttagggagtttactcttcccatgtaaaagataagagacatctcaagataaaaccctttgcctcctgcccatccgctattgcttagagggtctaccatgtgccaggaatactttgaactcttgagaacaatgtctcagctaccagagggattatattctgttaatgaagacagaaaataaacagtggacacatgcttaaataggtcatgtactacgaaggggaataaatcagggttattccacagagagtgagcgagtgtgtctttttaagctgagaacagaaaatatctgggaaaagaatcctttatcaagtgaagaggtcattctagaaacaaaaacagccagtgtaggtggactgtggaaagtaaagatgagagggagagtggtgggaaatgaggtaggaaaatggtgagaatagatgatgttagaagccattacaaggaattttgagtttattctcaaatgtgatatgagccactggagggttttaacctggggacttatttctagaaaaatgttaacacaaactaaggttttgattaattaccatgtattttaaaggctttgagttgaaagagaaaaatctaagtaggaaagacccaatttactagcaatccttctcctaggcttgcttatttattta

SEQ ID NO: 727112 - DNA, 1367 bp, Homo sapiens
cacaactgaacttaacaatgggctccacgtagctttagcctgaaagccactccctcaaagcctctcttgtagctcacatgtggctaaaagggtttgtttttacactgatacctagccactaatcactccctctgatgtgggatcagaccagcaatccaggacaggtccattccagcaatgaggaacaattaaaacctaactacaaaatgattaatcagcaatggcttcagagttaagatcttgatcaagagagaagcgtgaaagttgtcagaatcagaatgaagttacctgatttaaaaccctgaaaattggagccagagaaggccatgaaggaagggttctcatgcacatacacctgataacaataactatcacaaaggctttgcagaaaacacaaccttgcataggcttgatatgcaaagatagtcttcatagactcaaagagatttgactccaacatggaaatgagacatcctgcacaatggccaactctactctttgcctacccaatggtcatctctccttcttccttgctaatagaattataactttgtttttaggtagtgagtgataatccattgatttccaggaagcctagcctctccataggaatgagttatggtaggtcaaatccattcacaataatactatttctttttcccatggattggtccagaaatcaacacatgatccaatgtgaaccaatgaggcatgagggaagtctcttagggagtttactcttcccatgtaaaagataagagacatctcaagataaaaccctttgcctcctgcccatccgctattgcttagagggtctaccatgtgccaggaatactttgaactcttgagaacaatgtctcagctaccagagggattatattctgttaatgaagacagaaaataaacagtggacacatgcttaaataggtcatgtactacgaaggggaataaatcagggttattccacagagagtgagcgagtgtgtctttttaagctgagaacagaaaatatctgggaaaagaatcctttatcaagtgaagaggtcattctagaaacaaaaacagccagtgtaggtggactgtggaaagtaaagatgagagggagagtggtgggaaatgaggtaggaaaatggtgagaatagatgatgttagaagccattacaaggaattttgagtttattctcaaatgtgatatgagccactggagggttttaacmtggggacttatttctagaaaaatgttaacacaaactaaggttttgattaattaccatgtattttaaaggctttgagttgaaagagaaaaatctaagtaggaaagacccaatttactagcaatccttctcctaggcttgcttatttattta

SEQ ID NO: 727113 - DNA, 630 bp, Homo sapiens
gtagtcactccatttctcgcctgtacccccaagtcctaggcaaccaataacctactttctgtccctgtcattttgtctattctggacatttcatgtaaatggaatcattcrgtaagtggtcttttgtgatgagcttctatcgcttagcaaaatattttcaagtttccttcgctctgtagctcatatcagtacctcctgtattcttatggccaaatgaaatcccactgtatagatatacacattttatttatctattcatcagttgatgaatatttaggttatttccactttggggctattatgataaggctgctgtgaacacttacatacaagtttctgcgtaggcatatgttttcacttctcttggggtatatacctaggagtggaatttctgggttatgtggtaactctgtatgccctacagaaaaaaagttatattaaaaaagtaataagaataaatataagcccactattatgccaacttagtgtatgatttgtatgattcgtttatataattatttgtataattttagtatgatttttaaaaggcaatgaaaatgatcgaaaggatgaagtggctcccatgtgaagacagactaaaaagattacaattcagtctagcaggaggaa

SEQ ID NO: 727114 - DNA, 630 bp, Homo sapiens
gtagtcactccatttctcgcctgtacccccaagtcctaggcaaccaataacctactttctgtccctgtcattttgtctattctggacatttcatgtaaatggaatcattcagtaagtggtcttttgtgatgagcttctatcgcttagcaaaatattttcaagtttccttcgctctgtagctcatatcagtacctcctgtattcttatggccaaatgaaatcccactgtatagatatacacattttatttatctattcatcagttgmtgaatatttaggttatttccactttggggctattatgataaggctgctgtgaacacttacatacaagtttctgcgtaggcatatgttttcacttctcttggggtatatacctaggagtggaatttctgggttatgtggtaactctgtatgccctacagaaaaaaagttatattaaaaaagtaataagaataaatataagcccactattatgccaacttagtgtatgatttgtatgattcgtttatataattatttgtataattttagtatgatttttaaaaggcaatgaaaatgatcgaaaggatgaagtggctcccatgtgaagacagactaaaaagattacaattcagtctagcaggaggaa

SEQ ID NO: 727115 - DNA, 645 bp, Homo sapiens
ttgctaaagagtctttttttttttttgagacagtcttgccctgtcgcccaggctggagtgcagtggccctatttcagctcactgcaacctccacctcccaggttcaaacaattctcctgtctcagcctctcgagtagcagggattacaggcatgtgccaccacgaccagctaatttttgtatttttagtagagatggggtttcaccatgttggtcatgctggtctcgaactcctaacctcagatgatccacctgcctcggcctcccaaagtgctgggattacaggcatgagccaccgcacccagsctattgctgaagagtctttattctcctcccgagaccctgctgcccatcccactgccaagcaagtgaaatcaaagttccttcttatggtattcagtgccctctgagtgtgggctccaacttccatatcgtattgagcctcagtttcctgcatcccttgggcatcccatgctctggcaggggaatcacaaccccttctgcttcaccctcagggatcttaagccctgctgtcccctctgtctggaaagtcttttttccctttttccacctgagaacatctggctcacccttcaagctcagatcaaataccactccctccgtcggccttccacatcctccatca

SEQ ID NO: 727116 - DNA, 645 bp, Homo sapiens
ttgctaaagagtctttttttttttttgagacagtcttgccctgtcgcccaggctggagtgcagtggccctatttcagctcactgcaacctccacctcccaggttcaaacaattctcctgtctcagcctctcgagtagcagggattacaggcatgtgccaccacgaccagctaatttttgtatttttagtagagatggggtttcaccatgttggtcatgctggtctcgaactcctaacctcagatgatccacctgcctcggcctcccaaagtgctgggattacaggcatgagccaccgcacccagcctattgctgaagagtctttattctcctcccgagaccctgctgyccatcccactgccaagcaagtgaaatcaaagttccttcttatggtattcagtgccctctgagtgtgggctccaacttccatatcgtattgagcctcagtttcctgcatcccttgggcatcccatgctctggcaggggaatcacaaccccttctgcttcaccctcagggatcttaagccctgctgtcccctctgtctggaaagtcttttttccctttttccacctgagaacatctggctcacccttcaagctcagatcaaataccactccctccgtcggccttccacatcctccatca

SEQ ID NO: 727117 - DNA, 2712 bp, Homo sapiens
tttgttaaaacactcataggttacatatacaatgcacattagtatttcagtattctaatcaaataacagaagcaacaacatagcagtgcaaaattgcctaggtagcaagagcagcagtcattgatttgctgtcctcacagtgtaggctaacttaaaaagaggacttgtaccataccccaattttaaataagctaaattctgacagatagcttaaggcaaccagggaataccataagcctcttttataaccaataataagtaagtttgaatgattgttctaccataagttcccatttttgtttatttttagaaccattatagtagtggcaggtgtgttttgggggtggggtggttatttgttgtttttcccagaagaaaaattttcacaatcccactatccctaaaaatctatttttgttttggtgttccatctcttagtccttaggcatatatgcttttaaaaaaaacattgaaatcgtactataacatactatgttaagtggtaatggttggttttgttctgtctacactctgttgtttattattctgaaacagtgatgtgtatgcagatgcctggtggtaattcctagctcttgggcagagattttaattttaccagaaccatgagactgtagtccctggtcttgcccagtgttttctagagttgtcaatagtgtgtcacaaaattatccacacatagatttattcttgaagagaatattaaaaaaatgccatgcaatattgtcaggacttgttatgatggccagctctaagaaattaaatgagtaaactccccaaagactattaggcagtgttttagaataaggagtactgtaaagctatcatgagcagtccaagatgacagctcatttatccaacaaacagggtacagtaattgagagcctgggctctagagccacacagaccctggtttgaagccagttctgccacttcctagctatgtaatcttactaagtgctgtattactatcaaaaggaaagaatttaagtgattcaaataggggttaaaagcattattcatctgggcgcagtagctcttgcctgtaatcccagcactttgggaggccaaggtgggcggatcacctgaggtctggagttcaaaactagcctggccaaaatggtgaaaccctgtttctactgaaaatacaaaaattagccaggtgtagtggcatgcacctgtagtcccaggtacttgggaggctgaggcaggagaactgcttgaacccaggagatggaggttgcagtgagccgagattgtgccactgcactccagcctggatgacagagcgagacttcatctcaaaaaaaaaaaaaaaagaagaagaagaagcattatttagctgatgcactcagggtacacttgaactccaggtaacttcccaagtaaagcaagattggagctttatagagtaaagagaagaaagggttgtatgtccgtgtggtttagctcaggtaacagtttttaatgttaattgatgtgaaacttttggttggagattgtttcatttttttatacctcttcctcaggaatatactgatgcaatcctatccggataactgttattatattttgagagttgttcttacaagccttgtagtttctcagttggtcaaggttcacaggtgggagaggtggcaaaatagggataacggggaaaggaggcgagggttgaaggcaaggaaaattgggaatcctctctcgtgtgctttcttttatatcagcaatgtaagcaaagtgcagtgggatcataaaacaaaggatgattaactgttagtccagaaaattcaggaaggcatcatagaagaaactgggtcctaaaaatgaacaggagtttgccatgcagacaaaagggaagggacaggccaactctgggcacactgcttacgagttagccctgctccacaaggaaaaatttaagagcttttatataaaataaataaggttttttaaaaagggactagactatatatagaggamaagatatagataaaagcaaagaggtatgaaagtttaaaaaatggtaagaacttcaatgtggctgaagtatagagtacttgttagacaacggctatcacaaggttaaatttcacaattataatgccactcaaatgcaactgaaacatctgatacatgaaaaccttgtgtgagctgcctcagaattaagataatctaggctgcagaagcccactggggccaaaacttacaagctcagaaatagtgacccagggtacccaccattgttcatggccatcacaccaatcttagaggattaataccacctcatttctggggcttcgagtcacatagaaaagatgaaggaaacccgtggaaccaaattaataaaataaagcatcctcagtgagaatctggcaatatgactggtgcctggtgtgcctgtagagggagttgctagtggtggctggctcagaggaactccgtagaatcgctgtgtctgccacttaaatgtacttggcacacacagtaggagggtgctaaagattgccacaaactgataaagttcctggcttccatccactgtcacagttaggcagagtaagcccttttatccaggagtcctgctggactcctgaatcagagttctccacatctattgttcggagaccctcccagctatatatttttttggaaatacacaacaatgtatcccatggcttttattaagactcacta

SEQ ID NO: 727118 - DNA, 963 bp, Homo sapiens
gtagaaccaggagctctaactgccgtttcctataatttatcactcaactgaaaaagagaacctgtgattgttaccatcctccatagaatgcctgttaaatccagaaatctttagtgtaaatctcagcttcataaaatccctaccttggataggctctaccactaatagtataactggtaatggggggcaggacttctcaagaatgtaatgttccatatttgcaacccagctgactgatttcttgttagaggctagtattctgcatcaaccgtccagcaagttaaaaatgaggagaggaaaaawtgaggaaattatggcaaagtcaaaaaagcattagaggagaaacagaagagaattttttctatggatgagatattaggggctaaaagaaccaaggaaaataatttaagtgttcagatcacaaggatagataaaatgtgttagatgttgactaaaggttataaagacaaaatgaaaggctggatgatggattgcttgagacaggcttttctccctaaaatgaatctatgtcagtagttttcacattctgaaagaaggaaaatactaggtcaggtactagaggtcagctgtgtgagaacaaatgaacccttttctcaatttccaggaccttctctcctgtaagaaccccttggaatgaggtaaaagtaagaaatgccatccagatcaataaaggaaagagcaaagaaagttagttgatactaaaagagtccattaaagtatataagaaataaggtgcttgagagagcagggaactaggctagctatttatttcagatacttaaaacaaatgtatgcagagccactgttgtaaaggaacagagatattgttaatggagaagtgcctgtgagacttgatgaaatagtgcctaaggaactccatttgcttgtttctcttataaatcattatcctgatttttttccagcaagtagaaaccagtccag

SEQ ID NO: 727119 - DNA, 402 bp, Homo sapiens
gactcacgcttgtaaacccctacttttgggaggcggaagtggtggatcacgaggtcaggagaagttcaaaagcagcctggccaagatggtgaaaccctgtctctaytaaaaatacaaaaattagctggacgtggtgggggctcctgtaatcccagctactccggaggctcaggcagggaattgcttgaacctgggaggtggaggttgcagtaagccaacatcgtcccactgcactccagcctgggcgacacagtgagactccgtctcaaaaaataaaaaaaaaaaaatttatcatctacagataaataaacgtaattaaattagcagagctacataaattacatcataaataaaagtaatgtaaccagtgtagcttgggaaaatatataaaaatatataaaa

SEQ ID NO: 727120 - DNA, 2162 bp, Homo sapiens
cccaaagtgctgggattacaggcgtgagccaccacgcccagctgaatcttctttaaatatacaagaaatgacagattatatgtttataaaataagcatttatataagcttaccaagaactacaaaaaggaaggaatcaggatatggagaatcttagtataaagaaatataaatgtatgttatttaatcatgctggacctcgatatattcattggcagaatggaattttggaactgtgtaatatctaagttacttttcaatgaatctctgattcagtatcttattagttatgtgaccttagaataattatttgaacctcttaagtcttagttttcttagatatattcaagagattaataaaagtagttaattttgtgataaataatataatttattcatttgacaagtcattgactgagctcttcctatctagaagtactgttctttgtgctcctaggctacagcagtgtgcatagtacatttgatattctcatgggccgtgcttctagggagaattccaaacaacaaacaaacaggcaaaaggatgtaacatcaaagggcaatcactaatgtgaaaaaataaagtaagcaaaaattataaagtgatggaccaaatataagaatatgatggaagctttttaagattggttaattaacactatctgctggtgtaagaaataccccaaagtcttgtcactgtttaaatgtacatcttatttatttcttagtctgatttgggtcagtcttttctcacagccagttctgtgacttggacattccgattcctatcatattgaggcattattctgccttggttttgtagtcagagaagaaatgagggaaagcattttctggctgggctggtagttgacttgcatttcttatgtccacaatgtatttgtcagaagatactcacatagccccaacttaattataaaagagattgtgaaatatatccttcctttatacccatgacaaagaaagggaaccctgatttgatggctactcagggatggagtctcagtctaccctaatggagtacatggcacaggcttttcaccaaaggcattgtgatagaaacactatgtttccagttttgctgtcactgtaagaatttggcctcttaataagggaatatgactttatatatttttgaggaaaaatgcagagtcaatgctgacaaaataagccaataatttgttagctatccttaccactgtggtttgactcttataattgagacttcatactcaataaacgaattgtctttcattgttctaygtattaaagtaaattaactagttttgcagtgattcatatttcttgatccccaagccatgtttcctttccttgtattctaaaatgatgtgcagatctataattaatcacctattctttaatttcattggttacattatattttaatcagatgtatacttaaaaaatattatttaaatcaacaattttatattatactaatatcagcacaaaaatttacaatccatagagttaacatcaaattccatcttaaaataaggaaaataatttctcagaatttaagaatacatatatatgtgggcaggtatgcataggcacacccttcaccatacacacactacgtaagtttaagtgtacttaagttcaagactgtttctataattttcttctcaatgaaattactcaaccagaaaatatccattggctttaaagaaagacattttgtaagtagaagtctattgcctgaagtaattccctacagggctactaccatctggcgaagaaatatgcacatcaaagtaaagagaaaatagcacctcctaaaagtaattttctctgagggtctgcatccttcctggtgtcctgccaacagcaatctttaaactcttagcttttacacagtgagaagctctcagcaccattcctagattagggaagctctgatttctggagatagctctgaataaaataaataataatattcaggggaacaaaaataggaacaaagattctaaatttaccttatagctgacatgtcactgggctatttatttccctacattaatcacagattttttctgaaatgaaatcacaaatttcttctgaaaatgactactctgggatattgaggcaaatctacatatttaccaagtaaggaattcatgc

SEQ ID NO: 727121 - DNA, 2162 bp, Homo sapiens
cccaaagtgctgggattacaggcgtgagccaccacgcccagctgaatcttctttaaatatacaagaaatgacagattatatgtttataaaataagcatttatataagcttaccaagaactacaaaaaggaaggaatcaggatatggagaatcttagtataaagaaatataaatgtatgttatttaatcatgctggacctcgatatattcattggcagaatggaattttggaactgtgtaatatctaagttacttttcaatgaatctctgattcagtatcttattagttatgtgaccttagaataattatttgaacctcttaagtcttagttttcttagatatattcaagagattaataaaagtagttaattttgtgataaataatataatttattcatttgacaagtcattgactgagctcttcctatctagaagtactgttctttgtgctcctaggctacagcagtgtgcatagtacatttgatattctcatgggccgtgcttctagggagaattccaaacaacaaacaaacaggcaaaaggatgtaacatcaaagggcaatcactaatgtgaaaaaataaagtaagcaaaaattataaagtgatggaccaaatataagaatatgatggaagctttttaagattggttaattaacactatctgctggtgtaagaaataccccaaagtcttgtcactgtttaaatgtacatcttatttatttcttagtctgatttgggtcagtcttttctcacagccagttctgtgacttggacattccgattcctatcatattgaggcattattctgccttggttttgtagtcagagaagaaatgagggaaagcattttctggctgggctggtagttgacttgcatttcttatgtccacaatgtatttgtcagaagatactcacatagccccaacttaattataaaagagattgtgaaatatatccttcctttatacccatgacaaagaaagggaaccctgatttgatggctactcagggatggagtctcagtctaccctaatggagtacatggcacaggcttttcaccaaaggcattgtgatagaaacactatgtttccagttttgctgtcactgtaagaatttggcctcttaataagggaatatgactttatatatttttgaggaaaaatgcagagtcaatgctgacaaaataagccaataatttgttagctatccttaccactgtggtttgactcttataattgagacttcatactcaataaacgaattgtctttcattgttctatgtattaaagtaaattaactagttttgcagtgattcatatttcttgatccccaagccatgtttcctttccttgtattctaaaatgatgtgcagatctataattaatcacctattctttaatttcattggttacattatattttaatcagatgtatacttaaaaaatattatttaaatcaacaattttatattatactaatatcagcacaaaaatttacaatccatagagttaacatcaaattccatcttaaaataaggaaaataatttctcagaatttaagaatacatatatatgtgggcaggtatgcataggcacacccttcaccatacacacactacgtaagtttaagtgtacttaagttcaagactgtttctataattttcttctcaatgaaattactcaaccagaaaatatccattggctttaaagaaagacattttgtargtagaagtctattgcctgaagtaattccctacagggctactaccatctggcgaagaaatatgcacatcaaagtaaagagaaaatagcacctcctaaaagtaattttctctgagggtctgcatccttcctggtgtcctgccaacagcaatctttaaactcttagcttttacacagtgagaagctctcagcaccattcctagattagggaagctctgatttctggagatagctctgaataaaataaataataatattcaggggaacaaaaataggaacaaagattctaaatttaccttatagctgacatgtcactgggctatttatttccctacattaatcacagattttttctgaaatgaaatcacaaatttcttctgaaaatgactactctgggatattgaggcaaatctacatatttaccaagtaaggaattcatgc

SEQ ID NO: 727122 - DNA, 2162 bp, Homo sapiens
cccaaagtgctgggattacaggcgtgagccaccacgcccagctgaatcttctttaaatatacaagaaatgacagattatatgtttataaaataagcatttatataagcttaccaagaactacaaaaaggaaggaatcaggatatggagaatcttagtataaagaaatataaatgtatgttatttaatcatgctggacctcgatatattcattggcagaatggaattttggaactgtgtaatatctaagttacttttcaatgaatctctgattcagtatcttattagttatgtgaccttagaataattatttgaacctcttaagtcttagttttcttagatatattcaagagattaataaaagtagttaattttgtgataaataatataatttattcatttgacaagtcattgactgagctcttcctatctagaagtactgttctttgtgctcctaggctacagcagtgtgcatagtacatttgatattctcatgggccgtgcttctagggagaattccaaacaacaaacaaacaggcaaaaggatgtaacatcaaagggcaatcactaatgtgaaaaaataaagtaagcaaaaattataaagtgatggaccaaatataagaatatgatggaagctttttaagattggttaattaacactatctgctggtgtaagaaataccccaaagtcttgtcactgtttaaatgtacatcttatttatttcttagtctgatttgggtcagtcttttctcacagccagttctgtgacttggacattccgattcctatcatattgaggcattattctgccttggttttgtagtcagagaagaaatgagggaaagcattttctggctgggctggtagttgacttgcatttcttatgtccacaatgtatttgtcagaagatactcacatagccccaacttaattataaaagagattgtgaaatatatccttcctttatacccatgacaaagaaagggaaccctgatttgatggctactcagggatggagtctcagtctaccctaatggagtacatggcacaggcttttcaccaaaggcattgtgatagaaacactatgtttccagttttgctgtcactgtaagaatttggcctcttaataagggaatatgactttatatatttttgaggaaaaatgcagagtcaatgctgacaaaataagccaataatttgttagctatccttaccactgtggtttgactcttataattgagacttcatactcaataaacgaattgtctttcattgttctatgtattaaagtaaattaactagttttgcagtgattcatatttcttgatccccaagccatgtttcctttccttgtattctaaaatgatgtgcagatctataattaatcacctattctttaatttcattggttacattatattttaatcagatgtatacttaaaaaatattatttaaatcaacaattttatattatactaatatcagcacaaaaatttacaatccatagagttaacatcaaattccatcttaaaataaggaaaataatttctcagaatttaagaatacatatatatgtgggcaggtatgcataggcacacccttcaccatacacacactacgtaagtttaagtgtacttaagttcaagactgtttctataattttcttctcaatgaaattactcaaccagaaaatatccattggctttaaagaaagacattttgtaagtagaagtctattgcctgaagtaattccctacagggctactaccatctggcgaagaaatatgcacatcaaagtaaagagaaaatagcacctcctaaaagtaattttctctgagggtctgcatccttcctggtgtcctgccaacagcaatctttaaactcttagcttttacrcagtgagaagctctcagcaccattcctagattagggaagctctgatttctggagatagctctgaataaaataaataataatattcaggggaacaaaaataggaacaaagattctaaatttaccttatagctgacatgtcactgggctatttatttccctacattaatcacagattttttctgaaatgaaatcacaaatttcttctgaaaatgactactctgggatattgaggcaaatctacatatttaccaagtaaggaattcatgc

SEQ ID NO: 727123 - DNA, 881 bp, Homo sapiens
tttgacgtctggggaagccctacgtgtttgtgtgtgtggaggtgtgcatatcttctccttctaaaccaataaatcttttctagccagccataaatagcaatcaagtgtccaaaagacagaagaaacaactcaaaactcagtatggttgaaaatcaagggagcctgttttgggcaatccacagcgttggtctgacttaacaacctttgattttaatcaataagcatttccatcccaggatgcatgcactttttcccaaacagtatttattgaggtctactatgtatcaggcaccactccatcaaaaagagaagcataagcagcttttttctgttttaaactggttgtctgtggacatcatttgagttgacactgaggttcttctggctgggaaatgagcacttgcatagggcattagagatagaggagtttttccrcaacctggttttgattccatggtctttcactgcagttcctccagctaatttttttttttttttgctagttttgatcctaccaatcatacatcagtttggattccatcttttagtcatccactagattttccatttgggtttgacccgctttataccactggttctgataccactggtactcgctttatacccctggttctaaactggtactactcagggattttacttctcagttctcaagttctaacacagactactgccagcagagatactcctagacagagtacccagactctgcaacagaggctagaaagaaataacagcaagcattttaggcagagaagcaagagagaaatgaaatggaaagaccatctggtatcccagaggacaatgagcacaggagaactggtggttagtgcttcgcttgagtctgaagtgcctgcaat

SEQ ID NO: 727124 - DNA, 881 bp, Homo sapiens
tttgacgtctggggaagccctacgtgtttgtgtgtgtggaggtgtgcatatcttctccttctaaaccaataaatcttttctagccagccataaatagcaatcaagtgtccaaaagacagaagaaacaactcaaaactcagtatggttgaaaatcaagggagcctgttttgggcaatccacagcgttggtctgacttaacaacctttgattttaatcaataagcatttccatcccaggatgcatgcactttttcccaaacagtatttattgaggtctactatgtatcaggcaccactccatcaaaaagagaagcataagcagcttttttctgttttaaactggttgtctgtggacatcatttgagttgacactgaggttcttctggctgggaaatgagcacttgcatagggcattagagatagaggagtttttccacaacctggttttgattccatggtctttcactgcagttcctccagctaatttttttttttttttgctagttttgatcctaccaatcatacatcwgtttggattccatcttttagtcatccactagattttccatttgggtttgacccgctttataccactggttctgataccactggtactcgctttatacccctggttctaaactggtactactcagggattttacttctcagttctcaagttctaacacagactactgccagcagagatactcctagacagagtacccagactctgcaacagaggctagaaagaaataacagcaagcattttaggcagagaagcaagagagaaatgaaatggaaagaccatctggtatcccagaggacaatgagcacaggagaactggtggttagtgcttcgcttgagtctgaagtgcctgcaat

SEQ ID NO: 727125 - DNA, 881 bp, Homo sapiens
tttgacgtctggggaagccctacgtgtttgtgtgtgtggaggtgtgcatatcttctccttctaaaccaataaatcttttctagccagccataaatagcaatcaagtgtccaaaagacagaagaaacaactcaaaactcagtatggttgaaaatcaagggagcctgttttgggcaatccacagcgttggtctgacttaacaacctttgattttaatcaataagcatttccatcccaggatgcatgcactttttcccaaacagtatttattgaggtctactatgtatcaggcaccactccatcaaaaagagaagcataagcagcttttttctgttttaaactggttgtctgtggacatcatttgagttgacactgaggttcttctggctgggaaatgagcacttgcatagggcattagagatagaggagtttttccacaacctggttttgattccatggtctttcactgcagttcctccagctaatttttttttttttttgctagttttgatcctaccaatcatacatcagtttggattccatcttttagtcatccactagattttccatttgggtttgacccgctttataccactggttctgataccactggtactcgctttatacccctggttctaaactggtactactcagggattttacttctcagttctcaagttctaacacagactactkccagcagagatactcctagacagagtacccagactctgcaacagaggctagaaagaaataacagcaagcattttaggcagagaagcaagagagaaatgaaatggaaagaccatctggtatcccagaggacaatgagcacaggagaactggtggttagtgcttcgcttgagtctgaagtgcctgcaat

SEQ ID NO: 727126 - DNA, 881 bp, Homo sapiens
tttgacgtctggggaagccctacgtgtttgtgtgtgtggaggtgtgcatatcttctccttctaaaccaataaatcttttctagccagccataaatagcaatcaagtgtccaaaagacagaagaaacaactcaaaactcagtatggttgaaaatcaagggagcctgttttgggcaatccacagcgttggtctgacttaacaacctttgattttaatcaataagcatttccatcccaggatgcatgcactttttcccaaacagtatttattgaggtctactatgtatcaggcaccactccatcaaaaagagaagcataagcagcttttttctgttttaaactggttgtctgtggacatcatttgagttgacactgaggttcttctggctgggaaatgagcacttgcatagggcattagagatagaggagtttttccacaacctggttttgattccatggtctttcactgcagttcctccagctaatttttttttttttttgctagttttgatcctaccaatcatacatcagtttggattccatcttttagtcatccactagattttccatttgggtttgacccgctttataccactggttctgataccactggtactcgctttatacccctggttctaaactggtactactcagggattttacttctcagttctcaagttctaacacagactactgccagcagagatactcctagacagagtacccagactctgcaacagaggctagaaagaaataacagcaagcattttaggcagagargcaagagagaaatgaaatggaaagaccatctggtatcccagaggacaatgagcacaggagaactggtggttagtgcttcgcttgagtctgaagtgcctgcaat

SEQ ID NO: 727127 - DNA, 589 bp, Homo sapiens
cacttatcacactaaactctaatcattgaataacttatctgtgtccctgactagagcttcagttctttaaggccagggactgggactttttcacctttgtaccccagcacctatctagcacagcatctgactcaatgtttaatgaaaaagcaaatgaacaaaaaatgaatggatgaatgaatgaccttcattatatgaaataaggcccagtatatggggacaggtcatgcctatttgctgttatgtgttcatagaagaggagaagatgatcgatgtctgccaagaaggcctaagggtgaggagtatattttacagttgtttttgtagttgaagttgtttttggtggcattgttgctgtttttcccccaacagtggggatgactctattcattcaggcacacctcttgccaggtaccactttggggccaaaggcatatatggyaacatagctgggcatggttcaaggttgagcaaagcaaccaattctcccccaagatgaaatccctggatggtgctatggctgccttctgaaagcaatttagaaagctctcacctgagtcttccttgttgtaggagttccatttgttat

SEQ ID NO: 727128 - DNA, 2663 bp, Homo sapiens
ctttgctgtcgtcaatgacaggatctaggctcagcagggtgagcaccctgggaactttgccctccctgggactggctcctaccacctgacactgtcaaagcacagtgggttcctcctgggtttccttgtgtttggctttttggcatctgccattgatagaaggagcacgcatccccatctgtctgtgcctgctgtctacccctctcctctgtttctggctgagtttccagcttatgaggtagagatggtatgtttttttcttaaaaaacatcatgttacattttaaaaacttatgaatttagcaactacctagtttaaaggtttatttctaaggtctttgagtagcgcagtctaacacattgccaagaaaaagaaggtacttcatagactcagactaattggcaatctttatgcttcctgcattgaaagttcttgtcctccagaggggattgagcctgatctaacttgtctgcatcgagtccttctctcaggagactacatctctgggaaggcaggggccgtgcctgactcacttgtgtattcccctggtttaacttagtgccggctcaaagaggacaccaagctggtcaaagaggtcatgttcagccctgagttgtagtctgggattcaggccgcctttggaagacgttccaaagatctcagaaggcccttgggggtgttggcattgcataacaggcatgggtttggattctgtggaggttgtttcccaagatggctgctacaatcctggccagtcccgatgcccttttgacatgtgactttgtctctactcctatccacaggtagagttcattgcccttcccctccagactgggctggctggagaaaccatgtcaagaaagagggaccctaagaatgagcctccacaagcaaagagaagccttggaagatgaaagaccatgagtagagagaggctctgcggagggcagacatctgagagaggccatctggggtcttccagaggagagaacacgtgcaacatgcatgaaactgggctgagcatcctcgccgagccctgcccagccaacccacagaactgcaagtaaatggggcgggtttcactttaagccaccaagtattgggcgagtttattacactgcaataggtcacagatacaaaccaacataaattcaaactccatttctacacctactaatactgtgatggtgaatacattttttttagcctctcgcctcatatgcaaaatgagaataataatgcccatttaatagaattagaaccttgccagccacggctcccacttgtagaaacttgccagccacacctcccacttggaattgcccatagcccagttgcagggctggtcttaggtggtggagaatatattaagtagttttatctccctactcttccttagctgaggggaccagaagtagctgcctgaccccaatggctcatgtgagcgtgtttaactcactcttgagattataaatgaagaagcccagaaattgaagtcaggtagttgagccttggatttttcagatcatgtagagccgaggccagtgtcagaaccccaatgagccaaagtcacasgggaacggaagctaagagggagttggaactctgagtggacatcaagggggtccatagagcaggtgtgcagagagaagcctagagaggctgcctgactgcagccagagactgggaatggagagagtgtcccaactcaatttcctgcctttggttctgagagattcccttgtgccccatttgctcaagcctgtgtgcgtaggagtgggttgcttcctgccaagtcatccctaatgaaatgtgaaaatgcaaatgccagacacaaagtggatgtgcagttcttcaaggtacagtagtgttttgttttgttttttaagtaatggatgaacggaacatttatctacttttctctcaaaatctatattcttttttctccataggtttgataacattaacctgatgcctagggtctcagaagaaaccagttttgggggtcagtgggactcagaaactaacctctttctaaacttcacacacaagcaaaaggtgtttttcccttggaggccagagctccgaggagtggggatgggagttgtggccgcctctgccatgaatgtacccctgcactgcccactggtgttggggaaatctaaggtccatacataagaagctttggttccttgatgttttctgtgaatggattacccagaataggatttttccagatttgcaggctcaaatgagacgccttacaggttggcttcagagcaagagttctctggaaaagaaggaatcataatcctttgataatattttcctaacagccactagaggaagttttcagagagtaataaatcgtgcgttctcatttatataaaaccttttactcctagcttggaacactatctcaactttttactaactagcaattttactaacaaattgactaaatcatttagcttctcagcctcagctttcttatccataaaatcaagatagcagtagttaacacctcctggagttgtttgagacttcaaataaatgatatacctaaggcactttgaagactgcctggtgggtagctcgctgagcccaggcctcagtgggtgtttgatgaatgcctgctttcattatttctgcaccagtgcgat

SEQ ID NO: 727129 - DNA, 2663 bp, Homo sapiens
ctttgctgtcgtcaatgacaggatctaggctcagcagggtgagcaccctgggaactttgccctccctgggactggctcctaccacctgacactgtcaaagcacagtgggttcctcctgggtttccttgtgtttggctttttggcatctgccattgatagaaggagcacgcatccccatctgtctgtgcctgctgtctacccctctcctctgtttctggctgagtttccagcttatgaggtagagatggtatgtttttttcttaaaaaacatcatgttacattttaaaaacttatgaatttagcaactacctagtttaaaggtttatttctaaggtctttgagtagcgcagtctaacacattgccaagaaaaagaaggtacttcatagactcagactaattggcaatctttatgcttcctgcattgaaagttcttgtcctccagaggggattgagcctgatctaacttgtctgcatcgagtccttctctcaggagactacatctctgggaaggcaggggccgtgcctgactcacttgtgtattcccctggtttaacttagtgccggctcaaagaggacaccaagctggtcaaagaggtcatgttcagccctgagttgtagtctgggattcaggccgcctttggaagacgttccaaagatctcagaaggcccttgggggtgttggcattgcataacaggcatgggtttggattctgtggaggttgtttcccaagatggctgctacaatcctggccagtcccgatgcccttttgacatgtgactttgtctctactcctatccacaggtagagttcattgcccttcccctccagactgggctggctggagaaaccatgtcaagaaagagggaccctaagaatgagcctccacaagcaaagagaagccttggaagatgaaagaccatgagtagagagaggctctgcggagggcagacatctgagagaggccatctggggtcttccagaggagagaacacgtgcaacatgcatgaaactgggctgagcatcctcgccgagccctgcccagccaacccacagaactgcaagtaaatggggcgggtttcactttaagccaccaagtattgggcgagtttattacactgcaataggtcacagatacaaaccaacataaattcaaactccatttctacacctactaatactgtgatggtgaatacattttttttagcctctcgcctcatatgcaaaatgagaataataatgcccatttaatagaattagaaccttgccagccacggctcccacttgtagaaacttgccagccacacctcccacttggaattgcccatagcccagttgcagggctggtcttaggtggtggagaatatattaagtagttttatctccctactcttccttagctgaggggaccagaagtagctgcctgaccccaatggctcatgtgagcgtgtttaactcactcttgagattataaatgaagaagcccagaaattgaagtcaggtagttgagccttggatttttcagatcatgtagagccgaggccagtgtcagaaccccaatgagccaaagtcacacgggaacggaagctaagagggagttggaactctgagtggacatcaagggggtccatagagcaggtgtgcagagagaagcctagagaggctgcctgactgcagccagagactgggaatggagagagtgtcccaactcaatttcctgcctttggttctgagagattcccttgtgccccatttgctcaagcytgtgtgcgtaggagtgggttgcttcctgccaagtcatccctaatgaaatgtgaaaatgcaaatgccagacacaaagtggatgtgcagttcttcaaggtacagtagtgttttgttttgttttttaagtaatggatgaacggaacatttatctacttttctctcaaaatctatattcttttttctccataggtttgataacattaacctgatgcctagggtctcagaagaaaccagttttgggggtcagtgggactcagaaactaacctctttctaaacttcacacacaagcaaaaggtgtttttcccttggaggccagagctccgaggagtggggatgggagttgtggccgcctctgccatgaatgtacccctgcactgcccactggtgttggggaaatctaaggtccatacataagaagctttggttccttgatgttttctgtgaatggattacccagaataggatttttccagatttgcaggctcaaatgagacgccttacaggttggcttcagagcaagagttctctggaaaagaaggaatcataatcctttgataatattttcctaacagccactagaggaagttttcagagagtaataaatcgtgcgttctcatttatataaaaccttttactcctagcttggaacactatctcaactttttactaactagcaattttactaacaaattgactaaatcatttagcttctcagcctcagctttcttatccataaaatcaagatagcagtagttaacacctcctggagttgtttgagacttcaaataaatgatatacctaaggcactttgaagactgcctggtgggtagctcgctgagcccaggcctcagtgggtgtttgatgaatgcctgctttcattatttctgcaccagtgcgat

SEQ ID NO: 727130 - DNA, 2663 bp, Homo sapiens
ctttgctgtcgtcaatgacaggatctaggctcagcagggtgagcaccctgggaactttgccctccctgggactggctcctaccacctgacactgtcaaagcacagtgggttcctcctgggtttccttgtgtttggctttttggcatctgccattgatagaaggagcacgcatccccatctgtctgtgcctgctgtctacccctctcctctgtttctggctgagtttccagcttatgaggtagagatggtatgtttttttcttaaaaaacatcatgttacattttaaaaacttatgaatttagcaactacctagtttaaaggtttatttctaaggtctttgagtagcgcagtctaacacattgccaagaaaaagaaggtacttcatagactcagactaattggcaatctttatgcttcctgcattgaaagttcttgtcctccagaggggattgagcctgatctaacttgtctgcatcgagtccttctctcaggagactacatctctgggaaggcaggggccgtgcctgactcacttgtgtattcccctggtttaacttagtgccggctcaaagaggacaccaagctggtcaaagaggtcatgttcagccctgagttgtagtctgggattcaggccgcctttggaagacgttccaaagatctcagaaggcccttgggggtgttggcattgcataacaggcatgggtttggattctgtggaggttgtttcccaagatggctgctacaatcctggccagtcccgatgcccttttgacatgtgactttgtctctactcctatccacaggtagagttcattgcccttcccctccagactgggctggctggagaaaccatgtcaagaaagagggaccctaagaatgagcctccacaagcaaagagaagccttggaagatgaaagaccatgagtagagagaggctctgcggagggcagacatctgagagaggccatctggggtcttccagaggagagaacacgtgcaacatgcatgaaactgggctgagcatcctcgccgagccctgcccagccaacccacagaactgcaagtaaatggggcgggtttcactttaagccaccaagtattgggcgagtttattacactgcaataggtcacagatacaaaccaacataaattcaaactccatttctacacctactaatactgtgatggtgaatacattttttttagcctctcgcctcatatgcaaaatgagaataataatgcccatttaatagaattagaaccttgccagccacggctcccacttgtagaaacttgccagccacacctcccacttggaattgcccatagcccagttgcagggctggtcttaggtggtggagaatatattaagtagttttatctccctactcttccttagctgaggggaccagaagtagctgcctgaccccaatggctcatgtgagcgtgtttaactcactcttgagattataaatgaagaagcccagaaattgaagtcaggtagttgagccttggatttttcagatcatgtagagccgaggccagtgtcagaaccccaatgagccaaagtcacacgggaacggaagctaagagggagttggaactctgagtggacatcaagggggtccatagagcaggtgtgcagagagaagcctagagaggctgcctgactgcagccagagactgggaatggagagagtgtcccaactcaatttcctgcctttggttctgagagattcccttgtgccccatttgctcaagcctgtgtgcgtaggagtgggttgcttcctgccaagtcatccctaatgaaatgtgaaaatgcaaatgccagacacaaagtggatgtrcagttcttcaaggtacagtagtgttttgttttgttttttaagtaatggatgaacggaacatttatctacttttctctcaaaatctatattcttttttctccataggtttgataacattaacctgatgcctagggtctcagaagaaaccagttttgggggtcagtgggactcagaaactaacctctttctaaacttcacacacaagcaaaaggtgtttttcccttggaggccagagctccgaggagtggggatgggagttgtggccgcctctgccatgaatgtacccctgcactgcccactggtgttggggaaatctaaggtccatacataagaagctttggttccttgatgttttctgtgaatggattacccagaataggatttttccagatttgcaggctcaaatgagacgccttacaggttggcttcagagcaagagttctctggaaaagaaggaatcataatcctttgataatattttcctaacagccactagaggaagttttcagagagtaataaatcgtgcgttctcatttatataaaaccttttactcctagcttggaacactatctcaactttttactaactagcaattttactaacaaattgactaaatcatttagcttctcagcctcagctttcttatccataaaatcaagatagcagtagttaacacctcctggagttgtttgagacttcaaataaatgatatacctaaggcactttgaagactgcctggtgggtagctcgctgagcccaggcctcagtgggtgtttgatgaatgcctgctttcattatttctgcaccagtgcgat

SEQ ID NO: 727131 - DNA, 969 bp, Homo sapiens
gggcaaccgcctccctgtgccatgacgcaggtggcaggagacccgggatgagtgaaggtgcaggatgacggcgggatggggtctgcttcgggaagtgccgccaaggcarcccctgagccctgcctgggttgatgaggcaggctgagctgcctagagtcctctcttaggggacctccttggccctaggctgaagcagagggcgcacagccagagttcccagtcagaacggggcctgttagagacgttcaggagggcgccaggctcgttagcatgattctttttcctttagaaaaacagactctcctggaacaactaggccaactccagctcctgccccacccacctgagtctggccaggcagcccgagcccagcgcccagagctctccttgaccatgacctcatccccaaaccctccaggctgggtccctgccctccaccgcatgaggcagggaaagaaaggagaagggaaggtcccagttcaaatatcagggtgcctgtcctctccccaagacaacctccctgtgccacccctagggagggtctcccatgtcatggacagccgcacagctctgctgagctgccccccacagcagtgggcccagccctgggcctgggggacattttcataatactgacgcccagccatcctgccctcacctcgggaatcctcacctccaattggaggggaggtgaagcagaaggcacggatctttttagaagttcctcagatggcttttaaaagttcctgcatcttgtcatcaggggcctctgcactctgcggtataaattatggggacagggaagacacacccctgccctcactgaactcccagccactctggtggttcctgttcacacaacctcacatatatgaggcctcctcagaaggctctagggcaatgaggaagacagggctgggggtcagccctggtgaaggggtagagagtgacccaggctgggtgtggtct

SEQ ID NO: 727132 - DNA, 933 bp, Homo sapiens
gctgggattacaggtgtgcaccaccacacttggctaatttttttgtgtgtttttagtagagatggggtttcgccatgttggccaggttgatcttaaactcctggcctcaagtgatccacccacctcagcctctcaaactgctgggattacaggcatgagccaccgtgcccagcctgttatatatcttcaaatagctagaaaagaggactttgactattcccaacacaaagaaatgataaatgtttgagatgatggatatgctaattattctatttcatcactatacatgtttcaaaacattactatgtactccataaatacaattattgtatcaattttataaattaaagaattttttaaatttcacctcataatattgttttgaaaattaaataaataggggagagaaatgaacaggtggagcagcagggagttttaggccaggaaaagtattctgcgtgatactgtattaatgccattgtcaaaacccctagaaccatacaacacagggaataaacactcacataaacttggacttttgttaaaagtaattttcaagcttggttcattgtttgcaayaaatgtagcacactcatgcagggtgttaatctcaaggaaaaatggaggcagggggtttggtatatgggagctgtgtactttccgatcaattttcctgtaaatctaaaactgctttaaaaaataaagtcttttttttaatgacatgagacaatatacttaacgtatttgcgcactgccagacatgtttgctgctgtagttaccaccctttgcctgaagcctgggatttgagttcattttctgtcatagaacctggtgaagcagaacagccccattcagactttacagccaacaagggtgtttcctttggtccactgtccccggagcagccctccctttagatattgctgaaggta

SEQ ID NO: 727133 - DNA, 963 bp, Homo sapiens
tgggagaaagggtaatacactcatacactcattttttttctttttttttcatttataattaatgcccccagctgcctgtaaaatgggtttgaggtcccattggtcctggttagtcgaccagctgggaactaaattattaaataatcatttgaaaattaaataactttatttcatttctccttgtactaggactcattagtactttccatggcatttcaaattttgatctaaacagcagtaataactatctttagattccccaaatattgtaaccccaaagttatttcatcctgacatactggatacagatgagagaagtctcacatctaacatttaacaggctactgtcctcccagggaggggagcgtctgcaccacagccctcacaggcaccaagaaacatttagcagtgcaagtaggaaatcagtaataatgataataaatttaggtatgtgtttgtgggtttgaggacagacttattttgagaaaacatatactgtcattggttggatatgaagaaatggaaataacaggactaagaagtgttttaaaaggrtaagtatgaggttagtggtttaccctgatactcaaagtttgcatcagttaaaaaagctggagtagagacagaaaaaaaggaagatatttgaaactggacagagcaaagtttgatctcaaaagcaaaaagccagttttgaaaaagatttagaagttgctctggagtaaaaaatccttcttctttgactttgaagcattcatttttctccagggaaattagaaatttcttagaaatgacctctgttggagcagcaccatggaaaaatatcttcaccacaaacaactccgtttctcaagtatgcagagccattgatgcaaaatgcatttgactcatcgttggaagagacgttatatttagtggtggagctggtaggatatttttagaaatagtaaagttcacagaattttt

SEQ ID NO: 727134 - DNA, 1189 bp, Homo sapiens
ctggaaatttggtttctcagcattgtgtcactacaaaagctggagtccacagatggtcttcactttaccctaagccccttcctcagcagttaacttcacctttttccttctttttaatgttggctgcagtttgaaaccccagtagatcttatcccaaaaataccactgtatggaccccaccctcagagattttcactgggtgagacccaggcagctgtacttttaaaaagtctccaggtgattccaaagtggaaccagattatctcatcctatgatcactgttgagctttggggtattagcatgaccaaaaaaaaaaaaaaaaaaaaagtgatgtctcatctgcagaactagtgaaggtctggaagtcacttgcatttagtgattggcatctaacacaagccactgatagtttttgtgggctgtatgtaaggacgaatattttcttatacttgcatcattcacagtgagcttggatttatgttatcttatttgttttcataacaatcttactgagtaagcagataagtttattgttttttttttttaatcccttcttgctaattgttgttcttaacagatgataaaaccaataattcaggtacttgcccaaggtcacacagccaacagtctgtacagccaggattaagacgaggccatctgatatcaaagtttatgcttttacatacacttcctttacacggttcaataatggtaaaataatgattccaggacctgggctaagtaatttagcagtgggtctcagttgctactttggcagcatattgaattcacctgggagcctkcaaaactcctgatgccaaagattttaaattaattggctggggtgaggcctgaggattggaatttttcaaaggttgaaaccaatgctatatatagaccatttcatttaatcccttagcaacaatatgagattggagtcatcaccatgttaaaaatgaggaaactgagacatacaagactttaacccaccagcccacctgtctaccagctaaagaatagcagaagccaggctcaaaacaagggtgaaccactgtctgcagctcttctggtcaccatatctgtctccaccaattttaaggcttttgcttcaaactttgaagcagatgcagctgagtgaaccatgagacatatactagccagagaaagaactgaatttagagtttttaa

SEQ ID NO: 727135 - DNA, 1025 bp, Homo sapiens
gcttccagacttgaatcaaattttcctatttttcttcctcagaatcattcagaacacagtatcattttgggctgtgggtagggggttttatttaaattatgatttaaaaaaaatctactcctccaatttttacattatagattaacatagacatatacgtgtggataatattatatgttatatctagtgattatatcttattatatcttatttgttaactgagtacctatgataaagtcatgaaaagagaatttttttttaatatttcctctggctccatatgtacagaaaggcatgtgatgttttacactttagaatttactagatctttttttcttctccttcttcctcttattttggagagagacagagttttgctcttgtctcccaggctggagtgcaatggcatgatcttggctcactgcaacctctgcctcctgggttcaaacgattctcctgcctcagtctcccaactagctgggattacaggtgcccaccaccatgcctagctaaatttttttgtatttttagtagagatagggtttcaccatgttggccaggctggtcttgaacgcctgacctcaggtgatccacccgcctcggccttccaaagtgttgggattacaagcgtgagccaccgcgcccagccgaatttactagatgtttagggttagttaacagtatcccacttgactcaattcagttccaaagtaaatttaaaagatctgctktttttgagccagtgaagtgctagccttcatttaaataagcaaggtctatatggggaacggaacacacatgaaaatgaatcacattgctaactcaaaaggtaaccagtaatcctttttatattttttcaatactttttacttcaagaaaatttatttatacccagccttttcccaaaaagtctttgaggtgattgattcctttttacctgcatttaaaaccattttccagcaccaaataaaatgagatattttccttacatcaagcaactctgtaaaatttaagggccgtcaata

SEQ ID NO: 727136 - DNA, 1128 bp, Homo sapiens
gtatttacccagccatttcatgaaatgcattgtggaaggggagaaaaaaaaaacaccagtattccatctgaacatatttcaccagaaaagcttagatgctgaattttgaaagaaggctttaggctgttgggaaatatgtatgcatgttacatgacagtctctgaccagctgctcttcaaatattattcctacatgctgttcattttttaaggatgaaaacataccagcaatttatttcagaggattraaacatttaagtgactatagctaatgaaatcaagttactatgagggccaagttctcaaacatggggacgatctgtttttcacatttaataaaaataacaaatgccctcctgaagagggagaaaacaaatcacttccctgcatacagcaaacagggattagaaatgaggggtctgggggctctcattgagtcacatggagtcacattctttagacccaatttactttctacattaggtttcgagtttagtgaactggtgaggtccgacacaatcaactgtccgagtttagattttggaggaggagcactaaacatgctttgatgagtgagctttcaaatgtggggctcttttttcttttattttcagaattggctttctgagatcatggtgaactatctgttcacgacgctaatggaagatatttctgctgtgaaaccttctctatcatctttccagctacaagaatttttttaaaaattacatgtattaatggttcacatatttctcctctgccttaaactgaatgaaaagccacagaaaccaaaaatttcttctaaaatggggaaagaagagatcatggcatctgtgtttctgaaaactgggtacaaaactatacatctatactctcaggatagaagttcaacagttttgattaactgaaaatgaaccagctgataatcacacggattaatgaaaccgaacagttaatctcatcaggtctgcctgccctgcatgcttctggtttcttgctttttgttatttttgttttctctttttccatgaagctgaaggctgcagtagctgaaggtcttgctgctgaatgctcaaacttgaccttcactggctactttacagataacatgcatacgtcaccatggtaa

SEQ ID NO: 727137 - DNA, 1260 bp, Homo sapiens
tatctaaggaattcaaacaagaatcacatttggagagaaatcaagaggatcaataaactcattaaaccaagcccaygttgccctttttgtcaaagtttccagactcagaattgcaaatagactcgaaggtctgaaggacttcagaactttttggcagttaattctcaatgtgaaccacttagaggtatggtatggcctttcccaaggtaatccatctccaattctcccccaaaagaccacttcaccatctcccaagttaatgccagcttctcttctcttggtttcaagtgaatttagaatgtgccaggtttccccattagccagggccttccaagagatcactgtaccactaggcatacaccatcaaagcatttgtaaatccttagccccagctgtcacccaaaggccaatcctggaggaagaaatgatagaaggacccaaggcccgggcttacattcaggaagaatttcttcctctgataactttcaaaccaataaaccccaaacagagatacatacatacctcttcctcataatcagaatcactctcttcactgtcagatctaggggcaacttcataactaaggaaaaagagtgaggaagaggagggggcttagttttttaaattacaatacaataaagacacacatgacttaatagcacattctatgtataaaagacaaatccaagtaacaacttcaaccatctcagcaaaggctgtgtagttttagtttcgagatcgtacaagattaccaaaatctaaaaagctaaaagaacaccatgaacgctgctttcatgccttacccaggattcatttccagccaggcgtccagctgacttgctttgggtgcttctggtccgaacagaaccttgccggtttctgtgtgagtcactttgacagggaggtcactcatctggctgctctcatctatgggctacaaaggagggaaaatcatgtcacggtttcatgttaagaccttcccccagtcctgtactggacgtttctcagcagtttttgctgcccagcatgtgaaaccttattctgtgtttggaaatttcactacctaatgagtgttggtgggaggtgagaggctacctcccactaaagaaactgaaaatgctgcctccctggtagctaagatacaggcacaaacctcagctccagcaaccagatacatcaccaaggttgtgagttaagagctagaagtgcaagggtgtggaaaccaacaggtgcaccggtgcagggcagaccacagtggca

SEQ ID NO: 727138 - DNA, 1260 bp, Homo sapiens
tatctaaggaattcaaacaagaatcacatttggagagaaatcaagaggatcaataaactcattaaaccaagcccacgttgccctttttgtcaaagtttccagactcagaattgcaaatagactcgaaggtctgaaggacttcagaactttttggcagttaattctcaatgtgaaccacttagaggtatggtatggcctttcccaaggtaatccatctccaattctcccccaaaagaccacttcaccatctcccaagttaatgccagcttctcttctcttggtttcaagtgaatttagaatgtgccargtttccccattagccagggccttccaagagatcactgtaccactaggcatacaccatcaaagcatttgtaaatccttagccccagctgtcacccaaaggccaatcctggaggaagaaatgatagaaggacccaaggcccgggcttacattcaggaagaatttcttcctctgataactttcaaaccaataaaccccaaacagagatacatacatacctcttcctcataatcagaatcactctcttcactgtcagatctaggggcaacttcataactaaggaaaaagagtgaggaagaggagggggcttagttttttaaattacaatacaataaagacacacatgacttaatagcacattctatgtataaaagacaaatccaagtaacaacttcaaccatctcagcaaaggctgtgtagttttagtttcgagatcgtacaagattaccaaaatctaaaaagctaaaagaacaccatgaacgctgctttcatgccttacccaggattcatttccagccaggcgtccagctgacttgctttgggtgcttctggtccgaacagaaccttgccggtttctgtgtgagtcactttgacagggaggtcactcatctggctgctctcatctatgggctacaaaggagggaaaatcatgtcacggtttcatgttaagaccttcccccagtcctgtactggacgtttctcagcagtttttgctgcccagcatgtgaaaccttattctgtgtttggaaatttcactacctaatgagtgttggtgggaggtgagaggctacctcccactaaagaaactgaaaatgctgcctccctggtagctaagatacaggcacaaacctcagctccagcaaccagatacatcaccaaggttgtgagttaagagctagaagtgcaagggtgtggaaaccaacaggtgcaccggtgcagggcagaccacagtggca

SEQ ID NO: 727139 - DNA, 571 bp, Homo sapiens
gaggagatgtgggtggggacacagccaaaccatatcaatgacaaaggacttgtatcccaaaggacttgtaaaaaaaaaactcctccaatcaataaatatgagcagcccaatttttttttaagtggcaaaagaagtgacattataaggatgggtaacaagcacatgaaaagataatgttagtcatcaggtgatcacaagtcaaaaccattagagatagaatttacaccaactagaatggctaaaattaaatagattggcaayaccgaatgttgatgaagatgtggaactgtctttaattactgctgagtatataacatagttgggaaaatagtttgcttttttttttttttttttttttttgagacagagtcttgctctgtcaccaggctggaatgcagtggcatgatctcagcttactgcaacctccgcctcctgggttcaagcgattctcctgcctcagcctcctgagtagctggaactacaggtgcacgccaccacacccggctaattttttgtatttttagtagagactgggtttcgccatgttggccaggatggtcttgctctcttg

SEQ ID NO: 727140 - DNA, 654 bp, Homo sapiens
tcaggatgtgaggtttaagaatacaaggactttgcccccattcctagggaggaagaaagatgcaaggaagttacaggaaaagaggtgatcagactctgttggccacttggatttttttagcaactgctacagggtggggcttattcattccccagggccatcagtggatttgacgtcttcctaaacgtgtgcctcagagcatgagcgaggctgcctgaggatccaagagaggactgctgccagtgactcactcccaataactcgaggcccgcacctccacccagaactgatgagggaaacaaaccaacccacrtgaacaccatcgtcggcaccaggaatggaagtcaatgccagggaggacttgggccagaggaggctgtccaagctgaggatacatccacacccttctctgctgctttttaaccaataagattgaacatctttggtgtggaaaggacactttttgtccaactttgcccagaggcagagaagtgagccctagggcttccagcccaggactctgcctaggccgggatcccattgctccactcactccaggccagccaggtctcaaggcatttcccatggggagtttcaccccagtgcccatttcccattcaccacagcctagaaggagcggtcatcgatctaccc

SEQ ID NO: 727141 - DNA, 1374 bp, Homo sapiens
agaatagtcaatggaaactcactccgtgtcaacccccaccccacccttgagcaggagacccattttttccatactaggtaataaaatgcacctggaactatacaattttctaaaggtcataagagggagagggaatcggaaccaccatttgcaatcttattcaggatcttcagcattctcactgcaagcctgtcagaaatgtgaaggcggaaacattgaagtgttagtctacacaactgaaaattacacatttctaacaagagttcaggtgatgctgatgtttctggtccatggaccacactttgcatagcaaaaattaatacattaagygccgggcgcggtggctcacgcctgtaatcccagcactttgggaggccaaggagggtggatcacctgaggtcgggagttcgcgagcagcctgaccaacttggagaaaccctgtctctactaaaaatacaaaattagccgggcgcggtggcacatgcctgtaatcccagctactcgggaggctgaggcaggagaattgcttgaacctgggagtcggagtttgtggtgagccgagatcgcaccattgcactccagtctgggcaacaagagcgaaactctgtctcaaaaaaaaaaaaaattaatacaataatattttaccaaggtcattagctaataagaagaaaagaaaagaaaggtagaaagacctagtcttctcaaaacctcctaaccacggtgtctcagcattctcttccaaactgcttctattttaagaatgcaatgccggccgggcgcagtggctcacgcctgtaatcccagcactttgggaggccgaggcaggcagatcacaaggtcaggagatcgagaccatcctggctaacacagtgaaacccggtctctactaaaaatacaaaaaaaaaaaaaaattagccaggcgtggtggcgggcgcctgtagtcccagctacttggcaggctgaggcaggagaatgatgggaacccaggaggtggagctgccagtgagccgagatctcaccactgcactccagcctgggcaacagagcaatattctgtcaaaaaaaaaaaaaaatgcaatgccatactgtgcaactctgaattttacatggaatagggactgactcatgaagtcgtgcatggataaaatacaaacaatggtatacattcatattatgttacatgtgatgtataaagctaaacacagtgtcataacactggttcttcagtgtttaaacctattttatggtgtatggttttatgcaaacaaaagtgatgtgtgaaaccataatgttataggaaatagaaagaaattatttaggtagacagttaaggtaaagcgagtccccagcagaaaactttccttgtaacaaaaa

SEQ ID NO: 727142 - DNA, 1374 bp, Homo sapiens
agaatagtcaatggaaactcactccgtgtcaacccccaccccacccttgagcaggagacccattttttccatactaggtaataaaatgcacctggaactatacaattttctaaaggtcataagagggagagggaatcggaaccaccatttgcaatcttattcaggatcttcagcattctcactgcaagcctgtcagaaatgtgaaggcggaaacattgaagtgttagtctacacaactgaaaattacacatttctaacaagagttcaggtgatgctgatgtttctggtccatggaccacactttgcatagcaaaaattaatacattaagcgccgggcgcggtggctcacgcctgtaatcccagcactttgggaggccaaggagggtggatcacctgaggtcgggagttcgcgagcagcctgaccaacttggagaaaccctgtctctactaaaaatacaaaattagccgggcgcggtggcacatgcctgtaatcccagctactcgggaggctgaggcaggagaattgcttgaacctgggagtyggagtttgtggtgagccgagatcgcaccattgcactccagtctgggcaacaagagcgaaactctgtctcaaaaaaaaaaaaaattaatacaataatattttaccaaggtcattagctaataagaagaaaagaaaagaaaggtagaaagacctagtcttctcaaaacctcctaaccacggtgtctcagcattctcttccaaactgcttctattttaagaatgcaatgccggccgggcgcagtggctcacgcctgtaatcccagcactttgggaggccgaggcaggcagatcacaaggtcaggagatcgagaccatcctggctaacacagtgaaacccggtctctactaaaaatacaaaaaaaaaaaaaaattagccaggcgtggtggcgggcgcctgtagtcccagctacttggcaggctgaggcaggagaatgatgggaacccaggaggtggagctgccagtgagccgagatctcaccactgcactccagcctgggcaacagagcaatattctgtcaaaaaaaaaaaaaaatgcaatgccatactgtgcaactctgaattttacatggaatagggactgactcatgaagtcgtgcatggataaaatacaaacaatggtatacattcatattatgttacatgtgatgtataaagctaaacacagtgtcataacactggttcttcagtgtttaaacctattttatggtgtatggttttatgcaaacaaaagtgatgtgtgaaaccataatgttataggaaatagaaagaaattatttaggtagacagttaaggtaaagcgagtccccagcagaaaactttccttgtaacaaaaa

SEQ ID NO: 727143 - DNA, 640 bp, Homo sapiens
taatttattctatattataaatatattttatatattgatgtactcatttagaaattatgaatatttattgaaaaacaaaaaatgcagaaaaaaatgaataaatgttcatgtttgaaaggttggcatcttaaaggtgccagtggccycccaacttaatctatacaatttcaaaataagtcacagaaagatacttcaatgaagaataacaaaaatgggattgttcagataacagtaggtatcaaaattgtttataaagctatagtagtgagactgttgtggtattggtacaatgtcagaaaaaatagattaaaaatagaaataaacctacataaatgtgaaaaattggtatattttagtaatacaatgaatggtaatacaaaacaataagaaaaaaaatggatcattcaacaaaatgatgccatgaaactataaagaatatcaatatgtgtgattcttacctgaaatcacataaacaacaaaaatttatttctgaaagctaaacacatacgataaaatatctaagaaaatacaaaataatatatttgttgtttagtgacaaagaagtatttttaatgaaaataccaaaagcaggaggagccaagatggctgaataggaacagctccagtctacagctcccag

SEQ ID NO: 727144 - DNA, 1770 bp, Homo sapiens
aaatactttgctctcctttataggacaattattttacaaagcaaaaaggatcgttgtactaatttcttgataattaaaaaaaaaatttctgatctactcattctgtgtccattgcaccacagagaaaatgggaggaatgtccgctggcaggtcaactggttgtctccgtgaaatcatcagtgaatcccgaattgggtctcatcaacctctttggcctttaacattgctgtggctgacaggctgttttatacaatctgccccttcctacctgcatgtgyacacacatggagaccttcacacttgttcacatctggtactaatggaagtcaaagtcttcctgggaaatgctgtgccatgatggtaggagtccaagccaatcctgaattttgggtagtgcccaacctgatatcttaattgtactgctagaagagagaacaattttctttcaacaattttggcattagcaaagtctactcactcccggaaaagatgtgctgcgaaacacagtaccattgaacttgacaagtcctgactcttaaaaaactgggtttactagattattctgcaatacagacagcagtataaagggataaatgaagaggggttatcaaattctctcccttgacattggtttcacattgtattctttctttctgagtttcattcagtggccatctcttgtaagcaagcaatcttcccccattttcgcaaattcacttaaaaacatagccagttaacttgagccacatcattgaagtgcaacagggctacaatgatacaggtacgtgctcatcaattccttaatgatggagaggcttacctgccttatctttccactgtacagtatgctctgagggaaggcccagaataaaatcaaaattttaaagtctataatctagcattctctagaacctcatatggggcatgttaatgaagcagtggctctggtccatggctgcccattaagatcacctggcaacttatagaaaacgccaatgcatacgctctgtctgcagggaatgggacttcattggtcaagcggggagctcaggtagagggcttattatttttaatgctcccaaggcatttcctatttgcaccaaggaatggcactacttggtcagggcagatttgaaagcatgtttcatcgtatactacttgtattgtcctgaccaagtttgctcattttcgaagacaggactaacaattaatatttccctggattgttattccctggatgggatcacattttccccatttggaactgacatcgctgcttgaactctgtaggctactatttaacaggtcaaagatttagatttccttttgtaaaatggagagttttataagtataaacatacaggtttagtgtggggattgagtgaaataacgtgaaaagtacttagtctggtgcttggcacataattagatttcagcaggccttaaccactctgttcactgcctagcagagtatttggccaagggtacactctataaatctaaatcatttcctctcctttccttccatctatcactatcccctgtcctgatctctatcgttataatttggggtgtttgtatttagtaaccaaattcctctacaggagattaagatgtctaagtacaattttgaattccgtctcttttaaaatgatggtgaattaaagaggacacagtgtgtgtacttgtgggacaatgaatatacttatagatacagttaagatattactcaggttctagtttttaaaggtaaagcatgtaaacattggg

SEQ ID NO: 727145 - DNA, 1770 bp, Homo sapiens
aaatactttgctctcctttataggacaattattttacaaagcaaaaaggatcgttgtactaatttcttgataattaaaaaaaaaatttctgatctactcattctgtgtccattgcaccacagagaaaatgggaggaatgtccgctggcaggtcaactggttgtctccgtgaaatcatcagtgaatcccgaattgggtctcatcaacctctttggcctttaacattgctgtggctgacaggctgttttatacaatctgccccttcctacctgcatgtgcacacacatggagaccttcacacttgttcacatctggtactaatggaagtcaaagtcttcctgggaaatgctgtgccatgatggtaggagtccaagccaatcctgaattttgggtagtgcccaacctgatatcttaattgtactgctagaagagagaacaattttctttcaacaattttggyattagcaaagtctactcactcccggaaaagatgtgctgcgaaacacagtaccattgaacttgacaagtcctgactcttaaaaaactgggtttactagattattctgcaatacagacagcagtataaagggataaatgaagaggggttatcaaattctctcccttgacattggtttcacattgtattctttctttctgagtttcattcagtggccatctcttgtaagcaagcaatcttcccccattttcgcaaattcacttaaaaacatagccagttaacttgagccacatcattgaagtgcaacagggctacaatgatacaggtacgtgctcatcaattccttaatgatggagaggcttacctgccttatctttccactgtacagtatgctctgagggaaggcccagaataaaatcaaaattttaaagtctataatctagcattctctagaacctcatatggggcatgttaatgaagcagtggctctggtccatggctgcccattaagatcacctggcaacttatagaaaacgccaatgcatacgctctgtctgcagggaatgggacttcattggtcaagcggggagctcaggtagagggcttattatttttaatgctcccaaggcatttcctatttgcaccaaggaatggcactacttggtcagggcagatttgaaagcatgtttcatcgtatactacttgtattgtcctgaccaagtttgctcattttcgaagacaggactaacaattaatatttccctggattgttattccctggatgggatcacattttccccatttggaactgacatcgctgcttgaactctgtaggctactatttaacaggtcaaagatttagatttccttttgtaaaatggagagttttataagtataaacatacaggtttagtgtggggattgagtgaaataacgtgaaaagtacttagtctggtgcttggcacataattagatttcagcaggccttaaccactctgttcactgcctagcagagtatttggccaagggtacactctataaatctaaatcatttcctctcctttccttccatctatcactatcccctgtcctgatctctatcgttataatttggggtgtttgtatttagtaaccaaattcctctacaggagattaagatgtctaagtacaattttgaattccgtctcttttaaaatgatggtgaattaaagaggacacagtgtgtgtacttgtgggacaatgaatatacttatagatacagttaagatattactcaggttctagtttttaaaggtaaagcatgtaaacattggg

SEQ ID NO: 727146 - DNA, 1770 bp, Homo sapiens
aaatactttgctctcctttataggacaattattttacaaagcaaaaaggatcgttgtactaatttcttgataattaaaaaaaaaatttctgatctactcattctgtgtccattgcaccacagagaaaatgggaggaatgtccgctggcaggtcaactggttgtctccgtgaaatcatcagtgaatcccgaattgggtctcatcaacctctttggcctttaacattgctgtggctgacaggctgttttatacaatctgccccttcctacctgcatgtgcacacacatggagaccttcacacttgttcacatctggtactaatggaagtcaaagtcttcctgggaaatgctgtgccatgatggtaggagtccaagccaatcctgaattttgggtagtgcccaacctgatatcttaattgtactgctagaagagagaacaattttctttcaacaattttggcattagcaaagtctactcactcccggaaaagatgtgctgcgaaacacagtaccattgaacttgacaagtcctgactcttaaaaaactgggtttactagattattctgcaatacagacagcagtataaagggataaatgaagaggggttatcaaattctctcccttgacattggtttcacattgtattctttctttctgagtttcattcagtggccatctcttgtaagcaagcaatcttcccccattttcgcaaattcacttamaaacatagccagttaacttgagccacatcattgaagtgcaacagggctacaatgatacaggtacgtgctcatcaattccttaatgatggagaggcttacctgccttatctttccactgtacagtatgctctgagggaaggcccagaataaaatcaaaattttaaagtctataatctagcattctctagaacctcatatggggcatgttaatgaagcagtggctctggtccatggctgcccattaagatcacctggcaacttatagaaaacgccaatgcatacgctctgtctgcagggaatgggacttcattggtcaagcggggagctcaggtagagggcttattatttttaatgctcccaaggcatttcctatttgcaccaaggaatggcactacttggtcagggcagatttgaaagcatgtttcatcgtatactacttgtattgtcctgaccaagtttgctcattttcgaagacaggactaacaattaatatttccctggattgttattccctggatgggatcacattttccccatttggaactgacatcgctgcttgaactctgtaggctactatttaacaggtcaaagatttagatttccttttgtaaaatggagagttttataagtataaacatacaggtttagtgtggggattgagtgaaataacgtgaaaagtacttagtctggtgcttggcacataattagatttcagcaggccttaaccactctgttcactgcctagcagagtatttggccaagggtacactctataaatctaaatcatttcctctcctttccttccatctatcactatcccctgtcctgatctctatcgttataatttggggtgtttgtatttagtaaccaaattcctctacaggagattaagatgtctaagtacaattttgaattccgtctcttttaaaatgatggtgaattaaagaggacacagtgtgtgtacttgtgggacaatgaatatacttatagatacagttaagatattactcaggttctagtttttaaaggtaaagcatgtaaacattggg

SEQ ID NO: 727147 - DNA, 1541 bp, Homo sapiens
ctcagtatttcagtcatggcctcagggaataagctagaaattacactgtaggcaacagctccctctgacaggggaagggaccaggtgacagaacaggcctttgtcaccttcagattctcttgtttgcatttagagaccttgagttccctggatggtggcttcatgagtgcggggagatgagctaggactcagtgccacagtcctgtgtggctgagctggctgagagcacaaggatgtgctgcttcggagctcacaagcccctgtcctgagagggttgtacaaacagggacaggagtgtcccctgaggtgcagcccatcctcagccggatgcccgatgaccatagaaccatctactgtggccaccggggagaatgaggctggtttcatcacaaaacccacccatgcccaggccctctttgtagagcaccctatagtccgctgacgtcttccctcccttcctgccgcccccagcctccctcctgcctggctttgtgcctcctggtccccagactccccccaactccccagtagccacgctcatacaatcggcctaattattattttgtgcggcttttcacagcagaaggagagaagattaggggaagagaaaagaaagctgaaacctctataatgaaattttaaaatcacagagctcctgctgttaatattttcccagcctccaaaagcatcaaatattgttttatcccacaactaatctcaaccgtgtatctatctcacaatatttggacacgttaactgggagctgagtcctaagataacagccatggcagccaagtgtggtggcctcatcaccagaccctacatagttaattggtcactttgtccagctgagcaatggggttccagtccatccccatcattaaaagctgccaaagtctgtaccactttgaatcagctgccttcctcctgttccgtgtggcttttaagcacctgcacacccagcattcttgcctccgacggaaagcttctggttctttgatgagggctttggataatttaatcaactttccttcgtcctctccataagaaagaagtgctcagctcactttgggggaagagccacagagcagcacacactccttcctgttcttaataagcctcccaaatgcgtcagctagacagggtgtttatctcaattaatgcattaatagcttcaccaaattgccaggaaaatctgacacagactcgcgtgagcaggattccagttaagaaagaagctggcagagcagccgctgatgtgaaatctgaaccatcttttgaacagcggactattagttttgttttatttggttcatttgagtttttttgttgattacacacactcacaggcccatgcatacagccattgtggcaaaaaagacttgaaagattgttggaactgagggaaggtaagagcagcggaaaaataagacagagagaccaaggtcaggctccactggcaggggaggctggccacctggtccasccctgtcccacccctcagtgacagcagcacctggcaggggcagctgcgggcgtcc

SEQ ID NO: 727148 - DNA, 643 bp, Homo sapiens
cagttaaatgaggggagttgcaaattcagaataaatcaggcttgctaccttgttagcaggtagggacaggagctgaactcyacacagaggtggacaactgatggacctcaggttccaagttgcttcctgaccacatgaacacacaggtattatgagatctcaacaaaggctgttaacattcccaataaataataagtcatggctctgctacctctttgttcttgaggctagttaaaaaagaaagtcctggggctgtattagctccatgggcagatggaccaggcatcaggagcatgagtggggtggtcttcaggctggtccttcagctgctgggatgagtctatggccacccaggaatgtctatcagacaggtgcctcatgagcttccagcctcctgctggcttccaggagttctcccaaaagggctacagaacctggccatgtagcccaccctcttggtaagggacaaactcaagactccctagggttttgtcatatattatatgtcctgtcactcttttcttgttgactgagttgaaagggaccgtcatttgggactctgctactcagagatccgaggggaagtccttgaataaacaatgctgacagtcagcatgctaacgtgttaagaaatctattttcc

SEQ ID NO: 727149 - DNA, 643 bp, Homo sapiens
cagttaaatgaggggagttgcaaattcagaataaatcaggcttgctaccttgttagcaggtagggacaggagctgaactctacacagaggtggacaactgatggacctcaggttccaagttgcttcctgaccacatgaacacacaggtattatgagatctcaacaaaggctgttaacattcccaataaataataagtcatggctctgctacctctttgttcttgaggctagttaaaaaagaaagtcctggggctgtattagctccatgggcagatggaccaggcatcaggagcatgagtggggtggtcttcaggctggtccttcagctgctgggatgagtctatggccacccaggaatgtctatcagacaggtgcctcatgagcttccagcctcctgctggcttcsaggagttctcccaaaagggctacagaacctggccatgtagcccaccctcttggtaagggacaaactcaagactccctagggttttgtcatatattatatgtcctgtcactcttttcttgttgactgagttgaaagggaccgtcatttgggactctgctactcagagatccgaggggaagtccttgaataaacaatgctgacagtcagcatgctaacgtgttaagaaatctattttcc

SEQ ID NO: 727150 - DNA, 640 bp, Homo sapiens
ttgaaatattrtgagacttaccaaagtgtgacacagaaacaaagtgagcacatgcggttggaaaaaaatggcgccaatatgattgttcaaggcaaggttgctacaataaagcaaagtaccataaaatgagggtatctgtataacctcatcttcaaatataaaagctgaatcttaatgatattgactaaattgcccaagatcctacacatagaaagtgccggagttagaatttatcccaggcttgcctaactctacaatgccaggtcttaacaactgtatatcctgccttccatgtaataacagtaaacagtaatttagtaatttggggggaaactaaggtactaagattctgcactacatcatttttatgttgtatctaagcagctgtgattttttttaaaatgtctactgggaaactttatatattgacctcttttccctaaactttatcagtatctgcacattttttaaattgtaaatttaaatttgaactgcatgtcttcagtgcacacacatacacaaacacatcaaaattttcaagaagttaacagtggggtctgctggctcaactcataaacagaatgtgaggaacagctgtttaggctttagaacctaagctggtaatggttacttgttcaaa

SEQ ID NO: 727151 - DNA, 638 bp, Homo sapiens
gtcactttctctcatttataaatggctcaatgagccagagaaatgtatcctcactctctctatccttactggcatcatagtcagtaacagaactggaaatmgtaagtagcagcaatccaaatgaatttggttttagtgccaagaatccaactttccacaggccatttcttagagccgtaaaatattattcccaattttaattagaagtcagaaacttgaaatctattaactaattcttttattccataaatattccattacctacattatgcagcaatgcactagtgagcaacagagatgtggttcttacacccaaggaatttagatgctttcaggggagagggagataaaacaaataatttcaatgtaatttaaaaaattataaacaagtaattacaaagtaatttaataattatacccatgctaattgtggtaaacaagaagtagaaggtgtcatgaaaatattcaaaagaggagtctaacacaattaggaattttaaaagagttctttaaaatttatttgaaattctttaaaataagattttgacatgcacatagcttacatgtttccactaatgaatgggaagctgtacttttacattgtatgtttataggacaactgtagaacaaaatatgca

SEQ ID NO: 727152 - DNA, 1964 bp, Homo sapiens
ttcatcatttccccagggaagactacccaaagtcttcagctcatgttttgaagaaccaaagtcttcaagttcatgatataaggataatatttaacctccttccttataaaatgttaagtccttatggtcttgtaatctataaaataaagggcaggtcatttgttccaaacaaagagaaaaaaaaataacagcatctagaaatacctgtttggaagagggtaattggaaaacatagcaactagtggtctgtagcacttatgaaatacaattcaagtgaattagtaaaggccctttttgattatggcagaggaatttccttgtttagcccatttgggctgtctacttctgcttcctgaaaagaaatcttttcaccaatatcctccccgaatcatgactgtcttttgggagggtctgtctctctctttccctttttaaaaataatttttaaatggcaaataaaaattacatacatttatggtgtataacatattttgatatatgtatatattgtgatatgactaaatcaagctaattaacatattcattacctgttatacttgctcagtaagcttcgtggctgtatctaaggtgggcactgagaagtatgactgtcttgatggttacataacccgtataacctatgtcctgctaatacatttttgagggctggtgtatatttttcaggatatataaattataggaaatttcatgtcaaatttgcagtctctgtggcaataaatttttcatcaaatttataggtttcttatttgtttctcagttctgtaagcaagctcctataagcaaataatggtgtagacagttaaagtctgaacactctggtcctttacttactgggctcagtgttatgcccaccatcaccaccacctgaccgatgactgttttgagaccacctgaagcaaaaacactcttaatctgatctttactagtatgctggctgctgatctggtgtagaatttttgtgaaagtgcttaaaaagattctgcagcacaattatgctaatgatgtcaatacaagccactgattattattgttttgattactgatataggctggtttaaaatagcaaaactcagattgtagaactgtgtacaaagttcttagtgtagaaaggtgacctgtagatagaggtcaccagagcagacatgttctatctctgtttgcaaactgaccagttgtaggattttgcaaatatagggtaaagatagggtaaaagccaacatgcatctacattctacatatttctatcactttcctttacgataagatatgtgcgtctgctttccatggtagtgctgattatagtttttatcaaatattttttctgtaatgcaataaggttattattatttcagcttgcaatatttaaatccttgatagctgatttgcaactactaatttaatgtcacatattcttatgtaagtgtagattaatatgtagaatacagaataattatgtaaaatatagtcatttattataacctgtgtccacttatggaattccatattaatcatattaattagggttaagtttgtctatgagtgggggaaatagaaggccagataacatgaatgaatcaaatatggtttaaatttcttcattaaaagtccagaagttgactgtctaaaactggtatggcataagtcaacagagacttcaattattttcagcttgccattctgccattcctaaaatataactgccattttttcatgtttcagtcttgattttttgtgcctacattttctttaaataatttttactttcaaggacataaagtaatatcatgacatttttcttttagtttttaaaattgctaagtggaatagataygatttcctcaaaatcattaggtcagtcttaccagattccagagggtggaaaacccaggtgttgctagcagtactcatcctgctatgaacaatgacaccttaagatctcaggg

SEQ ID NO: 727153 - DNA, 615 bp, Homo sapiens
aatactaaatatacatttgtcttcattattatggaacttggggttgctggtggtaggagacttayaatgatttcagatgcttttctctagcaaggagtattatttttgcttctctcaaatatcactgagttccagtcttctttatagcttttcataaaagatcattttttttcagaaccatttattctcaccaggaactaaatccagataaagacatagttgagttcatatttgatttgagactatagtgatgtttcatttaagtagctttggaaaacacagacatttggttgccatttgattctggttacttactctagtttgttatcgaacttctggttcagcaacattaaagggaattaacacttgaatttacatctcttctgatttgaagctcatggcttgaggttcaagggcacgcctcttattaaaatcatttaatgttctatacatttccgagaaagtaatcaaaatcagacactctcactcctagactcaacttcagtggttatttcttttataaaattaattgcttaatgggaattttaaatgaaaggcagtggtttagaagttgaggcagggtggctcagagtctcttattgtgtaatgaatcac

SEQ ID NO: 727154 - DNA, 651 bp, Homo sapiens
agctgggattacaggcgcacaccaccacacctggctaatttttgtatttttagtagaaatggggtttcaccatgttgtccaggctggtctcgaactcctgacctcaggtgatctaccctcctcggcctcccaaagtgctaggattacaggcatgagccaccctgcccagcccttgctgatgttttgtatttttctatttcttcactttttacatatacatgtgtcactatagacaaattattatagaaaatatagctaagacttaaaagtaaacaccacaatcctattccccagatataataatacattgttaacccttccagactttctctcctatgccttttttttttttttttttttttagacagagtttcgcttttgttgcccaggctagagtgcaatggctcagtcttagctcactgcaacctctgcctcccgggttcaagtgattctcctgcctcagtctcctgaatagctgggattacaggtgcccacaccaccctaatgtttgtattttyagtagagatgggatttcaccatgttggccaggctggtctcgaacccctgacctcaggtgatctgccctcctcggcctcccaaagtgtggggattacaggcaccagccaccgtgcctggcctcctacacataca

SEQ ID NO: 727155 - DNA, 586 bp, Homo sapiens
ttcatgttttttttttttttttggtcaagtgtcaagctccaggaagggccctgaacatctcgagagggtsaaagagtgtgctacagacttttagaggactgggggtggccatgtcctaagaaacacgttcttggccagtggagatttctgagaagagatcaaggctaggcaaggaagggagtgtgcataagggtagggaaaggtagcagaattggaggtgagataaaattttggcatttgagaagagaagagagaagggaagtattggtagaaaattaacagtaattataacacagggaagggacttggaaggcattccattttgaagtaggtgaggggatagagttttcacagtggcattctgtatgtcagcctggggttcaagaaccaggtctgccagatcatagctgtgatacttttggcaaaccttcttagtgtcagagttttaatttgtaaaatggagataaaactgaggtggcttccctggaagtgaattcaataaactacttgaaagtgcctagcatggttgccaacacacagcaactatccaatcagtactggtggccttttctcccctcttcattct

SEQ ID NO: 727156 - DNA, 925 bp, Homo sapiens
tcaggatctggtgatgaaaaggccaagatccaagagacttatgatctggaggaggaggaacttgtgtataaaccagcatatctggtaaagtgctacaggttctgtgatcagtctttatgaggtgtagtgagaagctcaggtaggatgcagatgtgtctcagaaaaggaagtgagcctgtggtccaggcataattaataatagtgccctgttcaccttggacactgtatgtatttagatgataaattgtgtggccattctggtctaagaaagggtgatctactctacctgaaacttcaaaaaacatcagcagcatcttacgggtgaagttaacatcattaatgtaaaagtgactactmatttgtgagttgcctgaggtctgagttggtgacttatggtcttcggtgctaagcctatgatgagtgtgtgtatgcatacatttttcaccccattccttctttaatttcaattcttcaatctgatcattggtcagtccttgcatattaggagagagaaatatgtcatgttgtgctaattcttccatttccaagcagaggcgctgcacgttgagccacccattatagacctggcccacttgcaccataagctcctccggcttggtgctccctggcacctgcagcaggaactggctcttgtcgccccacttcatgtgcagcagaaccatggcagttctatgtgagagtgaaagttaaatgaatatgcaaatccaatgagtgttattcaaattgaataaatactatcaaccaactaaatgactaaaataatgaaattactaaataactaaagtgatttttaaaagatcacctttctgaaatttcagtaggtttttctggaggcttcaaataaaaccattagagaaaataaagtggttttacaaataactttaaaagcaatggcctagaaaaa

SEQ ID NO: 727157 - DNA, 1230 bp, Homo sapiens
aaatatttgaaaagttataaaaggagtatttttaaattgcagatatcctaagcaaattttatattttaatatactaatgtaccatgagattttcctagtgggagacatggcaagcagggtttccatatatgatcatgggatcaagtatttattccatggataaaagaacagagacttactaatgaaaagccaggaaaatggatgtatctctctcatgtattcgtcccttcattcattctatagacactcattgagctttcttactatatgccaggtataagcatgatagctgggaacacaacagtgaacaagacaggtcagatgtctctttgtcagttgcattataatggaaggtgagaaaaaaattgatacaccagcctctttttaaaaaatgtttattttaggttcagtagtacaagtgcaagtttgttatacaggtaacttgtgcatcacagagattttgtgtatagattattttattacccaggttataaactagtactcaatgggtacattttaaatcctaactcccctcccagcctctacccttaagtaggccctggtgttgttgccttctttgtgtccatgtgtactcaaagtttagctccctttatataagaagtgagaacatgaagtatttgctcttctgttcctgttagttcactgagaataatagcctccagttccatccatgttgcttcaaaggacgtgatctcattctttttcatggctgtgtagtattccatgatatatatgtagtacattttcttatccagtctccctttgacggccatttttgttgatgtcatgrctttgctattgtgaatagctctgttatgaacatacacatgcatgtgtctttatggtagaacaagctaattttttaacttgttaattaaacttttaaaaattcctttcaaattattattttaagacaactttgcataacctaagataatgacgatttttttctatagtaccttgtagaagatccattgttctatctctcacgtttagatggcaatccacttggaatcaatttttgtgtataacatgaggcataggccaagattcaattttccatgtggatattcgatgaacaaatgttgagtgggccttcgtttctccacagctgtatctatattatatggtttggctctgtgtccccacccaaatctcatcttgtatctcccacaattcccgtgtgttgtgggggggggacctggtggg

SEQ ID NO: 727158 - DNA, 1230 bp, Homo sapiens
aaatatttgaaaagttataaaaggagtatttttaaattgcagatatcctaagcaaattttatattttaatatactaatgtaccatgagattttcctagtgggagacatggcaagcagggtttccatatatgatcatgggatcaagtatttattccatggataaaagaacagagacttactaatgaaaagccaggaaaatggatgtatctctctcatgtattcgtcccttcattcattctatagacactcattgagctttcttactatatgccaggtataagcatgatagctgggaacacaacagtgaacaagacaggtcagatgtctctttgtcagttgcattataatggaaggtgagaaaaaaattgatacaccagcctctttttaaaaaatgtttattttaggttcagtagtacaagtgcaagtttgttatacaggtaacttgtgcatcacagagattttgtgtatagattattttattacccaggttataaactagtactcaatgggtacattttaaatcctaactcccctcccagcctctacccttaagtaggccctggtgttgttgccttctttgtgtccatgtgtactcaaagtttagctccctttatataagaagtgagaacatgaagtatttgctcttctgttcctgttagttcactgagaataatagcctccagttccatccatgttgcttcaaaggacgtgatctcattctttttcatggctgtgtagtattccatgatatatatgtagtacattttcttatccagtctccctttgacggccatttttgttgatgtcatggctttgctattgtgaatagctctgttatgaacatacacatgcatgtgtctttatggtagaacaagctaattttttaacttgttaattaaacttttaaaaattcctttcaaattattattttaagacaactttgcataacctaagataatgacgatttttttctatagtaccttgtagaagatccattgttctatctctcaygtttagatggcaatccacttggaatcaatttttgtgtataacatgaggcataggccaagattcaattttccatgtggatattcgatgaacaaatgttgagtgggccttcgtttctccacagctgtatctatattatatggtttggctctgtgtccccacccaaatctcatcttgtatctcccacaattcccgtgtgttgtgggggggggacctggtggg

SEQ ID NO: 727159 - DNA, 1230 bp, Homo sapiens
aaatatttgaaaagttataaaaggagtatttttaaattgcagatatcctaagcaaattttatattttaatatactaatgtaccatgagattttcctagtgggagacatggcaagcagggtttccatatatgatcatgggatcaagtatttattccatggataaaagaacagagacttactaatgaaaagccaggaaaatggatgtatctctctcatgtattcgtcccttcattcattctatagacactcattgagctttcttactatatgccaggtataagcatgatagctgggaacacaacagtgaacaagacaggtcagatgtctctttgtcagttgcattataatggaaggtgagaaaaaaattgatacaccagcctctttttaaaaaatgtttattttaggttcagtagtacaagtgcaagtttgttatacaggtaacttgtgcatcacagagattttgtgtatagattattttattacccaggttataaactagtactcaatgggtacattttaaatcctaactcccctcccagcctctacccttaagtaggccctggtgttgttgccttctttgtgtccatgtgtactcaaagtttagctccctttatataagaagtgagaacatgaagtatttgctcttctgttcctgttagttcactgagaataatagcctccagttccatccatgttgcttcaaaggacgtgatctcattctttttcatggctgtgtagtattccatgatatatatgtagtacattttcttatccagtctccctttgacggccatttttgttgatgtcatggctttgctattgtgaatagctctgttatgaacatacacatgcatgtgtctttatggtagaacaagctaattttttaacttgttaattaaacttttaaaaattcctttcaaattattattttaagacaactttgcataacctaagataatgacgatttttttctatagtaccttgtagaagatccattgttctatctctcacgtttagatggcaatccacttggaatcaatttttgtgtataacatgaggcataggccaagattcaattttccatgtggatattcgatgaacaaatgttgagtgggccttcgtttctccacagctgtatctatattatatggtttggctctgtgtccccacccaaatctcatcttgtatctcccacaattcccrtgtgttgtgggggggggacctggtggg

SEQ ID NO: 727160 - DNA, 684 bp, Homo sapiens
tgtacatgtgtgcacatgtatgcacacatacgcacacgcatgcatgcacacgcatatgcacacacgtacatgcacatacacrcatgcatatacacacgtacacatgcacacacatacgcacatacatgcatatacacatgcacatgcgcacgcgtacatgcacatacatacacatacacacatgcacacacatgcatgtgtacacgcatacgtaagtatcatctcaggtacgtggattcaaaattctgatgcaaacaagaataatcacaaaacagggtagggtgtcaacaagtgagaattgagatggatgttctggaatgttccagagacaacatagggggacggctgcacatcacattaacatcttatccattttaaacgtgaccattcctgccaacatcggcctggattaagatgatttcatttacataaggaacagaaaatataatacttgttctaatgagattctctaatcattagattattttcacaattttaagtaatcactaaataacttcctttcaagggtctaaaaatataagataacaaaagaaagttacagtcctgacagctttaccatgcaaatcacagctgtgaaaatgaagcatgtttttgagactatgttttcctcaaatattattcatggaattttgtaccagtaatggctggtaattaattgttata

SEQ ID NO: 727161 - DNA, 596 bp, Homo sapiens
aaagaaaaaggactagaaccatttgtgtttgccaacaagaaccgcctcctaggtttcactacaaataacagaggacagatggaagaaactcacgtttccccagatgattcttgaagcactccttcctcactgtacatttctactaaataccttctaacgtgacagcagttcgtcaacatcattaattgttcaaaaatataattaaatataaaaacacaatttcccacttctgattgatgccttatattttccaaaataaatttaagaaagagttttatcaaaacaacaactttctaaggacgatcatccctggggaccccgaccttatgaggagctggcctcacccgccccccacattccaaccagctggcaacaaccggcagcaacagccaggttacagtggaagcttctctttcaaatttatatcatcttataaattatttgccrtttataataatgcagcactttcataataaaatatagcaagcaacaaaagcaaacatagataagtgagattacgtcaaaccagagagttcctactcagcgaaggaaacagtaaaatgaaaaggcagcctacaggttgggggaaatatttg

SEQ ID NO: 727162 - DNA, 596 bp, Homo sapiens
aaagaaaaaggactagaaccatttgtgtttgccaacaagaaccgcctcctaggtttcactacaaataacagaggacagatggaagaaactcacgtttccccagatgattcttgaagcactccttcctcactgtacatttctactaaataccttctaacgtgacagcagttcgtcaacatcattaattgttcaaaaatataattaaatataaaaacacaatttcccacttctgattgatgccttatattttccaaaataaatttaagaaagagttttatcaaaacaacaactttctaaggacgatcatccctggggaccccgaccttatgaggagctggcctcacccgccccccacattccaaccagctggcaacaaccggcagcaacagccaggttacagtggaagcttctctttcaaatttatatcatcttataaattatttgccatttataataatgcwgcactttcataataaaatatagcaagcaacaaaagcaaacatagataagtgagattacgtcaaaccagagagttcctactcagcgaaggaaacagtaaaatgaaaaggcagcctacaggttgggggaaatatttg

SEQ ID NO: 727163 - DNA, 1454 bp, Homo sapiens
  misc_feature 419, 420, 421, 422, 423, 424, 425, 426, 427, 428, 429, 430,431, 432, 433, 434, 435, 436, 437, 438, 439, 440, 441, 442,443, 444, 445, 446, 447, 448, 449, 450, 451, 452, 453, 454,455, 456, 457, 458, 459, 460, 461, 462, 463, 464, 465: n = A,T,C or G
  misc_feature 466, 467, 468, 469, 470, 471, 472, 473, 474, 475, 476, 477,478, 479, 480, 481, 482, 483, 484, 485, 486, 487, 488, 489,490, 491, 492, 493, 494, 495, 496, 497, 498, 499, 500, 501,502, 503, 504, 505, 506, 507, 508, 509, 510, 511, 512: n = A,T,C or G
  misc_feature 513, 514, 515, 516, 517, 518: n = A,T,C or G
gaggttgcattaagctgagatcacgccactgcactccagcctaggtgacagagcgagactccgtctcaaaaaagaaaggaaggaaggaaggaaggaaggaaggaaggaaggaaggaaggaaggaagraagaaagaaagaaagaaagaaagaaagaaagaaagaaagaaagaaagaaagagaacattctgcatttctctcaaggacaataaaacaacagctattgtttgtatgtgaccctcacttgatccatttcatcattggcccttaatggggaaaatatggttatggggtggcagtggaggactcctcttcctcatgctcattcagtgaacttgctggacctcgagctgtgggatttatcttttacagctccatagcaatgtctttgtttggtgtttgtgccagagatcctaatggnnnnnnnnnnnnnnnnnnnnnnnnnnnnnnnnnnnnnnnnnnnnnnnnnnnnnnnnnnnnnnnnnnnnnnnnnnnnnnnnnnnnnnnnnnnnnnnnnnnntgtgccaggccccccaccctgggggcacacaatcaactacccagggtgacgggaaagtggaaggctgtttccacagggccacacgaggggggcagcagaaagacatattttgtgatgtgaaaatgaactgccgtcaactcgactttcccccacgtctaagggaatagacttggcataaagcaaaaaaggcttatagaacataaaagcacattggaaatgatccttttccaactttgctgttttatagatggagagattgaggtcccaagaaggtaaagtggatttgttggtcacattagctggttactagcagagcaggaactcgaacacagccctctctcccttcatcatcccacactgccgggcatgaagtcccatccccaaggtgggcccaacaacttcctctcttttctctcaatatacatggatatttttctgatatgaaaaatacatgttggccgggagcggtggctcatgcctataatcccagcactttgggaggccgaggtgggtggatcaactgaggtcaggagttcaagaccagcctaggcaacatggtgaaaccctgtctctactaaaaatacaaaaattagccatgcgttgtggcgatcacctgtagttccagctaatcaggaggctgaagcacgagaatcgcttaaacctgggaggcgtaggttgcagtgagctgagatcgcgccattgacctccagcctgggcatcagagcgagactctgtcccgtaaaaaaaaaaaaaaaaaaaaaaaaagagaaatacctgctcatgatagaaaaccaaaaaagacattaaaaatttaaaagaaaacaaaatcacccatacttgcactctcaggaataatgattgttgccattttgatgtgttaggttgaaccatatgaaattgctgatatttgacaattttcagcctacaaaaatgaca

SEQ ID NO: 727164 - DNA, 2161 bp, Homo sapiens
tgcaggaaaagtggtcctgaggcgccctctggtgtccatttcattcaggccactagggagaaacctgcgcttggcttaaacctcgatttctcttcctcaggtgggcaaagtgtgcttctgggctagtgaaattggtcccctcacattttcataaataaatatactgagaaaatgccaaagaaggccatacaaccatctgaggatgatggccactgcagaaacagaaaacacagggagaaggagctgatggggcagattagagagaggtgacacctgggcatgatggatttaaggtaccartgggacacctacctgatgatcttaacagttgtataactgtccgacgaaacaaacattgaaacttaggagcaagattccagcgcagcctgctgtgacccctgctactcacccacccccacccaccaaaaccaagctgtcttttggccacagaccagcctttactctttgctttcccagggctcgataaatgttttgggttttttgttttgttttgtttttttgagacagagtctcgctctgtcgcccaggatggagtgcagtggcacgatctcggctcactgcaagctccgcctcccgggttcacgccattctcctgcctcagcctccccagtagctgggactacaggcgcccgccaacatgcctggctaattttttgtatttttagtagagacggggtttcaccgtgttagtcaggatggtctcgatctcctgacctcgtgatccgcctacctcggcctcccaaagtgctgggattacaggcgtgagccaccgcgcctggccaataaatgtttgatgacgggatcaaggggcctgcttaaatcctgtttgcctatgtgtgcgtatctagagaacccttgatacccagcagcagacttgcaaaagagactgaaaaaaaggaagggagaagcctgaacttgaactgggaggttccaggtagagcgctttgttctgccgctttagcagcagtggctctgcttagacctttgctattcaacgtggtccatgggcaggggcagccgcagaagcagcagcagggatcctgttcaaaatgcagaatcttggacctgaccccagacctgctgaatcagaatctgtaagttaacaagcccccctgatgattcgtgtgcacattaaaatctaagtgctgataaatggagtctcagtctctgcatttgtcaaatggaagtatgacatttccccagcaggctggttatggcaaagtttgagataacatgcatgaaaatgtacaaataatggctagcactgaaaaatcactcgtgttctaggaatgaatgaatggatagtcattaacaatagctaacacttgctgtgcactaggcatttgccaggcactgttgtaagtgctttatgtgtgctaattcattggatgagtaaagtaggcaacgggactgtgtcaaagctggggaggggacattcttacctaaatgtttcatagtttgcctctccaattttgatgagaggatttggattggttttgcttttgttcctatttagcacctaacaaaagctatgcatgaagtgcaaaggtaaagaccttcctcaattagtgaccagaaatcacagtggaattcccaagttcaatgaggagtctgattaggatttcctggacatgcatctgcttcactggggttctttgcaatgtcaccaccagagaactgaatactaaagttaattctttccttcaataagttttatgcaaattatgcttctggtcttttcctggatgctggagatagacacgaatcagacagagtcaaccagcagacagaaaacagcaataattctacactagcaagtaatgtgacacccctaacaagagagtatcaggactaatggttcttaaaccctccatccttcatcacatctccatcctgtccactgatgccagcttcattttcccagagcctgattttcatcatgtcactcctctgctcctgaaccatcagtgactccccattgtccaccagcccctggtattccaggcttggtgtcatctgcttttccagcctcttatgcagcaatatctatttactaagctcctctgctgtcctgccttcatatccttgtgcagtagcttctctcaacctaaaagcctcccttgcccacaggcacatcacc

SEQ ID NO: 727165 - DNA, 2161 bp, Homo sapiens
tgcaggaaaagtggtcctgaggcgccctctggtgtccatttcattcaggccactagggagaaacctgcgcttggcttaaacctcgatttctcttcctcaggtgggcaaagtgtgcttctgggctagtgaaattggtcccctcacattttcataaataaatatactgagaaaatgccaaagaaggccatacaaccatctgaggatgatggccactgcagaaacagaaaacacagggagaaggagctgatggggcagattagagagaggtgacacctgggcatgatggatttaaggtaccaatgggacacctacctgatgatcttaacagttgtataactgtccgacgaaacaaacattgaaacttaggagcaagattccagcgcagcctgctgtgacccctgctactcacccacccccacccaccaaaaccaagctgtcttttggccacagaccagcctttactctttgctttcccagggctcgataaatgttttgggttttttgttttgttttgtttttttgagacagagtctcgctctgtcgcccaggatggagtgcagtggcrcgatctcggctcactgcaagctccgcctcccgggttcacgccattctcctgcctcagcctccccagtagctgggactacaggcgcccgccaacatgcctggctaattttttgtatttttagtagagacggggtttcaccgtgttagtcaggatggtctcgatctcctgacctcgtgatccgcctacctcggcctcccaaagtgctgggattacaggcgtgagccaccgcgcctggccaataaatgtttgatgacgggatcaaggggcctgcttaaatcctgtttgcctatgtgtgcgtatctagagaacccttgatacccagcagcagacttgcaaaagagactgaaaaaaaggaagggagaagcctgaacttgaactgggaggttccaggtagagcgctttgttctgccgctttagcagcagtggctctgcttagacctttgctattcaacgtggtccatgggcaggggcagccgcagaagcagcagcagggatcctgttcaaaatgcagaatcttggacctgaccccagacctgctgaatcagaatctgtaagttaacaagcccccctgatgattcgtgtgcacattaaaatctaagtgctgataaatggagtctcagtctctgcatttgtcaaatggaagtatgacatttccccagcaggctggttatggcaaagtttgagataacatgcatgaaaatgtacaaataatggctagcactgaaaaatcactcgtgttctaggaatgaatgaatggatagtcattaacaatagctaacacttgctgtgcactaggcatttgccaggcactgttgtaagtgctttatgtgtgctaattcattggatgagtaaagtaggcaacgggactgtgtcaaagctggggaggggacattcttacctaaatgtttcatagtttgcctctccaattttgatgagaggatttggattggttttgcttttgttcctatttagcacctaacaaaagctatgcatgaagtgcaaaggtaaagaccttcctcaattagtgaccagaaatcacagtggaattcccaagttcaatgaggagtctgattaggatttcctggacatgcatctgcttcactggggttctttgcaatgtcaccaccagagaactgaatactaaagttaattctttccttcaataagttttatgcaaattatgcttctggtcttttcctggatgctggagatagacacgaatcagacagagtcaaccagcagacagaaaacagcaataattctacactagcaagtaatgtgacacccctaacaagagagtatcaggactaatggttcttaaaccctccatccttcatcacatctccatcctgtccactgatgccagcttcattttcccagagcctgattttcatcatgtcactcctctgctcctgaaccatcagtgactccccattgtccaccagcccctggtattccaggcttggtgtcatctgcttttccagcctcttatgcagcaatatctatttactaagctcctctgctgtcctgccttcatatccttgtgcagtagcttctctcaacctaaaagcctcccttgcccacaggcacatcacc

SEQ ID NO: 727166 - DNA, 2298 bp, Homo sapiens
ctgagatgtctcacagtttcactgtaatatatagacacttagctatatcacagtgaaaatacaagtttctatgtatccatatctagtgaattctaactttaatactggaaaacttcagatattatctctttgaacatcacttctctctcattccttttattattttcttctggaattcctattagctgtatgttgatgcccgtcagtgtatcttctgtatctcttagctgccctttcatatttaaaaaaatacattttccctctttgtgttgcattatgggtgatttctacagtactgcctcctaattagtggatctctcttctaccatgacaacatagagtttatccaatacttatgagtttatgtattttttttttgagactgagtatcactctgttgcccagactggagtgcaatggtgtgatcatggctcactgcagccttgattgcccaggctcaagcaattctcccacctcagcctcccaagtagctgggaccacaggtgcacgccactatgcctggctaattttgaaatgatttgtagagacggggtcttgctatgttgcccaggctggtctcaaactcctgggctcaagctatcctcctgtctcagcttcccaaaatgttagaattataggagtgagccactgtggctggcctgagtttatgtattttaatacctatatttttcatttcaattggttctcttttataacttgcttttgttttagtttgcctatttattgtttcatagtttatgtttttataaatggttgttagtcattcctttatatctttgaggatcctaaacatttcttcaagcactttttaatagttgacatattacataatttaaaaaattttctgtctcttccatagaatgtaagtttcaagaaggtagttgtattagtctgttttcacactggtataaagaactgcctgagactgggtgatttataaagaaaagaggttcaattgactcacagttctgcatggatggggagggctcaggaaacttacaatcatggtggaaggggaggaggcacatcttacatggtggcagggaagagagagcatgcaagagcaggaaaaactgccttataaaaccatcagatcttgtgagaactcactcacgatcatgagaacagcatgggaaaatcacccccatgatccaagcacctctcacctggtccctcccttgacatgtggggattataaaggattataattcaagatgagatttgggtggggacacagaaccaaaccatatcagcagtcttgttttgttgattattgtatcttgagcacctaaaacagtgtctaggacatggtaggtgcttagaatatttgctaaataaataatcaattccttaaaaagtcagtgtcacattgccctaccattttcacttcttctgaagtgaattcaattcctaccattacatttttagattacattttttgactgcctttttagtctttctcttgtgggagttattattagtaattttagtctctctctatgctcattccctttcaacctagtggttttgcagtagcttctttttggtcctcgcagcccccaattcagaaccagattttcaattgtcagctcaggtatccatactgccatgatttggggacgttgctgatcccaacactgagccaggggacctctttggcaaggttcctcttcaactgggataagaagctttgtataagtctcagccccagcattttatattcctggttcttgggtgtgaaagccccacccagtttctggactgggaacccctggccatktatagttccccttttaccacaagagaagagaaaagctcctggccacctctgcctgagtggtgacctggagaacctatagcaccatttctgctgtagaattgtatttctgtgtttctctgatccttggagatgctgatcttttttttttttttttttcctggaatgcaatggcgtgatctcggctcaccgcaacctcctgggctcaagcgattctcatgcctcagcctcctgagcagctggcagtacatgaacttgccaccacgcccagctaatttttatatttttagtagagacagggtttcaccatattgcctaggctggtctcgaactcctgaccttaggtgatccacctgcagcagcctcccaaagggatgggattacatgcgtgagccactgcgcccggccaagatgctgatcttccggagcaaggcttggactttcatttttaaaatttttatatcttatgtattattgctaggtgtttggagtggtggggg

SEQ ID NO: 727167 - DNA, 1318 bp, Homo sapiens
ttcatcttatttccgggcrtcagaagaaggcctctgggattcctgggttggttgactagtcaggaaagagaggccgagctacaagcagctgaagggagctttgcagctcctccgggttccccaaggcattttgtgctgtggttctccagcccagctgtacatatgagaatcaactgggaggttaaaaaatacccatgcctcagacagtagaatcagaagctttgggggtgagcaagatgtttttataactcccaggtgattctcatatgcagccagcattggaagcactgcttccagaggtgaatctgtaaacaccacccttgagctctttgaccagatggtgttgggggcacctgctggtgaggcagctctgtgaattaagacactgcctgtagtaggctgaacaatggcccccaaagatatcatgtccgaacccatggaacttactactttatgaaatactaccttatttggaaaaagggtctttgaagatgtgattacattaagaatcttaataaggggatgttatcctggattacccaggtgggtcttaagtgctatcacatgaactattataagagaaggcagagggtgctattcacacccatggatgaggcgatgtgaaaatggagcagagagaaatgtgaagaggctggccttgcagatcggagtgctcgttagggatcccaagacaagggattctagaaatcactggaagctggaggaggcaaagaatgggctttcccttagagcctccagagggagtgtggccctcttgacaccttgcttttggtccagtgaaacaaactctggtttctggttctggaactgtgagatgaatgtgtgttggttttaagccatgtggtttatggtaatttgttacagcagccacaggagactcatacactgcccttcatgagaggccatgtgaaatgttaggtcagggttaccctttatgggctaattacctgcattccctagcccagcataaaacctactgaattcaatccttcagccaactggtcaactactattaaccaggggaccagcccaatgctggatacaatggcaactaccaagcaggatgggcagtgacacggtgcgtggtcaggactggggttggcaacctttttggttttctccttgctggtcacatgatggtcaagaagaactcgagctggtagggattatagaagcagggagaagtgggtgatggaaaggggatggattccctggagagaacaggtgaaagtttggagctagaaatgtgtccaaaatttttgggaaacaagagcatgaacaagcttgtctggagctg

SEQ ID NO: 727168 - DNA, 1155 bp, Homo sapiens
tcttaggtgttatgttgtaccatacatccaggagttaatcaaaacaactaagtcaagacttgctaagcaagtttgaaactataaagaggagggaattgtagaaagtaaaaagtttcctcttcaaagtttcccttcttgttaaataataaatcataagtgttagaaataatagtttcttttaaagactaactttcttcaagcctccttgctttgttaaaccctattctgtgtaactgttggacatgctcacaggcacattccagctcacagcctatgccccttcttyatttggaaatgttattgcttccttaaacttttcgtaagcaacttctttgttcgtccctgcacttacctatttaggaagttttaggctattagcaaattgggtatcagtttaagagtgtgaggttccgctccagccaatggatgcaggacacagcagtaaggacaacccaaatgtgtaagggataaatatgtctgcttttcctttgttcaggtgtgctttcaccattggtccatctgcgattgagcaacctttctgcagaaagtaaagattgccttgctgagagatcttttgtctctgtgctgacttttcttcacagcactgatgatcaatttctaacaattttggtatttctaacaagacctcttaaaggagccaggcgccaagaggaacatgaactggggctaacgaggaacccagggccaggggacttttgggggtcttttttgtcctccttgtctttcttttcctttttcttcttcttcttaatgaccccagagttgacagctttgcccactctcagatcaccaggttctgatagtgtttgtcatgtggatggtcccatatagactgcctgttggcaaagttgaaaaaatatttgtcaccccccatgtcctggcatagtttccactccccaggcagtggggccacaatgccctcccatgccagccacatcagttctgtttccttgatgggatcaataccaatctccagggcaaattcaagaatttcttcctcacttaaaatgtaggtctcattataatcctcctccagaactagctgatctcctatgcagaggggtgggaggggttggtgaggtcatctagctatgactcacctgggctcgaacactggctgtatgaccttaggca

SEQ ID NO: 727169 - DNA, 623 bp, Homo sapiens
tttgctattattttatttcttatctttattatttcctcctccttcttatatatagtcttcccaccaagcatccaagttgaatgcttaatgcttaacctatctatgtttcatcttacatattttatacattaatacatttaacattataattttgtacttaaatatttttatggcttcataatttttcatatgtagttaattcattattattgtttagttctaaacagtactcatttttattgtgaatttctgttttacttatgagttaatttacttatgagtttacttatgagttaatatgtgtttctaatcacatattttttggttccatctttgtatatttttacaaaatttgattacattttgatgagaaaatgtgktttatattatactaaatctttgatcttcattgagatgtcctttgtaacctaagatatcactattaaaaatatttgacataaaaataatgtatattgctaattctttgagtgcagaattatatacaaccatttctttctatcccccttctgtctcttcttactctttttttcttaattcatagtttgcctggtattaacattgctgtaataggtttgtctttaacatgtgtgtttccgtggcat

SEQ ID NO: 727170 - DNA, 1594 bp, Homo sapiens
ttgctttttcaaataacaaaacaaaatcagcacatagggtggcaaacatacgaaaacacaagggggtgagaaagaatctccaatgattccacccaagaaataactacacttcacattttggtgttttgtcttaatagttaaggaactgagtgacatggtttggatctggtcccaaattgcatgcaaattgtaattcccagtgttggaggtggggcctggtgggaggtgatcaatcatgggggtgatttctcatgaatggcttagcaccatcccccacacacccggtcccgttctcrcaatagtgagttatcacgagatctggttgtttaaaagcgtgtagctcctccccccttgctctctttttcctgctctggccatgtgatgtgtgtgctccccctccacttgccatcatgactgtaagtttcctgaggcctcctcagaagctgagcagatgccagcattatgcctcccagacagcctgggaaacggtgagccagggaatctcttttctttaaaaattacccagtctcaggtatttctttatagcaatgcaagaatgggctcatacactgaatctctatcagattggggcaccaacatggtcacactgggcactgtcagatggctttctccccagctcagctggggaagcaccttagatcttcggaggtgacttaagctgctctctgctgcactaggtgaagtggggtcggggggtgggggcctgaggacgtggtgagactccctgaactgcacaaagccagctgtgtctgcaattcacacctgccccaaggcctctttggccactgggtggtgcctgaaagctcaccatttgcatggcatttcttctacttgaggctttactccctagtaggccttctaggggtattcacaatctccctgcatgaaccccccctgggttccccattacctgcaagttgaagtcctgatgcatttgcataagtgaatagtaacagtttccaatcacagtgtgtttccggtgtacccagccctccgctgagtgcttttcctattataatgtgtgtcatcacatgacctaccataaggtgggcatcacaacttcacttttcagatgaagacaaggcatagggaggctaaaggacttgtccaaggcaacacagccaatgagtggcaggttgaacccgcttctgatgacacggaagcttgtgttcctagatgccacactttacacacacacgtccctcactgatcccgtttgcttctgcagcttctcccaggaacgtcaacagtacggagctttggacacaatggattctagccttgacttcatttttgttatttttttttatttttgagagagagagtcccactctgtctcctgggctggagtgcagttgtacgatctcggttcactgcaacctccgcctcccaggttcaagcgattctcgtgtttcagtctcctgagtaactgggattacagatgtgtgccccatacctggctaatttttgtattttttagtagacatggggttttgccatgttggccaggctggtctcgaactcctggccccaagtgatcctcccatctctgcctcgcaaagtgctggaatta

SEQ ID NO: 727171 - DNA, 593 bp, Homo sapiens
agagattacatgcaaataaatgacaactacgaatcaacagtctgcctaacttctaattagtctaaaatcgtccacaatactcctctccaaaatgaaccaggcactcaaaacgtaactagatattctagaagatataacctaatgttagccctgtttctgactctgagggactcagcatgtagcaaagtttacacttaccacatcttccatattgcttagatattaggtataaaaatactttgaaatttctaattttggctctggtaaaatgacatgaagtttggggaaaagaacttataatattaaattagcatgaaataacatccaggtcttccaccttctagtaaagtgctccttcctctacttcacatggaatcagagaaccaaagccaaaataaaggaaaaaataaaacaggaaaagaaaaaaaaagtctcaaaatcagaggcagtgaaacttactcgacccatmtaagtgataatttgttttttgaattctaaaaacaacagagccatttagcttttagcccaagaatatctgtagaaactattcatactcttacaccttatcaaaagttagaattatgttttatcct

SEQ ID NO: 727172 - DNA, 922 bp, Homo sapiens
tgttccagttgttttcaaattttcatgatattattaatgccctttagcatagataattaagaactataatgtctttaagggatttgccggattataatgtgaaagggactctctatactggaatttgaataattctaacacatttatattggcatgactgacatcaagtatctacccacaattatctcttgctctgtgacttccttaaaggttctcacattccgaattggaaatcatccaggtgtcctgaaccctagtccagctgtagaggttttgcaggttcgcttcatttgtgcccaccctgccagtatgtcagtaactccagtatacaaggtgccagctggtgcccagccatgtcctctgccacagcacaacaaatggctggtaagtacagagtatgtttccaactaagttggcacttttatmttccgtgctttagagatagagtctggaattctttggggtatatatccagaagtagaattgccagatcatatggtaattctatttttaattttttgaggaactgccatacagttttccacagcagctgtaccattttacattcttaccaacagtgcacaagggttcccatttctccacttatcaacattgaatgaactattttactcattactcattttctgatagtgtctgaggagaggtgattaaactgattagaattggctacacttgtttactatacttaagtacataatcagcttgtgataatggcaatagacacttgagatctgactacataacttccaaattttgctgatatccttcgctaccaaatcttttattaacaatattaataaataataaaatttacctcttctccaaaccaatcatgaagaatagtgataaacaataatgtagctactaagtaggcaacagggtatgaaaaataaatgagtta

SEQ ID NO: 727173 - DNA, 897 bp, Homo sapiens
cacacttatcctcccaggcctatgagagaccattggtagagagtgggaggcaccgtgtggcagagaaagagtcattgccccctaaaattccaagtaatgccagtgttttcaaccctgtagtggatgctatggttggtcatcccagattccaccttcagggctgagacagtcactcattagcccagctgccaggaatgttggtggctggtaaccatcagctgagtcyctgtccaggagtttctgtaagccaaaaagagccacttgcctcaaggtcctgctgcctgcatagaggtagacatcatccaatgaccatttatgacaggagttgaaagcctggtccctgtgtctcaaagtgagactaaggggccatccttgggagatcagctgagatcttttctgtgactgtatcacagctcacctccacccagtcctgcttccttcactttcccactttcaatgttcacttcaacacttccgggtatcaatctttgtgtataggaagatccttaacacacttcctatacacaaagctctggctcagagtcaacttccccagaaacagagaacctgacttcaaacaatcccttattaaaacataaaaggtatcgtaagtttagaaatcagaaaggccatgagtataaatagctaaaatatgaatgcagcagaaaataccttccttagaacattgttttagaagtggcaaactaggaaactttgaaaagaggtcagtatgaaactgtgatttttttaaaaaagatttcattttgacttagttttaagggtgtttcagcctgcagttatttcagaactagagatctaagcagatgtgctgagttttcattcgtggaaaattttgcatcaatagaccaagggttgatatttttaatgtctaagaag

SEQ ID NO: 727174 - DNA, 656 bp, Homo sapiens
aagggcaaagaggcagaaagctacaactctgtccaccaccacggcttaggcctcctgctcacagaggctctgaagagcccccacctcagccttcacacaaaatatctccttctggctcaactacagccaggctggaatgccatggcatgatctctgctcactataacctccgcctccagggctcaagtgattcagcctcccaagtagctgggattacaggcgtgcaccaccgtgcccagctaattttttgtgtgtgtgtttttagtagagacagggtttcaccatgttggcaaggctggttttgaactcctgacctcaagtgatgcaaagtgctgggattacaggcatgagccaccgcttctggcccaggccctatgttttaaaaaaattatttcaacttttattttagattyagggggtacacgtgtaggtttgttacacgggtatattgtgtgatgctgaggtttggggcacaaatgatctcgtcactcaggcagtgagcacagtacccaataggtagtttttcagccctttccaccctccttctctcttccctctagtagttgcagtgtctactgttcccgtcttacatccatgtgtacccagtgctcagctcccacttatacatgagaatatgatatttggttttccattcc

SEQ ID NO: 727175 - DNA, 604 bp, Homo sapiens
aaatcaggtcatattctgaggttctgggtggacataattttggggatggggaaacactattcaatccagtacatatgcttataaagtagatgaatcccccctggggatattcagatgcccattgaccctattaagccttaattcctgaaagtagagcttcagctcccaggagcatgtggcctacctcctcctcaatctctgctctggatgaggagtggggccagtrcagaagcaaggggtatagaccaacaacatgacccacaaggaccacatctggtcctggtaaagccatgggccccagagccctggtggggccctgggtgatgctgagaagcctgaggatcacacacctccctcacatagtattacgcctttgcaagtgcgtgggcatgttcttaggattaaccaattacaaactcagtttgaagtgtgacagtcattcattttctccctgagtggtactgaaagtaaaactcctgtcatgtgcgagtctgagaaacatgtgatgacaaaaagatttcttgtactcaacaaggttggaaatcaccatgctacatctttttctggagcagacttcttgtgggatgagaggcttttattggga

SEQ ID NO: 727176 - DNA, 604 bp, Homo sapiens
aaatcaggtcatattctgaggttctgggtggacataattttggggatggggaaacactattcaatccagtacatatgcttataaagtagatgaatcccccctggggatattcagatgcccattgaccctattaagccttaattcctgaaagtagagcttcagctcccaggagcatgtggcctacctcctcctcaatctctgctctggatgaggagtggggccagtgcagaagcaaggggtatagaccaacaacatgacccacaaggaccacatctggtcctggtaaagccatgggccccagagccctggtggggccctgggtgatgctgagaagcctgaggatcacacacctccctcacatagtattacgcctttgcaagtgcgtgggcatgttcttaggattaaccaattacaaactcagtttgaagtgtgacagtcatkcattttctccctgagtggtactgaaagtaaaactcctgtcatgtgcgagtctgagaaacatgtgatgacaaaaagatttcttgtactcaacaaggttggaaatcaccatgctacatctttttctggagcagacttcttgtgggatgagaggcttttattggga

SEQ ID NO: 727177 - DNA, 967 bp, Homo sapiens
cataagaaatgtctgtaataataatagaattactagcagtactttgattaacaatcatgctaggcaatttcttagaggtcttctcttcccaaatttgctgtggtcttgactggagtaacctgagctctaagttgagaacagtaaacacacagtatataaattaaggagaaggaatgtcatcagtcctccttttaagacaacctcttagaaagttacatccctccatatacactttcccccatcaggtatggtcttggatgattaccttaacaaataaaatggacagaatgggactggaaacactgccccaaattccacagccactaaaaaatcatgagtataagagtaaatatcacagtctatcatttgtgaacatttcaatgtctacattattgatttgaccattcctaacacctgcccctactcactggtcttagaatctcatttaaccacagtatcagaattatatatttaaactttatacaggtaacagcctatatatgaatagcaayataaaaataatttgcctcccctttctcaggtttggaatggagaaacaaatcacaaatcacaaaattattctcatatacttaatatagaagaaagcagtttgtctcagtattaatgatcacttccttcttaatgttttgcaggtttttcttttttcttttttcttttttttttttttgagatggagcctcgctctgtcgccaggctggagtggagtggcgtgatctcggctcactgcaacctccgcccccaggtttaagtgattctcctgcctcagcctcccaagtagctgggactacaggtgcacaccaccacacccagctactttttgtatttttagtagagacggggtttcaccatgttggccaggatggtctcgatctcttgacctcatgatctgcccaccttggcctcccaaagtgttgggattacaggtgtgagccaccgcatccggcca

SEQ ID NO: 727178 - DNA, 967 bp, Homo sapiens
cataagaaatgtctgtaataataatagaattactagcagtactttgattaacaatcatgctaggcaatttcttagaggtcttctcttcccaaatttgctgtggtcttgactggagtaacctgagctctaagttgagaacagtaaacacacagtatataaattaaggagaaggaatgtcatcagtcctccttttaagacaacctcttagaaagttacatccctccatatacactttcccccatcaggtatggtcttggatgattaccttaacaaataaaatggacagaatgggactggaaacactgccccaaattccacagccactaaaaaatcatgagtataagagtaaatatcacagtctatcatttgtgaacatttcaatgtctacattattgatttgaccattcctaacacctgcccctactcactggtcttagaatctcatttaaccacagtatcagaattatatatttaaactttatacaggtaacagcctatatatgaatagcaacataaaaataatttgcctcccctttctcaggtttggaatggagaaacaaatcacaaatcacaaaattattctcatatacttaatatagaagaaagcagtttgtctcagtattaatgatcacttccttcttaatgttttgcagktttttcttttttcttttttcttttttttttttttgagatggagcctcgctctgtcgccaggctggagtggagtggcgtgatctcggctcactgcaacctccgcccccaggtttaagtgattctcctgcctcagcctcccaagtagctgggactacaggtgcacaccaccacacccagctactttttgtatttttagtagagacggggtttcaccatgttggccaggatggtctcgatctcttgacctcatgatctgcccaccttggcctcccaaagtgttgggattacaggtgtgagccaccgcatccggcca

SEQ ID NO: 727179 - DNA, 967 bp, Homo sapiens
cataagaaatgtctgtaataataatagaattactagcagtactttgattaacaatcatgctaggcaatttcttagaggtcttctcttcccaaatttgctgtggtcttgactggagtaacctgagctctaagttgagaacagtaaacacacagtatataaattaaggagaaggaatgtcatcagtcctccttttaagacaacctcttagaaagttacatccctccatatacactttcccccatcaggtatggtcttggatgattaccttaacaaataaaatggacagaatgggactggaaacactgccccaaattccacagccactaaaaaatcatgagtataagagtaaatatcacagtctatcatttgtgaacatttcaatgtctacattattgatttgaccattcctaacacctgcccctactcactggtcttagaatctcatttaaccacagtatcagaattatatatttaaactttatacaggtaacagcctatatatgaatagcaacataaaaataatttgcctcccctttctcaggtttggaatggagaaacaaatcacaaatcacaaaattattctcatatacttaatatagaagaaagcagtttgtctcagtattaatgatcacttccttcttaatgttttgcaggtttttcttttttcttttttcttttttytttttttgagatggagcctcgctctgtcgccaggctggagtggagtggcgtgatctcggctcactgcaacctccgcccccaggtttaagtgattctcctgcctcagcctcccaagtagctgggactacaggtgcacaccaccacacccagctactttttgtatttttagtagagacggggtttcaccatgttggccaggatggtctcgatctcttgacctcatgatctgcccaccttggcctcccaaagtgttgggattacaggtgtgagccaccgcatccggcca

SEQ ID NO: 727180 - DNA, 997 bp, Homo sapiens
gtgatttttcattctgtcatattactggctgtatgtctgataaatgttgccttttcccctgtgtccactggccacaatccacaatatatttgaactaattgctatattctgcccaggaactggtgatttgtagcgtactttcacttcctatagcgtttatacattttccccattatttgtatsagaaagtatgtcttttgtagtatttaataaactagagatgcctcacttattggtggaatgaaatattctaagtcagattttcagaaaaatgaagtttagacaaagtttaaacacaaaacacagtataattgctttgattaaaatccttaaaaattcttagcataatttaactgtcaaggttataattgtaaacatccatcattactctttgctataatgtagtgatgtccccagagactgttgaaactgttagcctgcaatgccctgagtccttttatctgtttcttttctgttcttttagtacttgtgctattgataatgtgctttttctgtaacagccattcttttacccttttattgtctctctttttttttagagggaggctcactctgtcacctaggctggagtgcagtggcatgatctcggctcactgcaacctccgcctccccgggttcaagcgattctcctgcctctcagcctcctgagtagctagggctacaggcatgtgccaccatgcacggctaattttttttttcttttttttagtagagatggggtttcaccctattggccaggttggtctcgaagtcctgacttcatgatccacccacttcggcctcccgaagtgctgggattacaggcgtgagccactgtgcccggcctattgtctctttctgatctgcagttcccttgcaaaaaataagtagttgaaataagtattaagaaagtcacaaaaactcatcaacttcagacatcaattttagtctcccctggttactgtataaataagctgttaaatttatcctttgatat

SEQ ID NO: 727181 - DNA, 962 bp, Homo sapiens
taagattctgggactcaggtggggcctgacagcccaccccagtgacaaatctctgtctgagtgctatcacttggtgtccactccctatcctggaggtttcattttgttcctaccaacaactgggggatcattagcctcctcaagcatgggtggccaactgactcttggatgttacttgccagtttcctacttgaatatattagacctattagacctacagtattagacctattrcaagttctcaaacatttaaagggattaaatgtttgaattattacaaatttgaagtaaagaaattattgaagatagggcttaattaactactaattttctgagacactgaatttttttcctggtactcagcagataacagttttcttcaccaagactgttgaataaactttatatcagtcagtgtggtctaggttacatttcagtaacaaataatcccatatctcggagatttaacacaactgctatggactgaatatttgtgcctcccttaaattcatatattgaaagtctaacaaggtaatagtattaggaggttgggcttttgggaggtggccaagtcaagatggcaggaccctcatgaatggcatctgtgcccttataaaagaggccccacagaactcaccccctttccaccatgtgaggttatagcaagaagatagctgtctatgaaaaaggaggcaggccctctccagacactgaatatgctggcaccttgatctggccttcttagcctccagaaatgcaaaaaataagtgtttgttgtttataagtccagtttatggtattttgttatagcagctcaaatagactaaaacagaaaattgttactgaaagtgggggtgctgctgtaacaaatacttaaaaatgtggaagggactttggaactgggtaatgggtagaggctggaagagttttgaagtgaatgctagaaaaagccttcagcctga

SEQ ID NO: 727182 - DNA, 962 bp, Homo sapiens
taagattctgggactcaggtggggcctgacagcccaccccagtgacaaatctctgtctgagtgctatcacttggtgtccactccctatcctggaggtttcattttgttcctaccaacaactgggggatcattagcctcctcaagcatgggtggccaactgactcttggatgttacttgccagtttcctacttgaatatattagacctattagacctacagtattagacctattgcaagttctcaaacatttaaagggattaaatgtttgaattattacaaatttgaagtaaagaaattattgaagatagggcttaattaactactaattttctgagacactgaatttttttcctggtactcagcagataacagttttcttcaccaagactgttgaataaactttatatcagtcagtgtggtctaggttacatttcagtaacaaataatcccatatctcggagatttaacacaactgctatggactgaatatttgtgcctcccttaaattcatatattgaaagtctaacaaggtaatagtattaggaggttgggcttttgggaggtgrccaagtcaagatggcaggaccctcatgaatggcatctgtgcccttataaaagaggccccacagaactcaccccctttccaccatgtgaggttatagcaagaagatagctgtctatgaaaaaggaggcaggccctctccagacactgaatatgctggcaccttgatctggccttcttagcctccagaaatgcaaaaaataagtgtttgttgtttataagtccagtttatggtattttgttatagcagctcaaatagactaaaacagaaaattgttactgaaagtgggggtgctgctgtaacaaatacttaaaaatgtggaagggactttggaactgggtaatgggtagaggctggaagagttttgaagtgaatgctagaaaaagccttcagcctga

SEQ ID NO: 727183 - DNA, 962 bp, Homo sapiens
taagattctgggactcaggtggggcctgacagcccaccccagtgacaaatctctgtctgagtgctatcacttggtgtccactccctatcctggaggtttcattttgttcctaccaacaactgggggatcattagcctcctcaagcatgggtggccaactgactcttggatgttacttgccagtttcctacttgaatatattagacctattagacctacagtattagacctattgcaagttctcaaacatttaaagggattaaatgtttgaattattacaaatttgaagtaaagaaattattgaagatagggcttaattaactactaattttctgagacactgaatttttttcctggtactcagcagataacagttttcttcaccaagactgttgaataaactttatatcagtcagtgtggtctaggttacatttcagtaacaaataatcccatatctcggagatttaacacaactgctatggactgaatatttgtgcctcccttaaattcatatattgaaagtctaacaaggtaatagtattaggaggttgggcttttgggaggtggccaagtcaagatggcaggaccctcatgaatggcatctgtgcccttataaaagaggccccrcagaactcaccccctttccaccatgtgaggttatagcaagaagatagctgtctatgaaaaaggaggcaggccctctccagacactgaatatgctggcaccttgatctggccttcttagcctccagaaatgcaaaaaataagtgtttgttgtttataagtccagtttatggtattttgttatagcagctcaaatagactaaaacagaaaattgttactgaaagtgggggtgctgctgtaacaaatacttaaaaatgtggaagggactttggaactgggtaatgggtagaggctggaagagttttgaagtgaatgctagaaaaagccttcagcctga

SEQ ID NO: 727184 - DNA, 2646 bp, Homo sapiens
cctcccatgagcaagaaggaattctaccagcagattgcttttggactcaaactccaattcttccctgggtcttcagcctactttcccaccctgcagatttgccaaccctccacaatcacttgaaccaactccttaaaattaatctctctctctggatcagtcccataacctgtattcagggatctcaatgttatactgctagaaaaatacacataatcacatattttgttgctactacaaatgtatgggtcaaacctcagcatcactcagcaacccttttcctggtgattgtgctccaatcaacttctttggtgatgactccaaaactcaccattctctgcaagtttcctgttcaactcctattcccttcactcgtgttaacacatgtatcacctacctgccaactgaatccactagagcaatctaactcattgctttctcctataaaccattccttttctgttttctaagtctattagaccaaggaatccatgaattattctagaccaatgcttctcaacagaacttcctatactgaagcaaatgtcttaaatagtggcaatatagtagccactatcaacatgccactcataagccctaaaatgtggctacttgcaggtgaggaactcaatttggtattttacataaatttaaataacttaaatttaaacttaaatatccacatgtggttactgtattgaatatattttcaacccctcctctgtcacttataaatcataagtcataagtcacatatgtctcccaattttatctgcaaaacacttgcgtctgtgctttccacccccatgccaacagccgtagttgatcatgtcacttactaaaattcttcaatgtctcccaattatcttcataataaagttcatgctacttagctggaatttaagacatttcacattctagctggcccctgcttacttttgagaacmtcatctcattttttattactccctggcactgaacttttacatttcagaaacacttaactacttatatttgtctctacacacaccttatgctattttatattttgatcatctactttctccctccatctttttcatttgcataattctcaaaacaaatgccacctcctccagtaaacctgtctcaaaaccccaagtaaagccaagtgtttaccttctgagccccaaagtgcccaagacatatctcaacattatcactgaacacggtaagttaggtatctatcagtgagtgtaaccaacctctccactattcggtaagtactgatagtgcctggcccagtgattagcatactttaaggactcaatacgtatctgctacatttggcagaggcaggtataacccagaatcagacaacttcaacagtcactctccctgccccacctctcttttccaattttttcttctccacagaatctggttgaggagaagtagaagtggtggtggcttctggtaccagggacaagtaaaaagttacttaagaagtatcatcgatcgattttccatcctactcctaacttctagttctaagacatctgcttatgtggtgaaacatatatctaatactgatgtttaaaaacttacggacttctccacaacttgaaacattcgaatgatgaaatattgaagtatctggtagttctccaggaatacacggaagtgtttcaattccaatggcttcttcagagaaatgggccagtaatggtagcatttgataattccaccttctatctctctggttatcatggcaataacatttgaattattttccaacaccatttgccaaaagtcatctatggtgctcagcagtggtccttgagtagcgatataaaaatactcttctccacaattgactattctaatataactagcattgatgtagtccttgctttttccaagaggaacgcgtgttgaatcatctattacagaaacagaaacatctggtagataaaggtgggagatacatcacacccagacttcacgaaaggatttcacacatgtaaatccatatatctctttgaccaatagagaagatggcctaggagtttcttttcaaaatggttgagtccatgagtttaaattatttcctccctgaaaactattggcatgacctaagaaatatacaattatgggatgtttatttttcaaatcagtttttaataaatgcagaatgatatcattagcatccaggtacttttggaaatttctgctagaagtggcatgggcaaggttaagtcaagggaagtatcctatagtttgcaactgaacacaacagaggagaaactctttgtgggagtaaatgagtgatattatcctgcaaatctgaaacctgcaaacccagagcagcaggggccaggggaaaaaaaaaatctgatagttgactgcagacaaattctaggattaatggaattccaccactgtccccaaactagacagccatattttatgtccattctcagccttcatctggtgataggacatgttattcaaagcaaagatattgtggcaaaaggatgctaccaagggaaattgctccaagtaatatgggactcatctaacatggactgttataacaaatatgagagggaaaaccagctatttggcctactaaccttcactgctccaggagttccttcttcacct

SEQ ID NO: 727185 - DNA, 584 bp, Homo sapiens
tcgcaggagagaaaacactactgtgactcagattagaacccaggttgcggcaaccacagctacaagtattgaccactacacgaccaaaaagcctgctgacaaccattgtacttcttatatttttttatgtaaaaacactcatactattttctctgctttattctcgaacgtctgcagattttcgtgcttttctctctttcaygcgcttctccgttactctctccccattccgctacataatttaaaaaacatctcatctctcaggacctggccactgcctctacaacaagcctcctgggaagtctcgttgtcccatcgacacctctcccttctttcgctccatttttttttttttttttttttttgacggagttgctctgtcgcccaggctggagtgcagtagcgcgatcttggctcactgcaacctccgcctcccgggttcaagcgattctcctgcctcagcctctcaagtagctggaatagcaggtgcacgccaccacattcggctgatttttgtatttttagtagagacgggatttcaccatgttagccaggctggtcttgaactcttgacctcaagcgat

SEQ ID NO: 727186 - DNA, 645 bp, Homo sapiens
acggagtttcaccacgctggccaggctggtctcgaactcctgacctcaggtgatccacctgcctgggcctctcaaagtgctgggattacaggcgtgagccaccgtgcccggctgctcttttttatagacgaagaaattgaggtacagaaaatccagtaacgttttaaaagtcacgtcatgaatgaaccaagatttcaacccagaaattgaggcttcactacaagtgaagactggggttttcttgttttcaattattgggagttttggatttccaggaatgtgcaattgtaaaaacccagcttcaggaggtgatgaaataggtgcagtggctctggygtaagctctgaagccccaggctcaggctctattgaaaaattacttttgctgaaatattcctgtttttaggaacttccatggaacttgagccttcacgcagcatattttggcatctgattcaaagctaatagaggtccggaggattcccaggattaaagtctttaaacagaaactgtgaatcttgcctaagcaaaaggtgccatccctggatgggcttgcaccaccaacctttcagttaacagtcaaacgcgctaaccgattgcgccacagagactctaatggcttgtgtcttaaactcatttgctgata

SEQ ID NO: 727187 - DNA, 1226 bp, Homo sapiens
agctggtgctctccagaagcatcattccagaggccacacctcactgcaggcagtggcagggattgcaggtaagggaagcatgggcttgcccttctgccatctcttggggcagtgctgaggttgaaacaagtgcctctgggcaactgaatcaaggatgcacataaaagtcccattggccccttggaataggtgatgtacatatcaagggcagctcatctatttacaaattcttagatagaagtgtaatatgtgtaaggtcttgtcccatcttcagaggccagaactctgctgggtgcacagagcagaaaaagtggaatgagaaaaaccctggctccagaagcctagcaaaagaggtgctgagaaggagtgagcaccctttgtrtgcagcccctgacttctcaggctgcagagtgaaatgctcacaacctgagctttcagtcaggtagactcaaagtgtatgttaccccaagctgctttgtcttcagtaagttccttaactttgctgagcctcagtgtcctccactataaaagcagaacaccactacctatttgaggggatcactgtgtcaattaaatgaggaaatatatgtatagtggtcaatattgtgagcataataggtgctcaatcaatgagaagttcctgtctttccttggctgctataatcttagaggaaacattttgccgctttgctcctcattgtgaaatgagaaacaggaatagtaccagatcaaaatccattatgggccgggcatggtggctcatgcctgtaagcccagcactttgggaagctgaggcagttggatcacctgaggtcaggagtttgagaccagcctggccaacacggtcaaaccccatctctactaaaaatataaaaattagcctggcgtggtggcaagcacctgtaatcccagctacttgggaggctgaggtaggagaatcacttgaacccgggaggcagaggttgcagtaagctgagattgtgccactgcactctagtctgggcgacaacagcaaaactctgtctcaaaaacaacaacaacaactaaaaaccattatggctcactcattacttaaaattgccaatttagaaaaaaacaccagatacagccagggactaaaaataatttcttggtattgtccacattaggatatgattcatactggcctaaaacttcaaacacttttctcaagaggaaaattaaagagaaaactgagcaggagaaaa

SEQ ID NO: 727188 - DNA, 1226 bp, Homo sapiens
agctggtgctctccagaagcatcattccagaggccacacctcactgcaggcagtggcagggattgcaggtaagggaagcatgggcttgcccttctgccatctcttggggcagtgctgaggttgaaacaagtgcctctgggcaactgaatcaaggatgcacataaaagtcccattggccccttggaataggtgatgtacatatcaagggcagctcatctatttacaaattcttagatagaagtgtaatatgtgtaaggtcttgtcccatcttcagaggccagaactctgctgggtgcacagagcagaaaaagtggaatgagaaaaaccctggctccagaagcctagcaaaagaggtgctgagaaggagtgagcaccctttgtgygcagcccctgacttctcaggctgcagagtgaaatgctcacaacctgagctttcagtcaggtagactcaaagtgtatgttaccccaagctgctttgtcttcagtaagttccttaactttgctgagcctcagtgtcctccactataaaagcagaacaccactacctatttgaggggatcactgtgtcaattaaatgaggaaatatatgtatagtggtcaatattgtgagcataataggtgctcaatcaatgagaagttcctgtctttccttggctgctataatcttagaggaaacattttgccgctttgctcctcattgtgaaatgagaaacaggaatagtaccagatcaaaatccattatgggccgggcatggtggctcatgcctgtaagcccagcactttgggaagctgaggcagttggatcacctgaggtcaggagtttgagaccagcctggccaacacggtcaaaccccatctctactaaaaatataaaaattagcctggcgtggtggcaagcacctgtaatcccagctacttgggaggctgaggtaggagaatcacttgaacccgggaggcagaggttgcagtaagctgagattgtgccactgcactctagtctgggcgacaacagcaaaactctgtctcaaaaacaacaacaacaactaaaaaccattatggctcactcattacttaaaattgccaatttagaaaaaaacaccagatacagccagggactaaaaataatttcttggtattgtccacattaggatatgattcatactggcctaaaacttcaaacacttttctcaagaggaaaattaaagagaaaactgagcaggagaaaa

SEQ ID NO: 727189 - DNA, 1226 bp, Homo sapiens
agctggtgctctccagaagcatcattccagaggccacacctcactgcaggcagtggcagggattgcaggtaagggaagcatgggcttgcccttctgccatctcttggggcagtgctgaggttgaaacaagtgcctctgggcaactgaatcaaggatgcacataaaagtcccattggccccttggaataggtgatgtacatatcaagggcagctcatctatttacaaattcttagatagaagtgtaatatgtgtaaggtcttgtcccatcttcagaggccagaactctgctgggtgcacagagcagaaaaagtggaatgagaaaaaccctggctccagaagcctagcaaaagaggtgctgagaaggagtgagcaccctttgtgtgcagcccctgacttctcaggctgcagagtgaaatgctcacaacctgagctttcagtcaggtagactcaaagtgtatgttaccccaagctgctttgtcttcagtaagttccttaactttgctgagcctcagtgtcctccactataaaagcagaacaccactacctatttgaggggatcactgtgtcaattaaatgaggaaatatatgtatagtggtcaatattgtgagcataataggtgctcaatcaatgagaagttcctgtctttccttggctgctataatcttagaggaaacattttgccgctttgctcctcattgtgaaatgagaaacaggaatagtaccagatcaaaayccattatgggccgggcatggtggctcatgcctgtaagcccagcactttgggaagctgaggcagttggatcacctgaggtcaggagtttgagaccagcctggccaacacggtcaaaccccatctctactaaaaatataaaaattagcctggcgtggtggcaagcacctgtaatcccagctacttgggaggctgaggtaggagaatcacttgaacccgggaggcagaggttgcagtaagctgagattgtgccactgcactctagtctgggcgacaacagcaaaactctgtctcaaaaacaacaacaacaactaaaaaccattatggctcactcattacttaaaattgccaatttagaaaaaaacaccagatacagccagggactaaaaataatttcttggtattgtccacattaggatatgattcatactggcctaaaacttcaaacacttttctcaagaggaaaattaaagagaaaactgagcaggagaaaa

SEQ ID NO: 727190 - DNA, 1226 bp, Homo sapiens
agctggtgctctccagaagcatcattccagaggccacacctcactgcaggcagtggcagggattgcaggtaagggaagcatgggcttgcccttctgccatctcttggggcagtgctgaggttgaaacaagtgcctctgggcaactgaatcaaggatgcacataaaagtcccattggccccttggaataggtgatgtacatatcaagggcagctcatctatttacaaattcttagatagaagtgtaatatgtgtaaggtcttgtcccatcttcagaggccagaactctgctgggtgcacagagcagaaaaagtggaatgagaaaaaccctggctccagaagcctagcaaaagaggtgctgagaaggagtgagcaccctttgtgtgcagcccctgacttctcaggctgcagagtgaaatgctcacaacctgagctttcagtcaggtagactcaaagtgtatgttaccccaagctgctttgtcttcagtaagttccttaactttgctgagcctcagtgtcctccactataaaagcagaacaccactacctatttgaggggatcactgtgtcaattaaatgaggaaatatatgtatagtggtcaatattgtgagcataataggtgctcaatcaatgagaagttcctgtctttccttggctgctataatcttagaggaaacattttgccgctttgctcctcattgtgaaatgagaaacaggaatagtaccagatcaaaatccattatgggccgggcatggtggctcatgcctgtaagcccagcactttgggargctgaggcagttggatcacctgaggtcaggagtttgagaccagcctggccaacacggtcaaaccccatctctactaaaaatataaaaattagcctggcgtggtggcaagcacctgtaatcccagctacttgggaggctgaggtaggagaatcacttgaacccgggaggcagaggttgcagtaagctgagattgtgccactgcactctagtctgggcgacaacagcaaaactctgtctcaaaaacaacaacaacaactaaaaaccattatggctcactcattacttaaaattgccaatttagaaaaaaacaccagatacagccagggactaaaaataatttcttggtattgtccacattaggatatgattcatactggcctaaaacttcaaacacttttctcaagaggaaaattaaagagaaaactgagcaggagaaaa

SEQ ID NO: 727191 - DNA, 1226 bp, Homo sapiens
agctggtgctctccagaagcatcattccagaggccacacctcactgcaggcagtggcagggattgcaggtaagggaagcatgggcttgcccttctgccatctcttggggcagtgctgaggttgaaacaagtgcctctgggcaactgaatcaaggatgcacataaaagtcccattggccccttggaataggtgatgtacatatcaagggcagctcatctatttacaaattcttagatagaagtgtaatatgtgtaaggtcttgtcccatcttcagaggccagaactctgctgggtgcacagagcagaaaaagtggaatgagaaaaaccctggctccagaagcctagcaaaagaggtgctgagaaggagtgagcaccctttgtgtgcagcccctgacttctcaggctgcagagtgaaatgctcacaacctgagctttcagtcaggtagactcaaagtgtatgttaccccaagctgctttgtcttcagtaagttccttaactttgctgagcctcagtgtcctccactataaaagcagaacaccactacctatttgaggggatcactgtgtcaattaaatgaggaaatatatgtatagtggtcaatattgtgagcataataggtgctcaatcaatgagaagttcctgtctttccttggctgctataatcttagaggaaacattttgccgctttgctcctcattgtgaaatgagaaacaggaatagtaccagatcaaaatccattatgggccgggcatggtggctcatgcctgtaagcccagcactttgggaagctgaggcagttggatcacctgaggtcaggagtttgagaccagcctggccaacacggtcaaaccccatctctactaaaaatataaaaattagcctggcgtggtggcaagcacctgtaatcccagctacttgggaggctgaggtaggagaatcacttgaacccgggaggcagaggttgcagtaagctgagattgtgccactgcactctagtctgggcgacaacagcaaaactcygtctcaaaaacaacaacaacaactaaaaaccattatggctcactcattacttaaaattgccaatttagaaaaaaacaccagatacagccagggactaaaaataatttcttggtattgtccacattaggatatgattcatactggcctaaaacttcaaacacttttctcaagaggaaaattaaagagaaaactgagcaggagaaaa

SEQ ID NO: 727192 - DNA, 1510 bp, Homo sapiens
aaaaagaaaaagaaaactggggccaaatgaagactgagagcaaactcactaactgaagatctgtgacttgctcctaattcaaggccaccactctcatctcctatcccctgtctccaaagcctgggctggtgctgcatctgaactccaggagtctggcagagctccagaagcctccagatgtgygggagaggggctgggcctcgtggccttctccacatgacccttctcctttgtttccccagcattccctctgcacattttttggcaagtgtctaatgactgtagctaggagacaaggatgggttaagttaaccacagtgatttgtcatgcattacagaacagctgatgcccccgagactggctgaaccatgagatcagttagaaacaatgccgtttgtgccctgtgtgtagacattgtgtggctgtggttactgcgtgttggggagtgcggggagaggaggtctccttgtctttgtgaggaaggatgccaaaaagcccagctgtcctttgggagttttgtttctgccatcccctcttctgaaaccacaggtctcctatagcatcctcctaagcgaagtccagtgcggcccctggcattggctgcctggggttccagagagtaaggcaggaagcagtgatctcccccatttccccgtgcccctatggtataatggaaggactcagagagattcgtccagggcacgcttcttaccagcttttcttccaatcctaacatcctcttggataccacttagcagcttttcttccaatcctaacatcctcttagataccatgggtgacattctgcagcaaagaggggccagacctctatactgttcctttctttagatcagtaaggggactttggcttacatgtcaccaaacacatggcttaatttattatctcatataaaaagaaatcctgaagcaggccagtgctggacctggttaatttggcagcctcacaggatcttccagcatctcagtcccttcctcttccactctgtcatgcttggggattagtctcatcctcaggcttgttccctcttagctgtaaaatgactgcattagctgcaggcatcacatattcacctgatgcaatggggaccagaggcagtggaagagggagttctttcttttttttgaaacagagtctccctttgtcacccagtgagagtgcagtggcgcaatcttggttgacagcaacctccacctcccgggttcaagtgattctcctgcctcagccacctgagtagctgggattacaggcatgcaccaccacgcccagctaattttttttttttttttttttttttagtagagacggggtttcaccatgtcggtcaggctggtcttgaactcctgacctcaggtgatctgcctgtcttcgcctcccaaagtgctaggattataggtgtgagccaccacaactggcggggagttctttcttgtctctcctttttaaagactttattatacagattttctttttctttttctttttcttta

SEQ ID NO: 727193 - DNA, 1510 bp, Homo sapiens
aaaaagaaaaagaaaactggggccaaatgaagactgagagcaaactcactaactgaagatctgtgacttgctcctaattcaaggccaccactctcatctcctatcccctgtctccaaagcctgggctggtgctgcatctgaactccaggagtctggcagagctccagaagcctccagatgtgtgggagaggggctgggcctcgtggccttctccacatgacccttctcctttgtttccccagcattccctctgcacattttttggcaagtgtctaatgactgtagctaggagacaaggatgggttaagttaaccacagtgatttgtcatgcattacagaacagctgatgcccccgagactggctgaaccatgagatcagttagaaacaatgccgtttgtgccctgtgtgtagacattgtgtggctgtggttactgcgtgttggggagtgcggggagaggaggtctccttgtctttgtgaggaaggatgccaaaaagcccagctgtcctttgggagttttgtttctgccatcccctcttctgaaaccacaggtctcctatagcatcctcctaagcgaagtccagtgcggcccctggcattggctgcctggggttccagagagtaaggcaggaagcagtgatctcccccatttccccgtgcccctatggtataatggaaggactcagagagattcgtccagggcacgcttcttaccagcttttcttccaatcctaacatcctcttggataccacttagcagcttttcttccaatcctaacatcctcttagataccatgggtgacattctgcagcaaagaggggccagacctctatactgttcctttctttagatcagtaaggggactttggcttacatgtcaccaaacacatggcttaatttattatctcatataaaaagaaatcctgaagcaggccagtgctggacctggttaatttggcagcctcacaggatcttccagcatctcagtcccttcctcttccactctgtcatgcttggggattagtctcatcctcaggcttgttccctcttagctgtaaaatgactgcattagctgcaggcatcacatattcacctgatgcaatggggaccagaggcagtggaagagggagttctttcttttttttgaaacagagtctccctttgtcacccagtgagagtgcagtggcgcaatcttggttgacagcaacctccacctcccgggttcaagtgattctcctgcctcagccacctgagtagctgggattacaggcatgcaccaccacgcccagctaattttttttttttttttttttttttagtagagacggggtttcaccatgtcggtcaggctggtcttgaactcctgacctcaggtgatctgcctgtcttcgcctcccaaagtgctrggattataggtgtgagccaccacaactggcggggagttctttcttgtctctcctttttaaagactttattatacagattttctttttctttttctttttcttta

SEQ ID NO: 727194 - DNA, 607 bp, Homo sapiens
tgtatatataaagtatgtatgtatgtgtatgtgcatgtgtgtgtgtgtgtgtgtgtgtgtgtgtgtgtgtrtatatatgtagagagagagagagagagatttattttaaggaattgcctaaagcaattgtggggctagcaagttcaaaatttgcagggcaggccagagactcagggaagagctgatgttgcagcctgaaacccaaaggcagtctagaaatagaattccttctattccttctttctccggggacctcggtctacgctcttaaagccatcaactgattggatgaggcccactcaccttaagtcatctgctttactcagggtctactactttgaatgttgattcatctttaaaagtaccttcacagcaaaatctagaccgatgtttcaccaaacaactgaacaccattgccaccaaaatctctatcttcatacttctttcttcattgtagtctctcaaaagatgttctgcttccttgctaatgtgagctcttgatctcccctcttgtatctcttccaagagttttttcacaatgatgctttctcttttgtatcatcaaactctctattttcactcacttctccttctaggtaaacatgtt

SEQ ID NO: 727195 - DNA, 607 bp, Homo sapiens
ggaaagttatttgaagtaaaagcatctggcagcatctaataaaaacatagttgcatgcaaacaaaacacaagaaaaggaaaacacagtcacctacacaggctaaaattcacactgaccacaggtgtcttcctgataaattccaaataaaagtgaaaaaatgtctaaactgaagatatacaatgttgcagtaaaaagagagagctctggagccagaatttccttgggtttgaccctttctccaccaccaaattgtgtggccacggatactgaaattacttttgtatccatttcccccatttgctctgtaataatagaaagggcccaagtttcaaagtttacatcattcacacacatcagtttcttagactagtatctagaatgtgctatctgttcagtaaaacttattatcgatatcattagatacattttagttgagagtaatgtgtggctcaaacaggaagacattctgagataaattaggggggataaacagtaagatacagctgaatatttttgtagatgaaacaaaattaagaaaagggaagaaactrtaatattactaacagtaaacgttgaattcaggttaaatatatatatatttaaaaa

SEQ ID NO: 727196 - DNA, 1990 bp, Homo sapiens
tcaccaagcaaacaaatggagatgcataaactacctgacaaagcatttgaaataacagtcttagggaagctcagcaaacttcaagaaaatacacagaaactattcaaacaaacgataaaaataatatgaccacaatgataaacttagcaaatattggaataacttaaaaatcaaacaaattctaaagctgcaaaatataatgaacaaaatgtaaactgcagttgagaccatcaacagcagaatggatcaagccaatgaatctgtgaactcaaatacaggttatatgaaaatagagaagagaaaagaatgaaaaataataaaggaaacatgagatttactggacagcaacaaaacagcaaatttttgagtcattggagataagggagttgaaatgataaaggagtagaaagcttatatgaagaaataatagaaaacttttcaaacctggaaaaagatataaataaccaggtacagtgaggtaaaaagtaaccaatcagattcaatccaaacaaaactacccctaagacatattataatcaaaccaccaaaaattgaagggaagcttctctgtattggtggaaggtaggtagggcttttctagcccctacttccactctatcccctgagttccacctgcactgactcgaggaagagtaagcatctagagctagtgagaatgggaggaacttacaaagtcaagagagaagcctattgttccttgctcacccacagattacgtactattactcaaggcttgctgtatttattatagaagagaaaatcttcttgtattatatatcagctgagttattgcttatctgagaatcaccagaagtttccacccgagacaggataagagaatagagccaacatgttgggatttccagagcaatcaagagaaaagaaaatctattgtgttattattgcccctgagaaatcacacttttgtctttcctaggaagcygatgcttacaacaatggagattagcaatacctggacagagttgagcttcaaaggatactgagaaatggctaaagcaggtaaaaagagagaagactggaactttgtctatgcttatcatctagcttcaaggagaaacacagttgagttcagccattttgaaacaatggttagaaactagataaaaagttcttaagcttttcattatttatttatttatttatttttgagacagagtcttgctctgtgtcccaggctgcagtgcagtggtgagatctctgctcactgcaacctccgcctcccgggctcaagtgattctcccacatcagcctcccaagtagctggggttgcaggtacctaccaccgtgcctggctaagttttctatttttagtagagaaagggcttcacgatgttggccaggctggtttcaaactcctgaccttaaatgatctgccagcctaggcctctcaaagtgctgggattacaggcatgagcccccgcacccagcccttaagctttttatgagcaaattaatatttcaaattaaattgaaccaaatggttttctcatacgatggagcaacattcctcatgctggaaaatgagatgctcctgaagtctttgcatcttggccctctaccgttgttttccacattgatatttatgtgttctgtttagagacttgatgtgttcccagaactttctgaagagccccaccacatccttgtttctcaggatgtagatgagggggtttagcatgggggtgagtacagtgcaaaatacagacacagcttgtttctgctcagggatgtgggagaaaccctgtgtcacgtatattaaacacacagttcctaagtaaagaccacggaaagatgggaggagcagttggccaaagctttgttcctactttagggggatttcatatggaggactgtaaggaagatgaggtatgagaggccacaagtccaagatgaaatggataagaagtagagagccacaggccaagatcaaatgggtaaaaagtagaga

SEQ ID NO: 727197 - DNA, 1990 bp, Homo sapiens
tcaccaagcaaacaaatggagatgcataaactacctgacaaagcatttgaaataacagtcttagggaagctcagcaaacttcaagaaaatacacagaaactattcaaacaaacgataaaaataatatgaccacaatgataaacttagcaaatattggaataacttaaaaatcaaacaaattctaaagctgcaaaatataatgaacaaaatgtaaactgcagttgagaccatcaacagcagaatggatcaagccaatgaatctgtgaactcaaatacaggttatatgaaaatagagaagagaaaagaatgaaaaataataaaggaaacatgagatttactggacagcaacaaaacagcaaatttttgagtcattggagataagggagttgaaatgataaaggagtagaaagcttatatgaagaaataatagaaaacttttcaaacctggaaaaagatataaataaccaggtacagtgaggtaaaaagtaaccaatcagattcaatccaaacaaaactacccctaagacatattataatcaaaccaccaaaaattgaagggaagcttctctgtattggtggaaggtaggtagggcttttctagcccctacttccactctatcccctgagttccacctgcactgactcgaggaagagtaagcatctagagctagtgagaatgggaggaacttacaaagtcaagagagaagcctattgttccttgctcacccacagattacgtactattactcaaggcttgctgtatttattatagaagagaaaatcttcttgtattatatatcagctgagttattgcttatctgagaatcaccagaagtttccacccgagacaggataagagaatagagccaacatgttgggatttccagagcaatcaagagaaaagaaaatctattgtgttattattgcccctgagaaatcacacttttgtctttcctaggaagctgatgcttacaacaatggagattagcaatacctggacagagttgagcttcaaaggatactgagaaatggctaaagcaggtaaaaagagagaagactggaactttgtctatgcttatcatctagcttcaaggagaaacacagttgagttcagccattttgaaacaatggttagaaactagataaaaagttcttaagcttttcattatttatttatttatttatttttgagacagagtcttgctctgtgtcccaggctgcagtgcagtggtgagatctctgctcactgcaacctccgcctcccgggctcaagtgattctcccacatcagcctcccaagtagctggggttgcaggtacctaccaccgtgcctggctaagttttctatttttagtagagaaagggcttcaygatgttggccaggctggtttcaaactcctgaccttaaatgatctgccagcctaggcctctcaaagtgctgggattacaggcatgagcccccgcacccagcccttaagctttttatgagcaaattaatatttcaaattaaattgaaccaaatggttttctcatacgatggagcaacattcctcatgctggaaaatgagatgctcctgaagtctttgcatcttggccctctaccgttgttttccacattgatatttatgtgttctgtttagagacttgatgtgttcccagaactttctgaagagccccaccacatccttgtttctcaggatgtagatgagggggtttagcatgggggtgagtacagtgcaaaatacagacacagcttgtttctgctcagggatgtgggagaaaccctgtgtcacgtatattaaacacacagttcctaagtaaagaccacggaaagatgggaggagcagttggccaaagctttgttcctactttagggggatttcatatggaggactgtaaggaagatgaggtatgagaggccacaagtccaagatgaaatggataagaagtagagagccacaggccaagatcaaatgggtaaaaagtagaga

SEQ ID NO: 727198 - DNA, 1990 bp, Homo sapiens
tcaccaagcaaacaaatggagatgcataaactacctgacaaagcatttgaaataacagtcttagggaagctcagcaaacttcaagaaaatacacagaaactattcaaacaaacgataaaaataatatgaccacaatgataaacttagcaaatattggaataacttaaaaatcaaacaaattctaaagctgcaaaatataatgaacaaaatgtaaactgcagttgagaccatcaacagcagaatggatcaagccaatgaatctgtgaactcaaatacaggttatatgaaaatagagaagagaaaagaatgaaaaataataaaggaaacatgagatttactggacagcaacaaaacagcaaatttttgagtcattggagataagggagttgaaatgataaaggagtagaaagcttatatgaagaaataatagaaaacttttcaaacctggaaaaagatataaataaccaggtacagtgaggtaaaaagtaaccaatcagattcaatccaaacaaaactacccctaagacatattataatcaaaccaccaaaaattgaagggaagcttctctgtattggtggaaggtaggtagggcttttctagcccctacttccactctatcccctgagttccacctgcactgactcgaggaagagtaagcatctagagctagtgagaatgggaggaacttacaaagtcaagagagaagcctattgttccttgctcacccacagattacgtactattactcaaggcttgctgtatttattatagaagagaaaatcttcttgtattatatatcagctgagttattgcttatctgagaatcaccagaagtttccacccgagacaggataagagaatagagccaacatgttgggatttccagagcaatcaagagaaaagaaaatctattgtgttattattgcccctgagaaatcacacttttgtctttcctaggaagctgatgcttacaacaatggagattagcaatacctggacagagttgagcttcaaaggatactgagaaatggctaaagcaggtaaaaagagagaagactggaactttgtctatgcttatcatctagcttcaaggagaaacacagttgagttcagccattttgaaacaatggttagaaactagataaaaagttcttaagcttttcattatttatttatttatttatttttgagacagagtcttgctctgtgtcccaggctgcagtgcagtggtgagatctctgctcactgcaacctccgcctcccgggctcaagtgattctcccacatcagcctcccaagtagctggggttgcaggtacctaccaccgtgcctggctaagttttctatttttagtagagaaagggcttcacgatgttggccaggctggtttcaaactcctgaccttaaatgatctgccagcctagrcctctcaaagtgctgggattacaggcatgagcccccgcacccagcccttaagctttttatgagcaaattaatatttcaaattaaattgaaccaaatggttttctcatacgatggagcaacattcctcatgctggaaaatgagatgctcctgaagtctttgcatcttggccctctaccgttgttttccacattgatatttatgtgttctgtttagagacttgatgtgttcccagaactttctgaagagccccaccacatccttgtttctcaggatgtagatgagggggtttagcatgggggtgagtacagtgcaaaatacagacacagcttgtttctgctcagggatgtgggagaaaccctgtgtcacgtatattaaacacacagttcctaagtaaagaccacggaaagatgggaggagcagttggccaaagctttgttcctactttagggggatttcatatggaggactgtaaggaagatgaggtatgagaggccacaagtccaagatgaaatggataagaagtagagagccacaggccaagatcaaatgggtaaaaagtagaga

SEQ ID NO: 727199 - DNA, 1029 bp, Homo sapiens
aatgagagcacttgccaaggctactgaacaaagggtcaagcacccagccagtcactgagttccagactcttaataacaaggttatgaagctatgcgaagccttcatcccttctcataactacacaggcatgtcggggcttctgaagttgtgacagtgatttcctttaaagaaaacgattctaagtaaaccaaggacacttcacccttgactttgaaaatgtctacaaactttcccagagcaaatctctgccggcgtttctcacttcccgatctgatcggcctgaggagcccacgggctgggctggcacgttcttttgttcagcttctctaccggaaggagtttgtgtaaaaaggaatagaaatcagtgttcatgccacaataggggtaattgttctgagctgccacattccgttaaatgtttacctttttgtttcacaatctaacaggaaacgaggagcaaaggatttttggttcccttatccccctttggtcaagactaaaaaagaccagttgttattctagttgctcaaaaatgaaatgctcaaggtaggaaatgagcacagttgctaaagactccagatcacaatctggggtttcaaccaaatccgttgcatgaaatgtttcagaggaatgaggctttgtcaaccttctccatgtgcctccaggacaggatgtttagcaagaggtgctgaacattgtaaccatctttctatgtgatctatagaacactatggatgaccaagataaaraactggacagattagattccttagtagccaaatacaaggtagggaagtggcaaaaagctgggacccgttgggaaggaggccggagggcttcgccaggctctcctccgccatttcagatccatccttcaagaccagaccccaacccagcttctacttcgaggagaagtatttgtttaaagttccatttgtggaatggcccagctgggatgaaaaccaggctgtgaattctagtaccagctccacccctgaaaaacagagtagaacctccctgggctaacg

SEQ ID NO: 727200 - DNA, 1881 bp, Homo sapiens
caatgagttttttaatggtgtgtgtctgaattatagcatttttacaaaccccaccaccagttgctattttcattagttcatagcatttctgagtttatgtatgtatataaatatatatacatacacgtatgtgaatttgcatctataaattttgcatttcataatgacatattctttgccactagatcagctatactatttttggaaacattactctctacttggaaatcataacctcttagtcaatctgaatatgacttcataacttttatagtttttacccatacttttgcacaaccttactgtgattgcaaaatagctctgtgtggttaaggggaaaaaaagagagtaactttgcattacataccctaaaaatgcttcggagtctctgtttgggtattgggatctggatatgtctgatgtgtctgtgtgctagtgtgagcagaaaatctaagaggttaaataagtgacggtttctaaaccaaaactttgactctattgcttctccagttgctaattaaattaaagtcgaatacccagaacaatgcttccaggattccctcaatcctggaaaaaagattaacattaacttaaaatgcagagcagcattaattttattcattaggcctaaataatgctcttattaatttatcattcccctttagaaggaggggtctaaaagttctattgttaaatgataaggattttttcattaaaattttttattccatttaaattctctattgacatgatagtaatacgttttgatttttgtttttgtttttgtttttttgagatggagtctcgctctgtctctcaggctggagtgcagtggtgctatgtcggctcactgcaacctctgcctcccgggttcaagcgattctcctacctcagcctcccgggtagctgggattacaggcacgtgccacgacacccagctagtttttatatttttagtagagacagggtttcactatgttggccaggctggtctcaaactcctgacctcaggtgatccacccatgtcagcctcccaaagtgctgggattgcaggcatgagccaccatgcctggccaatagtagtaagattttaaacaggacttcttaaaattttatatacacaaaaaccacctggggatactgttgaaatgcaaatactgattcagaaggtccagagttgggcctgagattgcgcattcttaataagtgccgggtggtttctagacaacattttgaacaagattttaaagtatctaagcatgtattgcaaagcttcaccaacagyattatttttctgtgacccacaatggcttcccaaagtgtgctcgcctgagttctccttctgatgccaagttcagcattactcactcttttcttacttatattagaggttgctaatccagaagaatgtatcaataaaccttcctatggacttggaactgatctagttctaacttttctccaggtgtgtgtttgtacagaccttaaaaatattctagcggtgtgtagaaaactaaagcatgctttagacacatattttgtgcatttaaaagggtttcatgtgacttactcctgggatctcatcccaaactgcctatactgtttccctaatcccaagcatcacacaactaaaagaggcttgtgaattcctctataccagagacactaagccaaggccaatccattgtctttcaacttctccttgcaccaagcacacatcccttgagctagaacgaaaattgtacatctcaaagggataaataaatgtttgctgaaggagattgaatgagaggggcagaaagttgaggccccttgtaccactaacagaattgtaagtacttttaattgggcaggaagtgggttagaatgattagccccata

SEQ ID NO: 727201 - DNA, 823 bp, Homo sapiens
catgagatgagggcagatgcaacaaatgtgagagggaaataaaggggaatcatcaatgggtaagaaaccaagttggaggagagcaaggggtgaagggtaaaggaagagggagttcctctctggatgcattgaaatgatccaccttctctttcttctcagcacattacccacatgaatacactaagagctaaaaagaagttccacatgttctctccaaatcacttcaatggcacttttggcccctaattttaggaggtccaagggtgccttctatcataagatttctcaaggggaagaatcccagtgactccccagggaggaaaagccacccagcctagccrgcgcctgcctgctcaacaggctctttgccctcgtccccatcactcatttcccagttcagtctgcgttcagagtgtctgcaagattctggaaacatcttacacttcagcttccccctggagtaactgtacttcacatattttttaataggtgtctcataatgtcagttatattccagtgagatctgcatttgggacttgaagcttactgattcctggtacagtatttctatatgtgaatgttcagggcacagtggtttactgcttgatacacctgccagttcatttgtcactactaagtaacaaattagttcattatttgttttccaaagaaggcaaaacaaactgcagcaagcagtcacggcacatagacagaatgctaacctcgccaaggaaagcctcctttattattttgaatttgaaaagaacatagaaaaggaggctctccacctgtgctacaaaaggcaaagtgataagaacaagct

SEQ ID NO: 727202 - DNA, 621 bp, Homo sapiens
taaataagccacattaataaacctcaatcaaaattatatacagtatctatatcaataagccagaaacctcaaccaaaattataaaattacacttgtactactagtgctaatgtcatcatttgccaacacaaaaagtacttttgttgcaattattttcttctttccaccattctaagtttgaatacctgggattgactaaaattgcaaaactagttctatgtttaatgtttttattcatgaataagtgtcttgttttctatccttattaactttttttcttgctaataatgaatttattttatttcttataccacaggggttttcataagtaactttcaatcctttttggagcaaagcagaagttatttggtaaatttattaatgtaaatattcttttattctcttttttttytgttccttctccatttttgtagttcaacacttttcaaattagtcttaattatttgatctgaccattgccataacctgtaattggataaaaatgtctaagtactggtctcggtttgacacttagaagcagtaacctcagaatgttccttaactctacttaatgaaaagagaactgtccttataatgaggacaaagggataaataaataaa

SEQ ID NO: 727203 - DNA, 868 bp, Homo sapiens
agaaaaaagcatagaaagcagtcatttggcacatagtaagcaytcaataaagattagatttttaatatttatgattttatagtatgaagtcatgctaacggtcttaatttatgaactctgttatgttttactgaggttctactttacaaattcacaacaattcaaacttttagatgctatactgtcctgccttgatttgacacccataaatcaactcaattttatttactatttctttcaaaagtgacatgaaatcatactagttctatgttttttatgctattattcttttactactagcataattccaatttatcacagttcaattagttcaaaaccaaagattcattacattgaggtttattagaattaattgccattattgttcatgtcaattgccaaagtgaatttgaattgccccatccattcacatgaatgctgtttacttctcttgcccactcaatgttcgaagtttttatttgttcattttcagattaagaaaaaacccttaatcggtttcttttctttctttctttttctttttttttttctactcagtttggaagcgatcttatgcctggttaccatagctaaaacaggagacactaaatggaagagaggtatgatttatatgagaaagaatgaaaataaaaatcacaccccacttagaggaagagactgggacctagtcaaaatagtcagagatgaaagcttagcaacttcgcacattttaagcactgcctggaattctgactgatgggatattctggaaggaggcttaagcaaataagtaggctaagaggaacactgaagttgtttcatgctgtggctgttttaatctttgggcatgaactagtaattattttca

SEQ ID NO: 727204 - DNA, 868 bp, Homo sapiens
agaaaaaagcatagaaagcagtcatttggcacatagtaagcactcaataaagattagatttttaatatttatgattttatagtatgaagtcatgctaacggtcttaatttatgaactctgttatgttttactgaggttctactttacaaattcacaacaattcaaacttttagatgctatactgtcctgccttgatttgacacccataaatcaactcaattttatttactatttctttcaaaagtgacatgaaatcatactagttctatgttttttatgctattattcttttactactagcataattccaatttatcacagttcaattagttcaaaaccaaagattcattacattgaggtttattagaattaattgccattattgttcatgtcaattgccaaagtgaatttgaattgccccatccattcacatgaatgctgtttacttctcttgcccactcaatgttcgaagtttttatttgttcattttcagattaagaaaaaacccttaatcggtttcttttctttctttctttttctttttttttttctactcrgtttggaagcgatcttatgcctggttaccatagctaaaacaggagacactaaatggaagagaggtatgatttatatgagaaagaatgaaaataaaaatcacaccccacttagaggaagagactgggacctagtcaaaatagtcagagatgaaagcttagcaacttcgcacattttaagcactgcctggaattctgactgatgggatattctggaaggaggcttaagcaaataagtaggctaagaggaacactgaagttgtttcatgctgtggctgttttaatctttgggcatgaactagtaattattttca

SEQ ID NO: 727205 - DNA, 1421 bp, Homo sapiens
tgattaacacaactttgaagtccttctcacttgtctttagatgaagggtaagtactcttccacatctattccattatgtacatgtgagtaagggtgatggtgggggagagaagctcacagcatttcaacaaattatctctctataaaagtccttttcaatttcttttggcctctccaatctcttttatagactgaatgtacaggtaataaaaatatgttattttttccatgaaactgattcttggacagcttctatgcaaatcccacatatgtggtctagaacttctctttgctcttgagccatacttgacagagtcccatttttatatcctattaacacagctttactcttgatttccctatatcaggtatgctgttttccacttctttgaaaatcttgcctattttcaaagtttcaactaaaatgtcactatatttctgaagattccttcaactgctccagccaaatgtaatttcaccttcctgcaagttctcacagatctttacttctcattttcatctctatatcagcttctcttagcacttgtactgtttgtaagcttgattttgttttggttttgtattaggcaacatcattgcaacaagtcacactttgagaactcaagagaatatgtttgttctgaaaatccaggaattattgccaacccatggttgtctccatatgtcttgggaaaaataggaaaaggattttttgagttggtgatttgaatccaagacacaaagattcaggctctggtaaaaagattgtataggctatattggctgacataaaaggtaagagcaagaatgcagaggatttctatcaacataaagaagagtcaaaggtatgcgacttgtttgagtacaaagattctgaagcagaggtactgcaactccttagcatttgcagaagcaaagacttgacagtgaaaattaattgtcataaaaatttttaaggtaaaataaaaagaatactggaacactcataaaggcaaaattgctattttaaagttatcctaaaagatatcaaatattttgataaagagctagaaattcagataatatggtataggtgtagtgaaggaaaaaaagtcaatgcactacaattaagagtttagaaagagatctaagcatatctgagaccttgatatatgattagagaagatatataaaatcagttgggaccgaaatgatgctgaaacacttgtcttttcatataaaaaataaaatcaaattagattttcatttcaaccaaactcaaaaacaaactccaaatgtctatatgaattaaatgcgaaacaatgttttaaaatattagaatacaatataagaataaatagcaaaagcttgaataggaaagcattcttaactacaataataaaatagaaatcttcaaaatttctgtggaccaaaagayacca

SEQ ID NO: 727206 - DNA, 757 bp, Homo sapiens
gtctgtgtatcactgtgtaatttgcaaaccactttcccacaggctctcagaggcattacccctgccctttgagaatatgtagactatctccatcgtgtgggtgagaaaacaggccacaaaagtttaacttacttttccaaggttttctcattattaaatggcaaattcaggctttaatcccaggtttgcctcctatagattccacggaaatttcatggcgaggaaatgatgtccacagtagatgaatataggctgtaggacagactaagtatttttactgcatttaaaaaataagttgtgccaattttgttttattagtttcaaggtaaaacagcaattttttcaaacatcagaaaatatgtgttcttttctatatrcttagataaaggttcagctgaatcaccagatctgactgccaatttatgtggctatgaattttttatatacttttttttagatcagttttaggttcacagaaaaataagcaaaagatacagagattttccatgtgttcgccacccccacacaagcctagcctcctccattatcaacattccccaccagagaggtacatccaaaagtccacagtttacattagagtccactcttggttttactgagtttattagactgggttttagtattccttagggcttggtaattctaagacgtctactatgattggtcactaaagaccacaaaatatcatgagcattgttttattcatgcattaaacaaacacttttaaaatccatgt

SEQ ID NO: 727207 - DNA, 788 bp, Homo sapiens
tgtcttgatgtagctggcagtccagttgccagctccttcccttggacaggaaaaagaatagcaaacattatttacaaactttggtgtatgtatgttctaacctctctggggaatacctgaatcaatgaggcaaggcacttaagttatttagctaatttggagctcaggtgaaaaaagcaacaggtactgcaggtaaaacagatagctcaggcaagaggttatagatgaaggcatagaatacaccatctaaggctcagaagagaagcttgggtaaggcattttgagaaacgaggaccttcaaaagaagctgtataggtgaattttaaaaactattgtgatggttaattctaagtgtcaacttgattgaaggatacaaagtattgatcctgggtgtgtctgagaggaaaggagattaacatttgaggctgtgggctgggaaaggcagacctacctttaatctgggtgggcacaatttaattagttgccagcatggctagaatataagcaggcagaagaatgtgaaaagagagactggcctagcctcccaacctcgatctttctcccctgctggatgcttgctgcccttgaacatcagactccaagttcttcagttttggaactcggactggctctccttgttcctcagccygcagatggcctattgtgggaccttgtggtcgtgtgagttaatatttagtaaactcccctttttgtgtgtacatacatatatatatatatatatatatatgtatatatatatatatatatatatatataaaattatatat

SEQ ID NO: 727208 - DNA, 788 bp, Homo sapiens
tgtcttgatgtagctggcagtccagttgccagctccttcccttggacaggaaaaagaatagcaaacattatttacaaactttggtgtatgtatgttctaacctctctggggaatacctgaatcaatgaggcaaggcacttaagttatttagctaatttggagctcaggtgaaaaaagcaacaggtactgcaggtaaaacagatagctcaggcaagaggttatagatgaaggcatagaatacaccatctaaggctcagaagagaagcttgggtaaggcattttgagaaacgaggaccttcaaaagaagctgtataggtgaattttaaaaactattgtgatggttaattctaagtgtcaacttgattgaaggatacaaagtattgatcctgggtgtgtctgagaggaaaggagattaacatttgaggctgtgggctgggaaaggcagacctacctttaatctgggtgggcacaatttaattagttgccagcatggctagaatataagcaggcagaagaatgtgaaaagagagactggcctagcctcccaacctcgatctttctcccctgctggatgcttgctgcccttgaacatcagactccaagttcttcagttttggaactcggactggctctccttgttcctcagcctgcagatggcctattgtgggaccttgtggtcgtgtgagttaatatttagtaaactcccctttttgtgtgtacatacatatatatatatatatatatatatgtatatatatatatatatatatatatatawaattatatat

SEQ ID NO: 727209 - DNA, 788 bp, Homo sapiens
tgtcttgatgtagctggcagtccagttgccagctccttcccttggacaggaaaaagaatagcaaacattatttacaaactttggtgtatgtatgttctaacctctctggggaatacctgaatcaatgaggcaaggcacttaagttatttagctaatttggagctcaggtgaaaaaagcaacaggtactgcaggtaaaacagatagctcaggcaagaggttatagatgaaggcatagaatacaccatctaaggctcagaagagaagcttgggtaaggcattttgagaaacgaggaccttcaaaagaagctgtataggtgaattttaaaaactattgtgatggttaattctaagtgtcaacttgattgaaggatacaaagtattgatcctgggtgtgtctgagaggaaaggagattaacatttgaggctgtgggctgggaaaggcagacctacctttaatctgggtgggcacaatttaattagttgccagcatggctagaatataagcaggcagaagaatgtgaaaagagagactggcctagcctcccaacctcgatctttctcccctgctggatgcttgctgcccttgaacatcagactccaagttcttcagttttggaactcggactggctctccttgttcctcagcctgcagatggcctattgtgggaccttgtggtcgtgtgagttaatatttagtaaactcccctttttgtgtgtacatacatatatatatatatatatatatatgtatatatatatatatatatatatatataaawttatatat

SEQ ID NO: 727210 - DNA, 788 bp, Homo sapiens
tgtcttgatgtagctggcagtccagttgccagctccttcccttggacaggaaaaagaatagcaaacattatttacaaactttggtgtatgtatgttctaacctctctggggaatacctgaatcaatgaggcaaggcacttaagttatttagctaatttggagctcaggtgaaaaaagcaacaggtactgcaggtaaaacagatagctcaggcaagaggttatagatgaaggcatagaatacaccatctaaggctcagaagagaagcttgggtaaggcattttgagaaacgaggaccttcaaaagaagctgtataggtgaattttaaaaactattgtgatggttaattctaagtgtcaacttgattgaaggatacaaagtattgatcctgggtgtgtctgagaggaaaggagattaacatttgaggctgtgggctgggaaaggcagacctacctttaatctgggtgggcacaatttaattagttgccagcatggctagaatataagcaggcagaagaatgtgaaaagagagactggcctagcctcccaacctcgatctttctcccctgctggatgcttgctgcccttgaacatcagactccaagttcttcagttttggaactcggactggctctccttgttcctcagcctgcagatggcctattgtgggaccttgtggtcgtgtgagttaatatttagtaaactcccctttttgtgtgtacatacatatatatatatatatatatatatgtatatatatatatatatatatatatataaaawtatatat

SEQ ID NO: 727211 - DNA, 1295 bp, Homo sapiens
ttcttagcttaaataaaattagcaaacattattccaaggagttatatagggttgtctgttggcctgatcttttttctttggcttgttgtattagtttgtaatagtaagttagtttgtagttgtaaatgtttctgagaagaaaacactttcaattttatttctcaggaaagacatttctgtgcatttctaatcatgagattacaaatatataaacttcaaatgggagtttacctgtcaaactgattcacgcaccacatttcaaatcatttttacttctttctcttctgctcttccttctttacatcctctttcctttccctcatmctctctttctcttcctccttctcctgttcctctctttttgcttgaatctgttatgaaaaaatagcaacattagaccaatatttagttttagaatgagattttaatataactagacaattcacatagagtggacattaaatgcaaagccagatagttcagttaacttgaatacatgcccttcctatttctggaataagatttattacgtaaaaccctgattgtttttcccttttacatccaagttagctctattatgttagtatctgcagatgggtttaatttgagtactttttcactttcgaccacctcatgatttttcctgggagccaacaatgacagtgatctcatggaagagattgcataaatgctactcattagggttatttaagaactcaaatagatatttccagttgcttataaaactataaaataagcaataattaaacatgataaaaaactctgccaaatctcttttccatatcatgggatattacgataagagctaatcatatgttttgattaatagctggaatttaaattttagggcagattattttttaaccaagtcttaccttcaaattatatgtattttcaacaacatattcattttcattctgatttagagacttaacaccattttcatttttattatttaatttgcttatcaggccaaactttgagacatattgtccctggttttctgaactagcagcccccaagggttaattcaatcacttggctagggcaagtgaaatcagagctggaaaccagatgggactgatactcaaatgtgactactaggttgtgactttgagtatatattgtgttttgtctgttttattttagaatgaatgtgaggtggttgcttctctagtctagatttaatctaatgaaaacatttgaaatagctaaaatattgcattcctatgatggacaattacttaatatgttactaaaagttacaatgaaaa

SEQ ID NO: 727212 - DNA, 640 bp, Homo sapiens
gtttaatgagctcaaagaacatcacccttgtagagcacaataaaatactccttacaaggatgacactgagtcatcaagaacatgttaaatgtttattgaactaaattgaaaatgcttccataagatttccattaaaaatgattaagaaaatataggatcttaaaatagtaaacactagctatctagagaattcagttatgtggaaaattccatttcccaggagccaytgcaaatgatgatgatttaggcatctccatgaattagaggttactccgtgcaccagctccccaccctgatcttgttattatctacaggtttattctcctgagtgggagtattttctcattcctccacagctccagggaggctgaggctttctcctcaggcagaagcttcagcctcctgggaaggagatgaaacagggcagtggaggagtgagatgactattgcctcctttgggcccacaggtgaacttctttctgaccaggtgagaatctgcaaagaaggtaaggggctggagtcagtagccacaaatcaccaggcgttcttgtcctgtgagaggtggccatgtaaaggaggtgaccagctagggaaagctgaatcaattctagacctgcctgtgaccaagaccctgcttacc

SEQ ID NO: 727213 - DNA, 628 bp, Homo sapiens
tttagttttatgagatacaaatcaatgagatcatgcattttcttttagtctcttcattaacaaggagactttggccaagtcattaactaatctctgcacatttcctcatctttctgaaaactaaagaaacaattgagattattgttaggtttaaatgagataaatgtacctggaagggaatatttttgaagtgatatttacataatttgttttattgtttaattagtgatatttattcaaatgaaatacaatgtagttgaatacaaaaaatacttttattccttttactccttttcaatttttctttcatttttattcctcattgactgtttttttccctcatccagcaattgcattactaccatgtcattattatacatattttgggtagaaaaattagagtaggtagaacagaggttggtgttactcargtcaacgtaaattcaccataaaatcgttcttcatctattcttgctaccttcttttgagagaggcaactctgtgactttcaaagcttatcttgtctgaagaaatgtctagtgcatcatatgattattataattgcatcctcatgtcaatgacagtattcctggtaatgacaaagtcatttattttaacacagttggtc

SEQ ID NO: 727214 - DNA, 817 bp, Homo sapiens
gtaataactttgattattttacttaggagtattttatatgaaagtaaggccaagctaatttgtgattgtctcttgttagatgtcggttctgacatgattagttttctgttttgcttatcaaatcaaactcttactgaattatctgctgaaaagttgaaaataaagcacaatttatttcaatgtttttctgtatacaagtggatactttttttttttttttgagacggagtcttgctcggtcgcccaggctgaagtgcaatggygtgatctcggctcactgcaacctctgcctcccgggttcaagtggttctcctgcctcagcctcctgagtagctgggattacaggcacctgctgccatgcccagctaatttttgtatattttattagaggctaggtttcaccatgttggtcaggctggtctcgaactcctgacgacctcaggtgatccactcactttggcctcccgaagtgctgggattacaggcgtgagccaccgtgcctggccacaagtggatacttttattcacgatatacatttatgccaactttatgagaaaagcaattatttcttgggaaagagttcagttatttttgaggaacctcaaaagctgtaaatttgtactttaaaacagttattatttggtgatagcatacaggataactgcttttgttaggatgtaaatttatgacatgaaattaatcaaaatgtagtactttaattttcctaacctgtggttttaaaatgtttgttctttcagtagttttcccatgttagaatcagtttatataaagcaaaataatacagtggacttctca

SEQ ID NO: 727215 - DNA, 3042 bp, Homo sapiens
  misc_feature 1362, 1540, 1541, 1542, 1543, 1544, 1545, 1546, 1547, 1548,1549, 1550, 1551, 1552, 1553, 1554, 1555, 1556, 1557, 1558,1559, 1560, 1561, 1562, 1563, 1564, 1565, 1566, 1567, 1568,1569, 1570, 1571, 1572, 1573, 1574, 1575, 1576, 1577: n = A,T,C or G
  misc_feature 1578, 1579, 1580, 1581, 1582, 1583, 1584, 1585, 1586, 1587,1588, 1589, 1590, 1591, 1592, 1593, 1594, 1595, 1596, 1597,1598, 1599, 1600, 1601, 1602, 1603, 1604, 1605, 1606, 1607,1608, 1609, 1610, 1611, 1612, 1613, 1614, 1615, 1616: n = A,T,C or G
  misc_feature 1617, 1618, 1619, 1620, 1621, 1622, 1623, 1624, 1625, 1626,1627, 1628, 1629, 1630, 1631, 1632, 1633, 1634, 1635, 1636,1637, 1638, 1639: n = A,T,C or G
caaccaagaagctcagtgaactccaagtaggataaattcaaagagatccacacccagacatatcataatcaagctgtaaaaagccaaggacagaaagaaccttgaaaggagcaagagacaactgaaccatcatacagctcagtaagattaatggctgatttctcaacagaaatcatggaggccagaaggtgatatattaaaaagtgctaaaaggaaaagaacgtcaatgaagaattctatatccagcaaaactatctctcaataacaaagaagaaattaagatattctcagatgaacaaatattgagataatttgtaaccaacataccttcccttcactaaatgctgaagtgaatcatttaggctgaaatgaaaggacactagacagcgacataaacccaggaagaaataaagggtaccagtaaagataactatgtaggtaagtataaaagacagtacaaatgaaaaatgaattttgaagggttctggttcttagttcatttcttcatttgtgacttttttccactgtctgatttaaaaggcataaaagcagttataaatctatactgatgaggtacaaggatgcaatttgtatgacaataatggcacaaaggaggagggaggaaaaggagctacacagaaaaagtttttatatattattgtcattaagttgatattaatatgaatttataattctcggggcaactactaggaaaactaactcaaaatgcaagtagtcatagacctgggttcacatgaaaaagctgtcatttcagtctagatgaccttgggcaagtaatgccccatttttgaatcttagtttccttatctttcaaatggggataactatggacaatccaaggtttacctatatccctaataaggtaatgagtgtgccatgcatgtcaaagagaagagactgacctccagtggactgtgggaggccaccctggtggcctggcctgaatcttgcccctcagccttcttagctgtgtggcttggggcaatcattcaacttctcagggccccagttccttcttttgtgcaaaggagaaacaacagcccctcatctagagactgcatgcaattatgtgtgttgtccttaaagcagagtgcttggcatatagtaggtatccaataaatgttggtatccaagaaatgttggcgattactcttaactgtgagcaatccaagaagaaaataatgccttcatagacagaatgtttttgtcccctcaaagttcattgttgaaacctaattcccactgtgatagtatttctaggtggggcctttgggaggtaattaggttatgtgggcggagccctcatgaatgagattagtacttacaaaagagaccccaganggtcctttgccccttccaccatatgaggactttttttgtagactgcctttatatgaaccaggtaagcacacccttaccagacactgaatatgctggtgctcttgaatcttggacttcctggcctccaggactgtgagaaaataaatttctgttgtttataagccacccagtctatggnnnnnnnnnnnnnnnnnnnnnnnnnnnnnnnnnnnnnnnnnnnnnnnnnnnnnnnnnnnnnnnnnnnnnnnnnnnnnnnnnnnnnnnnnnnnnnnnnnnnatggactccttatgaggaaatgtcataacctcagcaccaagaggaacagatctgcatttttcccacattaggacgtcttgttaagaacgggttcttggccctgacagatatttgggatccaagggtgaccaggcctgtttaaaatctcttaaaggaaccctcacacttttttttcccaatgcagccccatcttcttgacacccgatctcaacagtctccatttcctacttccccatctcctaccagatctaatttgacttccacccagaccctccctgcctctgctcccgccaaggtccccaagagcctcctgtgactgtatctgagttcagtgccttggactcgcctcctgtctgtatcaccttgaccatcaggcctctgcagggcggagagagagacgaaccgggcttctgaagaatgcacattccatggcccgagtcctcctgaaaactctgagtgatgagcggaaaatgattcccgagggcaattattgcactaggtttgcacagcggtgcaaataagcacgaaaaaaggaagaatgtagcctgctatgggccaggccttttccaggccccttccatgggtttcctcatttaatactcayagcaaccctaagaggcagatactattatagcccatggttcatctcatgaggaaaccgaggcacagataggttaaattatgtgctcaagtctacagagtgagaaggtggagccagcacggggattcaagtaatctcagggcgaagtccagcccttaaccagaatcccatgtaacctttcaaggctggacacctgccctgggcaggccggcacagccctgcctttgtgtaatttagggccaatttacacagcactcaaaggaagcagtgtgagacagtctgtttgcaatgagactttgccactgtcctccctctcaccctaccccacttccaagaacactggtttccctttgtcagacacatccatggctggtttctaagctaagctgacctttctggaagtcattcatccagggacccaaaggcatctgggcaagaaggcaaatgttaattgtcctgcttggaagatgaggcagggaaggctgaggcttgagattatcaatgcccatagcagaatggacttcccaaggaggtggtgagcatccatctctggaggagggtcagcagggtctgcagcccaagaagagcggctgcagctcatgtctgaggttcctgcaggctctgtgaggctctgagtctgtctgcagcttgctggctgcttttgggcacttcattaacttctctgaatcttctgtttcctggtcagtaacccaagagtgttgaacaatagtccctagggtcagttactgctgataggtttagatattcacttccaagtcatccactgaagaagactaagtcc

SEQ ID NO: 727216 - DNA, 941 bp, Homo sapiens
attcaggtaagacctcatgtgctcccatcctccaccccacccctattctcacttcactaactttgtgaggatcgcccctgctttgtatgtgattgaattttgaagtcaccactcgtaacattatgttgaggtttcacagcctccccttccccctgggaacaaacagccgatcattataataatttcagctctcctggaatcttcaggtctcacagagaaactggtttcaacatcaaagcaggtaactaggtcataaagcacagaattttaaaatgtaaaagaacaaaaatgcacgcaaggtcagtggttctggagaaagttaatgtgagacaaaggaatatcttgccattaatcttccttgttcaagcatcatgccattccatgagttcagccacattcctgccacccttgcctctgtgcccacgaagaaataattcctcctttccacagtggagtcagcacatagaggtggtatcttcctgtggcatatcataactgaaacatgttttgcattttttgagtaataaaaatgcggtgatatggtttggctgtgtccccacccaaatctcatcttgaattgtagctcccatcattcccatgtgttgtgggagggacctggtgaaaaataactgaatcatgggggtggtttcccccatactgttctcgtggtagtgactaagtctcatgagatctgatggttttataaggggaaacctcttttgcttggctcttattttcttttgtctgctgccatgtaagatgtrcctttcaccttccaccttgattgtgaggcctccccagccacatggaactgtgagtccattaaacctctttttctctataaattacccagtgtcaggtatatctttatcagcattatgaaaatggactcatacatgcaaccacttcactttagtatttctttttttttaaatttatta

SEQ ID NO: 727217 - DNA, 941 bp, Homo sapiens
attcaggtaagacctcatgtgctcccatcctccaccccacccctattctcacttcactaactttgtgaggatcgcccctgctttgtatgtgattgaattttgaagtcaccactcgtaacattatgttgaggtttcacagcctccccttccccctgggaacaaacagccgatcattataataatttcagctctcctggaatcttcaggtctcacagagaaactggtttcaacatcaaagcaggtaactaggtcataaagcacagaattttaaaatgtaaaagaacaaaaatgcacgcaaggtcagtggttctggagaaagttaatgtgagacaaaggaatatcttgccattaatcttccttgttcaagcatcatgccattccatgagttcagccacattcctgccacccttgcctctgtgcccacgaagaaataattcctcctttccacagtggagtcagcacatagaggtggtatcttcctgtggcatatcataactgaaacatgttttgcattttttgagtaataaaaatgcggtgatatggtttggctgtgtccccacccaaatctcatcttgaattgtagctcccatcattcccatgtgttgtgggagggacctggtgaaaaataactgaatcatgggggtggtttcccccatactgttctcgtggtagtgactaagtctcatgagatctgatggttttataaggggaaacctcttttgcttggctcttattttcttttgtctgctgccatgtaagatgtgcctttcaccttccaccttgattgtgaggcctccccagccacatggaactgtgagtccattaaacctctttttctytataaattacccagtgtcaggtatatctttatcagcattatgaaaatggactcatacatgcaaccacttcactttagtatttctttttttttaaatttatta

SEQ ID NO: 727218 - DNA, 941 bp, Homo sapiens
attcaggtaagacctcatgtgctcccatcctccaccccacccctattctcacttcactaactttgtgaggatcgcccctgctttgtatgtgattgaattttgaagtcaccactcgtaacattatgttgaggtttcacagcctccccttccccctgggaacaaacagccgatcattataataatttcagctctcctggaatcttcaggtctcacagagaaactggtttcaacatcaaagcaggtaactaggtcataaagcacagaattttaaaatgtaaaagaacaaaaatgcacgcaaggtcagtggttctggagaaagttaatgtgagacaaaggaatatcttgccattaatcttccttgttcaagcatcatgccattccatgagttcagccacattcctgccacccttgcctctgtgcccacgaagaaataattcctcctttccacagtggagtcagcacatagaggtggtatcttcctgtggcatatcataactgaaacatgttttgcattttttgagtaataaaaatgcggtgatatggtttggctgtgtccccacccaaatctcatcttgaattgtagctcccatcattcccatgtgttgtgggagggacctggtgaaaaataactgaatcatgggggtggtttcccccatactgttctcgtggtagtgactaagtctcatgagatctgatggttttataaggggaaacctcttttgcttggctcttattttcttttgtctgctgccatgtaagatgtgcctttcaccttccaccttgattgtgaggcctccccagccacatggaactgtgagtccattaaacctctttttctctataaattacccagtgtcaggtatatctttatcagcattatgaaaatggactcatacatgcaaccacttcactttagtatttcttttttttwaaatttatta

SEQ ID NO: 727219 - DNA, 565 bp, Homo sapiens
tacaatagatgcattatatgctttgttgattttttttttaaagcaaacttctttttttgaaacagtacttgtctattgagagtaatcacaaaatgatgtttcttacaaaagccccttcaggatccttcttttttcctaccgattctaaaactagtgccaaatcaagttgtgcaaatctggacccctgcctaccgacaaattccctcagccttcactgcttcagcttccagcatttccatcgtagctgttttctttccagggaacacagtgattaatttgattgatatttcaggaagtctttgatctgtgcagattttggaagcataacacactggctcccttttcttctttttccatcttaaggcagccaccctctttgtttcttcggtttcctttcaaacaagactgaagtggaaggccgcctcgcagttcttctcttatttggagtcttttactattttaatgtttttattgctaatgacagttgggaggcaggtgtcaaaacaaacatggggaagtcacaagttkgagaaatctcatcatctcttccttgatagcgaacatc

SEQ ID NO: 727220 - DNA, 3049 bp, Homo sapiens
  misc_feature 2770, 2773, 2789, 3030, 3033: n = A,T,C or G
tgggtacacatattatgaatatactttccttttgccagaccttgacattctgtagacttttaatggaatattatttgcctctttcatcttactttgacgtatgaggtggatggcttacgtgcagggtaatgtatgaaccttcccaagctctgtacaaatataacttgtcattcgtagagacgtatgtatttatatgtgtgcatgcagtcttatttgtagattttcttcccatttgcttaatactgaacgctatggcctagatgtgaaatttaccaggtactactcatagcaggcagtgaaaccgtggactcagctgctctttccttctttcctcccaggcaacatgaaacagtcatcccgggtgacctccccctcatccaggaagtcaccacgacactccgagagtggtccaccatctggaggcagctctacgtggtgagaaaatgagatattcattcaaagcttagaaatagagagtgggcttttttgaccctgatatgccaatgggatgtttttttttctcagcgaaacttaaaagcagagcttccgagacagagttttactcggaattggcaaaggaagcgacatggctgagagtttagcccctgctgggggctgtgtgcccttcgacctgccatgtatttgggtgtattacagtgagctgtagcagaagggactgtaggatgtgtctttccttgcattggaaggagaaatgtggttgtttcaggcccctggaatgcaggatcgggcagtgggtgttgatgtcaccttttaaacagtaataggtgcttatttaaggatccggtagagggcaattactatttttttttttttttttgccgttgtctgacagtaggtaatacctcttatcatttaagaaaaacaacagtcttctagatttacctgtgtttgtgacaggratagggaaatattttacattctagcttcgtgtgcaattgtccagttctcctgatcacagaagaagtcttattaatgcagagaggttgaagctctgacatcttccatttcgtattccctcggggcatttctttgcacataaattcatatttgcagtagattaccttttgttaagcttgtatttctattcagagtgttgatttctcatatgctaatgttattaccaccaagccagggctctggaaggaagtcggtacgttcatttcttgagaacatagaaaacttcctaaagtcctgcagctgcttgttgggcaggcttgttgtttttgattatacagtggtttcctataaatgcacagtaataagcagttgcagtaattgtcatcaaacgtactgaaaaacctaaaagcgtaaagttagccatgaatgttttgtgtaaatctgagcaattctgtagtcagggtttcatcttcaacttagcaatttttaaacaaaaatatggcaacaaaacaaacaggagttgatgctcatagtcagtggacctacttaagtctgtaaccctagagtaggtattcttaatgagcaccttggtttccttttacaaaacttaaatttgcctctgatagacttacatggttggatttgtgcaaagaaagctaacccccaaaatggctataatatttttatatgggctgggcgcagtggcttatgcctgtaatcccagcacttagggaggccgaggcggatggatcacttgaggtgaggagtttgagaccagcccggccaacatggtgaaaccccgtccctactaaaaatacaaaaattagctgagcatggtggagcatgcctgtagtcccagctacttgggaagcttaggcaggagaattgcttgatcctggaaggcggaggttgcaatgagccaagattgcgccactgcactccagcctgagtaacagagcgagaccccttctcaaaaaaaaaaaaaaaatgcatttttttgctgcacattgtagatattagcaaaatagtaaggattttagatagttgatacagccttagagcagtggacaagagaaggcagcgtggatattagaaactcctagaaagaaggttaaataccagagtgagctcagtacgtggtttagatatgtagagggggagttttttaaaaaagtggcagtgaacaaatttaatgttttaaagggaccatgacatttagatacctttttatttatttattttttgagatagggtcttgctctgttgcccaggctagattgcagtggcatgatcacagctccctgcagtcttaacctcccaggctcaagcaatgctcccacctcagcctcctgagtagctgggactacacctgtgagccaccatgctcagctaatttttttaatttttgaagagatgaggtctccttatgttgcccaggctgatctccaactcctggactcaagcaatcctcccgcctctgcttcccaaagtgctaggattataggccggagctaccaaggccagcatgcttagagttttatcacattaggttccacctaaatttcttttcatggaaagaaccactgagttattttccttcagataatccctaatctccttgattattgcacgcttgtaattgcaagctgcaaactgttgcttttttttgaaccgtcaatcccatcaaaattcttagaaagtggtaagaagtgtgagttttgcatcttatttgcattttcctcttgtcacaaagcaccaagagcttgtagattgagatttggcctcttgcagaagtgtctcttgtgggttgtacacaccacagtgtgcagcagcccgccagtgtggaatgctnctncttccctatagctganctgagagcgaggccgaagagttcaggttctcagtgtgctgaaaagggtccagggtgcagggtgttctgaagaccgtatgtttgttgtaggattcagatctttaggctcagactaattccggaggagctttagacttgctccatctttgatccagatgcaggaagctcaccagcaggtgttgacgctcaaggtctagcccctgttgggatcacctttttgtttcagtgggacacaggatgtncgnagaagtcttggggatt

SEQ ID NO: 727221 - DNA, 1981 bp, Homo sapiens
  misc_feature 1079, 1080, 1081, 1082, 1083, 1084, 1085, 1086, 1087, 1088,1089, 1090, 1091, 1092, 1093, 1094, 1095, 1096, 1097, 1098,1099, 1100, 1101, 1102, 1103, 1104, 1105, 1106, 1107, 1108,1109, 1110, 1111, 1112, 1113, 1114, 1115, 1116, 1117: n = A,T,C or G
  misc_feature 1118, 1119, 1120, 1121, 1122, 1123, 1124, 1125, 1126, 1127,1128, 1129, 1130, 1131, 1132, 1133, 1134, 1135, 1136, 1137,1138, 1139, 1140, 1141, 1142, 1143, 1144, 1145, 1146, 1147,1148, 1149, 1150, 1151, 1152, 1153, 1154, 1155, 1156: n = A,T,C or G
  misc_feature 1157, 1158, 1159, 1160, 1161, 1162, 1163, 1164, 1165, 1166,1167, 1168, 1169, 1170, 1171, 1172, 1173, 1174, 1175, 1176,1177, 1178, 1424: n = A,T,C or G
cattccttagcatttttatcagcaagtgaaagttgatttcattatgaatcagggcagtttggctgcagcagtgtcacctaaagatcacagcagctgcttcccacaccagcacgtcttctttgacctacagaaactctatcactagcatatttgcaggcactgcatgtgcagccactttatttactgaaagtaaacaactctgtggtacaaagatcagaaagaacatccatttcatgaactggcataaagtcatcatgctacagtggatcctatacattttggtcaatgacaaggtcattttaagttgcgcaaaaattaacttaaggcagtctggttttgcaaatatctttgctgtttggtatgaatatgtaaggattgcagagcatattgtgcccattcaacaatgtggtttttacttcttctgcagtaaacccatagctagtaaccaaccttgaaaaaataccagggtcacaggaatatgaaaacaaacctaaaattgctgtagctgccccaaagaaaaatgaacttataaaaccattggtgcacacacacacgttaggatgattttctgaaagcaggtaggtttattagcaaacagtacaattatagacatttttatgatgactatacaaaacccagacactgtccatttgaaacacaacatttttttgcagatgattttaaaatcatttttaaaacacattcatacttaaactctattataatgaacatctcaaaatgaatgctcatgcatggggatataacatctttgtgaaaatatttggttatgagtcttgggtaaaaggcactattcactgggaaaccaattctattaataccattttccaaatgaaggagcatgtcaggcccttatcaatcacccatgctcagagaaagcactgggttttcaccaacagcaaattccccaccaaagatgctgttgtcacaatgaaacacaccctccaccatcccatcaatgtccccctgagacagtgtttagagtggaaacaaaataacttccatcacttgtgtctagggagtcaggatgctccagtggtgacaagagttaagtggagaannnnnnnnnnnnnnnnnnnnnnnnnnnnnnnnnnnnnnnnnnnnnnnnnnnnnnnnnnnnnnnnnnnnnnnnnnnnnnnnnnnnnnnnnnnnnnnnnnnntctaagtaggatggtgatgatggttgcacaacagtgtgactgtacttcatgccactgaacgggacacttagaaatggggaatttcatgttatttggccacggcagtatgttttcaaaaagtatttggctgcagccccagggctgagggccattcactgagggacggtgaggcggtactgaaacatctgggcacggcgggcgcctggggagcgggggtgacgggagacggccgctgggaaggggagngaaggcaggcagcatccactctcttattggagtttcctggacatttgacttaacataaaaactggcccacgcgtcctccatttgtgttttctcacttaaatgaccttggaaaaattttgtcactaaatcaatgaaaacagtcctgttgaaaattctagctggagaccatgcttatcctgcaataaatkacttctgaagttcctcctgccctccctcttcaatgaggcgtaaaaccccgtggctgactctaatccgcaaagttgatgccagtggcaggtttggtaccaagaaggggatggagcctttctctgctaaaaattcaaaaaaattagccaggcatgctggcgggtgcctgtaatcccaactactgggaggatgaggcaggagaatcacttgaaccgggaaggtaccaaccgtttggtaccaacgagggccacacttggggaaacaatgtttaacctttaaatgtcacagtctgaaaatatactttgtctatggaagatggttcacaaggtatttccttccatttagacacagcaaaactgaaagagttaaaa

SEQ ID NO: 727222 - DNA, 3398 bp, Homo sapiens
gaatctcaagagaattatgtggaagggaagaagccagatacaaaaagagtgcatgaccccactggtgtaaagtttaagaacaggcaaaacacattcctaacagaaaccacagagtggctgcttgtctgggagtgggatgggctcagataggccaagagggatgtttgtggggaatggcaatgtcttatgtcttgttttgggcagtagttccaagggtatacaaaaaccgtccaaacaaaattaaaatgagcattttgttgtatgcaaattataacaatttttaagtttttaaattttaagcaagcaaaaataacaatgctgttttgtaaaatatgcagacatattagtcataatcttaataacaatgttaatataaacatagaaaataaatgctggcacagtagatatctccaatatgtagcattatatacaagggaacttttatcgtctgcactataacatttgagtaatgtgagatttctttactattttttatccgttgagcatgtgttatttttaaatgatagaggcagtagtgaggatctgccatttttaattctatccacacttctacactttcaaccattactgactcatcaaataataatcttgttcataaggatgaccctcaagcaatagcttacacataataaaagaacaactgaattaacaacaacacacggtcattttttaatgtactgagctgcactgcaactctccaaaaactagcaccatgcgtgcagccagtaagacaccaggaagaatatccgccacccaaacttctccagtcaccaacatcttacgcatccaacaaaattcactgaggctttttaaaagccacatgaaagatttttatgttcataaaagcaatctgctggggtactgacagcatgtctggttcagttgtgagccagtaaaggccagactgctcactcaggttatggaataagacactcagaagagcaaccttcactgcaattatggatgagctaagagtacctattttaccaatacatcccaatgaaaatcttttttttttttttttttttttgagacgtagtgtcgctctgcccaggctggagtgcagtgctgtgatctctgctcactgcaacctctgcctcccaggttcaagcgattctcctacctcagccttctgattagctgggattacaggcacctgccaccacacaaggctaactttttgggttttattttttagtagggatggggtttcaccatgttggccaggctggtattgaactcctgacctcaaatgatccgcccacctcagcctcccaaagtgcaaggattacaggtgtgagccaccatgcatggcctgaaaagctttttgggagactgagtggatgtgaagccatttctaacaccgatcaggcaccagagctctagtagggagccctgatgctctcagagtcacactcctgctcgctgttctgaagaggcgaagtctgcagatcctcctgctacggtgtccatctccattggctggaaaacacaccttgccatataggcctctgcgggtggtgctcactgcacaagagagcatgcaacaccctggcatgaagcctgcttcactcagttttacttattttcccaaacttactggaccacgcacctcttattacatatattaatatcccagggaataaacattccatagaacacattttgggaattcttcaaaccaattaaaaaaagaaaaataataatgatttgcaaagagaaggacttagaaccaacaaatgtatcttaacctggaattagacagcaaaaagaaagaaaataaataaaagaaggacctagaaccagcaaatgaatcttaacctggaattagacagcaaaaagaaaataaataaaaataaatctgccaggccatcttatacctgcacaaaaagcaaccccttggcactggctagagggggcggagcagatggagcatcagttgccagtgaggagcctgcagcagctccatagggtggacaaaaaggagcccagtcatgctggttttatggaagagcagcccccaaagccgatgcctcccttmattctcacttgtaccagtgctggtcagtccagtggggctccagcatccatgaactacccacgcaggggagccgcagacacagctcgaggtgcggaagaggactgcccattgccaaaatctttcattccttctcttggtgttgttgggaagaagggctaaagatctcaacatttaccaaaggagagaggctacatggacaagagtctaaagtaagcctgtacctaccaaagccttctagaggagaagaggacaaggacactctgggataatattactggaatttcgcctggcccagagaatactgtaagcatatcaccaatgcggaggcgaccttccatgatgtggtcagagctatctcagtcgccactgactcctttggaatttcaaggtgcagacatgcaaattcaggctgctgaggaaccacgtgaggttgccagtttaccaaaacatgctaacaatacttattttccacaataaaaatttctttttcagcagattccatagattgaatgacaggatcctttttttttttttttttttttttttattgagacagagtcttgatctgtagcccaggctggagtgcaatggcacgatctcggctcactgcaacctccgcctcccgggttcaagtgattctcctgcctcagcctcccaagtagctgggactacaggcacgtgccaccacgcgcagctaatttttgcatttttagtagagatgggggtttctccatgttggccagactggtctccaactcctggcctcatgggatccacccacctcggccttccaaagtgctgggattacaggtgtgagccactccacccggccatgaggatactattcttatctcagtcccatcacagcataaagaaaaaatggtactttttgtttgtctcattaggaaactcatcaaaatctcccatttttctttctccacctatgagaatggctgcatcactccttccccaacagcacagcatggaaaggctggcgccaatgaagagatgtggctgcagtgtggtaagctgattcatgcctctcatcttctgaaattcaagcacggagcctaatctgagaagagttctttggccacatttcaatcaaaaggcagaattttgaaaatgagcacacgtggaggccgtgctacgtttgctgcagtccacaggccacttccgcaaaccccacaagctcctgttttggtcacaagagccaggaaaagtgccctgcaatgcaccctccccacggtctgtaaggaactactcgacatgcccacacactgggcatctccactcagcgaacaaaatgttttaaacaaacgtttattagcaagca

SEQ ID NO: 727223 - DNA, 3398 bp, Homo sapiens
gaatctcaagagaattatgtggaagggaagaagccagatacaaaaagagtgcatgaccccactggtgtaaagtttaagaacaggcaaaacacattcctaacagaaaccacagagtggctgcttgtctgggagtgggatgggctcagataggccaagagggatgtttgtggggaatggcaatgtcttatgtcttgttttgggcagtagttccaagggtatacaaaaaccgtccaaacaaaattaaaatgagcattttgttgtatgcaaattataacaatttttaagtttttaaattttaagcaagcaaaaataacaatgctgttttgtaaaatatgcagacatattagtcataatcttaataacaatgttaatataaacatagaaaataaatgctggcacagtagatatctccaatatgtagcattatatacaagggaacttttatcgtctgcactataacatttgagtaatgtgagatttctttactattttttatccgttgagcatgtgttatttttaaatgatagaggcagtagtgaggatctgccatttttaattctatccacacttctacactttcaaccattactgactcatcaaataataatcttgttcataaggatgaccctcaagcaatagcttacacataataaaagaacaactgaattaacaacaacacacggtcattttttaatgtactgagctgcactgcaactctccaaaaactagcaccatgcgtgcagccagtaagacaccaggaagaatatccgccacccaaacttctccagtcaccaacatcttacgcatccaacaaaattcactgaggctttttaaaagccacatgaaagatttttatgttcataaaagcaatctgctggggtactgacagcatgtctggttcagttgtgagccagtaaaggccagactgctcactcaggttatggaataagacactcagaagagcaaccttcactgcaattatggatgagctaagagtacctattttaccaatacatcccaatgaaaatcttttttttttttttttttttttgagacgtagtgtcgctctgcccaggctggagtgcagtgctgtgatctctgctcactgcaacctctgcctcccaggttcaagcgattctcctacctcagccttctgattagctgggattacaggcacctgccaccacacaaggctaactttttgggttttattttttagtagggatggggtttcaccatgttggccaggctggtattgaactcctgacctcaaatgatccgcccacctcagcctcccaaagtgcaaggattacaggtgtgagccaccatgcatggcctgaaaagctttttgggagactgagtggatgtgaagccatttctaacaccgatcaggcaccagagctctagtagggagccctgatgctctcagagtcacactcctgctcgctgttctgaagaggcgaagtctgcagatcctcctgctacggtgtccatctccattggctggaaaacacaccttgccatataggcctctgcgggtggtgctcactgcacaagagagcatgcaacaccctggcatgaagcctgcttcactcagttttacttattttcccaaacttactggaccacgcacctcttattacatatattaatatcccagggaataaacattccatagaacacattttgggaattcttcaaaccaattaaaaaaagaaaaataataatgatttgcaaagagaaggacttagaaccaacaaatgtatcttaacctggaattagacagcaaaaagaaagaaaataaataaaagaaggacctagaaccagcaaatgaatcttaacctggaattagacagcaaaaagaaaataaataaaaataaatctgccaggccatcttatacctgcacaaaaagcaaccccttggcactggctagagggggcggagcagatggagcatcagttgccagtgaggagcctgcagcagctccatagggtggacaaaaaggagcccagtcatgctggttttatggaagagcagcccccaaagccgatgcctcccttcattctcacttgtaccagtgctggtcagtccagtggggctccagcatccatgaactacccacgcaggggagccgcagacacagctcgaggtgcggaagaggactscccattgccaaaatctttcattccttctcttggtgttgttgggaagaagggctaaagatctcaacatttaccaaaggagagaggctacatggacaagagtctaaagtaagcctgtacctaccaaagccttctagaggagaagaggacaaggacactctgggataatattactggaatttcgcctggcccagagaatactgtaagcatatcaccaatgcggaggcgaccttccatgatgtggtcagagctatctcagtcgccactgactcctttggaatttcaaggtgcagacatgcaaattcaggctgctgaggaaccacgtgaggttgccagtttaccaaaacatgctaacaatacttattttccacaataaaaatttctttttcagcagattccatagattgaatgacaggatcctttttttttttttttttttttttttattgagacagagtcttgatctgtagcccaggctggagtgcaatggcacgatctcggctcactgcaacctccgcctcccgggttcaagtgattctcctgcctcagcctcccaagtagctgggactacaggcacgtgccaccacgcgcagctaatttttgcatttttagtagagatgggggtttctccatgttggccagactggtctccaactcctggcctcatgggatccacccacctcggccttccaaagtgctgggattacaggtgtgagccactccacccggccatgaggatactattcttatctcagtcccatcacagcataaagaaaaaatggtactttttgtttgtctcattaggaaactcatcaaaatctcccatttttctttctccacctatgagaatggctgcatcactccttccccaacagcacagcatggaaaggctggcgccaatgaagagatgtggctgcagtgtggtaagctgattcatgcctctcatcttctgaaattcaagcacggagcctaatctgagaagagttctttggccacatttcaatcaaaaggcagaattttgaaaatgagcacacgtggaggccgtgctacgtttgctgcagtccacaggccacttccgcaaaccccacaagctcctgttttggtcacaagagccaggaaaagtgccctgcaatgcaccctccccacggtctgtaaggaactactcgacatgcccacacactgggcatctccactcagcgaacaaaatgttttaaacaaacgtttattagcaagca

SEQ ID NO: 727224 - DNA, 1105 bp, Homo sapiens
acaaaccattctatgaggagggaagcttgtccttaggcagcagaagaaattacagtgttcacaaaaacacatttttctttatttttttttcgaatacggtacaagaccacaaacatacaatagttaatctgcttgcttatttaagctaacagtttcttggaaaattgcaaggtaatttacaagtcaaggcacataaagtactagattaagacatgaagtgaaataagaataaaacaagaggacaaagcatagcatgagtcaggaatgaggctaatgcaacagtgtacacaaaagcatattgattaaagcctggattcagatttgagctctttcgtttaatacctgtgtgacattaggcatgttcattaacctctccaggaaactttcctttgctgaatataggattaaaaatagggcctttggacctggcgcggtggctcatgcctgtaatcccagcactttgggaggccgaggcgggtagatcacgaggtcaggagatcgagaccatcctggctaacacggtgaaaccccacctctactaaaaatacaaaaaaaaaaaaattagccgggcgtagtggtaggtgcctgtagtcccagctacttgggaggctgaggcaggagaatggcatgaacccaggaaccggatcttgcagtgagccgagattgtgccactgcactccagcctgggagacagagcgagactccatctcaaaaaaaaaaaaaaaaagtaagtctctgaccaggggcgctggctcacatcttaatcccagcactttgggaggcsgaggtaggtggaacacctgaggtcaggagttcgaaaccagcctgtccaagttggcgaaaccccatctctactaaaaatacaaaaattagctgtcatgttacttggcgcttgtaatcccagatgcttggcaggctgagtgatgagaatcgcttgaacccgggaggcagaggtggcagtgagctgagattgtgcctctgcactgcagcctgcgtgacagagtgagacgccgtctcaaacagaaaacaaaaaaccaaaaaagaaaaaaattaaaaaagcaaaatgaaatcttttgtgctacacagaaacattggccactcatgg

SEQ ID NO: 727225 - DNA, 1085 bp, Homo sapiens
aattacccaatctgtggcattatgttattgcagtgaaaatggataaagacataggcttttctatagagttggatagaattaaaattttgttcttaaataattcaacaagaactacctcaggttatttcctgtatttgactttccccacttatgtttctcatacctgtttaatgtctcttagtctttttttttttttattttgagatggggtcttgctctgtcgcccaggctagagtgcagtggttcaatcttggctcactgcaagctctgcctccygggttcatgctattctcctgcctcagcctcccgagtagctgggactacaggcgcccgccaccacgcccagctaattttttgtattttttgtagagaccgggtttcactgtgttagccaggatggtctcgatctcctgaccttgtgatctgcccgcctcggcctcccaaagtgctggcattacaggcgtgagccaccgcacccggccagtctcttagtcttcaactgttattgtttctcatagtggtggtatgcctggtgaaagactattaaaaccccatttttgggcaaaagggtttactcctgtttgtgttacactgatatttcatttctattttatgattttcatttctaactctcaactctctgaaagaattaggcaagcagaaaatgggagaaaattctaattctggggtcttttaacactctccaatattactaaccattctgtctaaagatgaaggtagtgtccagatgaaattagactatatcatcctctgtggatattgtggagaaatgcaagtcttgactgcaaggcactgtgagttgcttatcggatatttttggcattatttatattagtaaatgaactagaatttcattgaaaatttaaagccttagaaattggactacgaagtcatgctagttagtgtcatatagcagtgtccttattccttttttgttcacatacttccttaaaaaatttctgaaagctgtgtatgtgggaagaggatgtgactctaaagggatagcacgaggggcatgtatctactctgtgtcctgtacaagcaggtggtgagtccataaatct

SEQ ID NO: 727226 - DNA, 1275 bp, Homo sapiens
attcattttgcaaaaagaaataaaaactcccatcacttaaaggttataacaaaatctcaagtgtttaactttgggtggtaggattacaagtgatttttattttcttcctttgcttaccagaattttgtaaattttctagaactaatatgttacttggtacaagaaaaattaattttacattttacaataaatttaaagaaacctaagttcagaatacggaagcaccctaggcatggtctgtttacccttccttgccctagctacaccaccatctctgcaactctctgtagaaatcttcagtgatccaaatatatgattcgatatttgcttctattccaccatgaaggtctactaactgtaggtgagtaatacattcaaagataggaaaaatccatctattagaacacttgtctctctacctgggcataacgtaagagcttctcagtggcctcagggtctttattccagatgagatcttcacagagctgcagaagttccttatggatatcatcatacacagggaggtttccagcattcactatccccatgtccatgccagactaagggcaatacaaataaaaatgagaatttacagtgataccttaagtcagcgatcagcaaacttttctctgtaaagggccagagagaaatattttacgccatagcctctgtcacagctactcaactttgtagttacagcataaaagcagccacagacaagatacaaatgaataggtgtggctctatcccaataaaatcttatttacagaaactggcagcaggccggacttagcctgcatgccacactttgaaaacccctgccccaactaaaaactggtttccgcagggctaagagttcttctaccataccttgattgcatggtaaaggaaaaccccatgcattgcttctcgaatggcttccattcctcggaaggagaaggacaagttggaaagacctccacttattctggctccaggtaatgtttcctggcaaaaattttaaaatatgaaaagattccccttttttgccaaaaacagcaatcacatctcttaagctttatataggagtggaaagaaaaaaaaacaaaaagcatccgaagttcaaagtaattcagagcttcttgttactagacatagaccaaagcttgccgtattacagtattacaaaggcgctgcttcrtaagtagtttttcctactagactccaatctccctaaggagaacacgcgcgtacacacacacacacacacacgcagaaagacaaagaggaattcct

SEQ ID NO: 727227 - DNA, 739 bp, Homo sapiens
aacttctgacttcaagtgatccacctgccttggcctcctaaaatgctgggattacaggagtaagccaccacacctggcctctttcacttaatcttggaactcctcccccaataattcctgtggagcatcctctttttcttccatggtgacaggtcttaatgcagctggcaggtaagaatcagaggtccttaaataatgatgccccaggtcagttatgcaaacccctgtggaccactcctgaccatggggtccagaggaaaataagccacagacacagaacctccaaggagcytctgatcttctgctgatagcgggcagtcaatgctgagggcacagagtagagtgaaaggcaatcattaataggagttcaggagagagatctgagtgccccagcagaggcaacagcatgagcaaaatggtggaggtaggaaaatacatagtggccgggtaagaatagttggagacgaattggttggagaaggcttcagtagataatatatttgtttatattcgtttcctatttctatttttctttttcttttttttttttttaaattgatcattcttgggtgtttctcgcagagggggatttggcagggtcataggacaatagtagagggaaggtcagcagataaacaagtgaacaaaggtctctggttttcctaggcagagtgtttgtgtccctgggtacttgagattagggagtggtgatgactcttaacgagcatgctgccttcaa

SEQ ID NO: 727228 - DNA, 1281 bp, Homo sapiens
aattataaaaataaaatgaaataacatacactacaaaagacgtttatttattaaatccccacagaaggggtctaagtgataaaggaaaataaaattccgggaacggtaaaatcaatcagaaatgccctacttcagtgctttccgaaatttgtctgacagagtggaaatccggtttttcactaagtcactgttctggaacagtttgtgtgtgtgtatgtatgtrtgtgagggctcacatacacaaattgaactaatggaagtgtaagcattcaaattatcagtttaatttagttctatacatatacacacacacacactcacacaccgaaaacattgataaaatcagccattccagcaaaactagctacttagtgtctatctctccttgaagattcaaactagaaatgaggatttagagaggcatgatggttcgttctctcttggagcccagttcgaagttgactgactgattcagtcattgtaattggttggtcttggggaagaatccactttgactcttgggaagtcagctaggtcagcggacagagcaggggctctggagccagactgcctgcacccgacttctagctatgataccttggataaactacttatcacctgggattcaggttcctcatctgtaaaatggggataagaatgctatctctctcacaactgttaggaggactgactgggttaatacgtgcaaagtaccaagtacataagaaaccaacagccagtgctcattacaatcattattattttgggcaagttaagccgcatggtttctttaggtataaaattaggctttatttacctacctgttgggttgttccaaggattaatcacatagtgttcatgaattccctttataaactagtatagaaaagaaatatagttaacattaattgaacacctactatgtgcgatcgttttaaggcttgccatgtgctgcttcattcagtccgcaccatgacattaggatcacactttcgttttccattttttttaaaattatactttaattactagggtacatgtgcacaacgtgcaggtttattacgtatgtaagcacgtgccatgttggtgtgctgcacccattcactagtcatttacattaggtatatctcttaatgttatccctccccctccccccgcccatgacaggccccggtgtgtgatgttcccctttctgcgtccaagtgttctcctagttcaattcccacctatgagtgggatcacgcggtgtttggtttatttgtccttgcgatagtttgctaa

SEQ ID NO: 727229 - DNA, 2528 bp, Homo sapiens
ttcttttgagatagtgatttttaaaatttctttagattgcataggcagaaagatgacatttaaacagaaatttgaaatcatagaaaaaggaagaggtatattccaggaaatcagaatacctattttgcagactcttaagttcctaagagtttgtcatatttcaaaattactgctacaatttgggatcagcatggaaggtaagataaaagtgtgatgggatctatggttggggccagatcaaataaggctttcataaagagggtaaggagttttgactttcatttctctcatcctccttctcatcttcgtttcttccttcttttcttccttcctttctttttttctttattacggtaaaccctgtgagagatggtggtggcttttattaggatgataggacatatgtaaggacatggtcagagtccatatgtgtttgaacatactaaaatatattttctgattaaataagtttgggagtgtgtgattgagaaaagtgaagtatcaagggcagcacaattaaattaggtttgacagttgctgctagtgtttccttaaacattttaatgctagcgctgccttttacaaaactgagaaacaggtggaggtttaatttaagtgatggcagaatcaatatttctgttttggctttttcagttttgagatgtttttcttgttgagccgtcaagtaagtaattattgataggagactagtgtttgaacgggaagtccccgtagaaaatacagcttttggaactgtctacatattaatgcaatttatgctctagaaacaaacctataagccttcttaaaacattttcaatcactgtttttatgtgacatgaaaaagagaaaattctaatttctatttaatattttcctataaaaatagcataatgattattggaaatttaaagctaagtaagaaaaaagcataggccaacatgaatgagcacaataattagtatcttggtgttatctacagattttctatgcagaaaacaaattataaaggtggaaacttcattgtataacatgattgcaactaaaacatcaccaaccacattttttttctttagttaggaagtaacattttaaaatctaacactagctccattaaagaacacatctttaccccatttatcattttaaaaatgtctttcccccatgctattaattttacaggatttcggactcaacactccaatagattacataagcagaagtgatatgtagctacaacggctcatgcttagctagatacagagtacagaaaaagcagcacacaatgcaaaatacccagattgctgtcctcatccaaacatttagcatcttctctgctagcctgttttatagggaaggatgctgctacttccctatgcttaatttaatttacaatattttgctgataaccaggctttcatatttcccctcattatcatctcagcatctgactttttcatttcttgatcattgcccataagattaaaaagtctattctggagcaaagccttgttttttgccctatgttctgccaatgtgaaaacagctccagagtcatatctcatatttatacagaatgccaaatcccgttcctttaattgtctcagctggggagctaagagtgcataaaacagctggtggcaactgagtacatagcagataggtagggtagactctcctgcaaagtgcaatgctgtactgagttttcagttaggggttcttccctctggaggaaaccagcacaattggtcctgttaaaactcatttactacacacaaccacctaccagatggtagcctctgacaccagaatgtgcctgaggcagaattgtggctgtaaagatgtacatgtaaatgtgatagggtaaggaattttttttagaagcaactgagaaagcatttaggaaacggaggctttaacttcacccttcagacccagtggtgatgttgctgtgctttgcagttagcagaaaaactgagatgccattttgctcatttgtacatatgttaaagatctattttaggtcttcattgtttttctatgaatgtgcaacatgattttaaaaacaaaatgccacaaaatattgcatattttgttcataatgcaatcttttgttttggggtggcttctatttctaaagctatggattaatgtcactttaaagtttaatgctagtagaaagtcacttttggtttgtctattatctttrtcctcatagtgtacacttaaagaatagataaattcaagcacttacagtcaattaattatcaaaaggtgaccaagaagacacaatggggaaagtttctccaacaaaaatgaaaaaaatttctccaacaaaatgggaaaactgaaaatccaaaagcagaagaatgaaacttatactatacacaaaaatcaactagaagtaaattaaagatctaaacttaagacctgaaattaatcccctagaagtaaacctaaaggaaaagctccttgacattggcccttgcaatgaaactttggatatcacaacaaaagctcaggcaata

SEQ ID NO: 727230 - DNA, 2528 bp, Homo sapiens
ttcttttgagatagtgatttttaaaatttctttagattgcataggcagaaagatgacatttaaacagaaatttgaaatcatagaaaaaggaagaggtatattccaggaaatcagaatacctattttgcagactcttaagttcctaagagtttgtcatatttcaaaattactgctacaatttgggatcagcatggaaggtaagataaaagtgtgatgggatctatggttggggccagatcaaataaggctttcataaagagggtaaggagttttgactttcatttctctcatcctccttctcatcttcgtttcttccttcttttcttccttcctttctttttttctttattacggtaaaccctgtgagagatggtggtggcttttattaggatgataggacatatgtaaggacatggtcagagtccatatgtgtttgaacatactaaaatatattttctgattaaataagtttgggagtgtgtgattgagaaaagtgaagtatcaagggcagcacaattaaattaggtttgacagttgctgctagtgtttccttaaacattttaatgctagcgctgccttttacaaaactgagaaacaggtggaggtttaatttaagtgatggcagaatcaatatttctgttttggctttttcagttttgagatgtttttcttgttgagccgtcaagtaagtaattattgataggagactagtgtttgaacgggaagtccccgtagaaaatacagcttttggaactgtctacatattaatgcaatttatgctctagaaacaaacctataagccttcttaaaacattttcaatcactgtttttatgtgacatgaaaaagagaaaattctaatttctatttaatattttcctataaaaatagcataatgattattggaaatttaaagctaagtaagaaaaaagcataggccaacatgaatgagcacaataattagtatcttggtgttatctacagattttctatgcagaaaacaaattataaaggtggaaacttcattgtataacatgattgcaactaaaacatcaccaaccacattttttttctttagttaggaagtaacattttaaaatctaacactagctccattaaagaacacatctttaccccatttatcattttaaaaatgtctttcccccatgctattaattttacaggatttcggactcaacactccaatagattacataagcagaagtgatatgtagctacaacggctcatgcttagctagatacagagtacagaaaaagcagcacacaatgcaaaatacccagattgctgtcctcatccaaacatttagcatcttctctgctagcctgttttatagggaaggatgctgctacttccctatgcttaatttaatttacaatattttgctgataaccaggctttcatatttcccctcattatcatctcagcatctgactttttcatttcttgatcattgcccataagattaaaaagtctattctggagcaaagccttgttttttgccctatgttctgccaatgtgaaaacagctccagagtcatatctcatatttatacagaatgccaaatcccgttcctttaattgtctcagctggggagctaagagtgcataaaacagctggtggcaactgagtacatagcagataggtagggtagactctcctgcaaagtgcaatgctgtactgagttttcagttaggggttcttccctctggaggaaaccagcacaattggtcctgttaaaactcatttactacacacaaccacctaccagatggtagcctctgacaccagaatgtgcctgaggcagaattgtggctgtaaagatgtacatgtaaatgtgatagggtaaggaattttttttagaagcaactgagaaagcatttaggaaacggaggctttaacttcacccttcagacccagtggtgatgttgctgtgctttgcagttagcagaaaaactgagatgccattttgctcatttgtacatatgttaaagatctattttaggtcttcattgtttttctatgaatgtgcaacatgattttaaaaacaaaatgccacaaaatattgcatattttgttcataatgcaatcttttgttttggggtggcttctatttctaaagctatggattaatgtcactttaaagtttaatgctagtagaaagtcacttttggtttgtctattatctttgtcctcatagtgtacacttaaagaatagataaattcaagcacttacagtcaattaattatcaaaaggtgaccaagaagacacaatggggaaagtttctccaacaaaaatgaaaaaaatttctccaacaaaatgggaaaactgaaaatccaaaagcagaagaatraaacttatactatacacaaaaatcaactagaagtaaattaaagatctaaacttaagacctgaaattaatcccctagaagtaaacctaaaggaaaagctccttgacattggcccttgcaatgaaactttggatatcacaacaaaagctcaggcaata

SEQ ID NO: 727231 - DNA, 647 bp, Homo sapiens
catttgcagcttctgtatctacaatttgatgggaaagtcagtctcctggagggaaatgagagacactaccacattcttcggtttatctgattatctaactgaatataattctaaataaactattactctactcaaatgcaggaaggagaacctattgaaactgttctcttgtcataaaattgccctcgggttcattattgtaattaccattaccattgctcatggctatattatgatcacgaatataacagtcattagctaaatgcttctgactttccttccaggcatagaccttcatcacgcatctcaaactcaggaagtcagtctctggttctcccacccatgaacatccatctccaacttccactactccctgtgacacttaaatgagataattcacatagagcacatagaattagcatgcctggaccacagggactcccgatggcatcagcattggctgctgctgctgtcatrattgttgttgctgtgctagacctgtgtaattttaaagttgtagttgtcgctgctaagggacaatttcctgccacctctactgtttttttctctgcattaacaaaagccccagctggttttcctcccacagccatgtggtggcaccagcacttcacaaattttcatctgaa

SEQ ID NO: 727232 - DNA, 766 bp, Homo sapiens
caacataaatcacctaatctctttgggcctcagcttcctcctctgttaaatgaggtcagcactccccacatcagagtcattgtgacactcaaatgagctgacacctgtaagaatgctttgtaaactgcaagactctcccagaaaactggtctcagggaaagagtagggatggagaggctgccttccacataaaggtttttaaaatctgctgtcaaatccccagatgaaataattaggtagacatttgagaacatgaaacacttgtgaccaaatcgtatgtattttcagaatgaaagcttgtgtgagaggatcagtttggcctaagttatctaagtaatagtttctcctttcacttaaaatactcagactcaaagtgtactaatcrtttatataaaaatattttttagagcaaataagggaaagacaaaaatatcaagagaaaactaaagccagagtacttcatggctgaattttctttctccacaattttcccctcaaatgctctaactccctatttcattgtttgggataggaatttgtatagtgaagacattgtattctgggaaaaaggtgacttgcttgtgtctctcccatagcctttggctatattgtgcaaccttcagtcaattgtttaaccccacgaggaaagtgtggactgagagcctgtaaatatcccagatttaccacccaaggtgttgagtttagggtgagttgacttagagcgaaggaggtgatattttaaatttctacacatttaaacatttca

SEQ ID NO: 727233 - DNA, 1739 bp, Homo sapiens
cagacttatgaaagttatttgaaggatatgttcacatgtgtatcctaaaaaaatcacaggtagttgctgaaatatttcactgtatttgcttcaattttaggataggcaaggaaatcttcttttaaaaagtgacacttgaatataaacctgagtataagctcacttgtccgagctcagcaagtttaataaacatgagaagtagtgagaaagagagagaagagggagcaagatgagagtggtgagtgaggcagggagcaatcagacaggctgtatatagatcattgtaaggacttcgacttttaccctgagtaaaagagaaagccattggtaggttttgtgcaaagagtgacatgatctgacatatattcaataatcattttgcagaggattcttttttcttaggtttatgaaactatcaatttatacagttaaatttccaaatgcacatgagttcccaaaattcctgataccaattatatatctcaaatttatataatctacccacagtttctaggatttatataaccaaaagtattacataatttttatacagcacaaaagatatagttttacaaaaattattctacaaagataccttaatcacagtttttctttaataccgcagagcaaaagttaaataccaaattagaaaagccattgactgagaagtttttacttacacaaaatgaggtctgagatatcaagtcaatgcctttaaataaatcctttataatttatacaagctgccaagaattattattaacttttatttcacttttacttttatgactactgatttttatatactaaaagtcttttccttaccacaagatggtgaatatgtatcttatgccatttccctaaaatatgtttatagtttcagcttgcttttaggtctgtctcattttaacagaagtatrtgtgtgtgtgtgtgtgtgtgtgtgtgtgtgtgtgtgtgtgtgtaatgtgaggcaaggttcaaattcatttattcgacaggtgaatatccagttgtttcagctccatttcttgtaaaaaaaaatatttccccattaaattgttttagcacttttattaaaaagcaattaatcatgtgttcatttatttataggctcgctcttattttaactgtataaggaaatatatttgtataaatagaaataagaatgtcaagaaactttaaacaaaattcatttgggtgacatagattgaaaatattaatcaattttagtcacatattccaattattaatacttaaatacatgctttttatcttaaacttattaagtttaagtataatgttaaatgaataaaagtttgaaagcttatttttaaaacataattttctcatggaagaagtaaaatagcccctttgaaagatcaaattttcattttctaccagtcaacattttaaaatttctctcaatattaattagtttgaaaagattaattcataatgtttgttgaaacacctgaagaaaatatttaccaggtcattttgaaataaatatgctcattttaatgcagatttatggctgatttatctgaaaaaaatgttgaaatcaaattgtcttctgtgatcagttattacagctgcaaacacatctattgaaatctcttaatataaatttgttcttagggcattttttgtcatttctctatggcctttaaagattacacgttttaggaaatacagcatcaatcaaacgtgtaaatatattatacttaatcattttgta

SEQ ID NO: 727234 - DNA, 602 bp, Homo sapiens
aaattagatatttgggaaaaaataattaaggatgactgtgtttttgtttttatagggaatactgtagaatttttccagctttcctcatggaggaaggaaaaaatggtcctttcaaaggctagttgttgagaaattgaaggaatgcagaagacaaagagagtattttatctgaaatctcattgtccccgcctggtgtggccacagaaatagggcatgataatagagtgtttgcaagagtttgctatttgaattctggaatttggagataaagttatagatgcataatgatgtttaagccagtgacagatggcatattatggtaatggtcatataacattctaatggagcatatataaaaaactgatatatagcacttgatattgrcattgaagattaagcagtggaaattattgctagtaatggtgctagtacatttgattttccatatgaaaaagtgtatatatgaacacatatatcatctacgtatatttatgtacactctataatgttcacacaagggaattgtttatgcatttctcagaatgtattgtaatcattaacggggcatgactctatatataaacataaaaactggtgtgcgc

SEQ ID NO: 727235 - DNA, 534 bp, Homo sapiens
gactttatagaataatttttaaaatatttaacattcttaaagtttagtttkcatttggtattgaaatggactactttagtcactattttttgttatgtttccttacataaatatggtagaattgtgtattgtattatattgtattgttaatagaaagacaattccagatagttacccgtattaaaattggattccttaatgaacataaaaatgaaaaaaaaaaccctattaatatattccttgagtattcagtttagttatcattttggtgaggttatttcacatttatttttgaattagctacatgttttggatttgacatactttcagtctagctgacatgtttttatcagaatgttgatgtacccgaaggagtaacccagttttaattgttgttttaatttaggcagaaaatctgattacttttttgaattgtgtcagttctggactgtctgaggggactgctgttactcaacctgaagcattttttctattcaaagcttgatgagtgattcccctacaaagtcattgtct

SEQ ID NO: 727236 - DNA, 534 bp, Homo sapiens
gactttatagaataatttttaaaatatttaacattcttaaagtttagttttcatttggtattgaaatggactactttagtcactattttttgttatgtttccttacataaatatggtagaattgtgtattgtattatattgtattgttaatagaaagacaattccagatagttacccgtattaaaattggattccttaatgaacataaaaatgaaaaaaaaaaccctattaatatattccttgagtattcagtttagttatcattttggtgakgttatttcacatttatttttgaattagctacatgttttggatttgacatactttcagtctagctgacatgtttttatcagaatgttgatgtacccgaaggagtaacccagttttaattgttgttttaatttaggcagaaaatctgattacttttttgaattgtgtcagttctggactgtctgaggggactgctgttactcaacctgaagcattttttctattcaaagcttgatgagtgattcccctacaaagtcattgtct

SEQ ID NO: 727237 - DNA, 1467 bp, Homo sapiens
tgtaaattaaactaaaatatagtaatgaataccayactgacaaattttggaggggtttctagtgcctgtcatgcatattcttaaatgctgaggatagagaattacataaaagggactgtttcttcactttgtcctgagtttcactgagtgagtctgtaaacaaattaacaatactgtataataccaggtcacataataagtgtgatgaataagaatagagcagaatactattcaaagacaggaatagaaaaggttttttggggggcattacagaaattgagtgctgtaaaagaataaatcgtgtaagttactgggatgaacaaactttgcaggtagaaagaatatccattacagagccttgtggtaggagtaagtgggggtattttcaaagatagcaaagataacaatatgatcagagcacagaaaataatagcactagataaggagacagagcatataattatttgtagtgtatagtaattgctttggctttattctaaatgtgatcaggaagccactggaggttttcaacaggaaaattacataatctgatacatgtataaaaggttattctggctgctctttgtagaatatactttagagattgttcatggagagatcaactgacatagttcaggagagagatcttgactttgactatagttaagaaagtggtgacctgtagttggagttggaatatattttaattttacagtcagtaggatttgcacattaagtgaatgtgggattcttcccttgaacaaatgagtaaatgttgatataatttatgaagagaggtaatactgaggatagcgggaggttgtaggtgaagaaaacataaatttaaacttttgatataatgagtttgaagcacgattattttctgagtgtatatgtcacatcaactattgaatatatcaatctacagttcaaggtagaggtcagggatggtgacatgcatttgggattcattagtgctaaaacaatatgtaaagtcatgctgctacatgataaggccacccatagaacaagcataaatagaggacagagaaaatcacagacctagcattaaggatctccaacagttatcatttaaaaagatgtgcaaaagtggtgattgcaaattatttttgcaaacaaaccaaatgactttcattgagcatgagaagagacattcaaaatgacagaaaacaaaacaaaaccaggagagtgttttgtcttgaaaattcagtaaaacaagtatttgtaggacaagctaataaactttaatgaatgctcctgaatattcaaatgagatgaggactataaattaactgtcaaatttggctacataaaagtgcttgataacgttgacaagagtcctttcaaaagagtgatggggataaaataagtgaattaatgaattaattaaattatgtgagggacttatttacctcaatgtgagttccaatgttgctcctacttgcc

SEQ ID NO: 727238 - DNA, 1467 bp, Homo sapiens
tgtaaattaaactaaaatatagtaatgaataccacactgacaaattttggaggggtttctagtgcctgtcatgcatmttcttaaatgctgaggatagagaattacataaaagggactgtttcttcactttgtcctgagtttcactgagtgagtctgtaaacaaattaacaatactgtataataccaggtcacataataagtgtgatgaataagaatagagcagaatactattcaaagacaggaatagaaaaggttttttggggggcattacagaaattgagtgctgtaaaagaataaatcgtgtaagttactgggatgaacaaactttgcaggtagaaagaatatccattacagagccttgtggtaggagtaagtgggggtattttcaaagatagcaaagataacaatatgatcagagcacagaaaataatagcactagataaggagacagagcatataattatttgtagtgtatagtaattgctttggctttattctaaatgtgatcaggaagccactggaggttttcaacaggaaaattacataatctgatacatgtataaaaggttattctggctgctctttgtagaatatactttagagattgttcatggagagatcaactgacatagttcaggagagagatcttgactttgactatagttaagaaagtggtgacctgtagttggagttggaatatattttaattttacagtcagtaggatttgcacattaagtgaatgtgggattcttcccttgaacaaatgagtaaatgttgatataatttatgaagagaggtaatactgaggatagcgggaggttgtaggtgaagaaaacataaatttaaacttttgatataatgagtttgaagcacgattattttctgagtgtatatgtcacatcaactattgaatatatcaatctacagttcaaggtagaggtcagggatggtgacatgcatttgggattcattagtgctaaaacaatatgtaaagtcatgctgctacatgataaggccacccatagaacaagcataaatagaggacagagaaaatcacagacctagcattaaggatctccaacagttatcatttaaaaagatgtgcaaaagtggtgattgcaaattatttttgcaaacaaaccaaatgactttcattgagcatgagaagagacattcaaaatgacagaaaacaaaacaaaaccaggagagtgttttgtcttgaaaattcagtaaaacaagtatttgtaggacaagctaataaactttaatgaatgctcctgaatattcaaatgagatgaggactataaattaactgtcaaatttggctacataaaagtgcttgataacgttgacaagagtcctttcaaaagagtgatggggataaaataagtgaattaatgaattaattaaattatgtgagggacttatttacctcaatgtgagttccaatgttgctcctacttgcc

SEQ ID NO: 727239 - DNA, 1467 bp, Homo sapiens
tgtaaattaaactaaaatatagtaatgaataccacactgacaaattttggaggggtttctagtgcctgtcatgcatattcttaaatgctgaggatagagaattacataaaagggactgtttcttcactttgtcctgagtttcactgagtgagtctgtaaacaaattaacaatactgtataataccaggtcacataataagtgtgatgaataagaatagagcagaatactattcaaagacaggaatagaaaaggttttttggggggcattacagaaattgagtgctgtaaaagaataaatcgtgtaagttactgggatgaacaaactttgcaggtagaaagaatatcmattacagagccttgtggtaggagtaagtgggggtattttcaaagatagcaaagataacaatatgatcagagcacagaaaataatagcactagataaggagacagagcatataattatttgtagtgtatagtaattgctttggctttattctaaatgtgatcaggaagccactggaggttttcaacaggaaaattacataatctgatacatgtataaaaggttattctggctgctctttgtagaatatactttagagattgttcatggagagatcaactgacatagttcaggagagagatcttgactttgactatagttaagaaagtggtgacctgtagttggagttggaatatattttaattttacagtcagtaggatttgcacattaagtgaatgtgggattcttcccttgaacaaatgagtaaatgttgatataatttatgaagagaggtaatactgaggatagcgggaggttgtaggtgaagaaaacataaatttaaacttttgatataatgagtttgaagcacgattattttctgagtgtatatgtcacatcaactattgaatatatcaatctacagttcaaggtagaggtcagggatggtgacatgcatttgggattcattagtgctaaaacaatatgtaaagtcatgctgctacatgataaggccacccatagaacaagcataaatagaggacagagaaaatcacagacctagcattaaggatctccaacagttatcatttaaaaagatgtgcaaaagtggtgattgcaaattatttttgcaaacaaaccaaatgactttcattgagcatgagaagagacattcaaaatgacagaaaacaaaacaaaaccaggagagtgttttgtcttgaaaattcagtaaaacaagtatttgtaggacaagctaataaactttaatgaatgctcctgaatattcaaatgagatgaggactataaattaactgtcaaatttggctacataaaagtgcttgataacgttgacaagagtcctttcaaaagagtgatggggataaaataagtgaattaatgaattaattaaattatgtgagggacttatttacctcaatgtgagttccaatgttgctcctacttgcc

SEQ ID NO: 727240 - DNA, 1467 bp, Homo sapiens
tgtaaattaaactaaaatatagtaatgaataccacactgacaaattttggaggggtttctagtgcctgtcatgcatattcttaaatgctgaggatagagaattacataaaagggactgtttcttcactttgtcctgagtttcactgagtgagtctgtaaacaaattaacaatactgtataataccaggtcacataataagtgtgatgaataagaatagagcagaatactattcaaagacaggaatagaaaaggttttttggggggcattacagaaattgagtgctgtaaaagaataaatcgtgtaagttactgggatgaacaaactttgcaggtagaaagaatatccattacagagccttgtggtaggagtaagtgggggtattttcaaagatagcaaagataacaatatgatcagagcacagaaaataatagcactagataaggagacagagcatataattatttgtagtgtatagtaattgctttggctttattctaaatgtgatcaggaagccactggaggttttcaacaggaaaattacataatctgatacatgtataaaaggttattctggctgctctttgtagaatatactttagagattgttcatggagagatcaactgacatagttcaggagagagatcttgactttgactatagttaagaaagtggtgacytgtagttggagttggaatatattttaattttacagtcagtaggatttgcacattaagtgaatgtgggattcttcccttgaacaaatgagtaaatgttgatataatttatgaagagaggtaatactgaggatagcgggaggttgtaggtgaagaaaacataaatttaaacttttgatataatgagtttgaagcacgattattttctgagtgtatatgtcacatcaactattgaatatatcaatctacagttcaaggtagaggtcagggatggtgacatgcatttgggattcattagtgctaaaacaatatgtaaagtcatgctgctacatgataaggccacccatagaacaagcataaatagaggacagagaaaatcacagacctagcattaaggatctccaacagttatcatttaaaaagatgtgcaaaagtggtgattgcaaattatttttgcaaacaaaccaaatgactttcattgagcatgagaagagacattcaaaatgacagaaaacaaaacaaaaccaggagagtgttttgtcttgaaaattcagtaaaacaagtatttgtaggacaagctaataaactttaatgaatgctcctgaatattcaaatgagatgaggactataaattaactgtcaaatttggctacataaaagtgcttgataacgttgacaagagtcctttcaaaagagtgatggggataaaataagtgaattaatgaattaattaaattatgtgagggacttatttacctcaatgtgagttccaatgttgctcctacttgcc

SEQ ID NO: 727241 - DNA, 586 bp, Homo sapiens
tttttattatcagataattgggtatatagtctaaatggcattagaagagaggaaaggactggtggtgtagatttgtaaaggatagtgtaataatcaaatatattgatattggaccggcttgtttttaaatcctttctcaccacactgaatcgcagtgtctccagggggaattttagaacctctctaagcttcatctgggaaatgaggataataatagtactcatagggttgcggtgatgattaaattaatgcacataaaacatttaaccaagtgactgccacgagaagccctcaaaaatattattaactacattgcttactgtttttgttaacaatggaaacttgagtaagtggcaayttctagtctcaatttattcagctgtgaaacggggataataatagtaccagttcaccaccgttatctataccagttcatcacccctgccagatggttttctgagttaagaattatttaggttttgaaaagaaatccaatgaatataccttgtattatgcagcatcccaacagcttgtagggcagtactctataatcaaatatatttatagagctgcagcaaaatgtatg

SEQ ID NO: 727242 - DNA, 1384 bp, Homo sapiens
gccagttcacactccaacggccatgtcatccggggacaaataacttcataaaaggccccgtaataaatcactacctgactttaaactttcaaagggctcacactaccctacagaaagtaatccaaaacaaaagtatctcccaaatgtgggtatttttggtttccacaattttacctatactgtttcctccactcagaatgtctctcacaccccttcaagctagggttacagtggctcacccctcctcaagggggtggtttcctggccagtttctgccagatccccagaatggtcactggttggggttgcagtgggtatgtactctgcctcactgcaacagcaggcagctgtgcagatataatggccccatgtgtgagactgggaactgttggtgggaggcacagctgagaatatgggtatatcacctggaatttaaccagatacaccactagaggtgatcttcgggtgtgcctgagcttgcttctctaacaagagaataaaatgtgctacagcaaacaaataaagtatttttctctttgttcaactgttcagctagctcccatccaacaggattcagctgaagttcttcaccttcttgaaaccatttcaaactactatgcaacagagattacttccttttctgaaatccacatgaattctcatcttgaacagctacttaagtatttattatatttttttgtggcatctctcacattaatttgtcacatgaggtctaattttcctcattaggcttcatctccttcaatcattctttttgtctcgcacaacactttgcacagtattcaaatatttgttatgtagttgacatttactgtaactaaaactatacttaaggaaaagttcaagtttcttggggacaagtttaagaaccaactttaaggaaagaaaaaatattttatattacctttttttttcctgcttcctttgagaaacatccttaatctgtgacagcagttttacataaaaaatcagttggtaatgtaatgtttcagtaactgaaaagatcagcacagcagtacttcagccttctgaatgaggcagttacgcttgtcccaaatagcaagctgaaaaatgccatgcaataggcactgtattccttcaataatttccatccttcttaaacttttcctttggtcctctgctacccagcttcacttagaactcctgcccaaagaccttagactcctctctaacctaattgctgatactgtcccacagmcacacagttcctcttgattctcctttttgcagatccttttatcccaatgctatgtcaggtcacctctgctctcccaccagccaaatgccctgagggtagcagatcagctcattctctcatccattccaagcctgtttatcctta

SEQ ID NO: 727243 - DNA, 858 bp, Homo sapiens
cagtaccatcaatgatatcaattcaatttttaaaaaagaaaaaaaagaaagaaaaattctagactctttttttctcacaaattcccatagccaattagtcatctggtaaacttcttgaaatacattcttgtgatccattttatagtttccaggcaaatcctattctcttggtagtttggtgattttgaactttactttgcaacatgcatttataattttctctcacttctttctctcaactcatttatgtcacagcctatgttgtcttcatggtggataatggccaatacagtgttgatacrtggtaggtatccagtaaatgtttgttgaattaattgtgtctgaagttaccggaggctacataaataacatagcctttttagaaattgccacggataaattacttggcatttatcttcagtttccatgtctatcaattgagaatgtgttgtattattcatcttcatgaaagagatgtagaaagattaacaaatagagtcatttaaaacaaaactgaagtgctagagaaattataatgaattatattaagaatgaaatttggctcattgtattattagtattctttttgtctattgaaatcacattaccaaatgatgacctaattataactcatttgccagatggttaattgtgatgaaaaaaaaaaaaaaagatttgctgttattgtaaaagttgtgtttttatagtaaaacatttttcagaattactaatttatcttttagtatgataattttcaccttgcaaatttaaaggcctatttctgactttaataaaattattctaaaaatacagaaagacgatcatgcttcaaaaaggcctaggctctaaaataaccag

SEQ ID NO: 727244 - DNA, 475 bp, Homo sapiens
tgcctkcctgtgtactgtacagatgggacagtctcactaaagctactgcaaaataatttctcaatagataactatatagtgcttcttccttgaaccagataaatcatcatccaatattttattacgaaaggatgggtgcttaaactttgatcagcagtaaggagttttaagaaaggtaaggcaaaggaatctccctgagccaaatggatacaatatggagctttttgtgtctttctatattaagctaattactgataggttcaaaaagtgaagtatgcttataaaaagctgcttccataaaggcagtgcttactaagtgttagcatgtcaaagggagaaaacactgtgatttcaaagtaatacacttaaaatgttaaaaaaaaaaaagcctacgagaaacagtacttcctatacaagttaggtatcaaaaattagtaaaaatgggccgggcacggtggctcacgcctgtaatccc

SEQ ID NO: 727245 - DNA, 475 bp, Homo sapiens
tgcctgyctgtgtactgtacagatgggacagtctcactaaagctactgcaaaataatttctcaatagataactatatagtgcttcttccttgaaccagataaatcatcatccaatattttattacgaaaggatgggtgcttaaactttgatcagcagtaaggagttttaagaaaggtaaggcaaaggaatctccctgagccaaatggatacaatatggagctttttgtgtctttctatattaagctaattactgataggttcaaaaagtgaagtatgcttataaaaagctgcttccataaaggcagtgcttactaagtgttagcatgtcaaagggagaaaacactgtgatttcaaagtaatacacttaaaatgttaaaaaaaaaaaagcctacgagaaacagtacttcctatacaagttaggtatcaaaaattagtaaaaatgggccgggcacggtggctcacgcctgtaatccc

SEQ ID NO: 727246 - DNA, 475 bp, Homo sapiens
tgcctgcctgtgtactgtacagatgggacagtctcactaaagctactgcaaaataatttctcaatagataactatatagtgcttcttccttgaaccagataaatcatcatccaatattttattacgaaaggatgggtgcttaaactttgatcagcagtaaggagttttaagaaaggtaaggcaaaggaatctccctgagccaaatggatacaatatggagctttttgtgtctttctatattaagctaattactgataggttcaaaaagtgaagtatgmttataaaaagctgcttccataaaggcagtgcttactaagtgttagcatgtcaaagggagaaaacactgtgatttcaaagtaatacacttaaaatgttaaaaaaaaaaaagcctacgagaaacagtacttcctatacaagttaggtatcaaaaattagtaaaaatgggccgggcacggtggctcacgcctgtaatccc

SEQ ID NO: 727247 - DNA, 1396 bp, Homo sapiens
gtcaccttatccagtccccggaatattggagtcttgtaaataattaacatttgggcagtggctgaaatatttctgaccagagcagtaggcataaagttattaagcaagctatgctgaatacaatgtggagtgaaacagactaagatttgtactgaggctgtagaattttcaggctgcctaccttgggtgagtgatagcagtttactgagactgagcctcaggagatatatatgtacatacataagcacgtgtgtttgtgtgtgtgtattttctgccttgttatataatccatcatttgataaaaagagtccctgaagttttagagatacatgtggcatttggcggagaagaaacataactatacttcatatgagacagtcattttaggcttcagtattgtaataaaaacttacatgaagtaacacttaagaaatattctgaaatcctaaaatgaatatattgttccaagttgcagggggataaaacctcaattttagaaaatatkattcaagtaattgttattgagtcaatttcataatttatcaatatgtgtttataaagtacatgcaagtagattgtaatatgccttactttagagatataattatatatatatagctactttgttaataggagacatttttctcatgaaaaaatataaatccctcctcagattcaaactcaaacttaaaacacataaattctaaattgctggattacttaaggtgtttaggtaaagtaagagcaaactaatcagtaataaaatattggcaagtccccgtttgtggcttttttctaaatctttcataaatatagacattgttcaaatatacttagaaatatagagtcttgagctatgtattttattgttaagaaaaaagaatttccctcttgaaaattccattttattgcccatcattaaattttacatgaccctatgaacttttcagaattgcaaattacttaagcagtgtaaactcatattactcatatacgtatgtctctttcattaaaatgattagatttataaattgaaaatattatcgtaactaattggcctaaaacatgaggtttaataaaatgcagattttaatcaggagcttaagaatttagcctatgctttctactatgtttttctcactttcaatgcctttttttcttgttttcacatctacatagggaaataatcagtaaattatgaaatattttgaaaaagacataatttaaatatttactaataataactttgtgcctatgtttaatattatgccatggatatagctgccattcaatacatagttgttgaataaactaatcaaatttattatccttttttgttgtttgtgacttgataatacaacagattgaagaatacaatcaaactggtgcggaaata

SEQ ID NO: 727248 - DNA, 1396 bp, Homo sapiens
gtcaccttatccagtccccggaatattggagtcttgtaaataattaacatttgggcagtggctgaaatatttctgaccagagcagtaggcataaagttattaagcaagctatgctgaatacaatgtggagtgaaacagactaagatttgtactgaggctgtagaattttcaggctgcctaccttgggtgagtgatagcagtttactgagactgagcctcaggagatatatatgtacatacataagcacgtgtgtttgtgtgtgtgtattttctgccttgttatataatccatcatttgataaaaagagtccctgaagttttagagatacatgtggcatttggcggagaagaaacataactatacttcatatgagacagtcattttaggcttcagtattgtaataaaaacttacatgaagtaacacttaagaaatattctgaaatcctaaaatgaatatattgttccaagttgcagggggataaaacctcaattttagaaaatattattcaagtaattgttattgagtcaatttcataatttatcaatatgtgtttataaagtacatgcaagtagattgtaatatgccttactttagagatataattatatatatatagctactttgttaataggagacatttttctcatgaaaaaatataaatccctcctcagattcaaactcaaacttaaaacacataaattctaaattgctggattacttaaggtgtttaggtaaagtaagagcaaactaatcagtaataaaatattggcaagtccccgtttgtggcttttttctaaatctttcataaatatagacattgttcaaatatacttagaaatatagagtcttgagctatgtattttattgttaagaaaaaagaatttccctcttgaaaattccattttattgcccatcattaaattttacatgaccctatgaacttttcagaattgcaaattacttaagcagtgtaaactcatattactcatatacgtatgtctctttcattaaaatgattagatttataaattgaaaatattatcgtaactaattgrcctaaaacatgaggtttaataaaatgcagattttaatcaggagcttaagaatttagcctatgctttctactatgtttttctcactttcaatgcctttttttcttgttttcacatctacatagggaaataatcagtaaattatgaaatattttgaaaaagacataatttaaatatttactaataataactttgtgcctatgtttaatattatgccatggatatagctgccattcaatacatagttgttgaataaactaatcaaatttattatccttttttgttgtttgtgacttgataatacaacagattgaagaatacaatcaaactggtgcggaaata

SEQ ID NO: 727249 - DNA, 1396 bp, Homo sapiens
gtcaccttatccagtccccggaatattggagtcttgtaaataattaacatttgggcagtggctgaaatatttctgaccagagcagtaggcataaagttattaagcaagctatgctgaatacaatgtggagtgaaacagactaagatttgtactgaggctgtagaattttcaggctgcctaccttgggtgagtgatagcagtttactgagactgagcctcaggagatatatatgtacatacataagcacgtgtgtttgtgtgtgtgtattttctgccttgttatataatccatcatttgataaaaagagtccctgaagttttagagatacatgtggcatttggcggagaagaaacataactatacttcatatgagacagtcattttaggcttcagtattgtaataaaaacttacatgaagtaacacttaagaaatattctgaaatcctaaaatgaatatattgttccaagttgcagggggataaaacctcaattttagaaaatattattcaagtaattgttattgagtcaatttcataatttatcaatatgtgtttataaagtacatgcaagtagattgtaatatgccttactttagagatataattatatatatatagctactttgttaataggagacatttttctcatgaaaaaatataaatccctcctcagattcaaactcaaacttaaaacacataaattctaaattgctggattacttaaggtgtttaggtaaagtaagagcaaactaatcagtaataaaatattggcaagtccccgtttgtggcttttttctaaatctttcataaatatagacattgttcaaatatacttagaaatatagagtcttgagctatgtattttattgttaagaaaaaagaatttccctcttgaaaattccattttattgcccatcattaaattttacatgaccctatgaacttttcagaattgcaaattacttaagcagtgtaaactcatattactcatatacgtatgtctctttcattaaaatgattagatttataaattgaaaatattatcgtaactaattggcctaaaacatgaggtttaataaaatgcagattttaatcaggagcttaaraatttagcctatgctttctactatgtttttctcactttcaatgcctttttttcttgttttcacatctacatagggaaataatcagtaaattatgaaatattttgaaaaagacataatttaaatatttactaataataactttgtgcctatgtttaatattatgccatggatatagctgccattcaatacatagttgttgaataaactaatcaaatttattatccttttttgttgtttgtgacttgataatacaacagattgaagaatacaatcaaactggtgcggaaata

SEQ ID NO: 727250 - DNA, 1396 bp, Homo sapiens
gtcaccttatccagtccccggaatattggagtcttgtaaataattaacatttgggcagtggctgaaatatttctgaccagagcagtaggcataaagttattaagcaagctatgctgaatacaatgtggagtgaaacagactaagatttgtactgaggctgtagaattttcaggctgcctaccttgggtgagtgatagcagtttactgagactgagcctcaggagatatatatgtacatacataagcacgtgtgtttgtgtgtgtgtattttctgccttgttatataatccatcatttgataaaaagagtccctgaagttttagagatacatgtggcatttggcggagaagaaacataactatacttcatatgagacagtcattttaggcttcagtattgtaataaaaacttacatgaagtaacacttaagaaatattctgaaatcctaaaatgaatatattgttccaagttgcagggggataaaacctcaattttagaaaatattattcaagtaattgttattgagtcaatttcataatttatcaatatgtgtttataaagtacatgcaagtagattgtaatatgccttactttagagatataattatatatatatagctactttgttaataggagacatttttctcatgaaaaaatataaatccctcctcagattcaaactcaaacttaaaacacataaattctaaattgctggattacttaaggtgtttaggtaaagtaagagcaaactaatcagtaataaaatattggcaagtccccgtttgtggcttttttctaaatctttcataaatatagacattgttcaaatatacttagaaatatagagtcttgagctatgtattttattgttaagaaaaaagaatttccctcttgaaaattccattttattgcccatcattaaattttacatgaccctatgaacttttcagaattgcaaattacttaagcagtgtaaactcatattactcatatacgtatgtctctttcattaaaatgattagatttataaattgaaaatattatcgtaactaattggcctaaaacatgaggtttaataaaatgcagattttaatcaggagcttaagaatttagcctatgctttctactatgtttttctcactttcaatgcctttttttcttgttttcacatctacatagggaaataatcagtaaattatgaaatattttgaaaaagacataatttaaatatttactaataataactttgtgcctatgtttaatattatgccatggatatwgctgccattcaatacatagttgttgaataaactaatcaaatttattatccttttttgttgtttgtgacttgataatacaacagattgaagaatacaatcaaactggtgcggaaata

SEQ ID NO: 727251 - DNA, 650 bp, Homo sapiens
gcccccgaggctttgaaaatgggagggcttttgaggtcaagtaggatgagttgcaggtctaatttgaaagcagtgagcatgcaatatctatctgaacatttattatcaagtaaaacttgggaatagagatgattcagcatggccaataaagaaggacctcgaaaggacatcttaagaaccataggcctggatttggcattccagagggcaatatctaagaggcctatcttgctgtgtccaaaaagtatactgagcttttgtgtgaagtatgaggaagaagcacagaagagaaaaattgcaaaagcaaggtttaaagaaagatgggaaagagaaaatagttcccaactggggtcagtgtcttgccacaactggttccttgagaaaatggaagactcttcctgggaaaagttatagtgctcctaggaggctagccaagcactgcatagtatgagactttagcctactgccttcattagcctcctgtcaggaaagactgtggcatctcagaactacttggtgtaggttgaaacctttccacctccatttgtcactcatcagggcaaacaaggtttgctctcyagtcagagagagcagaggcactatgactgaggggattcaagctgtagtcagctctgaggaacaaggaagaa

SEQ ID NO: 727252 - DNA, 2102 bp, Homo sapiens
gataaaataaataatgtaaagaaaaggataaagatcctatgaggaaaacgtgatagaggaaactcagtgattcttgaagtctgagaaaattttcttagaatctgacatgatgcatggtgggagagaaccaggctaggcatggtggtcagggtagtcaagagaaggaaatgtatgggaagaattctgtggtggtactagacttatgaaggagttyattattaacatagattatttcacagagtcagggacattagtccaagattccaaagatgttaatgtttcaacataatttacatctgcaaactactaacagtaacatctgttaaagaaaatgattatgtggaaagagactaccaccacagggagggcagaggaggcatgcaatagtaaagaatgcatctctcatcttatcattctaatatgttttactaatgacatgttccacagtaatgggtgtaatttataaatagactgaaatccagagtgtttgatgatcaaatagtccatgaatgctacatttcaaatgtgtgtgatatttataataggatgtaaaatgcatttaaacacaagctgtgctcatttatattcatagtcagggcataagagatacagcagaagggaatgtgttcttggtgtgctaacttgttctatagaaggcatgagctgaggtcatatttctcgtgatttaaattaggcaacataacctgagctgagacacgcagagaaaagtttcagctaccatagaaaactttattcttctatgagaaaacatgtctctgagaggttaaaagtcagatatgtgaagagagaatgcatggctgttgattgtggagagctgctttgaaacatctcttgttcctatcttgctcctcatttacagagtaaattagcacagtgctgtggtctgaatgctgtgtccccccaaaattcacatgtataaatttagtcacaaatgagatggcattaggaggtggggttgttaggaaatcattctgacatgggattagtgcccttataaacggggccccagagagctgccttgaccctattccaccatgtgaaaacccaattagaagacagcatctatgaaccagaaagtgagcccttgccagacagagtctgccggcaccttgagcatggacctcgcagtatccagaactgtaagaaacaaatttctgttatttgtaagctgcccagtttatggtgttttgttatatagcagtctgaatggatgaagacacacaccaccaaagaacaaattctcttatgttccatatttcatgccctaattatgaatataaatgaacactttagtttttaataggtttgaagctcaattatacaatttcacatatacatggaatattacatttattgactatttgattaccaaatctctttgggtcccagtttattcataaagtaacactcacaacagtagggcatgcctctatcaaaatatattagaattatgtcataggagatttaatatttaaatctccacccttctcttcaccccagagtggtgatctctttccaaacaatatttttgagagatgttactgataaaaatataggtttatttaaacagattaagtatttattaaataataattcttgttcatgtgaacccagtttatatcttatcataagcagcaagaaataatcatctggggaatgtaagcttcagatactaagcagaaactaatgtgaataattactgagaatgctaaatagtggctaagaataagattttcctttcaattgcttcaactgagggagagaagggaattgaacaaataagataggggaggatatgtgtgtttattgggtagaatatacaccaaatattcaaaaggatttgtttgtgtcatcttgttccttgtatttcaccaagttcacgttgtcttttctaggtctaattgctaccatgcaatgcatcattaatttttttttgaaaaaatacgattgtcacattatggggaaatctatatttttgtatgatgtaggaacaaaagttgataatttctccatagatttattggcaccaagtgtcgtttaccagtaaaggacagaatgatcttgggagtatgtattgtact

SEQ ID NO: 727253 - DNA, 2102 bp, Homo sapiens
gataaaataaataatgtaaagaaaaggataaagatcctatgaggaaaacgtgatagaggaaactcagtgattcttgaagtctgagaaaattttcttagaatctgacatgatgcatggtgggagagaaccaggctaggcatggtggtcagggtagtcaagagaaggaaatgtatgggaagaattctgtggtggtactagacttatgaaggagtttattattaacatagattatttcacagagtcagggacattagtccaagattccaaagatgttaatgtttcaacataatttacatctgcaaactactaacagtaacatctgttaaagaaaatgattatgtggaaagagactaccaccacagggagggcagaggaggcatgcaatagtaaagaatgcatctctcatcttatcattctaatatgttttactaatracatgttccacagtaatgggtgtaatttataaatagactgaaatccagagtgtttgatgatcaaatagtccatgaatgctacatttcaaatgtgtgtgatatttataataggatgtaaaatgcatttaaacacaagctgtgctcatttatattcatagtcagggcataagagatacagcagaagggaatgtgttcttggtgtgctaacttgttctatagaaggcatgagctgaggtcatatttctcgtgatttaaattaggcaacataacctgagctgagacacgcagagaaaagtttcagctaccatagaaaactttattcttctatgagaaaacatgtctctgagaggttaaaagtcagatatgtgaagagagaatgcatggctgttgattgtggagagctgctttgaaacatctcttgttcctatcttgctcctcatttacagagtaaattagcacagtgctgtggtctgaatgctgtgtccccccaaaattcacatgtataaatttagtcacaaatgagatggcattaggaggtggggttgttaggaaatcattctgacatgggattagtgcccttataaacggggccccagagagctgccttgaccctattccaccatgtgaaaacccaattagaagacagcatctatgaaccagaaagtgagcccttgccagacagagtctgccggcaccttgagcatggacctcgcagtatccagaactgtaagaaacaaatttctgttatttgtaagctgcccagtttatggtgttttgttatatagcagtctgaatggatgaagacacacaccaccaaagaacaaattctcttatgttccatatttcatgccctaattatgaatataaatgaacactttagtttttaataggtttgaagctcaattatacaatttcacatatacatggaatattacatttattgactatttgattaccaaatctctttgggtcccagtttattcataaagtaacactcacaacagtagggcatgcctctatcaaaatatattagaattatgtcataggagatttaatatttaaatctccacccttctcttcaccccagagtggtgatctctttccaaacaatatttttgagagatgttactgataaaaatataggtttatttaaacagattaagtatttattaaataataattcttgttcatgtgaacccagtttatatcttatcataagcagcaagaaataatcatctggggaatgtaagcttcagatactaagcagaaactaatgtgaataattactgagaatgctaaatagtggctaagaataagattttcctttcaattgcttcaactgagggagagaagggaattgaacaaataagataggggaggatatgtgtgtttattgggtagaatatacaccaaatattcaaaaggatttgtttgtgtcatcttgttccttgtatttcaccaagttcacgttgtcttttctaggtctaattgctaccatgcaatgcatcattaatttttttttgaaaaaatacgattgtcacattatggggaaatctatatttttgtatgatgtaggaacaaaagttgataatttctccatagatttattggcaccaagtgtcgtttaccagtaaaggacagaatgatcttgggagtatgtattgtact

SEQ ID NO: 727254 - DNA, 2102 bp, Homo sapiens
gataaaataaataatgtaaagaaaaggataaagatcctatgaggaaaacgtgatagaggaaactcagtgattcttgaagtctgagaaaattttcttagaatctgacatgatgcatggtgggagagaaccaggctaggcatggtggtcagggtagtcaagagaaggaaatgtatgggaagaattctgtggtggtactagacttatgaaggagtttattattaacatagattatttcacagagtcagggacattagtccaagattccaaagatgttaatgtttcaacataatttacatctgcaaactactaacagtaacatctgttaaagaaaatgattatgtggaaagagactaccaccacagggagggcagaggaggcatgcaatagtaaagaatgcatctctcatcttatcattctaatatgttttactaatgacatgttccacagtaatgggtgtaatttataaatagactgaaatccagagtgtttgatgatcaaatagtccatgaatgctacatttcaaatgtgtgtgatatttataataggatgtaaaatgcatttaaacacaagctgtgctcatttatattcatagtcagggcataagagatacagcagaagrgaatgtgttcttggtgtgctaacttgttctatagaaggcatgagctgaggtcatatttctcgtgatttaaattaggcaacataacctgagctgagacacgcagagaaaagtttcagctaccatagaaaactttattcttctatgagaaaacatgtctctgagaggttaaaagtcagatatgtgaagagagaatgcatggctgttgattgtggagagctgctttgaaacatctcttgttcctatcttgctcctcatttacagagtaaattagcacagtgctgtggtctgaatgctgtgtccccccaaaattcacatgtataaatttagtcacaaatgagatggcattaggaggtggggttgttaggaaatcattctgacatgggattagtgcccttataaacggggccccagagagctgccttgaccctattccaccatgtgaaaacccaattagaagacagcatctatgaaccagaaagtgagcccttgccagacagagtctgccggcaccttgagcatggacctcgcagtatccagaactgtaagaaacaaatttctgttatttgtaagctgcccagtttatggtgttttgttatatagcagtctgaatggatgaagacacacaccaccaaagaacaaattctcttatgttccatatttcatgccctaattatgaatataaatgaacactttagtttttaataggtttgaagctcaattatacaatttcacatatacatggaatattacatttattgactatttgattaccaaatctctttgggtcccagtttattcataaagtaacactcacaacagtagggcatgcctctatcaaaatatattagaattatgtcataggagatttaatatttaaatctccacccttctcttcaccccagagtggtgatctctttccaaacaatatttttgagagatgttactgataaaaatataggtttatttaaacagattaagtatttattaaataataattcttgttcatgtgaacccagtttatatcttatcataagcagcaagaaataatcatctggggaatgtaagcttcagatactaagcagaaactaatgtgaataattactgagaatgctaaatagtggctaagaataagattttcctttcaattgcttcaactgagggagagaagggaattgaacaaataagataggggaggatatgtgtgtttattgggtagaatatacaccaaatattcaaaaggatttgtttgtgtcatcttgttccttgtatttcaccaagttcacgttgtcttttctaggtctaattgctaccatgcaatgcatcattaatttttttttgaaaaaatacgattgtcacattatggggaaatctatatttttgtatgatgtaggaacaaaagttgataatttctccatagatttattggcaccaagtgtcgtttaccagtaaaggacagaatgatcttgggagtatgtattgtact

SEQ ID NO: 727255 - DNA, 1552 bp, Homo sapiens
caatatattggcttgagcaggaaaatgstattactataagccttccatgcaaagatttttgtctgacattgtctgccaagaggttctccaaaatgcagctttaagcttctatagtaaccagagatcaggagtatgtttccaataaatttaggcattctgaacgacagttttataacttaaaatttgcttgaaacactgcaatctagttgataataccagaggtgctactcaaatgagacagtcaacgaagatcaccaatttcccttctgacaaagaatggccattgctcccatcccttcaggtttcattcatgaggttttctctttaaataggagacgactaaagtgttcatttctcttcttttactcttcccctttttttctgtttaaagtctttgatacttcttgcctgcaactttaattatttaattttttcactgcattatttaaagaaaagacagttctgagactgaagtatgcatgaagacagtatgactccatgcaaaattgaagaaatctgcgtaacactgcaccacagcagataatttagtacagaatacattgcaatctctactcctgtcttaccttaatatatatatttctgcaaatgtggactaaatgaccattttgcggctgggtgcggtggctcacacctgcaatcccagcacgttgggagaccgaggtgggcggatcacgaggtcaggagttcgagaccaacctggtcaatacggtgaaacatcatctctactaaaaatgcaaaaattagtcccagctactcaggaggctgaggcagaagaatcgcttgaacctgtgaggcagatgctgcaatgagctgagatattgtccttgcactccagcctgggcaacagagcaagacttcataaaaaaaaaaaaattaaaaagaccattttgcttaatggtatcagatacatatcaattaagaaaagaccttcaggagcttgaagaaaggcattatatgtgaaggcatatcattattttttgttaaaagcatttagaaatgggtcaaagtaaagacaagactagaaatgcttatcacagcatttgaacataaaattttcctcccaacctacaaatggaataacagtagcactggaacacaagtacaatttgtaagaatgcatgattcttttacactgatgacacattcttcaatcaaaaatttaattacctcaaaagtagagatagatgtactttattttcctaatttttttctatacttttatttatcctaaatctttttttatttttaatgcctgtgggcacatagtaggtatatatctttatggggtacatgagatgctttgatataggcaggcaatgtgaaataatcacatcatggagaatgggatatccatcctttcaagcacttatcctttgggttacaaacaatccaagtacactcttttagttattttaaaatgtagaattaagttagtattgactgtagttgccctgttatcctatcaaatagtaggccttatttattctatttttttttgtacccattgatatggtttggatttgtgtcctca

SEQ ID NO: 727256 - DNA, 602 bp, Homo sapiens
tttagttgagatcatccataagcaaacacgattaactaatgtactaattgcacagtttgtgtgagagggtaatgtgttaagaaatatttgatttttgattcatagccaggaagaaagtcatttggcaaaactgaatttcttctcaacttaggtagaattgctgcatgacctcaaaagggaaacaatattcaagttcagctatataccaaaactcagaggagagttgaacagtatttgcttctgtcatgccttgtgttattccaaacaaacttctgcatccctgagctcctcctgacagcagaaatttcccaccggacctataagcccacctgtcgctatgttaccgcccttctgacttcttctgccaggaggattgaactttggttagtggcatattagaataatcaacaaccccatatgaatgtcttctcttctcatagaattccctgtgaaggcttcattccctgcacattccctatgctctttcttagacctttacattggcaatgccccatsatgagtcaatgtgcagaagatgaagatttctagatcttatttataccttcattacctgtattatatatattacctgtattgtatta

SEQ ID NO: 727257 - DNA, 1348 bp, Homo sapiens
gcaatgtgaccagctaatgcaaaagccgtctagaacaactgtgtacctttgtatttttgtttacagttcatccatgagctacagatgcctattgcaatccctcaggcctaccagtattgcattcgccctccagtggacagacaaagaaagaagctcactcaaatcatggaagcagaaccccagccatctggtcgactaactgtgggctcctgattacctggaatattttttataagggggatacaggttccagctgaacttgtccctacaactccaccaacttctcagctaatggtgataaactcagctgaaagagggatcaagcaaggccctctaaagcatgaggccctaggcaaaaaccctcttgcccagatctggaggtagtacccttgtgatgctagccagtatgaactggttttttttttagacggctttgatgaacatctgtcttttcaattaaattatggagtaaaaatcacagattcaatcaatgctgccatctaaacagcagataaattataaaataatctctatgataaaaagtgtcccagggtggacgcgataatcccagcactttgggaggccaaggtgggctgatcacctgaggacaggagttcgagaccagtctgaccaacatggagaaaccccgtctctactaaaaatacaaaattagctgggcaatcccagctacttgggaggctgaggtagaggaatcgcttgaacccgggaggtggaggttgcggtgagccaagattgtgccrttgcactccagcctgggcaacaagagcaaaattccatctcagaaaaaaagaaaaaaaaaagggaaacattcaaacaaagcctaaaattcaacttagtgcaccatcagatgtatgtagatcattgtactaggaatcagaagacacagtgacttaatcctttgattttgggtattaacgcctctgaaactctatgaaaaaagaaataatatcagttgttggatgaatcttgctaaacaatttaacattaaattaggttttataaaaacaaagtaattctttctggagctattaaaacatctaaaaacatcctgtgtgtgatctttacacctactgtagcagcatgattccctctgtgcccagagctaggctagactctgccacagatgggcagtgtagaacaaactgggaaaacatactactcaagttcatggtagaggactaccaatcactagtctggccacttgggcaaatcacataacttcttggtattctatactctcatttgtaaaatggaattacctgtattgttaacagggtcacacttacaatgtgcttcacaattgcaagctcccaaagtacttagtaac

SEQ ID NO: 727258 - DNA, 1348 bp, Homo sapiens
gcaatgtgaccagctaatgcaaaagccgtctagaacaactgtgtacctttgtatttttgtttacagttcatccatgagctacagatgcctattgcaatccctcaggcctaccagtattgcattcgccctccagtggacagacaaagaaagaagctcactcaaatcatggaagcagaaccccagccatctggtcgactaactgtgggctcctgattacctggaatattttttataagggggatacaggttccagctgaacttgtccctacaactccaccaacttctcagctaatggtgataaactcagctgaaagagggatcaagcaaggccctctaaagcatgaggccctaggcaaaaaccctcttgcccagatctggaggtagtacccttgtgatgctagccagtatgaactggttttttttttagacggctttgatgaacatctgtcttttcaattaaattatggagtaaaaatcacagattcaatcaatgctgccatctaaacagcagataaattataaaataatctctatgataaaaagtgtcccagggtggacgcgataatcccagcactttgggaggccaaggtgggctgatcacctgaggacaggagttcgagaccagtctgaccaacatggagaaaccccgtctctactaaaaatacaaaattagctgggcaatcccagctacttgggaggctgaggtagaggaatcgcttgaacccgggaggtggaggttgcggtgagccaagattgtgccattgcactccagcctgggcaacaagagcaaaattccatctcrgaaaaaaagaaaaaaaaaagggaaacattcaaacaaagcctaaaattcaacttagtgcaccatcagatgtatgtagatcattgtactaggaatcagaagacacagtgacttaatcctttgattttgggtattaacgcctctgaaactctatgaaaaaagaaataatatcagttgttggatgaatcttgctaaacaatttaacattaaattaggttttataaaaacaaagtaattctttctggagctattaaaacatctaaaaacatcctgtgtgtgatctttacacctactgtagcagcatgattccctctgtgcccagagctaggctagactctgccacagatgggcagtgtagaacaaactgggaaaacatactactcaagttcatggtagaggactaccaatcactagtctggccacttgggcaaatcacataacttcttggtattctatactctcatttgtaaaatggaattacctgtattgttaacagggtcacacttacaatgtgcttcacaattgcaagctcccaaagtacttagtaac

SEQ ID NO: 727259 - DNA, 587 bp, Homo sapiens
tctcaaaatagaattacctaaaagaaaacagtcacaccatacaaccactgcaaagcaactgctctctgtaccttcatcattgttccaaaagttttcattttttcttcttgactaacaggaaatgttcatattaatactgcagtgtattccaaaagcatattttagattttaaaaatgagatgtgtaacaaattagattagaaaacaaaatggctagacatgcaggttagaacttttggggcagatactaacaagccagctatatataattaggagacagccggatcctactacagtcaccatttcagccttccagagaggcaggattgtgctcctccacagatggtagccaaaatcctaaaactatgtttttgtcagaaaattggaggaagattttttttttcttagtgacaacttctgrttctttgctatacccacaagtcatcaagtgtaggaaatttaagctagagtcactaatttgctatttattgtaacaacactgcctggtgtttatacagcacattccattctgtgatctccaagaatgttacgatctttttctactaaaacagatggagaaactaaggc

SEQ ID NO: 727260 - DNA, 623 bp, Homo sapiens
taagaattgcaaagtatgccaaggccaaaacttcaaaccagaaggtaacaaacagggcaattccaatagacttgatcatattaattaaagatggctgtttgggatataaaatttgtttgcagagaggctgcagccagcaggaatgactgaagagttagaggcaatatagtgtagtggttacaagrgtacagcctggacgctttagctgtttattaaatatgctttgagcgagttacttaatctcttagggtctttgttttctcatttgtaccatagggagactactaacagtgccaacctcttagggtagtcaagagcattaaatgatttgagttagtacatatattctcaacaggggtgatagcacgttggagggtaaaaacaatcttaggtattagaatggtttatggccctctaaagctcaaccctgtctgacaaaaacttactcctttgtatttaatttctctcattatggataaattaaatttaattcaaattcaaattaacacagttaatttaaattaaacctaaatttaatttaatttttctcctcaaggggacaataataggaacaaaaaaaaaagctgagaaacactgagttagtatatacaaagcacttataa

SEQ ID NO: 727261 - DNA, 1461 bp, Homo sapiens
ccaaaagacattaggcctgcatctaataaagccaggagtttgatttcgcccttcagctgctttcttatttatacaggttttccccatattatatagacataaatgtaataaaaatctcaagtgaattgttacaatttttatacttgttatattcgtctgtaatgccattgcattctttctaatttttggtttgatacaattggattgcaaatatggaggagaagagagttataatgttaaatcatgaatgacagtttggaagattttcagtttttaaaatgtctaaatctcacctattttagaaaaaagataatattgctgttatattaagttaggtaaattgagaaagtgtacagatttttgtgaaaagtagtatttcatatttcatttgtcctttattgggaataaaatgctattattttaaaaaactgaaaaggatttactttgaaaattttggttactcgtccaaaatatgtgatttaggactttgtgcagccagttttgaaagtgtgaacaattaggaggaaacttatttcaaaggacagtgtagtggaagtgagtcaattcttttagatccttatatttacttgaaacaaatgttggttttgttaccttattaaaaaagcagtatttagcaaaagggaatagaagaaacattgctaccaagggttagtttagttcatgcttttaagcatttgtgtgtgtgtgtgtgtgtgtgtgtgtgtgtgtgcgcgtgtgcacgtgcacgcacattgtggaatttttttaatggctagtaatcttgattttaatcctgtggagtaagaggtcatagcccgatttgcagagatccctgtgccagggggtagataaaggtcaatgggtgggatgcagacaggcattcagtggactctttgaaattatattcaaagttgggcatatacgtagatttctgggaacgccatcatcaaatcccctgagatcgtttggtcckaaaaggattatgagccactgctgtcaagagaatagaagagcagcaataaataaatcattttaattttatgaacagattctaaattaacctgctctcatacctctctcttggaaattagggaaatgtacttttattagctctcaaaatggtaaatattattcccttaagcattcacttagctgatagtctgaaatattatattgaaatgtctagttttgaaaggcttataaataaaatacctctgattataaataatcaattttaaagtaccctgtaagccataaaaaatgcaaaagaccagtgatatatcctctgccttcatgcctaactcatgccttaggcatggagatcaatgtgtggtgcgtcagggtatgtttattttcgtctatcagctggatttcactaagagtgaagaaacggttggtaaacttaatttcttaacaatttgatgtcagtgatatcactgtctgtatttaaatgtaattgga

SEQ ID NO: 727262 - DNA, 1836 bp, Homo sapiens
tttaaaatattcttctcagaattttatagatcaaacagaataaaaattataatgcatataaaataataaggtttagcttaattgatttatatagaaatttacatccaacaagcaaaaaatatacattattttttaggacacatgcatagaacatattttttaaaactgaccatttaataggcaacaaatgaagccacaataaattcccaggaatctatatcataccctctataattcctgactatatttcaatatcatacataacaaaaggatgtctttaaaagaaaaccctcagccagaaaattatgcacacacataaaataaagatattacctaattaatcctaggattaaagaggaaatctcagggagaagttgtaaaataaatggtgcctgaatgacaataaaaacactatatatcaaaatatatatggtatcagttggacctaggaaagaaaaactcatagaatacaggtactagtagtttgaaaaaaacataaaatacatccttcagaaaacatgaaatggtgaaaacatggaagcactctgtattagttagggctctccagaaagacaaaaccaataggatggatggatggatagatataagatagatagatagatagatagatagatagatagatagatagatagatagagtttattacaggaattcattcattgggctcatgcaattatggaggctgagaagtccaaggttgaggggacacatctgtgagagcctgctcgctgatggggactttctgcaaattaccattcttgtaggtcaaaaatagttggatatcagaaatttcctatagttcaactaatagatagctatcattattctcattttactgaagaaattgaagcacagagagattcaataacttgcccaagttacacagacaatcattgtcaatgttataatttgagcctaggaagtgtagtttcagagtctgtctctcaaccagtatgctatactgcactgcttcttggaaattatctccatggatgcaaaaaagttatttaataaatctcatcaccgatttatcattaaaaaatatgtatctgactgaaagtaaagagcagttgcccagggataggtggaagagtagagattaactgtaaacrtgtaccaggaattttggggataatggaaatgttctaaaaatggattatggtgattgttgtactgttctcttaatttactaaaataattgaatttatttgcactcttaaaatgggtgaattttatgttatataaatatatttaaataattatatttttaaaattctgaaaacttccttagtttgctaataattataagaacaacaacatagcaagcatcatacttaatagaagaaattttagaagcatttaaaaaaatgcttcatgaataagaaataatgattgccatccctgctgctatctaacacagtactgaagattctagccaaagatataagctaaaaagaattgttttcatatgggaactaaaataaaagaaataatattgttattaaaagaatatggtcataaacaaggaaaaacaaaagtattaggtggcaaattgttataataaataagagagttcagcaaagtaccagatagaagatcaacttacaaaaaggagtttctcaaagcagaaataatcaagtggaaaatttaataggaaagaagatacattcacaaaagtggcaaaatctatacagcatctaagatttaacctaacaaagaggacagaagaccatttcagggaaaaaaatgtaacctctgttaaataatataacaagaaatctgaatagagataatttgatcatgtttgtggataga

SEQ ID NO: 727263 - DNA, 651 bp, Homo sapiens
agtccataggtcctcttaccattctcttcactaagcctgtcatcaattacccaagcccatgctcatcaaaacccattattaatgggtggccatatcccttgagaccaagtctgccacatttcctggtacataagtcctttgtggaaacgcaaaccctgttttctaacgttaagcaacgatagtcaaactatcgaatccttcaagtatgaagaacagctaatggataaaagacacataatactgtttctacttatgaagatgactcattcaaattttaaatggtatgatggttaatttcacgtataaacttggctaggccatggtatmtactttttggttaaccacaacctaaatgttactgtgaaagtattttttttgatgtgattaacatttatcagtagacctaagtaaagcacattatcctccactatgttggtgggcctcatccagtcagctgaagacctttaagagacaagacaaggagtcccttattcactccccagccctacaaggaagaagaaattccacctctagactgcctttagactcaaaaaatcaacttacctgtgtctccagcctgcagatttcagtcttgccagcctccacaatcacaggagttaattatttaaaataaatctctttctctctata

SEQ ID NO: 727264 - DNA, 631 bp, Homo sapiens
  misc_feature 297: n = A,T,C or G
tggggtgatggtgcagcaaaccaccatagcatgtgtatacctgtgtaacaaacctgcacattctgcatgtgtatcccagaacttaaagtataaaaataataataatagaagaagaaaaaaaaagaaagaagaagaacaagaagaaagaagaaagaaaaaaagaaagaagaaagaagaaasaagaaggagaggaggaaggaattggggagaactccaagatttagggccaaagtggtaactggaataataatacaaggactctcatatgttgaaaaacctgaacgagatagtaaaaanaaagaaaaagtccctctgatgttcacagtcccatcacttgatacctgtaaataccatttgttctattagccacacaatcagacaactcctacctgggggatggagttttgctgtgtaaaaacagggcggtgtgttccaaacactcttgaaaaaaggaactggtgtgttcacagaaaaataccacaatgtaccagacttatggggtgggaagggagcaaaaaatatatgattatggacagaggcaaaagaggctacaaacagcagtaaagaattcactgaagtgttggaggttgtgatgtctaaaaactatcccacctgatagctatgttccaaa

SEQ ID NO: 727265 - DNA, 613 bp, Homo sapiens
taattattttaggtttacatttcgcaatccaggtaggacccaaagcaaaattcctaagatccacactgcttcattaacatttggatctttggtactagcacaattggctttcatttatctgacctcactggaacyggcaagtgtcccttcaaggcttttctcgggtttcgaatcttttctggctttggctgagattcagactctactcaagtgccctgattccatgcttgatggagctagaagaattgaagctttacttttataggtaggagttttgtgtgttaattctctagagattctgccatttccaggtttgtggtttcccttttctttgaggttaagggtggtttttttgtttgtttgtttttgtgtgtgtgttttgttgtgtttgtttgttttgtcttacttgctaaagtttgcagcctttcttttcattgatatttggtcagagaaaatagtttctctttgaaaagagaaaaagtgaaagaactgaatctgtgtggctcaagtaaaagttgtgatctttaaactgcccagtttcttgagctttgtttgattgactgtctaaacttcatttttgtgtggccaaaatttcccttacagtcttgaatca

SEQ ID NO: 727266 - DNA, 644 bp, Homo sapiens
  misc_feature 358, 394, 408, 415, 427, 434: n = A,T,C or G
gatgtggagacaaacagagattccccccacctcataaatttatgattattagagcctctctgctgaggggaatgagcacctggagaaagaaacctttacaatgcagcagagagagggcaaagcagccagagggatgtccttgaatagacaagcaaaagtcacatccaagcaaaagtcacatccgtcactcaccttgagggctgtcctcagaggggagctcggaaggttgattcatcctaacaggaggggcggatgtatgtgtgtgcagtaggcagataataggtgttggggaaggggtgaggcaygtgcaggagctctcttctgatcacctctatgagtgagttaaatgagagggagnacatattggaagtttcaaagagtggagaaggtgtgnagcagttgtctggnagaatgnaagagtgaatgnactaggnaattgtagtgggttaaaggtcatgcttttgaagttcatagtcatgaatctaagtgagaccaggaaagaaatggaggatatgtgtgaccttggatatactgtgttaaggtagtttacataggtgtactatctgctttacaaagctgttgcgagaattcagtgtgttagaaggcattttgaagtataagtgcaggacaccattattatgaaa

SEQ ID NO: 727267 - DNA, 644 bp, Homo sapiens
  misc_feature 358, 394, 408, 415, 427, 434: n = A,T,C or G
gatgtggagacaaacagagattccccccacctcataaatttatgattattagagcctctctgctgaggggaatgagcacctggagaaagaaacctttacaatgcagcagagagagggcaaagcagccagagggatgtccttgaatagacaagcaaaagtcacatccaagcaaaagtcacatccgtcactcaccttgagggctgtcctcagaggggagctcggaaggttgattcatcctaacaggaggggcggatgtatgtgtgtgcagtaggcagataataggtgttggggaaggggtgaggcacgtgcaggagctctcttctgatcacctctatgagtgagttaaatgagagggagnacatattggaagtttcaaagagtggagaaggtgtgnagcagttgtctggnagaatgnaagagtgaatgnactaggnaattgtagtgggttaaaggtcatgctttygaagttcatagtcatgaatctaagtgagaccaggaaagaaatggaggatatgtgtgaccttggatatactgtgttaaggtagtttacataggtgtactatctgctttacaaagctgttgcgagaattcagtgtgttagaaggcattttgaagtataagtgcaggacaccattattatgaaa

SEQ ID NO: 727268 - DNA, 2264 bp, Homo sapiens
  misc_feature 1240, 1241, 1242, 1243, 1244, 1245, 1246, 1247, 1248, 1249,1250, 1251, 1252, 1253, 1254, 1255, 1256, 1257, 1258, 1259,1260, 1261, 1262, 1263, 1264, 1265, 1266, 1267, 1268, 1269,1270, 1271, 1272, 1273, 1274, 1275, 1276, 1277, 1278: n = A,T,C or G
  misc_feature 1279, 1280, 1281, 1282, 1283, 1284, 1285, 1286, 1287, 1288,1289, 1290, 1291, 1292, 1293, 1294, 1295, 1296, 1297, 1298,1299, 1300, 1301, 1302, 1303, 1304, 1305, 1306, 1307, 1308,1309, 1310, 1311, 1312, 1313, 1314, 1315, 1316, 1317: n = A,T,C or G
  misc_feature 1318, 1319, 1320, 1321, 1322, 1323, 1324, 1325, 1326, 1327,1328, 1329, 1330, 1331, 1332, 1333, 1334, 1335, 1336, 1337,1338, 1339: n = A,T,C or G
atgtgtctggtttgcttacagaccttgctgtacccatttggttccctctcacacttttgcatttttaactcaacatctccattacttctagtcatagggcttgaaattctcactgttaggatcattctttttggtctttctgcaaatgtttattaaagagaaatcaaggtatcacattacctgggaaaaataacgcatatataagactcactgtcacctaaaccgagatgatgatctcagtaggcactatccaaagaatgtcttgaccttggacaaacatctcatcttggaatttttcttgggctctggacacctgggaaacagcttgtaaagaccaaattctgttgtagaagtggagaacttcaaaaggagaatatgagatatcttgggattattgcctctggtttctaataaactgaattatgttgataatgcctatcccaggctctgtggtctgtagaaggaagagtggatgaggagtaaagagatactgagcttcagtcctgggttccaggcactgtagcttggtgatcaacagcccaaactccagattcacattgggtggcctcttgctcatgtgaccttagaaaatttacttaactttctgagaagcctcagtttctgaatctgtaaaatggtattaataatagaccttggccttatggggctattatgaggatttagtgagacaatccatataaagtgcttgcatagttctggtacttaggaaatgatcaataaatgtcacctctactgttttattattgattgtaactaatggttgttccctttattaaaaacttcatagcaaattctggcagagaattaaatttataagttgcattttctcagagtttagatttctttggctaatgaccgttatttaatttacagaattactctttgtatgccaaagtcctctgatgataaacactaaatttaaaaagtttaaagagcagcatgtcaacagaatccattcaacctacttgctgattgtttatgtatgagagtataaatggatggtaaattacaaatatatattaatataagtttatataaggtcacatattacagagttaagtatgcataagtaattgaaccagagagtatgcttgcttgcccgcccttccttcttctttacttccttccttcgttccttttctttccttttctttttctttctgtcttgtgctttttcttttctttccctctttatttccttttctttcctcctcccttnnnnnnnnnnnnnnnnnnnnnnnnnnnnnnnnnnnnnnnnnnnnnnnnnnnnnnnnnnnnnnnnnnnnnnnnnnnnnnnnnnnnnnnnnnnnnnnnnnnnctcagttcccgtaaaatgcactatttttgaaactagtagtatgatttttattgggtcaaagcataatgttgattgagattttaatttctgatgaataaactataatgaaaatttacaagattcaaggtccagaaggaggtaaactaaaaattttacaggtctgaagttcgtgcccagttctctcaaggcctcatcttgaaagttcttacatccaaattttttttaaaaggacattttcccattagcagtgaaagcagttactttgcaaatactacgtgggaaaaatattttatttataattcataatccctaatttatgaaatgtgaaatatattaatttgttgtgaaaataaccaccattataaaatggcatttattcacacatccatccagcatttagaaatgggttgttcaaagaaatggtagctgtttaagatgatggatatgctaattaccctgattttatcattacacaaatatatacatatatggaaacatcacatcgtgccttctaaaatacgtacaattattatgtatcaatttttctaaaaagaaagaaatggttgtttaaaaacttgtatgaaacttggtgctttggtggggggtatatatttgtttactttaacaataatcactgccaaaaattaatgcgtcacaatggcataataattatgagttaaaagaatcataccacctaaacatattcacttagaaaaaaatmaaaatgaaataggttagcatttagaatactcgtaacattgagccactcaaataaaatttctaaaggtaatgacaagatttctatacatttatcccagatgaagctataataaataggaaaccaatgaatccaggtactatctaagtatgccaatctgaaaacacacttaggcatatttcaacaaatactttaatgcagtatctg

SEQ ID NO: 727269 - DNA, 628 bp, Homo sapiens
tgcccagctaattttttrtagagatagggtctcgtcatcttgtcaaggcttgtctctaactcctgggctcaagcaatcctcccaaagtgctaggattacaggagtaagccaccacgcctggcctgaattggcaactttttggctgtgttgatttgttatcccacgggcagttttttgtttgtttgtttttgagacggagtctcgctctgtcgcccaggctggagtgcagtggcgcgatctcggctcactgcaagctccgcctcctgggttcacgccattctcctgcctcagcctcccaaggagctgggactacaggcgcccgccactatgcctggctaattttttgtatttttttagtagagacggggttacaccgtgttagccaggatggtctcgatttcctgacctcgtgatctgcccgcctcggcctcccaaagtgctgggattacaagcgtgagtcactgcgcccccatgggcagtttttgagaattgtccccattgtttcatattttgctactcttggaattttcagactttttaattttggtgaatctgatgggcatatagttgtgttaccttgtggtttttagtcacacttctgtggttacaagtaaggttaagcacattt

SEQ ID NO: 727270 - DNA, 2472 bp, Homo sapiens
atctgtgagtccacaacctgcacaactgcacatggcagccttaatccactatcacccattcgcctaaactagaaacctgagactcgtcsttgatttcctctcatatttttcttatccgcttctctcactcctgactgcttctgcctagttcccaagctgctcctgggagtgtttgtctcctagcaaagagctcaatgaacatgtatagaataaatgacttggtttgatatgagctatgattaactcttttctccaggagtgctctgccaagaatgagacgatggacacaaaaaccccttgttctctagactgttcaggtgtcatctcctccaagaagccctttggattctctccctccaatcagactggggtatgtgaccctcctctgattttccaaagcaacctgtgcttatctttaccaaaaacacaattctgtctcataacaatcaatttgcttacctgcatgccccactagataggaacttttacacctggatcctcagcacctcacatagtatctggtacaaagtgcaaagacaatgagtgttattgaatgagtggatgaatgatataaagaacaagtgcagtaagagatacacacaaagtagtcctaaggggagacagatgaaggagaagctaaatctgctgttgggttgagtaacagtgccatttgaactggtcttgaaggatgagttgcagttctcctagtgatcaaggcaaggaagggtattccaagcaaaaggaatagcatgaacaaaaaagcatgtatgcaagaaagcacatgcagtatttaagaccatgggagcctggcaaagctcaagaacagctttcagtgggaggaaaggaggcagatgtggctagaaagattgttttaaacaagttatgaaagacctggaagggataccaaggggtttgaagattataagatagaaagccactgcagttttaaggcagagtaataacacgatcagctctctaaaagaaaaaataatattttctttccttttcagtgactaaaagtcatagatctaacttcctccatttttagatttcttgatacttcatgaaaataaaaagtaaaggccagctgaagcaattattcccctgactggtctgaacgagggatttttcttttttctttttcttgttttctggccagtcacttggtgaagtgagtgcatcatacagctgggaaaacacgagcttctcgagtttgtttggcttctgagcgatgtgggtgagcgcaagtctgggcagtgtgtcagctccttcctgaaagtctgggtcaaggaagtccacaacacaaccttgtttacttgattttgctttcagcatcgagaacgctggttctgattactgcaaaggtgtatgtggttgctgttggctcacaaccctgtaattcctttgaaaagatgatctgattgggataactgtgactttaatacttcagttcctttggaaacatccagatgaaaagtgatgcattattttcctagtggcttttgttcctggctaactgtaatagtttgtcggatcactgggagtaattctgtggagctgagtttgctgggctggcagatttggaggggtagacaaagaatgaccagtctgaagcaacccttctagcccagacacgtgaatttacaacaaatgtttactgagtgcttgctttgtgccaagcactgagtcaggcgccgggcaaccaagatgaacaagacagtttctactagagtctgctaactagactgaaaactcatcaaagataaatgccgactcttaattctgtttacgtcccctaaatcgtctagggcagtatctagcttaaggcagagtccccaataaataccaaatgtttaaacaggcatatttcgattttgcacagtaaatattttctaagtgcctattaggggttgacgttgtgttaggtagtagagacactagagactactaaaatagagctcataccctcaagctgcttacggtctggtggggaagacagacattaaaacattaatcgcctgtaatcccagcacttcgggaggcagaggtgggcggatcgcttgaacccaggtattggcaaaaccctgtctctacaaaaaaatatcaaaaaatcaaaaattacacagagtggtgcgtacctatagtcccagctactcaagaggtcaaggcaggaggattgcttgagcccacgaggtcaaggctgcagtgaaccatgttcacaccactgcactccagcctgggcaacaaagtgagaccctatctcaaaacaaaaaacaaaaaacaaaaccacaaaattattcaacttgtacaaatctgagccccctaggagcccctgagcccctaagaaataccttgtcacctagttcctgctctggagcccccagatctccctactaaatggataataactggcgtagaagagagaccccaggatgcttctccagcaagcactatgtccattctgattggcca

SEQ ID NO: 727271 - DNA, 2472 bp, Homo sapiens
atctgtgagtccacaacctgcacaactgcacatggcagccttaatccactatcacccattcgcctaaactagaaacctgagactcgtccttgatttcctctcatatttttcttatccgcttctctcactcctgactgcttctgcctagttcccaagctgctcctgggagtgtttgtctcctagcaaagagctcaatgaacatgtatagaataaatgacttgrtttgatatgagctatgattaactcttttctccaggagtgctctgccaagaatgagacgatggacacaaaaaccccttgttctctagactgttcaggtgtcatctcctccaagaagccctttggattctctccctccaatcagactggggtatgtgaccctcctctgattttccaaagcaacctgtgcttatctttaccaaaaacacaattctgtctcataacaatcaatttgcttacctgcatgccccactagataggaacttttacacctggatcctcagcacctcacatagtatctggtacaaagtgcaaagacaatgagtgttattgaatgagtggatgaatgatataaagaacaagtgcagtaagagatacacacaaagtagtcctaaggggagacagatgaaggagaagctaaatctgctgttgggttgagtaacagtgccatttgaactggtcttgaaggatgagttgcagttctcctagtgatcaaggcaaggaagggtattccaagcaaaaggaatagcatgaacaaaaaagcatgtatgcaagaaagcacatgcagtatttaagaccatgggagcctggcaaagctcaagaacagctttcagtgggaggaaaggaggcagatgtggctagaaagattgttttaaacaagttatgaaagacctggaagggataccaaggggtttgaagattataagatagaaagccactgcagttttaaggcagagtaataacacgatcagctctctaaaagaaaaaataatattttctttccttttcagtgactaaaagtcatagatctaacttcctccatttttagatttcttgatacttcatgaaaataaaaagtaaaggccagctgaagcaattattcccctgactggtctgaacgagggatttttcttttttctttttcttgttttctggccagtcacttggtgaagtgagtgcatcatacagctgggaaaacacgagcttctcgagtttgtttggcttctgagcgatgtgggtgagcgcaagtctgggcagtgtgtcagctccttcctgaaagtctgggtcaaggaagtccacaacacaaccttgtttacttgattttgctttcagcatcgagaacgctggttctgattactgcaaaggtgtatgtggttgctgttggctcacaaccctgtaattcctttgaaaagatgatctgattgggataactgtgactttaatacttcagttcctttggaaacatccagatgaaaagtgatgcattattttcctagtggcttttgttcctggctaactgtaatagtttgtcggatcactgggagtaattctgtggagctgagtttgctgggctggcagatttggaggggtagacaaagaatgaccagtctgaagcaacccttctagcccagacacgtgaatttacaacaaatgtttactgagtgcttgctttgtgccaagcactgagtcaggcgccgggcaaccaagatgaacaagacagtttctactagagtctgctaactagactgaaaactcatcaaagataaatgccgactcttaattctgtttacgtcccctaaatcgtctagggcagtatctagcttaaggcagagtccccaataaataccaaatgtttaaacaggcatatttcgattttgcacagtaaatattttctaagtgcctattaggggttgacgttgtgttaggtagtagagacactagagactactaaaatagagctcataccctcaagctgcttacggtctggtggggaagacagacattaaaacattaatcgcctgtaatcccagcacttcgggaggcagaggtgggcggatcgcttgaacccaggtattggcaaaaccctgtctctacaaaaaaatatcaaaaaatcaaaaattacacagagtggtgcgtacctatagtcccagctactcaagaggtcaaggcaggaggattgcttgagcccacgaggtcaaggctgcagtgaaccatgttcacaccactgcactccagcctgggcaacaaagtgagaccctatctcaaaacaaaaaacaaaaaacaaaaccacaaaattattcaacttgtacaaatctgagccccctaggagcccctgagcccctaagaaataccttgtcacctagttcctgctctggagcccccagatctccctactaaatggataataactggcgtagaagagagaccccaggatgcttctccagcaagcactatgtccattctgattggcca

SEQ ID NO: 727272 - DNA, 2572 bp, Homo sapiens
tagtgataaattcttcctctttagtaattcctctttagtaattcagcactcaaaaagtttcagattttgggaccctttagattttggattttcaaattagaaatgcttaacctgtgtgtagatgtgcatgattttttttattttttttatttttttagttttttcttgagatggagtctcactctgtcacccaggctggagtgcagtggtgctatcttggctcaatgcaacctctgcctcctgggtccaagcgattctcctgcctcagcctcccaagcacctgggattacaggcacaagccatcatgccctgttaatttttgtatttttagtagagactgggtttcgccatgttggccaggctagtatcaaactcctgatcttaggtgatccacctgccttggcctcccaaagtgctgggattacaggcatgtgccactgcacctggcctcataaatgttatttaatagaaagcatacatttagagtggtactagggttaactgcataactcagaaatctttgaaaagttttaaaaattgaaagttggtggttttttgtttcattttgttttgtaactcattctgtggcaagacctaacataacctgaattcatttagtagcaaaacctgaactgagctcacgtgtcatgtggctatatatattctttattcaccacttactatgagtattctaaatttcactgcagaaattacatttgattatgattacaagtctgctttattggagtgttacataatatactttacatgcacatattaactttcctaaatctgaaaaattcttaattctgataaactctgtctccaaaggttttagataaggaattgaggatcacctttctctcacctcaggtattaacagctgcttaaaatgtcaaagatagaaactatcttacagcagtaagtccaacattgtcccctgtttaaagggagaaaactaatgtcaatagagaaggaacatacacaaatggttactcataaggctggggccagcatccccatgtcacatatctgattctggagaaactcagccagggagtagcacctgtggtgtcttgacctaaatcatctattttcactgtcatgattctgagcctggctttcccctaccttgtcttagaggctgagagaagcccaggccatgtatgggttttgaaaatcttggtggccgggcacggtggctcatggctataatcccagcactttgggaggccaaggcagatggatcagttgaggtcaggagttcgagaccagcctgggcaacgtggtgaaaccccatctttactgaaaatacaaaaattatccaggcgtggtggagcatgcctgtactcccagctactcaggaggccgaagcaggagaatcgcttgaacccaggaggtggaggttgcagggagccgagatcacaccactgcactccagcctgggtgacagagtgagactctggcttaaaaaaagagaaagaaaaagaaaatgttaattgataacacattacagtggtggggtccagtaatgaaacacaagtttaaaattgcataatgaacatgattttctttcaattctgtaagtatatcwctaggacaaatatataatctcatttgaaaataacatcaaaaaaaaccaagaattaccccctttgactgccatgggatgcatgcagatggctgagagtttgtgttttataaagtgggagaagggattgtataagggaaagtggagactgagaatccctatcacctcatttatcagtgagttcttagttaaaataattttagcaaagaatacaaatggagcacacaaactggaattagattccctaaagtcatccatgcctaagagcccttggaaagtccgtaagtgggcgggcacagtggttcatgcctgtaatcccagaactttgggaagccaaagtgggcagatcatttgagaccaagagtatgagaccagcctgaccaacatggcgaaaccccatctctaccgaaaatccaaaaattagctgggcatggtgtgcatgcctgtaatcccagctactcaggaggctgaggcaggagaatcgcttgaaccccgggaggaagaggttgcagtgagctgagatcttgccacagcactccagcctgggtggcagagtgagactccagctcaaaaaaaagtccataggtattctcaagatatctgtactttatttttaagactcactaagtgatgtgttagcttttttctccagaatatttgcctccccaatatatggactatgatccttttgtttaccgtttatggtttcacaatgttacccttaaatctcctatggtgcctacacattatctttgcacataagaggttctctgcaaatattagttgcagtggaagaatccattgtatcactttaggtgagaaaagacaaaagggctgggcgcagaggctcatgcctgtaatcccaacattttgggaagctgaggcaggtggatcacctgaggtcaggaatttgagaccagcctgaccaacatggccaaaccccatctctactaaaaatacaaaattagccgggcatggtgg

SEQ ID NO: 727273 - DNA, 660 bp, Homo sapiens
tatgttgcagttgaagtgttacgggattttattttataagaacttaaatccaacacataaatctctctcagatcagccaggctttgtgttttttccttttgtaactcattctgagttgatctaagacaaacattcctaaactagctgggtagaaaggacactgtggtgtagcgggaaaagcccaagaaggcaaatcagggctcagttcyagattggacttggttgctaactagctttttatccacagtgagtcaagattctgggcctcactttcttggtttataaactaagagaattgcatgaaatgaactatagcactgctttcagctctcatctatttaggctcaagaccttttgccccttctttctaccattttgaataatggaatataaagtgttggaaagaatcctagcattggctgagtaaatgttagttaaatctgagttaaattgaatatagtcaacccactcaagttaatagaggagggaattacatgagtacagaaaaatcaagttacttgcttaggtcacacaactaattaatggcagaaacctgacgttctaatcacaaatcatgagttttttttctcagaaaaaactttggtgatcacggtgggtgtagaggaagcagtagttttcataaaggtgttaaattcttat

SEQ ID NO: 727274 - DNA, 533 bp, Homo sapiens
ttaggatacctcttgtgtggcctctatagtcacaaaccatacttaccttgataagagtagatgagaaccaagcactttgcaaaagtcagagtctggagtttaaccattattatctgggagttggtcaaatctcaataaaggtgacataccctcagaatctttgaattctacctcaagttttgccttctgtagtcccctcatttcagctctggattcttctgcctcctttaagacttatttcaacgtctctgacctgactatttttagtctagatagattaggatgagaggaaaagacaggcttaggacggrcaagtctgttcctagggattcttggctctttttattcctctagaggggaaatgtttcctaaaagatgacccaagaatcaagcttttttttctctgtgtcagctctccccaaaagaaaaatatctggcatctgtatcatacatcacactttattgatagcttttcacttacactaggacattttaatcatcacaatcattttataattgaggaagtggagcaa

SEQ ID NO: 727275 - DNA, 1319 bp, Homo sapiens
aattttttgtagagatggggtctcactatgttgcctaggctggtctcaaactcttgggctcaagcaatcctcccaacttggcctaccaaagtgctgggattacaggcgtgagccaccccacctggcctccttacaagtttttaagtgattagggggtcataccagagaagttaaatacagaaatgttctattatgccactcactcaaaagatagcctccagcaagctccactctgacttataatcaagaatcttgaggcaggaaaaaaatcatctgagcagrcaaatataactcttttgaagtctctattcctttccatacagaaagctgaagttgtctctaggccagatgatattgatttcaaattgtgtatctataaagtcactgatctaatcagcttggctctctgatttactctgtgggtcttcctgaatctagcagatgagaaacctttaacatcaacttacaacaaggcatgagtcccacagaagtcctcccagctggctctgactgtgcaatgcagtaattttgtacattttgatatcactccaagtattgaagtataaactgaaaagtgactgaggcaggtctcaaaacaaatacaagtttatttagccaaggttgaagacacacccaggaaaaaatataagcatacaggagcattggtgacctgtgctttttctaaacggggctttgggaacttcagtatttaaagaggaaagagcaatctggagggaaaaaaagagagggtcataaggcagatggctacgttcttgcaggctctgatcagtctcagtaaatctacattttacatgtaaaaagaggaatggaggaaaaagtaattacacattgtcttgtgctcagtaagtctgcattttacataagataaacatgtgaaaagagggagtagagtaaatgaagccatgacacaaggttgtgaaatgacatctgtctgtttgggaacaaaaacaaagcacattttgcatgcctcagttcccaagcttaacttccctttggcatagtgagtttggggtcctgagattctatttttcttcacagaaggaaaagatgaagtaccttcaacatactctgagggcaaagaagcacataatccctttggcaaaaatttctgtcaaaatggttgtgtctggctggtctgagtgcagtggtgtttacaactaattgatcacaaccagttacagatttcattgttccttccccactcctactgcttcacttgacttgccttaaaaaaaaataattagaaaaaaaaggttgtgttttttggtaaagttacatttttggtaagcctctatttt

SEQ ID NO: 727276 - DNA, 867 bp, Homo sapiens
ttttttgagatggagtttcgctcgtcagccaggctggagtacaatgatgtgatctcagttcactgcaacctccgcctcctggattgaagcaattcttctgcttcagcctcctgagtagctgggattacaagcaaccaccaccatgcccagctaatttttgtatttttagtagagacggggtttcaccacattggccaggctggtctcgaactcctgacctcaggtgatccacccacctcggcctcccaaaatgctgggattacaggtgtgagccactgcacccagtctagatttcttaaagatataaacagattataaayataaaacaaatgtcaatgacccataattgtattaaaatttaaaaacttagttttgttcccatagttactataaaaaggaaaaacccttagatagtcaaatttagcagaatttatttaagcaaggaaaaaaagaaaaattcatgattcggccagcttcagaaccagaacagtttcaaaaaaactctaccatttacattatctccttaactaatgggtagcaaatgttacaaggtaacatttactaagtggtaatagtaggaatatatagtagtatatatagtaggcgctgccacaccacgaaggttgagaatcacctaacagcactgcagctagtgctgcctgggcctctacacgctgctggaatatgatctcgtggatggttacatgtgcccctaatgagccacatttcatattagccaacaagaacactctaaagcaggtcgtagcacacaacccatgtgccacctctacaatagtcctgttgtggactgctccgtcccagttggacatggatgatggaagggtgccaagtgcaggttctgcactg

SEQ ID NO: 727277 - DNA, 664 bp, Homo sapiens
agcttcagtctttacgacctatattaggtgtaagtaaaggacaagctaatggctaatacttggtcttctttggataataaatggctagcctttgaattttgaattttttttctcaataggatttttcaaatgctcacatgataatgtacagtgaaaaaaactttggatccaaaggttccagtattgatgtattgggaattgttgctaatttaaaggagactggatatggagtgaagacacagtctattaatgtactgagtggagtgtaagtgaaataatccagttggaattttaaacatgsgttttaccttggtttgttttaaactggtaagagtctatcacagagtaggcattcaatacacaaatatctcaacagcttaacattaaatcagtcatttaatagttgctgtcatgatattttcgttaactctctttaaaaatcgttctcataccatctcttctttttacgtttggggtaggctttgggtatcatgatagaaatctacagatctgtttcccttgtcattctgcacagaaagatagtgaattttttaaatgatggagatcaaataataataatagtaatctaacataaacctgaggctgggtcaaagtcccagtagattttcctgtggtcctacacctgttccagtatatttcttca

SEQ ID NO: 727278 - DNA, 664 bp, Homo sapiens
agcttcagtctttacgacctatattaggtgtaagtaaaggacaagctaatggctaatacttggtcttctttggataataaatggctagcctttgaattttgaattttttttctcaataggatttttcaaatgctcacatgataatgtacagtgaaaaaaactttggatccaaaggttccagtattgatgtattgggaattgttgctaatttaaaggagactggatatggagtgaagacacagtctattaatgtactgagtggagtgtaagtgaaataatccagttggaattttaaacatgcgttttaccttggtttgttttaaactggtaagagtctatcacagagtaggcattcaatacacaaatatctcaacagcttaacattaaatcagtcatttaatagttgctgtcatgatattttcgttaactctctttaaaaatcgttctcataccatctcttctttttacgttyggggtaggctttgggtatcatgatagaaatctacagatctgtttcccttgtcattctgcacagaaagatagtgaattttttaaatgatggagatcaaataataataatagtaatctaacataaacctgaggctgggtcaaagtcccagtagattttcctgtggtcctacacctgttccagtatatttcttca

SEQ ID NO: 727279 - DNA, 624 bp, Homo sapiens
tccaaatatttttgaagaaagaactctgtttgccagaagcattgtgtttattttatagcaggccacctctaaaaatcagacttcttgaataggagtgctcaagttgcatattctgtgcatgtgtgtggtttttcccattgtagctgggttgtatatgatggagaaaatttcactggtaatcaatacgtgttggaagaaggccattatccttgtctgtctgcaatgggatgcccgcctggagcaactttcaagtctcttcgttttatagatgttgtaagtatgtcattgtgaatagtgttgcagaaatgtaygcctcatatagctgatggtcagagtgaggtaaccagccggtagaacctgctcttaaagttagttaagggcttggagatggaactgtccatttggctctgtgtacatctagtttattgattctaactggtacacgttttccaccaccctgttttactcacttaatcctcatatgcatatccctatggacctgagtgggagtctcttggactatatattaggagtagaattactggatttcacatgtaagaacaggcagtttcattcagtactgccagatcccaccacttgagactcccaccagcagtacacatt

SEQ ID NO: 727280 - DNA, 652 bp, Homo sapiens
gtggtgtgatcttggctcaatgcaacctctgcctcctgggttcaagcgattctcatgcctcagcctcctaagcagctgggactacaggcgtgcgccaccacgcccagctatttttaatttttttttgtatttgtagtagagacagggtttcaccatgttgcccaggccactctagaactcctgagcttaggcaatctgcccacctcggcctcccaaagtgctgggattacaggcatgagccactgcgcccagcctcagctgacagttcttaagaacctgcrtgtgccaagtactttataacagtcatgtgaggtgataattgttatcttcatttcacatttgaaaaaactgcagggtgaaaagggatttgccaacggtcacacatagctggtgggactagaagatgcctagtaatgtttgtgctctttctcttcttctattgcttgttctgttcctttgggctgtatttgactatcacatacacgcacacatgtgtgcacacacacgtaaacatgaacagggatgaacaaggcaggtcccctcagacacagaaagagctggaagcagagcctgctactaaggggtgcagggggaaggccgacaggtgtaaaagacaggaaatagaccatggagaccaaggagtatgagccat

SEQ ID NO: 727281 - DNA, 1530 bp, Homo sapiens
ttttctaaacacacagaggaaactaattttctcttacattacttctgaagaaggtagaataggaggtcaataatagctttgatcctaagtatttgtcttatttttttatcccaatttatagattagccaatatatactgtctagttaacaaaatgaaataatttgctctgaatagacttacatagaaagataacagaactagattgttgagtagaataaagcaaatagcaacacactgtttatcctgtgactctatgtatgtgttacaggcctaagaatgaatggcaacactactacaagttgtcaattcacaacatttgcctttagagactgaatttagaattggaggatggacacttttagtcttttattttatacacttcactatacataatggaattttagaaaaatatgcatttcttttttaattaaaacataaatagtagaagaattgaatctctaattatttctaatactatttttagactttgcctaatactgatgtacagagaaggctacacagataagtctatttatttcatccaaagaggatagaagattgtgacttttatcctgtttaacacaaagaggttctgaaaaaatcattctagaaatgaatgattgataaccaaggtggtggaatattaatgaggaataaagattcatgcagagaaaatatttgaaagtactactatgataaggaaagcttgaattgcacaaaagatgtaacaaaacgcagcaggtggtacagaaatcaggggaagtgattagagaggagactattggaatcttaagcacagggatctatgttaggtgttttaacacacattgtcacaattaaaggaattgctgaacatcaatcaaagagaattgaagacttacaagatttaattcatagtgaagcaggttgaaacatcattgcataayattattctaacagtgcttatcagactaagcgtaaacaaagaggaaagacatggaaggggtgatctggataaaaacagccatacaatataggacagcttgcaatggtaacttaaaggtaagagaggcctagaccactaaggcgccactgacctcagaaaagccatcaactggactcaattgtacatatgaaatgatgagaaatatcataagtggaaaagttgcagctagtgagaagttgccaaaaattggatctagtcattgagatatatttgtgatggattcaccttgactggttatactgatcagaaagtgatttccaagtagcaaagcagatcatggcttcaaaaaaataaatatattaataataatttcaaattgaggtcaacaaaaagattgttaattagaaagacatcccaatggcattaaaggattataaaaggatactataaataaaggactggtttcagaatatttaggaataaggaatccatatgacaatataaaatggcagcaaggactgtgctaagggagtattatagagcctccatctgatatagagagaggttgggagctttgacagagaagcggcaggaatgagaataa

SEQ ID NO: 727282 - DNA, 1530 bp, Homo sapiens
ttttctaaacacacagaggaaactaattttctcttacattacttctgaagaaggtagaataggaggtcaataatagctttgatcctaagtatttgtcttatttttttatcccaatttatagattagccaatatatactgtctagttaacaaaatgaaataatttgctctgaatagacttacatagaaagataacagaactagattgttgagtagaataaagcaaatagcaacacactgtttatcctgtgactctatgtatgtgttacaggcctaagaatgaatggcaacactactacaagttgtcaattcacaacatttgcctttagagactgaatttagaattggaggatggacacttttagtcttttattttatacacttcactatacataatggaattttagaaaaatatgcatttcttttttaattaaaacataaatagtagaagaattgaatctctaattatttctaatactatttttagactttgcctaatactgatgtacagagaaggctacacagataagtctatttatttcatccaaagaggatagaagattgtgacttttatcctgtttaacacaaagaggttctgaaaaaatcattctagaaatgaatgattgataaccaaggtggtggaatattaatgaggaataaagattcatgcagagaaaatatttgaaagtactactatgataaggaaagcttgaattgcacaaaagatgtaacaaaacgcagcaggtggtacagaaatcaggggaagtgattagagaggagactattggaatcttaagcacagggatctatgttaggtgttttaacacacattgtcacaattaaaggaattgctgaacatcaatcaaagagaattgaagacttacaagatttaattcatagtgaagcaggttgaaacatcattgcataacattattctaacagtgcttatcagactaagcgtaaacaaagaggaaagacatggaaggggtgatctggataaaaacagccatacaatataggacagcttgcaatggtaacttaaaggtaagagaggccyagaccactaaggcgccactgacctcagaaaagccatcaactggactcaattgtacatatgaaatgatgagaaatatcataagtggaaaagttgcagctagtgagaagttgccaaaaattggatctagtcattgagatatatttgtgatggattcaccttgactggttatactgatcagaaagtgatttccaagtagcaaagcagatcatggcttcaaaaaaataaatatattaataataatttcaaattgaggtcaacaaaaagattgttaattagaaagacatcccaatggcattaaaggattataaaaggatactataaataaaggactggtttcagaatatttaggaataaggaatccatatgacaatataaaatggcagcaaggactgtgctaagggagtattatagagcctccatctgatatagagagaggttgggagctttgacagagaagcggcaggaatgagaataa

SEQ ID NO: 727283 - DNA, 1530 bp, Homo sapiens
ttttctaaacacacagaggaaactaattttctcttacattacttctgaagaaggtagaataggaggtcaataatagctttgatcctaagtatttgtcttatttttttatcccaatttatagattagccaatatatactgtctagttaacaaaatgaaataatttgctctgaatagacttacatagaaagataacagaactagattgttgagtagaataaagcaaatagcaacacactgtttatcctgtgactctatgtatgtgttacaggcctaagaatgaatggcaacactactacaagttgtcaattcacaacatttgcctttagagactgaatttagaattggaggatggacacttttagtcttttattttatacacttcactatacataatggaattttagaaaaatatgcatttcttttttaattaaaacataaatagtagaagaattgaatctctaattatttctaatactatttttagactttgcctaatactgatgtacagagaaggctacacagataagtctatttatttcatccaaagaggatagaagattgtgacttttatcctgtttaacacaaagaggttctgaaaaaatcattctagaaatgaatgattgataaccaaggtggtggaatattaatgaggaataaagattcatgcagagaaaatatttgaaagtactactatgataaggaaagcttgaattgcacaaaagatgtaacaaaacgcagcaggtggtacagaaatcaggggaagtgattagagaggagactattggaatcttaagcacagggatctatgttaggtgttttaacacacattgtcacaattaaaggaattgctgaacatcaatcaaagagaattgaagacttacaagatttaattcatagtgaagcaggttgaaacatcattgcataacattattctaacagtgcttatcagactaagcgtaaacaaagaggaaagacatggaaggggtgatctggataaaaacagccatacaatataggacagcttgcaatggtaacttaaaggtaagagaggcctagaccactaaggcgccactgacctcagaaaagccatcaactggactcaattgtacatatgaaatgatgagaaatatcataagtggaaaagttgcagctagtgagaakttgccaaaaattggatctagtcattgagatatatttgtgatggattcaccttgactggttatactgatcagaaagtgatttccaagtagcaaagcagatcatggcttcaaaaaaataaatatattaataataatttcaaattgaggtcaacaaaaagattgttaattagaaagacatcccaatggcattaaaggattataaaaggatactataaataaaggactggtttcagaatatttaggaataaggaatccatatgacaatataaaatggcagcaaggactgtgctaagggagtattatagagcctccatctgatatagagagaggttgggagctttgacagagaagcggcaggaatgagaataa

SEQ ID NO: 727284 - DNA, 638 bp, Homo sapiens
aacaggtttggggaggaaggtgctgctccactgtgccctggggtagctgagggagcagctcatgtcatatccttcctttctttccctgcctctctccctcccttgcttccttcttttttcctccctcccccctctctctttttctctttccttttttttttttcagggtctcactctgtcacccaggctggagtgcagtggcgtgatctctattcactgctgccttgacctcctgggctcaagcaatcctctcacctcagcctcctgagtagctgggactacaggtgcacaccactatgcctggctaattgttttattttttaatagagacagagtctcgccatgtacctcaggctggtctcaaactcctgggctcaagcgatcctcccgccttggcctcccaaagtgttggggtaacaggcattgaacctgtaatcattctatgctgattttcttttctttcttttccttttctttctttccttccttcyttttttttttttttttgacagggtctcgctctgtcacccaggctggagtacagtggcacaatcttggctcactgcagcctctgcctcctgggttcaagcaattctcgtgccttagcctccaaagtagctgggatgacaggtgtgtgc

SEQ ID NO: 727285 - DNA, 2792 bp, Homo sapiens
gggctacactgtctggatttgtgtaattccctctgatgttcacacaatgacaaaatcacctaatgatgcatttctcaaaacatatcccattcttaagtgacacataactgaaataggcaaggccatgttccaataatactttatttataaaaacactggtgagccaggtttggcccacagaccatagtttgtgacccctgtttgagatttgcttcaaaacacactaatggcatctctatcacgtctaacttgtgccctacttccaccccagcgaattatcttgaggttggtacctaatactttagagatcactattctaaatgattcttgaaaatgaacatcactctatcctgctttagcatgcaatatatgaatcttttaatgttttagtttttgagggatgtacagggatcataaaacagtcttggacatgtttctatcaatgagataggtaacatagttatttctgataaaatgctttaaaccgctttttagtcacttgagaattgtcctctttcaatttcagtatacatagaactaatgtttcaaaaaaaggctttactgaggagcttgatttttgaaaagaattaattatttttgagatgatactatcattctacaaaacttcaagaagacaggaacttatgaagcaagtaatatctttgttcattaaagaaaaattagcagacaaatatgcagtgaatatattaatttagctctgcttaactgacagacacatcagaaaattagtgttatagccatatctgatgcatttggtgctctagaaaaagcctactttctactcaaccatcaaatcatactgtttaacttcaaaaactgtttccattgcaacatcaaagggcattttaaggcattttgagctcttcttattaaagcctgcacatctgaaatgcttttgttccatcctggcattttaaagtcacttcctttcctgtggtttggaagtgaagggtgaaaattcacttcctcttcactcatgctgtcccctcttcacgctgcggttttctgtctgagtacaagacacctttgtgaactcagagtaccataggtaaaattactggagcctttcactccatcctgtcttccatcttcccacctctttggtaaagcaacatttatttttaaatgcagcatttattttcagctttcctttgctgtctagaacttacagcagtttaaaatcagagccatagcatttttgctacagttttaatttaaatcaacaccttgctaataaaatcatgaacagtagtaatattttcttaaagagcgacccctttatctaaagacaccaacactttacagacagcatcacaaaaacctcatgttactatgaaataagagattgtgattatctacatttcactaagataaagccaatataaattggtttcgattatatggcatatcttcttgcttagaaacccaaattttggagaatccatatgcattttttcaaacagacatatttaaagcaacacatatattttgaatcctgatttgaaccaagaaaatttgaacttgtgaagtatgaaaaatttagcatatgcttagctatttgaaatcctctatataaaaaaagatttttaataatcacaacataatttttaagatagaatttggataacttagtgcttaaagtgtatggttgtctgacagcaagtttcacagaacagatggcatggatcagcatggaagtatctgatggaggtacactcaagggaaaagaaagaaaaatactccataatcaatcacagtgagcagcagaggactacaatgctgagttttacgtttttctatacatatagttggattctggtcttttatttcccatgtggaggtgtttaggatggaggagcagttaaaattgaagaagtcaaaagtaacatagaaaataggcttctacaattgctcataatggaagagagaaagaagacaatatattcagttgaccctttagcaggaaatcaacctctttcttccaaaattgaagtgattctaaaggaaatgataacaagaaacatttaagtctttagagccctttgatagtgagtatttcattcaaccattgcagtatcattcttaacaattagatatggcaacaaccgaagtgtctgttgatggataaatgaataaataaaacgtgttaaacaatgaaatattattcagccttaaaaaagaaagaaatcctgccatttccaataacatgaatgaattccaaatatattatgccaagtgaaatgagccagtcacaaaaggacaaatattgcgtgatctcactttagtggaatctaaaatagtcagaattacagaagcaaagagtagaatgatggttgccaggggttggaatggacttttggttgaaatggatgttttgttgttttgaatctattattgtcttaataagggatttaagtgaaaaggaaaaatggtgtttaaagggtagaaacattcagttatcaaaggaataagttctggagagctaatgtatagcatggtgactacagttaataatattttactttttacttgaaatttgctgagaatagattttatgtgtcctcatctcttctcccatatacacacacagagtaactagtacattaatagttacattgattaatttaactgtggtaatcattayacaatgtacacatacatcaaatcatcacattttacaccttaaataggtataatttttgtcaattatactgcaataaagatgaaagcacttggaaaaaatttaaagaaattatacttttaaaaaaatc

SEQ ID NO: 727286 - DNA, 1730 bp, Homo sapiens
ttttttttttttttttttgagaaggagtctcgctctacgcccagactggagtacagtggtgcaatcttggctcactgcaactctaccttccaggttcaagccattctcctgcctcagcctcccgagtagctggggctacaggtgcgcaccaccacgcccggctaatttttttgtagttttagtagagacggggtttcactgtgttgaccaggatggtctcaatctcctggcctcgtgatctgcccacctcagcctccccaagtgctgggattacaggtgtgagccaccacaccctacatttattttcatgctgtttcagcttcattatgaaatgcctgggcagaaaacatttttgtttcattaataacctctgggtttgtggctctaataaatagatttcttggattttttctcgtgtagatttcactagttttcaagcaagataatttttgaaaaacaaaatataggtttttgcatagccctactatctatcgcatgtgaaggtgacagcattgtattgattgccattgacaaatttgctgtacaacatgtaagtaccatagacaaagttaggaccgtaggcaaatcttaccaggtgtgacaggcaccttgctatccacggaagtggtgtccctcaccgagggcctcttcttgtgcatctccttttcccttcaatatttttgttcagtgacttcttggtcactcttattaggggaccctttcccttattgcacagtattcggaatactagtttgarcacaactctggttcaaatggaaatcctgtatcttagtccattagggctactataacagaaatactatagattggcctgcatataaacaacagaaatttatttcttacaattctagagactgggaagtccaaggtcaggcaccaactgaatcagtgtctggtgcagcttcctggttcagagatggcgccttcttgttgtatcctcatatagtggaagggagaggacaattccttgtctcttttataagacactaatcccatgcatgagcccttgtgacccaatcacctttcaaaggcctcacctccaaatactatcacattggggattaaatttcaacatgagtttttggggtacacacacattcagtccatggctccctgctacatatattatacacattattctgtcaccatatgcagtggaaatatgtactaggtgattgagtatgggagacctgagctcttaaagagcattggtaagaatagattgctggctttgctatttctctacaaatagcagtctttacaaccttcttggttatctgtgtctagagaggcagaaagtggtcttgaccctctttagaaggatggtttcccagcatcaaccacttataattgtaatgaggcacttagtaccccacctgcagtcttaaatactaaaggtttccagcttcttccctagtaaacgtgaatcattatttactttgtgtgactaaaacatccctaattcattaaatgttgtactaagcttgttaccttttaataactacattcaaaccctctgtgaaagataaccttttcccttttgaagacatgtgttgaatttttacggtagactcccctttcattaaaaaatgatctgggccaggtgcagtggctcatgcctgtaatcccagcactttgggaggccaaggcaggtggatcacctgaggtcaggagttcgagaccagcctggccaacatagtgaaaccccg

SEQ ID NO: 727287 - DNA, 1730 bp, Homo sapiens
ttttttttttttttttttgagaaggagtctcgctctacgcccagactggagtacagtggtgcaatcttggctcactgcaactctaccttccaggttcaagccattctcctgcctcagcctcccgagtagctggggctacaggtgcgcaccaccacgcccggctaatttttttgtagttttagtagagacggggtttcactgtgttgaccaggatggtctcaatctcctggcctcgtgatctgcccacctcagcctccccaagtgctgggattacaggtgtgagccaccacaccctacatttattttcatgctgtttcagcttcattatgaaatgcctgggcagaaaacatttttgtttcattaataacctctgggtttgtggctctaataaatagatttcttggattttttctcgtgtagatttcactagttttcaagcaagataatttttgaaaaacaaaatataggtttttgcatagccctactatctatcgcatgtgaaggtgacagcattgtattgattgccattgacaaatttgctgtacaacatgtaagtaccatagacaaagttaggaccgtaggcaaatcttaccaggtgtgacaggcaccttgctatccacggaagtggtgtccctcaccgagggcctcttcttgtgcatctccttttcccttcaatatttttgttcagtgacttcttggtcactcttattaggggaccctttcccttattgcacagtattcggaatactagtttgagcacaactctggttcaaatggaaatcctgtatcttagtccattagggctactataacagaaatactatagattggcctgcatataaacaacagaaatttatttcttacaattctagagrctgggaagtccaaggtcaggcaccaactgaatcagtgtctggtgcagcttcctggttcagagatggcgccttcttgttgtatcctcatatagtggaagggagaggacaattccttgtctcttttataagacactaatcccatgcatgagcccttgtgacccaatcacctttcaaaggcctcacctccaaatactatcacattggggattaaatttcaacatgagtttttggggtacacacacattcagtccatggctccctgctacatatattatacacattattctgtcaccatatgcagtggaaatatgtactaggtgattgagtatgggagacctgagctcttaaagagcattggtaagaatagattgctggctttgctatttctctacaaatagcagtctttacaaccttcttggttatctgtgtctagagaggcagaaagtggtcttgaccctctttagaaggatggtttcccagcatcaaccacttataattgtaatgaggcacttagtaccccacctgcagtcttaaatactaaaggtttccagcttcttccctagtaaacgtgaatcattatttactttgtgtgactaaaacatccctaattcattaaatgttgtactaagcttgttaccttttaataactacattcaaaccctctgtgaaagataaccttttcccttttgaagacatgtgttgaatttttacggtagactcccctttcattaaaaaatgatctgggccaggtgcagtggctcatgcctgtaatcccagcactttgggaggccaaggcaggtggatcacctgaggtcaggagttcgagaccagcctggccaacatagtgaaaccccg

SEQ ID NO: 727288 - DNA, 1730 bp, Homo sapiens
ttttttttttttttttttgagaaggagtctcgctctacgcccagactggagtacagtggtgcaatcttggctcactgcaactctaccttccaggttcaagccattctcctgcctcagcctcccgagtagctggggctacaggtgcgcaccaccacgcccggctaatttttttgtagttttagtagagacggggtttcactgtgttgaccaggatggtctcaatctcctggcctcgtgatctgcccacctcagcctccccaagtgctgggattacaggtgtgagccaccacaccctacatttattttcatgctgtttcagcttcattatgaaatgcctgggcagaaaacatttttgtttcattaataacctctgggtttgtggctctaataaatagatttcttggattttttctcgtgtagatttcactagttttcaagcaagataatttttgaaaaacaaaatataggtttttgcatagccctactatctatcgcatgtgaaggtgacagcattgtattgattgccattgacaaatttgctgtacaacatgtaagtaccatagacaaagttaggaccgtaggcaaatcttaccaggtgtgacaggcaccttgctatccacggaagtggtgtccctcaccgagggcctcttcttgtgcatctccttttcccttcaatatttttgttcagtgacttcttggtcactcttattaggggaccctttcccttattgcacagtattcggaatactagtttgagcacaactctggttcaaatggaaatcctgtatcttagtccattagggctactataacagaaatactatagattggcctgcatataaacaacagaaatttatttcttacaattctagagactgggaagtccaaggtcaggcaccaactgaatcagtgtctggtgcagcttcctggttcagagatggcgccttcttgttgtatcctcatatagtggaagggagaggacaattccttgtctcttttatragacactaatcccatgcatgagcccttgtgacccaatcacctttcaaaggcctcacctccaaatactatcacattggggattaaatttcaacatgagtttttggggtacacacacattcagtccatggctccctgctacatatattatacacattattctgtcaccatatgcagtggaaatatgtactaggtgattgagtatgggagacctgagctcttaaagagcattggtaagaatagattgctggctttgctatttctctacaaatagcagtctttacaaccttcttggttatctgtgtctagagaggcagaaagtggtcttgaccctctttagaaggatggtttcccagcatcaaccacttataattgtaatgaggcacttagtaccccacctgcagtcttaaatactaaaggtttccagcttcttccctagtaaacgtgaatcattatttactttgtgtgactaaaacatccctaattcattaaatgttgtactaagcttgttaccttttaataactacattcaaaccctctgtgaaagataaccttttcccttttgaagacatgtgttgaatttttacggtagactcccctttcattaaaaaatgatctgggccaggtgcagtggctcatgcctgtaatcccagcactttgggaggccaaggcaggtggatcacctgaggtcaggagttcgagaccagcctggccaacatagtgaaaccccg

SEQ ID NO: 727289 - DNA, 1488 bp, Homo sapiens
tgcctttaatcccagcactttgggaggctgaggcaggcggatcacttgaggccatgagtttgagaccagcctgaccaacacagagaaatcccgtctctactaaaaacacaaaaattagccagacatggtggcacatgcctgtaatcccagctactcaggagatgaggcagcagaattgcttgaacccaggaggcggaggttgcagtgagcgtagatcctgcaactgcactccagcctgggcgacagagagagtaaaaaaaaaaggaactcagaattctgattttattgtagacctaaccagagggataaacgatgtctttgtggctcaaaaacattgaaacttcatgtaatagcctaagaaaatacactgggaattgagacgaaactgatggaacattcttctgccttaaatgtcctgtgagaggtttccatgaaagatgatatatacattgcaaagagctacaatgagaattgaggattccatatcctggcacccccatctttgtccatcagaagcagagttagaatgtaatgcaaaagcaagaagattgcatcagtacaaaatgggaccaaactgtaccctttaggattctctatcattgctaacagtgggtcacaaatctggtttcaatcaacttatcagctattgccaagaaatttagaccctgtccctatagcacattttagactacattttgcttgactttctgtatgggtagatttgattccaaaaatatattttaagatcatcagaaacaaagaagctgtttaaataataggtgacttgttttaatgattaacttcgctttcttcgaggaaaggaatgagcagagcgaacaaaacagcagagagatattgccaaataactgtgccctgacatgtccacacctggcaggaggggcacaggaggcaagttcagggcttctgtttctgacagagagcaccctcggcattgggagctgggttgtgatgttccagagacttactctgtacctggcactatgtctgtagttaggctccaagatcctgacactgtgattctcggagaggcatgaataactgagacattttctacttaattatccctttcccatttttaataaacctatctctaatatttatattttaagctgygaaatataattcagagtaaaatataaagaactatgaataagtaaagcagtatcggccagatagtattggatatctgttctcctgtggtcttcaaccattgtcaatcactatttaatttaaccttggcacaacttctgtgtttatatgaaataaatcaatttgactttctcaacctagagataggtctttcctgcatcttttcaatgactgtagcacacagcaacttctaccaactttttatccaaggccttcttagacatcctctggttagacttttaccttttgtttaaaagaacaatatcattatttacaacttagagggaaaggagcattacgagataatggaaaggacat

SEQ ID NO: 727290 - DNA, 1549 bp, Homo sapiens
ggtgaatcacttgaggtcaggaatttgagaccagcctggccaacatggtcaaaccccatctctactaaaaatacaaaaaaaattagctgggcatggtgacaggtgcctgtaatcccagctacttgggaggctgaggcaggagaatcactggaacctgaaaggtggaggttgcagtgagccaagattgtgacactgcactccaacctgggtgacaagagtaagactgtgtctcaaaaaaaaaaaaaaaaagtaaataaatatacatccagttaagcatgtaatgtactgatatgggggtaaatactaaaggasttgaaagtgattgtctctgtagagtgggaaattaggagcaaggagatgggagagaatacttgtttttctttatcaagcttgctgtactattaacctgttaaaactatctatatgcattgctttgttaaatacaagaactcaatgaaaaacaatgttagcaatgtggaaaaggcatatggtataaaattgtatccatcttatgaatattcactaaataaaagaacatttaaatataaaaaagttggttataaactgtagtggcatttaaaatgggcattttggtgccttcggtaaggatctgccactttgaactactgcaaattaaatagcctttttttttttttttttttttgagatgtagtctcactctgtcgcccaggctagagtgcagtgatgcaatcttggctcactgcaacctctgactcccgggttcaattgattctcctgcctcagcctcccaagtagctgggattacaggcgtgccccaccacaccaggctaattttgtatttttagtagagacagggcttctccatgttggtcaggctggtcttgaactcctgacctcaggtgatcctcctgcctcggcctcccaaagtgctgggattacaggcatgagccactgcactgggccaacaagccactttgaagaataatttaccacatcacacctttattatcaaatgtcggcaaaagaatcacatcatgttcctattttatttaacagttcatgaaataaaagctcaatgtatcaatttttaaaagcaggataatataatttgtctttttgtcaattttgagtaaagtaagtaaaatcttaaaaattctccactacacatgaattaattcaataatagaagaaaataaaataattaaaataaagtaaaatagacatttttactgcttttatttcaaatgatttgatgccactgcttttcttattgtatttccagaaatgcaagtagctccatttagcacttggctgatccatactatatattttatttcaaagactagaaaaaggaggcctagaaaagttaatggtcaaaggtctcccagtagcatggatgagatgtagaacaacatggcttcctggacaagaacagaacaacatttctaaactttaaactcaacgagaaaaacatagttgcctctgttcaaacatggattaactgcactttcaggcaaaaactcagttgagccgcttcaattacacttgacaaaaggttcagttttcc

SEQ ID NO: 727291 - DNA, 2969 bp, Homo sapiens
ctacaccatttttaaaaattagaaccaaaagtgagtcattttttaaaatccccttgtccaccctctgattctaactgcgggcccagccagcgtgccattcccaataaataatacacctgtgatggctttttcttctgtttttagctcttgctgcatcctgcagaggggaaaaaagcctagtttgaaacgctgtcagtcatgcctttggtggcctcagcttctctagttctcttcttattttctccctaagtgctcacgacccttcttccccacccgcgctgcgctcccttgccctccaggctattgactgctccctctctgccttcgattttatttcttcctgcatatatccttaaaatccagaggcgatttcctggacaaattagaagatggcctggaccttaagtgctccagtgtctctttaacatgattgatatcacaagtgtccagagagcggaacctaaattagagtctccaccaaggagcccagcgcttttgacacaggcaggcagcctgggaagggtctgcagcactgggtgcctgggacctccttgctggcctcttgccggtcctcactgcctgggaggactgtgtaacagcctttgcctgtttaatgggttaatgagtactctagtggaggcagaggacagctgctgtttctccctatgtgcctgtgtttctgtgcacgtctgtgcctgtctgcatgcaggcacctgaggcctagagcagcctgtggtttctgcccacatgcacctccaaagagaaacagccttcccaaggcgggagcagtctgttgttgaggaagtgcctgccaggggttggctaaggactccctcttcctgatggtccctaaggttttctactacagagagaggctggagcacccccagaccacctcctcattaccaccaggccacagggcatggcccttgtccctggtcatcagccttgtgacactgatgcacgggaccctctgggggatgcagaagcctgcccggtcaggcaagagtaggtggggtgttttcttgaaaggccttcttcctcttttccctatcacatggcagaagtcaggctgcagaagaggaaagactggctggcccgagcatcagcagtggctgagcctctgatcagctcatcctcagggagcttggggtcactcgtgcatggatccgtgaggttccctgtttctctgaccccttggtttctgagcccttactctgcctattctggttacagcctgagagtacatgaggggaataaaggggataagaatcagagcagtcagcttgccccttgctaggggaccttgcgaaggcttggccgaggcagggtataaaggtaggtagaaatgaggtttccatcttccttgctcaccctgcctggcagaaagactctggattcaggagagctggcttctgtttctgactgtgtttcaaacttgctgggtgacttgagaccatgtcctcctttgaggaatgaagatatgagaccgtagattgggacccagaaacttttcccgcaaagggccagatggttcgtattttaggctttgtgggccccacagtctctgtttgctactcagccctgcccttgcagagtgaaagctgcccttgacaacatgtaaacaaatgggctgaccgaaggccgaccgcgttccagtgttcacacaaaggaagagggcagatttggcccgggggtaacccgctgctaacctctggactgggaacactcacttacagctctttcccagttctgtgatctattatagtggtacctaccctgctgaatttgtcttcatatcactgaccactgcctggcctattatctatttgtttatgcatttgctagccatctctttgactagatgggcagttccataaaggcaggaacttgagctgaatctcccatgtctacaacatctagcgagctcagtaaatatttgcagaaggatgaatccatctctgagtatttgtggagaggagacagggacaggaggaagaaccgccatcgctggattgtgcaccgtgatcccgcagtgcacctccaccacagcctgcacacccggacctgcctgggccccagcctccccccatccccattcatactccagctcacccctgtggaggcttgagcacatcaagctcattcccgactcagggccaaccgtacgctgttccctctgtccaggctctaggttagccaattatttgtattttagttttattgcatttatcctaatttgcagtcttttttccccccacttgctgttgactctttttttttctttttttttttttttgtgcctccctccctagaacactggcattcccagcccctagaacacattgagcacatacaagctgcttggccatcatttgttgaatgagtgaatgagctctagaaggtcaactgcctttcacctttagtgagtgaatagatgaatgaataaattaaccactgcyacctgcttcttcccatctgctccctccacccatttctgccaggtgattccttctacacccagcactgccccccatactgtttggcgttgagaagcccccagagctccccagtaccttccaaaacaaaacccctctttaggcagctgcctgagaccacccgcgaatcggccctcagccacccttgcctccacgcgccccatcatttctccaagtggagcccccaaggtttccggcaaaggagccaagcgaggggacaatgcagcaaggtgcaggaggggcctggaagcgaggctgcaaggaggaggggcgtggcagtcacagggaggctgatttataaggcgcagaggctgagggtggccaggcccagggaggaacttgagcaaagcgtggaggggatgccctggggagaggctagaaccctaggggagactgggtggacacgtgagccatagtcaggtgatgtggagacggggccagtagatgtgattgactggggtgagggtgaag

SEQ ID NO: 727292 - DNA, 2969 bp, Homo sapiens
ctacaccatttttaaaaattagaaccaaaagtgagtcattttttaaaatccccttgtccaccctctgattctaactgcgggcccagccagcgtgccattcccaataaataatacacctgtgatggctttttcttctgtttttagctcttgctgcatcctgcagaggggaaaaaagcctagtttgaaacgctgtcagtcatgcctttggtggcctcagcttctctagttctcttcttattttctccctaagtgctcacgacccttcttccccacccgcgctgcgctcccttgccctccaggctattgactgctccctctctgccttcgattttatttcttcctgcatatatccttaaaatccagaggcgatttcctggacaaattagaagatggcctggaccttaagtgctccagtgtctctttaacatgattgatatcacaagtgtccagagagcggaacctaaattagagtctccaccaaggagcccagcgcttttgacacaggcaggcagcctgggaagggtctgcagcactgggtgcctgggacctccttgctggcctcttgccggtcctcactgcctgggaggactgtgtaacagcctttgcctgtttaatgggttaatgagtactctagtggaggcagaggacagctgctgtttctccctatgtgcctgtgtttctgtgcacgtctgtgcctgtctgcatgcaggcacctgaggcctagagcagcctgtggtttctgcccacatgcacctccaaagagaaacagccttcccaaggcgggagcagtctgttgttgaggaagtgcctgccaggggttggctaaggactccctcttcctgatggtccctaaggttttctactacagagagaggctggagcacccccagaccacctcctcattaccaccaggccacagggcatggcccttgtccctggtcatcagccttgtgacactgatgcacgggaccctctgggggatgcagaagcctgcccggtcaggcaagagtaggtggggtgttttcttgaaaggccttcttcctcttttccctatcacatggcagaagtcaggctgcagaagaggaaagactggctggcccgagcatcagcagtggctgagcctctgatcagctcatcctcagggagcttggggtcactcgtgcatggatccgtgaggttccctgtttctctgaccccttggtttctgagcccttactctgcctattctggttacagcctgagagtacatgaggggaataaaggggataagaatcagagcagtcagcttgccccttgctaggggaccttgcgaaggcttggccgaggcagggtataaaggtaggtagaaatgaggtttccatcttccttgctcaccctgcctggcagaaagactctggattcaggagagctggcttctgtttctgactgtgtttcaaacttgctgggtgacttgagaccatgtcctcctttgaggaatgaagatatgagaccgtagattgggacccagaaacttttcccgcaaagggccagatggttcgtattttaggctttgtgggccccacagtctctgtttgctactcagccctgcccttgcagagtgaaagctgcccttgacaacatgtaaacaaatgggctgaccgaaggccgaccgcgttccagtgttcacacaaaggaagagggcagatttggcccgggggtaacccgctgctaacctctggactgggaacactcacttacagctctttcccagttctgtgatctattatagtggtacctaccctgctgaatttgtcttcatatcactgaccactgcctggcctattatctatttgtttatgcatttgctagccatctctttgactagatgggcagttccataaaggcaggaacttgagctgaatctcccatgtctacaacatctagcgagctcagtaaatatttgcagaaggatgaatccatctctgagtatttgtggagaggagacagggacaggaggaagaaccgccatcgctggattgtgcaccgtgatcccgcagtgcacctccaccacagcctgcacacccggacctgcctgggccccagcctccccccatccccattcatactccagctcacccctgtggaggcttgagcacatcaagctcattcccgactcagggccaaccgtacgctgttccctctgtccaggctctaggttagccaattatttgtattttagttttattgcatttatcctaatttgcagtcttttttccccccacttgctgttgactctttttttttctttttttttttttttgtgcctccctccctagaacactggcattcccagcccctagaacacattgagcacatacaagctgcttggccatcatttgttgaatgagtgaatgagctctagaaggtcaactgcctttcacctttagtgagtgaatagatgaatgaataaattaaccactgctacctgcttcttcccatctgctccctccacccatttctgccaggtgattccttctacrcccagcactgccccccatactgtttggcgttgagaagcccccagagctccccagtaccttccaaaacaaaacccctctttaggcagctgcctgagaccacccgcgaatcggccctcagccacccttgcctccacgcgccccatcatttctccaagtggagcccccaaggtttccggcaaaggagccaagcgaggggacaatgcagcaaggtgcaggaggggcctggaagcgaggctgcaaggaggaggggcgtggcagtcacagggaggctgatttataaggcgcagaggctgagggtggccaggcccagggaggaacttgagcaaagcgtggaggggatgccctggggagaggctagaaccctaggggagactgggtggacacgtgagccatagtcaggtgatgtggagacggggccagtagatgtgattgactggggtgagggtgaag

SEQ ID NO: 727293 - DNA, 2969 bp, Homo sapiens
ctacaccatttttaaaaattagaaccaaaagtgagtcattttttaaaatccccttgtccaccctctgattctaactgcgggcccagccagcgtgccattcccaataaataatacacctgtgatggctttttcttctgtttttagctcttgctgcatcctgcagaggggaaaaaagcctagtttgaaacgctgtcagtcatgcctttggtggcctcagcttctctagttctcttcttattttctccctaagtgctcacgacccttcttccccacccgcgctgcgctcccttgccctccaggctattgactgctccctctctgccttcgattttatttcttcctgcatatatccttaaaatccagaggcgatttcctggacaaattagaagatggcctggaccttaagtgctccagtgtctctttaacatgattgatatcacaagtgtccagagagcggaacctaaattagagtctccaccaaggagcccagcgcttttgacacaggcaggcagcctgggaagggtctgcagcactgggtgcctgggacctccttgctggcctcttgccggtcctcactgcctgggaggactgtgtaacagcctttgcctgtttaatgggttaatgagtactctagtggaggcagaggacagctgctgtttctccctatgtgcctgtgtttctgtgcacgtctgtgcctgtctgcatgcaggcacctgaggcctagagcagcctgtggtttctgcccacatgcacctccaaagagaaacagccttcccaaggcgggagcagtctgttgttgaggaagtgcctgccaggggttggctaaggactccctcttcctgatggtccctaaggttttctactacagagagaggctggagcacccccagaccacctcctcattaccaccaggccacagggcatggcccttgtccctggtcatcagccttgtgacactgatgcacgggaccctctgggggatgcagaagcctgcccggtcaggcaagagtaggtggggtgttttcttgaaaggccttcttcctcttttccctatcacatggcagaagtcaggctgcagaagaggaaagactggctggcccgagcatcagcagtggctgagcctctgatcagctcatcctcagggagcttggggtcactcgtgcatggatccgtgaggttccctgtttctctgaccccttggtttctgagcccttactctgcctattctggttacagcctgagagtacatgaggggaataaaggggataagaatcagagcagtcagcttgccccttgctaggggaccttgcgaaggcttggccgaggcagggtataaaggtaggtagaaatgaggtttccatcttccttgctcaccctgcctggcagaaagactctggattcaggagagctggcttctgtttctgactgtgtttcaaacttgctgggtgacttgagaccatgtcctcctttgaggaatgaagatatgagaccgtagattgggacccagaaacttttcccgcaaagggccagatggttcgtattttaggctttgtgggccccacagtctctgtttgctactcagccctgcccttgcagagtgaaagctgcccttgacaacatgtaaacaaatgggctgaccgaaggccgaccgcgttccagtgttcacacaaaggaagagggcagatttggcccgggggtaacccgctgctaacctctggactgggaacactcacttacagctctttcccagttctgtgatctattatagtggtacctaccctgctgaatttgtcttcatatcactgaccactgcctggcctattatctatttgtttatgcatttgctagccatctctttgactagatgggcagttccataaaggcaggaacttgagctgaatctcccatgtctacaacatctagcgagctcagtaaatatttgcagaaggatgaatccatctctgagtatttgtggagaggagacagggacaggaggaagaaccgccatcgctggattgtgcaccgtgatcccgcagtgcacctccaccacagcctgcacacccggacctgcctgggccccagcctccccccatccccattcatactccagctcacccctgtggaggcttgagcacatcaagctcattcccgactcagggccaaccgtacgctgttccctctgtccaggctctaggttagccaattatttgtattttagttttattgcatttatcctaatttgcagtcttttttccccccacttgctgttgactctttttttttctttttttttttttttgtgcctccctccctagaacactggcattcccagcccctagaacacattgagcacatacaagctgcttggccatcatttgttgaatgagtgaatgagctctagaaggtcaactgcctttcacctttagtgagtgaatagatgaatgaataaattaaccactgctacctgcttcttcccatctgctccctccacccatttctgccaggtgattccttctacacccagcactgccccccatactgtttggcgttgagaagcccccagagctccccagtaccttccaaaacaaaacccctctttaggcagctgcctgagaccacccgcgaatcggccctcagccacccttgcctccacgcgccccatcatttctccaagtggagcccccaaggtttccggcaaaggagccaagcgaggggacaatgcagcaaggtgcaggaggggcctggaagcgaggctgcaaggaggaggggcgtggcagtcacagggaggctgatttataaggcgcagaggctgagggtggccaggcccagggaggarcttgagcaaagcgtggaggggatgccctggggagaggctagaaccctaggggagactgggtggacacgtgagccatagtcaggtgatgtggagacggggccagtagatgtgattgactggggtgagggtgaag

SEQ ID NO: 727294 - DNA, 597 bp, Homo sapiens
tgtctcccccaaagggagtgagttctcctctagagtttgctggagaaggggccagcagagcttgagtgggtgggatccccaktggagaaccccatctcaggctgacgtggctggggcctgggactctcagcggtagcaatttaaagaggacagacacacccacacacatgctggactccactgtcgttacaactttcttggtcacagaagcgcttacctgctttcccagggctgtccacaggaaggacttccatcacttcaactctaggataagatggactgttctggagcagggaggcctataggaaaatcacagtccctcgccccaccctggtgtgcatgttgctttacagtttacaaaacccttttatatgtgcagtctcactttgtccttgtaagaactcaccgagaaggtggaagctctcacttagaaggctgaagagacaggactgggacccaggtttgtattagtcagggttctctagagggaaagaactaatatatatataaaggagagtttagtaagtattaactcacacgatcacaaggtcccacaataggccttctgctggctgaggagcaaggagagccagtccg

SEQ ID NO: 727295 - DNA, 645 bp, Homo sapiens
tgtaagttcctatattcagtcaccaagttttcaacaccaggttctggccaaagtgccgaaaatatgaagatgaacaagtctgacaaagaaaatctggctagggtggtaaaattttctagggaagtcacaagggggagggggcgtgtaaaacaggtggaagataagggttatgtcatgaagtaggtttattcaggtccagtgtagcctctaattccaagtttctcgtsataagggctattttctaactgttgtatagagacgatgtcccttcagaagcaactttattattgctgcatgcaggaagaaatagatcagctagccctttctgaaactacaagaatcttggtttactagcaaaattatatccaagtaaaacactatgccacttaccagtacttacaaatctatgtgtctcaattttattcatttattttttcaatgagtgtttattgagcatctgcttcttgctgtacactgtgctggcagctagggatacagatgtaagcaaaaaccaaacagcatcacacccatccttatgggacttagagtggggagacacatcaaataaacacacaagtcagcgtattaattataacagagaaaccagaaattcgatctaaacagggggaaggagtcttccttgca

SEQ ID NO: 727296 - DNA, 645 bp, Homo sapiens
tgtaagttcctatattcagtcaccaagttttcaacaccaggttctggccaaagtgccgaaaatatgaagatgaacaagtctgacaaagaaaatctggctagggtggtaaaattttctagggaagtcacaagggggagggggcgtgtaaaacaggtggaagataagggttatgtcatgaagtaggtttattcaggtccagtgtagcctctaattccaagtttctcgtcataagggctattttctaactgttgtatagagacgatgtcccttcagaagcaactttattattgcygcatgcaggaagaaatagatcagctagccctttctgaaactacaagaatcttggtttactagcaaaattatatccaagtaaaacactatgccacttaccagtacttacaaatctatgtgtctcaattttattcatttattttttcaatgagtgtttattgagcatctgcttcttgctgtacactgtgctggcagctagggatacagatgtaagcaaaaaccaaacagcatcacacccatccttatgggacttagagtggggagacacatcaaataaacacacaagtcagcgtattaattataacagagaaaccagaaattcgatctaaacagggggaaggagtcttccttgca

SEQ ID NO: 727297 - DNA, 636 bp, Homo sapiens
cagaagcctctagcaaatctttccttgagtctcattgccctgaacttctagttttggaaaagaggataggcttactctgactggggatcagctctcaaaccttacggctggagtacaatggggagagtgaaattggggtgacaatcatggtgtccactacagagattctgttgtcttacaccaggttagggcagtattggaacttcttttacagtcttagctatataactataattctcttcagcgccacacagcaaaacaacttttgattgatgagccttcctactgctgatctgtaaacagtcccagcttctttgttttatttgtaccagtttatctggattcactattgctccccaccaatgccctctttacttgtgaataactgagtgggaagatatattctctagttcttgtcttagaaaagagaggccggatcttcattcaaccctacagctgcatgaaagaagacattaattaatgtgctaaagttgacgasctactgaagtgaccattacaggtggtggtgttgattctttatcctcctgaccatgggaaccttcactgaccttggtgcatctggaggggtcaggaagtgactctagggggttaatgcatgttgtcactttgatgctg

SEQ ID NO: 727298 - DNA, 796 bp, Homo sapiens
ctacctaaggaaaatatgtgagaaaggacaccaagcaaagaagttggaacagagacttaaatataagggaagatgaagaagagaggaaactatgtttagaaataagaaaggaagcttaactgaagatataaaagaagccgtagatacaatgatacaatatagagaatactatgtgcaactttttaacaataaatttgaatacctagaggaaatagatgttttcctagtaaaatgcaaatcaaagttggcataagaagaaatagagaacttgataggtcaattcatgtagcagacattgaaagtataaaaaagatcactatttaagaaggacagcagaatcagaaagtttctcagctgaatgttatctaacttttaaaagaacagttaattctagtgttttgtaaaactatttcatatatagaaaaagatgagaagtagccagattcattttataaacccaattcattttatgagttcagcattaatatgtaaggttgacaaatagtgaaaaaaaaggaaattatagccaactccaattatgaatatagaggttgccaatatgagggttaggaagagaaggataaggaactttgagagtatgaaatcctgaaaatratagtagtttctttctgctcttcatcagtcagaactagatttgctagcgatatatgacagaatagccaaaattacagtggcttaaatgtgacaattttaactttccatttcataaaaaaaaagtcaagagccaggttgtccatggctaatacactgactcttcaaagttatcaggaaccca

SEQ ID NO: 727299 - DNA, 613 bp, Homo sapiens
actattccaaggtatctggaatggagtaggcaatatatgagaatgttataatattacatgaggttgaaatggcagggatgaaatatggctagattctcattgcattttgaagggaaaacaaacaggatttatcatcagattggattacccatgtgaatgaaagaggaatcaatgatgaaaatgaaattttttacctaagtacctgtaattataaagtggccattcaactggatgggaaaagttgtaagatatttatgtttgttggtggaagatcaggagtttatattagaaatgctgattttggcatgtctattagacatcaagtagagatactagatragtagttggatatttgagtggggagttcaggtgacctatgttgtctattgctgcataacaaactaccccaatttagtggcttccaataataatttgttactacttctcacaattctgtacattgtctgtgctcagcttagtgtttcttgttttgagtatctcgtagctgcagttaaatgaagacagagactggagtcatttgaaggcttgactagacaggtgaaggacccattcacatggtgtgcagtccatgctagctgtaagctaggattca

SEQ ID NO: 727300 - DNA, 1790 bp, Homo sapiens
tgcctatttgagtaccccaacgcttctcaagttgtgctctaaagaacaataatcccaccagatgctcctcagtaatagggatccaaagcaagtaaaagcgtggaatacgtccatactaaaggctctgagaaatcctgtagcagagacaatgacttaactttgtatcatccaacatttcccaaatttgtagttgaacatgaaactcattaccagaagcatatattaaaagtacatgaaattggccaggcgcggtgactcacgcctgtaattccggcactttgggaggctgaggcagatggatcagctgagatcagaagttcgagaccagcctagccaacatggcgaagtcccatctctactaaaaatacaaaaattagctggatgtggtggcgcatgcctgtaatcccagctactcaggaagctaaggcacgataattgcttgaacctgggaggcagaggttgcagtaagctgagatcaggccattgcactacagcctgggtgacagagtcagactctgtctcaaaagaaacaaacaaacatacaaaaagtgcgtgaaactactgctcaatggaacccaacttaggaaatgacagtaaacgccctgggtaagagccttcagcttaacaccatccaaaagctcttgtcgcccaggttggaatacagtggtgcaatctcagctcactgcaacccctgcctcctgggttcaagcaattctcatgccttagcctcccaagtagctgagactacaggcatgcgacactatgcccggctaatttttgtatttttagtagagacagggtttcaccatgctggccaggctggtcttgaacccccgacctcaggtgatccacccatctcggcctcccaaagtgctgggattacaggcatgagccactgtgccaggccactttattatgtaattttaaaggaaataaaatcttgcccagtttcaaagaaacaatttggtattatcatccaattgtataaaataagaataaatgggtagctttaaacctacaaagctcaaaggtattttacagatattttatctttatctccactgtgatagcacactgcatggtgatttgcaataaaggttatatcttattttgaaaataactagggcaatagagaagaataaaaatagagttcatatacaaaataggccacagactacaaaggagtcccagggtatcacataagtgaggaaatactccttccctgtctcatagtgccaagcagtatttagtaattgtcccagacattggactaaatacatttaagtagaaatggcctatgttctttagtagtgtgctggtactttctataaggacaaaattaatacagaggtctaagaaatgactcaatacccagaaggaaaaaatgtcaatgcttgcaacataatttggcatttagggatagtgaataaagtctggtcattgaaagggaaaaggtaaattgcatctacttaaccaaggaaaatttattgataaagatataattatgactattggaagaaaatgtgtaagtactgagcaattagaacaaagaagagaaaatgaaatactctggtgattagcaaggggtggagtacatggtagggactcartaaatgttcactgaaaaatgaaagtagtgacctaggaaaggggatggggttcctaagtctagaaagtcatgaaacatggggaaggaaattcagacacagagaaaggcttgggttgcagagcttaagtcctagaatgtttaagtaactgttttaaaaaaggggatttgatcatttgataca

SEQ ID NO: 727301 - DNA, 642 bp, Homo sapiens
atttttgtatttttagtagagataaagtttcaccatattgtccaggctggccttgaactcctgaccttgtgatctgaccgcctcggcctcccaaagtgctgggattacaggtgtgagccgctgtgcctggccctcactgagcatttcttatgagccaggcacagcctcacacgcagtaatttggcagtctcttactttccagtgagattcttgagagtagaaataattttatttttgtgtgttttgtgcctggacagtgtgacatcgcaatagctgttagtttaaatggaccctcacgggcctgcaagacagggtgggattttgacrgaagggaggctgagggcgggagtttgggtggtggggagaggacctgttgttgtggggaagagaattggaggttttttgtaagaataactgccagataacgctgctggctttgttccacgtcaaggtgctcatacttcacagattgctgcagaagttggatgccttctccccttcttccataacaaatcccttgattttttttttttttttttgaacagcagcaagatttattgcagagtgaaaaaacaaagcctccacagtgtggaaggggacctgagcaggttgcccttttttttttttaatcccttgattttt

SEQ ID NO: 727302 - DNA, 586 bp, Homo sapiens
gagaatctgataagagaatatcaaggctatcatcattgttacaacactgggatttcttccttggagtcttggaactactccaggcccagaattctccagctcagctctgccaggactagatgagtggtggtatgttgaggctcaaaagatagcaccaaccatagaatttgcactatggagttaaaaatactcaagtttaaaacaaaatartgcttctcccactatgatgtccatatcctaaatccctagaatgcatgagtatgttgccttatgtggcaaaagggactttacattacaaatgtgattaagttaaggaccttgatatgcaaaaatatcctggattatccaggtgggctcagtgtcatcaaagggtccttataagagggacacaggaggaatcagaatctgataaaggagatgggacactggaacctgagtttggaatgatgtacatagaagatggaggaaggagccacaagccaaaggatgaaggcggctgcagaagctgaaaaggcaaggcattgaaagaattcgcccctgaagcttccagaaggaatgtaattctgctgacaaatgctgttttaag

SEQ ID NO: 727303 - DNA, 1461 bp, Homo sapiens
ccttgaatgtaaatgcccgcaattaaaagatattgaatatataaactactttaacaaaatgcatattttataatgcttgttcttgaaaattatatgtctgtatttgtttacatctctatttatactatcttatagatatactttttctataaaattcttagagatatttttacatatatacgataaatttcttgttattgtttttgtttaaaattaattactaaggtgtttttgaagcaaaattatctaagactgataaacatttgaaactcttactagttatgttagcaaaaactttttgtttataagcaaaatgttgcttcctaaaaaatattgtatttctctaatatttttattaattcgaaattgttttatattgatttccaaatattttaaaggcttcgtgttttaaaactcttccttgaaaataatttaatatattttctaagaaggtgtgtgtgtgtgtgtatgtgtgtgtaaaactgtcactgcctaaagtaaaaacgtactattacatctttttatttgaaacaggattatactggtttaataatactctggatatgtctttatatgtgcctacacatgcacacatacatacttcaaataggaatgagaaaattaaataataatgattttgtttacaaatagttattgccatgtaaattgtgatctcatgttgggatgtcaaaataaaacatggcatattggttgacaacaagcacatttaattctaactctgttgaatagcaattttagagtaggactattcaagtgaatctgaggcataatgtgtaacaaatttaagcagaacttttagcacatcagtacttaattatagtattattgttgttataattaatgttattgttttctactggacattgatcttccacttttaaygctatttttttcctctgttaacctgagaaagaattagaaaagtcaaaaatctcttttgcctgaaaaggacaaaatgtatctttaaggatattaaaactttatgaccctaatttatcaatgctgctaaacataaactcttctctgctcataaacttgaacacttaggctaaaagaaaagttaaagcactgaattgtatctctcattcatgagatgccaaggaatcatgggaattttgccaaattccagatggcatactgcaaataatgagtgcagccatatttattaccacggattattttcaagtgagaaggcataccctgtattggaagataaatactttaaaaaaacataaaatgttcaatgttattgtggaaaaataataaaaaataaaaacaaacattgatctgctccttggtgttgaagttacaatgctgaaatagacaactagataagtagtgttatcctactcaagggaagccatttaattaaaacatatttaaaagccatggaataaattaacttttcatgatgctgattaaatatgggtacattttcca

SEQ ID NO: 727304 - DNA, 2884 bp, Homo sapiens
atcaaagctttctaaaatatgctaagaatttaggacattaaacctttgttgtggaggtaataccactcattcaatttttatttctaattcagaaacactaaacgaaacttttaattaaatacaatttgtatgtattcagtgctattctctcccgatttcttgtgtagggtaatggaactgaaataaaaattagtgaaacactctatatccacatggattttgctagtacacagaagacaatagaagactagataaggtgagaatcaaaatgaagtacaatattactatgtgttacagacaaaagtttgatcttgttgaaggagattggaaaaaccttcatggaaatggtgacattcctaatgattgttcaataatgtgcarcctccagaagagtaagcccgagggaggctggaagatccagtgccatcaggaaaagacacagatgcaaaatcaaaagatttgactcaacagcttagggaatagaatgtaagcaagacttttttggtacataataatgtggaaataaataaggaaatataaatctgggagagaaaattaactcaaaaatacagaatactttgtctgacggagtggtagttcacaccggctttaccggatgaaaagttgttaaaggcctgtaagcagtggaaaatggtgtcactagagatttgggagctctttgtctaataataaattggatagattgatgttgttgaagaaacagtttatgtaaaaaggttattacttctttcattaggaataaagaagtaatagattaaacaagggtagaagcactgaaaattctcaaaggatagcattcatttgagaaacattagtgaattagaatttatatagtgaaagcatagtcatactcaatataatgatgcttaatttaaatgtacataaaatacatagatttataaatgtaccatgtagaaattattggattattaaatataaaacatttattcattctacaaatagttattgatcatctaatgttagtgaggagctactctacacattcgaacaaaagagacatttaaatacatttaaattcaaatgggaaaagaataccatagacaatcaaagatgttaattttagtctataaaatacatagaaatactgacatatatgatccattggtatggttgtcaggcaaaatctaagaaaaactatttaagctaaattccaaattataaaaagcataccttgagaaaaggagtattactttattagaaactatagaaagttcaattgaaaaagaactctgtttaagtcacataaattacgcttatatggctgaggtgtattgaggtgtggaggaacagtggaagagatgaggctggaggtggtgggaagccaaatctcagagggctataagaatgttttaagaaggcatattttatttttatatttataaagctcctctggctgctgtgaggagaattaatagtacaaaagtaaaataagaggacatgcaatagttaggacttactggcagttacccaggaaagactccaatgagggcaggaagaagtgatagaaagggtaaatcattgaaacatttatggggaggtatattcaatacttcctagtagtaaattgagtgagttttaaaacaagatttgaattaaagattatttttatattttgaaatgtaaaacttggtaacatattaatactctatcttaggtacacttaggaacaaaattggaattttgccaagaaacaactaaggtttcctatagtaatactttaatttgtgatttctattaaatttctaactagagtttgcaaaaataaagtaggatatgtggagcacaacaaacaatacaggatatatgtttacatgtgtaaatcataaacctaagcttgttatttgaggccataaaattggttgaaatcaccaaatagtagcataggaaatcttgacgagatagaataaaaaaatagaaaataaaatccttgtggagacataggcaataatgaaggtcacaaatggtaacatttccatagtgatttgatgttaaaaagaaagaccagccaacatcagcagattacttgaggccaggagatccagactagcctggccaagagggcaattaaaaaaaaaatacaaggcccggcgcagtggcacacgcctataatcccagcactttgggaggccaaggcaggtggatcacaaggtcaagagatcaagaccatcctagccaacatggcaaaaccccgtctctactaaaaatacaaaaattagccaggtgtggtggcatgcacctgtagtcccagctactcgggaggctaaggcaagagaatcacttgaacctgggaggcagaggttgcagtgagccaagaccacaccactgcacaccagtctggtgacagagtgagactctgtctcaaaaaaaaaaaaaaaaagttaactggctgtggtggtgtgcgcctataatcccagctactttggaggctgaggaacaagaatagcttgaacctggaaggcagagattgcagtgaacccagattgcaccactgcactccagcctgggtaacagagtaagattctgtctaaaaaaatttaaaaaaagaaagaaagaaaaaaacagatagttgcactaatcagaaatctttgaaaacatagttttaaatataaatatttgattaatttctatataaaagctagttcagtaaaaatggaaattaactttagcccaattaaaagaacagttttctccaaggcaaaacttatgcattagtaattattattaccttaaaaatgtggtcaaatagtatctatgggtcaaaattttgcagtgttttggttgctttaaatcttcataataaaattgcctctctaaaaatatttcttagtagtagtcgaatatg

SEQ ID NO: 727305 - DNA, 2884 bp, Homo sapiens
atcaaagctttctaaaatatgctaagaatttaggacattaaacctttgttgtggaggtaataccactcattcaatttttatttctaattcagaaacactaaacgaaacttttaattaaatacaatttgtatgtattcagtgctattctctcccgatttcttgtgtagggtaatggaactgaaataaaaattagtgaaacactctatatccacatggattttgctagtacacagaagacaatagaagactagataaggtgagaatcaaaatgaagtacaatattactatgtgttacagacaaaagtttgatcttgttgaaggagattggaaaaaccttcatggaaatggtgacattcctaatgattgttcaataatgtgcagcctccagaagagtaagcccgagggaggctggaagatccagtgccatcaggaaaagacacagatgcaaaatcaaaagatttgactcaacagcttagggaatagaatgtaagcaagacttttttggtacataataatgtggaaataaataaggaaatataaatctgggagagaaaattaactcaaaaatacagaatactttgyctgacggagtggtagttcacaccggctttaccggatgaaaagttgttaaaggcctgtaagcagtggaaaatggtgtcactagagatttgggagctctttgtctaataataaattggatagattgatgttgttgaagaaacagtttatgtaaaaaggttattacttctttcattaggaataaagaagtaatagattaaacaagggtagaagcactgaaaattctcaaaggatagcattcatttgagaaacattagtgaattagaatttatatagtgaaagcatagtcatactcaatataatgatgcttaatttaaatgtacataaaatacatagatttataaatgtaccatgtagaaattattggattattaaatataaaacatttattcattctacaaatagttattgatcatctaatgttagtgaggagctactctacacattcgaacaaaagagacatttaaatacatttaaattcaaatgggaaaagaataccatagacaatcaaagatgttaattttagtctataaaatacatagaaatactgacatatatgatccattggtatggttgtcaggcaaaatctaagaaaaactatttaagctaaattccaaattataaaaagcataccttgagaaaaggagtattactttattagaaactatagaaagttcaattgaaaaagaactctgtttaagtcacataaattacgcttatatggctgaggtgtattgaggtgtggaggaacagtggaagagatgaggctggaggtggtgggaagccaaatctcagagggctataagaatgttttaagaaggcatattttatttttatatttataaagctcctctggctgctgtgaggagaattaatagtacaaaagtaaaataagaggacatgcaatagttaggacttactggcagttacccaggaaagactccaatgagggcaggaagaagtgatagaaagggtaaatcattgaaacatttatggggaggtatattcaatacttcctagtagtaaattgagtgagttttaaaacaagatttgaattaaagattatttttatattttgaaatgtaaaacttggtaacatattaatactctatcttaggtacacttaggaacaaaattggaattttgccaagaaacaactaaggtttcctatagtaatactttaatttgtgatttctattaaatttctaactagagtttgcaaaaataaagtaggatatgtggagcacaacaaacaatacaggatatatgtttacatgtgtaaatcataaacctaagcttgttatttgaggccataaaattggttgaaatcaccaaatagtagcataggaaatcttgacgagatagaataaaaaaatagaaaataaaatccttgtggagacataggcaataatgaaggtcacaaatggtaacatttccatagtgatttgatgttaaaaagaaagaccagccaacatcagcagattacttgaggccaggagatccagactagcctggccaagagggcaattaaaaaaaaaatacaaggcccggcgcagtggcacacgcctataatcccagcactttgggaggccaaggcaggtggatcacaaggtcaagagatcaagaccatcctagccaacatggcaaaaccccgtctctactaaaaatacaaaaattagccaggtgtggtggcatgcacctgtagtcccagctactcgggaggctaaggcaagagaatcacttgaacctgggaggcagaggttgcagtgagccaagaccacaccactgcacaccagtctggtgacagagtgagactctgtctcaaaaaaaaaaaaaaaaagttaactggctgtggtggtgtgcgcctataatcccagctactttggaggctgaggaacaagaatagcttgaacctggaaggcagagattgcagtgaacccagattgcaccactgcactccagcctgggtaacagagtaagattctgtctaaaaaaatttaaaaaaagaaagaaagaaaaaaacagatagttgcactaatcagaaatctttgaaaacatagttttaaatataaatatttgattaatttctatataaaagctagttcagtaaaaatggaaattaactttagcccaattaaaagaacagttttctccaaggcaaaacttatgcattagtaattattattaccttaaaaatgtggtcaaatagtatctatgggtcaaaattttgcagtgttttggttgctttaaatcttcataataaaattgcctctctaaaaatatttcttagtagtagtcgaatatg

SEQ ID NO: 727306 - DNA, 2884 bp, Homo sapiens
atcaaagctttctaaaatatgctaagaatttaggacattaaacctttgttgtggaggtaataccactcattcaatttttatttctaattcagaaacactaaacgaaacttttaattaaatacaatttgtatgtattcagtgctattctctcccgatttcttgtgtagggtaatggaactgaaataaaaattagtgaaacactctatatccacatggattttgctagtacacagaagacaatagaagactagataaggtgagaatcaaaatgaagtacaatattactatgtgttacagacaaaagtttgatcttgttgaaggagattggaaaaaccttcatggaaatggtgacattcctaatgattgttcaataatgtgcagcctccagaagagtaagcccgagggaggctggaagatccagtgccatcaggaaaagacacagatgcaaaatcaaaagatttgactcaacagcttagggaatagaatgtaagcaagacttttttggtacataataatgtggaaataaataaggaaatataaatctgggagagaaaattaactcaaaaatacagaatactttgtctgacggagtggtagttcacaccggctttaccggatgaaaagttgttaaaggcctgtaagcagtggaaaatggtgtcactagagatttgggagctctttgtctaataataaattggatagattgatgttgttgaagaaacagtttatgtaaaaaggttattacttctttcattaggaataaagaagtaatagattaaacaagggtagaagcactgaaaattctcaaaggatagcattcatttgagaaacattagtgaattagaatttatatagtgaaagcatagtcatactcaatataatgatgcttaatttaaatgtacataaaatacatagatttataaatgtaccatgtagaaattattggattattaaatataaaacatttattcattctacaaatagttattgatcatctaatgttagtgaggagctactctacacattcgaacaaaagagacatttaaatacatttaaattcaaatgggaaaagaataccatagacaatcaaagatgttaattttagtctataaaatacatagaaatactgacatatatgatccattggtatggttgtcaggcaaaatctaagaaaaactatttaagctaaattccaaattataaaaagcataccttgagaaaaggagtrttactttattagaaactatagaaagttcaattgaaaaagaactctgtttaagtcacataaattacgcttatatggctgaggtgtattgaggtgtggaggaacagtggaagagatgaggctggaggtggtgggaagccaaatctcagagggctataagaatgttttaagaaggcatattttatttttatatttataaagctcctctggctgctgtgaggagaattaatagtacaaaagtaaaataagaggacatgcaatagttaggacttactggcagttacccaggaaagactccaatgagggcaggaagaagtgatagaaagggtaaatcattgaaacatttatggggaggtatattcaatacttcctagtagtaaattgagtgagttttaaaacaagatttgaattaaagattatttttatattttgaaatgtaaaacttggtaacatattaatactctatcttaggtacacttaggaacaaaattggaattttgccaagaaacaactaaggtttcctatagtaatactttaatttgtgatttctattaaatttctaactagagtttgcaaaaataaagtaggatatgtggagcacaacaaacaatacaggatatatgtttacatgtgtaaatcataaacctaagcttgttatttgaggccataaaattggttgaaatcaccaaatagtagcataggaaatcttgacgagatagaataaaaaaatagaaaataaaatccttgtggagacataggcaataatgaaggtcacaaatggtaacatttccatagtgatttgatgttaaaaagaaagaccagccaacatcagcagattacttgaggccaggagatccagactagcctggccaagagggcaattaaaaaaaaaatacaaggcccggcgcagtggcacacgcctataatcccagcactttgggaggccaaggcaggtggatcacaaggtcaagagatcaagaccatcctagccaacatggcaaaaccccgtctctactaaaaatacaaaaattagccaggtgtggtggcatgcacctgtagtcccagctactcgggaggctaaggcaagagaatcacttgaacctgggaggcagaggttgcagtgagccaagaccacaccactgcacaccagtctggtgacagagtgagactctgtctcaaaaaaaaaaaaaaaaagttaactggctgtggtggtgtgcgcctataatcccagctactttggaggctgaggaacaagaatagcttgaacctggaaggcagagattgcagtgaacccagattgcaccactgcactccagcctgggtaacagagtaagattctgtctaaaaaaatttaaaaaaagaaagaaagaaaaaaacagatagttgcactaatcagaaatctttgaaaacatagttttaaatataaatatttgattaatttctatataaaagctagttcagtaaaaatggaaattaactttagcccaattaaaagaacagttttctccaaggcaaaacttatgcattagtaattattattaccttaaaaatgtggtcaaatagtatctatgggtcaaaattttgcagtgttttggttgctttaaatcttcataataaaattgcctctctaaaaatatttcttagtagtagtcgaatatg

SEQ ID NO: 727307 - DNA, 2884 bp, Homo sapiens
atcaaagctttctaaaatatgctaagaatttaggacattaaacctttgttgtggaggtaataccactcattcaatttttatttctaattcagaaacactaaacgaaacttttaattaaatacaatttgtatgtattcagtgctattctctcccgatttcttgtgtagggtaatggaactgaaataaaaattagtgaaacactctatatccacatggattttgctagtacacagaagacaatagaagactagataaggtgagaatcaaaatgaagtacaatattactatgtgttacagacaaaagtttgatcttgttgaaggagattggaaaaaccttcatggaaatggtgacattcctaatgattgttcaataatgtgcagcctccagaagagtaagcccgagggaggctggaagatccagtgccatcaggaaaagacacagatgcaaaatcaaaagatttgactcaacagcttagggaatagaatgtaagcaagacttttttggtacataataatgtggaaataaataaggaaatataaatctgggagagaaaattaactcaaaaatacagaatactttgtctgacggagtggtagttcacaccggctttaccggatgaaaagttgttaaaggcctgtaagcagtggaaaatggtgtcactagagatttgggagctctttgtctaataataaattggatagattgatgttgttgaagaaacagtttatgtaaaaaggttattacttctttcattaggaataaagaagtaatagattaaacaagggtagaagcactgaaaattctcaaaggatagcattcatttgagaaacattagtgaattagaatttatatagtgaaagcatagtcatactcaatataatgatgcttaatttaaatgtacataaaatacatagatttataaatgtaccatgtagaaattattggattattaaatataaaacatttattcattctacaaatagttattgatcatctaatgttagtgaggagctactctacacattcgaacaaaagagacatttaaatacatttaaattcaaatgggaaaagaataccatagacaatcaaagatgttaattttagtctataaaatacatagaaatactgacatatatgatccattggtatggttgtcaggcaaaatctaagaaaaactatttaagctaaattccaaattataaaaagcataccttgagaaaaggagtattactttattagaaactatagaaagttcaattgaaaaagaactctgtttaagtcacataaattacgcttatatggctgaggtgtattgaggtgtggaggaacagtggaagagatgaggctggaggtggtgggaagccaaatctcagagggctataagaatgttttaagaaggcatattttatttttatatttataaagctcctctggctgctgtgaggagaattaatagtacaaaagtaaaataagaggacatgcaatagttaggacttactggcagttacccaggaaagactccaatgagggcaggaagaagtgatagaaagggtaaatcattgaaacatttatggggaggtatattcaatacttcctagtagtaaattgagtgagttttaaaacaagatttgaattaaagattatttttatattttgaaatgtaaaacttggtaacatattaatactctatcttaggtacayttaggaacaaaattggaattttgccaagaaacaactaaggtttcctatagtaatactttaatttgtgatttctattaaatttctaactagagtttgcaaaaataaagtaggatatgtggagcacaacaaacaatacaggatatatgtttacatgtgtaaatcataaacctaagcttgttatttgaggccataaaattggttgaaatcaccaaatagtagcataggaaatcttgacgagatagaataaaaaaatagaaaataaaatccttgtggagacataggcaataatgaaggtcacaaatggtaacatttccatagtgatttgatgttaaaaagaaagaccagccaacatcagcagattacttgaggccaggagatccagactagcctggccaagagggcaattaaaaaaaaaatacaaggcccggcgcagtggcacacgcctataatcccagcactttgggaggccaaggcaggtggatcacaaggtcaagagatcaagaccatcctagccaacatggcaaaaccccgtctctactaaaaatacaaaaattagccaggtgtggtggcatgcacctgtagtcccagctactcgggaggctaaggcaagagaatcacttgaacctgggaggcagaggttgcagtgagccaagaccacaccactgcacaccagtctggtgacagagtgagactctgtctcaaaaaaaaaaaaaaaaagttaactggctgtggtggtgtgcgcctataatcccagctactttggaggctgaggaacaagaatagcttgaacctggaaggcagagattgcagtgaacccagattgcaccactgcactccagcctgggtaacagagtaagattctgtctaaaaaaatttaaaaaaagaaagaaagaaaaaaacagatagttgcactaatcagaaatctttgaaaacatagttttaaatataaatatttgattaatttctatataaaagctagttcagtaaaaatggaaattaactttagcccaattaaaagaacagttttctccaaggcaaaacttatgcattagtaattattattaccttaaaaatgtggtcaaatagtatctatgggtcaaaattttgcagtgttttggttgctttaaatcttcataataaaattgcctctctaaaaatatttcttagtagtagtcgaatatg

SEQ ID NO: 727308 - DNA, 2884 bp, Homo sapiens
atcaaagctttctaaaatatgctaagaatttaggacattaaacctttgttgtggaggtaataccactcattcaatttttatttctaattcagaaacactaaacgaaacttttaattaaatacaatttgtatgtattcagtgctattctctcccgatttcttgtgtagggtaatggaactgaaataaaaattagtgaaacactctatatccacatggattttgctagtacacagaagacaatagaagactagataaggtgagaatcaaaatgaagtacaatattactatgtgttacagacaaaagtttgatcttgttgaaggagattggaaaaaccttcatggaaatggtgacattcctaatgattgttcaataatgtgcagcctccagaagagtaagcccgagggaggctggaagatccagtgccatcaggaaaagacacagatgcaaaatcaaaagatttgactcaacagcttagggaatagaatgtaagcaagacttttttggtacataataatgtggaaataaataaggaaatataaatctgggagagaaaattaactcaaaaatacagaatactttgtctgacggagtggtagttcacaccggctttaccggatgaaaagttgttaaaggcctgtaagcagtggaaaatggtgtcactagagatttgggagctctttgtctaataataaattggatagattgatgttgttgaagaaacagtttatgtaaaaaggttattacttctttcattaggaataaagaagtaatagattaaacaagggtagaagcactgaaaattctcaaaggatagcattcatttgagaaacattagtgaattagaatttatatagtgaaagcatagtcatactcaatataatgatgcttaatttaaatgtacataaaatacatagatttataaatgtaccatgtagaaattattggattattaaatataaaacatttattcattctacaaatagttattgatcatctaatgttagtgaggagctactctacacattcgaacaaaagagacatttaaatacatttaaattcaaatgggaaaagaataccatagacaatcaaagatgttaattttagtctataaaatacatagaaatactgacatatatgatccattggtatggttgtcaggcaaaatctaagaaaaactatttaagctaaattccaaattataaaaagcataccttgagaaaaggagtattactttattagaaactatagaaagttcaattgaaaaagaactctgtttaagtcacataaattacgcttatatggctgaggtgtattgaggtgtggaggaacagtggaagagatgaggctggaggtggtgggaagccaaatctcagagggctataagaatgttttaagaaggcatattttatttttatatttataaagctcctctggctgctgtgaggagaattaatagtacaaaagtaaaataagaggacatgcaatagttaggacttactggcagttacccaggaaagactccaatgagggcaggaagaagtgatagaaagggtaaatcattgaaacatttatggggaggtatattcaatacttcctagtagtaaattgagtgagttttaaaacaagatttgaattaaagattatttttatattttgaaatgtaaaacttggtaacatattaatactctatcttaggtacacttaggaacaaaattggaattttgccaagaaacaactaaggtttcctatagtaatactttaatttgtgatttctattaaatttctaactagagtttgcaaaaataaagtaggatatgtggagcacaacaaacaatacaggatatatgtttacatgtgtaaatcataaacctaagcttgttatttgaggccataaaattggttgaaatcaccaaatagtagcataggaaatcttgacgagatagaataaaaaaatagaaaataaaatccttgtggagacataggcaataatgaaggtcacaaatggtaacatttccatagtgatttgatgttaaaaagaaagaccagccaacatcagcagattacttgaggccaggagatccagactagcctggccaagagggcaattaaaaaaaaaatacaaggcccggcgcagtggcacacgcctataatcccagcactttgggaggccaaggcaggtggatcacaaggtcaagagatcaagaccatcctagccaacatggcaaaaccccgtctctactaaaaatacaaaaattagccaggtgtggtggcatgcacctgtagtcccagctactcgggaggctaaggcaagagaatcacttgaacctgggaggcagaggttgcagtgagccaagaccacaccactgcacaccagtctggtgacagagtgagactctgtctcaaaaaaaaaaaaaaaaagttaactggctgtggtggtgtgcgcctataatcccagctactttggaggctgaggaacaagaatagcttgaacctggaaggcagagattgcagtgaacccagattgcaccactgcactccagcctgggtaacagagtaagattctgtctaaaaaaatttaaaaaaagaaagaaagaaaaaaacagatagttgcactaatcagaaatctttgaaaacatagttttaaatataaatatttgattaatttctatataaaagctagttcagtaaaaatggaaattaactttagcccaattaaaagaacagttttctccaaggcaaaacttatgcattagtaattattattaccttaaaaatgtggtcaaatagtatctatgggtcaaaattttgcagtgttttggttgctttaaatcttcataataaaattgcctctctaaaaatatttcttagtagtagtygaatatg

SEQ ID NO: 727309 - DNA, 619 bp, Homo sapiens
caaaaaacaaccaggtaattaaaattcaagattcatttataatgaaaattttagaagtagatagaaattttcttacctaaagtttatctttcctgaaccaagagaatatactataattaatggatgagggggaaaaagcaaatcctttggtaagaagaacaaaagatcacttgatgattaaattgaagggctgggttttcaaagaaattcccatttttaaatattaataacacctaggataatcatggggttttgagtggattaatagactgtgtactaaagatctaagctctaataaatgagggagactgattaagaagtaaataaatggccagggtggtgactcacacctataatcccagcaactctagaggccaaggcaggaggatcatttgaggccaggagttcaagaccagcatgggcagtatagtgagatcctctgtctacaaaaattatttgaaaaaaaatagcactgtgaatatatcatatattattcrgagtatgtattatatattgtatcatttgtattataatatgcaatattatatattatgcttcattatagtattagagttttgtatacacatatataatataaattgaatcaatatacataaca

SEQ ID NO: 727310 - DNA, 982 bp, Homo sapiens
ctaaaaccattattgttactcttactacttttattataatcatctgcataaattgtcatttaaaaaagatgtcaattataaactagcaaaggagtcataaagagaaaatttctaaaatttctaaagttttactctaaccagaatattggaggctgtttaatataaaagggaaaaatggtaagatgttcaaataatatgattcaatttcccaagsaacaataacagactatattctacagacagaagccaaagacttcccttgaagacacgcatgtccccatgttcatgcacatggttcttaaaataaattaatttttatgaggcagaaaaaattcccccactatcttggaataagcattgttaaaaagaaacagatataaatatcaaggaattgaagcaagtaacaaattagagggcggtaagaggcatcgctagtggaatggagatgagcaaaacacctgtgagtatctgctctgtgtgtggctatatgttgtgtgtgtctgtgtttgtgtgtatgtgcagctgattgaggaaggtgattaaagacaaagttttttgagagcaataacatttagctttaacatttctctcctttcattttttttctttgctgagttttgagaataacaaagtgaaagtgttggccatatctgttcctttgggttttttaacttttatttaagttcagggttgcaagtgcaggtttgttatatgggtaaacttgtgtcatggggatttgttgtacagattatttcatcactcaggtgttaagcctagtaccaatcagttatttttcctgatcttctccctcctcccatcctccaccctctgataggcccattgtgggttgtttttctctatatgtccatgtgttctcattatttagctcccacttaaaagtgagaatattcagtatttggttttctgttcctatgtgtgtttgctaaggataatggcctccagccccattcatgttcctgca

SEQ ID NO: 727311 - DNA, 982 bp, Homo sapiens
ctaaaaccattattgttactcttactacttttattataatcatctgcataaattgtcatttaaaaaagatgtcaattataaactagcaaaggagtcataaagagaaaatttctaaaatttctaaagttttactctaaccagaatattggaggctgtttaatataaaagggaaaaatggtaagatgttcaaataatatgattcaatttcccaaggaacaataacagactatattctacagacagaagccaaagacttcccttgaagacacgcatgtccccatgttcatgcacatggttcttaaaataaattaatttttatgaggcagaaaaaattcccccactatcttggaataagcattgttaaaaagaaacagatataaatatcaaggaattgaagcaagwaacaaattagagggcggtaagaggcatcgctagtggaatggagatgagcaaaacacctgtgagtatctgctctgtgtgtggctatatgttgtgtgtgtctgtgtttgtgtgtatgtgcagctgattgaggaaggtgattaaagacaaagttttttgagagcaataacatttagctttaacatttctctcctttcattttttttctttgctgagttttgagaataacaaagtgaaagtgttggccatatctgttcctttgggttttttaacttttatttaagttcagggttgcaagtgcaggtttgttatatgggtaaacttgtgtcatggggatttgttgtacagattatttcatcactcaggtgttaagcctagtaccaatcagttatttttcctgatcttctccctcctcccatcctccaccctctgataggcccattgtgggttgtttttctctatatgtccatgtgttctcattatttagctcccacttaaaagtgagaatattcagtatttggttttctgttcctatgtgtgtttgctaaggataatggcctccagccccattcatgttcctgca

SEQ ID NO: 727312 - DNA, 1043 bp, Homo sapiens
actcgtgcacatgtgggcacacgacacacaatgctttcagtcagttgcaaagggatttcatagagagcttggactttgtacataccaataatatttctgaaaatgttgactgaaggaggagtttaggattaacatttaatatattgggccaaatttttggaagatttagacaaaggaagggaggaagaaaaagagaatggcaggaaggagaggtgaagaaataggtgattcataaacagttctctttcaagttactttttctctattgagggtattctgggtctttgcagagttactgaattgataataataatgtgatatcatgtaatcattacaaatgttttcaaagtattacataatgaaagcttgtagcattcttattctgaaactcatctctccatcctcccatctaaacaccacatagtcatttataactgacaggaatatgttctatccctcaggtgtatttaaaatgtgaagggggaaaaagtgagaaattctggcttcgttagcctagagtacaaatatttagatcatgcttgacttctttcaactgatctgccttgtcaattcaattagagaatcagtgattatcttaggaaaaaacaaacaaaaacttaacaaaaaaaattagtctttgatcataggaaaagacttccaaatttatctttttatagcccatagctataaatataagctgtatggtttatcagaatagatatagcttatatatagcattaaacatttttgcctttttaatggtattaataaagccagatgttcttatttcttttgttttcatattagggttattcggcacagtaacactattcaaacattaatacacaaattccaagtttcagttttagctgagagtacatgaataaaattggctgcacaacattctgaactactaaggagaatttgctgtaggagaaccctaaatctcagaaagagakgacattaggctttgtttttatgggcggaaaattagtttatgatttaagcaacttgttttaggggtacctctaatacttctctgc

SEQ ID NO: 727313 - DNA, 1173 bp, Homo sapiens
gctcccgccctacccccacctctctcctctttgggacatattgaagttcctgggaaaagtggggcacccccagagcacctgtgtacccctgtacccacctgtcctgagtggtccaaatgccagtgaaatgctatttggtgagtgtttcctagactttgcaaaattttcaaagtagagggaaattttgcctgtagcaacatatcttacttacctttytcaccccttccttctattttccccacataaaaatattaagacaatgttggaagtatttcattgagagagagggagagcaagagagatatttagaatgaggatccctcttggtagctgatatggtacatgaaaacagactaatacagtagccaaaagaattcaaacgaattgataataaaggattggagttctctggtgtgcaggcactatccccagtgtaaatattctcttcagttcttacctacatcaagcaggccacctgtctttagttccctaaacttaccactcatttcttccccacactcaataatccataaccctcatacagagtactggccaatcccacagccttaatgaattctccctcactctccaccaccaacacacataccaaaccctgactagaatagagctcaacacataatttcttactgatgctaattgggttaacagctcaaggtctgactgtgggtctctgggtagtgcccatggctcaggtcagtgtctcccaaacctagagaaccatcaggatttctgagtgagccccttgcaatttcagattcccatcctgtcccatcagaatctccacaggtgagggatggacatctctgcttttaaaaggctattcttatcattttgatgattggccaagtttggtaattagtaaccagaaaatctttgaggaaccagacattaccaaaaagaaacagacttgagagagctttggggctcacaggaaaacactcttatcatgcacctactactgcctgcagatttcattctgaggactttggtggcccatgaaaccaaatcattttcaatagccaccaaccttatagaaaaaagcccttcagatagaacttaacatattcaaacttttttcatttttttaagaattagtctatgatgaacaattactaagcttattgtctcccagcagttcaggataacagataa

SEQ ID NO: 727314 - DNA, 876 bp, Homo sapiens
ttatattactggaaagttctaatttttagaaaactctgtaatacgttaatgatgtttgcctatttccatccatctatctatccattcaacacttggctaggagctcagggtgatacaaattattaaggtatgccttcactgaacaagaaactatgcattcatcgtcactgtcttaatccttcaaatatttttaaaaactcaggtacttgcttaagggttctcctttctaagacaagtttccaacttctcttgactatttttcagacattctatctagactcctaaccatcatagttactttctyctgcacagattgcagttgttagcttggttttagatattgcattatcaaataaaaatatttatccaagtgaaagtactccaaaaagcaataaacaaaatgtaatcaaactcaggagaggagtcatagttggagacagatatttaacagtcatcctttcaagaagtgagttaaaatcaacagaccaaaaaaaaaaaaatgtccttagaaaggaaaaagacaattgcagagaaaaaaatattaaacttagaaagtgaaatgatagtataaactcactgctggaacttgcccagaagttatttgtgtttcccccagcagtcatgacaacttcgcatacagaggcaaaattgggaaattttattacgctcatgaagccaaaaaatctctccatggatgagaggaatgcaacatcccaactgattttgatctgggtttctataacttataaaacctatttgctctaatgaacagaagacaaagagagcaatttactgtgtaacactttcaaagctaattctagatattttcaatcctctaagacatttgaaatttaaggtcttgctcatttcacttat

SEQ ID NO: 727315 - DNA, 1180 bp, Homo sapiens
tttttaattgtagagacaggatctatgttgtccagggtggtctcaaactcctggactcgagtgatcctcctgcctactgtaggtttctgattatggattatatgctacaaactgaaagtcatcataaaagtagatacttcaattttgttttttagctgtacacatacaaatttgacaacgaatgaaatgaatcaattccttgaagaccataaactacccaaactcacccaagatgaaataactacccctacgaaaacattgaattcyggcggggcacggtggctcatgcgtgtaattccagcactttgggaggccaaggtgggtggatcacttgaggtcaggagttcgagacaagcctggccaaacatggtgaaactctgtctcaactaaaaatacaaaaattagctgagtgtggcggcgggtgcctgtagacccagctactccgcaggctgaggcagaatagcttgaacccaggaggtggaggttgcagtgagctgaggttgtgccactgcactccaacctgggcaacagagaaagactctgtctcaaagaaaacccaacaacaacaacaacaacaacaacaaacttgaattcctaattaaaagcctcccagaaaacaaaaaagaactgcaagggctagatggttccaggggagaatgctatcaaatattccaaaagaattagcaccaattctccacaatctcttcaagaaactaatgaggagggaacacttccaacccattcgatgaggccagtattatctggacaccaaaaccagatgatgacagtataaaattcaaactcaagaactaacaaaaagtcctatctgaatttccaagtaaaaaatattcatctttagctatctccagaccgtgtgcgttccttccagagcactctcagtgccctttgggaaacagaatcattctcgggcttgtcttatgaggtcagtagggcaagaactgctgttccaattttacagactgagaccttaggaaaaaactgacttgttccaggaagtggtggggatgggatttgatctgggacctttagactccacagtgtcacatcacccggcaggattccagtcagaaatgtcacaacagacaccatggcaagaagcgacttccccaccgcattgggcacacgggctatggcagcacataccaagaccaagcctggg

SEQ ID NO: 727316 - DNA, 1180 bp, Homo sapiens
tttttaattgtagagacaggatctatgttgtccagggtggtctcaaactcctggactcgagtgatcctcctgcctactgtaggtttctgattatggattatatgctacaaactgaaagtcatcataaaagtagatacttcaattttgttttttagctgtacacatacaaatttgacaacgaatgaaatgaatcaattccttgaagaccataaactacccaaactcacccaagatgaaataactacccctacgaaaacattgaattctggcggggcacggtggctcatgcgtgtaattccagcactttgggaggccarggtgggtggatcacttgaggtcaggagttcgagacaagcctggccaaacatggtgaaactctgtctcaactaaaaatacaaaaattagctgagtgtggcggcgggtgcctgtagacccagctactccgcaggctgaggcagaatagcttgaacccaggaggtggaggttgcagtgagctgaggttgtgccactgcactccaacctgggcaacagagaaagactctgtctcaaagaaaacccaacaacaacaacaacaacaacaacaaacttgaattcctaattaaaagcctcccagaaaacaaaaaagaactgcaagggctagatggttccaggggagaatgctatcaaatattccaaaagaattagcaccaattctccacaatctcttcaagaaactaatgaggagggaacacttccaacccattcgatgaggccagtattatctggacaccaaaaccagatgatgacagtataaaattcaaactcaagaactaacaaaaagtcctatctgaatttccaagtaaaaaatattcatctttagctatctccagaccgtgtgcgttccttccagagcactctcagtgccctttgggaaacagaatcattctcgggcttgtcttatgaggtcagtagggcaagaactgctgttccaattttacagactgagaccttaggaaaaaactgacttgttccaggaagtggtggggatgggatttgatctgggacctttagactccacagtgtcacatcacccggcaggattccagtcagaaatgtcacaacagacaccatggcaagaagcgacttccccaccgcattgggcacacgggctatggcagcacataccaagaccaagcctggg

SEQ ID NO: 727317 - DNA, 1180 bp, Homo sapiens
tttttaattgtagagacaggatctatgttgtccagggtggtctcaaactcctggactcgagtgatcctcctgcctactgtaggtttctgattatggattatatgctacaaactgaaagtcatcataaaagtagatacttcaattttgttttttagctgtacacatacaaatttgacaacgaatgaaatgaatcaattccttgaagaccataaactacccaaactcacccaagatgaaataactacccctacgaaaacattgaattctggcggggcacggtggctcatgcgtgtaattccagcactttgggaggccaaggtgggtggatcacttgaggtcaggagttcgagacaagcctggccaaacatggtgaaactctgtctcaactaaaaatacaaaaattagctgagtgtggcggcgggtgcctgtagacccagctactccgcaggctgaggcagaatagcttgaacccaggaggtggaggttgcagtgagctgaggttgtgccactgcactccaacctgggcaacagagaaagactctgtctcaaagaaaacccaacaacaacaacaacaacaacaacaaacttgaattcctaattaaaagcctcccagaaaacaaaaaagaactgcaagggctagatggttccaggggagaatgctatcaaatattccaaaagaattagcaccaattctccacaatctcttcaagaaactaatgaggagggaacacttccaacccattcgatgaggccagtattatctggacaccaaaaccagatgatgacagtataaaattcaaactcaagaactaacaaaaagtcctatctgaatttccaagtaaaaaatattcatctttagstatctccagaccgtgtgcgttccttccagagcactctcagtgccctttgggaaacagaatcattctcgggcttgtcttatgaggtcagtagggcaagaactgctgttccaattttacagactgagaccttaggaaaaaactgacttgttccaggaagtggtggggatgggatttgatctgggacctttagactccacagtgtcacatcacccggcaggattccagtcagaaatgtcacaacagacaccatggcaagaagcgacttccccaccgcattgggcacacgggctatggcagcacataccaagaccaagcctggg

SEQ ID NO: 727318 - DNA, 2027 bp, Homo sapiens
tttgatgggcagccatggcttttatccatattttcagggcagaagacaggtggaaccagaatgatgccataatggttgtaaccagtgggtggccaatttggggttgacataactgtatctgcaggggaagcatgatcaggtccttcttcatatttaaggcttacctactccttttaccccttcctctataagtagcactgctgtctcttacatccttttcctcatacctcccattcattctgtctacaaggttactaacttccttattctctatacttaacacatctttacattttgcccatatcacccaagctccttgcctactcactaagtttttataacacttcttccaagtttcattcaccccatctctttttcttttttctacaacacataattgaacatcgttaaatattcaattaagaattattgaacacagtacagttacaattgaacatattacaatagcattcttacaaagttctatgtatgttaaagccctgaaaaaaaattctgcttgtaaaatggactgatgtgttggaacagaggtgagcaaactttctgtaaaagagccagagagtaaatattttagattttgagggtcataggtctctgtcccaattactcgtaactctgtcattgtagattgaaaacagccatagtcaatacgacaacgaatgggcaaggctgtcttccaagacagtgttatttacaaaagcaggtggtgggttggatttggctgagctctgtgttctagggtcatattattaaaaccagatcttatctgcctgaatgtttggttggatatttgaaagtcaggtgggacctgggaatggtcttccttttgctggactctccacacattgcagaatgtctgcacctctgtcacctgcccactaaatgccactagttcctccaataaaagtgtccccatgaatttccaggcaccccctaggggtactgcagccacccaaccactggtttacacagtggcaggttcaggcatggggagaggtggctgtggtgtaggaatgaacatctgtcattcactcagcaaacattcaccagcgtaggctctgttgcaggcagcatgctaagcatgggccacrcagccccaggctgacagtcaagccacaccttcatggaatttatatcccagggaggatacaggcggtgcatgagtctagttaacctgccataacaaaataccatggtcttggtggcctagacaacagaactttattttctcacagctctgggagctagaagtcccagatggaggtgccagcagattctcttccttgtgagggcttgcttgtatatgctcgctctgtgaacacatggcctctcctctttgggttcacagagagagaaatctccggtgtctcctttttttgaaagacagggtcttgctctatagcccagactgtagtgcagtggtgcaatcgtagtcactataacctcgaatgcctggactcaagcgatcctctcgtctcagcctcctgagtagctgagactacaggtgcacaccaggctgctgctgcttataaagacaccagttattaccttgtaactcttatgacctcatttaatcttcattactactctggaggccctgtttccaaatacagtcacaattgggggttacagcttcaacataacgaatctgggggccacaattcagttgcaacacgcagtgggtaaggaaatgagcaaatgacaagatgatgtcaactgtgatgagtgctccaaggagaataaacagggagatgtaacaaagagaaaccaggaaggacgccaggctctctgaggaagtgacagtggagctggcacttgcaaattcggaagagccagccatgggtcacaagtgtcgccagcagataggaggccaagtggctgaggagccaaggggagaggggtggggaatgagttggccggtgctcaggcaccgggaagccatggggttctaaaacagggcaggtgatctggtttgcatctcagaaagaccagttgactgctgggatgag

SEQ ID NO: 727319 - DNA, 2027 bp, Homo sapiens
tttgatgggcagccatggcttttatccatattttcagggcagaagacaggtggaaccagaatgatgccataatggttgtaaccagtgggtggccaatttggggttgacataactgtatctgcaggggaagcatgatcaggtccttcttcatatttaaggcttacctactccttttaccccttcctctataagtagcactgctgtctcttacatccttttcctcatacctcccattcattctgtctacaaggttactaacttccttattctctatacttaacacatctttacattttgcccatatcacccaagctccttgcctactcactaagtttttataacacttcttccaagtttcattcaccccatctctttttcttttttctacaacacataattgaacatcgttaaatattcaattaagaattattgaacacagtacagttacaattgaacatattacaatagcattcttacaaagttctatgtatgttaaagccctgaaaaaaaattctgcttgtaaaatggactgatgtgttggaacagaggtgagcaaactttctgtaaaagagccagagagtaaatattttagattttgagggtcataggtctctgtcccaattactcgtaactctgtcattgtagattgaaaacagccatagtcaatacgacaacgaatgggcaaggctgtcttccaagacagtgttatttacaaaagcaggtggtgggttggatttggctgagctctgtgttctagggtcatattattaaaaccagatcttatctgcctgaatgtttggttggatatttgaaagtcaggtgggacctgggaatggtcttccttttgctggactctccacacattgcagaatgtctgcacctctgtcacctgcccactaaatgccactagttcctccaataaaagtgtccccatgaatttccaggcaccccctaggggtactgcagccacccaaccactggtttacacagtggcaggttcaggcatggggagaggtggctgtggtgtaggaatgaacatctgtcattcactcagcaaacattcaccagcgtaggctctgttgcaggcagcatgctaagcatgggccacacagccccaggctgacagtcaagccacaccttcatggaattyatatcccagggaggatacaggcggtgcatgagtctagttaacctgccataacaaaataccatggtcttggtggcctagacaacagaactttattttctcacagctctgggagctagaagtcccagatggaggtgccagcagattctcttccttgtgagggcttgcttgtatatgctcgctctgtgaacacatggcctctcctctttgggttcacagagagagaaatctccggtgtctcctttttttgaaagacagggtcttgctctatagcccagactgtagtgcagtggtgcaatcgtagtcactataacctcgaatgcctggactcaagcgatcctctcgtctcagcctcctgagtagctgagactacaggtgcacaccaggctgctgctgcttataaagacaccagttattaccttgtaactcttatgacctcatttaatcttcattactactctggaggccctgtttccaaatacagtcacaattgggggttacagcttcaacataacgaatctgggggccacaattcagttgcaacacgcagtgggtaaggaaatgagcaaatgacaagatgatgtcaactgtgatgagtgctccaaggagaataaacagggagatgtaacaaagagaaaccaggaaggacgccaggctctctgaggaagtgacagtggagctggcacttgcaaattcggaagagccagccatgggtcacaagtgtcgccagcagataggaggccaagtggctgaggagccaaggggagaggggtggggaatgagttggccggtgctcaggcaccgggaagccatggggttctaaaacagggcaggtgatctggtttgcatctcagaaagaccagttgactgctgggatgag

SEQ ID NO: 727320 - DNA, 1920 bp, Homo sapiens
gcatttacaactctctcaatctgaaatcctgagcatgcctagatgaacagaaggagggcaacacgtatttatctgtagctgagcattacactcttccacctttagaagattcccctctctctgccccagaggtaaacgggggctgcatgggaaggattctctactttcctctccctgctgggctccctctattctctatttttttattttaatttttattttttgagacggagtctcgctctgttgctcaggctggagtgcaatggcgtgatcccggctcactgcaaactctgcctcctggattcagcaattctcctaccttggcctcccaagtagctgggattataggcacccaccaccatgcccggctaatttttgtatttttagtagagacagggagacgaggtttcaccctgttggtcaggctggtctcgaactcctgacctcaggtgatctacctgcctcggcctcccaaagtgctgggattacaggcgtgagccactgtgccccgccacttctctattaaatgcaagccttttaagctttacctgctgagagctgtcaatctgagaagtaaatgagattatataggcgagagcatctagcacaggcctggcagttaggaggtgacttgaatggagttctggctggagtcaacccatggatatgtgtggattagtgagagacgcagcacagaatgtgggtccttgctgcttctcactttggggtgctcctgggtgtggccccactgagaggctgtcacacttgtgcccaccggcgattgtctagtggtccccaacaagtgaagcagcactgtccccgacccaggtcctaaagccagcatcagagctgtgttgctgcttacgcacagatgttttaaatgcatggcttttgattgtactttactatccttatttagctaacgaggtaactcaggtttagtgaggtgacttactggaccatgtgagtctgcaaatgagtggcaaagccagaactaaaatttggacctgtccttgtcactcgtgagtgacagaactgtaaaacagcgtgaaccttcgaggacatcccatcccattttctcactttacagttgcttggtttagctcccaaatgtgtcacacagaccccatccttcctgccctaattgccagttcttggatcatcaggggaaaatcctttgtctaaaaagacttggctagggagagtttttttctacactgaaagaactatttccctttaagacccaagggactgaactttgtttatttaatatttataaaagcttcttaacagactaaggacataataagacaagacatgattttgcgctgtcaggatggctgggtgttttccacctccccagagtcttcaggatgcagcatgagagattcccaaacattgagtgagcaaagactttcctctggaaaaagaatttcttctcaattcacagatgctgaagagcaatgtaaataaggtctttcctggttcacttggtagtttaaggctactgggcttagaaaacatttgtttgccccccccattaaaacaggcaaatattaaaaagaggggtaaatgctagttatctaagaaatgtctaaaataaggtctgtgtgaaaccaatttcgcaggggtrccaaaaaaaaaaacaacaaaaaaacaaacagaaaaacccaggcctttacccaaacgtacacattcttgagaatgaggagtgatatggtttggatctgtgtccccgcccaaatctcctgtcaaattgtaatccttagtgttagaggcggggcctggtaggaggtgactggatcatgggcatggagttctcatgaatggtttagcaccatctcccctccccgggtaccgcacagtgagtgagttctcatgagatctggctgtttaaaaatgtgtggcacctcccctgac

SEQ ID NO: 727321 - DNA, 773 bp, Homo sapiens
tctactggtaacaatttactgtattcatccatttttacactgctgataaagacatagccaagactgggtaatttacaaaagaaggaggtttaattggactcacagttccatgtggctggggaggcctcacaatcatggcagaaggcaagaaacagaaagtcacatttttcgatggcagcaggtaaaaagagagctcgtgcagataaactcccgtttttaaaaccatcagatcttgtgagactcattcaccattatgagaagatcacaataaagacccactcccataattcagttacctcccactgggttcctcccatgacatttaggaattgtgggagttacaattcaagatgagatttgggtggggacacagccgaaccatatcagccttattattcaagccagctacaacccaatttttatctctccactacttccaaactccccataagttttatctatactttttgtttctagttctttgtattttattctctatgctattgatcccaaacagggcttctatatctcttcagcaaaatagttccagtaaaattcagcaacgttatcttgcattggagcttaggtgacagtaacacctagcaggagctgaaactctgatgggcctgtccagcagaagcagaagtcatctagatcctagtaaagtgagaaaaggatggggagaaatacccatttccttctgctttccagttttyttgcaaatggaaaatttccacatattgaccaccccctactggagaaaaccatatttc

SEQ ID NO: 727322 - DNA, 977 bp, Homo sapiens
atgcttacctctaataagagagacaggggctgaaacctgaattgtgcgtgtgcaaggttgaattcaaggacattcatgtggaaaacaataactggaagcctgaaggaactgaacagaggtttcgcttgcttcctaccacaggagaaatggggttgttttcataccaagttaaagaagcttcataaatgccgtggggcttcaatacattccatgctaacaaagctgtaaataaacctgtacaaattcaaggtcaccagccagtcattgaactgtgtgatagaataaaatatggttcaaatgtgcttagagggaaacataactttaaacaattacactagaaaagaagcaaagctttaatcagcgatttattcaaatatgagrataaaacatttcctaaacttcaataatatttaaatatcacatatatatttcacaaaagatggacatgtccctactcataaaacactcttaagaaatttaaagaagatttgaataaataagaggatttatcacctaaagaattggaagacctttttttgttgttgttgtttggttttgagacggagtttttcgctcttgtccaggctggagtgcaatggcgctcgatctcggctcactgcaacctccgcctcccggatttaatcaattctcctgcctcagcctcccaagtagctggcatgcaccaccacacctggctaatttttgtatttttagtagagacgggggtttcaccatcttggtcagactagtctagaactccagacctcaggcgatctgtccacctcgactttccagaatgctgggattacaggtgtgagccaccgcgcccggctgggagattcattttaatgtatcaattctatctaaaataatctatagatttaaaacagtgtgaaaattttttaaaggtattttaaataaaattacagatataaagctatttttttgtaaacacaaaagaggtagcctaagatgac

SEQ ID NO: 727323 - DNA, 2072 bp, Homo sapiens
attaacatcagtgtaaaagaaggcaactccatcagcctagattcccatgttaactttgtgtagatgttaaaatacccattcttggctttaataaaacaagggttctggggtgtttacgtaatacaaataagttaatgttggcaaataaaattagtttcaaactcagggaagctcgaatttaaagtttttaattatactaagttactcctcattaagcttcttttttgcttcttcatatcaaactttcctaaaatatatacagcttaatgctcatagacggggatcataattgcaccaacatctgaagactattgggaagtttaatgagagaatgctggaatagcacttttcacacaaagtgtgtgtgaaaaaaatgatagcttccatacttatttctattatgctttctcccattcttcaagcattcctcattgaccctgactaatgtgataaacatatttcacctagggtttaaaataaaattaagagtagaactaaatgaatgaccctgatactggaatttagaaccaagaaggtatatttgaagttagcagtattctttccttttttaaaattttctatttgcatctattttctcttactctgagtactttagttttcaatttcattaacttaaaactaagattactgcaataatccagtgactgtattttagcattactatgtatraacatgcatgtgtggagtctttagaataatgtcttataaaatcacttgaaataattttctatgtgcagatttgcctccaacttgaaatataattaggtttatttgtttcagtttgcttttaatttttggagataacttttttctgtttgattaaatatatttcttaaaataagtaaaatatttgcatatttccaaatttaaaagtatactttaatatattcaaagaactccagattcctttttattagctttggtttgccctttcattatttcattttgaaaaattaacaaatatttatatgtctgcccacacatctcttagaaaaatggtaacatcctatacattcttttgtatcttgctttttttctgatttagtattatgtcttggaaaatgtgctatagcaatacatagacattttcatcttatctttttacctccttatgtggataaaccacagtttatttaaccagtcaagggcctttcaatgatctttgcatctctactgagggatatgaacatctactctgtaaatggagggttctgcttattttagtccatgttcctactcccactgcatagagaaccagcacaatcctctcaaaggaaaaagaagtcaatatggataagggcagaatttatattacctaatggcttagaaaaccattagataatagaatcttaggagattggtacgtggtggtcaaattccacagattgtttttcattgctagtagaaccaggaataaaacccacgataactgatttctatttcaagctttctttactattccacacattaccttatattttattttttgttgtttcattttgtcgtgtttttttcctacctcgtaacccattgtccctgacttagttccccagctcatactcaaatattcagaagactttgttaatcctctgtttgtaaaaagcaagagtaatacattttcaagtcaggccttctcatccctatgcaccgttccacaagctgtatttgcccaagatccagtttaaccagatgtgtattggtgccttttctctgggctacacattgctgagtgctctagcaaaaaggaggattcacaggaaataatggctcattctagagaggattctcatatctcacagttttttaaaaaaggaaacctttaaccaaaaatagacttaagcctaaattgtatatttctaatttttagtttcaaacatgataatgcctatgtacatgcatgtacaaccacacatacacaagcaaatgttttgggtttcaaggactctacattttttcatcttaccctcatctctttccactttcttttgcagatgttttctttgaaaaacatggtgagaaattcctccactgcattttcttcagcaggatat

SEQ ID NO: 727324 - DNA, 685 bp, Homo sapiens
tttctatttactttttgtttctatcatctaccatagtgtttactgatcaataaatcattgctcaatatatgcagaaattgttaacactgttgattcttacatttagttcccttttcctacttgctaagggttagaaagagtcttttgctgacatgttgctcttaggttcatttttctactttggtctacattcagctcacctttccaaggagggaaatgttcaaagttgagcaaaaccagtgtcagttttaatgcgaagtaaagagattggcaggattttgaaaaaggggcaaagggaaacataaagtcttgtgtcctaggaaagataaacttggaaatggaggaattgttaaaatttctaagtgtctggagggaagtgactgaagtcagagactgaagtgagtggaagttgggccaagtgtggtgtgtactagatgtattagagcagtgtccagaatcttcttggaaaacaggacaatggagagatcataaacgatgctgaaggaggtgacctctrccttattttccagtccctgaattatagtgttgccagtgatatggtggtcagcatggtgggagctataaaaaccatggagatggatgtataggtttttacatgacccctgaattttcagagctctagacacatcctctcaccaccccaccaatagccctcttaactttc

SEQ ID NO: 727325 - DNA, 3384 bp, Homo sapiens
  misc_feature 1619, 1620, 1621, 1622, 1623, 1624, 1625, 1626, 1627, 1628,1629, 1630, 1631, 1632, 1633, 1634, 1635, 1636, 1637, 1638,1639, 1640, 1641, 1642, 1643, 1644, 1645, 1646, 1647, 1648,1649, 1650, 1651, 1652, 1653, 1654, 1655, 1656, 1657: n = A,T,C or G
  misc_feature 1658, 1659, 1660, 1661, 1662, 1663, 1664, 1665, 1666, 1667,1668, 1669, 1670, 1671, 1672, 1673, 1674, 1675, 1676, 1677,1678, 1679, 1680, 1681, 1682, 1683, 1684, 1685, 1686, 1687,1688, 1689, 1690, 1691, 1692, 1693, 1694, 1695, 1696: n = A,T,C or G
  misc_feature 1697, 1698, 1699, 1700, 1701, 1702, 1703, 1704, 1705, 1706,1707, 1708, 1709, 1710, 1711, 1712, 1713, 1714, 1715, 1716,1717, 1718: n = A,T,C or G
tgtccctccacacctccccgcaaggtgagggagcccgctccggcctcggccagcccagagaggggctcccacagtgcagtggcaggctgaagggctcctcaagagcggccagagtgggcgccgaggccgaggaggtgcagagagtgagcgagggctgctagggctgccagcacgctgtcacctctcaccagcactttgggaggccgaggtgggtagatcacttgcagtcaggagttggagactagcctggccaacacggccaaaccccatctcttctaaaaatacaaaaattagctgggcatggtggcgtgcacctgtaatcccagctactcggggctgaggtgagaagattgcttgaacccaggaggcacaggcagtagtgacccaagatcgtgtcattgcgctccagcctgggtgacagagggagacaccatctcaaaaaaaaaaaaaaaaaaaaaaaagaggataagtgctgcaaacatacatatagtatgtagaagaagtttcaaataatttttaaattgctattgagatggacataatgcatcatgttaattgtgagctccatttctgtgtgaatagaaaccatatcaaacatcatcagtagaaatgtgtttttatcggacagcttttgaggtacctctaccttatgaataaaggctttctgcagtttgcagcatacagaagtttgttccttatgtaacagtaccaaaagaatccaactggatctcacgccacgtgaaactttacctacacgtctttcctgaaagagatgtttcaatcctgggaaccgagatcctctggagaccagagccaaataactgccacattggaatgcattccgctgggggttcctgtattttatatatgaaagcttcctggccgcatgtgtgttttggttggctttagtggyaggactgaagggttttgctttgcttttgttatgtgaatggggaaaggggctttgccactcatggcctcattaacaacaatggtgccaagatgcggacttttaagtgacttttactttatagattctgaaaacccacaacttgctagttgtgagtgacaagcatctttctgagaactttctgaaaattccccacttccaagtttacacagcctttagtagacttaaaaaagaagagaaaaataccaaacagttcctttgttgagaaagcagcctacatatagatctgattgttcatggtatgtttgagtccacgaagtagaaatgaacaaaaattattgcttagttttcctgatgtcaaatcagttttgttttaaaaatgtcattagtaatttattaggtaaaatgttagctaagctaactctagttaatttacaaagttttggcttcattttgttatgatgagactttataaacctgatctttaaaataaggttcttaaaatttttaaaaatttattttatttattttttgagacagagtttcgctcttcttgcccaggctgagtggcagtggcatgatctcagctcattgcaaccttcacctcccaggttcaagcgattcttctgcttcagcctcccgagtagctgggactacaggtgctcgccaccgtgcccagctaatttttgtatttttttagtagagatgnnnnnnnnnnnnnnnnnnnnnnnnnnnnnnnnnnnnnnnnnnnnnnnnnnnnnnnnnnnnnnnnnnnnnnnnnnnnnnnnnnnnnnnnnnnnnnnnnnnngccaccgtgcccagctaatttttgtatttttttagtagagatggggtttcaccatgttggccaagttggtctcgagctcctgctcaggtgatccaaccgcctcggcttcccaaagtgctgggattataggcgtgagccacggcgcctggccaggtgtttttttttttttttttgaaacgaatcttcttctatttcacaagtggaaatcatccaggaaatgtgcacctcaagggaaatccagtgaaatcttgattctgggtagaacatatgagaaaagaatagtgtagcactcactgcttggctatttgggataggatctgtcttaggtccccataagcgcttttatttctgtgtaatttactgcaaaactctatgaggtaggactaatattatcttatgtcaagggttaagacaattgagacttgggggtttgtcaaaaataaaagattttctgactttggagtgcgatgtgcatttctgttgcacagatctccaccaagggcaaattcgatggcaatgacaatttgatgtcagaacttctcaggaaaggctctgatgaactcattcacactgcatgtgaatgactgagaaaactcgatgtattttcacttttttttttttaagaagtaaacctgggtgttttgtagttctatgagaaaatgaaagctgaagctaggctatagatgaaaagttctattcattattacaatttaataatgcttccaaaatagcaattcacttaaatatacctagttagggtgttaagaaatactttgattaaaaccacactgcaaaatagggaacttcaatggactgctttaaactctcgacctcaaaggaaggaaatcaactaaccgataatgaaaactagcagaaaaaaaaaagcttaggatccgtaacagattcggagtcaacaatgacatgactcagcattttggggttcaattaaaaccaggcttgtaggttgcaggtcaagttgtgtttcggtgtgtaacgcataaaacttcttgttccacgctccgcggtgttggggattttctactgcatctcgacagcatctcgggtaacaaccgagcccctcctcgcagcgtaagtcgtaggagccctcggccattcttccccctccctcccgccgccggtcccagcatcggtccgggttcgcttctacgcaggttcagcggccgcggacacaaaagcgcccctgctcgccttcgatgccgctgcttggtccaggggcttctgtgggattttaacacgctaaggagggcactcatagtgttttaccgagaaacgctttcgagctcggatctttggtgatcacttcaagaatgtattagttttctttgtagcttaaaaaaaaatctcgttcgccaagccacctggcaccccaaacactgctgcgagcgctgggagggaaagggcgggagcgcgcgggctccgtgtgctgcgagggcgcctgggcggctgagataaggcggtggcaaacgtcgcgctccgggccgccccgccagactcggtttcccccgctcaccggcctccccgcccccaggcagggtggggcggggcggacgcgccacggcgcgcgaccaatcgacagcgccggggatgattcaaaaggtcgaggagccaatgggagccccgggcggcctcgccggtggggagggga

SEQ ID NO: 727326 - DNA, 1136 bp, Homo sapiens
  misc_feature 338, 339, 340, 341, 342, 343, 344, 345, 346, 347, 348, 349,350, 351, 352, 353, 354, 355, 356, 357, 358, 359, 360, 361,362, 363, 364, 365, 366, 367, 368, 369, 370, 371, 372, 373,374, 375, 376, 377, 378, 379, 380, 381, 382, 383, 384: n = A,T,C or G
  misc_feature 385, 386, 387, 388, 389, 390, 391, 392, 393, 394, 395, 396,397, 398, 399, 400, 401, 402, 403, 404, 405, 406, 407, 408,409, 410, 411, 412, 413, 414, 415, 416, 417, 418, 419, 420,421, 422, 423, 424, 425, 426, 427, 428, 429, 430, 431: n = A,T,C or G
  misc_feature 432, 433, 434, 435, 436, 437: n = A,T,C or G
tagctcaaaaggtcagaagctgttcctgtaaaggctgcctgatgttccgtgctctgtcctccttacaggattcagggcgcttttgtataaaagtttccacctctggtagacatttcaaaagactcttgtgaaaagaatatctgtaagcatatagccagaaatgcacagagatttaatctgattaattaagaagtttttttattttaatatcaacccaacttttatataatctttaaaaattctagtgcttctggatcaaaggtgaggttattcaccccaggaggatctttaaattgaggagtatctgtaaccttttcttttaaaaatatttaaaattnnnnnnnnnnnnnnnnnnnnnnnnnnnnnnnnnnnnnnnnnnnnnnnnnnnnnnnnnnnnnnnnnnnnnnnnnnnnnnnnnnnnnnnnnnnnnnnnnnnncttccttttgggtcaagtggcgtccgtcgggcagctgcacattggatgatacttcctagagtgcgtcggtgtcctgctgctaggaaaggtgccctgttgtttggagctgggagaaaacagcaagaaatgagttctaaggattttggtaagcttgattaggggaattgagtctaaaatagatgttaggtaagagatgtggtggtacatgtcagggccagtgggtgaggccaaactgaaagcaggaggggaaaggggcaacaaggcagggcaatgcaggaggccrtgtgccccagtgagtcagcagacagtcgtctagacagacctggaaatgtggtccctcagctcattgttagctttgcttttggttcacatttgagtgagtgtctgcatctagagaggccagttcaggagcaaaacatccattttccaggaagggataagagaaagaggggctaacctttagcttgagctgcttggcatccagacaaagggtctcacactagacaggtcacagctaaccccctctagtccttgcatgactttgcaaaatctcctgttttattttgattacttccaaaagatggccatctaacctgtttgtacaaagaaaaatgagtattcagaacaggcaacgtcatcctatggacagggggtagccgttcagaactctgaagtgcttgacgcagtgcagtatgctgt

SEQ ID NO: 727327 - DNA, 606 bp, Homo sapiens
aaaaaaattaaattaaatttttaaaatatataaataaaaataaaagttgaaaactgaagtttagagggttagagaggatttagtaacttgctcagaactgtcagaaatgacagaatcaggatgggaactctggtgacttgattccaaaggctgtgtccttcctccctacttcacatgggatagctcaatgtgtgtccagagtctggcacgtactaaatgttcagtaaatgtaattctttctttccattaccttgactgagttctctgaagttgtctgcttccttggccagatctctgagtgctgcctgctctgaggatccccatttcccacgaggatgccttcatttcccaaaacagaagttctcattcaacagtgttgaatgcctggccattgccattgctatgtgaccttgggcaagtcatgtcacctcacttgtaaacccrgcttggtattctctgcttgctccaatgggggacatataggacagaagccatgtaaagcatctcacacagagcttcccaactcaatgactagtcgttgctactattgtgttcttctggaacttgctttctttgccttcttggctggcttttcaccaacagttg

SEQ ID NO: 727328 - DNA, 606 bp, Homo sapiens
aaaaaaattaaattaaatttttaaaatatataaataaaaataaaagttgaaaactgaagtttagagggttagagaggatttagtaacttgctcagaactgtcagaaatgacagaatcaggatgggaactctggtgacttgattccaaaggctgtgtccttcctccctacttcacatgggatagctcaatgtgtgtccagagtctggcacgtactaaatgttcagtaaatgtaattctttctttccattaccttgactgagttctctgaagttgtctgcttccttggccagatctctgagtgctgcctgctctgaggatccccatttcccacgaggatgccttcatttcccaaaacagaagttctcattcaacagtgttgaatgcctggccattgccattgctatgtgaccttgggcaagtcatgtcacctcacttgtaaacccggcttggtawtctctgcttgctccaatgggggacatataggacagaagccatgtaaagcatctcacacagagcttcccaactcaatgactagtcgttgctactattgtgttcttctggaacttgctttctttgccttcttggctggcttttcaccaacagttg

SEQ ID NO: 727329 - DNA, 606 bp, Homo sapiens
aaaaaaattaaattaaatttttaaaatatataaataaaaataaaagttgaaaactgaagtttagagggttagagaggatttagtaacttgctcagaactgtcagaaatgacagaatcaggatgggaactctggtgacttgattccaaaggctgtgtccttcctccctacttcacatgggatagctcaatgtgtgtccagagtctggcacgtactaaatgttcagtaaatgtaattctttctttccattaccttgactgagttctctgaagttgtctgcttccttggccagatctctgagtgctgcctgctctgaggatccccatttcccacgaggatgccttcatttcccaaaacagaagttctcattcaacagtgttgaatgcctggccattgccattgctatgtgaccttgggcaagtcatgtcacctcacttgtaaacccggcttggtattctctgcttgctccaatgggggacatataggacagaagccrtgtaaagcatctcacacagagcttcccaactcaatgactagtcgttgctactattgtgttcttctggaacttgctttctttgccttcttggctggcttttcaccaacagttg

SEQ ID NO: 727330 - DNA, 610 bp, Homo sapiens
gtctataggtgttttctctgtgctacctgaaccccaaagccttgtttcatagactaaaggtcactgccaaacccaaacgttaatagcttggttttgatggaaacattttgctkcagtatattttccataacctatttttcattacccatccaccttctacctggcactgttgtttccatatacaacattataacatggatgttttatgataaaatattaagcaaacaaagaaggcaacctgtatacacacaaggcatacccttgtatagctcacatctgttcagtaaatacctatagcttttgtatttagcaatttctgtcattatttggagcactggaactaatcctattttttccttaaaaaaaaacttccagcatatttttttaaggttggtatagttggtaagcctgagatcagggcaccagcgtggttaggttttggggaaggcccccttctgggttgcagactgcagtctcctcattgtatcctcagatggtgggaagagagtgagctagccctctggcctcttcttataagggcactggtcccattcatgaaggctccacccacatgatgtaattacctctcaaggctgcatcatgatcacat

SEQ ID NO: 727331 - DNA, 1258 bp, Homo sapiens
gatcacaggcatgagccaccacacccgcccatatctggctttgaaaggaaaatacaagcatgctttcctaaagatgcaccatatacactgtgttaagtaaaacagctcagaaacagacagtcaaacaccacacgtcctgcctcataaccaggagctgcccaacaggcaatgtgggctcagaaagtggaaggcggatgtgggggactctaacgaggggaggcaggaggtgtgagggtaagaagcccagactgcaccaccatgcactatacccacataacacaactgcaccttatgccttgaattcacacacacacacacacacacgaacttcctatgtttttacaacacaaactaaagcagacaggaaaagcagtgtgcagttttggagcggctacaccagctctcagcagatcccagtgttcctgaacacaaagctctgaccctgccgatgcgctttagggcctgcttccaaggtcctaaaggccaggcctttctgagaggactaaggacattttggtgaaaactgatttggtttgtatgacagaggggctcttttgttgactgacactttcctttttaaagacacagaagaggctgggcacagtggctcatgcctgtaattgagaccatcctggccaacatggtaaaaccccatctctactaaaaatacaaaaawtagccgggcatggggcatgtgcctgtagtcccagctacccaggaggctgaggcaggaaaatcactggaacctgggaggcagaggttgcagtgagcagagattgtgccactgagctccagcctggccaacagagcaagactccatctcaaaaaaaaaaaaaaaaaaaaaaaaggacacagaagaacacgaaatgtgtttgatctgaaccaagtattttgagatcctgacacctgcagagacctgaagacactgagggggcacaggatggctcaggcggcacctcactctggagtggagtgcttccttcctggctcacctcctagccctcacccagccacacccacgggacaggctaggatgctcccagatgctgcagcactcaaggaggccccactggaaaagccaggcaacttcaggcagatgacagagccgggacactttgagctcgaggcacagaccctcattccaggggtgcatgcccctcatgcaggagacaccagctcttggtgacacaggccacaggcacccactcctggctgagctggagagaaaactggctgggaagctgatcaaatgtctcca

SEQ ID NO: 727332 - DNA, 1206 bp, Homo sapiens
acctgcagcgaaagctcacagcagccagctatactggtaacagccagaaagggagaatcaaggtgccactacaccatgtgggacttctcagcaagaacagggagctggagatggacagaagtgggtggatctgagggcactatggtgagggaaaagggtaaggctaaaaagtgacaggccgatgcatccatctatgacactcctgaaatgacacgattttacagctgagaacaggttttggggtgttgggggtgcccattcaggggcaggagcaggaagccgcgtgggcctgagaatggccacagatattcacacgtgataaaactgcagttatacacatgcgtgcacagacgcacaaagtaagacacacaaatccagagaccccagatatgccctgtgtgtgcaatcaggggaactggggaggggtccgtgcgatctctcccacgggttttgttttgtttttttttttgcaacttcctgtgaatctataattatttcaaaataagaagtgaaaaaacaacaacaacaacaacaaaaaaraaaaacaaggagcttcgcctgcagaggtgtccgagcactacaagaggaaaggcagcaggcagtcctttcatcccagccatctgacatcagcgagtttttaaccacgtgcatgcatatttgtatttttaaaatctatagtggggtcagcagacaaagatggaccaaaacacaggtgagtgggggacccgggcagagggacagatgtgaggtcatgggcacaggatgctgggcgccggacaggcagggagaagctgagcgacgccaggcagtagagggacagagtaaggggactagagtggagctgagggaccacaggtccagggtctagtgagccaggcacacaggcacaggggaggccgcagagccctacagggcaagggcaggagctggggcaaggcaggcagggtggggccagggtgccccatgggtccatcagtcaagagtggagcccagaaaagatcaagctgagggcccctgcactctgaggtggggccagctcagctgcctgccttggcaggaacccccacccatgctgacaccccctgctgcccccatctgctgagcactccctggcctcacacagggtggatgtcctcacaggacccaggttctggggtcgagggcactttccagctctctgtgccggtgactgtctaccaggcagct

SEQ ID NO: 727333 - DNA, 1030 bp, Homo sapiens
gattattgaagtcagggaatacatttcatccagtaataaaaccttcaatttacattataagttgttacgtgctggatctcttgaaaacataatgcacgatgagagagtagaggacagtgactgaaaatcatcacaatcttcctttgcacaagaatgatgcattactatcatctccatcaccacctcattttcattatcttcaccaccaattccatttcataacacatttgcttcatgtctcacttacagtcacaaacttctttgatagacaagaaagggacccatgttgagatctacattctcaaatcaggttaagagggacagcgatgcttatttcactgtctatgtgtttatacctgattctttcaaccagggagacagcctgacccatggagaaagcacgagtcaaaggtcaaatgcatccacctgcaggtcctgtcactgaccacttagcatcccacaatatcactgaacctcagtttgctcataygtaaaataaaattttaaaaaatagaaaatgtaggtagcgtgtctagctcagatggctctagtcccttactgtgacccaaccatttctaatttggcacaagttacaataaaaaacaagcgtgatacttacctggcagggcaaataccatcatcacaaaggtggttttcccagggtaagccttatccattgcactctggatgtacaaactcctgcaatttccccaaatatgggaaactcgactgcatcatttgttgtcatggggactgcatttgcactttcccctaattttaaaaaaagaagacaagcacaattcagataagtaaaatagaattaattaaatgcacgaaagagaggaataaccaaatactttgagagctgagctagttcctataattaggcaatattcatgactctgagcctcctggaagtgagggcaaaaatggaaataaaagagtttccccaaaaggaagaagcataccaatgcttcaaaagaaataaagtctaaactgacaacaggtaacgagatatttctcatgtaaa

SEQ ID NO: 727334 - DNA, 2329 bp, Homo sapiens
  misc_feature 883, 884, 885, 886, 887, 888, 889, 890, 891, 892, 893, 894,895, 896, 897, 898, 899, 900, 901, 902, 903, 904, 905, 906,907, 908, 909, 910, 911, 912, 913, 914, 915, 916, 917, 918,919, 920, 921, 922, 923, 924, 925, 926, 927, 928, 929: n = A,T,C or G
  misc_feature 930, 931, 932, 933, 934, 935, 936, 937, 938, 939, 940, 941,942, 943, 944, 945, 946, 947, 948, 949, 950, 951, 952, 953,954, 955, 956, 957, 958, 959, 960, 961, 962, 963, 964, 965,966, 967, 968, 969, 970, 971, 972, 973, 974, 975, 976: n = A,T,C or G
  misc_feature 977, 978, 979, 980, 981, 982: n = A,T,C or G
aactgtgagctgtctaaggtcacacaactagtaactggttatagcttgtattgtaaaccagatccattggactgctcttcccacgcccaagtgcctctaatgaatacatgcagactcgcttgtttatacaggcacagttttcatgggctcattatgactagataatgtgttactttcataagcagtgtagacaggtcatttgtttgacttcacagacacttctgtagcctcagccaatttaaaaaataatgtaaggttagtaatgtgtaaagtggcaagttggcagcatatatcagaagatttagaaaattgtttattctttttcagctaactcacttttaggaatttacccttgggaaataatcagaaatgcataaaaatattacatatgagaatgctcatctcagcattattatgtattacatataatattattatatatggaaaaattggaagcaatctgaatgtccaccatagggattggttaattaaawtatggcatggggccaggcgtggtggctcatgcctgtaatcccagcactttgagaggctgaggcgggtagatcctctgaggtcaggagtttaagaccagcctggccaacatggtaaaaccccgtctctactaaaaatacaaaaaattagctgggcgtggtggcgggtgcctgtaatcccagctacttgggaggctgaggcaggagaatggcttgaacccggatggcagaggttgctgtgagcccagatcgcaccatcgcactccagcctgggcaacaagaaactccatctcaaaaaaaaaaaaaaaaattatggcatgccctaattagcatgaggaattgccaatgataggctgctaactatattttctaactatacaattaataagagnnnnnnnnnnnnnnnnnnnnnnnnnnnnnnnnnnnnnnnnnnnnnnnnnnnnnnnnnnnnnnnnnnnnnnnnnnnnnnnnnnnnnnnnnnnnnnnnnnnnagccctgactcctcgattactttcacttaaaacataaagctaagttttctgttcatttgaatagacaggttcataggaacttgcgcctttataccagagtggcctcatctcctggtgtgcctgggatagtcccattgtatccctgttaccctggtctaattgttcattgtaccccctattattctgataaatgtcctgctttgtacaataactattattatatgctgtttaattctgctacctgaacaagtcaaacttgagaaacaaacttaatgatcaggctagaaacaggagcaaagtcagttatttttctcaaataggttatttccgattttaagtatgaaatgacaggtacacagggatgtgaaagcaaagtgtctacggaaagacaatgataactgggccacatttctttattatgacccatgtataataaacaaggatattacagcaaaccttagctttattcatgctttaagaatggattcgtacatcaagtctaagataggacctcttggccaatagcataacaggaaatgttttctgtgaataaagactgtgctatacacagacttacctgttcccaattccagccgcctgttcttcaatgaacacaatttgggaaaggagaatggccatgcaacactcctaggaggaaatcaatagcttaaatgaaagactctaaacaacatccataacacttgtcagaaatccttgttttatagcattacagtgccatatgccttaataataaaaataatgaaaaacaataatgattttactccttaaatgaacttaaggaaaaattaaatgaaaacagtaatgtggtggcatttggctgcatggaagaacataagaagtttaaaagaagctgtaactagcttttgtttttacaatgggtgtattttctttattattattattttttaatttatttttttttgaggcggagtctcactctgtcacccaggctggagtgcagtggcgtgatctcggatcactgcaagctctgcctcctgggttaacaccattctcctgcttcagcctcccgagtagctgggactacaggtgcccgccaccacgtccggctaatttttttgtatttttagtagagacggggtttcaccatgttagccaggatggtctcgatctcctgacctcgtagtccacctggctcggcctcccaaagtgctgggattacaggcgtgagccaccgcacccagccacaatgggtgcattttctaagagtaatatttctatgaaaacattttactcgtaatattttcttacactgaaagcaaaaaacaaatcagatacatcaagataattttaaggagggcatttatg

SEQ ID NO: 727335 - DNA, 1109 bp, Homo sapiens
ggttccttccatgctgcactgccttcctttagccagtgacagagcctggtgcccttcctggactgaaaccgatggaatccttccgaggggagtggcattcggcttgcctcctgcctaaatctgcttttatccatttgtagcaactttatgctgtaacaaaaggcggaaggaaaccaagagttctcttagcaagtcagactccttcccaagatggcaatcacagaacacctcgcaggatctcgcaggccacggtgaaggagaatgctttatgttgatgttgtccattctctctctcttctctttgcttttttttgacctaaataagctgcaaacatgttaatttaccaatattgataaaccacatgaagaaatcaggcattttacgttatgatgtgcttgttcctgtctctgcctataaattgactgtattgatgatgaaggaaggagttccggctgaccattctgaagcagtcccagtcacgggaggatgccttacccagtggccagacatgatagttccaggtctccccttggttttggtgatagagaacccaaggaggcaagggggaatatcaacgaacccatttctatttcattacccacaagcgaaaggactagaaaaaaatatttgaaattaacatttagatgcataggtctaactccttgtgtgaacctgtcctcctcaccccctgctccaaatatgtgaggtggaagcattagcagcggagcaaaactaagatctaagaacgggcggtggtgctattgtgtccctgggagtcactccacgtcgcattgcacggtggtgctgaggagcgagagtttgctttatcatgggctttcagttcccacctgcgagctgcaaactttgatcttgttgtccttgaattcccctctacatcacgaggaagctgtctctttcatctcttccggatttggaatcagaacactctgcccgttgtttattcgccagttgccattcttaacatgggggagcattaagatgcaaatgcagagatgtgtccygtcttgacaaaggtgggaacccctgagctggagaaggggctcctctcatgagaagctggggtaaacagccaggcatcgcagcgtgg

SEQ ID NO: 727336 - DNA, 1038 bp, Homo sapiens
tcctaatgctctcctcccgccttttcaatgtgaaccttcccacccaccctgcttttcttgtcttcttcccatagcttcagcaggctccaggtgccgcagccctgactcctcagggcccacccctgctgtgtccacacaaatgcccccaggaagctgacacttccccgcagcctgttcctgcagtccctgccttggttcttagctgatgctgtcttatcactgccaccccatccccatttctgagcatcaggcaccctcatcagcacttggcatgtaatagctccattaaccttaactgtaaccccattttttggatagagtttttggtgtgttaaatcttgtgttcaacttaggttttgaaataagagcaggaaatgaagctttcagactgcaaatgtttcctttgaatgttctttaaagaccccatatgataggacatgtgctttttgtgagtgtaactccctgtggtgatcacactaaagtttggacccactctgttagacaagggaggaactgggcagaactgcctgcccatggctgggctgtaggctcagtctccttttagatgygtcagatttctagtcttgctttcttgcaggagttacttcattcagttgtaatattatccttaggactttaaatccctccgtattttatatgtgcttttcagggttaggcggctccactgctaccgcagtttttttttaataacgtaaaatatgccatcataaccactcaattcagtgttcagttcattcagtgttcagtagtgccagagtatgtatcttgttatgcaacagatctctagaatgttttcatcttgcaaaactgaaactcagtacctattgagtaactacccctcccttttatctctctctccagcctggcaaccaccgtcctacttcctgtttctaagagtttgactgctttagatactccatataagtagaatcatgcagtatttgtctttttatgtttggcttattttacctcaaggttcatccatgttgtagcatgtgtcagaacttctttttaagg

SEQ ID NO: 727337 - DNA, 661 bp, Homo sapiens
ttcatacatttccattttttatgctttaagatatccactttgaaatagtagcaaaagaatacatagctaatggaataacaaaggggaaaataatatctaaagaagacaaaaacataaaatacagaaagattagaaagaaaaaaagaactctcaatcaccatagataacaattgaatggcagaaaatttaaaagaaattgtagatatattactagaattaatacatgaattcaacaatattaatcaatatataaaaattaattatatttctccactgagaacatatagatataaaatgacattttcttttaaaaatgtacaataacaataaaagccaaaaatactaaggaataatttyaatcaggttgtgcaaagcctccacacagaaaaaaatacaataataatagagataattttaagtgcctccatttatttaaatggaggtgtatatgccatatttatgatttgacaaacttagtattataaagatgtcaattttccacaaattagtctatttaactgttttcccagtcaaaatctcagaagttattttttaagtatatgagcatcaaccaacaacaaggtttcaaaatgtatataaaaatacaaagaaccaagcaatcttaatgatgctgaaagctggacatccgcttccaaaattc

SEQ ID NO: 727338 - DNA, 661 bp, Homo sapiens
ttcatacatttccattttttatgctttaagatatccactttgaaatagtagcaaaagaatacatagctaatggaataacaaaggggaaaataatatctaaagaagacaaaaacataaaatacagaaagattagaaagaaaaaaagaactctcaatcaccatagataacaattgaatggcagaaaatttaaaagaaattgtagatatattactagaattaatacatgaattcaacaatattaatcaatatataaaaattaattatatttctccactgagaacatatagatataaaatgacattttcttttaaaaatgtacaataacaataaaagccaaaaatactaaggaataatttcaatcaggttgtgcaaagcctccacacagaaaaaaatacaataataatagagrtaattttaagtgcctccatttatttaaatggaggtgtatatgccatatttatgatttgacaaacttagtattataaagatgtcaattttccacaaattagtctatttaactgttttcccagtcaaaatctcagaagttattttttaagtatatgagcatcaaccaacaacaaggtttcaaaatgtatataaaaatacaaagaaccaagcaatcttaatgatgctgaaagctggacatccgcttccaaaattc

SEQ ID NO: 727339 - DNA, 1671 bp, Homo sapiens
aacctatcaggtagtatacaaagagttagcaaaacagaggtcagcctgagtttgaagccaggttctgcctcttactaactgtggaagtttgagaagttacttaacctcttgatgcctcagtttactcatatgtaaagtggggacaaaaatattccctccataaaagggttgttgtgagatttgagttaatgcttataaagtacgtggagccatgcctggaacatagtaggtgctaaataactaggagctgttagtactctatttagagttagatctaattttgaaatctcagttccatgtgtcttatagctgtgtgccctgggaaaatcccttcatttatttaacgccttctttcttcttggataatttggagatttaaaaaaatcaaaaagaaatttcacaagggtgtcatgaagacttaatgggataaaatgtgtcgcagttatttgtaatgtacaaggaataaaagttgacctagacggctaagaagttttggcgccagaagtcaactgtatatatataatactaacttacttagacaccaatgttcactgactttctgactctgggagtacattccagatttgttctgtaataaaggaaagtaaaactgatccttaacccatcaaggctcctgtacttaccatggaaaatgacaatgttaaaaattacacttctgacaaaagttacatgttaacaatagcttttcttttcagtatgaacatcattctcagtttatgtgatagtattgtaatcaaaggttcagaaaagctaatgaaatactataaaatgtcaactgtaaaawtaattttagtggaacgaattggagaagtggaaaagacaaattggttaggaataagaccatcctaataattagccattagaaaatggtctcactgagcaaaataaaggtcacatgggggtcagctgctaaggttctgaattatcaatcagaaagtggataatattcagaaatcaatggagaaactaaagactttaagccatgcaacacaatcaacaatgaattacacttacataaacactttcttcaagtctccaaatacatggcaatcatgacaaacgaggcaaaagtaggtggaaggttgaggaaggaagaaacttggctttacatctggtgatggggcaattttaagagttcctcttctgatatgggttttgaatataccgaacaggaaatgaaggtcttatcctaaattcaatggcatttccctcaaatggcaagtggtttctccaagattgtgtctagacaaaggaatccatgactgggtgtggcagtacctgggcacgtccttgttcatcagtccttttggtcaggggctctgacttggttgtccttctggctcctgcagtgtcaaggatggttttgcacagtagtcagtaattaagtgtttaatgaatgaatcttcatatatgtcttacccagtcatttattaaaaacttgacggaaaaaatcatcttctatttgtttatattcttcacagtatatatggtataatgaatgtaaacatagacaattgttaaaaatttaattggaagagtttttatttgtatttttgagaaattatggtattaatacatattgttgatcccttagtgactaggaaaattgtaaattaagatcatttatatcaattataagaaataaagcaa

SEQ ID NO: 727340 - DNA, 1671 bp, Homo sapiens
aacctatcaggtagtatacaaagagttagcaaaacagaggtcagcctgagtttgaagccaggttctgcctcttactaactgtggaagtttgagaagttacttaacctcttgatgcctcagtttactcatatgtaaagtggggacaaaaatattccctccataaaagggttgttgtgagatttgagttaatgcttataaagtacgtggagccatgcctggaacatagtaggtgctaaataactaggagctgttagtactctatttagagttagatctaattttgaaatctcagttccatgtgtcttatagctgtgtgccctgggaaaatcccttcatttatttaacgccttctttcttcttggataatttggagatttaaaaaaatcaaaaagaaatttcacaagggtgtcatgaagacttaatgggataaaatgtgtcgcagttatttgtaatgtacaaggaataaaagttgacctagacggctaagaagttttggcgccagaagtcaactgtatatatataatactaacttacttagacaccaatgttcactgactttctgactctgggagtacattccagatttgttctgtaataaaggaaagtaaaactgatccttaacccatcaaggctcctgtacttaccatggaaaatgacaatgttaaaaattacacttctgacaaaagttacatgttaacaatagcttttcttttcagtatgaacatcattctcagtttatgtgatagtattgtaatcaaaggttcagaaaagctaatgaaatactataaaatgtcaactgtaaaaataattttagtggaacgaattggagaagtggaaaagacaaattggttaggaataagaccatcctaataattagccattagaaaatggtctcactgagcaaaataaaggtcacatgggggtcagctgctaaggttctgaattatcaatcagaaagtggataatattcagaaatcaatggagaaactaaagactttaagccatgcaacacaatcaacaatgaattacacttayataaacactttcttcaagtctccaaatacatggcaatcatgacaaacgaggcaaaagtaggtggaaggttgaggaaggaagaaacttggctttacatctggtgatggggcaattttaagagttcctcttctgatatgggttttgaatataccgaacaggaaatgaaggtcttatcctaaattcaatggcatttccctcaaatggcaagtggtttctccaagattgtgtctagacaaaggaatccatgactgggtgtggcagtacctgggcacgtccttgttcatcagtccttttggtcaggggctctgacttggttgtccttctggctcctgcagtgtcaaggatggttttgcacagtagtcagtaattaagtgtttaatgaatgaatcttcatatatgtcttacccagtcatttattaaaaacttgacggaaaaaatcatcttctatttgtttatattcttcacagtatatatggtataatgaatgtaaacatagacaattgttaaaaatttaattggaagagtttttatttgtatttttgagaaattatggtattaatacatattgttgatcccttagtgactaggaaaattgtaaattaagatcatttatatcaattataagaaataaagcaa

SEQ ID NO: 727341 - DNA, 1671 bp, Homo sapiens
aacctatcaggtagtatacaaagagttagcaaaacagaggtcagcctgagtttgaagccaggttctgcctcttactaactgtggaagtttgagaagttacttaacctcttgatgcctcagtttactcatatgtaaagtggggacaaaaatattccctccataaaagggttgttgtgagatttgagttaatgcttataaagtacgtggagccatgcctggaacatagtaggtgctaaataactaggagctgttagtactctatttagagttagatctaattttgaaatctcagttccatgtgtcttatagctgtgtgccctgggaaaatcccttcatttatttaacgccttctttcttcttggataatttggagatttaaaaaaatcaaaaagaaatttcacaagggtgtcatgaagacttaatgggataaaatgtgtcgcagttatttgtaatgtacaaggaataaaagttgacctagacggctaagaagttttggcgccagaagtcaactgtatatatataatactaacttacttagacaccaatgttcactgactttctgactctgggagtacattccagatttgttctgtaataaaggaaagtaaaactgatccttaacccatcaaggctcctgtacttaccatggaaaatgacaatgttaaaaattacacttctgacaaaagttacatgttaacaatagcttttcttttcagtatgaacatcattctcagtttatgtgatagtattgtaatcaaaggttcagaaaagctaatgaaatactataaaatgtcaactgtaaaaataattttagtggaacgaattggagaagtggaaaagacaaattggttaggaataagaccatcctaataattagccattagaaaatggtctcactgagcaaaataaaggtcacatgggggtcagctgctaaggttctgaattatcaatcagaaagtggataatattcagaaatcaatggagaaactaaagactttaagccatgcaacacaatcaacaatgaattacacttacataaacactttcttcaagtctccaaatacatggcaatcatgacaaacgaggcaaaagtaggtggaaggttgaggaaggaagaaacttggctttacatctggtgatggggcaattttaagagttcctcttctgatatgggttttgaatataccgaacaggaaatgaaggtcttatcctaaattcaatggcatttccctcaaatggcaagtggtttctccaagattgtgtctagacaaaggaatccatgactgggtgtggcagtacctgggcacgtccttgttcatcagtccttttggtcaggggctctgacttggttgtccttctggctcctgcagtgtcaaggatggttttgcacagtagtcagtaattaagtgtttaatgaatgaatcttcatatatgtcttacccagtcatttattaaaaacttgacggaaaaaatcatcttctatttgtttatattcttcacagtatatatggtataatgaatgtaaayatagacaattgttaaaaatttaattggaagagtttttatttgtatttttgagaaattatggtattaatacatattgttgatcccttagtgactaggaaaattgtaaattaagatcatttatatcaattataagaaataaagcaa

SEQ ID NO: 727342 - DNA, 691 bp, Homo sapiens
ttccattgctggaattctggggtcatctctttgacaagtctggtttgtaaacagcacacaggctagaatgagatactcttgagaggatgtgcatattctcaatagagttttaggaattttcctgcttataggaatttactttggcttctgagtttccaggtttagacagctcaaaatacgctaacaatttcatggaactgctttatttctatcaaatatttacaattaatttataagataacagtttttaaacattccctagaaagcaattagctatcatttatttgaattatttaagcaaaattcaaaatctatgaagaaaaaagtcacatctttaaactttaaaatagcaatattctgtctaaatctaaggaaatttttcattatttcattaattaaaacattttaaggacagttttagtggttcttaccagagatgtctgctacatacatgcacacataktattttaaagattgaggtttttcttagattagattaaattatcaaagtattctacggtaaaacagctatcatcacagtatatactaaacactaaagtaaaactttgctgctaaatgtaattaaatgttacagaatcaacaaaatataatctacttatctatataataaatacatttctatcattaaacaaattgttatagttttagacctcaggcatcacacaaatct

SEQ ID NO: 727343 - DNA, 691 bp, Homo sapiens
ttccattgctggaattctggggtcatctctttgacaagtctggtttgtaaacagcacacaggctagaatgagatactcttgagaggatgtgcatattctcaatagagttttaggaattttcctgcttataggaatttactttggcttctgagtttccaggtttagacagctcaaaatacgctaacaatttcatggaactgctttatttctatcaaatatttacaattaatttataagataacagtttttaaacattccctagaaagcaattagctatcatttatttgaattatttaagcaaaattcaaaatctatgaagaaaaaagtcacatctttaaactttaaaatagcaatattctgtctaaatctaaggaaatttttcattatttcattaattaaaacattttaaggacagttttagtggttcttaccagagatgtctgctacatacatgcacacatattattttaaagattgaggyttttcttagattagattaaattatcaaagtattctacggtaaaacagctatcatcacagtatatactaaacactaaagtaaaactttgctgctaaatgtaattaaatgttacagaatcaacaaaatataatctacttatctatataataaatacatttctatcattaaacaaattgttatagttttagacctcaggcatcacacaaatct

SEQ ID NO: 727344 - DNA, 1786 bp, Homo sapiens
ttaagcacatctctgtacaaattcttctgggaggccatacctggaagcttgcacctggtttctcttgaacttcacccctgggccttttcccttcgctgaattttaatctgtatcctttcactctaataaaccataactttgtatatcagcttttctgagttctgtgaatcctcctagtaaatcagtgagcctgagggagcctgagggagcctgaggatgatcttggtgactgccgatacagcatccactgtctataatattgaataactggagacatctaaatgactacaagtaatagattggttaaatgggttgttttatcaattcagtgaaatactaggcaactactaagaaatataacaaagagggatgtggtagctatatcagaaagttttttaaaataatatttttttattttgtgggtacatactaggtgtatatatttatggggtacatgagatgttttgatataggcgtgcaatgtgtaataatcacattacagaaaatggggtatccatcccctcaagcatttatcctttgtgctacaatccaattacacccttttacttatttttaaatgtaaaattatattattattgagtatagtcatcctgttgtgctatcaaatactaggccttattctatttctttttcttttggtaacaattaatcatcctcacctcctccctaaccgccagctacccttcccagcctctggtaaccatccttctactctctatctccataagttcaattgttttgatttttagatcccataaataagtaagaacgtgcgatgtttgtctttctctacctggcttatttcactcacataatgatccacagttccatctatgttgttgctagtgactgaatctaattctttctatggctgagtagtactctatcacatgagtaccacattttctttatccattcatctgtcgatggacacataggttgcttccatatcttggctactgtgaatagtgctgcagcaaacacggaagtgcagatatctctttgacatactgatttcctttctttggggtatatacctagcagtgggattgctggattgtatggttatatcataaagttttaaaaagctggtttacaagtagaaatgtctgagcacatttactttaaaaatacatatatgtatgcacatatatgaaaaatgttgaaagatagatggtatataaaaccattaactagttatttmtgggagtgggcattatgagagagacttacatgaaatgcattatgtacttcttcttatatagtttttatttatctatttcaactagtattattaaaattcttcaccatgaagaataatagatatttatattctggaaaagaggtgaaacgtaagggttcatttactgacattttattatggtatccttagaagtgagatttcccttctcaattccctaaaattactgcataagttccttcaaggataggggcaggagacacatctcgattgttactgaatgcccgcagaggctggctcagtatatatctaactgggagtgaatttaacagcttctgtatttaggattttagccactagggggcattatttgccttttggtaaaatacgttttctctgcacttgtcttgaaaaaaggaaaaatgaatatggaagccctgtaagagcataatcaggatgttaggcccaaggaaggaaatgctatctttagagagggagctgggttgctttcccgtcaaggaaaggagaagaggctctctgttttaggattagtagatacacaca

SEQ ID NO: 727345 - DNA, 651 bp, Homo sapiens
gcatattcatttagaggctcgtctttgtaaagatgtgtcctccttctgtagcacctattatcaagattctgaggcaataacttcagctctacagaaccctaggaccagcgataatggattggtagttgaagccctctcactgcgtaggaataacttggccaactgagcaaataactcttcctgcccracttccgaccctccccacccaacccaacattagcacatccatcacattgtttatctgtccttctgagaaatgctggggcaggaaccggttcgtgacatttgggccatgctctcagttccttttttgattcaagaagaaattggtaaacagagagtcagatgagtggggcaagggagaccacagatgttccccattccacatcagggtttgctgagtgacactttgcacaaaccctctccctccattcttccccggacagacaaaatgcagagaatggccatgggtcccgtcacaaccttggagagcttttgctgcctgcacttaggccagtgtgttatagtggaaagagctctggacttgcatgcacaaaccctagatttaaattttggttctgtcacgtagtagttaaataactttggcccagccagttaagctctctgaacttctgtgcccctatccaaaaa

SEQ ID NO: 727346 - DNA, 797 bp, Homo sapiens
cccattcccttaggtgttgcggaatgtttggagaaaagattaaagaagtgaggtctccatttaatgaagccattgagagaaccaagtctagaaagttcaccaggtcctaagcaggagcaggggacaaactagggcctgattggcctactttttcactgcattgtaagctttatgtgttacagtgtcattaaaggtagagagtccaggactcaattcatggtaataaaaataaatctgtgcaatagtgggcagcttcaaaactagctgtaattatctctcatagatgaaatccagcaggtgagccctggcccaggaatagctcattttctccctgcctacagctgtgcccgggctgaagccactgacgctgggcttgaggggtgccttcccctgcctccgacttgcctcctctctcaggcaactcatcctccacccagtgttmttatgaaatcaagtggcctgtagaaggaggactgggagaatgtcaagagtccctcctctgtctccagtcctttctcccttcctcccatgccccgtgactttctaaacccaactgcaatggataggtaatgagaacatgcaacagcatttcctagaacaggattttctacctccttttggaaatcacttatcttattcccatagtgccctaattccaacagtctatgacacatacaatgagaatgtcacatgggctaaatgctgaagacccatgccttaaagctaaccagcttccagaagaatccttaaacctacattccatttccataccaatcctgggtgtcctaacttgctca

SEQ ID NO: 727347 - DNA, 797 bp, Homo sapiens
cccattcccttaggtgttgcggaatgtttggagaaaagattaaagaagtgaggtctccatttaatgaagccattgagagaaccaagtctagaaagttcaccaggtcctaagcaggagcaggggacaaactagggcctgattggcctactttttcactgcattgtaagctttatgtgttacagtgtcattaaaggtagagagtccaggactcaattcatggtaataaaaataaatctgtgcaatagtgggcagcttcaaaactagctgtaattatctctcatagatgaaatccagcaggtgagccctggcccaggaatagctcattttctccctgcctacagctgtgcccgggctgaagccactgacgctgggcttgaggggtgccttcccctgcctccgacttgcctcctctctcaggcaactcatcctccacccagtgttattatgaaatcaagtggcctgtagaaggaggmctgggagaatgtcaagagtccctcctctgtctccagtcctttctcccttcctcccatgccccgtgactttctaaacccaactgcaatggataggtaatgagaacatgcaacagcatttcctagaacaggattttctacctccttttggaaatcacttatcttattcccatagtgccctaattccaacagtctatgacacatacaatgagaatgtcacatgggctaaatgctgaagacccatgccttaaagctaaccagcttccagaagaatccttaaacctacattccatttccataccaatcctgggtgtcctaacttgctca

SEQ ID NO: 727348 - DNA, 2800 bp, Homo sapiens
tgctggaaggttgcagaggccaggggcagccttcagaggcacggggaaccaagcagtgaggctgggtgattgagtccaggttctgtcagagcctgagtcagaactcacatcttctgggcttgtgtgctttctcaatcaagctaggtcatccttccccctgagattgccttcacaattgacttagcccgtgccaggggagttggtttatgaaacttatcgcatccagtcctcgtgtttgcctcctcaatatgccttttgatgtcaaagtacttgcagtagtacttttcctcttccctgcaaaaacatttatactttcccctggactttcccattgaaaagcttactatttaaatgtttaaacataatctttcccagtcttagcaagcttttcattttcagctctgattagccatcagatcttctgtgccttgggcttctccctcttgtcaggcccgatctggctcttcatatattcacactgcagtaaggcggcagctgcaggctggcatgtctgacaggaatttcaggctgctccctatactcagatcaaggaatcttcctcagttccttcacgcacactgtgcgtaagaatctagaatggcaccctagtgcctacctggtataagctccatacaatcaagacttgatctctttcaccacagtttccttagctgcttggacagtgctgttacagggctgaccctccattaccgttggctgaatcaatgaatgctgcctcaggctcaaccagcattcactgacagacactgcaccaggctctgagtaggtactaggatgcagtacctccattcttgcaggagatcagagttgaggatgcagagagagtggagggattgatgtttaaccagatcacttcactacaacttagtaagtgctatgggctgaggcacacctggggcaggaacgcagaggtgacgccttgcggagtagtaattcaccaatcccaccacactcctccgctagccatgggccatttgccatctgctctcctcctgcccttatctttttaatctaagttctccttacttcgcagcaagccaggccttctgttccagggatgctaatctgctttctctaacccccaaggacttgcttttgtccatgctagcctatctctgtgactatatgttcattacagcccaaaaggtctkgctcagattcatggggtctaggcagcgtttcctagtgatttctcttctgatccctttatttctctactactcagaacttaggcttttagcctgtgcagtgtaattctatggacccagataaatcacactggcattgaccatgatttggatgtctatagataaaaataatacaaagaaaggtatcgggattctcctcatgtacttttataaagccaggaaatgtagtgtgcacagcactgcatgtcaatgtggaaatcaacacagtgggaggtgactacttccttttcgcagggacttttagtgtccccattgtctctatgtcaacgtgacatatcacagacacacttctttatgtaaatttagcactgtttatacatataaaaatttggaggagggggatctggatgggagatgtattaaatgggctttatcaccactgtcaccaccattgtggggttttgtatttgactcccaactgagttgcagttgctttagaaatgtctccatctttgtattccaatagaagaatagttaaggaaacaaaataataataataactttaaaattgtgaatagtgcattacagttcacatccaaagtaaatgtgacctcccctgagatgccttactgaattcctaggagacatgttttcactttgtgctcccaatgcgtcttgtcacactttcagtgtagcacctccaagaaagtattgtggttgatgtttcatacctgacttcttagcagacagacttcttcaaggatggggggcttggcttccttatttgctgcgtgctactaggacctaagtcacagcaaatctcagtacactttaaaaatacttttttttttttttcccgagatggagtctggctctgtcacccaggctggagtgcaatgacgccacctcagttcactgcaacctccacctctggggttcaaacgattcacctggctgcctccccaatagatgggattacaggtgtccatcaccattcctggttattttttgtatttttagtacagatggggttttactatgttgaccaggctggtctcgaattcctgacctcaagtgatctacctgcctctgcctcccaaaatgctgggattacaggtgtgagccaccgcacctggtcaaaaaaatacttaataggtaataaatgaatgaatgaaggaagggaggaatggtgtttctgtattatgtatttgataaagggatgctatagtatacacttattatgataaaataaaaataaaagctgatcaatctaatggtaggaaaaaatatttgtgggatgaaatgtgaagttataaatgtaattaagattctaaattttcctaagagttcttttgtccctagaatcaacagtaaggagttagttgtattaacttgggccagcacctctgcagagttataaaactgattcaattaagtcttacctttctgtaagagttagaaaagaaaaagtgtttgaagatttttaaaagtatagaacaaacagttaccgtgtaaattctggagtattaggtgcttttctgggtatttcctccttcatactaaaatgttaatctctgagttatgcactgtaataatagattccactgaaaaaagtgtttctggcactaatg

SEQ ID NO: 727349 - DNA, 1612 bp, Homo sapiens
aaacagcaaagaaaatgggttagtttagttctttataaaatctatcagagaaaatatacataacataccaaccctaaagtatgcattgatcctttattgccaagcaagccaaattgggaagctaattacataaacgtttttagaactgttcaacaaagtcgtccatttacctttggttaaaagtcaaattgttggagcacagccctagagacgctgattcagcaagatgagtatagacccaaaaatctggatttttcacagcactgaaataactcctcattttgaagatgaggagagtaagatctagagagttaacatgacttggccaatggtatgtggggagttcaccaaccagagccagggctagagccaccccagccctgttatttccctgtgcagcgcccccctttggcacatcctgctcctcaaatgaaactctggtgcctgcctacttagatattagcagattggaggaaagcaatcaaggggctccaatttcaatgcttcagctagaaaccactcgtcacttgcaaaattatcctttgaattttctggtgagactaatggccacagcactttatagagctaaaaacaaaaagctattgttaggtttgttattgttgccatgttgctaggagagcctctgcgatggaatgtgccattcaatacaagctttgcttctctggtacaaccctaccatgttcaagggacatggcccaggtgcaaggggagtgagaccatacattgcaaggccaaggccagaacagcaagagaaaggggagatttcctctcgggctttgtgggagaagaatcaaagactagcacacaagtcctgaaataacaacagagttcttcaaatttaagaaataagcatacatgaaaattccaaatgttatgctgctttgcttttgtggtccctaaacctgcccattgctcatttggttatagcaaacagcagtaaaatggtcctgaaatgtataagactgtattttgttggaagtaggccatgccctggccccaagtttgattcactgttcttggaaatactccaagcatggtggtggtatgagagtgggatattcacccaaacacctagttgatcagatcagcaaatacaggcaaggagggtggcagatgaacagaactggatacacgtgtgtaagacaagtgacaatgtcctcaattatatgctggaatgaaaagcacatgtccacctcttcaagcacctgaattccaaatgccatcactttcctttgttatttgcatcctagaaaatacacctccaaggataatgtgtgcatatatatacatatatttccagggtgagagaaagcatgaagaataaagggagaattracgtaccatttaacatttttgaaatgtttgaaaactgccactgggaaaatggtatacctcttgcttaaaaaatgacacattttatttaaaaatattccgcattttttatttcgggggaaggggaggtaagggctgttgttttgtaaaacctcccaaggctgagcatggctgtcatttctggagtctttctgctgaggccatttctcctgtgaccatgggctaaagggcacagccgcgtgcccccacagctgcttct

SEQ ID NO: 727350 - DNA, 636 bp, Homo sapiens
aaaacgttataaaggtctagaatcaaataatatttcattgtatggtaatatagattaactatcataaagaataaaattttataaatttttcctagtacccacacgcccacatatgcacacagagtaggcctgttttcccatgttatgtttgccaccctttcctggacaattaatgcaggacatattttaaaatgtcactatccaaagacattaaggaatcccttacagacttctgtcttccagatcactaatatcttaagaaagcaaatgtaacaaggttattttttaaatattaaaaaaaattttaaaaattttaaaaattaaaataaaaatatttaaaaaaaattaaaataatattaaaaatattaaaaataaaaataagaaattaataataaaaaaaattaaaaaataaaaatattttaaaaagaaaataaaaaattttaaataaaaatcataaataaaatattttttaaatattaaaaatwaaaaaaaattaaaaaaataataataatacattcaaaagcagagatagttacctgtgctgtcttaaatcattttgggaaaagtgagcctgcttttgaatatagctcatcatgagttttatatttaaattaacctccttattttttatcttca

SEQ ID NO: 727351 - DNA, 631 bp, Homo sapiens
tgcatgcaacagaaaaataagaccagatattttacttctagcatagagatgtggaagtggtacgtacaaggttattaatgtaagtttttaatggttcttgattgtattttggatgactggtaattcctagttgtagctgtggtctgctagggcctactataaataagttctagctcaacaggttattttttacttgctaaataaaataaaagtgtgagtcagtaattcttattattttctccctcttttttggaaaccggcagttttactgcagaactctcctcaaggctaagctaataaaatacccaatatttttttctgactatgaagagactaagaaaagacaacagaaaaattagcaagtcttttataaaaacagaagacatataaacatgcaccaacttgcttaagtcagtgatactacactaacttataccaaaacatttttagtagcacacgtaggctagtgaagaaaacctgcatctactaaaatagttttatctttattgacttgcttaaaaagggtcattatagacaatacattaaaaatctggatggcgctgtgggtcacacctgtaatcccagcactttgggaggccaaggcaggcggatcacctgaggtygggagttt

SEQ ID NO: 727352 - DNA, 826 bp, Homo sapiens
tgacagccgattgttgttttaagccacagaattagggatggtttgttacacagcaatagctaactgataaacgggataaattaaaggttccacttagatttccaccctaagccacatacaccaactcagcctcgccagtatcctgcactgagatgtggataaattctcagctattaatcaagggttatgttgaatcttctcatgtgaagaatttcctgaggaacgctgtggctataggtggtaataggcaaggcaaaaattgggcattccagagacgctgactctctaatcccgtccaaatatcaccaagagcacacccaacaaaccgcaagcatggaaacgcacaagaatctcttttgtgccttccatttcccgctgatcttgatattggcgttgctgatggagaacttaaggcccacattgggcaccatgcttatctgggaactgggaagctggaattcacggatgtccatgctgcaaaggagaaatgtgaatgtcatataatttcatatactcctaggtgcacacatgaggacttcgttaatggttaatgcagactygtcccccaccacctggtccttcactccatccattccaggaggagcccaaagctaagaaagcaggcttggcagatatgtaggcaactggagtggcttaggttttgaagtcagaaaaaacttgcatttaaatcctgctctttaatatactcttgggttaccttgggcataattaccccagcctcagtttcctcatctgtaaaatgggcacagtgattgctattttgcagggtgtgtggcaatcaatgaagataaaatagaaggccctt

SEQ ID NO: 727353 - DNA, 1310 bp, Homo sapiens
atttttctgtctcccaaaacctccatgacagaagaactttgtctgtactgttttcttctctagtccctgtgcctctaaccattttttaatgaatttattgtgataaaaatacataacataaaatttaccactttaaccattttgaagtgcacagttctgtggcattaactgcattcacgttgttgtgcaatgatcataaacacccatctctagaactttttcatcttcccaaactgaaactctgtacccattgaacaatagctccccatcctcccaggccctgtcaatcacgattctgttttctatctctgaatttgactacactaggtgcctcattgtgtttgacttatttcacttagcataatgtcttcagggttcatccatgttgtaacgtgtgtcagattttccttcctcttaaggctgaataatattccatcataggtatatgacacattttgcttatccattcatccctgtatgggctctgtatactatatgctatcggctattctatatgatcttcccagaaactgtaagttcttctctcactatttgatatttgaaataagtgagcacttttgaaggctaagtgtttgttaagggtcacatggtgaagaaatggggttgttgatgggcaaacttggacctgcctccctcccaagcctgttctttccctgctgcccaccatgctggtgcatggcaaaaggcttttcagtctgttgtcaggataaccataatcatggatataaaagggctttgaaattgatagatagcttaatataatatcatccttgttaaaactgaatatttttgaaataatattattaatgtgtttttgagtagttcaaagaagatttgctgttataagatgggatttttttcacaaaataagaaaagcatatttcctgcaggttattcctatgggccagtttctaatctggaacctcgcctagaatagacattctgtaaatattagaatagtaacaggcaaaagatttccattttaagagctgtttccagtagttatgtaacaattatttctcagacatgcctttttgccttgtggccagaaggtggagamagacgatgtcaaatacttcacttgttgtttcctgctctgaatttttctcaccaatcctggttacctttttttaccatgtcctaatctacttcaaatgtacgattgaaaatagggtctattattgatatatgttagtcagtgttctccagaaagtcggaaccagtaggaaaggtacgtaggtaggtagatagatggatgaatgagtggggatttattaaggaaattagct

SEQ ID NO: 727354 - DNA, 1039 bp, Homo sapiens
tcctcttccctgatacatggggaggttgagagtcactcatcaagtgtagcgctctcactttatagatgaagaaacatggaaaattcttccccaaaagcccatgatcagggcttagttcctgctgatgttccccctcctcctgggcattcatattttaactgaggacattttaaataagagtagggatgggagactctcaggcccttccaccacctttggagatatctgggggcctggtgtcttcccctcccctgccactgtccctgctctgagcaagctgtcccagggaagccctggggaagtgtgctcatgatagtgagcaggaggcctccagcatgatcattactggagtgtatttttcattgatttgataaattctgttttactccatgggatttacaaaagtaggagaaaggatttctgcagcagggtctaattctgctttaaaatgccacaaccatctttcctaggaccacagaagtgcttttgcttagataaatgtcattctagacctagggcgtcaccgggattataacgttattgaattttccgtctgtacctctaatttgcatgttgcaaaaataaactaaagattttatacaaaaattagttctgaggtgaccggatagatttttccaattcacattaagccagtgtatcctctggtgagggaaaggaaagataatacctcgtctggaagctggaagagacttcacctaaatttcttcctgccctggacaaggtgaaagcgaaagtactttaaattaatgtttccttgccctagctgcttctttatattgtctgcatttcccaagcaattttcaattctccttgccaactcctgctagagtgttagtaccctagttawtaagttattatgaacaactaaaagcatcccagcttcaacatgtactagctgtgtgaccttgactgtgtcaaccctgctgagcttctgctcctctatctctaaaacaggaacactaggacctccatcataaagttattgagaataatggagagtatatatgggttttaaagc

SEQ ID NO: 727355 - DNA, 1077 bp, Homo sapiens
tggcttgaagcctgggtgcagagcttgactgaacaagggctggacatcaatctctgctcactccctgtgcacaagctgcacaacctcccaaagtaggcctttggcccatctggcttcctggtccgaacagaatagaaggtgggttccagacacactgtctcgccccaaagttcgggggcacagaggacaaaggagatcaaggtctcaggcttgcccagggacacaggaccttggggcaaaagggcatttgccttggaggaatactgagtgagcccgtcgggtagaggcagctgaaaaatacagcgttgctgccaggagatgactgccctggcctctggtggttctgcaaagtcagcatgcagggtgtccattctcttgttcttttgctggagttggtaatcattgcccagaaaacaggatgcccytcagcacctaatacaacctataaaagggtatccaaagacagaatgcttcctagctcttggaatacatccaacctaacacgtaggcactccatccactacatagcagacattctgtaatttcgtattattcaaataaatcagcaacagcctttcattttctccacatggaggcagcatggtgtgggggaaagaataaatgctgctgataaaactccatttatacctgcatctgacactaagtaacgtcatagtagccagtgatggaatggaggagtttcagatttccttagaaaggtaagcaaaaaaaaaaaaaaaaaaaaaaaagctggggttaatttgaaatagataaaatacacacattcagcttcattacctgaaagtgtgcacttgggaaataaactacacaggacctctgatctttggtcactgtcttctacgagccagacaactttagaagctctggaattatctcaaggattataaaactagtggattaaagtgcaaaatcttagagaaagggattgaatcatgggttctagtcctagatcagcttaataaaaaaatatattccaagatgttagctaagtcacatcagcattatgtgactccatttacatgttttaaatgggtgaagaaaatgtcttctacagtc

SEQ ID NO: 727356 - DNA, 666 bp, Homo sapiens
tgagcttatttaattatctcaataactttatgcagtagtacttttatctccattcatagtaaggagactcaaggatgtagagactaagaaacttgcccacagcataatgcttgacacctggtatgaacttataaaatagcagaaaaatgggatgtcaatgttaccttttgatggacaaaatctagatgcattaattgcctatatactctccattctgcagatgaaaaattgctatactcaagatacctgtaaagtacaagaactgaaggcctgtgctttggttgagttattggttaaaaataatccagaatgaactgctaggaaaaaatggcagataggagkcaggactaaattgcagcccccacttggatggatagaatagaatgtggagacttgcattgtgaacttttgttccaagaactgctgcagaaatatactgggaaagtcaagagaatccacagaccatttgaaggaaacaggttgctcctgcaggacttgggagacagcccaaatactgtgagtgcccaaactgcaaaagtgggaaagggagatcatcccctgccccgaatacacacactcactggggaacctaaaggtccagatcacaagagaaagatttgaccttacctggagctgagacaatttagagagctgagtgaaacacaa

SEQ ID NO: 727357 - DNA, 666 bp, Homo sapiens
tgagcttatttaattatctcaataactttatgcagtagtacttttatctccattcatagtaaggagactcaaggatgtagagactaagaaacttgcccacagcataatgcttgacacctggtatgaacttataaaatagcagaaaaatgggatgtcaatgttaccttttgatggacaaaatctagatgcattaattgcctatatactctccattctgcagatgaaaaattgctatactcaagatacctgtaaagtacaagaactgaaggcctgtgctttggttgagttattggttaaaaataatccagaatgaactgctaggaaaaaatggcagataggaggcaggactaaattgcagcccccacttggatggatagaatagaatgtggagacttgcattgtgaacttttgttccaagaactgctgcagaaatatactgggaaagtcaagagaatccacagaccatttgaaggaaacaggttgctcctgcaggacttgggagacagcccaaatactgtgagtgcccaaactgcaaaagtgggaaagggagatcatcccctgccccgaatayacacactcactggggaacctaaaggtccagatcacaagagaaagatttgaccttacctggagctgagacaatttagagagctgagtgaaacacaa

SEQ ID NO: 727358 - DNA, 1001 bp, Homo sapiens
ttcattacgaagtactagaaaaaagataattttcttctttttttctgtacgtacttcaataatctggctccttttaaagtttaagcaaactaatttaagaattacataatctatcttagaataactttacatttatttgattcccagtgttttctaaagaaacactgaagaaaaagatatatactcttagaagcaacacaaaatattaaaagcgttctggaccagaagtaaagagatgtgattttcagtgctggcttcccatcagtgtgaactcaggcaagtcactcaactttcctgaagctaagtttccttgtgggtataatagagatgtcagcatctgctctatttaaacaattgttgtgtggcaaaaattctttatttatccagcagttgttagtgcttattaggttcttcttatggagatatgaagacaaatacaattcagtttcttctctcaaggaacacagaggtggggagatacagacagaaatttggggtagagtcaaagaatactcctggaaggaggagatcttgaagaagaaataagaggtagtgaagagaatggaagaagacaagataagagcattccaggtagagggcacagcatcctgcaaaggtaatgagttatgagagtgtaaggtgctgggggacctgcccggcattcaggtctgaaacagaaggggaaaagtcaaaggtgagattggaaaggtgggcacaatccagctaaaccagagtagcagatactgtggctatggatttgtcttctaacctagaggcaatgagtgaaggtgaggggttatgaaggattaggaaagggattttaggaaacgcactctgaaggtaacataggcaatgaaatcagaggctggtaaactagctcagggtccatggtactagttcagatgagaaaaagtaaaggcstgcgctaacgcagtggcagcaaggatggaggagaaaaaccaatgttgagagatagtttggatgaagtctgaccggtggca

SEQ ID NO: 727359 - DNA, 1946 bp, Homo sapiens
tgaagcaagatttgatacccagaaacatctgaaaaccactgatagttctacttcttcatttccatgtgaggaaaatgaggcccaaagaagtaagatacatgtaaatctaacatcaatgtccctattatgtaatgaacgattatcaaggttgctgacatcacactctaatagcagctctatgtgtgcatataactgaagtgctatttctcacaaagcatggttttcatttttttttwtaaaaaaaacaaaccttagattctttccttgaaactatttcctatgccagtcattagtaaaaatatcaaaataatgtattcccatggaacatcaaagtaattgacagttcatttttaaacaaagcgattttccttctttctttcttctttttttgagacagggtcttgctctgtcacccaggctggagtacagtggcatgatcttggctcactgcaacctctgcctcctggtttcaagcaattctcatgcctcagcctcccaagtagctgggattacaggctcgcgccaccacacccagctaatttttgtatttttagtagagacaggggatttcaccatgttggccagactggtctcgaactcctggcctcaagccatccttctgccttggcttcccaaagtgctgggattacaggcgtgagccactgcacctggccagctaaatgattttctatccatgacagatggaacaactagaaacactcattctattgaaatgcttaaagtgttgaattgatagttttttatcaactgagtaaaagtacttcatggcacttctactgacttcttttaagctaaaatccaacattgctccatagaaccacatttttcagtagtttgtttacattgtgtagatagaaacaacataggtaaagatgaattacatcatacaatgttttccaaaaatttatgggtaatcatttgtctccattttcaggtactatccttttatatcttgtcaaattaatatagtgatacttctgtggattagctatttaaagtcagccaattaactggcttctatgaaactagagctagaatttatttgatgtgctaattttcaaaagaatagacatataattttatatccattacgttagaaaaacaataatccacaaacactgactcagttggcaatgaatctaaaatattcacacactgattgttatccttctggaaagaatttggtaatgtgtgccaatagccacaaaaattctgaaattccttgatctaacaatctcactcctgagtatttataccaagaaaataatttgaaaagagaaaaatacttaggtattaagttattcattgtattataaaagcataaaagttaaaggaactaaatgatttgctgtagggaaatgtctaaataaattattgggaaattcaatgcaattattatgtaaacactataattatgatgagcagaaaatgaggaaaaataaccttttgtagtaacacaaaagccttttctagtaacacaaaatgctgttcgtgttacaaatatgatggagcagagacaggagtttattttgtgacttttcaggagagatgcattttaatgaataaaacgaatggcatttcttttaatgcatggatgatggggtggagttgaaaaataactgagcctaagtctaaaatgcagagattttttttcctggtagcaaactattttctctaattaagtaagcctgataaacactctttaattgattgctaaatagatgactttacttcaaccacatgagtagtttatatgtaagtgaatggacctgcctgcttcaggaccaaactgctgccaaattagaatatttctagctctggccttctacaaaatcaaggagagaagtaaagactgtttcctcggtcgggcacggtggctcacgcctgtaatcccagcactttgggaggccgaggtgggcggatca

SEQ ID NO: 727360 - DNA, 1946 bp, Homo sapiens
tgaagcaagatttgatacccagaaacatctgaaaaccactgatagttctacttcttcatttccatgtgaggaaaatgaggcccaaagaagtaagatacatgtaaatctaacatcaatgtccctattatgtaatgaacgattatcaaggttgctgacatcacactctaatagcagctctatgtgtgcatataactgaagtgctatttctcacaaagcatggttttcattttttttttwaaaaaaaacaaaccttagattctttccttgaaactatttcctatgccagtcattagtaaaaatatcaaaataatgtattcccatggaacatcaaagtaattgacagttcatttttaaacaaagcgattttccttctttctttcttctttttttgagacagggtcttgctctgtcacccaggctggagtacagtggcatgatcttggctcactgcaacctctgcctcctggtttcaagcaattctcatgcctcagcctcccaagtagctgggattacaggctcgcgccaccacacccagctaatttttgtatttttagtagagacaggggatttcaccatgttggccagactggtctcgaactcctggcctcaagccatccttctgccttggcttcccaaagtgctgggattacaggcgtgagccactgcacctggccagctaaatgattttctatccatgacagatggaacaactagaaacactcattctattgaaatgcttaaagtgttgaattgatagttttttatcaactgagtaaaagtacttcatggcacttctactgacttcttttaagctaaaatccaacattgctccatagaaccacatttttcagtagtttgtttacattgtgtagatagaaacaacataggtaaagatgaattacatcatacaatgttttccaaaaatttatgggtaatcatttgtctccattttcaggtactatccttttatatcttgtcaaattaatatagtgatacttctgtggattagctatttaaagtcagccaattaactggcttctatgaaactagagctagaatttatttgatgtgctaattttcaaaagaatagacatataattttatatccattacgttagaaaaacaataatccacaaacactgactcagttggcaatgaatctaaaatattcacacactgattgttatccttctggaaagaatttggtaatgtgtgccaatagccacaaaaattctgaaattccttgatctaacaatctcactcctgagtatttataccaagaaaataatttgaaaagagaaaaatacttaggtattaagttattcattgtattataaaagcataaaagttaaaggaactaaatgatttgctgtagggaaatgtctaaataaattattgggaaattcaatgcaattattatgtaaacactataattatgatgagcagaaaatgaggaaaaataaccttttgtagtaacacaaaagccttttctagtaacacaaaatgctgttcgtgttacaaatatgatggagcagagacaggagtttattttgtgacttttcaggagagatgcattttaatgaataaaacgaatggcatttcttttaatgcatggatgatggggtggagttgaaaaataactgagcctaagtctaaaatgcagagattttttttcctggtagcaaactattttctctaattaagtaagcctgataaacactctttaattgattgctaaatagatgactttacttcaaccacatgagtagtttatatgtaagtgaatggacctgcctgcttcaggaccaaactgctgccaaattagaatatttctagctctggccttctacaaaatcaaggagagaagtaaagactgtttcctcggtcgggcacggtggctcacgcctgtaatcccagcactttgggaggccgaggtgggcggatca

SEQ ID NO: 727361 - DNA, 1685 bp, Homo sapiens
gcacactgacattatgccatgccagcctggagcaccctaaagttataactgcaccctttcctttatgtaaatgatacaaacccccatagtcagagaatcatgcctgggaatgagatggcataaatttcctctctaaatctatgtcaaatgagcttctcactgcatcttagaggtaccaaaaggctttttctttgcaaagccatgtgagaactttctcttttgctcttggataatttttcatttagcattccattgctttagctcagcacaccattcacttaagggtcaacgggcacaggtacacttttctttaggcaaggtaaattaagtctataagctcttgaaccaatgaattttcacagtaggttgctccagagtcatttagctcaagattctgtgtaattgtgatacattgagacaattctctactgaacactggggttcagtacaaagtgcatttagttgcaggtgctgatgtgagacttgaatgactggaccaagcctcagtgaaatttctccccaggaaagtgcttctctaaaactctgagtcatccaaagttaggagagtttcaaaggaagctcaaagggcgaaaagtaaaaaataacagasttaattaggagggctattaccacgggaagctttgggcaggcagaaaccccagttaaacagactcccagacataaatcaccattgcttaccagctacataggcaaattggcaggctttacaaaagacatggttgggttcccaagccacaccacttgagagtcagaaatggtgtaaaatgaggaagcacggtagcagctgagatagccaaactgcaaaagcaatggtcccctggagattcagctatgcagagcaggaggcaagcagcagttaaatcattcttcagtgggggtttgtgcctcacgatttaacagacttagaattgtacatatttttataaattttcaattaagccattggattatgttcttcctaatttggtacttcaagtgttagtttctcctctggaaattcctctgccctgtgactgtctacagggggcatgaccagaggagccacctggaggcagataggccagctgtaaactcaggtttaggattccaggcacagccctctaggagattactttctgattcatatacagctttccctggactaattcctcttgggaaacctagggctacctcctgcccttatgcactgtgttgtaactcctaaaagacagctcctttgagcaggtctgcacttgcctttgtgtcactaatggaggattggatttcctcatgtcctaagagtcttttgggaggagagatgtttgggcctccctcctcctcccttgaaagtccttccttctttatccaggcttcctacacagactgtttttctcactatccttttctaatatcctcaatgaaaccttctccaactacctcagctcacacagaattcttccccttctaaacagctatggcacttagggaagcaatgtggcacagtgagaataaaagcaaactttggagtcaaacaagcctgaacttgaatgccagttccagcaattcctacccatgtaactttggaaaagttgtttcatctcactaaagctcagctctcttatatgtaaagtgaacataaccacagtccctacttcatagggatttacgaagactaaataaaaatc

SEQ ID NO: 727362 - DNA, 1685 bp, Homo sapiens
gcacactgacattatgccatgccagcctggagcaccctaaagttataactgcaccctttcctttatgtaaatgatacaaacccccatagtcagagaatcatgcctgggaatgagatggcataaatttcctctctaaatctatgtcaaatgagcttctcactgcatcttagaggtaccaaaaggctttttctttgcaaagccatgtgagaactttctcttttgctcttggataatttttcatttagcattccattgctttagctcagcacaccattcacttaagggtcaacgggcacaggtacacttttctttaggcaaggtaaattaagtctataagctcttgaaccaatgaattttcacagtaggttgctccagagtcatttagctcaagattctgtgtaattgtgatacattgagacaattctctactgaacactggggttcagtacaaagtgcatttagttgcaggtgctgatgtgagacttgaatgactggaccaagcctcagtgaaatttctccccaggaaagtgcttctctaaaactctgagtcatccaaagttaggagagtttcaaaggaagctcaaagggcgaaaagtaaaaaataacagagttaattaggagggctattaccacgggaagctttgggcaggcagaaaccccagttaaacagactcccagacataaatcaccattgcttaccagctacataggcaaattggcaggctttacaaaagacatggttgggttcccaagccacaccacttgagagtcagaaatggtgtaaaatgaggaagcacggtagcagctgagatagccaaactgcaaaagcaatggtcccctggagattcagctatgcagagcaggaggcaagcagcagttaaatcattcttcagtgggggtttgtgcctcacgatttaacagacttagaattgtacatatttttataaattttcaattaagccattggattatgttcttcctaatttggtacttcaagtgttagtttctcctctggaaattcctctgccctgtgactgtctacagggggcatgaccagaggagccacctggaggcagataggccagctgtaaactcaggtttaggattccaggcacagccctctaggagattactttctgattcatatacagctttccctggactaattcctcttgggaaacctagggctacctcctgcccttatgcactgtgttgtaactcctaaaagacagctcctttgagcaggtctgcacttgcctttgtgtcactaatggaggattggatttcctcatgtcctaagagtcttttgggaggagagatgtttgggcctccctcctcctcccttgaaagtccttccttctttatccaggcttcctacacagactgtttttctcactatccttttctaatatcctcaatgaaaccttctccaactacctcagctcacacagaattcttccccttctaaacagctatggcacttagggaagcaatgtggcacagtgagaataaaagcaaactttggagtcaaacaagcctgaacktgaatgccagttccagcaattcctacccatgtaactttggaaaagttgtttcatctcactaaagctcagctctcttatatgtaaagtgaacataaccacagtccctacttcatagggatttacgaagactaaataaaaatc

SEQ ID NO: 727363 - DNA, 1169 bp, Homo sapiens
tgggaagggtagatccaccaagtcaataccaaaagcagctgcctgtgttacaaaatgggtagggtactatgaaattctaaagtaagagcccccaagccctatttcattaggatggaccctgatcgtttcagttttctatggtgaatatagttcttgagtttagttaggccttgtaaagaaggccctggggttgggagtgtgccaaccttcagaaagcatggtccttaagttttaccaagtgagaatagataagtggaaagaaacaagtcacacatcagtaccattgacagtcattattcatggattccacatttgtgaatttgcctacttgctaaaatttatttgtaaccccaaaatcaatattcatggagattttgcagttattcacagacacatgcatgcataaaacactgaaaaatttgcaacacacccagtcatgttccctatggtgtttaaacaaaatggcacctgccttcttgttttggtgctcatattataaacaagtatccagttcatggtatacttaatgtcacatttccttttttttttcctttttgctttttcttggtgattttactgttttaaatgagccccaagtgtagtactaaaatgctgcctagtgtttctaacctcaagaaggctgtgatgtgccttacggaggaaatacatatatcagataagctttattcaggcatgcattatagtactattggccacgagttcaatgttggtgaatcaacaatatatattaaataaagtgtctctaaacacaaatacatataaccagttaaattttgatccactgacaaaaattytgtggtcaaaggctataaggacctaaccctgtattcctcctagaggcaatgactcagtattcactaactctgtatttgcaataacattagaaaacataactatcataaatgaaaattgactgcattttcccatgttctcatcctatccaagaaatgccatagggaggggagtggctgtaaaagttaggaattcaccatcactcatcatcactcattctttattggtcaaccaagtgagaatgctactatagcgacacattgtgagaatactaatgataaggaaaatatgtaatagctaattgatgaatgctatctagcacataacatttgaataggaatacaagaagctatgtc

SEQ ID NO: 727364 - DNA, 359 bp, Homo sapiens
atataaattttatataaaaattacatatataatttcatatatgggcaacttctctatatatattrgcacaaaatcaaaagctgacaactacagaagtaaaactaaaacaacagagtctgccaggcgcggtggctcacgcctgtaatccagtactttaggtggccgaggcaggcggataacctgaggccaggagttccagaccagcctgaccaacatggcgaaaccctgtctctactaaaaatacaaaaattagctggatggggtggcgggtacctgtaatcccagctactcaggaggctgagacagggaaatcacttgaatccgggaggcagaggttgcagtgagctgagatcccgcca

SEQ ID NO: 727365 - DNA, 566 bp, Homo sapiens
cattgaggtgattttcccaagagtgcaaagttaatccttggcagagctgggctagagcctgcattttctgattttcaatttaacactcattcctgtcttgctattagtttaattttatctgattgcatcactatgccatgcaaacttgaagttaagaatgtctttctcaccagtttttatctggtcagtaattatactgacattttattatttaacaaacatctcaccttaatatccaccttaaaaatcctaatgatatcctctctagaactttagccttgcatttaaacttgcccccaggctagcatttaattctgcggaaataagaaacccaagtttacctttgcaagattgcttggcatgtycagacactgtgctaaatgctttatgtaggttcctttgtttatgcctcacaaacaccatatgaagtaggtcttatttcttgcaatatatggataaaagaattgaggttaagtcacttgtcttggatcacacaggaaagactagatttaagccaggatgtctggtcaaaagcccaagctacgcaattcttccacagaattgtc

SEQ ID NO: 727366 - DNA, 1635 bp, Homo sapiens
tttactagacaaggcaaaggtatttgattttgaagaacttcaaatatcaagtattttcccctcagatactgagcctaaatataatttttttctgtacatttttcccattgttcctattttctttagaaaactcataggaaatgtctattatttccacacattaatgctgcatgtgtctaaatacaaagatgaaatctctcattggcctcattggcaacttaaataactttaatcatttgtattatagttttcagatgacttcacctacccagtcaccattctgtaggctttttgtcattttcctttacaaaatatgtcacctataacgataccattcttgggtgtatagcatttgcccccttttttttttttttttttttttttttgagacagagtcttgctctgtcgctcaagctggagtgcagtggcatgatctgggctcactgcaagctctgcctcctgggttcacaccattctcctgcctcagcctcctgagtagctgagactacaggcgcctgccaccacacctggtttttagtagagacggggtttcaccgtgttagccaggatggtctcratctcctgacctcgtgatcagcccacctcggcttcccaaagtgctgggattacaggcgtgagccaccgcgcctggctgcatttactcttgtagcttggaaagttgttactaactaaggggatcttaagtcttagcacttagattaaatcatgtatttactgaatatttatgctggcattgtgctaagtactatgggagctacagaagtagttattttctgttataataaaattgtatactaaccaaaagcataaagcaaaaacctagactggaagagatagatttaaaaggaagcagtaaaactgagtctttccatttatattatagttatgctagttttgcaatgactactttatacagtcatctgtaaaactgctcaaaatagaaaaatcaatttttattttctcatattgataacagaaaattgcaaacattaccaaataaatgaagtcataatttgaatcacttgtttattcatttacatgatatacgttgcacgtaatgccatttcagctctgatggaattctattcactccaaaatgtgttttttgtctcccttattttagtcagtgaattaagcaaaaaatcatggaatcagcaacactttgccctgttatttcccaaaccacaacggccaggaaccaaaaggagatcaaaaccttctcaaatacgggacaacacggtttctgtaagcattggaaagattttataattatcagtaataagtaataacttagtaataattataaccataataagtaattataattagtcttaagtaatcactaagtagtaagcttgtgaaatcatgtatagttgtatgtgttatagatcaaagctgaccaacaagtttctgcaatgatgggaatatttatctccgtagtccaatgaggctattaaatacttgaaatgaggctagtgcaactaaggaattgaattttacatttaaattacattgaattaaagtaaattcacatgtggctatgaaatgccctactgaacagcacagttagagataattcaaagtctaccacttaaagaaaatagatatgtttta

SEQ ID NO: 727367 - DNA, 1635 bp, Homo sapiens
tttactagacaaggcaaaggtatttgattttgaagaacttcaaatatcaagtattttcccctcagatactgagcctaaatataatttttttctgtacatttttcccattgttcctattttctttagaaaactcataggaaatgtctattatttccacacattaatgctgcatgtgtctaaatacaaagatgaaatctctcattggcctcattggcaacttaaataactttaatcatttgtattatagttttcagatgacttcacctacccagtcaccattctgtaggctttttgtcattttcctttacaaaatatgtcacctataacgataccattcttgggtgtatagcatttgcccccttttttttttttttttttttttttttgagacagagtcttgctctgtcgctcaagctggagtgcagtggcatgatctgggctcactgcaagctctgcctcctgggttcacaccattctcctgcctcagcctcctgagtagctgagactacaggcgcctgccaccacacctggtttttagtagagacggggtttcaccgtgttagccaggatggtctcgatctcctgacctcgtgatcagcccacctcggcttcccaaagtgctgggattacaggcgtgagccaccgcgcctggctgcatttactcttgtagcttggaaagttgttactaactaaggggatcttaagtcttagcacttagattaaatcatgtatttactgaatatttatgctggcattgtgctaagtactatgggagctacagaagtagttattttctgttataataaaattgtatactaaccaaaagcataaagcaaaaacctagactggaagagatagatttaaaaggaagcagtaaaactgagtctttccatttatattatagttatgctagttttgcaatgactactttatacagtcatctgtaaaactgctcaaaatagaaaaatcaatttttattttctcatattgataacagaaaattgcaaacattaccaaataaatgaagtcataatttgaatcacttgtttattcatttacatgatatacgttgcacgtaatgccatttcagctctgatggaattctattcactccaaaatgtgttttttgtctcccttattttagtcagtgaattaagcaaaaaatcatggaatcagcaacactttgccctgttatttcccaaaccacaacggccaggaaccaaaaggagatcaaaaccttctcaaatacgggacaacacggtttctgtaagcattggaaagattttataattatcagtaataagtaataacttagtaataattataaccayaataagtaattataattagtcttaagtaatcactaagtagtaagcttgtgaaatcatgtatagttgtatgtgttatagatcaaagctgaccaacaagtttctgcaatgatgggaatatttatctccgtagtccaatgaggctattaaatacttgaaatgaggctagtgcaactaaggaattgaattttacatttaaattacattgaattaaagtaaattcacatgtggctatgaaatgccctactgaacagcacagttagagataattcaaagtctaccacttaaagaaaatagatatgtttta

SEQ ID NO: 727368 - DNA, 1350 bp, Homo sapiens
tgactatagtcattccaatgtgctatcaaatagtaggtcttattcatttttttctaatttttgtgcattaacgattctcatctctccttcaattccccactaccttttccagactctgataaccatccttttaccctctacctctatagtttgttttaatttttagatacaacaaatgagagagaacatgcaatgtttctccacatctttgccaacacttttatctttgtaataataaccaatttatatatatcacatatatacaaacatacatatgtgtacacacatacatatatgtgtatatacacacatatatgtattatacacacatacatatatgtgtacacattgaatttattacattttacatgtatgtgtatatatatatatatacatgtcaatataacaaaaatagaaaatttaaaataacccatatcatttttgatggcatcaaaatatgcaataattttattatcactaattgattcaaacttattttcatgagaaatcaatacaatcaattttaaacaaataagaatttactgaaaaagtgcatagaagttgtcatataccaagttaattatgtaccaagtgaaaagttttataccaaattactttataatcaagaaaatccttgtaaaagcagtggcaaaatacaaaattattgcataattataatcatattcaagttatctcacaaatgcttaatccacaaaatcttttttaagttaaaataacagcagcaggaaaaatgactactatttatttactactatttgctaaacgctttcctcgtattatcacttaatcctcacaatcctaatatatctccatttaattgaagcwcagaaaggtcaagtaacaataaatttgcacagagagtgcaaaaccagaatttgaatctgaatgaatctcatatgacaccaacgtttagactgtggttatgtagtgtaattgtttgtggatttgggagaatttttctttagcaccacaggttcagtttcttcatatcctatgtatctttatttgcaaaaatgtatagttatgttaaaattacataaaattatattattagtttaaagatctactacagaatttaagaaggcagttgttctattcataattgctcacaatcagcctctcctcctactactgttcctactctctataccctttgtgtctgctcagtaagtattgcacattgcttagtagtttacattagttgtatttgcaggaatgtgctgtattgaacaaatatggaaattaaaaatatgcatagaatcctagatcaaccattatgtaataataaaaagggactaagaagcaggatgtaaaacactgaagtcaaag

SEQ ID NO: 727369 - DNA, 601 bp, Homo sapiens
ctgtgtttttcccctattggctagggttggaccacacagtctaggctaattctgattggctattttaaagagagctggagtggcggggagagtagtttggcgggaaagacagttacagaacaggtgactcaggatgactaagaatgaagcaggtgaccaaggatgactgaggtcagagcaggtgaccaagggtgactcaggacagagcaggtgaccaagggtgactcaggatggatcaggtgaccaggggaacagatgtgaactactgattagaactggtgggttgtttactgagactagggccraggagatataaagaacaaggaagttaacgtttaaaatgaagaacaaagaacaggggagctgaatatactgatacgttggttctttggagaggatctcagaactcattgtacttaacaatttacaggctaaaacctttgaagaggaatttattatatcctacgatagcattacatatttcagaccaagaagtctagaattattatgagccagcattaactgacttgcctgaggctacacatctggtttgtaactaggcaaggttcggacgtagattttcaagctcactcatcctggg

SEQ ID NO: 727370 - DNA, 1638 bp, Homo sapiens
ggtagagactgagatagttacccatctggtactgaatttacaagctaatgatttactgataactgaaagaaatttggaaataattaggattttgccatgaggcttataacagcttttgcccatagtaaaataataatataggctattrtttaagattattctattttatctatgaattaaccacagattcaaatatcccattagtagctttaacttttgcaccttttgaataagatgaatataggaaaattattttattactttttttcattcatttatttcctcaataactactctgtaccctataaacaatatagaagtgtgtcctctcatagaacttatactctagtcagggcaagcagacaataaacacgtgagtgaattaataaataacgaaaagggtaattttagagtagtccccaaatactttaaaattgggaatcaggcactcagtaatttgtcagtctaatagataataatggtgtaactaaaatcagaagtgttaatcatgctttaagtgattagctcatttaaacaacttatttttccaagcctcagttctctagcctgactacccaccagtaaatgagttaataggttacataaattaaaatgtaattatgcacatagtgttattaaacagtggggttaaattaatatgtgacaaaaataatgctaaaattactttacctaagaggtatgatgtggtgtctcaggttagttttaaattttaacttgtctctttctacaaccttatagattttcccagacgtaggaaaattggttcctggaataatcttcatttatttatttttcatttgcttctctatagaaagtctcttacctacaaaaggttttgttcccaaagttaatttgtacaccattctgaactcgtttaccatagaagcggtgcttagcataattgttaggttcaaatgttggtttacagaagtttatttcactgttcttgaagctgaaaagttgcacttaatggtgctcccttgagttttggcccaatttggttgcaaggagtaaacaaaggaggtgcatttttctctttccctgagcacagacctggatccagtccatcctgggaagcagatgagatctcctcacggccccctctggtcttccctttcacacccctgactgcccgtggcactgttctctttacacatcaggacagattttttttttttctagtaagagctacgtgtcctctattcactttttttccatcttattggaagaataccaaagttgataattgagtaaacaatatggatatttgatttttctaaatgccaaatagatgtatcacagtgtcaaaatgatttccttcatcttttgttcaaatatctgtttttaagggccgataacttcctcagagttaccttcttttgcttcttaacaataccctctgctcggttagagctgtcactgactggcccccagatgttcatagaatattcttgcttctaactttgagatggtacgcgggaattaaaatctatgtgatttaactcaaggcaagcttagtcctgttaaaagaaaaaaaaaggctgaaaaagtatagcagtgttaattgattagtttgggttcaccctgctgttggcattggctttattctgtgtattg

SEQ ID NO: 727371 - DNA, 1638 bp, Homo sapiens
ggtagagactgagatagttacccatctggtactgaatttacaagctaatgatttactgataactgaaagaaatttggaaataattaggattttgccatgaggcttataacagcttttgcccatagtaaaataataatataggctattgtttaagattattctattttatctatgaattaaccacagattcaaatatcccattagtagctttaacttttgcaccttttgaataagatgaatataggaaaattattttattactttttttcattcatttatttcctcaataactactctgtaccctataaacaatatagaagtgtgtcctctcatrgaacttatactctagtcagggcaagcagacaataaacacgtgagtgaattaataaataacgaaaagggtaattttagagtagtccccaaatactttaaaattgggaatcaggcactcagtaatttgtcagtctaatagataataatggtgtaactaaaatcagaagtgttaatcatgctttaagtgattagctcatttaaacaacttatttttccaagcctcagttctctagcctgactacccaccagtaaatgagttaataggttacataaattaaaatgtaattatgcacatagtgttattaaacagtggggttaaattaatatgtgacaaaaataatgctaaaattactttacctaagaggtatgatgtggtgtctcaggttagttttaaattttaacttgtctctttctacaaccttatagattttcccagacgtaggaaaattggttcctggaataatcttcatttatttatttttcatttgcttctctatagaaagtctcttacctacaaaaggttttgttcccaaagttaatttgtacaccattctgaactcgtttaccatagaagcggtgcttagcataattgttaggttcaaatgttggtttacagaagtttatttcactgttcttgaagctgaaaagttgcacttaatggtgctcccttgagttttggcccaatttggttgcaaggagtaaacaaaggaggtgcatttttctctttccctgagcacagacctggatccagtccatcctgggaagcagatgagatctcctcacggccccctctggtcttccctttcacacccctgactgcccgtggcactgttctctttacacatcaggacagattttttttttttctagtaagagctacgtgtcctctattcactttttttccatcttattggaagaataccaaagttgataattgagtaaacaatatggatatttgatttttctaaatgccaaatagatgtatcacagtgtcaaaatgatttccttcatcttttgttcaaatatctgtttttaagggccgataacttcctcagagttaccttcttttgcttcttaacaataccctctgctcggttagagctgtcactgactggcccccagatgttcatagaatattcttgcttctaactttgagatggtacgcgggaattaaaatctatgtgatttaactcaaggcaagcttagtcctgttaaaagaaaaaaaaaggctgaaaaagtatagcagtgttaattgattagtttgggttcaccctgctgttggcattggctttattctgtgtattg

SEQ ID NO: 727372 - DNA, 1638 bp, Homo sapiens
ggtagagactgagatagttacccatctggtactgaatttacaagctaatgatttactgataactgaaagaaatttggaaataattaggattttgccatgaggcttataacagcttttgcccatagtaaaataataatataggctattgtttaagattattctattttatctatgaattaaccacagattcaaatatcccattagtagctttaacttttgcaccttttgaataagatgaatataggaaaattattttattactttttttcattcatttatttcctcaataactactctgtaccctataaacaatatagaagtgtgtcctctcatagaacttatactctagtcagggcaagcagacaataaacacgtgagtgaattaataaataacgaaaagggtaattttagagtagtccccaaatactttaaaattrggaatcaggcactcagtaatttgtcagtctaatagataataatggtgtaactaaaatcagaagtgttaatcatgctttaagtgattagctcatttaaacaacttatttttccaagcctcagttctctagcctgactacccaccagtaaatgagttaataggttacataaattaaaatgtaattatgcacatagtgttattaaacagtggggttaaattaatatgtgacaaaaataatgctaaaattactttacctaagaggtatgatgtggtgtctcaggttagttttaaattttaacttgtctctttctacaaccttatagattttcccagacgtaggaaaattggttcctggaataatcttcatttatttatttttcatttgcttctctatagaaagtctcttacctacaaaaggttttgttcccaaagttaatttgtacaccattctgaactcgtttaccatagaagcggtgcttagcataattgttaggttcaaatgttggtttacagaagtttatttcactgttcttgaagctgaaaagttgcacttaatggtgctcccttgagttttggcccaatttggttgcaaggagtaaacaaaggaggtgcatttttctctttccctgagcacagacctggatccagtccatcctgggaagcagatgagatctcctcacggccccctctggtcttccctttcacacccctgactgcccgtggcactgttctctttacacatcaggacagattttttttttttctagtaagagctacgtgtcctctattcactttttttccatcttattggaagaataccaaagttgataattgagtaaacaatatggatatttgatttttctaaatgccaaatagatgtatcacagtgtcaaaatgatttccttcatcttttgttcaaatatctgtttttaagggccgataacttcctcagagttaccttcttttgcttcttaacaataccctctgctcggttagagctgtcactgactggcccccagatgttcatagaatattcttgcttctaactttgagatggtacgcgggaattaaaatctatgtgatttaactcaaggcaagcttagtcctgttaaaagaaaaaaaaaggctgaaaaagtatagcagtgttaattgattagtttgggttcaccctgctgttggcattggctttattctgtgtattg

SEQ ID NO: 727373 - DNA, 1080 bp, Homo sapiens
gctatatacatagctatgaagatagaagtcaccattatatataaattttgtatctttttaaaattaacatattataattctttccctgtcactaaaattctttgcaatatcattcttargagaggcatgctattcaaccataatgccataccattatttaatcctccccctattgttgagcatttttatgatttttaagtatttattataaataatgtgaggacaattatatgcatgtcaatctttgttagtatttctgatttttttcataggatatgttgctagaaatgcaacactattaaaatttaccagtaatagatgatcgtataagctaataaaagcttaagtaaagttcttctttcaaatgactgtgtgccaagtgcacttgaaaagcaagaacggaatgcatataaaatgtctttttccatgcataagcagctaacaggaatagcagccatttaaacattttgctttatttccctttatagtaatagtggaatgatatttgcacacaaattcccagcatctggacattatggtggattcgaaactgaaaaaattgtcattgcctaaaagactacttcctagatctatttaagataaatttttaataaaggcataagcacacagtgtcaccatggtgacaaaaggaagctaggaatactgtctggtagaatatacattgaataaaaaaataggttgatgatacagtagaagaggtccaggcaaagaaaggatcagaagcaaaagcagagggtttctctgatgaaagaaataaagaatcatagatgtattcgtttctgattaaatcatgtgaatgtcacatttggctttcttgcacagtttgtgtctactcatcagacccttgggctagctaatcaaagttcatagtacatacttttagcaatcagtgggcaaatctcagaaacaagaaagacaaaaccatccttgccaagaatgcttcttaacaatgtacagcctggctttgttgttgctgaacactaattccgtgggggcaaagggatagaaatgggtgaacaggattcttcacctcaagctgttggctacactcagacattc

SEQ ID NO: 727374 - DNA, 1080 bp, Homo sapiens
gctatatacatagctatgaagatagaagtcaccattatatataaattttgtatctttttaaaattaacatattataattctttccctgtcactaaaattctttgcaatatcattcttaggagaggcatgctattcaaccataatgccataccattatttaatcctccccctattgttgagcatttttatgatttttaagtatttattataaataaygtgaggacaattatatgcatgtcaatctttgttagtatttctgatttttttcataggatatgttgctagaaatgcaacactattaaaatttaccagtaatagatgatcgtataagctaataaaagcttaagtaaagttcttctttcaaatgactgtgtgccaagtgcacttgaaaagcaagaacggaatgcatataaaatgtctttttccatgcataagcagctaacaggaatagcagccatttaaacattttgctttatttccctttatagtaatagtggaatgatatttgcacacaaattcccagcatctggacattatggtggattcgaaactgaaaaaattgtcattgcctaaaagactacttcctagatctatttaagataaatttttaataaaggcataagcacacagtgtcaccatggtgacaaaaggaagctaggaatactgtctggtagaatatacattgaataaaaaaataggttgatgatacagtagaagaggtccaggcaaagaaaggatcagaagcaaaagcagagggtttctctgatgaaagaaataaagaatcatagatgtattcgtttctgattaaatcatgtgaatgtcacatttggctttcttgcacagtttgtgtctactcatcagacccttgggctagctaatcaaagttcatagtacatacttttagcaatcagtgggcaaatctcagaaacaagaaagacaaaaccatccttgccaagaatgcttcttaacaatgtacagcctggctttgttgttgctgaacactaattccgtgggggcaaagggatagaaatgggtgaacaggattcttcacctcaagctgttggctacactcagacattc

SEQ ID NO: 727375 - DNA, 1080 bp, Homo sapiens
gctatatacatagctatgaagatagaagtcaccattatatataaattttgtatctttttaaaattaacatattataattctttccctgtcactaaaattctttgcaatatcattcttaggagaggcatgctattcaaccataatgccataccattatttaatcctccccctattgttgagcatttttatgatttttaagtatttattataaataatgtgaggacaattatatgcatgtcaatctttgttagtatttctgatttttttcataggatatgttgctagaaatgcaacactattaaaatttaccagtaatagatgatcgtataagctaataaaagcttaagtaaagttcttctttcaaatgactgtgtgccaagtgcacttgaaaagcaagaacggaatgcatataaaatgtctttttccatgcataagcagctaacaggaatagcagccatttaaacattttgctttatttccctttatagtaatagtggaatgatatttgcacacaaattcccagcatctggacattatggtggattcgaaactgaaaaaattgtcattgcctaaaagactacttcctagatctatttaagataaatttttaataaaggcataagcacacagtgtcaccatggtgacaaaaggaagctaggaatactgtctggtagaatatacattgaataaaaaaataggttgatgatacagtagaagaggtccaggcaaagaaaggatcagaagcaaaagcagagggtttctctgatgaaagaaataaagaatcatagatgtattcgtttctgattaaatcatgtgaatgtcacatttggctttcttgcacagtttgtgtctactcatcagacccttgggctagctaatcaaagttcatagtacatacttttagcaatcagtgggcaaatctcagaaacaagaaagacaaaaccatccttgccaagaatgcttcttaacaatgtacagcctggctttgttgttgctgaayactaattccgtgggggcaaagggatagaaatgggtgaacaggattcttcacctcaagctgttggctacactcagacattc

SEQ ID NO: 727376 - DNA, 964 bp, Homo sapiens
  misc_feature 649, 650, 651, 652, 653, 654, 655, 656, 657, 658, 659, 660,661, 662, 663, 664, 665, 666, 667, 668, 669, 670, 671, 672,673, 674, 675, 676, 677, 678, 679, 680, 681, 682, 683, 684,685, 686, 687, 688, 689, 690, 691, 692, 693, 694, 695: n = A,T,C or G
  misc_feature 696, 697, 698, 699, 700, 701, 702, 703, 704, 705, 706, 707,708, 709, 710, 711, 712, 713, 714, 715, 716, 717, 718, 719,720, 721, 722, 723, 724, 725, 726, 727, 728, 729, 730, 731,732, 733, 734, 735, 736, 737, 738, 739, 740, 741, 742: n = A,T,C or G
  misc_feature 743, 744, 745, 746, 747, 748: n = A,T,C or G
accttctgataaattccaatttttgcttaaggtagtttgagtttaggtttctgtctgttgcaaccaagattcattaatgacctattttcataccccctcagatatgaaaatttgtgataaaagaggtaggcattttccccccctttttactctccttttttaaactatgaaaataatggaggacatatagaaggattttggtgtgaattagcatcagtcacactcagaactgcttgctgtcattcctgtccatttcataccttctcctccttttcatgatagtcctcggctcctggccacaggagtgagggttggcccaggatgctcttatcatgtatcatattcttcacggttctgggtacagtgagtgatttgcccaaggtttgtgagcacataacccaagccagactgttagcggtggaagagatctgagttactgacagcatatccctatgggtccatagcaccccccgccctcccctttaaagaaagaaagaattcgacagaggggtataaagcagaaaaagaggccaaggcaagttccagaacagggatggaagtttatttaaaaagctttagaacaggaaagaaaggaaagccccttggtagatccaagggggcaaaagtcaaaaaggaaaaggaagcaaannnnnnnnnnnnnnnnnnnnnnnnnnnnnnnnnnnnnnnnnnnnnnnnnnnnnnnnnnnnnnnnnnnnnnnnnnnnnnnnnnnnnnnnnnnnnnnnnnnnaactgagtgtgtgcagtgcgtatctggagttatacatgagtataactcagagtgcccatctgaggcttttttcctttttttccagtttcatgtgtcccccaaaacatcatactgtgccattttgtctcttaacrcgcatgcccaagaaacagcttctctctggggcctgcattcgattaacactcttaatgttaacaggtgtggaccatcaggagc

SEQ ID NO: 727377 - DNA, 581 bp, Homo sapiens
gtgttacatcattcgtaaagtaagggcaacattatctctcaaaacaaaaagaaacagaacaggcattttatagcaatgaataaaataaaaagtctctgagaaagtaaatttttatacagtaaaaaacactgctagttgggatactgccttctcaagaatataaccaagtatctttcaaactaaacaagttttctattttgaaaaggaaaaataaataataagtgcattgatttaaaygaccagaatgccatttactttaaaagacctttctttttacctggagcaagcaaatcaatcaaatagtaaagaggaaagtgcaataataaccgtaagacaaggtttcatggaagaaaatactggctgtatagaagatctgtgttttcacagactttgttttctttgaggtcttccaacccaatactaaccaggtccagctagtttagcttatgaaatctgacaagggcacagcccatggcaataaggatgcaggatagtgattttatttcttatttaattcattgcagccctagggagagagataacgagaacaggaatgaaatccaggtctcctacataaaaca

SEQ ID NO: 727378 - DNA, 581 bp, Homo sapiens
gtgttacatcattcgtaaagtaagggcaacattatctctcaaaacaaaaagaaacagaacaggcattttatagcaatgaataaaataaaaagtctctgagaaagtaaatttttatacagtaaaaaacactgctagttgggatactgccttctcaagaatataaccaagtatctttcaaactaaacaagttttctattttgaaaaggaaaaataaataataagtgcattgatttaaacgaccagaatgccatttactttaaaagacctttctttttacctggagcaagcaaatcaatcaaatagtaaagaggaaagtgcaataataacygtaagacaaggtttcatggaagaaaatactggctgtatagaagatctgtgttttcacagactttgttttctttgaggtcttccaacccaatactaaccaggtccagctagtttagcttatgaaatctgacaagggcacagcccatggcaataaggatgcaggatagtgattttatttcttatttaattcattgcagccctagggagagagataacgagaacaggaatgaaatccaggtctcctacataaaaca

SEQ ID NO: 727379 - DNA, 779 bp, Homo sapiens
ttatgtaaggagacatgaatattaagatttttagaagtacatagagaataatggcaagctaaaaagtttcgggcagagacacaccagtaaagagactatactgcaattaaaaactattattcaactttgcatttttgatcctattaatcattttgaaacatatgttgattttcaactcagtttgtttagtttactaatacatccacaatagtctaccccaccaccaccccattagaataggtattaaagatactatcatttaagaggaaaaatggctgtttttttaaaaaaatagatttttggctgtgcacagtgactcacgcctgcaatcccaacactttgggaggccaaggtgggaggatcaattgaacgtgagctcaataccagccttggcaacataagagaccctgtckctgcaaaaaaattttaaaaattaggcatggtggtgcctacctgtagcccaagctacccaggaggctggagcaggaggactgcttgtgcacaggaggtgccactgcttggctgcagtgagcctagatcatgccaatgctctttatcctgggtgacagagtatgagactctgtctcaaattttttatatgtgtacacacagatttttaaatttccctacggtggagagattgtctgggtttggtagttacgtagctataaccgtaaaagccttcctagataatacactgtattttgggggcttctgtttgtcctttcaagtagcactagtgacaagatgataaactgcaaatttgtttgtctcgtgtg

SEQ ID NO: 727380 - DNA, 611 bp, Homo sapiens
ctcagctatttacccatttgcatctcaatttctttatctgtaaaaaggatgatagtaatacccatcctctagaattatgacaaggtacatagtaaaatagagcccctaacatgtgcgttttagggggaggagaatgtactattctccaggtggacttcagtgaatttgattttccttatgtttatccagcctagtttttctccctcaaacaatttgtccttcaaggctaagataaaacttccatcaacacccttcctcttgtgcctctcagatctggtggcttccagggctgctggcaacacaaaccccttagaaatcacaagagtgaagcataggttagggsagtggggttggggtggctcagtagggtgtgtggagtagggagatggaaagaaggttgtatctgcaatcactgcaggctcctcagctgtgattgggatgtggcttccagctcttctgtctataaaacagacgactaatacagagccttcagactcagcactcggttttcactccatcctcacttctcatctcccactatgagggcacaaaccagggcttctttagcatggtttaagcaagtgccatgccctccacttagaataattgga

SEQ ID NO: 727381 - DNA, 1882 bp, Homo sapiens
tgtctctgttgtccttcttctggtcaattttgattcccccaccatcgattttaaagccctggccaatcatgtggagagttcctaggagttatactgcctcagtctctttagtagttgatatggtttggctctgtgtccacacccaaatctcatgtcaaactgtaattcccacatgttaggggagggaactggtgggaggctattggatcatggggtcagttttccccatgctgttttcatgatagtgagtgagttgtcacgagatctgatgatttaaaagtatgtggcaattcccccctyactctttctttcctgccaccatgtaagacgtttttcttccccttcaccttccaccatgattgttatacgtattgtgatacgaagaagttatacgatcttcaccttccaccatgattgtaagtttcctccccagccatgcagacctctgagtcaattaaacctcttttctttataaattacccagtcttgggtggttctttatagcagtgtgaaaacagactaatacagtagtccattcaacttttcagttatacgatctcacctatgtaggtcatttgttttcctctgtttctagggagacttctgcccactcactctaactcagactttataaattggtcttgtttcaggcctacagtgctatcctaggaatctcctttactattcttctagggtagatctaatgtcttcctcttttatgatttattatcttattttgatgaattatatctgcaaggaatgttctaaaaatgggttttagaaagccatactttctgagttcttatgtatctgaaaaaatctttcttctactgtgaggtttgactaatagtgtcaataagataaaattcaagttttccatagacctttgtatatatatcttcattgtagtttagtttccaatgttgttgacgggaggtctgatggcactctgattcttgttcctttataggtgaccaattctctatctctgaaagcctttaggattttctctttatctttgtggttctgaaatctctcagtaatgtctgtgcaaaggggagtcatttttccttcgtttttgaacactaaatgggcccttttcatctgaagacttatgtccttcccactctggaaaattattatttattttattcaggaacaatttccttccttccattttctctattctcttattttggaattccatttagtcagctgttggacctcctggttggagtttctaaaaatcaattttgttgaaatattattcagctacagaaatatacacttattttgtgtgcattttagtgagttttgacaaaatgtatatgcccaggtaaccaccaccaccacagtcaaactataatgtatttttatgatcataatttttttcatgcatctttgcagttattctccccacctccagctccagtcaacaactgatctgctttctgtcactatagatcgctttgacttgaggtcatataaatgggattacataatgtgtatctggctacttttgtttagctaatttttaaaacagttgatccatgttgttgcacatatcaaaaatgcattgttattgctgagtaatagtctatttaatggaagtaccagaatttatttatctggattgactttttaaaatctcagagtttagtagctcagagtatgtgctctggagctcctgaactttaccctccggtatcacacttgtgattgtgttatgttacttggcaaatgggactttgaagatgtcattcggactactaatcagctgaccttaagataaaaataagtattcaggattatttggtgggtggggcaaatataatcacatgcacttttaaaagcagaaaaaaaaagtcagaataatgtggca

SEQ ID NO: 727382 - DNA, 677 bp, Homo sapiens
gtattattattgatattacttacagggtaagattttcattcagggaaattattttgattaatttctttgttgactaagaaaagattctcatttcccacttccagagttgctacttcatttacttcagttggcagtagaaaaggtgattaaattgttgaccactcatgttctcttttgtagcatatttgagtttgtctacttcaaaaagtagaacaggagcataatcttggtgacagagtttctgggatctgtagctacgcatctcctcaggtcattgcttattgtatctgcctgactcagggaaagttccaccacactgaatgttgccaagccacaaactgatagaacaccaccattttcgtcgatagagcaatttgctaaaaagtctttcagcaaatgatttgttataactgagcctaaatgtacagaacaccctgggcttctatttgtttttaccttatgcaattgtgttgtcaaataatagttagataaattaatatcagttcttaaaaattgcctcaaataagacraaacaaagaccttacagcagtttacagcagtttgttctctactcttaagtcctccatttctacagatgacattctgttccaagagaattaaaatcaaaccatcaggtaattgtatctatatacaaagttattttcttccatattcaa

SEQ ID NO: 727383 - DNA, 605 bp, Homo sapiens
tgaggttttggaaataattttatttgatgtaaaagcgattgggcacaggttgtagaatgataaaaataaatttgacttttttttttacttattcattacacaggcagattgacttaagctttatttttgtaaaagaagccatgattttatacattctagaacctgtttccatttgtcagaaacaaccacttacatggtctcataattgaatkatatgtatttttaaaattgtgtttcacattctcaaaccttcagaatacactgaatttttagtatataaaaattttcataagatattctttcctggccaaagaccacaatagaggtcttgattgtgtggtttcctcctcctttttcccttcacgaacagaggttttcctatcttggcagctgtttcctacaaagcagtcatcagtccctgatttcttccttcctcctccttcccacaaacaagggctctttgaatagtggatgactgaagacagactgatcttggatcactttaagaaagtggaaacgtgtgcaagagttgagcatgtgggcaagctgcctgtaggcactagctcattcaaatcaaacaatgaaaacttggacagtaaaaattc

SEQ ID NO: 727384 - DNA, 1128 bp, Homo sapiens
ttgtctgtgtattttgatgtctctgccctttttctctatttactatttaaacaaacaggctttactcttacagagacaaagttagcaaaagtaccccattgtttttcaggtttcttctacattcccaaagctgtaaccttattttgtttttctaaaatttaatgtagttctaactgttgacaaagctagttgtgacactggccaacattttctttattgagagttgatgaatgacagccatgtctgaaatctccagtcagactcctcctgatataaagataaatgtgaaatattagaactggaagtattttagcagctttcactacatcgaagctattttttgtcacttttatttggggatatggaatgttcacataaattctattttaaagatgtttaagttttttaaaaatatcctcttcacttaccaccatagatgaggagcctacctattctagaaagaaaaattgtctctaattcttaatttattatgttttctcatgtgagattagtagtttcattactagtttwgagccgatggtacatttctcctgagagatacccagggagtgaagtggactttgttagtaacctttgctacttgccctgcagacaaggagaacttagggagacaattcatcaccctaaagggaagcagaggagagggctgacatcacaattgtctatgaaatcttgatcattttaagcagcattgaaaattttgttggaaatggttttattaaaaatgttctgcataattgtgacatttaaagagaaaacagtttgtatcttctaagttaagaaaggtaaaagtgacagcagttttgaagaagaaggaattgagcattttctgtgtgatgaaaactttttgtgccaacagtcataaaatagggatcttattttctccattaaatagattagaaaaagggagctaaaaatgttttggtaacttactgccaagatcacataactgttaagttagagctgagattaaaatcgaaccttcctttctcaagtccatggtttacactgttaagccttgatgctcgtagcagaataggaaagaaataacatttcatgctcttttcttctttctaaaacatgttacattttttcttgcctctggca

SEQ ID NO: 727385 - DNA, 1275 bp, Homo sapiens
ttctctgttttcacaaatcattaacaccatattctttgtgaggatcctttcctattccagcagagtattagacatgcattaaacaaatgtttgtcaagtcctgctatatgccagacactgaccttgtccctgagtaaactgaaatgaacaggacacaatacctgccattaactgacacatggttaatgtggtcaacaagtatactttacagataggcctgctttgcttcactgtaagtactatatagtagattcatactctgtgtatggtttcatcagaattttcacaagtagaacagtgtttgaagttgagtgctgttccataattacaaaataaactacagtgtgtcctgagcagccatgactaccaactttatttaggcttctggttcctcataaagagatccttagaatrtggagatttacattgactctgatgatatgcctattcatgttctacctggccagtgagaacatgatcagaatataccctgcagagcattttttcttccagaaattggtgcttaacagaagtactttgaactattcttgagaccataacaatagagattttatcaaggattactcctcagtttgggaagtatggttttttgggggttgtgggggtgaggcacagagtttcactcttgtcgcccaggctggagtgcagtggtgcgatcttggctcacttcaacctccacctcccaggttcaagcaattctcctgcctcctgcttcagcctcccgagtagctgggattacaggtatgtaccaccacgcctggctaatttttatatttttagtagaaacagggtttcaccatgttggctatggtggtctcgaattcctgacctcaggtgatccacccacctctgtctcccaaagtgctgggattacaggtgtgagccacagtgcccagccaggaagtatcttcaatctaaagatttcgccaaactccaagcaacttttttttttttttttaaacatagctacctattgactgcctccaaataatttcctttaagtgcccaagatgtggcttcaaacattaaaatctcagactattaatctactgtctcagcatagcagattacattcactcacatattgtagtccttacagtgtgactgtaaaatcatacctctactatcagtcaccagactggtttcagacatcttaatgactagggaatcatgttgatacagacattgacacagaagtctgtgtcttggaatgttggtaactatgtggatataatcactttacccattctaccc

SEQ ID NO: 727386 - DNA, 608 bp, Homo sapiens
gttttttttactttgtctcttttctttcctccgcaactgctttgttgttgttgttgttgtttcttgtaaaccacttctcaaaagtgaactagttgccgtttaatagaagtttggatgaactgcccccaaaataaaggaaatccgaacagtcatgraagttgactccaattggagggatggctctgatcaattactctttccacagtaagttattagctcaggattgattagaggaactttttgtaaatcaatattgtacctgacatgcctaaagtttggatacactgagcatacgcatctccaagaaagttttctgagttataatctttttctttgaccaacaaacaaaagaaaagcatataattgattttcatgcttaagatactggtgtagttttacacgataattccccactacacccccttgtcttaaactgaaagaaaggtatgcctatacatacattttacttacagaagatgatacatgttgacctttgccattctgaaaagcatcccccccccaacctcctaccttaacctgtttttcaggaaatccagtttttgttggggaatgttgactcactacagtgctaaaagaggatgtacact

SEQ ID NO: 727387 - DNA, 608 bp, Homo sapiens
tgtctcagggaatagggcggtctgacgagagggagagagatgagggtatagctgacggatggagcagtcagaacacacacagcatttttcaattaagttcaccaccttctatgagcgcatttgtgatgccccagaacaatgaygatcgtcacatcaaagctcactgtgatgtaataatgaaaaagcttgaaacattgtgagaattatcaaaatgtgacagacacgaactgagcacatgctgttgggaaaatggtggtaacagacttgttcaacacaaggttgcttcaaaccttcagtttttaaaaaacgaggaatctgcaaagtacaatacaataaagcaaaataaaacgagttatgcctgtatgacataaataaactaatggaaaaggcagtaaaatctccattaatatgtaacaaggagactagaagtgaacattaacattcattataaaatatttagtatttaaaactatttataaaacaagtcattaaataaatcatatttacaaatcataaaaatataaatttgtggtccctcattgtcttcccttttacactgagtattgttatctaataggttctgtaaggatctacaaagtaatcacaag

SEQ ID NO: 727388 - DNA, 641 bp, Homo sapiens
gagaatcccttgagcccaggaggtcaaggctacagtgaaccatgattacatcgctgcactccagcctgggaaacaggttgagatccttgctctaaaaaaaaaaattaaaggggttgcacgtgatcagtagctgcaacactagaaagatggcagagcaagagcgaagaaaaatccctttggttccagmaaatctcctgaaaaagaggaaggcttatcaagctctcaaagccatccaggcaaagcaggcacttttggcaaagaaggagcagaggaaaggaaaagggctcaggtttaaatgactggaatcattcctacatggttcctggcggcagaaacgtgacaaggtgcatctcagatgactagaagtgaaacttcacactttggaattgccagataaacatcctttggcctttgttgaacgcattgaaaggattaatggtgtgagtttactggtgcagagaaccattgcaacacttcacctaaagaaaatttttagtggtgtcttgtaaaagtaaccccccagaacctaaaaatgctgcgtatagtggaaccttatgttacctttggatttccaaatccgaagtctgtctggcaactcattttgaaacatggagaatccgaggtcaagaataagaccatcc

SEQ ID NO: 727389 - DNA, 643 bp, Homo sapiens
cctctcactgaggtcatcctctccaggtaactttcctggatcatccctcattttcaagtattattatcccaaagatcattcttctcaaagtaaacagtcttttttttttgttgctatgttcactgcaaataagaaaaaaaaaataacctctattggtattattgtaacaagctatgcaaagaagcccatgcattaagaaaggcatcttggtaggcaatagcttacagttaggtctcaggtctcatgttccagctctggccccacatgctatacattatttcatttagtawgaaattgggataagagaattcttttgtcaaattacgtgccagtatcacgctgttttaaatactgcatttttataacaggcagcatagcctggtggttaaggcagtacacttgagctaaactgcctggctctttgacccttctctttactacttccttggctgtgtggccttgcgcacgttatttaacatcccagtaattcaatgtccttatttgtaaaacggagatgataatgatacctatctaatagaaagagctgatgtgaggattaaaagttttaggcttttaaaatatttccatttatttatttatttatttatttagagatggagtctctcgctctgtcgcccaggct

SEQ ID NO: 727390 - DNA, 1702 bp, Homo sapiens
aaaaaaattaagtatctcataatgtcactggccagggatgcccaatgttaacattttcgtctattttatttcatttttgtttgcaaacataaataattttacatcatgtggtctctaaactgaaattgatgtttacctttgagtcatgaagaacatgaattatggttaataccaatggcatggatataacttttctaaggaataaaagattatttaaatctgactagtgattttaagtcaatttaacttaagaaaaaatagccctagtagtaattaaattgattttaatttattcccacatttttctgggtaaaattattacatagtagccatagtcagtacccaagaaatcataaagatcatcccctggcagttactaagttaagacagtgcaattcttaccttccaagatcctaataattgtgaatactaatatatcagcctcctttgcatattttcatcattaacatcacaccagttctctgatattaatttagtctaatagaggtcttatgcaaaaacttattgaagaaaaatgcaaagtacagatgagcatagaagctgaattttgtagaacatatgaaatcagtatcttatctgcaaatcagcctacatttgtaatagataatgttaatattattatttcaattgttagaatatataatagtagtaaatcaagtcagattaacaggctggttattcagttaaatattaacagaaacaaaaataaatgtcgactggaactgcagtgatatgtgcatttaggagattcaaatgcgctaaattaaaagtaaagaggatttaaaacaagatatctataatgatttctgtgatttacaagaaggtgaaaacatacatcaaagttaaacttgatgatttgggaaaacaatcacacataaaaatttctctttggaaaattataattttgatgcgattttcattcctcgtaagaaacaagtgcaacatggaaggtttagtcaaacgacacatagttttgtacaggatagtgcatgtgcaatattatagttatcaatactatattgtacactgtagttaacaatatgctattgtgcccttaaagatttcctaagagggcagtaaattttatgtgaagttttcatatcacaaaacaactaacgataataataatgaataaagaaatcagaaggccgggtgtggttgctcatgactgtaattccagcactttaggaggccaaggcaggcggatcacaaagtcaggagttcgagaccagtctggccaatatggtgaaatcccatttctactaaaaatacaaaaaaaaaacaaattagccgggcatggtggcactggcctatagtcccagctactctggaggctgcggcagaagaatctcttgaacccaggaggtggaggtggaagtaagccgagatggtgccactgcattccagcctgggcaacagagtgaaactccgtctcaaaaaaaaagaaaaaaagaaaaaagaaatcagaaaaaaaawaattggaagtgatgaatacatttatggcatagactgtgatgatggtttcagagcttatacgtattcacaaacttatctaaattatatgcattaaatatatacaacattttgtatctcatcatacctcaatacatttttaaagaaacgggtgttaatggctttgtagaatgagtaagagaggagtcattgccacaattttttagaa

SEQ ID NO: 727391 - DNA, 1262 bp, Homo sapiens
agagccctaatccccgcagatatattgtgacaccggtttatgcattgtatgtatatctgcactttgtacatttaaaaaattaagttgttttttatcccccaagatcaattctcactcccattgagaatgtgcaacctatcagaccacagcagactgattcaggacacagcagaagcagatcacagaaatagatgctagacaattgatttgggcraaaatcagtgcagatgtccagcatagaagtttgtctagatcaggctttgtaaaggtaaagacagacagttggccatacaggttagccaaacaagacacaggttggagaatacagctgacagcagtgttgatggaagataggagggcaaggttcaaggcaggcagagatgtgagaaatatttgtccactgggtcagagaatgctttatatagagaaatatcatcatccagaaaagttccgtgaaagagaaattattctcagttctgaagccagatttagacattttgcctttgttcctcaggagcctggaccacccagccaactgtgccctattgatgaaaatctctgattattataggggaatacattatgttggcttctgtattccctgagaaccatctacatctcctagtactttgaagtcgtggtatcagatgaaagaaccaagccttccaaactgacttggagctgtgctgaggtgttcatggcctcaagcattcaagcaggttgattggatatgaggtgtgatattccttttcctcaagtcatttatcctctggagatcctaacctaacctaatctctcctaacctaaaaacaggagcagacccagggtcctgactgggcattctcattatgcttcctaaaaccattaggatctcttcgtggtcacatccaacagcctttctctttctcaggcctgcagctcactgcatgtggtgctgcctctcacattctcctctttaattagaggtcagccactctaactccagccttcatcacactctgcctctagggtcttctgaatgctgtctttgagggtcttctcagtctcttccttcctctttatcttttatcaaaggcactcttttaatcttttggttcctttctgttgcccctccattctcatctgtttatatgttcgctttaaggtcataaacattattgagtgcttgctatatgcctagtactgatataaacaagatatggcttttgtgcattcttgtgatggaacagatacatatataaaaccaagcaaaacacaatgtg

SEQ ID NO: 727392 - DNA, 1262 bp, Homo sapiens
agagccctaatccccgcagatatattgtgacaccggtttatgcattgtatgtatatctgcactttgtacatttaaaaaattaagttgttttttatcccccaagatcaattctcactcccattgagaatgtgcaacctatcagaccacagcagactgattcaggacacagcagaagcagatcacagaaatagatgctagacaattgatttgggcgaaaatcagtgcagatgtccrgcatagaagtttgtctagatcaggctttgtaaaggtaaagacagacagttggccatacaggttagccaaacaagacacaggttggagaatacagctgacagcagtgttgatggaagataggagggcaaggttcaaggcaggcagagatgtgagaaatatttgtccactgggtcagagaatgctttatatagagaaatatcatcatccagaaaagttccgtgaaagagaaattattctcagttctgaagccagatttagacattttgcctttgttcctcaggagcctggaccacccagccaactgtgccctattgatgaaaatctctgattattataggggaatacattatgttggcttctgtattccctgagaaccatctacatctcctagtactttgaagtcgtggtatcagatgaaagaaccaagccttccaaactgacttggagctgtgctgaggtgttcatggcctcaagcattcaagcaggttgattggatatgaggtgtgatattccttttcctcaagtcatttatcctctggagatcctaacctaacctaatctctcctaacctaaaaacaggagcagacccagggtcctgactgggcattctcattatgcttcctaaaaccattaggatctcttcgtggtcacatccaacagcctttctctttctcaggcctgcagctcactgcatgtggtgctgcctctcacattctcctctttaattagaggtcagccactctaactccagccttcatcacactctgcctctagggtcttctgaatgctgtctttgagggtcttctcagtctcttccttcctctttatcttttatcaaaggcactcttttaatcttttggttcctttctgttgcccctccattctcatctgtttatatgttcgctttaaggtcataaacattattgagtgcttgctatatgcctagtactgatataaacaagatatggcttttgtgcattcttgtgatggaacagatacatatataaaaccaagcaaaacacaatgtg

SEQ ID NO: 727393 - DNA, 1262 bp, Homo sapiens
agagccctaatccccgcagatatattgtgacaccggtttatgcattgtatgtatatctgcactttgtacatttaaaaaattaagttgttttttatcccccaagatcaattctcactcccattgagaatgtgcaacctatcagaccacagcagactgattcaggacacagcagaagcagatcacagaaatagatgctagacaattgatttgggcgaaaatcagtgcagatgtccagcatagaagtttgtctagatcaggctttgtaaaggtaaagacagacagttggccatacaggttagccaaacaagacacaggtkggagaatacagctgacagcagtgttgatggaagataggagggcaaggttcaaggcaggcagagatgtgagaaatatttgtccactgggtcagagaatgctttatatagagaaatatcatcatccagaaaagttccgtgaaagagaaattattctcagttctgaagccagatttagacattttgcctttgttcctcaggagcctggaccacccagccaactgtgccctattgatgaaaatctctgattattataggggaatacattatgttggcttctgtattccctgagaaccatctacatctcctagtactttgaagtcgtggtatcagatgaaagaaccaagccttccaaactgacttggagctgtgctgaggtgttcatggcctcaagcattcaagcaggttgattggatatgaggtgtgatattccttttcctcaagtcatttatcctctggagatcctaacctaacctaatctctcctaacctaaaaacaggagcagacccagggtcctgactgggcattctcattatgcttcctaaaaccattaggatctcttcgtggtcacatccaacagcctttctctttctcaggcctgcagctcactgcatgtggtgctgcctctcacattctcctctttaattagaggtcagccactctaactccagccttcatcacactctgcctctagggtcttctgaatgctgtctttgagggtcttctcagtctcttccttcctctttatcttttatcaaaggcactcttttaatcttttggttcctttctgttgcccctccattctcatctgtttatatgttcgctttaaggtcataaacattattgagtgcttgctatatgcctagtactgatataaacaagatatggcttttgtgcattcttgtgatggaacagatacatatataaaaccaagcaaaacacaatgtg

SEQ ID NO: 727394 - DNA, 1440 bp, Homo sapiens
tggtattatcatggttttactgactaaaagaggacacgtgtaacaaaatcagtaaggagggtactccaagaatccatgttaaagttaatgagggcttgaacccaaacataaaggatggaaatgatgtaataaaataccttttgaaagttatatatttaaaaattttcggctaacattctacttagaggtgaatgaagaaagcagaggagtctaatgcaatgcgtgacttgtagctcaggtaaaggggtggcaggtgacgcttaaatactagaaatataagaagcagcacaggtttggttttatctktgagaacaatggagtggaggtatgctttacatgcaattatttatgggatattcaaaacagatatatatcaagcaaaaaacttgggcccaaaaaacaagtttgaaggtatatttgggagttaccagtaatataggtaactgttgaagctctaaatatagaagacaaactagaggagcttgtttcttgaagaattcttgtcacacttgacattttttacagagatttcttaaaacaggggcatatcttctttggctaacatatgcagactaaaatgaaagagtatagtatattataaaatcaataaaaggtaagataaattgaggcctaaaaataaagaataaatacactcagttgattctgaagctctaatttacagatgcaaaattgtaccagtacattaactcatatgtcaaaacaacatctagagaaacaaaaaatgaaagtaaaatggaaaaagataaaagaagtgaggcaaggagaagagaatgggcaaaaggagataggaaaaacaggaatttttttttaaagggctaaaattttagtgaatcagatgtggaaaacagttggattaacattgagatcaaatgagaaaggagcaaataaggaaagatgtattacaaaccaagagtaaaaaagggaaaacaaaataacaaaagcaaatttatttaaaaagaataaaggaagacgtgataatgaagtaaatttaaaaagtacggaataataaaaagaaattgcaaaaaataccttttgaaaataaacatactaataacttgacaataaagtgaaatgtgtaagacaaacatatctgtgtcattatttaggagtagtgaaaagtactcttaaataataatttggtatctagcaggcctggatttgaatctactttaacttgctagctatgtgaccttgggcaagcaaagaaactcctcataaccattgtaataataccaccaaaatgccttacacttacggctcaaaaagtgaaggaaatgagagaaaaaagtatagattactatatggaagtcaaatttctagtgacttttctaatccaaacatgaattgttacagtacttgaaataaactttatgagaactgagtgactacattgcttcagatagttttatactgctaggt

SEQ ID NO: 727395 - DNA, 826 bp, Homo sapiens
tatatgaacgttttgaaatacaggataacataaagacaaagctattgcttggagaagtcatttaacaaatatttatgtgacaggcaccatgtgaagtgctgaggatacaacagtgatcaaaatatacatgatccctgcctttaaggaatttagagtcttgcatgagtgatacaagaaaaattcctgtgctagtctactttatcccatataggaattgcaagtctgtatgacaaaaccttacacactcactcactcaaaatttggtatttaaagagtgtgaaggtaaatgaataactgctcactactcaaaaaaaggttaaagtttgtagttcataataaaagaaaactcacttactaatgaatatatagcatggctgaattcaaaaatacttattaaggaamctatttgtgaccatttctgtgggggatatataaggagtatgtgaaacagatataaaatacataagcactatctttaaagagcttacatgtccacattaaacacttaggtaatatttaaatatcaggtaaatatacatatacttttaacctaattttacctaattacctacacttttaaaattatataaagggctgggtgttgtggctcatgcctgtaatcccagcactttgggaagctgaagtgagtggattgcttgagccctggagtttgtgaccagccggaacaacatggcaaaaccccatctctactaagaaaatacaaaaattagccaggcgtggtggcacaagcctgtagccccagctactcagagaataaggtgggaagatcgcttgaacccaggagatggaggttgcagtgagccaa

SEQ ID NO: 727396 - DNA, 814 bp, Homo sapiens
  misc_feature 670: n = A,T,C or G
ggatattgtgaagaaagtaagcaaaacccctttgtttgtagaatttcagtgagcatagtcctgggttaacctgacaacagtcctactgtttattgatgcttataggtgagcctatttctctttctagctttcttccacttaatttactttcttttggaattcttgaatttaataataataatattgatgttattagtcatcactataactttttattgagtatgtattttatgtcagacacagtgtggctaagtgctttacatacattatctcatctaatccttagaaaaaaccctggtgtattagtcttaatttaaaagatgtactttggaaaggttagtagtttacccaagattatgcagctagttaaaagtggtgctggggctgggcttggtggctcacacctgtaatcgcagtgctttgggagtctgaggcaggaggatcgcttgacaccaggagtttgagactaacctgggaaacatagggggaccccatctttackaaaaataaaaaaattagccaggagtgggggtgcacacctgtggtcccagctacttgggaggctgaggcaggaggattgcttgagccccagaggttgaggctgccgtgagccatgattatgccactgcacatctgtctgggtgacagagcaagatcctgtctccaaaanaaaaaaaattatttttataaaaaagtggtattgggcctgtctaattgcaaagccacattctttactgcatgctttagtccattgttttttaaactgcagatcatgaccacgaatgggtcatgaaaccaatttggtaggtctcca

SEQ ID NO: 727397 - DNA, 814 bp, Homo sapiens
  misc_feature 670: n = A,T,C or G
ggatattgtgaagaaagtaagcaaaacccctttgtttgtagaatttcagtgagcatagtcctgggttaacctgacaacagtcctactgtttattgatgcttataggtgagcctatttctctttctagctttcttccacttaatttactttcttttggaattcttgaatttaataataataatattgatgttattagtcatcactataactttttattgagtatgtattttatgtcagacacagtgtggctaagtgctttacatacattatctcatctaatccttagaaaaaaccctggtgtattagtcttaatttaaaagatgtactttggaaaggttagtagtttacccaagattatgcagctagttaaaagtggtgctggggctgggcttggtggctcacacctgtaatcgcagtgctttgggagtctgaggcaggaggatcgcttgacaccaggagtttgagactaacctgggaaacatagggggaccccatctttacaraaaataaaaaaattagccaggagtgggggtgcacacctgtggtcccagctacttgggaggctgaggcaggaggattgcttgagccccagaggttgaggctgccgtgagccatgattatgccactgcacatctgtctgggtgacagagcaagatcctgtctccaaaanaaaaaaaattatttttataaaaaagtggtattgggcctgtctaattgcaaagccacattctttactgcatgctttagtccattgttttttaaactgcagatcatgaccacgaatgggtcatgaaaccaatttggtaggtctcca

SEQ ID NO: 727398 - DNA, 608 bp, Homo sapiens
gtttaaataatattgctaagccgtgatagcatttacttaaaaaagtaatacagcattttaaaagatcaaagtaagttgatttagtctcctcactcaaggaactctgaaaragtcgattaaaatcttaatttgtaaatctataaaatctgttcatatgcaaacactagaaatatgtaggttttacttcactataagagtttacagaggcatgagatttgttcaacaacctgaagtatgagccacttaaacataacttagatgcttatgttactagaaacttgatataacttctgaaaggatggttattcaaaaactcattcatcacttaatgcctaaagttcattcatcatgagtactttatgtaattcttaaaaagaaaaaataactttatcagagattcaaatttctgcaaggcacattgtgatatgtccatatggtgcattttgcaactaacaaaagaagaaggaaataacatcctaatctgtttcattcattcatctgctctctttatgtcactcaggagattttcaacagaagagcttcagtgatggtggaagctgcaaaaataatgtccagaatgcattattggatgcaaattttagagaaga

SEQ ID NO: 727399 - DNA, 2857 bp, Homo sapiens
caccagtattctgacttactcatcatgaacaatgctgcaataaatccaagtaataagaatattcacttggtttgtaacagattggacagaatatacagaaagattagtttcatcatttgatacctatttttgtgaacgtcaagcattaattctagttatttggaatataatggtgaataaaacaaagttgcctgttaccatggagcttatattttagcaggatcagatgaaaaatagacaggatgaataagtaaattatgtagtatgttagatttgataatttctttataaacattaagaggagtgtaagaaaagatgggtaagatgagtcaggaatggggagggggttaacctggtattcagtagggaggacagagtagcctcattgagaagataagatttgagcaaagacttgagggacaggaggggtttggcaagcaattatctggagaaagtttaagtgaacaaatactacaagggagtgtttcgactttcacattatctgaaggcccagttcattatgtcagtatgacagctgagtaattataaatgaaggaggtgttagtaaaaaatagcatgaagttctttttgaaggtcttgtgagcttgtaaattagcctttttctcttgactctgcttctctggttcattttcatgcatttaaagatgtggggtcttgagcttcagtttagtgacaggttaaaacaaacaaacaagtgaaaaaaagtgcagttaaacaagtaagaataatgacaacaatgctgatggtggtgatgatacggtaacagtaataagttaacatttattggcatctgttgttagtgtcaaagctttgaattcagcctgtgttaggttactctttattctcatagcttcagctacctttcagctttagacagagtaattgtgatttttagaatttttgtaactttaatcagtggacaggactggagccctgcctgttcatgcttaaagttacagattatagcaagggccgctgaaatggacaatgagctacttcattcaataatgcaacaatgtaaaaacctgagtggttccagaaagcccagatcttttgtaaaccctggaagatatcctttctgaagtaaactatcaagctcatgaccttggacctgagataggaaggctgccatttaccctgagttgccatttttgcacatttgtctgatgaaaattggttttattgtatttacaattcattggactcttttcaaacataatgactaattcttcacaacctgctagaaatattaaacaaaggacacagaggacaaagattttttttttwaaaaaaggttagtcatccttctaaggtcacagagaataaatcatagagaaattggtttatacttgctttgtttgttttttaaatgccaaaagttggtcatactacctgtttttgtgagttaactttctttccctgcgcaaatttactctgtagtgacttatatcttatttgttctatgaaaatgatggttttctgtatatcaggtctatttttgggaggtgtaactccctcaaagtggactgcgacattcattaaaagctgaacttacaccactgaccattttagacaccttgagattttattcaattctccaaatttttcatccacatataaaattagactaatattaacatacccctttaagaatactatataatgactacaatgagaagtaatgagatgataaaattgaacagctcttttgaaattctcagaagagaaagactaaataaatccaatcatttattttgttaatgcatgaagcgtatgttaatttagcacaatctgtgtagttccggtttctttcatgaaataatctctgttttttctgcagtattttaaaatattttctgacatttctaaagcactcttaaattaacttatctgaccttttcttctcttatatgtgaatgcggaacataccagctatgactgctctgtttgaatccattcccgttgctgctttatctaacctcatggttatcacttattctctgtaagaattttcagtgcccaaagacatagaatctgcattacgatgtgcccttcctgaatgtatggatgttgttgttaccctatagggtcgtctttgttatcctgaaggcactggtgaatgtgaagtactttgaaaactataatgtgccatataaatgtgaagtattatttgtggttgctacttaatcacagggtcatttgaagtcttcctaatcttttacaatgtcacttgataaaggtgagggttcaatgagtgaaagtttccagtaagtatccctttcaggggtatttccttacctgaaaattatcttggacaaactggttttctgtaataacgtaagaatatctttttttttttaaataaaagcccccagcctaatgcaaagatttcaaattaaacatcttgaaaaaatattgacaaattatggttttgagccacagcttccatttatacagaatattgattctccttcatattaactttggtactgaaaactttatttttcctacttagatggattctaaccctacttttgaaagcaaagttaatattctcttagctgttaattattctcttgatcagttgcctccatatttttaaatgttttccacgtagaagtaacctagaaaaacttgtatgtgtgttctcttagttatttttatatacatatctttaaataaaatgaaataaaatacacattttgaaaaggtcatatacacaaaaggataatttgaaaagttaaaattctcccccacactgtttactccccagccatccattttcttgcttaagaatttaatttgtatctttccagaaatagatgtacacaataca

SEQ ID NO: 727400 - DNA, 703 bp, Homo sapiens
tcacagatcaaggagcggagcattgccagaagcccagaaactccctgtgcttccttctaattgctggcctgtcatagcaaattaagtttgcctgttttctaatttcatataaacagaatcatatactcctttgagcttattgagatcaacattttatttctaagatccatccgtgttgtgatgtgtaattttagtttcttcctttaggttttcaaaattgagataatgttagagttataagtcagtttagcaagagttagtatgacactgaatcttctgggtacacagtgtctatgcctttccatttgcttagtcttttttttttctttcggttacattttaaggttttcttcatatgaattttttttctaatccattgacygatggcccagaacaatataaataatagtcttactaatggacatccaaaatttccctattttactagacatcctttacatattgaccatccttgtactctggggatgaactctctttggagttttatgtgttgctacatttgtttctaatacctaatttggatttttacatcatcattcataattgtgattgagtatagttatggatttttattgaatttttggaatgttttatgctaccttcatacagagaatttggaagggtttttcgtcttgtttagtgttctgaaatagcttaagttacattggaattacctatttca

SEQ ID NO: 727401 - DNA, 703 bp, Homo sapiens
tcacagatcaaggagcggagcattgccagaagcccagaaactccctgtgcttccttctaattgctggcctgtcatagcaaattaagtttgcctgttttctaatttcatataaacagaatcatatactcctttgagcttattgagatcaacattttatttctaagatccatccgtgttgtgatgtgtaattttagtttcttcctttaggttttcaaaattgagataatgttagagttataagtcagtttagcaagagttagtatgacactgaatcttctgggtacacagtgtctatgcctttccatttgcttagtcttttttttttctttcggttacattttaaggttttcttcatatgaattttttttctaatccattgaccgatggcccagaacaatataaataatagtcttactaatggacatccaaaatttccctattttactagacatcctttacatattgaccatccttgtactctggggatgaactctctttggagttttatgtgttgctacatttgtttctaatacctaatttggatttttacatcatcattcataattgtgattgagtrtagttatggatttttattgaatttttggaatgttttatgctaccttcatacagagaatttggaagggtttttcgtcttgtttagtgttctgaaatagcttaagttacattggaattacctatttca

SEQ ID NO: 727402 - DNA, 636 bp, Homo sapiens
tgtatacatatgtattacaatatataattgattataatttttgattataatttaaaacaagtgttcactaaagaaatgattcggtacttgttgataatattaaaattgaagcaggacagttgaaaacatacagagcatattaattctaccacatagaggtcaaataagcattttcatgattgtaagtatagaatgtacatcataaaaatgatgctaaattatttatataaaaataatattttctttggaaataacaatgacaaaaatatatatctggaagaaacaaaagtagctgaggtctgtatctgcaaatattacaagaaagttgaaaaaccctacattgctgtgtccaaacagctcataatccagcttcagtcactggagcaagatacagacactgccyatggcgttgattttctgttctgctccaactcttagagagcagtcgtgttaattaaaaattctgaaatatcataagcatgtctagaaatcacagaaagactaaagacagatttaattgtatttgataatgaagtcatagtccttggttaagataaactaggtttgctacaaatgttcatggaatatggaggacttccatggtcactatcagggcaaatatttgggattatacca

SEQ ID NO: 727403 - DNA, 578 bp, Homo sapiens
gggtggagggcagtggtgtgattttggcttactgtaacccccaccttctgtgtttaagcgattcgcctgcctcagccttccaagaagctggattacgggcatgtgccaccacgcctggctaatttttggatttttagtagaaatggggttttgctacgttggccaggctggtctcaaacctgtgacttcaggtgatccgactgcctcggcctcccaaagtgctgggattacaggcatgagccaccgcgcctggcccccacaggtcttctgaccactgtattcagtcctgacctgcccagacagccttctccctaaggaaggagtyccacacaaatctcactggcgaatgcccttatcttctgcagctggagcagcagcttactaggcctttcagatacacttaggaagaaatcctaaagcagaatctcattagcttgtgtgtggctggtgaggtggtttttgctcaggacagggtgcccaacagctctgggaggtctttggtgaggaggggcctcaaggaattatctcagatgtgatggacttatttcatttcctctggggcaccccctctttcttcc

SEQ ID NO: 727404 - DNA, 716 bp, Homo sapiens
ttaaaaagacagtttcatgagctgtaaaaagtaatcatggtttgtcaagtcagcagatctctccccttccgccttctaactgtcactaatgctttttggagagagcacacttttgttcttttacttttcagagttgttgaagggggagaactatttctttacacagagggccctgcatggcagctttaaccacttgagactgataagataatttyactcaagagttttgttttttttgtttgttttcctgccctctctgttgagacaggccaccagctgaccaaataattgcaatagcggttgggagatggtaaattccacagaataatccaaggaaattccagtttttctaataattgaatgataagaatatttatgtgatcttttctgcattgcactggtctctgtgaggaaaatcaggtgatagcataattcatatggaaataatcaagctcccttttcaaaaaagaatgacactttgggaggccaaggcaggaagactgcttgagtcctagagttcaagaccagcctgagcaaggcctgtctctacaaaacaacaaaaaataaagaaattagcctagtgtggtggtgcccacctgcagtcccagctacttgggagaatgaggcgggaggatcacttgaacccaggagttcaagctatgatgacaccactgcattcaagcctgggcaacagagtgagaccctgtctctaaaca

SEQ ID NO: 727405 - DNA, 634 bp, Homo sapiens
taactccatgacattggaaatttcatagaaagaaatcagagctcaggaatgtttctttttggtttaggtttggatgcctatggcagaaaaacctaaagtaataatgactaaaataggatagaactatatttccctttcatatgaaagaagtttgtcaatagacaattcagagcttatacaattttatgtagtggaaggacatgagccctttttgtcttgttgctctcagccttagygtctaccttttttttttctttttttgagacagggtcgtgctctgtcgccaggctgcagtggcacgtggcacgtgcagtggcacgatctcggctcaccacaacctccgcctgtcaggttcaagtgattctcctgcctcagccttccgagtagctagtactacaggcgcacaccaccatgcctagttaatttttttgtatttttagtagagacgagatttcaccatgttggttaggatggtcttgatctcctgacctcatgatctgccagcctcagcctcccaaagtgctgggattacaagtgtgagccaccgtgcccggcctttagcttctactttatggtctgattcccgcaatcccctccatgttccagccagcaggcaagaagaaggaacaaaaaa

SEQ ID NO: 727406 - DNA, 634 bp, Homo sapiens
taactccatgacattggaaatttcatagaaagaaatcagagctcaggaatgtttctttttggtttaggtttggatgcctatggcagaaaaacctaaagtaataatgactaaaataggatagaactatatttccctttcatatgaaagaagtttgtcaatagacaattcagagcttatacaattttatgtagtggaaggacatgagccctttttgtcttgttgctctcagccttagcgtctaccttttttttttctttttttgagacagggtcgtgctctgtcgccaggctgcagtggcacgtggcacgtgcagtggcacgatctcggctcaccacaacctccgcctgtcaggttcaagtgattctcctgcctcagccttccgagtagctagtactacaggcgcacaccaccatgcctagttaatttttttgtatttttagtagagacgagatttcaccatgttrgttaggatggtcttgatctcctgacctcatgatctgccagcctcagcctcccaaagtgctgggattacaagtgtgagccaccgtgcccggcctttagcttctactttatggtctgattcccgcaatcccctccatgttccagccagcaggcaagaagaaggaacaaaaaa

SEQ ID NO: 727407 - DNA, 1891 bp, Homo sapiens
cctctggattctaacttttttggctattgttttaggttactgcctttttaataagttacttactttttaggactaggtagcaaaagaaaaaagacaagatggtaactttcccaaggtggatttaagcaaaaaaaaaaaaaaaaaaaaaaaggctacctagctatctgcaatttttcttaaactcaggattaaaaaaaacaaaaaacaaacaaaaacgctgggtgcagtggctcacgcctgtaatcccagcactttgagaggccgaggcgggtggatcacgaggtcaggggttcgagaccagcctgaccaacatggtgaaacccagtctctactaaaaatacaaaaattagctgggcatggtggcgggcgcctgtaatcccagctactaaagaggctgaggcaggagaattgcttgaacccgggaggtggagtttgcaggagatcgcaccactgcactccagcctgggcgacaaagcgagactccgtctcaaaaaaaaraaaaaaaaaaaaaagaaaaaaaaagaagaagaagaagaaaaaaaaaggactagctagctatctgaaatttttctaaaactcaggattaaaaaaaaaaaaaaaaaaggccaggcgcggtggctcacgcttgtaatcccaacactttgggaggctgaggcgggtggatcacgaggtcaggagatcgagatcatcctggctaacacggtgaaaccccatctctactaaaaatacaaaaaaattagctgggcgtggtggcggccgcctggagtcccagctactcaggaggctgaggcaggagaatggcgtgaacccgggaggcggagcttgcagtgagccaagatggcaccactgcattccagcctgggtgacagagcgagactccgtctcaaaaaaaaaaaaaaaaaaaaatgctcttgtttgggcacaggcccctaaaaagagggtccctgctccgtctcagaagtaaaagaatccttatcaaatctgaatgtggctgggcacagtggctgatgcctgcaaccccaacattttggcaggcaaggcttggaggattgcttgagcctaggagttcaaggctgcagtgatctatgatgatggcactgcactgaagcctgggtgacagagcaagaccttgtctctaaaaaagaaaaaaaaagtgtttattttgatatctgagcactccagtaaaacctcagggacaaaattaaagttttaataaaaactgtaccgttaaggggaaaaaaaaaaagaacaattacgcttattttacattaatcttatgcttttaaaagaccaaaaccaattccaagagggtctgctcttggaatttaaattctaacattttaaatcaggatgcttgaatctgattttaaggcccatgaaagactgtgctactaatctgcaagacagaggaaagattttctttcagaattcaaaaagcacccacatcctaacatttttgtgtcataataaaacatgaatttgtcatagaattaaattctagaaaaaaatgaatcctagacctggtgcagtggctcacgcctgtaatcccaacactttgggaggccaaggtgggccaatcacctgaggtcaggagttcgagaccagcctggccaacatggtgaaacctcgtctctactaaaaattacaaaaattagctgggcgtggtggtgggtgcctgtgatcccagccacactggaggctgaagcaggagaatcacttgaacccaggaggtggaggttgcggtgagccgagactgtgccattgcactccagcctggatgacaaaagcgaaactctgtctcaaaaaaaaaaaaaaaaaaaagaaaagaaaaagaaaaaactaatccctagcattacttattttatatttagaacacgagtttttctctact

SEQ ID NO: 727408 - DNA, 1891 bp, Homo sapiens
cctctggattctaacttttttggctattgttttaggttactgcctttttaataagttacttactttttaggactaggtagcaaaagaaaaaagacaagatggtaactttcccaaggtggatttaagcaaaaaaaaaaaaaaaaaaaaaaaggctacctagctatctgcaatttttcttaaactcaggattaaaaaaaacaaaaaacaaacaaaaacgctgggtgcagtggctcacgcctgtaatcccagcactttgagaggccgaggcgggtggatcacgaggtcaggggttcgagaccagcctgaccaacatggtgaaacccagtctctactaaaaatacaaaaattagctgggcatggtggcgggcgcctgtaatcccagctactaaagaggctgaggcaggagaattgcttgaacccgggaggtggagtttgcaggagatcgcaccactgcactccagcctgggcgacaaagcgagactccgtctcaaaaaaaagraaaaaaaaaaaaagaaaaaaaaagaagaagaagaagaaaaaaaaaggactagctagctatctgaaatttttctaaaactcaggattaaaaaaaaaaaaaaaaaaggccaggcgcggtggctcacgcttgtaatcccaacactttgggaggctgaggcgggtggatcacgaggtcaggagatcgagatcatcctggctaacacggtgaaaccccatctctactaaaaatacaaaaaaattagctgggcgtggtggcggccgcctggagtcccagctactcaggaggctgaggcaggagaatggcgtgaacccgggaggcggagcttgcagtgagccaagatggcaccactgcattccagcctgggtgacagagcgagactccgtctcaaaaaaaaaaaaaaaaaaaaatgctcttgtttgggcacaggcccctaaaaagagggtccctgctccgtctcagaagtaaaagaatccttatcaaatctgaatgtggctgggcacagtggctgatgcctgcaaccccaacattttggcaggcaaggcttggaggattgcttgagcctaggagttcaaggctgcagtgatctatgatgatggcactgcactgaagcctgggtgacagagcaagaccttgtctctaaaaaagaaaaaaaaagtgtttattttgatatctgagcactccagtaaaacctcagggacaaaattaaagttttaataaaaactgtaccgttaaggggaaaaaaaaaaagaacaattacgcttattttacattaatcttatgcttttaaaagaccaaaaccaattccaagagggtctgctcttggaatttaaattctaacattttaaatcaggatgcttgaatctgattttaaggcccatgaaagactgtgctactaatctgcaagacagaggaaagattttctttcagaattcaaaaagcacccacatcctaacatttttgtgtcataataaaacatgaatttgtcatagaattaaattctagaaaaaaatgaatcctagacctggtgcagtggctcacgcctgtaatcccaacactttgggaggccaaggtgggccaatcacctgaggtcaggagttcgagaccagcctggccaacatggtgaaacctcgtctctactaaaaattacaaaaattagctgggcgtggtggtgggtgcctgtgatcccagccacactggaggctgaagcaggagaatcacttgaacccaggaggtggaggttgcggtgagccgagactgtgccattgcactccagcctggatgacaaaagcgaaactctgtctcaaaaaaaaaaaaaaaaaaaagaaaagaaaaagaaaaaactaatccctagcattacttattttatatttagaacacgagtttttctctact

SEQ ID NO: 727409 - DNA, 1808 bp, Homo sapiens
gaatcctaagtcagaacgttcaggaaatccaagtaagaagaacggcagacaggctattggcaacagggaagggtcctgagttgtagggatctgagccttgcaccagaactcaggaactcagtcctgttgatggaaatggctgccaaaatagtgcagcttcccagttccagagttaatcacatggataagagctcacatccagggatatagttatcagaacagcagtgcacaatgatggagctttagaaataagtcaaagacagtgtgatcagactttaggctccaggacagatccaaactggccccaaggacaactgaatggggagttgcagaataaggagctggagctccttcaatctctactaagttcagtgtctgtggggtggggagagtgtggttagtagctgcagttatagaaagcatcaataaggctgcgaagactgggacccaggaagccgaggtcagatgctttgcagttacaacaaagcagggttctttgtgttttggaaaaatccacagcaatttcttgacttgctgggatttaaaaccaaaatcaatttgtattagattagctgtatgtcattataggccaggctttcaggctccaccagttttaggtaaattgaattggcaattcagtatcctattcaggtctgagggtcatgcggctgactccaagaaaaacatcaacaacaacagaaaaacacaaacaaaaaacacacagatcagacaggcaggaaatggagccaaagggccacaactttagaggtgcagaccgatagcacaaggagtccctcagaggccatcttgtstaacttcctgcttccagaaaggacaggctcagagaagtctagagagctggaaatttaaactgtgttaacagtttgcagaggaagagggctgtccttgatgctgactcagaaatttcctgatataatactattgctaaccattgccaagcacgttcaacatgtgtagtattgtactgtgctctgttacaggtatcacttcatttaagcatcgccatgtttgaagcaggtatattattgtcactaccattcatgaggaaagcaaggattagagaggatgagcatatcacccaaggttacccagctggtaagtggtagagcagaatctgagaatagttcttttgaggccaaccatttttccacgtcacactgaaattcaaagatggaagcctgaacccctctgcattccttgtagagacactttccctaaatctatcttttgtcttttatgcctctcatcctgtctttccagaaatttattttttattgtttttctgtccagaaaatattttatttggtttaagattattttaactatgacaagtaaatatttcccaaacaaaatctctctcttaaaacattgctctatcccattcctaatcccagagaaaaccaactaaattagttggaggcctttgagcagaaattcctttatgatacataagacattcagtatgaaattcactgtctttttcctctctcctctaccatcccaactgcatggggaggcaggaattcagcactaggaaattcagagccttcttctccccactgtcactgcccgtgagcacatcagcccatccacagggacatgtctgccactgtcgtcaattattatttctcaggcacccactgggtgcccggcacatcagagaagaaacgaattgactctgctttcaacaatcaccctgcaaacagccaaataattttgatgttcttcaaacatattataattaaaaaattacatgctgggagaaaaattataagcatttaatcaga

SEQ ID NO: 727410 - DNA, 1918 bp, Homo sapiens
  misc_feature 1096, 1097, 1098, 1099, 1100, 1101, 1102, 1103, 1104, 1105,1106, 1107, 1108, 1109, 1110, 1111, 1112, 1113, 1114, 1115,1116, 1117, 1118, 1119, 1120, 1121, 1122, 1123, 1124, 1125,1126, 1127, 1128, 1129, 1130, 1131, 1132, 1133, 1134: n = A,T,C or G
  misc_feature 1135, 1136, 1137, 1138, 1139, 1140, 1141, 1142, 1143, 1144,1145, 1146, 1147, 1148, 1149, 1150, 1151, 1152, 1153, 1154,1155, 1156, 1157, 1158, 1159, 1160, 1161, 1162, 1163, 1164,1165, 1166, 1167, 1168, 1169, 1170, 1171, 1172, 1173: n = A,T,C or G
  misc_feature 1174, 1175, 1176, 1177, 1178, 1179, 1180, 1181, 1182, 1183,1184, 1185, 1186, 1187, 1188, 1189, 1190, 1191, 1192, 1193,1194, 1195: n = A,T,C or G
tattagactgatgagtttgaatacagaacatgcaaatcagaatatggacaagctttaagaaatgacctcatgtgcacacagtctttgaaattaacaacaacaacaagaagaaatgagctcatatctctcacctcttgaaactgagatctaattttcttcttcaaatttaaggaacagcaaaagaataagaaatattggtcgtgaggcagctaaaagaacttagaaagtgtagaaccccttcaacacaagttagacaatgaagaaaccagttgccattgtagatgggtgtgggtacagaattgaatcactaaattagatgattaaagaaatttttttcggccaggcagggtggctcatgcttgtaatcccagcactttgggaggccgagttgggcggatcacagagtcaggagatcgagatcatcctggctaaaatgttgaaacctcgtctctactaaaaatacaaaaacattcatgcctgtaatcccagcactttgggaggctgaggcaggcagatcacgaagtcaggagattgagaccatcctggctaacatggtgaaaaccccgtctctactaaaaatacaaaaaaaaraaaaatagccaggcgtggtggcgggtgcctgtagtcccaaatgcttgggaggctgaggcaggagaatggtgtgaacccaggaggcagagcttacagtgagctgagatagaaccactacactccatcctgggtgacagagtgagactctgtctcaaaaaaaaaaaaaaagaaaaatttttttttcagtttcaggtggggcacaggtggctcatgactgtaatcccagcactttgggaggccaagatgagcggatcacctgaggtcagtagtttaagaccagcctggccaacatggtgaaaccctgactctactaaaaatagaaaaattagccaggtgtggtggcatgcgcctgtagttccagctactcaggaggctgagggcagaagaattgcttgaacccggggaggcagaggttgcagtgaaccaagatggcaccactgcactccagcatgggcaaaagagtgagacgctgtctcaaaaaaaaaaaaaaaaaaaaaaaagagannnnnnnnnnnnnnnnnnnnnnnnnnnnnnnnnnnnnnnnnnnnnnnnnnnnnnnnnnnnnnnnnnnnnnnnnnnnnnnnnnnnnnnnnnnnnnnnnnnnaatttgtaatggtaacaactggaataaaaaaaataagtgacactttgggctgtaagaaaatgtgtgaacttgaagaatcatcctaaatcttgggctgagattgtaaatctcttcctaattgggttgaatttttgtaagccccataaaggagaaagaataagaataagtaaatcaaacacatattaataatactctcacagtggctggcaagatggctgaataggaacagctcctgtctgcagctcccagtgagatcaatgcagaaggcaggtgatttctgcatttcaaactaaggtacctggctcatctcattgggattggttagagtgggtgcaacgcacggagagtgagccaaagcagggtggggcgttgcctcacctgggaagcaaggagttggggaactccctaccctagccaagggaagccctgagggactgtgccatgaggaacggtgcattctggccccaatactacacttttccgacggtcttcggaacccgcagaccaggagattccctcgggtgcctacaccaccagcgccatggatttgaagcacaaaactgggctgctgtttgggcagacactgagctaaatgcaggagtttttttccataccccagtggtgcctggaacgccagcggcacagaaccgttcactcccctggaaaaggggctgaagccagggagccaagtggtctaactcagaggatcccaccctcatgggg

SEQ ID NO: 727411 - DNA, 735 bp, Homo sapiens
cagaacccaaaggtgcatttctcagtggcctcttctgttaaaaagagtggcaagtttatgtctttaatcctggaggaactttaacatctctgtgtttgagtgatttctgtttctaagaattattcttggggtcctttttctccaagttttctaccatcttttcatattaagataggtcaacacattcattatagaggccatttatggcttatttttaagcatactgatcatacaacactctggttttcctggaagaatacaggtcttgaaattcatggagatagtagttgcagtatttgcgtagactttttatgtacataattcttaatgttttaatttttacaatgaaagtacaggataaaaaacttgaccctrtagttacattctcgttcagcagtattttgactgagcactattatttataagctctttcactagatgctgtgatcagtgtgaaaaatatgaaaggaattaagttccacgtccttcataaattttcagataatgtaaatgcataccaatcttcaacttaattgtgtgaacttctgcaaatgctgaagtgattggatgggattttcaagataggagttattggaggaagtgagtttagagcagagatttgaaataggtaaataatatgaattggtatggaagaaataacaagttactccagctggagaagtgacttcaaagactgattgttgtcctctcttcactgcagtgagaatttctaat

SEQ ID NO: 727412 - DNA, 735 bp, Homo sapiens
cagaacccaaaggtgcatttctcagtggcctcttctgttaaaaagagtggcaagtttatgtctttaatcctggaggaactttaacatctctgtgtttgagtgatttctgtttctaagaattattcttggggtcctttttctccaagttttctaccatcttttcatattaagataggtcaacacattcattatagaggccatttatggcttatttttaagcatactgatcatacaacactctggttttcctggaagaatacaggtcttgaaattcatggagatagtagttgcagtatttgcgtagactttttatgtacataattcttaatgttttaatttttacaatgaaagtacaggataaaaaacttgaccctgtagttacattctcgttcagcagtattttgactgagcactattatttataagctctttcactagatgctgtgatcagtgtgaaaaatatgaaagraattaagttccacgtccttcataaattttcagataatgtaaatgcataccaatcttcaacttaattgtgtgaacttctgcaaatgctgaagtgattggatgggattttcaagataggagttattggaggaagtgagtttagagcagagatttgaaataggtaaataatatgaattggtatggaagaaataacaagttactccagctggagaagtgacttcaaagactgattgttgtcctctcttcactgcagtgagaatttctaat

SEQ ID NO: 727413 - DNA, 1017 bp, Homo sapiens
tcaatcatagtaaccaaccttagaatattacatttgtagtggaatgaggataaatttaaatgtctcagtctttggaggtaattatctrattatatgttcatatttctagcatgattaagtggcaatgtttaattcattttagaggtaattttaccccatgtggggatatgtattctaaatcattatacctttctgtttatagaaaacatttaattaacatactcaagttttatttggaagtttagtaatattgcactgttatatcacatcactacttaagatgttatttcggaaaacaccattatttattaatcttaacaaattgcattttattttagtatattcacaattaagaggctacccaatggatatgactttataatgctttgatcttatggagtgctggcgagtattattttctatgttttagttcagaaaatgtataaagtagtattaaccttgataaaattagaatgcctgaaactgcaaagggtaaagcatatttgtcagttttatcttgtgctagcaaaagcctggccaattgccaaaatgtggttagggacgtatatgcactctacaaggattattgttaagggcatctacaaggaaaatcactatgatagatgaaacaggatgctactttatggtggttttatcttattttaggagtaaaatcagagtatcaaagcaaaccaaaatcatcaaaatcatttctgtgatggaaatagaattcatctgtttttctgatctatgtcctgtgacacagaacatagagtccttgtggaattcagaaaatcatttatctgtgaagaatgttgatttggggtttctaagctgtgtcatggctaaaagtcttaaaaacaggcaactttaattggggagagggtttgacaaaatcctgggaatcagatggatatgtattatgatgtgactattagcttaagaaatactaaggccctatttattccctagagggaaacaggtcattgaaatatttccccctcaaagagttgaata

SEQ ID NO: 727414 - DNA, 1310 bp, Homo sapiens
gttacatgtagaagtgtaattattaatcctgccttttacatttatgtagtcttttacagtttataggataccttaacatctgttgccttactagacatgtgagttctaactaagactgccatttatttaaccctgaaagtgggtaagttatttgagtttcagcttcagtttataaatatgtcacctactttctgtgtaggtattactagaaaacaataaaagatagtatccctaaggaagattaatttaaattacataactttgtatttaaattcctcatataaaatataagataccaagatcgaaatttattcagatataaactgtactatataccaacatcttttattgttgtatttttattgtaaattatctaattgtttatcttacagattttctggctttattataaaatatattattctttagtttcattcctaacttgcttacccrgccctattgtaaatttggttgttgtatcattttatgtttatagtttctgtgacaacctgtacagtttgatccacctagcaagtatttaattaattcttgattaatataattttttagttgttacataacagtagggctgaagacagccttatttccttttcaaacattaattttactaagctttttaaccaaatttattgcaatctagagatgtttaaaggaacagtcagtcagcaataaatttatttttctttaaatgttatcttttttccccctgcaaggaaatgtaacctagttcttataacacttgtgttgtcttgcctttcattttgtatgactaactttttataccaaattgaataagccattagcttttagtgtgtaggaatgtagatccatagatatttcccattagacaaaagaaaatctataaaagcaatatcccctggggcttggtcttcttagcggcctaatggtctaaagcactgctatactgtacccttatgagaaagaactatgttgggtgattcgcttggcatccagaaatattagttgaagagatatgcataccctttaagataactttaacgtttgtactgtaccacatttattaattaaatattccaattcagggaattcattcataaattttttatttcaaaaatcatttctaaacagaatgatacactttgtatatcttatgcagttttcaactagagtttgctgaaactgagagataatattatttagatagccacattgttttgataaggttttttttctaaagaattttacttcaaaaaagacctctattggtgatagttgtacaactctgtgaatacgtactgaattgtaca

SEQ ID NO: 727415 - DNA, 1310 bp, Homo sapiens
gttacatgtagaagtgtaattattaatcctgccttttacatttatgtagtcttttacagtttataggataccttaacatctgttgccttactagacatgtgagttctaactaagactgccatttatttaaccctgaaagtgggtaagttatttgagtttcagcttcagtttataaatatgtcacctactttctgtgtaggtattactagaaaacaataaaagatagtatccctaaggaagattaatttaaattacataactttgtatttaaattcctcatataaaatataagataccaagatcgaaatttattcagatataaactgtactatataccaacatcttttattgttgtatttttattgtaaattatctaattgtttatcttacagattttctggctttattataaaatatattattctttagtttcattcctaacttgcttacccggccctattgtaaatttggttgttgtatcattttatgtttatagtttctgtgacaacctgtacagtttgatccacctagcaagtatttaattaattcttgattaatataattttttagttgttacataacmgtagggctgaagacagccttatttccttttcaaacattaattttactaagctttttaaccaaatttattgcaatctagagatgtttaaaggaacagtcagtcagcaataaatttatttttctttaaatgttatcttttttccccctgcaaggaaatgtaacctagttcttataacacttgtgttgtcttgcctttcattttgtatgactaactttttataccaaattgaataagccattagcttttagtgtgtaggaatgtagatccatagatatttcccattagacaaaagaaaatctataaaagcaatatcccctggggcttggtcttcttagcggcctaatggtctaaagcactgctatactgtacccttatgagaaagaactatgttgggtgattcgcttggcatccagaaatattagttgaagagatatgcataccctttaagataactttaacgtttgtactgtaccacatttattaattaaatattccaattcagggaattcattcataaattttttatttcaaaaatcatttctaaacagaatgatacactttgtatatcttatgcagttttcaactagagtttgctgaaactgagagataatattatttagatagccacattgttttgataaggttttttttctaaagaattttacttcaaaaaagacctctattggtgatagttgtacaactctgtgaatacgtactgaattgtaca

SEQ ID NO: 727416 - DNA, 650 bp, Homo sapiens
ttcaaagactttcagaccagtgaaaaggtaaagcaggtcagataagaccaaagaaggttcttgcagaagggtcctggttcttggacaattctgagaagtcagtttccctccctcatttcacctcctcatacatccagagatacagttaggcagatacagggattttctggggaatatttttccttgcgacggtaagttgccgtcttataagcaaagggcttcattgcaacttctcatccccagagtcatactctgtttgattagaaatttggacgtagcattttaagaccatggagagctctgtatttttrgtgcctagagactgatgttgagaattcaccctgggccttcgtccctcacttctgtagctctgcagcgggctgcgtggaggactcctggcactgcctcctgggtcgtccgcagctctgtgacagccgtccaggtttcacggcttcaccaccgtgttggtcttacgagtgttcatcttttacaggttaaaatggcttaaaggtgtcagcgtttcatgataagccttgtatttgggaccttgcaactcagtcagaaacttgtcgtgtggaatgatagttaaaaatcagaggctgaatgctaagtagatttgtgtatggtgggaattggaaggcataaaaaaa

SEQ ID NO: 727417 - DNA, 638 bp, Homo sapiens
tcctgagatgtgctggcatgtgggcaaggaactctaccccagccccacaccccatttggtggtcttgaraagagctggtgacatcctgcatcacttcagtggcaccaagctgcatcgattggtcttgagacacatggcagacttctgagccaccaggattgtttctttcagcaaaacaccttctggcacagagttgccaccaggagggacagcagctgacatctgcacatgcaccacctgccaggacctggccatgaagtactgatgtgtacccatgtgtagtgactcactgagactttccggcaacccgtgaggcccctgttccacagatggggatgctcagacaacagtgagtgggtggcgcagagagtcacacacagcagtgcgaccccatcatccgctcttgacctctatgccatgtgaggcttctggagcctcttcctgttgcacctgcactactttggagctgcctcccagggctagagcctgtccttgcttcccggttattcacgacaaccgtcagtggagtacccgttaggtgccaggcactgcgtcacgtgatgagtatcagaagaaatggatcagatgaggacctgcagtcaacgagcttcccgtccaggggaggaaacatccgaact

SEQ ID NO: 727418 - DNA, 599 bp, Homo sapiens
ctcrggcaccgacggcacctccaccacgcaggagccaactctgctgtcagtgaagtaacaaatccaactaaagacaaaggtagtaaaactgcagctaattggcatgaagcacaaaagagatttggaactcccatacagattctgcacccacctttaaagagtctacaaaagaggagaacatcttaaagtcggctaactttgcagaaagcaacaagtttggagcacactgcctcaacagtttcagtgcacagtgaaaatcagaaatattataaacaagaattgagacattctaaagtaagactagtgaaatgaatgtagaagaacagagaaagcgtattactcctaagactaatgaggtctttaaaaaaaaaaaaaaaagggctgaccgggctcatgcctgtaatcccagcactttgggaggctgaggcagggggatcacctgaagtcacgagttcaagattagcctgagaaacatggggaaaccagtctctactaaaaacacaaaaattagctgggcatggtagcatgtgcccgtattctcagctactcgggaggctgaggcaggagaatcgcctgaacctggcggggcagaagttgca

SEQ ID NO: 727419 - DNA, 896 bp, Homo sapiens
caacagaaaatcttttatacatgagaaacactgtgctaaggactgtgcatgtggaagaataagatggtagggaaatacagttaaaaacaaaatctcctcccagcccagaaatcctctctattgagaaagcagagaaagaaaacacatttattattcaataagcgttaaaccagaatgtaatgcacatcacaggcaatcctctatgagatggcaaagacagaagtctcatccttttatataaccaagcagatacaacccactacctgcrtgttgtcaagataaacaataactagttctcaagaagacatgacagcaccatttgtcacacagctcattctaactttacttgataattagggtgaccatctgtattagctaattttctagagaaaaacaaatttcatatcatggtgacaggattgctataaagatagtagtttttcaacatggaggcacccatcaaagttaggcattcccgtgttgtgtgtgaggtggccctcagcatccattcttcctttaactaaccgagtgaacattgataacttgcctttccaggcaccttgatacagagaacggtctaatagcagactccttatagacactagaaatgataaaattctgatcaatataaattaacaaattggaattctgcttgactcttcattctcatgtaacttgggttagtgagagttagtccccaagatcctggtcaactttgggtccactgattgactcaagccctgcaaagctgataactagtcctgtgacaatatcagcccatggttaatgttccatctcattttcctctgtatctatagtatctattatctaccacattctgggtgctgaatgaataaatatggatcctgggtgcatatggcagttccaagtcctca

SEQ ID NO: 727420 - DNA, 1288 bp, Homo sapiens
tagttgggaggctgaagtaggagaatcgcttgaacccgggaggcagaggttgtggtgagctgagatcacgccattgcattccagcctgggcaacaagaccaaaactccattttttaaaaaaaaaaaataaataaattagtaaaaataaaaatttgataaggcaaaaaaatgtaaaaaatttatgaacataatttaaaaccactttaccttttttatatttgaaatgcttggatgtaaaaagcatttgtgctttaaagactacatagaaatcaaatgtacaatcacctggctctgatacctttataaatggtagaacctttaagaatttcracaattcagactaaaattgaccactacccacagagacaaagcccattaaaatcccctcataatatcctgatggacttttcccagatattgtaaaggacaaagtggtgccactacagtttatataaaacattatcccagcacatagcagctactttttaaaaaatatgcattgaatgtattaattcatttgagaaatcttaaactgcagtctgtaaagcaattctctagtgcatgattgttgttagaatgtccgagaaacagattgggcctttttaaagaaaacaaactgaagcagaaaaattaatacaataaaaattttaaatcttagaaaatattgcagagtatgaaaaaatttttaaaaatggaaaaaacaaattaatgaaatttaaattggacaagaagttaaagctaagttaataatttaatatataaaacttaagattaatgattaggtaatagtaaaaaaatgttccaagtgtaagattaacagattaacactcagcagagagaggtataaagaaaagaaatcaaatagaagaaattagtcatgaaggatttgtaaggaaattcatgaagtacgcaaaactccctaggcactggcttgggcgctgcatatacacagagagatatggtggtccttgacctcctggagccctcagttaagaagacttacagctaatggttttcatttacctttgtctttcactaaagcctaaaaaagtgtttctcatactctggaaatcttcagcaaagtcaaatgaacgtgggctcatacaggaactaccaaattaattgcatcaaggcaaacatatgtattctaatttttgagtaataaaatattgttttaaaatttcaaaatattctttataaatacaaaacaatattttataaatattatagccaagttacaattactttctaggaaattggggagagcatgagaaaaaaggtgagagaa

SEQ ID NO: 727421 - DNA, 1229 bp, Homo sapiens
attgaactcagaccaaatcaagaaataaactagcccattaaattttagaaagttgtattgaatatgttcaaagctttgggtttcagaagtccctgaaaatgctgaaatgtggcatgaagacatttggaaactactaatacgatcccaacccttttacttcattaattgtcttaattcttacagaaaaggagaatggacttgttctaaatagttccaaaagacttacctagagaacatgaaaggaaattatagggaagtaacttttgttttaaaataataaaaatatttttaaaacttaaagctttccaattttataaagcagtaaattttctgtggttggcagtgtttagattagatgtatgtttgtctgagtattggctccaggcagtggggaaagtttttttatatttttccaatttttaaacaatttttgttctattgaagcaaagtgaacatacccatgtaattgacatgtagttctagaaataaatattgcgcatgaagatgtaaaagtgagaaaaagaaactataaaaccaataacaacttttctaaaaggttaatggatttgatgaaaagtctgtctttaccctgagactattttttgcctctatttaggtgttcaaatcccctttttattggaaaataatatttgtagattttaggttttattggttgctgtttctattgtcattaacttaacaaaatggatgagttatcgaaacaacatttgtttctgtggacatttcctgaaatgcatgtctttcttcaaccatgaaatcccaaaatgtagaaaactatttatrggagataactgaaagggtattgattcactggatagtaaggaatggacaaatttaaagtttgtttccaacctggaaataaaaccaaataaataaaattttattccaagctttaaaatttttctctttatcgtctctatttaaaagaaaatatttttctacctgtttatctttctaggtgagagtagatctaaagtatgtatttatatttatttttatttagcaaatgcattttctcctttttacaaattttagcctgtgtaactcaagagatgctatctttaatgtgaagtagtttatgacttcatatttaaaaaaagaactgcaaacaaattaaattaggacatttgcagctattgcttgaataaactatacatctgaatttaacacagcaaatataatagtttgtgagaaaataaagatgcatg

SEQ ID NO: 727422 - DNA, 597 bp, Homo sapiens
caatgggtgctgtgggcacatgggagtggccacttgccacaggaagaaatgcatggggtcctagccagagggaacagcttgcacaaagtcactaaggttatagagaagacattttattagataacctaaagattcagactggctgatgcagagagaagaaaaatatttaaaaatttaaaaagmggctgtattggaaaaggaggaaagactttaaatcagaaagtcttgtaagacatgataaaggtttttatttaaaccttaagtcaacaagggaggctttggagtgatatgagtaggaaacagacatgatcagatttaagattaagatgtatactctggcaagagagttgaaaacagactctgaacacactgagcaggatgattatgagtttgagtttatcaagcagccagctagagtgtagtaagatccaaaggtagagatcgggcttttaggaaaagtggtagaagaagcctaaacacttcactattatctaattgaacagagctctgcattgagggttatctcacaccagcccacctttgataacaaaatggcattttctctttactttttggcaactcttgccaaaaaagctc

SEQ ID NO: 727423 - DNA, 657 bp, Homo sapiens
tcgtgtttattttcttccatttactatctaacaacctctcccccaaagtagcctggttcaaattaattgtgttggccaggcacggtggctcacgcctgtaatcccagcactttgggaggctgaggygggcggatcacgaggtcaggagatcgagaccatcctggctaacacagtgaaaccccgtctcaactaaaaatacaaaaaaaaaaaaaattagctgggtgtggtggcaggcgcctatagtcccaactactcggaaggctgaggcaggagaatggcgtcaacctgggaggtgcagcttgcagtgagccaagaccacaccactgcactccagcctgggcgacagtgcgagactccaaaaaaaaaaaattaattgtgttaaaccactgagagctgaggtagctaagacttcacatcttaagtttctttctatagtatgtcccaataacagcacttccacctgtacaaaatccccaacttgctcaaaggtttcttgtctcacccttttaaataactcctttcatttatgtataagttgagcaacaacactgaattcagagattcaaatgtaaatcaaaggtcttttaattttataacattgggaaaactttaactaagtaatggaatttagcagtatcggccttagattcctgatat

SEQ ID NO: 727424 - DNA, 546 bp, Homo sapiens
ctttgacttacatagcgagccacatactgccgagcataaaccacttaacaccaaaaggaaactacatattctattagttcaatgaaacaaagtggaaaataagctaaatgcagagctttttattaccattaaatagttgatcaaaataagcagagttaaataaaagggacaaacctgagtaaataaagttttcatttctgcccaggaatataaatatatatataaatataagatagaagtcatgttgattattccagcatttcccaacagatagttgaggaatttctttccaatatttttattgcaccacctggtgkaatattttccatatgattgatatttgagaagcaaataagcgctgatttctcttcatcttttttgtgttttacttagaaggttggttaaattagggagaatttcatgttgctatttctactctcttttatgaataacttgccttgcccttcagttaagtgttcgtagagaagactatctaaattattcactgtggaagtacacatcatcacatgtgatgggatattgtta

SEQ ID NO: 727425 - DNA, 546 bp, Homo sapiens
ctttgacttacatagcgagccacatactgccgagcataaaccacttaacaccaaaaggaaactacatattctattagttcaatgaaacaaagtggaaaataagctaaatgcagagctttttattaccattaaatagttgatcaaaataagcagagttaaataaaagggacaaacctgagtaaataaagttttcatttctgcccaggaatataaatatatatataaatataagatagaagtcatgttgattattccagcatttcccaacagatagttgaggaatttctttccaatatttttattgcaccacctggtggaatattttccatatgattgatatttgagaagcaaataagcgctgatttctcttcatcttttttgtgttttacttagaaggttggttaaattagggagaatttcatgttgctatttctactctcttttatgaataacttgccttgccyttcagttaagtgttcgtagagaagactatctaaattattcactgtggaagtacacatcatcacatgtgatgggatattgtta

SEQ ID NO: 727426 - DNA, 546 bp, Homo sapiens
ctttgacttacatagcgagccacatactgccgagcataaaccacttaacaccaaaaggaaactacatattctattagttcaatgaaacaaagtggaaaataagctaaatgcagagctttttattaccattaaatagttgatcaaaataagcagagttaaataaaagggacaaacctgagtaaataaagttttcatttctgcccaggaatataaatatatatataaatataagatagaagtcatgttgattattccagcatttcccaacagatagttgaggaatttctttccaatatttttattgcaccacctggtggaatattttccatatgattgatatttgagaagcaaataagcgctgatttctcttcatcttttttgtgttttacttagaaggttggttaaattagggagaatttcatgttgctatttctactctcttttatgaataacttgccttgcccttcagttaagtgttcrtagagaagactatctaaattattcactgtggaagtacacatcatcacatgtgatgggatattgtta

SEQ ID NO: 727427 - DNA, 546 bp, Homo sapiens
ctttgacttacatagcgagccacatactgccgagcataaaccacttaacaccaaaaggaaactacatattctattagttcaatgaaacaaagtggaaaataagctaaatgcagagctttttattaccattaaatagttgatcaaaataagcagagttaaataaaagggacaaacctgagtaaataaagttttcatttctgcccaggaatataaatatatatataaatataagatagaagtcatgttgattattccagcatttcccaacagatagttgaggaatttctttccaatatttttattgcaccacctggtggaatattttccatatgattgatatttgagaagcaaataagcgctgatttctcttcatcttttttgtgttttacttagaaggttggttaaattagggagaatttcatgttgctatttctactctcttttatgaataacttgccttgcccttcagttaagtgttcgtagagaagactatctaaattattcactgtggaagtacacatcatcacatgtgatgggatatkgtta

SEQ ID NO: 727428 - DNA, 649 bp, Homo sapiens
cagagcgagactccgtcccccctccaaaaaaaaaaaaaaggatttaagaatttgatttacatttttaagctgtttgtcagaaatggaaacttgaagtagtaaaagcaaagagtagattcttacatggaaaataatttcgctacaaatgtctctgcttacctgccctcattcattttccaaagggcatataagcatactttcactggaatttaggcataaataagtagcagtcttacaactagataacagagcatgtattttaagaaaaatatatccctcaatctttaagagatatatcaataactacatagatgggtatacctacatcttatacattgatacgtatatgtatttattttacatctttggtacttctggagaaaagcttaaagctttaaatagcaaactgctgcactatatattgatgtaaaaatctagwcgagttttagagttgtgcttaaaaatacattcaacagtaattttcccgagtttgaaggtaaacacttccctaatactgacacacactgtgcaaagacgagctcactttcatgttaccttttactatgtagttgaatcctggtccagtaaagaggcttcattggtcgacaaggctctatgggctgcttcctactccctttgtcctgattca

SEQ ID NO: 727429 - DNA, 661 bp, Homo sapiens
acaccagagacaagttggaggcttgctccttggcttccttcaggaggcttgcaccactctccctggcaccctggaatttcacctctgaagctaggtagagaaaaagagagacttctctgtaaggactggagaagagctttcattgtcttctttccctggtgtcacccagctgtccatttaaaccttccaaatttaaggcattcccaataagaattctgctggtaaacagccttctgtttgctctcagatatcccagtattccaaagaactacactgtttaagttgtagtagggtggagttcccctatgggaaatacccccaggctctgccttgatgtatagtcacayggaggggatgagaatgaagaaaatcagtccagtggcttaggaaggaaagaggctgatgttcttattataattctattaactatatctttgcaatttccactaaaatgtccttccctaatacaaagacctaaatctggtgttctttggactccattttgtccttgactctttcactagttggagtgagtaggggtagggaagagctttggtctcccatagaggtcagatgccactagcactttagggtattaaaatttcagagtgtcaattgctgttctccacatcacactgcttgtgtatgcacgactttaaaa

SEQ ID NO: 727430 - DNA, 642 bp, Homo sapiens
ggattataggcttgagacaccatgccgggctaataagctgccttttaaatacaaacgcctatctttccagcccccttgttcctctatagacactgtaataactctttggcccccttgacatgtttaagtgaccactttcttttttaaagaaaggtgagaggaggcttgatttcctaagaaaagcagtcactctgtgttcaccctgaattagataatataattgagacttatataaaagtgtttgtgtttctaagtctttcaaaaacaaaaagtgtttgtgtttcaaagtctttcaaaaacattctgaaataataattctgaataattccttagrattcttttagagttctaaattacatttcttttacttatttatttttattgatgtataattattgtacatattttgggggtacatgtgatattcagatttctgtatacaatgtgcaatgatcaaatcagggtactgggatatccatcacctcaaagatgtatcttttacctgtgctggaaacattacaaatcttttcttctagctgttttgacatacacaacaagttatgtttaactttaattttcgtactatactatcattcctttcttttccttttttttttttttttttgagatggagtctcactc

SEQ ID NO: 727431 - DNA, 646 bp, Homo sapiens
cctctctcaccctctctcatcactcctattaaacrgtagtggaaatcctgaccagggcaatcatgcaagagaaagaaacaaagggcatccaaatagaagagaggaagtcaaattatccctgtttgcaaatgactggattctatatctagaaaaccccatagtctcagcccacaggctcattaatctgataaacaactttagcaaagtctcaggatataaaatcaatgtgtaaaaattactaacatatctatataccaacaacagtcaagtggagagccaaatcaggaattcaatcctgttcacaattaccatatacacacccaaatataaaatacttgggaatacagctaaccaggggcggggcaaaaaatctctacaaggagacctacgggggcaaaagatctctaccaggagatctacagaacactgcttaggccaggcacagtggctcatgcctgtaatcccagcactttgggatgccaaggcgggtggatcacctgaaggcaggagttcaacaccagcctggccaacatggtgaaaccccatctctactaaaaatacaaaaattagccaggcatggtggcgtgcatctgtagtcccagctactcgggaggctgagccaggagaatggcttcaacctggtagg

SEQ ID NO: 727432 - DNA, 646 bp, Homo sapiens
cctctctcaccctctctcatcactcctattaaacagtagtggaartcctgaccagggcaatcatgcaagagaaagaaacaaagggcatccaaatagaagagaggaagtcaaattatccctgtttgcaaatgactggattctatatctagaaaaccccatagtctcagcccacaggctcattaatctgataaacaactttagcaaagtctcaggatataaaatcaatgtgtaaaaattactaacatatctatataccaacaacagtcaagtggagagccaaatcaggaattcaatcctgttcacaattaccatatacacacccaaatataaaatacttgggaatacagctaaccaggggcggggcaaaaaatctctacaaggagacctacgggggcaaaagatctctaccaggagatctacagaacactgcttaggccaggcacagtggctcatgcctgtaatcccagcactttgggatgccaaggcgggtggatcacctgaaggcaggagttcaacaccagcctggccaacatggtgaaaccccatctctactaaaaatacaaaaattagccaggcatggtggcgtgcatctgtagtcccagctactcgggaggctgagccaggagaatggcttcaacctggtagg

SEQ ID NO: 727433 - DNA, 713 bp, Homo sapiens
ttgtgccactgcactccagtgcctgggtgacaataaaccttgtctcttaaaaaaaaaaagaactcttacctattaaaaatatgtgtgtttttattatatactaatatatacttattctagaaaatcatggaaaataaaacaaaatagagataactagtattttctgtagtcctcctaaccagatactactactttgtacgtatagatttttgttgttgttgctgagacagggtcttgctctgtggcccaggctggagtgcagtggctagtcacaggcacgatcacarttcactgcaaccttgaaatcccaggctcaagtgatcctcccgcgtagctaggtctacagatgtgcgccaccatgcctggctaattttaaaaaattttttatagagacagggtcttgctgtgttgctcaggcttgtcttgaactcctggcttcaatcgatcctcctgcctcagcctcccaaagtgctgggattacaggtgtgagccaccatgtctgcccagtttctagatatgattttttaaagcatagtttgtaattgtgctatattctgtattttgcttttccctcctaatactgtctcgacatttttctgcttgagtagcctttaacaactttttaaatgactgtatattgtctgataaaccataatttacttaaccattttctgttttttttcctcaactacatagtgtttagtgaatgtctt

SEQ ID NO: 727434 - DNA, 650 bp, Homo sapiens
cagaagtcccagcaggccactaatccccaggtatcacctcatgcctcattcctccctcccaactcccagaggcacagagaggcacacagggcacttacgctcattctgaatgcttgctgttagttccgacgggttagcattggagagggagaaaagaagaacatcgttatgcacacaaccgcccaggcatcctcacgccccagcacacagggagtgggcggggtgtgcctggggagggcgctgagcacagggctctctcctcctggctgcaaagcccagtgcaagaaccaagcagggttggggaacrgacccagtgagtgccttatggagaaggtgacgcctcccctgggtgaccaaaaccacagagttgggcagaaagactggctctgatcaaaggacagtgtcaccaggaagtccacatgtccccaagtgacaatgctgcttgaaagaggccctgaaggtatttccctccatctgatgccactgagggaagtgggctcctcagccaacagtgaacaggagaggctgagggcaagacaggtgccaggaagggagtggattggaaacactgctgcagagcaaagctccaaggcctcatttctcccacgacaccttctctccttggcatctcctcctttcccatcctatgg

SEQ ID NO: 727435 - DNA, 663 bp, Homo sapiens
tgcccatgtggcccctttcccctggaatgatgactttctttcccaagaggaaggaagtcttgtggagacagctgtcagggtgcatcagaacaagcaccaggaagatggtggtgcaactaggccattgactaggtcgttgcagacgcacaaaccaacctccttgcaaaaggtgggtagaactatccaaacacatgttgaagtaattccttcatcccagtgcccagttctagcacaygggcaagccagtatccatatgacccctagctgatatcaggggaaaaacctaaatcagtatgccaggttaactgtattatagtaagattaaattcacccattaatcaataagtagtcactgactacttgttatgtgaccagcattgtgccaagtactacgaggctaaaagagatcccccgttctcaagactttaatagtataattggaaaccaggacccaggaaatagaacaattaaatgttccactgcatggcgcagctgggggtgaaatcggagtttggagatggtgtgagttggagcaaggggagattcagggaggaggggtagagtgtgcaaaggtggcagtgagctaggagggcgacagcctgggctttcttgggcaggaggggcaggatgcacggaaaggagactggagctcccagaaggcca

SEQ ID NO: 727436 - DNA, 643 bp, Homo sapiens
ttccaggaatgaaaagtgacctaggagtctgtaggtgagttcaaccaaaaagtaggaaagaatgcaaatgtgagctgaagttcaaaggcatattgcacaaatgtatagcaaagcctacatgtgacagcaagacgggcatttcyatggtcattatatcagaatatttagaattcactggctatatctttgactgcatagcttaattcagttagaaatgcagagctgcatgttaagaaataatgagtcaaaaagattttgttatattacaaattaaatatcaataaaacaacaattcaagcaatgttacaagccagcacatagtgattgacaaaagagttgtacagacaatttgtgcagtaagttcagaaaaataagaggccacaaatgaaatgagttggaaagaattttttgaattaatatatatggagtattctgtgtatcaaatcaaaaggatcatgtctaaactagctatcaagtagcacctacgatgggatatacaccccatgggggctcaataagtgctaattatcataatatcaaagggtaagaggcacctcatctaatccagccctcaggcatcaagcttaaaccatcctagatagaagagagactgtctgagtttgaaaccgttttttgagaaatc

SEQ ID NO: 727437 - DNA, 643 bp, Homo sapiens
ttccaggaatgaaaagtgacctaggagtctgtaggtgagttcaaccaaaaagtaggaaagaatgcaaatgtgagctgaagttcaaaggcatattgcacaaatgtatagcaaagcctacatgtgacagcaagacgggcatttctatggtcattatatcagaatatttagaattcactggctatatctttgactgcatagcttaattcagttagaaatgcagagctgcatgttaagaaataatgagtcaaaaagattttgttayattacaaattaaatatcaataaaacaacaattcaagcaatgttacaagccagcacatagtgattgacaaaagagttgtacagacaatttgtgcagtaagttcagaaaaataagaggccacaaatgaaatgagttggaaagaattttttgaattaatatatatggagtattctgtgtatcaaatcaaaaggatcatgtctaaactagctatcaagtagcacctacgatgggatatacaccccatgggggctcaataagtgctaattatcataatatcaaagggtaagaggcacctcatctaatccagccctcaggcatcaagcttaaaccatcctagatagaagagagactgtctgagtttgaaaccgttttttgagaaatc

SEQ ID NO: 727438 - DNA, 643 bp, Homo sapiens
ttccaggaatgaaaagtgacctaggagtctgtaggtgagttcaaccaaaaagtaggaaagaatgcaaatgtgagctgaagttcaaaggcatattgcacaaatgtatagcaaagcctacatgtgacagcaagacgggcatttctatggtcattatatcagaatatttagaattcactggctatatctttgactgcatagcttaattcagttagaaatgcagagctgcatgttaagaaataatgagtcaaaaagattttgttatattacaaattaaatatcaataaaacaacaattcaagcaatgttacaagccagcacatagtgattgacaaawgagttgtacagacaatttgtgcagtaagttcagaaaaataagaggccacaaatgaaatgagttggaaagaattttttgaattaatatatatggagtattctgtgtatcaaatcaaaaggatcatgtctaaactagctatcaagtagcacctacgatgggatatacaccccatgggggctcaataagtgctaattatcataatatcaaagggtaagaggcacctcatctaatccagccctcaggcatcaagcttaaaccatcctagatagaagagagactgtctgagtttgaaaccgttttttgagaaatc

SEQ ID NO: 727439 - DNA, 643 bp, Homo sapiens
ttccaggaatgaaaagtgacctaggagtctgtaggtgagttcaaccaaaaagtaggaaagaatgcaaatgtgagctgaagttcaaaggcatattgcacaaatgtatagcaaagcctacatgtgacagcaagacgggcatttctatggtcattatatcagaatatttagaattcactggctatatctttgactgcatagcttaattcagttagaaatgcagagctgcatgttaagaaataatgagtcaaaaagattttgttatattacaaattaaatatcaataaaacaacaattcaagcaatgttacaagccagcacatagtgattgacaaaagagttgtacagacaatttgtgcagtaagttcagaaaaataagaggcmacaaatgaaatgagttggaaagaattttttgaattaatatatatggagtattctgtgtatcaaatcaaaaggatcatgtctaaactagctatcaagtagcacctacgatgggatatacaccccatgggggctcaataagtgctaattatcataatatcaaagggtaagaggcacctcatctaatccagccctcaggcatcaagcttaaaccatcctagatagaagagagactgtctgagtttgaaaccgttttttgagaaatc

SEQ ID NO: 727440 - DNA, 643 bp, Homo sapiens
ttccaggaatgaaaagtgacctaggagtctgtaggtgagttcaaccaaaaagtaggaaagaatgcaaatgtgagctgaagttcaaaggcatattgcacaaatgtatagcaaagcctacatgtgacagcaagacgggcatttctatggtcattatatcagaatatttagaattcactggctatatctttgactgcatagcttaattcagttagaaatgcagagctgcatgttaagaaataatgagtcaaaaagattttgttatattacaaattaaatatcaataaaacaacaattcaagcaatgttacaagccagcacatagtgattgacaaaagagttgtacagacaatttgtgcagtaagttcagaaaaataagaggccacaaatgaaatgagttggaaagaattttttgaattaatatrtatggagtattctgtgtatcaaatcaaaaggatcatgtctaaactagctatcaagtagcacctacgatgggatatacaccccatgggggctcaataagtgctaattatcataatatcaaagggtaagaggcacctcatctaatccagccctcaggcatcaagcttaaaccatcctagatagaagagagactgtctgagtttgaaaccgttttttgagaaatc

SEQ ID NO: 727441 - DNA, 643 bp, Homo sapiens
ttccaggaatgaaaagtgacctaggagtctgtaggtgagttcaaccaaaaagtaggaaagaatgcaaatgtgagctgaagttcaaaggcatattgcacaaatgtatagcaaagcctacatgtgacagcaagacgggcatttctatggtcattatatcagaatatttagaattcactggctatatctttgactgcatagcttaattcagttagaaatgcagagctgcatgttaagaaataatgagtcaaaaagattttgttatattacaaattaaatatcaataaaacaacaattcaagcaatgttacaagccagcacatagtgattgacaaaagagttgtacagacaatttgtgcagtaagttcagaaaaataagaggccacaaatgaaatgagttggaaagaattttttgaattaatatatatggagtattctgtgtatcaaatcaaaaggatcatgtctaaactagctatcaagtagcacctacgatgggatatacaccccatgggggctcaataagtgctaattatcataatatcaaagggtaagaggcacctcatctaatccagccctcaggcatcaagcttaaaccatcctagatagaagagagmctgtctgagtttgaaaccgttttttgagaaatc

SEQ ID NO: 727442 - DNA, 640 bp, Homo sapiens
ttagtatacaaataaactgaaatactattcagccttaaaaaagagaaattttcaacatgtgaccacatggatgaaccttaaggacattagggtaagggaaataagccagtcacagaaaggtgataaatactgcaggattccacttatctgaggtatctaaaataggaaaacttgtataatcacagactggaatggtagttgccaaaggctgagagaagggggagatatgtaactattaatcaatgagcataagattttagtcaagcaaaaggaataagctctagggatgtgctgtacaacattgtaattataattaacaataatgtactatactcgatgttataaaaaattagcaastaataattaataatatgactcttttttatgtaccagaagaaaaaaaaataagatattgccaaattaagttgtttccaagttataaagagaggggaacagaaatggtcatttgaacatttgttgagacgattaaaaaaatgccaatacatacacacacacacacacacacacgcccctcaagtaattctaaagatgacagaaaaagagggcaaaaacacaagaaagattaacaaaatagaatatatcaataaagatggaagattttaatctggccatataaaaa

SEQ ID NO: 727443 - DNA, 648 bp, Homo sapiens
tacaatgaagttacatttgccttgagggtatttgctgaatatggacaaatttgagcttcaattctgatggcatctttgggcaaggggtgcagaacttcaaacccagaatattcactaggggagggatctgttggtagaactgtctcccaagaagttggatctcaaaggattatatctgtagggtaggagtaaagcagaagtaaacccaatctacacattcccactccyaagggagtgcaggaaatgtgtgactttgaaatgaacaggatgggatgatgtggttatccattcttgaaattatagttacaagttgacctttatatggatttttaactcaaattcaagtcacttgataattcaaatcagcctcaagtcatgcacttaaatgtgatcctagacagtgatgtctatagttgcccgtggacacaaattttctctggagaaagaaaccatcattttagtcatcagcatatcctataaatatttttaaagggcaacaaatagcatagaatcaaattgatcaaaattaatcaagaacacacaggaagacagtactttgaaagaaaaccaacagaaaaacttcctcaaaacttcaattgaaattatcaggcagtggcccggtgcggtggctcacgcctgtaatcccag

SEQ ID NO: 727444 - DNA, 571 bp, Homo sapiens
aaatatggcttaaccattatttaaacagtctagaaaattatttcactcaggttaagtgatgtatcatttcagaaagtaacacgatggttctgttccacaaagtccttgggaattcaggcttcttccatcttaatcctcaaccaccatcaataaatggtacatcttataaccctgactacttaaactccagctattaattccacatttcctccaaaagtaaagcatgcttcttctttttgaggagacttcccaataattttagacactttttttttctgcttggatttcattgaaaataactttattgtattgcttcaccrtcaattaatgttgtgggtatagattttattttaagaagattaaattgcatttattatatatttaagtttcctttattgaaaatactgcaatgaaattaaaatgagattgccaaggaaaatccttgaactatggttttatctctgtaaactatgcaccattactattgtatccctttttcagagccacggacatttagtctcagaataatttcaaaagatagatgatatgaggtttaattattgactcaaga

SEQ ID NO: 727445 - DNA, 571 bp, Homo sapiens
aaatatggcttaaccattatttaaacagtctagaaaattatttcactcaggttaagtgatgtatcatttcagaaagtaacacgatggttctgttccacaaagtccttgggaattcaggcttcttccatcttaatcctcaaccaccatcaataaatggtacatcttataaccctgactacttaaactccagctattaattccacatttcctccaaaagtaaagcatgcttcttctttttgaggagacttcccaataattttagacactttttttttctgcttggatttcattgaaaataactttattgtattgcttcaccgtcaattaatgttgtgggtatagattttattttaagaagattaaattgcatttattatatatttaagtttcctttattgaaaatactgcaatgaaattaaaatgagattgccaaggaaaatccttgaactatggttttatctctgtaaactatgcaccattactattgtatccctttttcagagccacggacatttagtctcagaataatttcaaaagatwgatgatatgaggtttaattattgactcaaga

SEQ ID NO: 727446 - DNA, 1237 bp, Homo sapiens
aggttccaggcatctcagacttactgaatctattgctgggataggacaaacatgccaagtgattcttgtcaacacaaattttgagagacactcatttaaaattgaccagggtcatattagcaagagttttagaaatcatgctgaggataaatggataaataaatcattttaaggtaagagtaacataaaaggattttctaattaggaagtttactctagctataccgagaaggatggataagagaaaggtgaaaatggaggckaaagggaaatataggggtctattttagtaattgagacaagatatatttctaatttcagaacgcgagtcataggtagggtttcgatcagctcagaatggtattatagaccatgctatttaaaagaaaacacccaaaccttcagatgatcatcccatgctttacaatttttaccctatgtatctaattctattcacatccaagtttttctaagtccccatctctcctctgacaagttccagtgtctgcctcctcacctcgacctttgcaccctttcttcagtaacccaggtccaggcgctttcaggacatcacttcatttcagattcaacatgtctgaaatggaactcattacattgcctgagaaatgtacaactttcacattgtgaatgctgtattggtttccttagggctgctgtacaaagtactataagctggatggctcaaaacaacagaaatcaattatttcacagtacaggaggatggaagtctgaaatcaagatgtcctcagaattgtctatttctgggggctgggggctctgagggagggtctgtttcattacgttctatctagtttctggtgggtgctggcaatccttggtgtctattggtttgtggctgcatcactccaatctctgcctccatcttgacatggccatcttccttctgtgtgcatctgtgtctgtgtcctaatgaagacaccagtcattgaagctttttgttcccaccttctcagtgacttccttcttgcagggttccgtgtcaaggaagctatgtgtacaataacaaaatggtaatctaattaatacttaatagctgagccagtactcaataataaacaacatagggtttttgaagaaaactgagttggaggcttaatggaggctttactcatttctacactcctaatcttggaacctgtgtactcaggtgtggctgtttgggacagaaggtagctgggagagaagggaggaagcc

SEQ ID NO: 727447 - DNA, 595 bp, Homo sapiens
gtgacatttaatatattcataatgtgtaaccattattattttcaagacatttccatcatgtgaaggaaaaccctttaccaattaagcagttaaatatattctttttaaaatccaacttttctagttattcagggatagatgattggacggcgacaaactagtccatagtagccacaagaaaaagtcttttgtttttttatttgactattgcaaaatatttcctcctagaaatgtatcatttgtattaaaaataatgttgttgtcatgattgtaaaacatgytttttgtaaacatttgaaaaattttggaagtctaattaaaattaaaaaattactcataatactaacatctgggaataatacatttattttttgtgtgtatttccttccaccagttttcctgcatttatcatagaattgggatctaagtacattcacttgcccaacattattcacaaatcaaccatgagaacacaattttctcaagtgccagctttttcaataaaactatttgatgaattttccacatttatttttgagacactattttaaaagagtaaacaatattccttttagagctatataaaaatgtagac

SEQ ID NO: 727448 - DNA, 595 bp, Homo sapiens
gtgacatttaatatattcataatgtgtaaccattattattttcaagacatttccatcatgtgaaggaaaaccctttaccaattaagcagttaaatatattctttttaaaatccaacttttctagttattcagggatagatgattggacggcgacaaactagtccatagtagccacaagaaaaagtcttttgtttttttatttgactattgcaaaatatttcctcctagaaatgtatcatttgtattaaaaataatgttgttgtcatgattgtaaaacatgttttttgtaaacatttgaaaaattttggaagtctaattaaaattaaaaaattactcataatactaacatctgggaataatacatttattttttgtgtgtatttccttccaccagttttcctgcatttatcataraattgggatctaagtacattcacttgcccaacattattcacaaatcaaccatgagaacacaattttctcaagtgccagctttttcaataaaactatttgatgaattttccacatttatttttgagacactattttaaaagagtaaacaatattccttttagagctatataaaaatgtagac

SEQ ID NO: 727449 - DNA, 906 bp, Homo sapiens
taagtgtaaaaaaaaaaaaaaaagaaaatgtggcatatatataccatggaatagtatgcagccataaaaaacgggtaaattcatgtcctttgcagggacatggatgaagctggaagccatcattctcagtcaactaacaccagaacagaaaactaaacaccacttgttctcactcataaatgggagttgaacaatgagaacacatggacacagggaggggaacatcacacactagggcctgttgggtgctggaggactacaggagggatagcattaggagaaatacctaatgtaggtgatgggttgatgggtgcagcaaagcaccatggcacatgtatacgtatgtaacaaacctgcatgttctgcacatgtactccagaacttaaagtataataaaaaatatatataaattaaaaaattcagtccctggggcaaccacagtagctctactgcaagatgagtggtcacagacctcgagctgccaagtctccctagaagccacagccctttccttgtgaatgattccagtcttcscggtcggttcaggagaaagaaaaaagcagacagaaaattgtgaaatctgtctattggtaataaactaacataagctcctcttatctcacaccttattgttaaaaccacgtgagcatatactctaagtaaattatagtatatctaaatttagagaactcacaactagattcctgtaacagcaagaaacagcaaagaataaggaaacccagtaatgaccccatgcccctcctgctttcctgaagggtggctgccatgacacataaaggggagttgctctgtgttggctacagaaaatgagaaccccacctgagacttcacaggcaatgcaaaggtcatggggtgcgctccatatgccaatcagtcattattgat

SEQ ID NO: 727450 - DNA, 906 bp, Homo sapiens
taagtgtaaaaaaaaaaaaaaaagaaaatgtggcatatatataccatggaatagtatgcagccataaaaaacgggtaaattcatgtcctttgcagggacatggatgaagctggaagccatcattctcagtcaactaacaccagaacagaaaactaaacaccacttgttctcactcataaatgggagttgaacaatgagaacacatggacacagggaggggaacatcacacactagggcctgttgggtgctggaggactacaggagggatagcattaggagaaatacctaatgtaggtgatgggttgatgggtgcagcaaagcaccatggcacatgtatacgtatgtaacaaacctgcatgttctgcacatgtactccagaacttaaagtataataaaaaatatatataaattaaaaaattcagtccctggggcaaccacagtagctctactgcaagatgagtggtcacagacctcgagctgccaagtctccctagaagccacagccctttccttgtgaatgattccagtcttcgcggtcggttcaggagaaagaaaaaagcagacagaaaattgtgaaatctgtctattggtaataaactaacataagctcctcttatctcacaccttattgttaaaacyacgtgagcatatactctaagtaaattatagtatatctaaatttagagaactcacaactagattcctgtaacagcaagaaacagcaaagaataaggaaacccagtaatgaccccatgcccctcctgctttcctgaagggtggctgccatgacacataaaggggagttgctctgtgttggctacagaaaatgagaaccccacctgagacttcacaggcaatgcaaaggtcatggggtgcgctccatatgccaatcagtcattattgat

SEQ ID NO: 727451 - DNA, 1517 bp, Homo sapiens
ctttcagggcatccaaatcaccatcagttcctgaggactgaactgtctgctgctccaacctcttccagtcatcatctacaactgatcttttaaaaatgatcttcaattacctttttatcaaacagatgcattttaggaaatcaaagagtattatcaagtctcacatgaaaaacagtagctacctggcacttacattcataaacatggacttaccacatgacttccygaattgtcctttttagacaccaccccttacgccactgtggtcatcaacatcagcgtccgcagtgtgctacaaataccgttctatcttacgcttttcaatgattctggagttaatattttatctattttccactatcttggcttacaatgtacctattgccaatcctttcacaattctccagcagaactgaaaaactctttcccataccttcctgcccacgatcaaacactgacaacctggtgagaatctgttcaattttcctggaagtcctcttggagcccccgccccagtcccaaacgtgctaccgtcactgggccacgcctttcttcccgctggctgtggctgctgtgttggtcacttgttctcatgctcttcaatgccccctcgtctctccacactcccgtgctaaaggagcaccttgaatgtttcagaaaggaagaaccagaaggaacacttgggggccccacacatccgaaagtgcttctctttctaccccagtgagaccgagtctttcgcctagatacggacttctgggtgaaaattacttttattcattgcctttcatttccattattggtgagaagttaaacttcactctgatgctataatccttatgtaatacccattcctttctcttctccttcaataatcttttattcattcccactggaggagctgcaagccaggttgtaatatccattcctttcttttctccctcgataatctttttgctgcaaatcaggtttttcttctcacgggggcacaccaccaaatctctccccaaggaaggcttcaacggggctgtttcgtttgcccgaagagccctctcctctcctgtttccaacacaggcatgttcaccctctaacctggagcctctgttgtcagtatcatccccaaatctggagcctcccagtttaatttctccagataacacacatggctgggaggaggaggaaaagcggccgcctgcttcctggacaccgttctctgggctccatgtgtacagcacccatggctgtccgccgtgtctgcatcttggctttctccattttgctaaatgatgaaccacaaatttctctaacttctcttgtgctgtggacttatatagtcactgacagcacagttgggagaaacagataaaggcacacttccaagttgccaagcgtatccagtggcctgacgtttttaatgtttcaccttcaatctcagtaccacacctatctggtccactcaaacaggcttcctgtgattacctccaaccctaacctcctcttggtgcccatggacgat

SEQ ID NO: 727452 - DNA, 1517 bp, Homo sapiens
ctttcagggcatccaaatcaccatcagttcctgaggactgaactgtctgctgctccaacctcttccagtcatcatctacaactgatcttttaaaaatgatcttcaattacctttttatcaaacagatgcattttaggaaatcaaagagtattatcaagtctcacatgaaaaacagtagctacctggcacttacattcataaacatggacttaccacatgacttcctgaattgtcctttttagacaccaccccttacgccactgtggtcatcaacatcagcgtccgcagtgtgctacaaataccgttctatcttacgcttttcaatgattctggagttaatattttatctattttccactatcttggcttayaatgtacctattgccaatcctttcacaattctccagcagaactgaaaaactctttcccataccttcctgcccacgatcaaacactgacaacctggtgagaatctgttcaattttcctggaagtcctcttggagcccccgccccagtcccaaacgtgctaccgtcactgggccacgcctttcttcccgctggctgtggctgctgtgttggtcacttgttctcatgctcttcaatgccccctcgtctctccacactcccgtgctaaaggagcaccttgaatgtttcagaaaggaagaaccagaaggaacacttgggggccccacacatccgaaagtgcttctctttctaccccagtgagaccgagtctttcgcctagatacggacttctgggtgaaaattacttttattcattgcctttcatttccattattggtgagaagttaaacttcactctgatgctataatccttatgtaatacccattcctttctcttctccttcaataatcttttattcattcccactggaggagctgcaagccaggttgtaatatccattcctttcttttctccctcgataatctttttgctgcaaatcaggtttttcttctcacgggggcacaccaccaaatctctccccaaggaaggcttcaacggggctgtttcgtttgcccgaagagccctctcctctcctgtttccaacacaggcatgttcaccctctaacctggagcctctgttgtcagtatcatccccaaatctggagcctcccagtttaatttctccagataacacacatggctgggaggaggaggaaaagcggccgcctgcttcctggacaccgttctctgggctccatgtgtacagcacccatggctgtccgccgtgtctgcatcttggctttctccattttgctaaatgatgaaccacaaatttctctaacttctcttgtgctgtggacttatatagtcactgacagcacagttgggagaaacagataaaggcacacttccaagttgccaagcgtatccagtggcctgacgtttttaatgtttcaccttcaatctcagtaccacacctatctggtccactcaaacaggcttcctgtgattacctccaaccctaacctcctcttggtgcccatggacgat

SEQ ID NO: 727453 - DNA, 1517 bp, Homo sapiens
ctttcagggcatccaaatcaccatcagttcctgaggactgaactgtctgctgctccaacctcttccagtcatcatctacaactgatcttttaaaaatgatcttcaattacctttttatcaaacagatgcattttaggaaatcaaagagtattatcaagtctcacatgaaaaacagtagctacctggcacttacattcataaacatggacttaccacatgacttcctgaattgtcctttttagacaccaccccttacgccactgtggtcatcaacatcagcgtccgcagtgtgctacaaataccgttctatcttacgcttttcaatgattctggagttaatattttatctattttccactatcttggcttacaatgtacctattgccaatcctttcacaattctccagcagaactgaaaaactctttcccataccttcytgcccacgatcaaacactgacaacctggtgagaatctgttcaattttcctggaagtcctcttggagcccccgccccagtcccaaacgtgctaccgtcactgggccacgcctttcttcccgctggctgtggctgctgtgttggtcacttgttctcatgctcttcaatgccccctcgtctctccacactcccgtgctaaaggagcaccttgaatgtttcagaaaggaagaaccagaaggaacacttgggggccccacacatccgaaagtgcttctctttctaccccagtgagaccgagtctttcgcctagatacggacttctgggtgaaaattacttttattcattgcctttcatttccattattggtgagaagttaaacttcactctgatgctataatccttatgtaatacccattcctttctcttctccttcaataatcttttattcattcccactggaggagctgcaagccaggttgtaatatccattcctttcttttctccctcgataatctttttgctgcaaatcaggtttttcttctcacgggggcacaccaccaaatctctccccaaggaaggcttcaacggggctgtttcgtttgcccgaagagccctctcctctcctgtttccaacacaggcatgttcaccctctaacctggagcctctgttgtcagtatcatccccaaatctggagcctcccagtttaatttctccagataacacacatggctgggaggaggaggaaaagcggccgcctgcttcctggacaccgttctctgggctccatgtgtacagcacccatggctgtccgccgtgtctgcatcttggctttctccattttgctaaatgatgaaccacaaatttctctaacttctcttgtgctgtggacttatatagtcactgacagcacagttgggagaaacagataaaggcacacttccaagttgccaagcgtatccagtggcctgacgtttttaatgtttcaccttcaatctcagtaccacacctatctggtccactcaaacaggcttcctgtgattacctccaaccctaacctcctcttggtgcccatggacgat

SEQ ID NO: 727454 - DNA, 692 bp, Homo sapiens
  misc_feature 3, 4, 5, 6, 7, 8, 9, 10, 11, 12, 13, 14, 15, 16, 17, 18,19, 20, 21, 22, 23, 24, 25, 26, 27, 28, 29, 30, 31, 32,33, 34, 35, 36, 37, 38, 39, 40, 41, 42, 43, 44, 45, 46,47, 48, 49, 50, 51, 52, 53, 54, 55, 56, 57, 58, 59, 60,61, 62: n = A,T,C or G
  misc_feature 63, 64, 65, 66, 67, 68, 69, 70, 71, 72, 73, 74, 75, 76, 77,78, 79, 80, 81, 82, 83, 84, 85, 86, 87, 88, 89, 90, 91,92, 93, 94, 95, 96, 97, 98, 99, 100, 101, 102: n = A,T,C or G
ctnnnnnnnnnnnnnnnnnnnnnnnnnnnnnnnnnnnnnnnnnnnnnnnnnnnnnnnnnnnnnnnnnnnnnnnnnnnnnnnnnnnnnnnnnnnnnnnnnnnngtaacaccgaattttagaagaatatgttacataatattattagaaattatcttttttaaggggacctgaaacccattatatatgactttatagaaagacatgctgataattgcagtrccagtgtagtgaggaataccaggaggtgttataccattgaacagggtgtgtgttttctttctgttttttaaccagtaattattataatggaaatgcctttcatcataatatgcttccaatttgttttaaacatctttctcacaacaatcctgtgaggctgacatgatttttcttactttataagaaaacagatacagaagtcaagtgaatttccaagatcacagatctcataattggcagcagtagtgccagaactcaggttttctgccatctgttctcctccaggttgatgtaatcgttatcactttgttatgaaatttgaattgaggagacagtgaagccaattaacagaagagagaggctgcgaaaagggatttctttatgacgttttggtgtattcttgctgcatataagggaggcctcaggctaatgagaatgacttagggtagcattcaggctgttgtagtaattaa

SEQ ID NO: 727455 - DNA, 428 bp, Homo sapiens
accaaagcagttgagtttcctgggtaaaccttgtatagtcattatgtctcagacatcaagcacagaggtcatcttctacaattgccttgtaaacatgatcactccatattctggggttttagttggacactattaaaataattcctcttgagaaaggttaaaaataatatctatgatagctaatataaaaagataatatrtgaatgcatatgcatacatattatatatatacatattatatgtatgcatatgcattcacatattatctttttctttcagagtgacaggaattatatattatctgagtcaataatttatatgtaggggtctagatttggagactctttgtcatgtatctagctagagttattcttttctcataaaatatcagtgttgtagaatatttgacacaatgaaaatcccagagg

SEQ ID NO: 727456 - DNA, 1049 bp, Homo sapiens
tttggaattctttggtatgagagatgtatctatttgcttcaatttatcaatttattcaatcatttatttatattagtatggactcgtagatatttattttatagtttgggtataatccaatgctactttatttattttattgctcaaattgtttcacttttggtcattatgggttctttcaatgggcttttgtgcccccttgacatatcccatctgtgtgtgtgtgtgkggggggtgttttgaaaaattccttacttacaagatgatccaggttcatcttgtgtatttgctgccccagttcctagaatcagctatttctccaagaagccctggatccttttcatagagaatagtattagaaaccaagatctgggcactaagtctgctcattgctaatggcgtatcatttcttctaggccttctcagctgatagatcaaagaaatatatgtgcgtatactaatccatgtgtatacacatatctgtaaatatttataaatgtaaccatttgtatctatattaagttaaacatgagttcttactgatatctccaactctagtccactaccacatggattattctagcctgttcccctggcttgtcggtaatctcccactcaggagagaaattttatgtatatgaacttacttaatcctgtgaggtagctattattacctcattttatagttgaagaaactgaggctcaatgatgataaattttttcaaatacatagcgattaggaggtgtaactaaactgggcatggtggctgatgcctgtaatcccagaactttggaaggccgagacaaggggatcacgtgagcccatgagtttgagaccagcctgggcaacacagtgagcccaccatctaaaaaaaaatttaaaaagaaaaagaggtgtaactaggacctcttctgggggaaaaagaacacacaagttgtgggattgagaaggtatatggtttgtgcagtagtacatactgatgagtcagtaaaatagattaaatttatgttggtatgaccttgaattgaacactgatgattttgatatt

SEQ ID NO: 727457 - DNA, 521 bp, Homo sapiens
ggtgagtcttcattatatccaccctgatttagagaccattccctyccaccccgatccctgccagtctacggcacttaccctatccaacagaacactcatgccctttgcctcttacagccattgtgatctgtaaccgcaaactggatgctttatgtaacattcatgagaacattcgtgtcaagagtggggcctgggatgagagtggggtatttatctataccacaagcaaccacatcaaatatgctgtcaccactgggtaagttaattatctgggatacagaatgggagaagacagcttcctgaaatcactgtcttgtcttgagatgtaactgaagtcctccatgaattttcttcatggaaaagccttacctggcatatatgtgcaaggggcatcagaacattcttttttcaacttttttaaaattgagaaatctaaaacaaatatagacaattacattaaaaaaaaatagaataacaaataagttatgtagtgaacatcagcataactaccacccaagtca

SEQ ID NO: 727458 - DNA, 649 bp, Homo sapiens
  misc_feature 132, 133, 134, 135, 136, 137, 138, 139, 140, 141, 142, 143,144, 145, 146, 147, 148, 149, 150, 151, 152, 153, 154, 155,156, 157, 158, 159, 160, 161, 162, 163, 164, 165, 166, 167,168, 169, 170, 171, 172, 173, 174, 175, 176, 177, 178: n = A,T,C or G
  misc_feature 179, 180, 181, 182, 183, 184, 185, 186, 187, 188, 189, 190,191, 192, 193, 194, 195, 196, 197, 198, 199, 200, 201, 202,203, 204, 205, 206, 207, 208, 209, 210, 211, 212, 213, 214,215, 216, 217, 218, 219, 220, 221, 222, 223, 224, 225: n = A,T,C or G
  misc_feature 226, 227, 228, 229, 230, 231: n = A,T,C or G
tgacctatgctagacagtaagctccacaatattattgtaagactagcttagtgcccatactacttattaaacatttattaaatagctacaagttggaatgaatacatagtttctgctttctacacccctgcnnnnnnnnnnnnnnnnnnnnnnnnnnnnnnnnnnnnnnnnnnnnnnnnnnnnnnnnnnnnnnnnnnnnnnnnnnnnnnnnnnnnnnnnnnnnnnnnnnnnaatctcaggtctcatctttccgtacttagaaatcctctaagtctctcagcaacaactttacacctgatccatgaaaaatataatgttggcttggcgtggtggctcacgcctgtaatcccagcactttgggaggctgaggcaggtggatcacctgaggtcaggagttcaagactagcctgaccaacatggtgaaaccccatctctactaaaactacaaaaaagttagctgagtgtggtggtgggcacctgtagtcccagttacctgggaggctgagataggagaatctcttgaacccgggagtcggaggttgcagtgaaccgagatctcaccactgcactccaacctggcaacagagtgagactccatctcaaaaaaaaaaraaaaaaagaaaaaaatatatatatatacacacacata

SEQ ID NO: 727459 - DNA, 675 bp, Homo sapiens
caaagaactactgcctgtgggagaaggtaaaagcaaagtagtttgcttctggaggaggagttaaaaactcaactacttccagtcccaggaaaaggaaaggaggaaggaatagaagcaaaagctgcctgttccaaccagaaggtttgtactgagtaataagcaatagcagtgtactactgcagaagtgctaagaaaacccctgccaatagaaataggcaggggtaaattggaaccaaaagaggaatgaaaacaaaatctatattccttgagagagaggaaaaaacactgctaggacccaggattttgagatgatacaatgcacagggggaaataacagtattctctcccacccagctcccccaccytcctacagaaataagggaaacatttggctaccatgaggatgggcaggaacactgagagagctccattctcaaggtctagacacccaggacttacgtaagtgtgaggctgggtcaagataatagaaaactacccactttacccatcacaccttgaacaatgtgcaaaataataattaagacagaacaatagtataaagagatactcctaaatggcataagcatacaaggactgttaaaaattgagaatagagcaagaacacaggggaaaatcctcctacgacaaaatccaattaagcacaaggtatcgaca

SEQ ID NO: 727460 - DNA, 675 bp, Homo sapiens
caaagaactactgcctgtgggagaaggtaaaagcaaagtagtttgcttctggaggaggagttaaaaactcaactacttccagtcccaggaaaaggaaaggaggaaggaatagaagcaaaagctgcctgttccaaccagaaggtttgtactgagtaataagcaatagcagtgtactactgcagaagtgctaagaaaacccctgccaatagaaataggcaggggtaaattggaaccaaaagaggaatgaaaacaaaatctatattccttgagagagaggaaaaaacactgctaggacccaggattttgagatgatacaatgcacagggggaaataacagtattctctcccacccagctcccccaccctcctacagaaataagggaaacatttggctaccatgaggatgggcaggaacactgagagagctccattctcaaggtctagacacccaggacttacgtaagtgtgaggctgggtcaagataayagaaaactacccactttacccatcacaccttgaacaatgtgcaaaataataattaagacagaacaatagtataaagagatactcctaaatggcataagcatacaaggactgttaaaaattgagaatagagcaagaacacaggggaaaatcctcctacgacaaaatccaattaagcacaaggtatcgaca

SEQ ID NO: 727461 - DNA, 633 bp, Homo sapiens
tttgggaaaatatggttgctcctaggatgtgtaatgcagggaaaaatatactctctttgcagtgtcatgattgaattagccctctggagttgttaaagtgcttttttttttttttttaattactagagttgctgtcgtttaggtaaaaggccaaaatgaattttattatttgtttttattttaaattctgggttttgacctttcttccaatataggcacagtatacttgttaatttggacttagctaacatggataaccatattttcttctctaatttctatctcacagagtttaaccctgaaattttgctgtgttttatgaatgatcctctatacactggtctttcaaaaattgtagagaaaaagtgaaaaacaatttagaggaaaataggaaamaagggattggaaaagcctatgcttaattagactgaggttttagaatagtaaatatattcttagaagtactggtattgtcctggtttctcccgtaacttgtgtatttttctaatttggtagtcagccctctcttatatttcctaccatcctgctcccattatcacaatttcttcatttgagaatgaaggtgaagggaattttaatgtcttttccttaaatatttttgatgaatctcct

SEQ ID NO: 727462 - DNA, 794 bp, Homo sapiens
caacctctgcctgttacccagttccaaagttgcttccacattttcgggtatcttttcagtagcaccccactctcggtaccaatttactgtattagtccattttcacactgctgataaagacatacccgagactggacaakttactaaagaaagaggtttattggacttacagtttcacatgggtggggaggcctcacaatcatggcggaaggtaaaaggcatgtctcacatggcagcagacaagagtggagagcttgttcagggaaactcccattttttaaaaccatcagatcttgtgagacttactcattatcatcagaacagcacaagaaagacccacccccatgattcaatcacctcccaccatgttcctcccataacatgtgggaattcaagatgagatttgggtgggggcagagccaagccatatcaaatatctactggcaacatgtagaatgtgtattaaaatgcagaatatgggccaggcatggtggctcatgcctgtaatcccagcactttgggaggccgaggcaggcagatcacctgaggtcgggagtttgagaccagcctggccaacatggtgaaaccctgtctctactaaaaaaaaaaaacagaattagccaggcgtggtggcacatgcctgtaatcccggctacttgggaggctgaggcaggagaatcacttgaacccaggaggcagaggttgcagtgagccgagatcacgccattgcactccagcctgggcaacaagaccgaaactccgtctcaaaaaaaaaaaaaaaaaatgcagaatat

SEQ ID NO: 727463 - DNA, 351 bp, Homo sapiens
  misc_feature 147: n = A,T,C or G
tagtaactcctgtaaataccaatttccaaatggtatctctctgttccagcccatcacaacagttttaaaaccagcttttgtttttgtttttgttttgttttgttgctttttgttttttaacaggagagccagtgtaactccttcaanactggaatgacacacactgcatctgcatctgcctcatgtgagttctcattttggcaaccccactctgctaggctggaacctctgtagaggtttgccctttatttttctaaatctataaattactacatagtgtgtcttggtggcaatggtaaaaagtgcatgagaattccaaacttcyctgcagaaagttttctgctcattcca

SEQ ID NO: 727464 - DNA, 591 bp, Homo sapiens
cacagaaaaggaagatacacaccaattttgcttattaattccaayttaaaaatcttaaataaaatattaggaaacagaatataacaatgccttagaataagaatgtgttccttatgactatgcagaatttattccaggaataataggatgactgaatgtcaggaaattaatataattcacaaaatcattggctctaaagagataagtcatatgatcagttccatagaccatagaaaacttaaatctagtctgattttaatatcttaaataagccaatatagactaatacttcatagcattatcaatataaatctattccagtccgcaaattcacatcattagaaggattcctgagagtgtcagaaacaaaacgagaatgtctcctgtaaccattgttatttaacattgcattagaggtaccagccaacacgagtattatagacaagagaaacagcagtaaagaggagctagcctatttgcagataacatgattgcatgcctgaaaaatccaacacagtgaaaaagtacaacaaataataagaaaatttactacagtagcaatgaacaaaattaatattgagacccacagct

SEQ ID NO: 727465 - DNA, 1221 bp, Homo sapiens
agcaagtgttacccttgccttaggaaggaagaaaagtacaaacaccctcactctaagaccaaagaaaagaaaaaaacatatatggcaaccaagaactaaaattttaaataatatcaatatgacagggattgagagagcaagaaagagaggccaaaggtataataagcatcaaaaatacttttattgttaagggaaaaatgtatatattaatatttgcttaagaaaataaaagaagcaaataaacatatatttggatattaaattaaggcaactgtcatagaacataaattatagttataacttttaaatcaataaaagaatataatgggaaaaagtaaatgtaaatatgaagttggaaggaataatcactaatataacaaaaattacaaaatataaatgggttaaatccaacaattaaaaggctgagactctcagaatttgaaacaaaaacatatccaacagtatgtggtctccagaagaaacttaaagagacggtagaattaaaaataaaactctagcctgtaatcccagcactttgggaggtgaaggcaggtggatcacttgagaccagactagcaaacatggtgaaaccctgtctctattaaaaatacaaaaattagccggacatgatggtgggtacctgtagtcccagctacacaggaggctgaggcaagagaatcatttgaacctgggagacagaggttgcagtgagccgagattgtgccactgcactctagcctgggtgacagagtgagactttgtctaaaaaaattaaagtaaaattaaattaaaaattctggaaatagatagccctaatatrtaaaaggaaaacaaacttttccaaatcagaatataattcttttgaattactttttcactcacagtcagttacccaagcttttgagcatactcaaatgccctctgtgataatgatagaatttgtgatgaagcactgtttaagagtgcttcaatgttgtctgagatttttttttctttcaagacatggatgccatttttaagttgatgccagtgctttagtgatcttacgagaacttgcaatcagtgcaaggttttcagacaacaaacagaaatcgtgttccttcttcaaataagtgttaaatggtttgctgatggaatcttcaaggagtcatacattatggaacaaccaccaacctaattcacttcttagtgaactttttctttagctgatcagatacatca

SEQ ID NO: 727466 - DNA, 1221 bp, Homo sapiens
agcaagtgttacccttgccttaggaaggaagaaaagtacaaacaccctcactctaagaccaaagaaaagaaaaaaacatatatggcaaccaagaactaaaattttaaataatatcaatatgacagggattgagagagcaagaaagagaggccaaaggtataataagcatcaaaaatacttttattgttaagggaaaaatgtatatattaatatttgcttaagaaaataaaagaagcaaataaacatatatttggatattaaattaaggcaactgtcatagaacataaattatagttataacttttaaatcaataaaagaatataatgggaaaaagtaaatgtaaatatgaagttggaaggaataatcactaatataacaaaaattacaaaatataaatgggttaaatccaacaattaaaaggctgagactctcagaatttgaaacaaaaacatatccaacagtatgtggtctccagaagaaacttaaagagacggtagaattaaaaataaaactctagcctgtaatcccagcactttgggaggtgaaggcaggtggatcacttgagaccagactagcaaacatggtgaaaccctgtctctattaaaaatacaaaaattagccggacatgatggtgggtacctgtagtcccagctacacaggaggctgaggcaagagaatcatttgaacctgggagacagaggttgcagtgagccgagattgtgccactgcactctagcctgggtgacagagtgagactttgtctaaaaaaattaaagtaaaattaaattaaaaattctggaaatagatagccctaatatataaaaggaaaacaaacttttccaaatcagaatataattcttttgaattactttttcactcacagtcagttacccaagcttttgagcatactcaaatgccctctgtgataatgatagaatttgtgatgaagcactgtttaagagtgcttcaatgttgtctgagatttttttttctttcaagacatggatgccatttttaagttgatgccagtgctttagtgatcttacsagaacttgcaatcagtgcaaggttttcagacaacaaacagaaatcgtgttccttcttcaaataagtgttaaatggtttgctgatggaatcttcaaggagtcatacattatggaacaaccaccaacctaattcacttcttagtgaactttttctttagctgatcagatacatca

SEQ ID NO: 727467 - DNA, 1561 bp, Homo sapiens
atcccatatactcataacccttatcgctcagtgttctgcagccttggtagttgacaggtagtcccctgactctcagaagcatctctgtttctatgtaagtttcatttccttttagtttttttttcctaaatgcagttcatcctcattattcatggattcctttttttttttttttttggttgagacagtgttttactctgtcgcccaggttggggtacagtggtgtgttctcggctcactgcaacctctgcctcctgggttcaggtgattctcctgcctcagcctcccgaatagctgggactacaggtgcccaccaccatgcccagctaaaatttttgtatttttagcagagacagggttttaccacattggccaggctggttttgaactgacgtcaggtaatccgtctgccttggcctcccaaagtgctgggttacacgtgtaagtcactgcacctggcttcatggattctatttttatgtgttggcctactcactgaaactgacctgtgacctcagtatcaatatttacagtgcttttgtgatcctttgtggacttgtggagagtggtgaaaattttgaatcacctgacgtgcacgttctcggctcaggtagaacaaggcaatgctctgccttctttcagctcttactctgtcaacaagtgtatcagtctgttctcctgctgctctaaggacatgcccgagatgggtatgaggaaggaaagaggtttaattgactcatagttccgcagggctggggaggcctcagggaatttacaatcatagcaaacacatccttcttcacatggcggcagcaagaagtgcagagtgaaagtggggaaaagccccttataaaaccatcagatctcgtgagaactgtcattagaacagtatggaggtagccacccccgtgattaaattgcctcccactggtccctccgacacatggggatgatggaagctacagttcaagatgaaatttgggtagggacgcagccaaaccatatcgaaagtttcctttttgccatctattaagtgccatgtttttcatatttttgtgctttttgttggtgatcttatttaaatggtgaccagtcataatactgaagtcctatcgagtgttcctaagcacgggaggactgtaacgtggcttctagagaaaatatgtatgttagataggcatgggttatagggctattgaccatgagttcaatgttaatggatcaaagtgtctattaaataaggtgtctttcaacagaaacacacataaaacaaggttatgtattaattggctggtgaaaacgatgtcaccaaaggatggcaggaaccctgtattttccctagcagcaatggctcagtatttgctaattcagcatttatggtgactataatttataaagtataactactgtgaataaagagaattggcgstattgatgccttattttaaggcaggcatttgataaaagggagtcaacttatataaatgagagggggtgctcctttattgggtgtctcttatctccttggggccatttcatctctgagaagtagtagtgaacc

SEQ ID NO: 727468 - DNA, 613 bp, Homo sapiens
gctgggattacaggtgtgagccaccatgcccggctaatttttgtatttttattagagacaaggtttcaccatgttggccaggctaatcttgaactcctgacctcaagctatctgcctgcctcggcctcccaaagtgctgggattataggcgtgagccagtgctcccagcatattcattcttttctcttgctcccttccatcctcccagctcacctttcctccccctcctygcctgctaaataactgcaaacagggacagatggaagcaccctatcaagacgtgtctgcagcagaggttcgcgggccctctgaaggaatatatcatcttagttcagtcacatcctcctgggagaaaattgacagaagcccaaatggcttacaagagccttcagtgaaatgccccatagacaaagtatttttcccaaactttgggtcatgaaataaatttagcgattgtgaccagcattgaaaataaatttgaacaaggagatatgggagtggattttttgcagtacatgctcctctgttgcatgtcatgtatatgccttaaagatgattcttgattttttattttattttattttatttttgagactgtcttgctctgtcaccc

SEQ ID NO: 727469 - DNA, 1255 bp, Homo sapiens
catgtaccatttttttggacataattgcaattaaacaagttacctttaagcaacattcatgagtatattttcagtatattttcctgtattcaattttgtccaaatagagaaatataggaaacattgaacatcagtgccacactaaaattcagctttaatatgtggatttcattttgtagaatacatttttgttgttacgaaatttatcgtgctgtggtattgtcctctgttcaaaaatgaggtttttagggttgcttattgcataatgtatattaattcttcattctaaagtaaaatcacacaatgagatcaaacgttttgagttcataatatgcaatgaataattgtaaaataaatctatactttagtattaaggcaaaactaaatgtttgccacgaatgacttaatacaaggacatctatgcattgtgcatttcttagcaacaaaggctatgaatgggtaaaggtaaagtttgaatgtatccctatcataacatggggaaaactgtatgcaactaggcatgggagtggattcagtagattcccaagatagtgctgagaacagctgacgtttacagctacaaatatcgctgtgagactgctagcttaaaacaaacatcacttgggtgttggagaggagaggggtgtttataatctgtagtctatattttaaaatgtgggtttctaaaaaaggatatgtgagtgtctgaatatcttttaagataaataagaaggcaagaagtcataaggctaagcagtgagtaaaaaaaaaattgggacaatgcagggtagtcacaagatattaggaagaatcaatagaagtggacacacttggtttcaattctggcactgccaattatktcctacttagccttaagcaagtttactaaatctccgagatccagtttctttctgtgtaaaatgacattaacaatttcttcatctggagaaacctagggattaaatgaaatttgagagagaaagggaaaaagagaaagacttaaaagacatgtcaaatagacaaaacctatcaatcttatttagatccttatccaaacaaagatgcttagacacagcaaacacacacacacacacacacacacacacacacacacacactaacagaaaatcagagaaatatgaataccacctgaatatttgatgatactaaggaataattatagaatatctttaattttgatggtatcatggccttgtcaaaataaaaggatgattctttttagagacagtaaaca

SEQ ID NO: 727470 - DNA, 1255 bp, Homo sapiens
catgtaccatttttttggacataattgcaattaaacaagttacctttaagcaacattcatgagtatattttcagtatattttcctgtattcaattttgtccaaatagagaaatataggaaacattgaacatcagtgccacactaaaattcagctttaatatgtggatttcattttgtagaatacatttttgttgttacgaaatttatcgtgctgtggtattgtcctctgttcaaaaatgaggtttttagggttgcttattgcataatgtatattaattcttcattctaaagtaaaatcacacaatgagatcaaacgttttgagttcataatatgcaatgaataattgtaaaataaatctatactttagtattaaggcaaaactaaatgtttgccacgaatgacttaatacaaggacatctatgcattgtgcatttcttagcaacaaaggctatgaatgggtaaaggtaaagtttgaatgtatccctatcataacatggggaaaactgtatgcaactaggcatgggagtggattcagtagattcccaagatagtgctgagaacagctgacgtttacagctacaaatatcgctgtgagactgctagcttaaaacaaacatcacttgggtgttggagaggagaggggtgtttataatctgtagtctatattttaaaatgtgggtttctaaaaaaggatatgtgagtgtctgaatatcttttaagataaataagaaggcaagaagtcataaggctaagcagtgagtaaaaaaaaaattgggacaatgcagggtagtcacaagatattaggaagaatcaatagaagtggacacacttggtttcaattctggcactgccaattatgtcctacttagccttaagcaagtttactaaatctccgagakccagtttctttctgtgtaaaatgacattaacaatttcttcatctggagaaacctagggattaaatgaaatttgagagagaaagggaaaaagagaaagacttaaaagacatgtcaaatagacaaaacctatcaatcttatttagatccttatccaaacaaagatgcttagacacagcaaacacacacacacacacacacacacacacacacacacacactaacagaaaatcagagaaatatgaataccacctgaatatttgatgatactaaggaataattatagaatatctttaattttgatggtatcatggccttgtcaaaataaaaggatgattctttttagagacagtaaaca

SEQ ID NO: 727471 - DNA, 1255 bp, Homo sapiens
catgtaccatttttttggacataattgcaattaaacaagttacctttaagcaacattcatgagtatattttcagtatattttcctgtattcaattttgtccaaatagagaaatataggaaacattgaacatcagtgccacactaaaattcagctttaatatgtggatttcattttgtagaatacatttttgttgttacgaaatttatcgtgctgtggtattgtcctctgttcaaaaatgaggtttttagggttgcttattgcataatgtatattaattcttcattctaaagtaaaatcacacaatgagatcaaacgttttgagttcataatatgcaatgaataattgtaaaataaatctatactttagtattaaggcaaaactaaatgtttgccacgaatgacttaatacaaggacatctatgcattgtgcatttcttagcaacaaaggctatgaatgggtaaaggtaaagtttgaatgtatccctatcataacatggggaaaactgtatgcaactaggcatgggagtggattcagtagattcccaagatagtgctgagaacagctgacgtttacagctacaaatatcgctgtgagactgctagcttaaaacaaacatcacttgggtgttggagaggagaggggtgtttataatctgtagtctatattttaaaatgtgggtttctaaaaaaggatatgtgagtgtctgaatatcttttaagataaataagaaggcaagaagtcataaggctaagcagtgagtaaaaaaaaaattgggacaatgcagggtagtcacaagatattaggaagaatcaatagaagtggacacacttggtttcaattctggcactgccaattatgtcctacttagccttaagcaagtttactaaatctccgagatccagtttctttctgtgtaaaatgacattaacaatttcttcatctggagaaacctagggattaaatgaaatttgagagagaaagggaaaaagagaaagacttaaaagacatgtcaaatagacaaaacctatcaatcttatttagatccttatccaaacaaagatgcttagacacagcaaacacacacacacacacacacacacacacacacacacacactaacagaaaatcagagaaatatgaataccacctgaatatttgatgatactaaggaataattatagaatatctttaattttgatggtatcayggccttgtcaaaataaaaggatgattctttttagagacagtaaaca

SEQ ID NO: 727472 - DNA, 656 bp, Homo sapiens
tcttttctgtttcagcagacaatcatctcatttaagaacagactgggggcygggtgcggtggctcacgcctgtaatcccagcactttgggaggccgaggcgggcggatcacgaggtcaggagatcgagaccatcctggctaacacggtgaaaccccgtctcgactaaaaatacagaaaattagctgtgcgtggtggcaggcgcctgtagtcccagctacttgggaggctgaggcaggagaatggtgtgaacccgggaggcggagcttgcagtgagccgagatcacgccaccgcactccagcctgggtgacagagctagacaccgtctcaaaaaaaaaaaaaaaaaaaaagactgaaatttctaacctgtcttctgcgtactgatcattctaatttcagttcatttttaatgtgtttgcagtgttctttcattttatgtgacaactggtggacagtctacagcctggctggtggtctatcccctagttcaatttgaaaagcttttgatatgatatttattatcagattgacacatgagaagtttgttagtgagttcttgagttcacactcaatttcatgctatagctttgttgaggtttttccttgtgctcttctccttaatacatgccagatcccaatgtccctctgctgtggatg

SEQ ID NO: 727473 - DNA, 661 bp, Homo sapiens
tctggatagcaatgaaagtatacaacataagttctatctgtttgcaaaaagagattatgagaacttaatgggctcttacgagagcaatacacttcattgcaattatatttatggatggtccagcagagatacggatctcaagataataccagactcttaaactgctaacaccatcaccttaaaaaaaaaaaaaagtagcacttccaatataggcttcagaataccctactgaacatacaaatttatgaaacatgattatacaacatttttaaactctttttaaagaacttatttgtcaagagcactgaggaaaggctatgtttgtgagctataagaracgcatcatcctgtatgattatcaaagtgccctctgcaaagctctctgccccaagggaattctgaatggagtagttactaaacagtgagaatatgagatttatacctgagataccaatattttttctttcatttcaacttttactttaggttcaggggatacatgcgtaggtttgttacaagggtaaattgtgggttgtgggggtttgatgaacaaattgtttcatcacacaggtaatgaaaatggtacccaataggtacttgtttaatcctcaccctccttctacctcccaccctcaagtaggccgtggtgtctattgttctc

SEQ ID NO: 727474 - DNA, 557 bp, Homo sapiens
cctgtctcaaaggatttgtgtctcccacagggcaatatttgtaaagtgctttgcaaactgaaaattctgcagctaagtcagttgtcaccacgattagcagatatgcttacttgagaaatcgcgcccgatgtgaaatggctcagcctttcctactgcactttaccggaaggagagaggaagaaggggagaagggacggcctctgcagcttggctttacttgcttccccctcctccctcctgccccttattttcattacaaacaaaggtccacagagggcacatttaaaacsaagaagtcgtcactactgtccacccactgcctggcctacgtctttgtaacaaaggccctcttgggttttgttccctcccctaaaccttctttgcctctagggaacagggaactggggagtccatgattttattcctaattgcatgtgaagtgctgtaaaccccgtggagcacataaaattctaatctattttagtccccattaatttcccaccccttttcatttataacttgctctcctttctctgtaatgctcccttttccctgat

SEQ ID NO: 727475 - DNA, 663 bp, Homo sapiens
tggtttcgaatgattccagcaacacagtctgcttttcagctggtggcacagcagagtgaacacaacatgaaactgggaggtgcaaggccaccagttctatgcagcaacagtgcgtgaagcctggaagagtccctgctggggcctgggctgcaggagagcccttccaatcacagaggcagaaggctgtgggcaggagccctggtaaaaacttctatttttattgctactattcttattttggaattacctctttgccttaaaaggtaaggatagcccctcaaactctgtrtccaaggccgggtgcagtggctcatgcctgttatcctagcgctttggaggctgaggtgggtggatcacctgaggtcagaagtatgagaccagcctggccaacacagtgaaaccctgtctctactaaaaatataaaaatcggccgggtgtggtggcgggcatctgtaatcctagctacccgggaggctgaggtgggagaatcgcttgaacccgggaggaggaggttgcagtgagctgagaccatgccactgcactccagcctgggcgacagagcaagactccatctcaataataataataataataataataatgataataacaataattctgtatctacttctaccccctgttaacttgttaggcagtcattta

SEQ ID NO: 727476 - DNA, 663 bp, Homo sapiens
tggtttcgaatgattccagcaacacagtctgcttttcagctggtggcacagcagagtgaacacaacatgaaactgggaggtgcaaggccaccagttctatgcagcaacagtgcgtgaagcctggaagagtccctgctggggcctgggctgcaggagagcccttccaatcacagaggcagaaggctgtgggcaggagccctggtaaaaacttctatttttattgctactattcttattttggaattacctctttgccttaaaaggtaaggatagcccctcaaactctgtatccaaggccgggygcagtggctcatgcctgttatcctagcgctttggaggctgaggtgggtggatcacctgaggtcagaagtatgagaccagcctggccaacacagtgaaaccctgtctctactaaaaatataaaaatcggccgggtgtggtggcgggcatctgtaatcctagctacccgggaggctgaggtgggagaatcgcttgaacccgggaggaggaggttgcagtgagctgagaccatgccactgcactccagcctgggcgacagagcaagactccatctcaataataataataataataataataatgataataacaataattctgtatctacttctaccccctgttaacttgttaggcagtcattta

SEQ ID NO: 727477 - DNA, 663 bp, Homo sapiens
tggtttcgaatgattccagcaacacagtctgcttttcagctggtggcacagcagagtgaacacaacatgaaactgggaggtgcaaggccaccagttctatgcagcaacagtgcgtgaagcctggaagagtccctgctggggcctgggctgcaggagagcccttccaatcacagaggcagaaggctgtgggcaggagccctggtaaaaacttctatttttattgctactattcttattttggaattacctctttgccttaaaaggtaaggatagcccctcaaactctgtatccaaggccgggtgcagtggctcatgcctgttatcctagcgctttggaggctgaggtgggtggatcacctgaggtcagaagtatgagaccagcctggccaacacagtgaaaccctgtctctactaaaaatataaaaatcggccgggtgtggtggcgggcatctgtaatcctagctacccgggaggctgaggtgggagaatcgcttgaacccgggaggaggaggttgcagtgagctgagaccatgccactgcactccagcctgggcgacagagcaagactccatctcaataataataataataataataataatgataataacartaattctgtatctacttctaccccctgttaacttgttaggcagtcattta

SEQ ID NO: 727478 - DNA, 1316 bp, Homo sapiens
agtgacatctgtgtggtcccataagatgctgaacacataagagaaatttaaacaaatgaagcatttgttgatagtacttatttatctatcattcaacaaatatttattgagaaactaatgtgtgtcaaacactgttctaggcacttgggataagtcagtgatcaaaaagcaaagattctgccctcatggaacttacatactatcataagagatgaaagattgcagtttatttcttcttaaattgcaaaaattatcactttcatgaagaaactaatgcccaactacattataggctccatgaggggaagaactacatctgttttgttcagtgttgtgtgcccagaaaactgcatagtatctggaacatgatggggactcaacatatgtttgttgggtaaatgaaacatctaaattgtcttacctaacagtagaaggtgttaatatactctgtaacatgtgcgcttttgcatccttccacacgttacaaaataacttctacttttattgccatagaggaactcacataggataataaaataaccaacccctctttatttttttacctgataattcccatacatacgtttttaggaaaaaaatatatttaatattgaattccttctgagttcctaatagcgtataaacatatatataatgtcatatacaaatatcacataccacagggtgggtggactgtagttatattagtttcataaaaaatgttatatgacacatcatgccaacaagtcagtcatgtcctgcacaaatcagttaggttaaatacaggttaagagacctcagacctcagccatcagtggaggaaaaagtttcaatcattaaaaaaaaaaaggctctattattatcagcatctaattagcaactaaaattgtaatgtatttaattttcttctaagttttctatctgaaaataaaagataaaaagaatgagagtcatatcaaaagatctaggtttcagctactcaggaggttggggcaggagaatagctagaacccaggaggcaaaggctgctgtgagccaagatcgcgccactgcactccagcctggccacagagcgaaactccatctcaaaaaaaaaaaaaaaaaaaaaaaaaaaaaatgctgggtggggtattcagtcctcaggtaattcacgctgactggatgctgaagaaattaacattgtttgagaacacaccacagagtatccaccagtggcaccmaaggctgtcaagaccttccaagaaaaaaaagaatttaaccacttcttttgatgagaataatcctaaagatactataatagaaactgcgcaaaatat

SEQ ID NO: 727479 - DNA, 579 bp, Homo sapiens
ttgagaagaagcaaccgtttaaatagagtttcatggagaccactttcacagatacatcctttcttctattcctacattttcaaggatgcaattaagtggagtgatcttggcttcttttacctttgaaaccaacttgctgttaaagctatcgtttctcttgctcaaagtgaggagagtagagaggatacattcatgatgacttggtttggtttagatttagctagtatataaacaaagtactcatgagccactgcaatgattaattttcagtaactagaactccatgagtataactgttctaataggtaaggatgttttaaaaatcatgtgtaccrcgaacacctgtttgtcaagaggacctaatttcagtggcagcatacctatcaaaacaaaaccttagagtccaaaacatataacacttctcattccccttttctggaaaactaatgataggatttaaaagctgtttggcaacaattatgaaacatgggcaataaaacaacgtaattatacaagagagagaatagatatctaattgatgttttcttgtttagttacttttaaattcaattagtttgg

SEQ ID NO: 727480 - DNA, 1494 bp, Homo sapiens
tgctactgaaaatcaatttatcagacaaataacacaacttctagctttagtggatgtatgaggtaaatgcttttatttatttagagacagagtctcactctgtcacccaggctggaatgcaatggcacaattctggctcactgcaacctccaccttctaggttcaagcgattctctggcctcggcatcccgagtagctgggatgacaggtgcccaccaccacgcccagataatttttttgtacttttagtagagactgggtttcaccatgttggtcaggctggtctcgaactgctaacctcaggtgatccacctgccttggcctcccaaastcctgagattacaggtgtgatccactttgcctggcagtaaaccctttttattttaagaattaagaatactttgcatcattttgttctcagtattataaaagataaaggaaatactataaatgaatacacatgggagtatttctaaaaggcttttgagcaattttcttaggattgaaaatggaaatatgcaaaatcattccacagcttccacaaaaagaagtagggtaacaaatgttaccctactgaccaactctggcagttaaagaatatatcctgctatcatctgtagtaggatgaggaaaaaaaacatcgttgctatatgatttcatttttactacaaatcaggaaacatagagcccatggtttgaaattagagggtttttaaaaaccatattttaatggcttatgacagctattatataaacaatcattatttgggaaaatattttaatgaagcttttttccttttctctcacaagctaaattgtttgttatttctgagagtaaaaccattctacttgttagataatttacagtaaacacacatcctcttaatcacatcacagaagcttaaatggatttgtaaaaccattaaaaaatcaatacttagcttttaggtgatgaattaattaatagagtgtgaatgcttgaagtctgcattacccagaatgcactagggcttttcataacatcactgtcaatgggaacagtatacaaagtaatgtatgtgatgtaactagttgggaagtgctgataaaaatctatcaatccctgcttcccagtgagaatattccggtaaaacctgttttctggtaggaaaaataatggagttatttttcatttacatatagtgatgagagaaaacagtgttgctgataaataaaacacagagaaaagataatcagagggtatgtcacctctttctcattggccaggcattgtgtgataacccgcacaatggcatgataggaaactgtgaagggctgtagggatcagagttgttttcctccataaaatttttttaaagtattcttttgcaagtaagtcatgttttcctaatttcatttgggtttattttatcctatccatcttccagtgcttctttccactttaaaatttcctcctcaggccgggagtggtggctcacacctgtaatcctagca

SEQ ID NO: 727481 - DNA, 1494 bp, Homo sapiens
tgctactgaaaatcaatttatcagacaaataacacaacttctagctttagtggatgtatgaggtaaatgcttttatttatttagagacagagtctcactctgtcacccaggctggaatgcaatggcacaattctggctcactgcaacctccaccttctaggttcaagcgattctctggcctcggcatcccgagtagctgggatgacaggtgcccaccaccacgcccagataatttttttgtacttttagtagagactgggtttcaccatgttggtcaggctggtctcgaactgctaacctcaggtgatccacctgccttggcctcccaaactcctgagattacaggtgtgatccactttgcctggcagtaaaccctttttattttaagaattaagaatactttgcatcattttgttctcagtattataaaagataaaggaaatactataaatgaatacacatgggagtatttctaaaaggcttttgagcaattttcttaggattgaaaatggaaatatgcaaaatcattccacagcttccacaaaaagaagtagggtaacaaatgttaccctactgaccaactctggcagttaaagaatatatcctgctatcatctgtagtaggatgaggaaaaaaaacatcgttgctatatgatttcatttttactacaaatcaggaaacatagagcccatggtttgaaattagagggtttttaaaaaccatattttaatggcttatgacagctattatataaacaatcattatttgggaaaatattttaatgaagcttttttccttttctctcacaagctaaattgtttgttatttctgagagtaaaaccattctacttgttagataatttacagtaaacacacatcctcttaatcacatcacagaagcttaaatggatttgtaaaaccattaaaaaatcaatacttagcttttaggtgatgarttaattaatagagtgtgaatgcttgaagtctgcattacccagaatgcactagggcttttcataacatcactgtcaatgggaacagtatacaaagtaatgtatgtgatgtaactagttgggaagtgctgataaaaatctatcaatccctgcttcccagtgagaatattccggtaaaacctgttttctggtaggaaaaataatggagttatttttcatttacatatagtgatgagagaaaacagtgttgctgataaataaaacacagagaaaagataatcagagggtatgtcacctctttctcattggccaggcattgtgtgataacccgcacaatggcatgataggaaactgtgaagggctgtagggatcagagttgttttcctccataaaatttttttaaagtattcttttgcaagtaagtcatgttttcctaatttcatttgggtttattttatcctatccatcttccagtgcttctttccactttaaaatttcctcctcaggccgggagtggtggctcacacctgtaatcctagca

SEQ ID NO: 727482 - DNA, 1178 bp, Homo sapiens
atttgaaacatcactgaatttttaagtacttaatttttatgtaacagacttgaaatatggaacatttactagtcaatgaatttttcttcctatctctcttctagtacatttttggagattggatgctttccctagtcacctgatcaatccgtactgttccaggctgataggcaargcattttcaagatcatcatacgtattctttatctctgtgtacaaacagaatattttcccattatttttaaaagttatctttctcaaccccataaaaaaattgactttataaatatccattgtgttgggccgggcgcggtggctcacgcttgtaatcccaacactttgggaggctgaagcgggtggatcacttgaggccaggagttcgtgaccagcctggccaacatggagaaaccccatctctactaaaattacaaaaattagccaggtgcagtggcacacacctgtaatcccagctactcgggaggctgaggtatgagaatcacttgagcccaggaggcagaggttgcagtgagccaagatcgcaccactgcactccagcctgggtgacagagcgagactctatctcaaaaaaacaaaaacaaacaacaaaacaaaccattgtgatgataatctaaataaacggaaatgtacaatatttagaaattgcttaaagcttatctctttgttgctatcatacttgccatggttgtcagaaattccgagtgatcatgaattgtctcctgagcatcatcatttcctccagattctttcagaggacctgggaagaaagcccatttggcaatcactgcatgggagtcacttacctacagaagaaatagcaataataaataaaactactcgaaaatcaaaaggttatttgttgctttgagatatatttgatattttctaaatacttttttgtgaaaatttgattgtgttagactgatttatggtaaatattttattcctaaacttttattgattgaagcaaaacatatgacgtaatgagaagaaagccacctggaattcaaaattgtatacaacgtaaatcacaggtaaagagaaatgaaagctgaactcaatgctaagcaaccgaacatcaaattttatgtctattggtaatgagcagtgtggacaccaggtatgtaacctatctggtctttattttccatataaattaa

SEQ ID NO: 727483 - DNA, 1178 bp, Homo sapiens
atttgaaacatcactgaatttttaagtacttaatttttatgtaacagacttgaaatatggaacatttactagtcaatgaatttttcttcctatctctcttctagtacatttttggagattggatgctttccctagtcacctgatcaatccgtactgttccaggctgataggcaaggcattttcaagatcatcatacgtattctttatctctgtgtacaaacagaatattttcccattatttttaaaagttatctttctcaaccccataaaaaaattgactttataaatatccattgtgttgggccgggcgcggtggctcacgcttgtaatcccaacactttgggaggctgaagcgggtggatcacttgaggccaggagttcgtgaccagcctggccaacatggagaaaccccatctctactaaaattacaaaaattagccaggtgcagtggcacacacctgtaatcccagctactcgggaggctgaggtatgagaatcacttgagcccaggaggcagaggttgcagtgagccaagatcgcaccactgcactccagcctgggtgacagagcgagactctatctcaaaaaaacaaaaacaaacaacaaaacaaaccattgtgatgataatctaaataaacggaaatgtacaatatttagaaattgcttaaagcttatctctttgttgctatcatacttgccatggttgtcagaaattccgagtgatcatgaattgtctcctgagcatcatcatttcctccagattctttcagaggacctgggaagaaagcccatttggcaatcactgcatgggagtcacttacctacagaagaaatagcaataataaataaaactactcgaaaatcaaaaggttatttgttgctttgagatatatttgatattttctaaatacttttttgtgaaaatttgattgtgttagactgatttatggtaaatrttttattcctaaacttttattgattgaagcaaaacatatgacgtaatgagaagaaagccacctggaattcaaaattgtatacaacgtaaatcacaggtaaagagaaatgaaagctgaactcaatgctaagcaaccgaacatcaaattttatgtctattggtaatgagcagtgtggacaccaggtatgtaacctatctggtctttattttccatataaattaa

SEQ ID NO: 727484 - DNA, 705 bp, Homo sapiens
aaaagagaaacccaaagataaaatattgtgaaggatattacatatcttcatttatatgtcaaataatactatttttaaaagagaaaataaatttaaagtagtgaagctttttcaggcaaggaagtaactgttaaatgtgtacagtgctggactgagtggaaggaatacaacaagtacacgatggaagaatgactcagactaaatacacaacatgattacctataggttacacatcccaaatctgaaaatctaatctgaaatgctccaaaatctgaaactttctgagtgctaacatgacatgatgttcaaaggaaatgatcactagagcattttcaatttcagatgttcaataactaagtataatgcaaatattccaaaatccaaaaaattccaaaatccaaaacacttctggtcccaagcatttgggaaatgggatactcaacctcatctctatttacaatataatctttgtaacagttactaatttctgtaagcaaatgatagttagaatcaagtttataaacagttttctactacatactactacgtactatgttaaggttccayagctttttcttccaaatataaggaagtttataaatcctcaatttctatggaatcttgaaaaacaaaaacttttagaaaaaagaggccataagaagacagataagttttaatttcaaattttattttttaaaaaactca

SEQ ID NO: 727485 - DNA, 1128 bp, Homo sapiens
atgctgaaatattagttaatttgagtgctttctttagaaagggaaggtatttgaatcatccctccttccatcccttcctcctttcttggaaagtgtgagcaaagttaataaatttcatttctctttgtatgttgtcattttagcatctcaattttaaagaaatgtactggaaatcaacatattttatttgttaattttaatcttaatatttttctcagacagggtctcactctgtcgcccagcagaagtgcagtgccgcgatcttggctcactgcaacctccgcttcccatgttcaagtgattctcatgcctcagcctctggagtagctgggattacaggcgccygccaccacacccagctaatttttgtattttttagtagagatggggtttcgccttgttggccaggctggtccccaactcttgggcttaagctatccgcctgccttggcctcccaaagtgttgggattataggcgtgagccaccgtatccagccaagatattttatttttgcttgtaaagcatgttttatttccagttggtatgttgtatggcatgagctttataaagtctcttaaaattttaaagatctgtgatatggcttattcacatttaaagataaagtaatattacataatttatttcagagaatcctgccaaagttttataaagaatggccaagaaactagcataccatatctgattttggatctttaaattaaccttgatagaatcttttttcatggcctgcttttttttggtctgtgccctgatggatgtgaagtaatatcgtccctgattactaatgaggttgagctcattttcatatgtttattggccatttggatttcctgttctctgaagtgattgttaaagtcttttgggctctctttctttttcttattgatttatgggggtcattatacattttggatacttatcctttgtccgttatatatgaggcacatattttcttatgcattgtggtttatcttttcactctctttaggattttctttttttgtgtagacattttaagttttaatatagtccaatttattaacttttccctacatggctaatgtttttgtcttaagaaattctttcctaaccaagatggtgaagat

SEQ ID NO: 727486 - DNA, 643 bp, Homo sapiens
ccaccacctcccgggttcaagcaattccctgcctcaggctcccaagtagctgggactacaggcacccgccaccaagcccagctaatttttgtatttttagtagagacggggcttcaccgtcttggccaggctggtctccatctcctgacctcgtgatctacccaaagtgttgggattacaggcgtgagccacygtacctggcccatttaaggaagtttttaatacaaagtttaccaagtcattattttctccttccttcagattagtcctaatgagttagaatttactatagtgtatgtgggtttttaattttctttttatcattatattctggtattttaaatttttaataggataggaggttctagagatattacattggctttgtgaagtatagacatatggttgggctctgagtattggcaccctaatgcccatcaccatttctaggcatctcttcataattctttcagaaagcaagaccatttgccaactttaggaatgtgctacaagggaatattctgaaacaaaaaccaaaaaaccccagtagcactatgagattctgttttctgaaagatttgggaagaagggtaaagagtttaatctgtcagggttataagaggggaaaaaaacttgatggaat

SEQ ID NO: 727487 - DNA, 604 bp, Homo sapiens
aaaaaaaaagaaaagaaaagaaaagaggtttcatttgttcacagttccccagacagtacaggaagcatggctggggaagcctcaggaaatttacaatcatggtggaaggtgaaagggaaggatacgcttcttacatgtgcagagcacgaagaaaagagagcaatgggggaggtgctacacacttttaaacaaccagatcttgtgagaacttactcactatcaagagaacagcagggggcaagtccgcccctatgatccaatcacctcccaccaggctcctccaccaacattagggattacagttcaacatgagatttgggtggggacacaaatccaaaccatgtcaataacatattgtagctttcattttcaatattttacagtttccatgttatcggcatagcagatggygaagctgtttcttgccccaatgaccaggtgaaaaaactgatgctaagagaagttaagtgacctgctcaaatttataccactagcaatggcagagctcggcctggaaataacttcttgggtttcaagtctaacgtattggcttccacaccatgtttgcttctaaacaactaaggtagtggttgatcaaaatcaa

SEQ ID NO: 727488 - DNA, 616 bp, Homo sapiens
ttgagatatatacccaaaaataggactaccaaaaaacagtacggttgttcctcaaaaattaaaagtagaattatcatatgatccrgcaatcctggttgttcttttgccataatatttaaagatgtatgtaaggagataaaggcaaataattcagattcatacacttaagagttggaaggaacttcaaacgttgtatgtcaaatgttaaaataaatgttaaatgttaaaattgatgttaaaatagataagaaaatacctgttcaattattaaaggcaatgaggaaatgcctgtatatttatgtataaatacacacacacacacacacccacacacactcacaggcagttcttttgatcccaaataagccctttctctattgctactataataacctactgataataaacagttagtgagtcaatttttctttttttttttttttttggacagagttttgtgttgttgcccaagctggagtgcaatgactcaatcttggctcactgcaacctccgcctcctgggttcaagcgattttttttccttagcctcccgagtagctgggattacaggcatgcaccatcacgcttggctaattttttgtattattttaattttg

SEQ ID NO: 727489 - DNA, 651 bp, Homo sapiens
agtgggaaaaggctaatggtacaactatccatgtagacattcaccacagcaagtggttctcactaggataaaactgaacaaagacggcaaaaagattcctgaacagaaagccaaatctcgccaagtaggaaaggaaaagggcaaatacaaggaagaaacaattgagaagaggcaggaataaagtaatcttatatacaagctttgataaaaactcgaaataaaaaaaagaaaatacaaaccttgatctcaatctttaggtttccttttgctggccaactgagatttagtatgtattggattgtagttgtaggacgagggacagggaaaagtttttaaaaagctttaaaataagctacattaaaatgatcattaaaaacaccactttttactttggcaaatataaaatttccaaagttacatttagaagccttatcaaaagtagaggagcaaagataccagacataaattaatcataagatccatttcaagtgtttcaatcacaggagaaaaatataaattrtaattacttaaacatatttatacaaagtctagctctgttgccaacgctggagtgtagtaacgcgatctgggctcactgcaacctccacctcccaggttcaagcgattctcctgcctcagcctcccacgtat

SEQ ID NO: 727490 - DNA, 1509 bp, Homo sapiens
gcctgtaatgccagccagcaccttgggaggcctagacaagaggattgcttgagtccaggagatcaagaacagtctaggcaacatggtgaaaccccgtatctacaaaaaatttaaaaatcagccaggtgtagtggtgcgtgcctgaagtcctagctgctcaagaggctgaggcaggagaatcgcttgagcccagctggtcaaagctgcagtgagctgagagtgagactgtttctcacaaaaataatccattccttgaggatgtggtcaaaggtcatggtccattttccctccaaatattccttggactacaaaccctcctcatttctctataatcctgatatgttctatatttttacctttttcatcatattttatactttcatataactgggagactaagagccagtgaaaacttattagcattaaaaaataccccagggctgggcaccgtggctcatgcctgcaatcccagcactttggaaggccaaggtgagcagatcacttgaggtcaggaccagcgtggggtttcaccttcaatatggtgaaaccctatctctacaaaaaatattacaagtaatggcaaaaaccgcagttacttttgcactaacctaatacaaaaattagccaggcatggtgatgcatgcctgccgtcccagctactcaggaggctaaagtggaagggatcactggagtctgggaggcagagtttgcagtgaaccgtggtcacaccactgtactccagcctgggtgacagaggaagactgtctctcaaaaaacaaaacaagacaataaaaaaaaaacccagtataaatttccatattaatttttaaaaaaacaaattaaaagaccatacaaatatagattaatcagacaagattaaatcacactagttttacaaataaggtttatgttcactcatactgtaaaggctcaatatagaaggcagacttcaacaacactttgtttttttgtttttgttttttttgagatgaggtctcactctgtcacccagggtggaatgctgtggggcaatcttggctcaccgcaacctccacctcctgggttcaagtgattgtcctgcctcagcctcactagtagctgggattacaggcgcccaccaccacgcccagctaatttttgtatttttagtagagacggggtttcaccacgttagacaagctgctctcgaactcctgacctcaggtgatctgtccttttttttttaaaattcaaataccatttaaatgctccttaagagttcaggagattcttcctatgacaaatctggttttcttaagacaattttgttttctttytttttttttttttttttacaacttaaactttatttacttgattgagagcttattgcacatgaaatgttttatgtggttgatcttaacttcgtttacattgacttcttttctatgctcaagattgttcaattgctgctgccgccgttgtgttttctttcaggatcgaggtgggtaccttcatataatatcttct

SEQ ID NO: 727491 - DNA, 642 bp, Homo sapiens
gaaagaaagaaagaaagaaagaaagaaagaaagaaagaaagaaagaaagaaagagaaaaagaaaataaggccaggcacggtggctcacgcctgtaatcccagcactttgggaggctgaggtgggcagatcacctgaggtcgggagttccagaccagcctgaccaacatggagaaaccctgcctctactaaaaatataaacttagctgggtgtggtggcgcatgcctgtaatcccagctactcggaaggctgaggcaggagaattgcttgaacccggaaggcggaggttgcggtgagccaagatagcgccattgcactccagcctgggcaacaagagcaagactccgtctaaaaaaagaaagaaacaaacaaacaaaaaacacacacacaagaattagccaggcatggtggcacgcgcctgtaatcccagctacttgggaggctgaggcaggagaattgcttgaacccgggatggggaagtttcagtgggccgagattgcgacactgcactccagcctgggcaacagatcgagactccatttcaaaaaaaaaaraaaagaaagaaagaaagaaaaaagaaaatatgtgtgttaaaactattatattgcttcatgaaaatatttcacaaatgggggaggcagga

SEQ ID NO: 727492 - DNA, 2895 bp, Homo sapiens
tgaattttgaccccaggagacttctttggtatttcgtctccccaagcaataaactattattctctgtttatatttcacatattgtgttagtccattctcatgctgctataaagaactacccgagactgggtaatttataaagaaaagaggtttgattgactcacagttctgcaggctgtacaggaagcatggctgggaggcctcaggaaacttacagttgtggtggaaggtaaaggagaagcaagccctctctctcctgctctgtcttaccatggcagagcaggagagagagtgaaaggggaagtgctacacacttttaaacaaggagatcttctgagaactcactattatgagaactgcaaggggaaaatgcacaccatgatccaatcacctcccaacaggtcccttccccaacactggctattacaattcaacatgagatttgggtggggatrcagagccaaaccatatcagatctttactgtaattcacccagtgtatgttatttcaggtgtcacaatttaagtaattcaactagccctttctttatttttcttatttcgtgttgcaatggaaattttgtgcccaatgttattgagcactgactatgtgttgggtactatattaagcaccttatatgcacaagctaatttaatcctgataactgagtggttagctgctcttgtccaaatttagagaaaagaagcccagaaaggttacgtgacttattcatgaggcgcagctattaaaagttgaagttgggatttaaatccaattcttgttccataattttcttccctctgcctctactataatttggtgttaatgtggtattgtcttcattatggccatttgttgatttaaaaattgaccatgaaatgtgggtctgactgtgtgtcataaacttccccaatttctggatattggtattgactaggaatggcaagctcctttaggacaagaacctacatctcaaccacttacttttaatactgggaagaaagaaagtattgatatttggtgtttattccacatattgattctataatttcatcaaaaagtatttaaatacctaaaataaagaaatatatttaaaaatatacattttaaaaaagaaatattataaacttattagcaaatcttaaatgtaaaattatgaaagataaatgtagagcataaattattatgttgctataggttagcattggataaaataaatgatcactcaccaataaaactattaaaatgaagaaattttgatcagggaatactaaaaataaatagtgtttcatcatttcttcaaaaatcagtcttaaagtccattgatgtcactgtagactaacaagtgcattctttataaagttttctagctgctgtagaagttctttgtaacttgatacaagttcagataatggtgaaaggttagttataagctaattctgtgatgctttaaaaaagaaacataactcttgcttgaggtgatctttagaatctcttttgggctggtggtggtgctgtgaatagaattatattagtagttataaaaagttgaagttatagtgatgtagttttctatatagaaattcatttctgtttcccttactgttgttttgtttcttcaagtactgttgaagatttggttatatattgttttagcttattatcatttccatcttcagcttgtttgacaagttattaaatcaaagagatgtatagatataatacatgttggtttttgagttggcattttcttcctttcaatggagattgtggaagtagagagaatgctttctaagcatcctgtgttagatttagaattttaatgtaacatgtaaatgcctaagtgtatctctagatgtaatgtttaatatttgatatattttaatatacactgagaaaaacactacgatttattttactatgtaaaaatagcacacaataccaaatactataaagtgatgttgcagtcactattctcttcagaccctagcatggtctcctggaacacacacatgcacaaaatgccttccttcaggttaagataaaaacacaaatcctacactttgaggaactttcaattaaatgaaactcaaacctcattattcttataatcaccatgtgttctttgtttttgaaggaatacaaattcttgacaagtgaaaaaatacatttagtactatcttctcttttatacgccagctcccattattctgtttctagagagagctaaaattatgcaaacagattttatttttttaaaaagctgcagatgggccaggtgtggtggctcacgcctgtaatcccagctctttgggaggccgaggcaggcggatcacaagatcaggagatcgagaccatactggctactacggtgaaaccccatctctactaaaaatacaaaaaattagccgggcatggtgacgggcacctgtagtcccagctactcgggaggctgaggcaggagaatggcgtgaaccccggaggcggagcttgtagtgagccaaaattgcgccactgctctccaacctgggcgacagagcgagactgggtctcgaaaaaaaaaaaaaagatgcagatgttaacagacttaagaaaagccaagtccgtgtgatagttttatctctgaaaagtcaactatgacttaaatacttttataaagcactatggaagctggtttaaccaaaaaatatttttgatacaaggaatcagcttttaatatatccaggaagttactggtcttcacatataccattttgtctcaaagggccaggctgcactcccacattcattgcagcactattcacaacagccaagatttggaagcaacctaggtgtccatcaacagaagactggataaagaaaatgtggcacatagacacaaatactattcagcca

SEQ ID NO: 727493 - DNA, 2895 bp, Homo sapiens
tgaattttgaccccaggagacttctttggtatttcgtctccccaagcaataaactattattctctgtttatatttcacatattgtgttagtccattctcatgctgctataaagaactacccgagactgggtaatttataaagaaaagaggtttgattgactcacagttctgcaggctgtacaggaagcatggctgggaggcctcaggaaacttacagttgtggtggaaggtaaaggagaagcaagccctctctctcctgctctgtcttaccatggcagagcaggagagagagtgaaaggggaagtgctacacacttttaaacaaggagatcttctgagaactcactattatgagaactgcaaggggaaaatgcacaccatgatccaatcacctcccaacaggtcccttccccaacactggctattacaattcaacatgagatttgggtggggatgcagagccaaaccatatcagatctttactgtaattcacccagtgyatgttatttcaggtgtcacaatttaagtaattcaactagccctttctttatttttcttatttcgtgttgcaatggaaattttgtgcccaatgttattgagcactgactatgtgttgggtactatattaagcaccttatatgcacaagctaatttaatcctgataactgagtggttagctgctcttgtccaaatttagagaaaagaagcccagaaaggttacgtgacttattcatgaggcgcagctattaaaagttgaagttgggatttaaatccaattcttgttccataattttcttccctctgcctctactataatttggtgttaatgtggtattgtcttcattatggccatttgttgatttaaaaattgaccatgaaatgtgggtctgactgtgtgtcataaacttccccaatttctggatattggtattgactaggaatggcaagctcctttaggacaagaacctacatctcaaccacttacttttaatactgggaagaaagaaagtattgatatttggtgtttattccacatattgattctataatttcatcaaaaagtatttaaatacctaaaataaagaaatatatttaaaaatatacattttaaaaaagaaatattataaacttattagcaaatcttaaatgtaaaattatgaaagataaatgtagagcataaattattatgttgctataggttagcattggataaaataaatgatcactcaccaataaaactattaaaatgaagaaattttgatcagggaatactaaaaataaatagtgtttcatcatttcttcaaaaatcagtcttaaagtccattgatgtcactgtagactaacaagtgcattctttataaagttttctagctgctgtagaagttctttgtaacttgatacaagttcagataatggtgaaaggttagttataagctaattctgtgatgctttaaaaaagaaacataactcttgcttgaggtgatctttagaatctcttttgggctggtggtggtgctgtgaatagaattatattagtagttataaaaagttgaagttatagtgatgtagttttctatatagaaattcatttctgtttcccttactgttgttttgtttcttcaagtactgttgaagatttggttatatattgttttagcttattatcatttccatcttcagcttgtttgacaagttattaaatcaaagagatgtatagatataatacatgttggtttttgagttggcattttcttcctttcaatggagattgtggaagtagagagaatgctttctaagcatcctgtgttagatttagaattttaatgtaacatgtaaatgcctaagtgtatctctagatgtaatgtttaatatttgatatattttaatatacactgagaaaaacactacgatttattttactatgtaaaaatagcacacaataccaaatactataaagtgatgttgcagtcactattctcttcagaccctagcatggtctcctggaacacacacatgcacaaaatgccttccttcaggttaagataaaaacacaaatcctacactttgaggaactttcaattaaatgaaactcaaacctcattattcttataatcaccatgtgttctttgtttttgaaggaatacaaattcttgacaagtgaaaaaatacatttagtactatcttctcttttatacgccagctcccattattctgtttctagagagagctaaaattatgcaaacagattttatttttttaaaaagctgcagatgggccaggtgtggtggctcacgcctgtaatcccagctctttgggaggccgaggcaggcggatcacaagatcaggagatcgagaccatactggctactacggtgaaaccccatctctactaaaaatacaaaaaattagccgggcatggtgacgggcacctgtagtcccagctactcgggaggctgaggcaggagaatggcgtgaaccccggaggcggagcttgtagtgagccaaaattgcgccactgctctccaacctgggcgacagagcgagactgggtctcgaaaaaaaaaaaaaagatgcagatgttaacagacttaagaaaagccaagtccgtgtgatagttttatctctgaaaagtcaactatgacttaaatacttttataaagcactatggaagctggtttaaccaaaaaatatttttgatacaaggaatcagcttttaatatatccaggaagttactggtcttcacatataccattttgtctcaaagggccaggctgcactcccacattcattgcagcactattcacaacagccaagatttggaagcaacctaggtgtccatcaacagaagactggataaagaaaatgtggcacatagacacaaatactattcagcca

SEQ ID NO: 727494 - DNA, 1302 bp, Homo sapiens
tggggctcccttgttcctaaggtttgacaaaataggaagctatgttgcacaagaaatgtcagagtgagtaagtgtgaagagtgagactaagtgctgtgtggataataggcaagaggattaagtggccagggaccagaaaacgcttcagaagatagatgtccaatggaatttttcagttacaacgttgtaatctgtgcagtggtactgcttcctgtgatctcaacatcttcaacaaagtcacatatatgttagtcttagtaacattagtgtgattggattcctggtagtggttggtgacagaatttattttttgtcagagttggggtagcagtgtgagagagggagcttgtgtaaataagatacatgggtcataaagcatgtaaataagacatgggtcataagaacatgagtcatgctctctcttgtatgttttctgtaagtggccttaaccatctagttcatttacccatgccttagatayattccttgcaaaacattccttccaagtagttgtgtaacataaccttaaacactgaagtctgtagcagattactttgtctggctgtacatggttttaattgatatttttatttttttccttaaaacctcattctatctaactaaagtagattgatggtagtccattaccccttctttctaaagaactttttgattataatcagcgaagatcattctagaacatattcatgagttcctgatcttaccttatttttgtagatgattaaattaagtggaagcatttgcatatatatatggttggttctgaattcaagattcttctcacaggtactgcataaactcagtaaaaatttagtctattattttgtctttaattacacttaaaatatgtgtgaacaagattgatgaaataaatgtgaattgaaatacattccacatgttatttataggtccttatgtagcctagcaaaatacttaggtatggttgactgctaaaaagaagtggatttgatgattgttctgttggacctggagcttctggtcctattcatcagttcataggaatgcttactgtgggttttacagagagattaggagattaaaactaaaagtattactagctgacccaaaaacgaaggttccatgattatgttgaagtaaagctcaaggaagggtatgaagtttgattcaatagaaataaatggtttcaaattacagcttgagaatatggatgataatcatatgttttgtctgtaataatggtagaaaaccatgggagttatttgcatgttggggaggataattattcatctttccatttag

SEQ ID NO: 727495 - DNA, 1350 bp, Homo sapiens
tttgctattttacaagtgaggacatatatttatagaaaagttaaagaatattcccaggatcccagggctggtaagttctagagctgggatataaacccagacagtaccagcttccttttttttccaaggaatgagggctaatttttctattccttagcatcctaccttgccaaaatcctatattgggcattatataaatatgaattacaaacagaagacacttaagcaaattctagtctaattaaagactgggaaaaaaattaaaagattaagagataagacatttggtatagaggtctatgagcgagagagtcccagtcttgggaaacagtgtggtctatgggaaaactcataggctttagaatccagtaaagccaactttacattctagtttcattacttgctaattgtgaacactcatgggaaagttacctactatctttgagcttcttttccttcaactgtataatgtagtttccaagaaaatgtggataaatcaatatcarcatcaatagcttccatttactagcggcttaatgtgtaccagtcctggtttcaagaactctgctatatttatctcatttaatattttaacccttcaagataagcatcatcactgccataccacaggtgagtaactgagtcttgtagaacttacccaggtcaccagggaagcagtggaactaggatttaactctatgtaacattaaaaagattacttcttgggccgggtgcagtggctcacgcctgtaatcccagcacattggtaggccagggccggtggatcacctgaggtcaggaattcgagaccagcctggccaacatggtgaaaccccgtctctactaaaaatacaaaaaattaatggggtgtggtggcaggcacctgcaatcccagctactcaggaggctgaggcagaagaattgcccgggaggcagatgttgcagtgagcagagattgtgccattgcggtgacagagtgaaactctgtctcaaaaaaaaaaaaaaaaaaatcactgctcttaattattcaactaacagcttccccaaagtaaatgctgaatctaacagtggtcaaagtagtaactgtggtatatgaaacctctgagacaagatttagcatatagagcgcactctgtaagttgtagctcaaatgatgaactcatatatcttatctgtgtctgagaagatacttatgtttggaaatacattaatgaatactgcaaggaagaagaattagtgtaatttaactaaaattatatttccttgcttattctttcaatttttttcaccttctcttactttcctagaagaacattaaataatcatagactttacgtagaaacattttca

SEQ ID NO: 727496 - DNA, 1350 bp, Homo sapiens
tttgctattttacaagtgaggacatatatttatagaaaagttaaagaatattcccaggatcccagggctggtaagttctagagctgggatataaacccagacagtaccagcttccttttttttccaaggaatgagggctaatttttctattccttagcatcctaccttgccaaaatcctatattgggcattatataaatatgaattacaaacagaagacacttaagcaaattctagtctaattaaagactgggaaaaaaattaaaagattaagagataagacatttggtatagaggtctatgagcgagagagtcccagtcttgggaaacagtgtggtctatgggaaaactcataggctttagaatccagtaaagccaactttacattctagtttcattacttgctaattgtgaacactcatgggaaagttacctactatctttgagcttcttttccttcaactgtataatgtagtttccaagaaaatgtggataaatcaatatcagcatcaatagcttccatttactagcggcttaatgtgtaccagtcctggtttcaagaactctgctatatttatctcatttaatattttaacccttcaagataagcatcatcactgccataccacaggtgagtaactgagtcttgtagaacttacccaggtcaccagggaagcagtggaactaggatttaactctatgtaacattaaaaagattacttcttgggccgggtgcagtggctcacgcctgtaatcccagcacattggtaggccagggccggtggatcacctgaggtcaggaattcgagaccagcctggccaacatggtgaaaccccgtctctactaaaaatacaaaaaattaatggggtgtggtggcaggcacctgcaatcccagctactcaggaggctgaggcagaagaattgcccgggaggcagatgttgcagtgagcagagattgtgccattgcggtgacagagtgaaactctgtctcaaaaaaaaaaaaaaaaaaatcactgctcttaattattcaactaacagcttccccaaagtaaatgctgaatmtaacagtggtcaaagtagtaactgtggtatatgaaacctctgagacaagatttagcatatagagcgcactctgtaagttgtagctcaaatgatgaactcatatatcttatctgtgtctgagaagatacttatgtttggaaatacattaatgaatactgcaaggaagaagaattagtgtaatttaactaaaattatatttccttgcttattctttcaatttttttcaccttctcttactttcctagaagaacattaaataatcatagactttacgtagaaacattttca

SEQ ID NO: 727497 - DNA, 2818 bp, Homo sapiens
agaaattcataacaaaaatttctattttatatttttttctttttcagagttacaaaatttttacatttttgtgggaaaattttttctcttcatactctcaaacccactttttaatgatagtatcctttaattgttgatatatatcattcctgatacacatatcataacctatacacaggtacactaatacacaaatgtgcaagtatacgttcagagtattgtgttaagcactcatttttaaattgaaagaatagcttgcatgtttaggtatatatgaatggtaatagttttaaatagttatatgaacacaatttctacctagcttttttttcttctttgtttgatgaataaagcaattaaagaaaattagaaaaggtcaaattaccatggcttatttttgccaccagttatgaaagataaagcaaaatttccctaatgcattcttaagcatcttagagtccctaaactctcactaatggacttattagaactgtacttttatgtatgaccttcttatacagcagaattgaatctatgccaatacaaaattacattgtgtgttatatattagccacagggaatttttgccttcggtgtgatccattatggttataatttattgccctctaagttctagccatgccactaacagttgcatagggagctaaagttgagagtgataactgttccaggtgacctggttagatctaatttatgggtacttagcaggactaagtgaggcctcagtacacagtgcatttgatcctctatttgataagattttgaccttttggtcccagtggtaccactccaagtagaattagaagttgagatagaatgtttttataggtctctcttgcaataattggaagataaataactttaaaagtgcataattcacctcattgtcttccaagaggtgtgccaaggacaaacagtacacatatttattttgtttttaatttacaattaaaatatgctggacatgccttaaaaggtctattacacacttgaaagctggtagtaaaaatggaggtcatctaattcaaattctttccaggaaacttctaagagctagtctttttcaatggtcttttatcctcaaactggcatatttcagtgatgggtcttgttttatagaatagtctgttctattccatgtcactttttcctcctgatttttctttattttatacaaagacaaatgtgaaaaaaagaaattgaagcatcacaaatattttagctcataatggcagaggaaaagtatttggaagtgcgaaggcataaatttatttctaacataaactatactcttctactgataagaatctctgctctatttgttattttttaaaaacttttatgggtatatagtaggtgcatatgagttacatgagatactttgatagaggcacataattatttggtgcaaatttggattaagagaagccctctacttatggtgaaaacatgctttgaaatatttttcaactatttttcttatttctgctctctgaaactacagtaagtcaactaatggatgtttccatgacaaccatttagatatttgacaaatcatatgttgttaaatttaaaatcctcccattttatacattctcaaaagtgttcaaatttctcttctatgcacctgtaaaatggtacctgttataatctacctatatattattatctgatattattaattaatgtacagtatgcattagtgttccagtagcccatttacagtgctgtcatgtaaaatcagcttttagctatcaaaatttcacaattacatttttacattaatgtttgtagctgtctattacatttgggtgattttttttctattacaaattggaggataaaatttattattgcaaaaatttaccattttgtaacccattattatgacttattaagatgactttgaaccatgtcttttgtcattaaatgtatttatacatccttccaaggtttgtaacattcacagattttatacacatgattttaatgccttcatttatatcagtgattaaaggagaaatagagtagatataaaaacacagagctatgtgtgatttcactagagacctcttttcgtatgtcaatgatgcctcaatttattctttctaggtagcatcattcagacagctacaaattcaagtcaactttctttttctttgttggccataaaaatatcttgaaactaaataatgatttccttcagcttagatatagtttctgtagcatttttctcatttacaaatgtgtcrtgcattatagattttattttttcactattttggatatttattttttaataaataaaataggatatgtatgtaatcccttaggtgtttaacatatgcctagtatagtctaatcacatgcagtatttacaattctcattggtgtaactattagccttaattttatagatgaataaacgaagcatagagatactttgtactttttcctggatcatacagttagtaggttatggaactggaagccatgcagtttgactccagatcatctgtcttaggcatagggctggttactggaaagagggatactatcatgactaaaataacacacaggttgtattgagcttccagtctagtgaaggcagacaaaccaaaacaagtacataaaatatacaacgagccaaattttcggtgagaaatgcaataaagaaaaataaattggaagaaatttgaaaggagatgtcaggttggagacaaggtttttaagatggaggggtcaggataggacactgcaaaaatgacatatttagagataaagttgcataagctca

SEQ ID NO: 727498 - DNA, 639 bp, Homo sapiens
aatagcacaatagccatttgttcattgtctccaggacccagagtggctagcctatagaactagcccaaaaagaaaactgcattctagtaagtacctaagttagttttgggagaggagggagaggagaaatgaagtatgttttttatgttattacactacagttgtagtggtaaattwttatttgaaggtagactgtgataatttaaaggtatacactataggctgaggatggtggctcatacctgtaatcccagcactttgggaggccgaggtaggaggattgcttgaacccaggagtttgagaccagcctgggcaacatggtaaagcctcatctctaccaaaaaaatacaaaaaaaaaacacaaaaatttactgagcatactggcatgcacctatagtcccagctgttcaagagactggggtaggaggattgcttgaacctggaatgtgaaggttgcagtgagctgagatcataccactacagtctaacctgggtgacagagactcagttttaaaaatatatatatatctcactataaaccataaacaacaagcaaaatgccaaaacaaaaagtcatagctaataaaccaataaaagagagaatataaaattataaaaaattaattcaaaaaaagaga

SEQ ID NO: 727499 - DNA, 639 bp, Homo sapiens
aatagcacaatagccatttgttcattgtctccaggacccagagtggctagcctatagaactagcccaaaaagaaaactgcattctagtaagtacctaagttagttttgggagaggagggagaggagaaatgaagtatgttttttatgttattacactacagttgtagtggtaaattattatttgaaggtagactgtgataatttaaaggtatacactataggctgaggatggtggctcatacctgtaatcccagcactttgggaggccgaggtaggaggattgcttgaacccaggagtttgagaccagcctgggcaacatggtaaagcctcatctctaccaaaaaaatacaaaaaaaaamcacaaaaatttactgagcatactggcatgcacctatagtcccagctgttcaagagactggggtaggaggattgcttgaacctggaatgtgaaggttgcagtgagctgagatcataccactacagtctaacctgggtgacagagactcagttttaaaaatatatatatatctcactataaaccataaacaacaagcaaaatgccaaaacaaaaagtcatagctaataaaccaataaaagagagaatataaaattataaaaaattaattcaaaaaaagaga

SEQ ID NO: 727500 - DNA, 648 bp, Homo sapiens
tatttagtcggtattccatgtctgatggcagcctgtgatcttacactcaaggaagtttggatgtctcccaatatttctccccaggtttaaggagtcactagctggttggacattatcagatactgggaggtagcagtgaatatgatcactgtccccatttcactcagtgtggctaaatgcttttgttcattagagaaaaaaaatgagatggatgagtctccaagggagtattggattcaattactttaatttttgtgtgtgatttaaatgcacttaccacagtttagaaaacaggatctgaagctcggagaaatataacaaagctggcatatggaaaatgaaatctaggccttaaatctctcttagtgcagcatttctgcttcttcttctgctccctatgcaagaaaagtagttatttgtaggaaaagaagagcaagaaaccaggtgaattttatatactgggctgaaacaaggccagtggcaatgccactatrtcaaaaaaagttgtgggaaaaccaatcttaagactggttataaatgaacaacttgttgcagacaaatgctcctgatgggaacagcttaaaacatccagctaaaatagaaaaatcgtatgttttaaagtcttggctaattgtccgggcagtcaag

SEQ ID NO: 727501 - DNA, 648 bp, Homo sapiens
tatttagtcggtattccatgtctgatggcagcctgtgatcttacactcaaggaagtttggatgtctcccaatatttctccccaggtttaaggagtcactagctggttggacattatcagatactgggaggtagcagtgaatatgatcactgtccccatttcactcagtgtggctaaatgcttttgttcattagagaaaaaaaatgagatggatgagtctccaagggagtattggattcaattactttaatttttgtgtgtgatttaaatgcacttaccacagtttagaaaacaggatctgaagctcggagaaatataacaaagctggcatatggaaaatgaaatctaggccttaaatctctcttagtgcagcatttctgcttcttcttctgctccctatgcaagaaaagtagttatttgtaggaaaagaagagcaagaaaccaggtgaattttatatactgggctgaaacaaggccagtggcaatgccactatatcaaaaaaagttgtgggaaaaccaatcttaagactggttataaatgaacaacttgttgcagacaaatgytcctgatgggaacagcttaaaacatccagctaaaatagaaaaatcgtatgttttaaagtcttggctaattgtccgggcagtcaag

SEQ ID NO: 727502 - DNA, 648 bp, Homo sapiens
tatttagtcggtattccatgtctgatggcagcctgtgatcttacactcaaggaagtttggatgtctcccaatatttctccccaggtttaaggagtcactagctggttggacattatcagatactgggaggtagcagtgaatatgatcactgtccccatttcactcagtgtggctaaatgcttttgttcattagagaaaaaaaatgagatggatgagtctccaagggagtattggattcaattactttaatttttgtgtgtgatttaaatgcacttaccacagtttagaaaacaggatctgaagctcggagaaatataacaaagctggcatatggaaaatgaaatctaggccttaaatctctcttagtgcagcatttctgcttcttcttctgctccctatgcaagaaaagtagttatttgtaggaaaagaagagcaagaaaccaggtgaattttatatactgggctgaaacaaggccagtggcaatgccactatatcaaaaaaagttgtgggaaaaccaatcttaagactggttataaatgaacaacttgttgcagacaaatgctcctgatgggaacagcttaaaamatccagctaaaatagaaaaatcgtatgttttaaagtcttggctaattgtccgggcagtcaag

SEQ ID NO: 727503 - DNA, 648 bp, Homo sapiens
tatttagtcggtattccatgtctgatggcagcctgtgatcttacactcaaggaagtttggatgtctcccaatatttctccccaggtttaaggagtcactagctggttggacattatcagatactgggaggtagcagtgaatatgatcactgtccccatttcactcagtgtggctaaatgcttttgttcattagagaaaaaaaatgagatggatgagtctccaagggagtattggattcaattactttaatttttgtgtgtgatttaaatgcacttaccacagtttagaaaacaggatctgaagctcggagaaatataacaaagctggcatatggaaaatgaaatctaggccttaaatctctcttagtgcagcatttctgcttcttcttctgctccctatgcaagaaaagtagttatttgtaggaaaagaagagcaagaaaccaggtgaattttatatactgggctgaaacaaggccagtggcaatgccactatatcaaaaaaagttgtgggaaaaccaatcttaagactggttataaatgaacaacttgttgcagacaaatgctcctgatgggaacagcttaaaacatccagctaaaatagaaaaatcgtatgttttaaagtcttggctaattgtcygggcagtcaag

SEQ ID NO: 727504 - DNA, 776 bp, Homo sapiens
ccattcatttgacctgttccttgagtaattcttgagtgcaatgtccttcttccttagaataacataatgttaaaaagaaagcaaattctgttcttctaacttgttrcccaagttttctattctctccagagtagcaatgttaaatgtggggaaggccggggatggcagtggaaaaagatttgccatgaagctaaagaagtttccaaggacctaaagtgggcctagcaattttgtacttgcaatttcatatagtttacatccccaaatgtatatggttctactgctcttgagtagcacactttttacttagaagtattgttctcctagcttcaaacatatgttaatattaaatatcagatagtgaatgtatatacagataagaatacaataggcctaaataatgtagactctacatattacacatccaacaggctatttcattctgacctatcactactctttttcccattattgtttcctctattgtttctatgccagccactgttggtgtctacccgatagccatcgtcagctagggcataggcttgtgagccaatcctagacctaagcagaagtcagctggaagcaactgtgaaagctctgtaataaactgagatacacagcagaaaataccacctcttctttgttggacatggtcatgtctgcaaatagcatctggaactcctacatccatcttgcaactataatggaagaaatcaccaatatgctgaggatggctgagtacaaaaatgaaaaacatctgggtactccatgac

SEQ ID NO: 727505 - DNA, 602 bp, Homo sapiens
tgaaagcaacatgttagaaacctctctagtgttttaacagtgcaataacattcaagcatgtgactagcagacttgtcttctggaatggggtctagactagtttgggtgytgttgaactcaggttgcatatggcccaagctgcatgcttgtactggttcatcacggattgaaaaataaaaaattaaaataaataggccgggtgtggtggctcaagcttgtaatcccagcactttgggagacccaggcaggtggatcactttaggtcagcagttcaagacgagcctggtcaacatggtgaaaccccgtctctactaaaaatacaaaaattagctaggtgtggtggcgtgcacctatagtcccagctactcgggaggctgagggaggagaatcacttgaacctgggaggtggaggttgcagtgagccaagatcacatcactgtactccagcctgggtgacagagcaagaccctgtctcaaaaaaaaaaaaaaaaaaaaaaaaaaaaaagataaataaatgaattaaaaaaaaaaaatccctggtggttccccagagaaagttggaaaagcaccaccctagaattcagctgggtaaatataattac

SEQ ID NO: 727506 - DNA, 621 bp, Homo sapiens
aggctggagtgcagtggcacgatctcggctcaccgcaacctctgcctcccgggttcaggcaatttccagctaatttttgtatttttaatggagacgggatttcaccatgttggccaggctgatctcaaactcctgacctcaagtgatccgctgccttcgcctcccaaagtgctgggattataggcgtgagccaccgtgcagggctttgttacccacttctagggcccaagatagggaggactgaatgggtgtccaggggtctgattctaatgctgccgctacctccttctccaggccactcacasgtcagtcataggccagtcacaagacctttacagatgggagcttgatagaggtgacactgacatgccctgaagcattagggcaaagatatgcagagctgaaaagagattggatagctgtcccaaaacaaaactaaactcgactcaggattaatgtatctaaagaaggaatgtgcccaggagtggctggcggagggcaggaagggaagggactttgtcagcctgggagtcacagaaaaagcagttatttatctatttattttttaattaattaatttatttattttttcgagatggagtctcgctctgtagcccaggc

SEQ ID NO: 727507 - DNA, 1084 bp, Homo sapiens
ttacaccagagtaggccacacctaacaaaaaagaaacacagataaatggagaatataatacagaggaacaatcaaggcaggtgatagcagacacttctaggaagaagtaagttttgagctgaattttggaaggcctgctaagagggaaaaagtatttcattaaagaaaggcatgaaaaagacacgaataagagaatcaggtgcatacagtactgataggaattgatgtcccgaggagagaaggtgatttgattcagtgcacaccccactgctcagttcttacataggttcaagcaggtttagagcacttgtggtttactgaacctgtctatattcttggcctgatcttgagcaagattgtgctagaargggaatccttgaaataatactctattatcattatctgagattaaagggtcagaaagaatcctgatttgagaaatttttgttttttaaaactaaacttatttacctgacttcctacaatagacaaatgatctcaaaagagaaacttacttggaatattataatcatagaaaattttctttaattgatttatagacttttttaatacattttaaactggatgccatagaagccatgtcctaaattcttctatagcattacctttaacagcctgcaacttaaccaacagatgttcattgaacgctgactttacaccagacactgtgagcagctcaggggagacaaagatgtataaaatgtggctattaatcatgaggattcagaatccagtgggagaagacaaacaaccagatatgtaattccgtgacaagttctagaaggaaggttgtaaaaatgaatggctgaggtgcactaaagagagagcccctcagtctgcccgggcctgacagggcaacatgaatggtcttgcctgctgggttttgaagtattcaccagatttcaccaggaaaaggatgcagaaagtcttcccaccatggagagagaaggaagaatgacaaagaggtcagtgtgaaagagtgagcattaagtcccatgggttatcacagaatcatactctgcagtcacaattttttcattctgcagcagtttttttaaaaaaa

SEQ ID NO: 727508 - DNA, 1447 bp, Homo sapiens
tatatgttctccatatatatatatgttctccatatatatatatgttctccatatatatatatatatatatatatmtatatatatatatatatatgtctacatcagaaaatttatatgtcagtaaatctgataccataagggtttttctggagatgtcagtcagactgtgccaaaatcaatgtatctttcattcaagttgaaattttggcaaacatggtggaaatcaagaggttcattggaattcaccttctttgtatctcagtttgtagcaggaacatttagaaacattaagaccaaatataaactcctgaaacagcagaaagaaagggaccttaattctatcaacaacaaaatgattgggttgggttcaagaacttcaggaaatcatggtagaacgtctaatctcttcggtttcctgtagattctctggtgctgatgtctgcaagcaaaagtaacttttaaggggacacaaccttagtgggcctcaaaaagttcaggcaaagttcagtatgcagggagtggtaagggggagtgaggaattgggggcgcttcctccctatagcggactcctggcacatgctgctcatgttattatcggtagattacagtatacctacgaaggtatttatttttgttttgtattttttaagtgaagagtgcagtatagcataatagtaaagacacaaatttttagaggcagtcaggcctccagtccatcatccatcattgaccagctgtgtaattttggatcttacttaactttcctgagcctgaatttttttctcttgtgtaaaatgtgaaacaaacaagcaacaaaatcccactcaagacaggtgttgtgatgggtaaaacaagttagaagcagtcatcaaaggtaatttattaatcactgaccatttactaaaagtgagacatttatcttccacattatccctcacagcacctctgtgaggtaaatattatctccatttatgaaattgagacagtgggatttgaaaagattttaatactaacccaaaatcataaagtcagtaaatttcagatcagagattaaagtccagggtcaggtcccattaagaaaaaagaactaaagaacaattccaaactacttcatttagtgcatctctaatcctctttgtgaagctattttcttattcaaagtttccatcattttcaaatatgaaaatattgatgaagtgacattaaaaccttctgtctatttccttcagggctacattcaccttttgcctagggaaagagttcctgccagccattgttctcttctgtaacttttttttgccattcccattgctatttccagaactaagaagttcacccacaaacttggctgagcgctttacttttaatcagcacccagtttacatctaattcccctccactttgaacattccataaattaaatgattgtcataattttccctagcca

SEQ ID NO: 727509 - DNA, 1447 bp, Homo sapiens
tatatgttctccatatatatatatgttctccatatatatatatgttctccatatatatatatatatatatatatatmtatatatatatatatatgtctacatcagaaaatttatatgtcagtaaatctgataccataagggtttttctggagatgtcagtcagactgtgccaaaatcaatgtatctttcattcaagttgaaattttggcaaacatggtggaaatcaagaggttcattggaattcaccttctttgtatctcagtttgtagcaggaacatttagaaacattaagaccaaatataaactcctgaaacagcagaaagaaagggaccttaattctatcaacaacaaaatgattgggttgggttcaagaacttcaggaaatcatggtagaacgtctaatctcttcggtttcctgtagattctctggtgctgatgtctgcaagcaaaagtaacttttaaggggacacaaccttagtgggcctcaaaaagttcaggcaaagttcagtatgcagggagtggtaagggggagtgaggaattgggggcgcttcctccctatagcggactcctggcacatgctgctcatgttattatcggtagattacagtatacctacgaaggtatttatttttgttttgtattttttaagtgaagagtgcagtatagcataatagtaaagacacaaatttttagaggcagtcaggcctccagtccatcatccatcattgaccagctgtgtaattttggatcttacttaactttcctgagcctgaatttttttctcttgtgtaaaatgtgaaacaaacaagcaacaaaatcccactcaagacaggtgttgtgatgggtaaaacaagttagaagcagtcatcaaaggtaatttattaatcactgaccatttactaaaagtgagacatttatcttccacattatccctcacagcacctctgtgaggtaaatattatctccatttatgaaattgagacagtgggatttgaaaagattttaatactaacccaaaatcataaagtcagtaaatttcagatcagagattaaagtccagggtcaggtcccattaagaaaaaagaactaaagaacaattccaaactacttcatttagtgcatctctaatcctctttgtgaagctattttcttattcaaagtttccatcattttcaaatatgaaaatattgatgaagtgacattaaaaccttctgtctatttccttcagggctacattcaccttttgcctagggaaagagttcctgccagccattgttctcttctgtaacttttttttgccattcccattgctatttccagaactaagaagttcacccacaaacttggctgagcgctttacttttaatcagcacccagtttacatctaattcccctccactttgaacattccataaattaaatgattgtcataattttccctagcca

SEQ ID NO: 727510 - DNA, 1447 bp, Homo sapiens
tatatgttctccatatatatatatgttctccatatatatatatgttctccatatatatatatatatatatatatatayatatatatatatatatgtctacatcagaaaatttatatgtcagtaaatctgataccataagggtttttctggagatgtcagtcagactgtgccaaaatcaatgtatctttcattcaagttgaaattttggcaaacatggtggaaatcaagaggttcattggaattcaccttctttgtatctcagtttgtagcaggaacatttagaaacattaagaccaaatataaactcctgaaacagcagaaagaaagggaccttaattctatcaacaacaaaatgattgggttgggttcaagaacttcaggaaatcatggtagaacgtctaatctcttcggtttcctgtagattctctggtgctgatgtctgcaagcaaaagtaacttttaaggggacacaaccttagtgggcctcaaaaagttcaggcaaagttcagtatgcagggagtggtaagggggagtgaggaattgggggcgcttcctccctatagcggactcctggcacatgctgctcatgttattatcggtagattacagtatacctacgaaggtatttatttttgttttgtattttttaagtgaagagtgcagtatagcataatagtaaagacacaaatttttagaggcagtcaggcctccagtccatcatccatcattgaccagctgtgtaattttggatcttacttaactttcctgagcctgaatttttttctcttgtgtaaaatgtgaaacaaacaagcaacaaaatcccactcaagacaggtgttgtgatgggtaaaacaagttagaagcagtcatcaaaggtaatttattaatcactgaccatttactaaaagtgagacatttatcttccacattatccctcacagcacctctgtgaggtaaatattatctccatttatgaaattgagacagtgggatttgaaaagattttaatactaacccaaaatcataaagtcagtaaatttcagatcagagattaaagtccagggtcaggtcccattaagaaaaaagaactaaagaacaattccaaactacttcatttagtgcatctctaatcctctttgtgaagctattttcttattcaaagtttccatcattttcaaatatgaaaatattgatgaagtgacattaaaaccttctgtctatttccttcagggctacattcaccttttgcctagggaaagagttcctgccagccattgttctcttctgtaacttttttttgccattcccattgctatttccagaactaagaagttcacccacaaacttggctgagcgctttacttttaatcagcacccagtttacatctaattcccctccactttgaacattccataaattaaatgattgtcataattttccctagcca

SEQ ID NO: 727511 - DNA, 1447 bp, Homo sapiens
tatatgttctccatatatatatatgttctccatatatatatatgttctccatatatatatatatatatatatatatatatatatatatatatatgtctacatcagaaaatwtatatgtcagtaaatctgataccataagggtttttctggagatgtcagtcagactgtgccaaaatcaatgtatctttcattcaagttgaaattttggcaaacatggtggaaatcaagaggttcattggaattcaccttctttgtatctcagtttgtagcaggaacatttagaaacattaagaccaaatataaactcctgaaacagcagaaagaaagggaccttaattctatcaacaacaaaatgattgggttgggttcaagaacttcaggaaatcatggtagaacgtctaatctcttcggtttcctgtagattctctggtgctgatgtctgcaagcaaaagtaacttttaaggggacacaaccttagtgggcctcaaaaagttcaggcaaagttcagtatgcagggagtggtaagggggagtgaggaattgggggcgcttcctccctatagcggactcctggcacatgctgctcatgttattatcggtagattacagtatacctacgaaggtatttatttttgttttgtattttttaagtgaagagtgcagtatagcataatagtaaagacacaaatttttagaggcagtcaggcctccagtccatcatccatcattgaccagctgtgtaattttggatcttacttaactttcctgagcctgaatttttttctcttgtgtaaaatgtgaaacaaacaagcaacaaaatcccactcaagacaggtgttgtgatgggtaaaacaagttagaagcagtcatcaaaggtaatttattaatcactgaccatttactaaaagtgagacatttatcttccacattatccctcacagcacctctgtgaggtaaatattatctccatttatgaaattgagacagtgggatttgaaaagattttaatactaacccaaaatcataaagtcagtaaatttcagatcagagattaaagtccagggtcaggtcccattaagaaaaaagaactaaagaacaattccaaactacttcatttagtgcatctctaatcctctttgtgaagctattttcttattcaaagtttccatcattttcaaatatgaaaatattgatgaagtgacattaaaaccttctgtctatttccttcagggctacattcaccttttgcctagggaaagagttcctgccagccattgttctcttctgtaacttttttttgccattcccattgctatttccagaactaagaagttcacccacaaacttggctgagcgctttacttttaatcagcacccagtttacatctaattcccctccactttgaacattccataaattaaatgattgtcataattttccctagcca

SEQ ID NO: 727512 - DNA, 1447 bp, Homo sapiens
tatatgttctccatatatatatatgttctccatatatatatatgttctccatatatatatatatatatatatatatatatatatatatatatatgtctacatcagaaaatttatatgtcagtaaatctgataccataagggtttttctggagatgtcagtcagactgtgccaaaatcaatgtatctttcattcaagttgaaattttggcaaacatggtggaaatcaagaggttcattggaattcaccttctttgtatctcagtttgtagcaggaacatttagaaacattaagaccaaatataaactcctgaaacagcagaaagaaakggaccttaattctatcaacaacaaaatgattgggttgggttcaagaacttcaggaaatcatggtagaacgtctaatctcttcggtttcctgtagattctctggtgctgatgtctgcaagcaaaagtaacttttaaggggacacaaccttagtgggcctcaaaaagttcaggcaaagttcagtatgcagggagtggtaagggggagtgaggaattgggggcgcttcctccctatagcggactcctggcacatgctgctcatgttattatcggtagattacagtatacctacgaaggtatttatttttgttttgtattttttaagtgaagagtgcagtatagcataatagtaaagacacaaatttttagaggcagtcaggcctccagtccatcatccatcattgaccagctgtgtaattttggatcttacttaactttcctgagcctgaatttttttctcttgtgtaaaatgtgaaacaaacaagcaacaaaatcccactcaagacaggtgttgtgatgggtaaaacaagttagaagcagtcatcaaaggtaatttattaatcactgaccatttactaaaagtgagacatttatcttccacattatccctcacagcacctctgtgaggtaaatattatctccatttatgaaattgagacagtgggatttgaaaagattttaatactaacccaaaatcataaagtcagtaaatttcagatcagagattaaagtccagggtcaggtcccattaagaaaaaagaactaaagaacaattccaaactacttcatttagtgcatctctaatcctctttgtgaagctattttcttattcaaagtttccatcattttcaaatatgaaaatattgatgaagtgacattaaaaccttctgtctatttccttcagggctacattcaccttttgcctagggaaagagttcctgccagccattgttctcttctgtaacttttttttgccattcccattgctatttccagaactaagaagttcacccacaaacttggctgagcgctttacttttaatcagcacccagtttacatctaattcccctccactttgaacattccataaattaaatgattgtcataattttccctagcca

SEQ ID NO: 727513 - DNA, 560 bp, Homo sapiens
aaaaaaaaaaacaacatggaacatagagacctttggttttagtttaactctaaagttgagatcattttcttcttttactttttaaatgcattttacataaaattggacaagtaatgtaaaaattctgaatcttgtaaaaattcaaaggagtatgaaatacttagcaaaagcatgtagagttaaataaaaattctcctttttttgtttttgttttttatttgagacagagtcttggtctgtaaccaggactgaagtgcacagctgattgcaaccttgaactcctggcctcaagtgrtcctcctgccttggtcacccaaagtgcttggattagaggtatgagccaccatgcctagctctcctgtattttttacaattagcccttatatagtgtttactatgtgccaagaactgtactaagtgcttcacatatttaacttattcaattattacagcaatcttgttagggtagcattattattatccctcttttatatatgaggaaactgaggtacagagggatcaagtaaatgcccaaggcctcatagctgaaaccctaagcg

SEQ ID NO: 727514 - DNA, 769 bp, Homo sapiens
ggttaaacttttctgtattattaatttctaactttatcacaaagaagtgcttacatgttattaacaatgaaattaaacactaaaggataatttttttttttttttttttgagatagagtctggctctgtagcccaggctggagtgcagtggcacgatctcggctcactgcaacttccgcttcccgggttcaagcgattctcctgcctcagcctctcaagtagctgggattacaggtgcccgccactatgcccagctaatgtttgtatttttagtagagacggggtttcgccatgctggccaagctggtctcaaactcctgaccacaggtgatctgcctgtctccccctcccaaagtgctgggattacaggcataagccaccgcacccagccaaggataaaatgttttaaaatatagttttacatgcaaaagagattgagaataaaaaagcaaaagggcaaaaaaagratgaaagaattccaaagtttgaagtcttttatgagtctgattctgcatttaatcttttttcatctaattcttgctcacttaccctcccttttttttccagtgtgtttgtgatttctaactgtgggcgtatactcctggaattttatctgtgagaattcttagagggataggataaggttgcactctcatagggggattttcttttgattcaaaaggcacaaatgaggaccagtgtaactagattcttatcttggactctttagaccattaagagtgtgtgaattcttgctgaaaacacagta

SEQ ID NO: 727515 - DNA, 1140 bp, Homo sapiens
taactcatgggttgtttagaaggattaacagttttttcctaaatgttttaaaagtcatctttttgttgctgatttctaacttaataacattgtgatcagagaatgtgatctgtatgttctgtttctttgaattttgttgagatttgttttgtggcccagtatgatacagtgtccactagatcaaccttgttaattttgctgctcttcaatcaccttaccttattttttctctgcttaatctatcagttactgggagattttttaaagtttaccaccacagaggtagatttgtctatttcttcttttagtactgttaacctttactttatatatttttgaggttgtgttattaggtatagtatgttaatttttgcatttattgttacatctattgatcaaaatgttcaatataggggtcccgtggcaacttagagtgtggatagatctacatgctataagggtggcttggtaatggtgaaagcatccctctgggtgggctgggtaaattggattttcagctccagggaagaaacacccttaaaatcaaaattgcaccttcttgaagagttcttaaatttgacattgccaaacaaaattaacaccctcatatcctcaagtgccagaggcttttgtcgttattgaaaacactcttaaaagctgcattccttctgggatgcatgaggggttgggaaggaaagctttatttttcatgggccttacagacattacttctggttggtcagacatgtttcagacccttggactttcttcttcttactgcctagtattttctatgagacttgagccaaatcctgttacctctctgccttttaggttcaatgactggttcccttttcccctgacagaagtgaggtgtggagaaattgaaataatagttgcatagggattctaaataatttattagttccctcacttgctctgcaggaaacaaaaataaagtctatagaagacagtgttcacgaggatcaagcaacagaaatgatgtcagctattcccccttttattagattttygaatggaatcagactatgtgaagctggaaggcatacagagagacaaattacatttggtcacatatgggtgggaatggaacttttcagtccagctcttgagcctatg

SEQ ID NO: 727516 - DNA, 643 bp, Homo sapiens
atgtgctgttctcctcgcgtacatctggtctccccactggccaggaaactgctcaagggcaatgttaccttaccgttggtttccttagtcctaccccagatgtggcacacagtaagtatttaatgcatgctggctgactcacttcttctgccattgttaccaagctacagaatgttctatagagcacaatgatgtatatagaccatctcattacatagattttaaaaatatttaaggagaaaaggacagtttagagaaatgtagccaaatgcaaacgatgcaaaatgcagcttaatgaggttagtaaaaatccttatcaacccagaaaagtccttgtgaaccttgatttttttktgtgtgtgtttgacattaaaccaaatttagaatttaaaaatatatatttttgtagggattccttgcaggagaagatagaacatgtaataattacagtaacaagtgtattgaatttgattatctcatgaaggaagatgtaccatatactttaaaaaaatgttctcaaggaagatttgattatatcaaaggcataagacctgtgaaatttggccctaagttgaggagtacaaagaagccagccttcacctaaagaaggctcagtctagtgacattgtttatccatttgctt

SEQ ID NO: 727517 - DNA, 2038 bp, Homo sapiens
tgattactatcagatttctgggtgaaattgcgacagtaatttcccaagaggaggaaggaacacagatcttcctctttcttaagtcctggccaagtttcaaactcttgagtgggtaaagaggggctatattagttctcctttcatatttctgccctcaaaaacctagagaatctgtggtgactactggaagaaaattcaatttaaaaacatttatttgaggctgggcgcagtggctcatgcctgtaatccaagtactttgggaggctcaggcaggcggatcacctgaggtcaggagttcgagaccagcctggccaacgtggtgaaaccccatctctaccaaaaatacaaaaaaaattagctgggcatggtggcgggcacctgtaatcccagctacttgggaggctgaggcaggagaattgcctgaacgcgggaggtggaggttgcagtgagctgggatcgcgccactgcactgcagcctgggtgacaagagtgaaactccatctcaaaaaaaaaaaacaacaacatttatttgatacttttttgattagtcagggctcttcactgctgatgaatcatgacaaacttaatgaaagagagaactcattggctcatgtaactgaaaaatccaggggcagaaaaccttcaggcgtggttggatccaggtgcttacaagctatctcattaagaacctgtctcgctccctcttttgagtctgtatttcctccctgttggcttttgttgttgttgtggttgttaacttcagttctcctcttgcggaggcaaggtggccrctagccactcttgctcatatttgtctggttttaacagctccagaagaaagagaaagccttgctttcctattgttccagcaaattttttgggcctggatcttatttctgcaacttgagcatgtgtccctctctgaaccagtcaccagtgccagggagaaactgggctctgattggataagcccaggagcccaagagccttgtgcccagggatgaggttagccttctacaaataacatggactaagagagggggaatgtggcttcccaaaggaaaaatgtcaggaaggccatttctaaaagaagtagaagaggatgctagacatgcctttcctccttccccccaaaaagacacttaggtccccaatatctactctgtgcgatatattattttgggcattatgggaatgacatgataaacacgacatccctcagaaggcttagactagaatcatgtgattatgcaatcgcatacacatgaatttagtaatgaacaacttagtaagtgctataacagaaataatagttaatagctaatatgtattgaatgctttctagatcctaggtactggtctcagtattttacttggtttaacctatttagtctccaaaagaaccaggaaagtagttgctatctctccattttgcagatgaggacgctgaggcacagagaagttggttgaaagtgcttttggaacacaaagttctagcccatcaggatagtgagatctccatgcagagctactgtgtgaagagaacttaacattttagggtagatttcacccgagagggatagggaaacagtctaaattctaggaagaaggaacaatacatgaaggaatggagctgaagaaccgcagatgtttaggaaatggcaagaagtaaagtttgactttaacaccaggcttgcaaaaaagagatggaaggaaagtgatgggaaaaatggttcgctgggacgggttgtaaagcttggctgccgttccaagtccagctggttccacagactgtagaattctttagtaggggagtggctggagcagataaacaaaaaaatcgccagacccctgagtgtttttaggtggggatgttggctttgtatctctgctgtacattcttgggatgttttggaaggtttttgcaaatgtcctgttgggtggcattgaagcggttgtttctttaaatgacttagctctgccttagtgaagatcttgttaaaagcagaccattttctgacattctgttttctgcaac

SEQ ID NO: 727518 - DNA, 628 bp, Homo sapiens
tcatgcctctcgactttaaagtatactattcttttcatttcacagaaaaaccaagatgcagatgccttaagtgaccatacttcatacttaaaagtacacagagaggtgcaaaatagcagaactgaaatgaaaaaaacaaaatgaaaaaaaacagccttccaactctcatttccacctctttacaccatagcacagtagaaactattgtaggtcactatataaacaaaatcaaagcattatcaagaaagataatcccrtgcctataatcccaacacttcgggaagccaaggtgggcggatcacttgaggtcaggagttcgagaccagcctggtcaacatgacaaaacgccaactctactaaaaatacaaaaattagccaggcacggtagcgtgtgcttgtagtcccagctactcgggaggctgaggcaggagaatcgcttgagcccaggaggcggaggttgcagtaagccaagtccaagccactgcactccagcctgggcaacagagcgagactccatctcaaaaacaaagaaagaaagatggattaacccaattctaaattatttagtttaatatcatatcttctttttaacaattttttttttttgtagagatggggtctcataatg

SEQ ID NO: 727519 - DNA, 3020 bp, Homo sapiens
tgctctacatgtggcctcaggataaatataaacacaaaagytgcaattattttgtgccattattttgggaaaaaacccaagactgcgttgtattgtttctaaaggtattttcctgtagggaatctgattattgagtgaatctcttctctgttctgaattgttgagattgccagatgaagttgccttggatacctaagatttttttttttttaattctcctggatttcatcattttgttccaggaaacatgtatttctagattcatacaggcaaagggaagtaacatttattgagagttctcttcatgacaagcacttgacttacattattacattggtccgcacaaaatttctctgggctcaataattcttcctccattctattaaaaaagaaacttattcagggtcactgttcaggctgaattgcgtccttccaaaattcatatgttgaagtcctaatccccatgacctcagaatgtgaccttgtttgaaaatagggtccttacagaggtaatcaagttaaaaccaggtcattaggatggaccctaatcaaatatgactggtgttcttctaggaagtagaaatttggacacagatgatgtgaagacacaggaagaagagccatctataagccaagaagagaggcctggaacagttctttctctcatggctctcgtggtttctcaatgctttgattttggacgtccagtcttgggaactgtgagacaatacctttctattgtttaagtcacccagtctgtggtacttgttaaggcagccctagtaaactaaagcagtcatatagttagtatgtgacaaagatgtattcaaactgaggtctagtacccaagcatatgcatggccttttcagtctcttttctgtgattttgagtgttctggggcagaacgatctggtgaatctcaagttgggcactggtgggacaagggtgttctctgcacttattaataggcagaggagaagccctaccacctaaaagagctttggagaggtgctctggggtctctggttggcacagcttgagctgtgtctggagcaagactggatctattttccttaagcacttctgctcccaccgcgttaaccctcctttttattggctcctccttccctaccccagatggagcgaacaaaagcaagaacttggaaatgggggcaaactgtaatattttgaacagctgcctttaaagacacaagagaataaaagtatgagaaaggcaggcttcattcactaaggagaaaataatcagaagcttgggggcagataaatgtgccctttattttgataagatacagaaactgctcattaaaaaaatcaatgatgatgacacaatgaataaatcatctgacatgtttaacaccctttaaggtcatatgcttttcactcaaatggatctgaagagaaaaatactccattgggcacatctgtctcttaagtagcacacattataaaccaaattggaaggatcagttttaaaagaaataagctttaatctttgcaaatattttaaatgtcttagtagcatgttgcctaaaaagtgagccatctgaatgattatttggtcacaaagtatgagcctacattaaataaagtctcagattaagtgtctccaaggggaagaccatattttataaattatccaagtagatatatttagaaaagtcaacattatatcggaaaaattatatttgtaaatgatatagatatgttcccaagcatacgaatttgtgagagctcactctaataagtctctaagatctaatttaaactgctttattggggcaaagatactcacggcaggaagtgcaaagaaagaaatgccaaggagtgcaaagcctgcagaaagcaatcttcccagccaagttaggggagttttgtctccatagccaatagttgtcaatgtaatctagaaacaaaataaatagaatgtgcagcttaagtacttgagaggaaagttaggacctatgaacaggaggcaagcaacgtttccactaaatcattattcaacaaatcttgttcgtgctttttattactgggctttaattttccatgacgcatgacagaacttctctttgtttaaggaaaggaataacctacatacttgttcctcccttataacacagttttccgtcttttctaagtgtatttaaggaaagagtatttaagtaaggggataaccatcagtgatacagaaatgatagcaccatggatttaggactggatcagtacacaaataataatttatgttaatttaggctgtcccttcgttaccttagcaggcatttcctgaaggtctggtgtgtgcaaggtatgtgttaagatttgtagtggaacaaaaatgagggcatagttcttgtcctaagatatttatggcctaataagagaaacatgccacacatgaataattaaaatgcaaaacaggatgagagaggtattataatggaggtacaaataacctgctatgggaattcaaggaagagattagttattataagcttccggtgttgagggagctttactagggagatgtcatcatacctgggctttgaaagaggggtaacattttgagaagcagaaatgataaagaaggtgatctagggaggagaaagaggtggctagctgcagaacagtgagaacacatagagtagattctgaaaagtatgagttgttcagctggactggggcatggtggatttaaaaaggattagtgactttttcaatttatttttttaatattttatagactactgtgtacaggtctttcagctccttggttaaatttattcctaagtattttaatttttgtagctactgtaaatgggattgctctcttgatttcttttttggaaagtttgttgttaatgtatagaaatgctagtgatttttgtggtgttgattgtgtctcctgtaactgtactgaatttattagttctagcagtttttttctggaatctttagggttttctatatataagattatgttgtcagcaaacagcaaaaa

SEQ ID NO: 727520 - DNA, 642 bp, Homo sapiens
ccatgcccaactaattttgtatttctagtaaagacgatgtttcccatgttggttgagctggtatcgaacttctgacctcaagtgatccaccagccttggcctccyaaagtgctgggattacaggtgtgagtcattgcacctggccagattatgtattcttatagtatatagaaaaataaatagtataaatacatacatttgcatattaatggtgattatctttagggggtaagattccatacaaattttagttatatatatatatatatatatatatatatatatatatatatatctttggtccaaatgatctttaatagccatgtattgcttttgtaatgagaaaaaagagaaccataacttatttaaaaaagaagctatggcctagaaaggttagtacattggccaaggtaatttatttagtcaggggtgggaaaacagaagagaaatgggcaacatttattgagtacctctgatgtatgaggctgtgcgggatgctcagtacacagactttatttcattgtttctccataatagcccttcaaggaggcacagaggttatgagtataaacttcatgtgcaacagcccaggtatttctagttctgtcctttcttagttgtgtgaccttgggcctattaatc

SEQ ID NO: 727521 - DNA, 642 bp, Homo sapiens
ccatgcccaactaattttgtatttctagtaaagacgatgtttcccatgttggttgagctggtatcgaacttctgacctcaagtgatccaccagccttggcctcccaaagtgctgggattacaggtgtgagtcattgcacctggccagattatgtattcttatagtatatagaaaaataaatagtataaatacatacatttgcatattaatggtgattatctttagggggtaagattccrtacaaattttagttatatatatatatatatatatatatatatatatatatatatatctttggtccaaatgatctttaatagccatgtattgcttttgtaatgagaaaaaagagaaccataacttatttaaaaaagaagctatggcctagaaaggttagtacattggccaaggtaatttatttagtcaggggtgggaaaacagaagagaaatgggcaacatttattgagtacctctgatgtatgaggctgtgcgggatgctcagtacacagactttatttcattgtttctccataatagcccttcaaggaggcacagaggttatgagtataaacttcatgtgcaacagcccaggtatttctagttctgtcctttcttagttgtgtgaccttgggcctattaatc

SEQ ID NO: 727522 - DNA, 1390 bp, Homo sapiens
gtattcataatgttgttactgctttttaacaaagtggaggttctttcgtggcaagctaagctatccaaacttaggtaggaattccaacatatattccaaggtaggaatatagaggataaagggctacatcccaaaggatcagaaatggactaggaattatgacaagagcatgtgatctgcagcatcagagtcctcgcttactttctgcacagagttatataaccctctctccactgattagttttattgtgcaggcagagaaaggacaaatatctgaagatggtcctcagcaatcctccaactgctagtgtcacaacacggtcatgtcttggaggccttttgttccttctcctcatcctgtctgtatgatcttggaaaagtcccattacctcttttacacctggaggtgaaatgtttattactaacataataaaaataataatttaaaagaaactaacattttttatacttatagatagcaggcactatgycaagcatttaaatgcattatttcatttaattctcaatgacaatcactactaatattccaattttactgacgaggaaacagccagccagacaagtgaagtaaattgtctaagatcactcaggtaagaaacggcttgcaaattttcttccatccatggctttattaatttaaatggaatgttatgcagaagtgtaaacacaagtctgaaggtatctgcgagagtctccaagactcttcaaaaaattctctggggcctagaagtacagtctgcaaagcactagtctatatgacctctgaggacaattctgcagagcttttagaacagcctgaatcatgtatgcccaatgccaagttctgtataaaagagatgaaacctcaccaaaggcaccagtgctgagctaagcactaaacaaggatggtcttccctgttttcttggccttgttcaagggacagtcacccaaaggcaacagcaaaagccaaccaccttgacctctttctccttccttccctccttcccttccgtctctctctccctgcctctttgaaaggtatcatttagatgtctcacctttggtgtacaaaaaacaaagaggaaacattcattttaagttaacttttgtataaggtgtgagacttaagccaaagtttattttcgtttacctatggcaattggtccaacaccattttttaaaaggctgtgtttcttctattgagctgcctttacatctttgttaaaaaaaaataacaacaacagttgggcatatctgtataattctatttctgaattctcaattctgttccattgttctacgtgtctctctttgccaataccagatagtcttgattattatactgataattcttaaaactgatatactaatgcctcccttttatttttc

SEQ ID NO: 727523 - DNA, 2113 bp, Homo sapiens
gctgaaaataaacctggaagttggatctattgagaaactgtatgtcagcctccaaaatgacatctttttaatgtatttccaaaggtaattttgctttatgtaacatttgccttataatctgtttttaagacttaacctcagcgtaaaatattatttcattctgctaccaaactgagattggtccaagatctttgaagcttatctctctgacctgtacagatgctgtcagcatcctcccatatgctctctgcattcaccactactgtacataccttctaacacaaactgccagcatctgcagctctacctgagggctcccctctggccaccaaggtctgctttgctcatctgtggggcaggccagaaatgctgagaaattagtgaatactagaaacagcccataacaatgactgacaggaagacggcagatgacaggctaactctcaggtgcatatttcacagtgtaccccagagttccctatcgggatgaaggtagagtttcccagagtgataagttgcttgatgaaaccatgtattggctttctttcctcccctttccctttcctagtattttctgggatcccaactaagaaaatttcccttgaatctttgtctcaagaggaagattacttctggaggaatgcaaactacaacacacagagtccttgccccaagcatcagactaaaaacaaaaaaaaaatatcaaaattgggtgaaatgggttcagtcccttcatcatggctttttcttcacatagctagagcaaataagactatggttttatataacctttggtttatataatctgtataacatttcctaacacctatgcctagaaaaaaaaaacctgctgtaggtgtataaaatttgaacctaactaaataaaatcaattctaatttgatacctgataccattttcccataggaaaagtctggaacttacttgggtgttttctgtgcctagggagatacttggacctttcaacaggaacactgctaactattctgtcccttgtatctgaaagtttaaaaattcgtgtttccagtgtgttggtccacaggtatttctttcaaacaactgctggtagaattcacttgcatgaactaatttattttaaattatatgcttagaactttccctggggttagacacctttaaatttgacgygtacattcacacaaaccaaaatagacaaaatagtaaaatcccatattatatgaagaaagtcattactgttattcctaggtatgagaaatctaggattccataaaatttcactctcaagaagataggtatcttcagaattaccttcctagaataaagcttgaggctgaaagacataagaaaccattgcatttttagggcaaacagaaatataatactgtcctataatattattaaatgtcatctcagagactgtggatttttatcgtaaaggaaaaagagatttaagaggtatatttctcagtggtgcttttggccattttcctctaagggtgcattttattgaagattttcctgtggaaatttaagatattaagattgcatgtagaccttcacctcaaagggttgtagtgattttaggctaagtaatattgcctcttattatagttcttaaaaaatatttcattaactggacaccctagttacagtctcgaaaatctgtatactgtatttactaaaagccatctcctcttgttcctggaggagtgtgagtgctctttgtttatgcctcctccatgctgaaacattctgtgtaccaactgatgtgcagtgttcttggcaccctcaagacctgaaatgactggctctggaatatattgtattgatctcgcagtgacatttgtgcctctagcttgttccctggctggggtctgagatagatccacacacagggctgccttaggcttgaggtagtctgttgagtttgtacctctaaacattatttatcatttgattctctttagatgacctgtaattgttaattttcagtttaaaaaataaaataaaataatctgctttgtgtgtttcaggaaaataataaaaacagagtctgaccacattgattttatgtagactctacacctttttttaaggaataattattttatg

SEQ ID NO: 727524 - DNA, 2113 bp, Homo sapiens
gctgaaaataaacctggaagttggatctattgagaaactgtatgtcagcctccaaaatgacatctttttaatgtatttccaaaggtaattttgctttatgtaacatttgccttataatctgtttttaagacttaacctcagcgtaaaatattatttcattctgctaccaaactgagattggtccaagatctttgaagcttatctctctgacctgtacagatgctgtcagcatcctcccatatgctctctgcattcaccactactgtacataccttctaacacaaactgccagcatctgcagctctacctgagggctcccctctggccaccaaggtctgctttgctcatctgtggggcaggccagaaatgctgagaaattagtgaatactagaaacagcccataacaatgactgacaggaagacggcagatgacaggctaactctcaggtgcatatttcacagtgtaccccagagttccctatcgggatgaaggtagagtttcccagagtgataagttgcttgatgaaaccatgtattggctttctttcctcccctttccctttcctagtattttctgggatcccaactaagaaaatttcccttgaatctttgtctcaagaggaagattacttctggaggaatgcaaactacaacacacagagtccttgccccaagcatcagactaaaaacaaaaaaaaaatatcaaaattgggtgaaatgggttcagtcccttcatcatggctttttcttcacatagctagagcaaataagactatggttttatataacctttggtttatataatctgtataacatttcctaacacctatgcctagaaaaaaaaaacctgctgtaggtgtataaaatttgaacctaactaaataaaatcaattctaatttgatacctgataccattttcccataggaaaagtctggaacttacttgggtgttttctgtgcctagggagatacttggacctttcaacaggaacactgctaactattctgtcccttgtatctgaaagtttaaaaattcgtgtttccagtgtgttggtccacaggtatttctttcaaacaactgctggtagaattcacttgcatgaactaatttattttaaattatatgcttagaactttccctggggttagacacctttaaatttgacgcgtacattcacacaaaccaaaatagacaaaatagtaaaatcccatattatatgaagaaagtcattactgttattcctaggtatgagaaatctaggattccataaaatttcactctcaagaagataggtatcttcagaattaccttcctagaataaagcttgaggctgaaagacataagaaaccattgcatttttagggcaaacagaaatataatactgtcctataatattattaaatgtcatctcagagactgtggatttttatcgtaaaggaaaaagagatttaagaggtatatttctcagtggtgcttttggccattttcctctaagggtgcattttattgaagattttcctgtggaaatttaagatattaagattgcatgtagaccttcacctcaaagggttgtagtgattttaggctaagtaatattgcctcttattatagttcttaaaaaatatttcattaactggacaccctagttacagtctcgaaaatctgtatactgtatttactaaaagccatctcctcttgttcctggaggagtgtgagtgctctttgtttatgcctcctccatgctgaaacattctgtgtrccaactgatgtgcagtgttcttggcaccctcaagacctgaaatgactggctctggaatatattgtattgatctcgcagtgacatttgtgcctctagcttgttccctggctggggtctgagatagatccacacacagggctgccttaggcttgaggtagtctgttgagtttgtacctctaaacattatttatcatttgattctctttagatgacctgtaattgttaattttcagtttaaaaaataaaataaaataatctgctttgtgtgtttcaggaaaataataaaaacagagtctgaccacattgattttatgtagactctacacctttttttaaggaataattattttatg

SEQ ID NO: 727525 - DNA, 2113 bp, Homo sapiens
gctgaaaataaacctggaagttggatctattgagaaactgtatgtcagcctccaaaatgacatctttttaatgtatttccaaaggtaattttgctttatgtaacatttgccttataatctgtttttaagacttaacctcagcgtaaaatattatttcattctgctaccaaactgagattggtccaagatctttgaagcttatctctctgacctgtacagatgctgtcagcatcctcccatatgctctctgcattcaccactactgtacataccttctaacacaaactgccagcatctgcagctctacctgagggctcccctctggccaccaaggtctgctttgctcatctgtggggcaggccagaaatgctgagaaattagtgaatactagaaacagcccataacaatgactgacaggaagacggcagatgacaggctaactctcaggtgcatatttcacagtgtaccccagagttccctatcgggatgaaggtagagtttcccagagtgataagttgcttgatgaaaccatgtattggctttctttcctcccctttccctttcctagtattttctgggatcccaactaagaaaatttcccttgaatctttgtctcaagaggaagattacttctggaggaatgcaaactacaacacacagagtccttgccccaagcatcagactaaaaacaaaaaaaaaatatcaaaattgggtgaaatgggttcagtcccttcatcatggctttttcttcacatagctagagcaaataagactatggttttatataacctttggtttatataatctgtataacatttcctaacacctatgcctagaaaaaaaaaacctgctgtaggtgtataaaatttgaacctaactaaataaaatcaattctaatttgatacctgataccattttcccataggaaaagtctggaacttacttgggtgttttctgtgcctagggagatacttggacctttcaacaggaacactgctaactattctgtcccttgtatctgaaagtttaaaaattcgtgtttccagtgtgttggtccacaggtatttctttcaaacaactgctggtagaattcacttgcatgaactaatttattttaaattatatgcttagaactttccctggggttagacacctttaaatttgacgcgtacattcacacaaaccaaaatagacaaaatagtaaaatcccatattatatgaagaaagtcattactgttattcctaggtatgagaaatctaggattccataaaatttcactctcaagaagataggtatcttcagaattaccttcctagaataaagcttgaggctgaaagacataagaaaccattgcatttttagggcaaacagaaatataatactgtcctataatattattaaatgtcatctcagagactgtggatttttatcgtaaaggaaaaagagatttaagaggtatatttctcagtggtgcttttggccattttcctctaagggtgcattttattgaagattttcctgtggaaatttaagatattaagattgcatgtagaccttcacctcaaagggttgtagtgattttaggctaagtaatattgcctcttattatagttcttaaaaaatatttcattaactggacaccctagttacagtctcgaaaatctgtatactgtatttactaaaagccatctcctcttgttcctggaggagtgtgagtgctctttgtttatgcctcctccatgctgaaacattctgtgtaccaactgatgtgcagtgttcttggcaccctcaagacctgaaatgactggctctggaatatattgtattgatctcgcagtgacayttgtgcctctagcttgttccctggctggggtctgagatagatccacacacagggctgccttaggcttgaggtagtctgttgagtttgtacctctaaacattatttatcatttgattctctttagatgacctgtaattgttaattttcagtttaaaaaataaaataaaataatctgctttgtgtgtttcaggaaaataataaaaacagagtctgaccacattgattttatgtagactctacacctttttttaaggaataattattttatg

SEQ ID NO: 727526 - DNA, 945 bp, Homo sapiens
tgcatgtctagtgattaaagtttagtcctcccaggccgggcatggtggctcacacctgtaatcccagcactttgggaggccaaggcgggtggatcacctgaggtcgggagttcgagaccagcctgaccaacatggtgaaaccccgtctctattaaaactacaaaattagctgggtgtggtggcacatgtctgtaatcccaggtactcaggaggctgaggcaggagaattgattgaacccaggaggcagaggttgcggtgagccgagattgtgccattgcactccagcctgggcaacaagagcaaaactccttctcaaaaaacaaaacaaaaaaaagtttagtcctccctagaggaagctgtacttgataacacctcataagaaatctctcaaacctatggtcatttatatgaaatctcacagaaaaagtgttttggactatttaagaaagatggcctgaaaattaatgtaaatatgctggcaaaatgaatggaaaattgttccaacttcaaattccaccggaactcagatggggtctttctgaaagtttacagggcaaaactttcctttatcctatgaaaaatgtttgtcatattttaaaaatatagacttttattcacaaactttggccaaattttgttgtatattgacactatgtatatagttaaacattttggccaaagctaaaatgttcagcatatagctaacttggttgcagttgtagccctttggagataaatgaacattttgcactggttaaaaaaaaaaaagtggaaaaaagcatgayttttcctaccaactgggtaaaagtttaatatactcatttgctcatcagtgattaaacatctgcatatgtgtgtgtacacacacatatgatctttaattaaaagctgcttttaatccaggtagagttcaaaaacaaaattaaacattgtggaggatgatg

SEQ ID NO: 727527 - DNA, 664 bp, Homo sapiens
tcgttgtataccctattttatttagtatgctgattgaaggtctgtgaagatttctaggaccagcttgtcaagccacatgccttcagtcaagttgttttaccaagtgttcgctaatagttaaatataataagactcttgcaaccctatcctatttgctgcctctgtggcattgaatcctgactgacctatttttagaaaatccatcttcctttggattccaagatactatttttgcagttttccacttcgcactgtgagtattccctctcattcacctctaattttactcctrtttaccccttaaatcttcatcttccatcttcttcacagttttactactctgagtgattttattcatgctcatggctttgtatatggttataatatgaaaccctaaagctgtatcttgaaaaagtggcctagaccacttttctgggccacgagaaccatatgtcccatcccactcttggcatatagactcctcttttaatgtaattagtattctgaacttattcaacgtgagttatcttaacttcattttcccaatcttgaagtttctgataattaaaaaatatattggcaatggacacagacttgtttgatgtttttataatcatcacacactagttatacaacccaaagcaaattatttaacctactttta

SEQ ID NO: 727528 - DNA, 612 bp, Homo sapiens
  misc_feature 499: n = A,T,C or G
atggctaggcaagctggtttcctactgaccaattgattgtgggcatatttctagaactctacagtttctgtgacagccccaagtttccttctctctagaatggaaataactatgttctgaaaatccaaagagacaatgtatataaattgcctggcataaaataatgttaaatattatcatcacaagcaagtagaagccaggtacagttgctcacacctgtaattctaggactctgggaggccaaggcaggaggattgcttgagcccaggagtttgagacctggataatatagtgagaccccatgccaaccaaaaaaaawtttttttttaattagccagatgtggtggcatgagcctgtagtcccaggtacttgggggtgtgaggtgggaggatcgcttgagctgtggaggttgaggctgcagtgagccgtgatcatgccactgcactccagtatgggcagcagagcaagaccctgtcttaaataaaaaaatataataanttaaaaaaagcaaatagatatgggttttttaaatggcatctgggatgagactgacagttattttgtccttgtgcctaagttcttccttcagcaagtagataggcacgtgcagc

SEQ ID NO: 727529 - DNA, 1868 bp, Homo sapiens
ctcccctcccctycccttcttttcttttctttctgacataatcttgctctgtcttccagcctggagtgcagtggcgccaagtttgctcactgcaaccttcgcctcccaggttcaagcaattctcgtgcctcagcctccctagtagctgggattacaggcacgtgccaccatacctggctagtttttgtatttttggtagtgacagggttttaccatgttgtccaggctgatctcgaactcctgacctccagtgttccacccaccttggcctcccagagtgctgggttacaggtgtgaaccactgcacctagcaaataaatttcttaataactgctctttgtggataagtctgtatttatttgtgtgatcatctttttgtttaaatggctgccaaattattatgcatttggaagactaaagtaattaccatgttttaaaattaggtctaatacagtgaacaagaataatactaattgctgtttattgaaagctttctgtgcagagttaagtgctgtacatgtaatttctatttctcttattatgatagttgtacaacttcttgttttatgaaatagaatttcataattgagaggaaatcgattgaggaaatacaatttgtgtgcccagggtcacacaaatacaaagttgttaagatttgaacataagcctctgtcttgacaacttttcttctgaccatattgtgatgtcttgacttaaagaaaatctgagatcttgtgtttcttctgccgttaactagcttacaactagggcaagttggatggcttctctaaatgcatatatttttgttataaaatggacataataatcattaacttttcagttttctgtcattccctacaggttctgtcaaaccctactaagaagtttttagcattagtttttaattagcagccattgttttagttccttttttttgggtgccagtttctgattttaagtatttgaggaaaatatgatttttttggtaaactgccttgtcatagtaattaaaatgagaggttctttttaaactttgctgttggccttttgggcccttgtattttatcagaaagtatatgttgcgttctagtcaagctgactgttctaggatagtttttataaattcagtcattttgtgatttattagactttaaaatgttacttgtgaaactgtatattttgtttccataaaatcatggatttgacagctattgatgaaatgaaaatatatgaattttggcagataactgaaggacttttatttgtagttaggggtactggacagatttctagagagtggacaaaaagctaacactgttttccttccttattacaagactcatcaatagtcttagactacctctttaggtaccttgtccactctaccacacctgccctttcacagaacacctaatcaaacataaacctacttctttatattctgtgaaagcaatgctttcattgttttttaaaatcttcagcaattttgaactattagcatttgccatatttctgtgcttgctatttacttatcctagagtgagatctcttctgagttattgggtatgtaaattctaagtatttggcaaaaatgcttgctatttacttatcctagagtgagatctcttttgagttattgggtatgtaaattctaagtatttggtaaaactcacctgtacagccccccgactcttctatctacgtagtttgaaacacactttctcttacaaagttggttaggttctttaggtcagaaacaaattatataatatcttgataatagtgatttgctattggttattgatgatctcctgggtatcaggcagtgtggcttaaacacattatttgagatatttccagcaaatctg

SEQ ID NO: 727530 - DNA, 1586 bp, Homo sapiens
tgcatacaagaattattgactgaattttcaattgacttctgcaaaactacaactgtaatcatcaccttcttacatcttttcatttttcatttgcttctttcgctttttaatatttgttagtgtgttactttcctcttgtcacctatgtgagctagattctacatctgtctttgtctctgccaaacagatgtcaaattctgtccgtctttaatagaattgactcacaaattccgttgatcctttcatgtcattctcatggtcgatatcctattttaggccttcattaatgctatgtactgaattgtgttcccccaaaattcgtatgttgaaactctaacccccagtgtgattatatctggagatgaggcctatagaaggtaattaaggttaaatgaggtcataagattagggtctgatatgataggattaatgttcttataagaagaaacatgagagagctcacttgccttctttcctcctccactcttgtgtgcacaaaaaaaaaagagatcatgtgaacacacagggagattgtggctgcctgcaagccagggagaatgaccacaccagaaaccaaccatgttggcattttgatctcagactcccagcctccagaattatgagaaaatgaatgtctgccacttaggccacccagcctgtggtgctttgttatggcagccctaagtaagacaattaccttttgcatagagcttaactactgagattgtaattaggcctctttataccaatctatttaggatattgggatcagatattccaaggcacagcactgactatgttactcttctactcatatgtgcttattatattctcattttcatatgatatagtaatgatagtgaataaatcattgattattacatgccatgcatgaagcactcaacttgcatcatgacatttaatattcataattatatgacatatgcaatatacttaaccctccatttgcagatattatgtaatttgcctrataccacaggactaactaatgatagatccagaatataaactcaggcttttctaatccaaaggtcacaatttaagcactaattgcatatagtttttcttgacttggcattcaagggatgggaaaactcaatagaagactcttgcaatagcccagataacgtgtagatagttagcagagggaatgaacagtagtgaacaaaacccaaagacacatcacaggcaaaaatcaattgggtctggaaatacatttaagttatggaatataacgtggtctaccacaattttaatgaaaatttaaacttcataagaacttacaagtgtatatttatttgatttgtcaaatatatcaagtagtatgttatctttttaagaaattataaagccatactttatatgatagataccctgatttctttaagattcatctaaaaaatgtgactgtgtgttttttaaatatctaccctcactttaccctttctttgttataagtaagcacctaccacttttggttttatttaattagtattttaatgtttagaagatttgcttttctagttaggtagttagaataattattcatctactttccattgaat

SEQ ID NO: 727531 - DNA, 1274 bp, Homo sapiens
tccctgtcacataaaaatccacaaactctataactgcaaacacataacttgccaatgctacaagtataaggctgctgttttttaaactttattctagaatttatcaataatattgttgtaccataaaatttaactcaagacagcatttcttagaatttgagcaatatatgtgctttttagtggacatggtttacagagatattccattctatttactcaatatgttcctctgctttccaggcctaaattctagatgcaatgttattaacaacttcataaaaaactctcaagagtggaaatgacatttgtgattgaaacataaacgagaaggtttatgattacatggtgacaaatatagcttataattgagctctgactacttctattttctttcttttttacagacatgtagaaagattctaaacatatcattctggaaaatccatttgtaaaattaaaatggctaaatgtcttctaattaggtacaattatcataagttaaattgttttctgwcatctgagaaaaaatactcttgggtaaaactcagatcccaaaccttaaaagtaattttaaagtacctttatgaagagcaattataatgtaagtttagaccatactagtgtgtcaagttcttcttacatcttttcatatccgtcccaaattcatttctgaccacaagttattatcagggataaaaaagcttgtgaattttaacgtatcattttaacctggcctatattttaaagcttcttggagggaacaagattagaaaacaatatcagaagactagaaaaagagaaaagcatacaaaatttcttactgttacaattttcttaaacataatttgaacattctatcacttcagaatgaataagtcataaagatggactaatttgataaatccacacaatacatctcttttgggagttaggcaaagctagtgaaagcactactaaattcttaactagaattaataaatatgttttgaattaataatgacatgaaaagtgttaaccctctggaaatataccataaaccagaacataataatatgctaggaaatagatttccaaatgacattcagtaataaacaaccagtagagtttgggtttagcttagaatgactgaacagtttcagactggccaccctaatgaatgaaggtgcagaaaattcttattgtttttatgtaatgcataagactgtgcatagacatgaaatgtctgctcataagttcctgctacatttctagattttttgaaaatatattaattc

SEQ ID NO: 727532 - DNA, 1274 bp, Homo sapiens
tccctgtcacataaaaatccacaaactctataactgcaaacacataacttgccaatgctacaagtataaggctgctgttttttaaactttattctagaatttatcaataatattgttgtaccataaaatttaactcaagacagcatttcttagaatttgagcaatatatgtgctttttagtggacatggtttacagagatattccattctatttactcaatatgttcctctgctttccaggcctaaattctagatgcaatgttattaacaacttcataaaaaactctcaagagtggaaatgacatttgtgattgaaacataaacgagaaggtttatgattacatggtgacaaatatagcttataattgagctctgactacttctattttctttcttttttacagacatgtagaaagattctaaacatatcattctggaaaatccatttgtaaaattaaaatggctaaatgtcttctaattaggtacaattatcataagttaaattgttttctgtcatctgagaaaaaatactcttgggtaaaactcagatcccaaaccttaaaagtaattttaaagtacctttatgaagagcaattataatgtaagtttagaccatactagtgtgtcaagttcttcttacatcttttcatatccgtcccaaattcatttctgaccacaagttattatcagggataaaaaagcttgtgaattttaacgtatcattttaacctggcctatattttaaagcttcttggagggaacaagattagaaaacaatatcagaagactagaaaaagagaaaagyatacaaaatttcttactgttacaattttcttaaacataatttgaacattctatcacttcagaatgaataagtcataaagatggactaatttgataaatccacacaatacatctcttttgggagttaggcaaagctagtgaaagcactactaaattcttaactagaattaataaatatgttttgaattaataatgacatgaaaagtgttaaccctctggaaatataccataaaccagaacataataatatgctaggaaatagatttccaaatgacattcagtaataaacaaccagtagagtttgggtttagcttagaatgactgaacagtttcagactggccaccctaatgaatgaaggtgcagaaaattcttattgtttttatgtaatgcataagactgtgcatagacatgaaatgtctgctcataagttcctgctacatttctagattttttgaaaatatattaattc

SEQ ID NO: 727533 - DNA, 1357 bp, Homo sapiens
  misc_feature 1346, 1351: n = A,T,C or G
tatgtagggaagtttggagattccatctgagtagactttaatctctccctcatacaaccatcagtaataataatactttatattcaaagtgttttcacattcattagctcatttgatcctggcagctgcccactgaaggaaatacaggtggcattatcctcattttgcaaattgtgcaactgaggctcacagaggtgaagtagggaagatggttggaaagggggcccttcggactccaagagctgtggtcgttctgtccctttgtgctgctccccttccaccagccccactactctcatcatcatcaaagctgggttatgagccatgtagatcattcaggcagacatgacctttctgcacccaggttctcagagaacaacccagaatgaaagaagtgagcacgttctattttgtttagcagtcaaagatgtaactagggccgggcgcggtggctcatgcctgtaatcccagcactttgggaggccaaggcgggcggatcacctgaggtcgggagtttgagaccagcctgaccaacatggagaaaccctatctctactaaaaatacaaaattagctgggcgtggtggggtgtgcctgtaatcccaactactcgggaggctgaaggcaggagaatcacttgaacctgggaggcggaggttgcagtgagccaagatcgcaccattgcactctagcctgggcaacaagagcgagacgccatttcaaaaaaaaaaaaaaaaaaaaaagcatgtaactagactgagtgagaagctatgtaacagttaagcctcactgaagatgggcaggttcaggatctgtcaaggaagatttgctggggtgggtggggctgagggttggccagtccagatatttggggcaactaggagaaggtgggaacagccaggcaatgggcagagaagggagttggaggtagagcaggaacaggaagcagaggagggtcaggggccacttaaaaggagggacagagggaagttcctgttgttagaataaatcactgtggtctgccagagtgcgtgagaaggtgytctcatgttcatagctggatggaggcctgcctgaaggaggagcttccttccccggtggagctggaggagagccttcggaatggagtgctgctggccaagctaggccactgttttgcaccctccgtggttcccttgaagaagatctacgatgtggagcagctgcggtaccaggtgggaggattggaccccaccttctaccttcgtcccctcaaactatgctttctcctcaaagctgtgagggtagagtgaccatataacttattgtccaaatctggataaaagggagtgttattaatctatgttntctgnctggta

SEQ ID NO: 727534 - DNA, 1357 bp, Homo sapiens
  misc_feature 1346, 1351: n = A,T,C or G
tatgtagggaagtttggagattccatctgagtagactttaatctctccctcatacaaccatcagtaataataatactttatattcaaagtgttttcacattcattagctcatttgatcctggcagctgcccactgaaggaaatacaggtggcattatcctcattttgcaaattgtgcaactgaggctcacagaggtgaagtagggaagatggttggaaagggggcccttcggactccaagagctgtggtcgttctgtccctttgtgctgctccccttccaccagccccactactctcatcatcatcaaagctgggttatgagccatgtagatcattcaggcagacatgacctttctgcacccaggttctcagagaacaacccagaatgaaagaagtgagcacgttctattttgtttagcagtcaaagatgtaactagggccgggcgcggtggctcatgcctgtaatcccagcactttgggaggccaaggcgggcggatcacctgaggtcgggagtttgagaccagcctgaccaacatggagaaaccctatctctactaaaaatacaaaattagctgggcgtggtggggtgtgcctgtaatcccaactactcgggaggctgaaggcaggagaatcacttgaacctgggaggcggaggttgcagtgagccaagatcgcaccattgcactctagcctgggcaacaagagcgagacgccatttcaaaaaaaaaaaaaaaaaaaaaagcatgtaactagactgagtgagaagctatgtaacagttaagcctcactgaagatgggcaggttcaggatctgtcaaggaagatttgctggggtgggtggggctgagggttggccagtccagatatttggggcaactaggagaaggtgggaacagccaggcaatgggcagagaagggagttggaggtagagcaggaacaggaagcagaggagggtcaggggccacttaaaaggagggacagagggaagttcctgttgttagaataaatcactgtggtctgccagagtgcgtgagaaggtgttctcatgttcatagctggatggaggcctgcctgaaggaggagcttccttccccggtggagctggaggagagccttcggaatggagtgctgctggccaagctrggccactgttttgcaccctccgtggttcccttgaagaagatctacgatgtggagcagctgcggtaccaggtgggaggattggaccccaccttctaccttcgtcccctcaaactatgctttctcctcaaagctgtgagggtagagtgaccatataacttattgtccaaatctggataaaagggagtgttattaatctatgttntctgnctggta

SEQ ID NO: 727535 - DNA, 1357 bp, Homo sapiens
  misc_feature 1346, 1351: n = A,T,C or G
tatgtagggaagtttggagattccatctgagtagactttaatctctccctcatacaaccatcagtaataataatactttatattcaaagtgttttcacattcattagctcatttgatcctggcagctgcccactgaaggaaatacaggtggcattatcctcattttgcaaattgtgcaactgaggctcacagaggtgaagtagggaagatggttggaaagggggcccttcggactccaagagctgtggtcgttctgtccctttgtgctgctccccttccaccagccccactactctcatcatcatcaaagctgggttatgagccatgtagatcattcaggcagacatgacctttctgcacccaggttctcagagaacaacccagaatgaaagaagtgagcacgttctattttgtttagcagtcaaagatgtaactagggccgggcgcggtggctcatgcctgtaatcccagcactttgggaggccaaggcgggcggatcacctgaggtcgggagtttgagaccagcctgaccaacatggagaaaccctatctctactaaaaatacaaaattagctgggcgtggtggggtgtgcctgtaatcccaactactcgggaggctgaaggcaggagaatcacttgaacctgggaggcggaggttgcagtgagccaagatcgcaccattgcactctagcctgggcaacaagagcgagacgccatttcaaaaaaaaaaaaaaaaaaaaaagcatgtaactagactgagtgagaagctatgtaacagttaagcctcactgaagatgggcaggttcaggatctgtcaaggaagatttgctggggtgggtggggctgagggttggccagtccagatatttggggcaactaggagaaggtgggaacagccaggcaatgggcagagaagggagttggaggtagagcaggaacaggaagcagaggagggtcaggggccacttaaaaggagggacagagggaagttcctgttgttagaataaatcactgtggtctgccagagtgcgtgagaaggtgttctcatgttcatagctggatggaggcctgcctgaaggaggagcttccttccccggtggagctggaggagagccttcggaatggagtgctgctggccaagctaggccactgttttgcaccctccgtggttccsttgaagaagatctacgatgtggagcagctgcggtaccaggtgggaggattggaccccaccttctaccttcgtcccctcaaactatgctttctcctcaaagctgtgagggtagagtgaccatataacttattgtccaaatctggataaaagggagtgttattaatctatgttntctgnctggta

SEQ ID NO: 727536 - DNA, 1357 bp, Homo sapiens
  misc_feature 1346, 1351: n = A,T,C or G
tatgtagggaagtttggagattccatctgagtagactttaatctctccctcatacaaccatcagtaataataatactttatattcaaagtgttttcacattcattagctcatttgatcctggcagctgcccactgaaggaaatacaggtggcattatcctcattttgcaaattgtgcaactgaggctcacagaggtgaagtagggaagatggttggaaagggggcccttcggactccaagagctgtggtcgttctgtccctttgtgctgctccccttccaccagccccactactctcatcatcatcaaagctgggttatgagccatgtagatcattcaggcagacatgacctttctgcacccaggttctcagagaacaacccagaatgaaagaagtgagcacgttctattttgtttagcagtcaaagatgtaactagggccgggcgcggtggctcatgcctgtaatcccagcactttgggaggccaaggcgggcggatcacctgaggtcgggagtttgagaccagcctgaccaacatggagaaaccctatctctactaaaaatacaaaattagctgggcgtggtggggtgtgcctgtaatcccaactactcgggaggctgaaggcaggagaatcacttgaacctgggaggcggaggttgcagtgagccaagatcgcaccattgcactctagcctgggcaacaagagcgagacgccatttcaaaaaaaaaaaaaaaaaaaaaagcatgtaactagactgagtgagaagctatgtaacagttaagcctcactgaagatgggcaggttcaggatctgtcaaggaagatttgctggggtgggtggggctgagggttggccagtccagatatttggggcaactaggagaaggtgggaacagccaggcaatgggcagagaagggagttggaggtagagcaggaacaggaagcagaggagggtcaggggccacttaaaaggagggacagagggaagttcctgttgttagaataaatcactgtggtctgccagagtgcgtgagaaggtgttctcatgttcatagctggatggaggcctgcctgaaggaggagcttccttccccggtggagctggaggagagccttcggaatggagtgctgctggccaagctaggccactgttttgcaccctccgtggttcccttgaagaagatctacgatgtggagcagctgcggtaccaggtgggaggattggaccccaccttctaccttcgtcccctcaaactatgctttctcctcaragctgtgagggtagagtgaccatataacttattgtccaaatctggataaaagggagtgttattaatctatgttntctgnctggta

SEQ ID NO: 727537 - DNA, 1357 bp, Homo sapiens
ttaaacagtaaattattgttaatatcaactccaacattcagctggcataatggacacattttcctttccaatggacccaacaatggttccaaaattcctatctagctgaaataaacagaaaaaggatttgtcaaagtatatttaaatttaatttcttgcaccagaatagaaagtaaaaatctaaaaagcctgtatcattttttgaagagacacaccattaacatggacaaataataacaaggtaactatccattccccgcaatatattttttaaaactatcctgatattctgacgccagtgtagtgtaaaaagggagcgaaagcatccctgtattctgtttttaatattctaaagcagactgtattctaactttcaagtgtacgagatgatgattcacttttacaaataaagccatttgtgttagccataaaaacattctgccaagatacttgtgagtatttagcccattttggttggaagggtgacaaggtaggtctcatgtacagaagttcatctctttctgactcttgcgtgttaatcacacagccaatttttgtaataatggatagagcaatggaaacaaagacaaagtcatagtaattccttgaaatattatatatttgcctagtgctttacatagtgatttcaaaattctggctgacttgatactcattgaataattctgtgggtagagtaagataaatgttattattattctccctgtaatacacttgagggagctcagattcaaagacattaagtaataagaataataatacctaagattcactgaactttcgctaggtatctggaattaatttcttacaaaggtattttcaataactttgtatttccattatcctcatttaacagatggagaaattgaatccgtagaagcttgaacacctcgcccaaagtcccatagctaatgagtcacagggtcaggattagaatgtggctttcttctcactccaaattcaggaaacacttttgctctcctgcccaagatgacacaaatagaaagcrgcagatcccagcaagggctccaacacagacatttccacccgtattttacctctctgaaattgggacacatcttgcaatcactatctcataccctagctggctctgcctgtacatgcagtcgtccgttgctattctggtgcaagactaaaccacctgcacacttcaatgcttgggccaatagaccacttgagaaccatttcaggaaataataagagtattggttgttgcctgaaaaactttccactaacactttctggtaagacaaagaagagatggctaggtgtgatggctcacacctgtaatcccaggactttgggaggccgaggtggg

SEQ ID NO: 727538 - DNA, 1357 bp, Homo sapiens
ttaaacagtaaattattgttaatatcaactccaacattcagctggcataatggacacattttcctttccaatggacccaacaatggttccaaaattcctatctagctgaaataaacagaaaaaggatttgtcaaagtatatttaaatttaatttcttgcaccagaatagaaagtaaaaatctaaaaagcctgtatcattttttgaagagacacaccattaacatggacaaataataacaaggtaactatccattccccgcaatatattttttaaaactatcctgatattctgacgccagtgtagtgtaaaaagggagcgaaagcatccctgtattctgtttttaatattctaaagcagactgtattctaactttcaagtgtacgagatgatgattcacttttacaaataaagccatttgtgttagccataaaaacattctgccaagatacttgtgagtatttagcccattttggttggaagggtgacaaggtaggtctcatgtacagaagttcatctctttctgactcttgcgtgttaatcacacagccaatttttgtaataatggatagagcaatggaaacaaagacaaagtcatagtaattccttgaaatattatatatttgcctagtgctttacatagtgatttcaaaattctggctgacttgatactcattgaataattctgtgggtagagtaagataaatgttattattattctccctgtaatacacttgagggagctcagattcaaagacattaagtaataagaataataatacctaagattcactgaactttcgctaggtatctggaattaatttcttacaaaggtattttcaataactttgtatttccattatcctcatttaacagatggagaaattgaatccgtagaagcttgaacacctcgcccaaagtcccatagctaatgagtcacagggtcaggattagaatgtggctttcttctcactccaaattcaggaaacacttttgctctcctgcccaagatgacacaaatagaaagcagcagatcccagcaagggctccaacacagacatttccacccgtattttacctctctgaaattgggacacatcttgcaatcactatctcataccctagctggctctgcctgtacatgcagtcgtccgttgctattctggtgcaagactaaaccacctgcacacttcaatgctygggccaatagaccacttgagaaccatttcaggaaataataagagtattggttgttgcctgaaaaactttccactaacactttctggtaagacaaagaagagatggctaggtgtgatggctcacacctgtaatcccaggactttgggaggccgaggtggg

SEQ ID NO: 727539 - DNA, 3030 bp, Homo sapiens
taggctattttggaaagggtcctaggacaaataaaaagaaaacatataaacttgccattggatttgttccccataaataatcccaacagagaaaattgacctggtggcctgggatccacgcatctgctacattgatatcattgtttttatataccattattctagtttctaaatcattcattcatcaacaggtagtaagttttgactaagtgtcaggttatgtgatactctttgtggttaaaaaagacagcttggctgtccttactttcacttcccttgatatcaatctctaccacaataaagtagagacaagccttagagtattcagaaagttctttttctagattatatatatattaatgaagttgtaggcatggtaagagctccacagagtgagtcagatcctcaactgacacaaacacccatcataatgaggcagattatctgcttcacaaaacactcatcataggacacaagcagacttggaacctacgagaaggaaggttttgattttacatctctgccctgtgaatttaccttaaagaaagcctttgtgcatattattttagggttgagtgctatggattctgttgcttgggattatagatacactaatataggtaaactacgcttaaaaattcctactatggctgggcacggtggctcacgcctgtaatcccagcactttgggaggctgaggcggactgatcacaaggtcaggagatcgagaccatcctggctaacacggtgaaaccccgtctctactaacaatacaaaaaaaaattaactggccatggtggcggacacctgtagtcccagctactcgggaggctgaggcaggagaatggcgtgaaccgggaaggtggagcttgcagtgagccaagatcatgccactgccctccagcctgggcgacagtgcaagactctgtctcaaaaaaaaaaaaaaaatatatatatatatatatatatatattcctactacaccttcagtgaaaataatttataaactgaccattgagtttccccaccatagatattaccagcaagcatatgaaatgtgtctgctcaaagatgaactattttctcgtctttcttctgctgtggacctgaaaccatctcatttgtcattttgtagttggcagatatggctatccatcttattttattgaaactggcggtgatgataacttgcctgagaaaacaattttagtttccctgcagcatgatgtaaatcgattggtgtgcaatgtatcagaccttgtagcctaattgagttcagacaatatatcttcattttcccctggcagcatcgttagttcttaagttgctgctcaagttctgtgagctctgaattgtatcatgggtttttgtcagagtgtccgatacagccctgggggttcctaaggaatgctgtggggctgctgagtagacactccccacagtgggaaatgtcacccctgctgctacatatgccaggggcagaagtttctacagcatttcccaaagtattgtgttccaatgaatatgaagtcttgggtttatgccagtagctatgaggcttcagccagagaccatcctgggggctctgtatgataagtttacaaaccaagagcacccatgtattcaagcactactagattcttatatccaacaacaacaacaaaacagttattgggaacctactgtgggccaggcaatttgttctgagaatggatagataagacaaagcctctgctcataggaagcttatactttgcaaaaggacagatatgaacacaaattactactttggrgatactactaacagttgcacctgagttggttcattctgctcatgcaagttaactgttcagtgaacagatttggctttccacgaacttccttaatataaatcatgatagcttctcttaaaacagtgcagagtaggcagggagaggaagagttaaggcctagcaagagacctgcctgctaaacagtggggccctgcaggagagagagagacagagcaaaggtggcacaagaaagagggtctgaagaaggcaaattcgggcagggactactgtggaggtttccagtgagagaagcagagtacagaagaaggtaatcaagaacatatcctgtgctctggatctacacgtgggccatcatcatctacacagcagatgagggcaagctaggagaatctagagataggaggatgtgtttgcagcatcagcagctactgtagtcatctgcacattagatgataacaaaaacttgggtggcaaaatagaagaaatgaaggaagaagaagacttgtagcaccaataaactttttagaacatttttgaaccaagtttactggaagacttgacagcagaaaaataaatgtcacactgtctcactttaaaatcatgttatatatgaccattagctcattatgttgcattatcacttttattttatttggtgatatttgaacttgaattattattcaaaatgatctgaatctcatattatggtacaaaattgtagctcagtaaagcaaggagatataggacttatatcttctatgtaatgtaatcttagcatttcaacatttggcacagtaccttgcagatggtcaactctcaatctcaatttatgtcattgaattaaacagcatcaaatagaatgaaaaagagttaagcagaattccatcaacggtctaaagggtaatatttgcacattatttttataaatttgttttaagtatctaggaaaaagatgaatggaagttgttgatgcaaagtttgggtttattatggtgtccaaatttaatttccaccaaaagtggagtcatatgttaattatttctagttgtgaggccacttactagacagccctgggtcatcaacaagtcatctctttcggggggcttttctcttgcttagtctaaagacacatgtagcttcatatatactcattagcattcttttatgaaacctctttcagaaaagaaagccatttttatactgatgacaagctgtggttgtaattttttcttttcca

SEQ ID NO: 727540 - DNA, 2148 bp, Homo sapiens
aatggccctggaaatcgtgtcaaccattgaaggcataaagtggaaagattcccctccccagaggaacatatctgactgtcagtcctgaaggaaattagaagtttcatcctcatatttaaaagatgatggccttttaaatttgattaatgaaccattagcttacatctgaaattcccacttgagccaattattaacaccactaatcagcaaattaataagaaagcattgattttaaaagtaaatgtcattagagactgaacggtaagatatgttttataacccggctcccatcccaggaaaatgaaatctgccagttcaaagtttgttactaatgactaaatggttaaaatagtaagctggatctgggatgcttgtctcggaggccctgtaatttctaatgaggcctcatgggacagctaatggttcaacagatctatgatatctaagtcaactaggaaattcttgaagattaaaaaagcttagaggcccaaagttgcctggaatacttctgaataattaaggtcatgacccagtgctgataacccctgaataactgctttcagaagtcatgcactgtggtaagtgaaatatggcaataatttttcttgaattctcttatgtattcaataaatatttctttctgcatctaattgtcggatcttgtgacaaatggtgagttacagaaatgaaggcacgagccctatcccagtaacttcctgatacaataaaaacgacagacacatgaataatcagaatatgggagcataatgactaagtggaagttggcacagagcattacatgacaacagaacattccagacatcctttttttttttttttttttcctgagacggagtttcactcttgttgcccaggctggagtgcaatggcgcaatctcggctcactgcaaccgctgcctcctgggttcaagtgattctcctgtctcagccttctgagtagctgggattacaggcgggtgccaccacacccagctaattttttgtatttttagtagagacaaggttttgccatgttggccaggctggtctcgaactcctgacctcaggtgatccacccgccttggcctcccgaagtgctggaattacaggcatgagtcactgtgcatggccaagacagacatccatttttatgcacagtctgttggttctcctcaacatggcaaacactattcctttaaaagttatttttaagcaatttttcaatctcgatgagaccatgttgtctttggttatttaaaaaaaagtcaatcatctttttgatgcatatataataggtaccactagctggcaccagaccttcrtgaaattcgtaaaattggtttctgcagagctaaacaaatctatcttcccaataagatataaataacattaccattaccaagtagacattccattaaaatcttcaaatatatactatttgctggatacagtattaagcacatagtattgttggatgtaaggaataatgaaatgctatttacatcagcctggaagagaattgtgttatttctagtgattcaaagatgaatttcttttcaaccgaactaagctgggttgcaacattattataacgttatttattataaagtaggatttaacattgtggaagccactcctgagggagtaaacggagcatatcattgagaaatactactgtcataacatttacgtgagtgtcctcatgaggtgcaaaagagaagctggagtttttggtttcattattgatattttaagtaaaagcatctaaatgccatttagttcctttcatgcgatagtacatttttgttagttatagcagaaggtacacttgtgttcaagacaactcggcaaagcctgtggtgaagagcgacagtgagagagaggaatacagaacagctgtgtttaagttccatcactgcagctgatgtgtacctgggagaacagtgtcctaaacgacaggtgagtggaggattagaaatgcaccatcaaatagagctgatagcaagacatcaagtacaccctagaaagttttaaaaaatcatgattctgggaaaattcaggtttcaaatatgcatagtccccccttatcctggggggatatgttttactactgcccacccccacaaaagagatgcctgaaaccacgga

SEQ ID NO: 727541 - DNA, 456 bp, Homo sapiens
atgattccttagtgttgaatacctacagtgaatcaaaaaggcactggctgggggcggtggctcacgcctgtaataccggcactttgagaggccgaggcgggcggatcacctgaggtcaggagtttgagaccagcttggccagcatggtgaaaccctgtctctactaaaaaaaagtacaaaaaattagccatgcatggtggtacatggctgtaatcccagctactctggaggctgaggcaggtgaatcgcttgaacctgggaggtggaggttgtgatgagctgaggtcatgcccttgcactccagcctgggcaacaagtgtgaaactccatctcaaaataaataaataaataaataaataaataaataaataaataaataaatraatgaataaataaataaataaaataataagagcattggatttagagtcagaaggtccaatcttggctctacct

SEQ ID NO: 727542 - DNA, 910 bp, Homo sapiens
tttccccaaaaactcatgaataatycacctcttgtttagcatataatcaagaagtaataataaatacaagcagctgagcagctaaagccactgctctgtctctggagtagcattctttattcctttactttcttaataaacttgctctcactttatgagcttgactcaaattctttcttgtgggagattcaagagccctctcttagggtctggatcgggacccctttctggtaacagaggtacatatagagaaagaggtgtcaaggattagtcctaggtttctgacttatggaactaatggagggcggtccgtttgctcaaatggaactttggaggagtatgtgtaagggaaggagagggtcagagagattggtaaaaatcagattacaccaggcgctgagatactggagtttaagatttggaaggtggggcaggtctaggggatagccatgtctggggaaaaccttgggatttggtggattaattcactggaaaaatatttattgaacatctgttatgtttcaggcactatttggactatggtcctagcctacgagggcaaacaaagcctttgccctcagctaggagagtcagattgaactattgtccacattaaaaaaatctgtaattccagatggtatgaagaaaaacaaagcagagtaaagggacaaagggtggagtcggggtggagtgtatctaggcagggtggtcagaaaggccttcctgaaggtaacagtcagatgaagactcatgagatgagaaggagccatttgcaggcaggtctatgggaagagcattcctggtagaggaaacagtgagtgcaaaagccctgaggtgggaaaagcttgatgtgcttaaggaatagcaagaaagccggtatagcagaaacgaagtggcaggagcacttgca

SEQ ID NO: 727543 - DNA, 910 bp, Homo sapiens
tttccccaaaaactcatgaataattcacctcttgtttagcatataatcaagaagtaataataaatacaagcagctgagcagctaaagccactgctctgtctctggagtagcattctttattcctttactttcttaataaacttgctctcactttatgagcttgactcaaattctttcttgtgggagattcaagagccctctcttagggtctggatcgggacccctttctggtaacagaggtacatatagagaaagaggtgtcaaggattagtcctaggtttctgacttatggaactaatggagggcggtccgtttgctcaaatggaactttggaggagtatgtgtaagggaaggagagggtcagagagattggtaaaaatcagattacaccaggcgctgagatactggagtttaagatttggaaggtggggcaggtctaggggatagccatgtctggggaaaaccttgggatttggtggattaattcactggaaaaatatttattgaacatctgttatgtttcaggcactatttggactatggtcctagcctacgagggcaaacaaagcctttgccctcagctaggagagtcagattgaactattgtccacattaaaaaaatctgtaattccagatggtatgaagaaaaacaaagcagagtaaagggacaaagggtggagtcgsggtggagtgtatctaggcagggtggtcagaaaggccttcctgaaggtaacagtcagatgaagactcatgagatgagaaggagccatttgcaggcaggtctatgggaagagcattcctggtagaggaaacagtgagtgcaaaagccctgaggtgggaaaagcttgatgtgcttaaggaatagcaagaaagccggtatagcagaaacgaagtggcaggagcacttgca

SEQ ID NO: 727544 - DNA, 1316 bp, Homo sapiens
tagatttacagaaaggagcagaagttcttccccatactcttgataccaaactactttgcttatgctttggaattgccctgccaatcttgatcatttagtcagtgagaatgcatgaaagacttacatattttggtgacttatttcatttctatttgtaagtctttgtgcttctatctataataatcagtgtagctattttaaaaattagaagacagtaaaacraagttgacctttttagttaatgcagcttaatagagcccagcagtttcattggtaagtttcctgtcttagctggtgttcataattaaggtgattcagaattgttagataactgcaattttcttatctgttgtaattcttagaagtcagtggaagagaaacaaggagaaattgaagtttatacttgggtggtgaaattgcaagagcactactctcagttggtaattcatcccctgaacctgaaagaggctgtattcagggataaaacagacatgttctctcatctgtctatctttaggaatgatgaggtcagtgtgaatgagtaagaagatagacacaaccagttaagaagttctatactgttctagaatactgtagaatactgggtaatgtactgtaagggtttacatccagatggagttaaatgactcaaggggacagaatatgctagtagctatgttaacttgtttctgtacttgactgatatacttagaaaaatcaacatgtactcaaaaccagggcttaaatgaaatacccaaatatttttatgtgagttttgctttctcactgtgtaaactcgggccagctacttaagctcaagaaatttcagtttcatccttataaaatggtgataataacctagttcttcattaggttattgtgagaaataaatgagataatatacataaatcactcaacacagagtctggcacatagcagacattaaataatagaatctattattatccctttatgttgttaaagcaaccctgtttagtaggaagagaagctattgataatcatataacaaatatagaaaatgagtcttaggggttaaactatttgttccaagttgttagtagaacaattaggtccataattcatgaatgtgtattattcttactttcagagtttaactcttgatgtatttaattctattcttgatttacaaattttaaatgtattttatttggaatttaattctcctatgtgtgtatgatttatctttgcacagaattagaataggatgccaaaaagtgaggacatagagtagtgccaagaaatactagaatcacagtagctccaggggatggccg

SEQ ID NO: 727545 - DNA, 1316 bp, Homo sapiens
tagatttacagaaaggagcagaagttcttccccatactcttgataccaaactactttgcttatgctttggaattgccctgccaatcttgatcatttagtcagtgagaatgcatgaaagacttacatattttggtgacttatttcatttctatttgtaagtctttgtgcttctatctataataatcagtgtagctattttaaaaattagaagacagtaaaacaaagttgacctttttagttaatgcagcttaatagagcccagcagtttcattggtaagtttcctgtcttagctggtgttcataattaaggtgattcagaattgttagataactgcaattttcttatctgttgtaattcttagaagtcagtggaagagaaacaaggagaaattgaagtttatacttgkgtggtgaaattgcaagagcactactctcagttggtaattcatcccctgaacctgaaagaggctgtattcagggataaaacagacatgttctctcatctgtctatctttaggaatgatgaggtcagtgtgaatgagtaagaagatagacacaaccagttaagaagttctatactgttctagaatactgtagaatactgggtaatgtactgtaagggtttacatccagatggagttaaatgactcaaggggacagaatatgctagtagctatgttaacttgtttctgtacttgactgatatacttagaaaaatcaacatgtactcaaaaccagggcttaaatgaaatacccaaatatttttatgtgagttttgctttctcactgtgtaaactcgggccagctacttaagctcaagaaatttcagtttcatccttataaaatggtgataataacctagttcttcattaggttattgtgagaaataaatgagataatatacataaatcactcaacacagagtctggcacatagcagacattaaataatagaatctattattatccctttatgttgttaaagcaaccctgtttagtaggaagagaagctattgataatcatataacaaatatagaaaatgagtcttaggggttaaactatttgttccaagttgttagtagaacaattaggtccataattcatgaatgtgtattattcttactttcagagtttaactcttgatgtatttaattctattcttgatttacaaattttaaatgtattttatttggaatttaattctcctatgtgtgtatgatttatctttgcacagaattagaataggatgccaaaaagtgaggacatagagtagtgccaagaaatactagaatcacagtagctccaggggatggccg

SEQ ID NO: 727546 - DNA, 1558 bp, Homo sapiens
ccttgggctcccacctgcacagtaggatctcacccccggattgaccccggccctggccctcctccacactcttgacacaggaggaggcacgcctccagtgaattctgcctcacggtggctgctgccctcctaagtgcaaggctgggcttgagaatttcaggggagaaactcagtagtgagtgcttctcctcagctgcagcagctggtacttagtggctcttaatttccctgctttctgtgctacttcccaaaggcacacagaaagcggactggacatctgtgccagagatgactagcttcaggagtgccgatggtggcaaggcctctctgcacatgctttggtcaggtccccctcacctcatcaacagccaagagcacatccctcaatgtggctggtccttaggagtcacacccactggccagaggtcctgagcaccaagccctcaagcaataagctcccaactcctccagaggctgtggctagttagcagcagggttccatctggaacccaggtctctgactacagtaactaacctagagctctttcctcacatttcttcagcagttatctagcagagggagtaggatcatgagcggagctagccacttcagcaaagaaagtgtgatgaagtccatgaacccagagaataaagccctttggcctgtcaggggcagattcttaagggcacagaaggggaaaaacaacaaaagcaagtttatattcacagggaaacataatctgtgattataaatattttatgggcaaagaaagcagcactggctgagagactggggtggagagggtggacagcaaattagattccagcctgcaaagtgatagggcagctggaaaagcagcaaagccgaggctattctgggctgtgctgcgagggcctgcgtcacaggccctggccacagtctttgttgaaaccacagccttccagcggtcagcacagaacaccttggggagagggtttaagtccatgaagaccagaggaggggacagcgaggacagaggagagtcatctgaatgactctggtgaacctcaacagcagggaggcaggtgaggggaggcagcaccctgcaagcacgtgaaaggaagacwcttcctgctgactaagggcagaggaagaagtgaggctgaccccagaaagcaagccacctgagaagccagaaggcagcttgggtcaagctgccccagtgagagcaaaggtccagcccttgagcaagtggtgccaggctaagaacaattccaccctccctttgcctcaggccagggttctctacctcccacagcctttaggaagtagcacagaaagcagggacattcagaacctgctgagcaccagctcctgccactggagagaaccaccactggcaaagcaggccctggtttcgatgattcctcctccttggccacatccaaccactgcagcagagcatgtccttccagagggccagaaggaaaggatattagctcctaaaatacccagagtaccttgaatcaggcttagtcagaggagccctggggagcgatgtgctcctccaatggaaga

SEQ ID NO: 727547 - DNA, 518 bp, Homo sapiens
ctcctagatacctcactgacatacatcgcttttactgtcatctatatgctggtaaactccaaatccattmtctctagctcagacttcaaccctctattggaattctctcctgcctatcccattagagtcaaatgaactcatcttcattctctcctcctctttgctccccacctacaaacgtgcacgattcttctctgtggttcccagtctccaggaattgtgccacagccacccagtcatgtaagccaggaaacatcgcttgtcttctccctatcccttcccccagagtcattagcccaccataaaagtcaattccctaaagacttgtagaatgttatttctttccttcagatccacaacacttaagaagtgaattatatcaacagcctccaaaatgacctcccagtctgtctcccttacacactgtcactagagtgatcgttttaaagcataaagcatgtgaaacccactccgtatcctaaaatactgagctgaatatccatcgcttttatataaag

SEQ ID NO: 727548 - DNA, 518 bp, Homo sapiens
ctcctagatacctcactgacatacatcgcttttactgtcatctatatgctggtaaactccaaatccattctctctagctcagacttcaaccctctattggaattctctcctgcctatcccattagagtcaaatgaactcatcttcattctctcctcctctttgctccccacctacaaacgtgcacgattcttctctgtggttcccagtctccaggaattgtgccacagccacccagtcatgtaagccaggaaacatcgcttgtcttctccctatcccttcccccagagtcattagcccaccataaaagtcaattccctaaagacttgtagaatgttatttctttccttcagatccacaacacttaagaagtgaattatatcaacagcctccaaaatgacctcccagtctgtctcccttacacactgtcactagagtgatcgttttaaagcataaagcatgtgaaacccactccgtatcctraaatactgagctgaatatccatcgcttttatataaag

SEQ ID NO: 727549 - DNA, 1261 bp, Homo sapiens
cgtccctttccttccctccctcaggggggtcttttgtctgccacagccaccccttcttctgcctaagggtcagctctctaggccttgcctcctactgaggagagagcagggaaggccaatgggaccagcctgttgcctgcaacatggcttttatggccagtaccacctttgtgccatctgcccacatgtccccctccagggacaggtgcagggcagccttcccccaggacttggggggaccagggaaggcctgtttggctcagagctgggggttccagcatagtgcctagaactatttcatccggacataaaatgctaaaagggctgccttctctgtggaaaggcctggaaggattggtggaggaatttccttcctgattagtggttcctagatttggggtccaggagtatagagatctaggcacctggacagactgctggaagctgtcaggcccacccctgactctgcagataatgacagtggggagggaggtgcagggagagggggacctgcccaaagccacagtcaccccgtgtggctcattctgggccatgtgctttctgggccagcctcctcccgtgaacctcccaggctggggaacccaggctgccgctggacacgattccacatttatgcttcagggacgaagccaaaagaaggttctgccaccagatgctgctgggagctcggactctccaaagcttcccctagggtcctcctgtcccagcagcagctttgctgcctcacatgggctgagagcaggccaggaggtcctgggggctgggatggggtcttatttcatctgtgtttccttggagtctagttagtcaactggaagccgattcaagaacctcgtttgaacttcatagagaaactgtggcccattcctcaaaaagttaaacataggattagcatacaacccagccattccactcctaggtaactgcccaaaagaactgaaaacagactcaaacaggtacctgcacacacatatctacagtggcacacttcacacaaggcaggaacagcctacatgcccatcggcaragcaagaggtaagcaaatgtgggctcgccatacaatggaacgttatccaccccgagaggggaaccaagagctgacatgcgccacaacatggatgaaccttgaaaacagactcactgaaagaagccaggcacagaaggccacacattgtatgattccattcctaggaaacattctgaagaggtcaacctatagggtcagaatgcagattggtgg

SEQ ID NO: 727550 - DNA, 641 bp, Homo sapiens
tagctataaatgcatcataaacaaatttagaagacagtcaggcaatattaaaggagaggtgggaaattatggtcatcaactctgtgaccttaaactgcaacacaaataattcttcatggggattagaaacatatccagcttttcatgaatggcatagagatgtggccagctgagtgaaacagaattagaccccagaataaaatgcagcttgcagttgggacttaacatttttagagaatggcctcaaatctgcatcttgacattcttttcaaccttcaaggactagtttaataattgtttcctccttacagtcttcccaaatccctacctgttactattcatttcccctttttctcaattattgctgctcatgttttctrcatctagtagagtacttattataattttttcagtttgaccttaaagtgtttgtgtttattgtggagcttcccaagtttcagttatctgtgcatttgttttagatattttgcccaatctgtgtgctgtccgtagcttattgacctgatcgtctctttacatttactaacttttaaaaacatttttttctttaagcctcattcttagtctcatctgctaaattaaaaatttgatgtaattatctatatgcacatattgcatta

SEQ ID NO: 727551 - DNA, 790 bp, Homo sapiens
  misc_feature 2, 3, 4, 5, 6, 7, 8, 9, 10, 11, 12, 13, 14, 15, 16, 17, 18,19, 20, 21, 22, 23, 24, 25, 26, 27, 28, 29, 30, 31, 32,33, 34, 35, 36, 37, 38, 39, 40, 41, 42, 43, 44, 45, 46,47, 48, 49, 50, 51, 52, 53, 54, 55, 56, 57, 58, 59, 60,61: n = A,T,C or G
  misc_feature 62, 63, 64, 65, 66, 67, 68, 69, 70, 71, 72, 73, 74, 75, 76,77, 78, 79, 80, 81, 82, 83, 84, 85, 86, 87, 88, 89, 90,91, 92, 93, 94, 95, 96, 97, 98, 99, 100, 101: n = A,T,C or G
gnnnnnnnnnnnnnnnnnnnnnnnnnnnnnnnnnnnnnnnnnnnnnnnnnnnnnnnnnnnnnnnnnnnnnnnnnnnnnnnnnnnnnnnnnnnnnnnnnnnnacagattttaattcccaaacttggccacaaattagtccccatctaatgtgcttcctgcatgctcccttttggaacacgttctcttggaatccagctgtcattccctgaatagcccaagacactgtgatgaggcctctatatacgttcctctggtcgactgttagagctgagccaaaacttggagacatccctgtccatgcccacacatgcaagaaaagaagycttcaggtgattttagccaccagccattcaatgcttaccagctgaaagcccagaccccacggggcagatgccagctatccctactacactctggctgactttttttttttttttgagacagggtcttgccctggtgcccaggttggagtgcagtggcactatcttgactgaatgcagccttgacctccctggctaaagcgatcctcctgggtagctaggactacagtcatatgccaccacaaacagttaaattttgcattttttgtagagaggggtttcaccatgttgtccaggctggtctctaaaatctgagctcaagtgatttgcctgccttggcctcccaaagtgctgggattaaaggcatgaggaacaatacccagaactctagatgatttttaagaaaataataatagctaacattcactgatctcttactatttgccaggcactgtgccaagggatttata

SEQ ID NO: 727552 - DNA, 790 bp, Homo sapiens
  misc_feature 2, 3, 4, 5, 6, 7, 8, 9, 10, 11, 12, 13, 14, 15, 16, 17, 18,19, 20, 21, 22, 23, 24, 25, 26, 27, 28, 29, 30, 31, 32,33, 34, 35, 36, 37, 38, 39, 40, 41, 42, 43, 44, 45, 46,47, 48, 49, 50, 51, 52, 53, 54, 55, 56, 57, 58, 59, 60,61: n = A,T,C or G
  misc_feature 62, 63, 64, 65, 66, 67, 68, 69, 70, 71, 72, 73, 74, 75, 76,77, 78, 79, 80, 81, 82, 83, 84, 85, 86, 87, 88, 89, 90,91, 92, 93, 94, 95, 96, 97, 98, 99, 100, 101: n = A,T,C or G
gnnnnnnnnnnnnnnnnnnnnnnnnnnnnnnnnnnnnnnnnnnnnnnnnnnnnnnnnnnnnnnnnnnnnnnnnnnnnnnnnnnnnnnnnnnnnnnnnnnnnacagattttaattcccaaacttggccacaaattagtccccatctaatgtgcttcctgcatgctcccttttggaacacgttctcttggaatccagctgtcattccctgaatagcccaagacactgtgatgaggcctctatatacgttcctctggtcgactgttagagctgagccaaaacttggagacatccctgtccatgcccacacatgcaagaaaagaagccttcaggtgattttagccaccagccattcaatgcttaccagctgaaagcccagaccccacggggcagatgccagctatccctactacactctggctgactttttttttttttttgagacagggtcttgccctggtgcccaggttggagtgcagtggcactatcttgactgaatgcagccttgacctccctggctaaagcgatcctcctgggtagctaggactacagtcatatgccaccacaaacagttaaattttgcattttttgtagagaggggtttcaccatgttgtccaggctggtctctaaaatctgagctcaagtgatttgcctgccttggcctcccaaagtgctgggattaaaggcatgaggaacaatacccagaactctagatratttttaagaaaataataatagctaacattcactgatctcttactatttgccaggcactgtgccaagggatttata

SEQ ID NO: 727553 - DNA, 592 bp, Homo sapiens
taaaaaacagatgaggcaaagaaaggggtctcatgtcctcatgggtgtctctgggccaaaatcctgggaaggggtggggactagaaagggtctgagtattctagtcatagtacttccttcagagtctcatrgtcactgtcccttccagggtccaattagccctgtgaattgtggatgacaaagagagcgggacactgccaagtgactatgaaaaatcttggccttcatatgttttggctgatgtgagcggtttgtgtaatagaagccacattgctgatattggttcatcagagctgtatgttgtgtgagtctctatagccactacagtatattaaatccagagcatgggggcaggacaaatataatgtaatataatataacataaagcagtcctggcccctgttccacatgggatgtgcacagcagcagacgacagaagaatatcgtgatggggcagataagggacaacatattggaaactagcaggcccagaagacagcacggggccccatgcactggagcaaggacatcattctcatcactcccaggaggtcagttgagccccatcatgcgccctcaggtcatcattggt

SEQ ID NO: 727554 - DNA, 592 bp, Homo sapiens
taaaaaacagatgaggcaaagaaaggggtctcatgtcctcatgggtgtctctgggccaaaatcctgggaaggggtggggactagaaagggtctgagtattctagtcatagtacttccttcagagtctcatggtcactgtcccttccagggtccaattagccctgtgaattgtggatgacaaagagagcgggacastgccaagtgactatgaaaaatcttggccttcatatgttttggctgatgtgagcggtttgtgtaatagaagccacattgctgatattggttcatcagagctgtatgttgtgtgagtctctatagccactacagtatattaaatccagagcatgggggcaggacaaatataatgtaatataatataacataaagcagtcctggcccctgttccacatgggatgtgcacagcagcagacgacagaagaatatcgtgatggggcagataagggacaacatattggaaactagcaggcccagaagacagcacggggccccatgcactggagcaaggacatcattctcatcactcccaggaggtcagttgagccccatcatgcgccctcaggtcatcattggt

SEQ ID NO: 727555 - DNA, 592 bp, Homo sapiens
taaaaaacagatgaggcaaagaaaggggtctcatgtcctcatgggtgtctctgggccaaaatcctgggaaggggtggggactagaaagggtctgagtattctagtcatagtacttccttcagagtctcatggtcactgtcccttccagggtccaattagccctgtgaattgtggatgacaaagagagcgggacactgccaagtgactatgaaaaatcttggccttcatatgttttggctgatgtgagcggtttgtgtaatagaagccacattgctgatattggttcatcagagctgtatgttgtgtgagtctctatagccactacagtatattaaatccagagcatgggggcaggacaaatataatrtaatataatataacataaagcagtcctggcccctgttccacatgggatgtgcacagcagcagacgacagaagaatatcgtgatggggcagataagggacaacatattggaaactagcaggcccagaagacagcacggggccccatgcactggagcaaggacatcattctcatcactcccaggaggtcagttgagccccatcatgcgccctcaggtcatcattggt

SEQ ID NO: 727556 - DNA, 627 bp, Homo sapiens
  misc_feature 550, 565: n = A,T,C or G
ggaggccaaggcgggtggatcacaaggtcaagagatagaggccatcctggccaacatggtgaaaccctgtctctactaaaaatacaaaaattagctgggcgtggtggcacatgcctgtagtcccaggtacttgggaggctgaggcaggagaatcgcttgaacccgggaggttggaggytgcagtgagccgagatcgggccactgcactctagcctgggtgacagagcgagattccatctcaaaaaaaaaagtataaaatacatttcactcttgaggattaaagagcggataattatagttaagactacaggtgttctggtgagtttactttttcttcccaaaaaaatcaaaagtttttgaaataagctcccctagtatatattaacctcaatattagcatttccatctccccagtgtcactttccttgtcataatatctgggggaagggaatcatctcatttttcctctagctttgctgcccgcctgtttcatatggtgggcttctctgcactttacctcagtctcacccacgaactgtcatcatgtttntcagtgtcctgtttnttagatctttccactttcccaaagttcccaagtaccacttacccaaaaactgtgcagtttat

SEQ ID NO: 727557 - DNA, 627 bp, Homo sapiens
  misc_feature 550, 565: n = A,T,C or G
ggaggccaaggcgggtggatcacaaggtcaagagatagaggccatcctggccaacatggtgaaaccctgtctctactaaaaatacaaaaattagctgggcgtggtggcacatgcctgtagtcccaggtacttgggaggctgaggcaggagaatcgcttgaacccgggaggttggaggctgcagtgagccgagatcgggccactgcactctagcctgggtgacagagcgagattccatctcaaaaaaaaaagtataaaatacatttcactcttgaggattaaagagyggataattatagttaagactacaggtgttctggtgagtttactttttcttcccaaaaaaatcaaaagtttttgaaataagctcccctagtatatattaacctcaatattagcatttccatctccccagtgtcactttccttgtcataatatctgggggaagggaatcatctcatttttcctctagctttgctgcccgcctgtttcatatggtgggcttctctgcactttacctcagtctcacccacgaactgtcatcatgtttntcagtgtcctgtttnttagatctttccactttcccaaagttcccaagtaccacttacccaaaaactgtgcagtttat

SEQ ID NO: 727558 - DNA, 627 bp, Homo sapiens
  misc_feature 550, 565: n = A,T,C or G
ggaggccaaggcgggtggatcacaaggtcaagagatagaggccatcctggccaacatggtgaaaccctgtctctactaaaaatacaaaaattagctgggcgtggtggcacatgcctgtagtcccaggtacttgggaggctgaggcaggagaatcgcttgaacccgggaggttggaggctgcagtgagccgagatcgggccactgcactctagcctgggtgacagagcgagattccatctcaaaaaaaaaagtataaaatacatttcactcttgaggattaaagagcggataattatagttaagactacaggtgttctggtgagtttactttttcttcccaaaaaaatcaraagtttttgaaataagctcccctagtatatattaacctcaatattagcatttccatctccccagtgtcactttccttgtcataatatctgggggaagggaatcatctcatttttcctctagctttgctgcccgcctgtttcatatggtgggcttctctgcactttacctcagtctcacccacgaactgtcatcatgtttntcagtgtcctgtttnttagatctttccactttcccaaagttcccaagtaccacttacccaaaaactgtgcagtttat

SEQ ID NO: 727559 - DNA, 1241 bp, Homo sapiens
gggcagtggtgactcgtgagtcatatattttcagcctcacacagaccatagagtatgtttggcactaaaagccccatatggattgagatttgcagaatctcttggaaaaaaagatacatcctggctgagcagatcctagggtctcttgactgaccctgcacatgtacacaggtgcacagatgctgccaggaggccattatgaattctattttatctaatagcctggtcaggaaatggaagggtatattacagatcattaagtgggtgaaggaatttgacaacctttgatcygactcagtaaaatagatggcatgaattaattccctggcttgtggagagaagaaaagtcatccttcaacagtggtgacaggcagggagttcaccccctgtgggacagattctagggaaggcatgcagcagcttccctgggagtgaagggctgagatgcatggggtggggagcaggaacctgagggccccaggctgcccctccaagcccctgctccagccaaggtatcatgagaggcactagtgtgtccctcacttccccttggccaggggacagctctcagggaatgttctccaagaccaggggacagcccttgagggcaacatgggcaccagttacccctgagggccaggcctgggtccctaggactgacccctgtgctcgtgcctcactgaccctgcaagggggccggggatgggggctcagggcaggaacctcaggtcaggctcacaatgtccagttacaaacaagtccacctggacatccagtaggtattcaaaaggcacttgtccccatttccttccccataggcctgccctcgccccactccagctgatgatagccctgcactcccagtttctcaggccacaggtcctggcgtctccctgggtgctggcttctctcatttccttcaccccacgcaccagcagttcccgtggtcccagaatctgacccctcacctcctgcccacctgctgcatctctgcagtggcccattctgcactttcctgtccaccagcactgcagcctgtcctcctgttctctgcccgagacaacaggattctcctgagatgtaagtcagaacccactgtgccactgctccagccatgtgctgctctcttgggcacctcactgatccaccagggacccctagccagggcctcgatactggcgtcccccatgcctggcatgatctcccccaggtgtccacatggctcagcatcacctcggcaa

SEQ ID NO: 727560 - DNA, 976 bp, Homo sapiens
ccatgtaatttaaaacatttaatagatatataatgttccactattaatttaactagaagtataaaaataaaacatatataataaaaatattctactgatttttaaattatctatattatactgagtaaaagaaaatttaggaatataaataaatgagcatttttgaacatgtaaaaatattttcttgctgtttttaggagacttttagcaggacaggagcttacctctcatctacctctgcttggacaaaccagtgatgtgatttgcaaataggctgtaacttcaccgaaaacacatcacagtaaagaaaggtagtgactttcagagaatttgaccyaacttagaatttgtaaaagagaaaagcattgtccttatgcctaaagtacatgactgtttctttttaagttacatgtatatttacctgaccaatttgttttactctgtattttaagttatcaggtgaaatggttttggaataaattaatgagttgtttgttctgaataaatgtgcatgttacaaatgcaaacacgtgtatgtattatacaactatgcagcttcaagagctgacttatttctatcagctttttattcacttaaaaaaatcaggctactgaagcatattagaatttaattacaccaattagtactgccacatcagacatatgatgtgccttcaattaagaagtacctaatgggtattagtacaatttagcttcataattaaagttctaagaacagcacaaattaaacattatgattacaaaacattaaaaatctactggtgaaattaaagctgaatatttaacttctccttttgagctgattttaaaaaagaaaatcaggattatataaaatgcaatgttattattgaagcattctgaatttaaaaacagaaattaagctcacatgcccataaatatgtgcatatataatgattaaatatttagtaaaatacccaacctaacacttgtgtca

SEQ ID NO: 727561 - DNA, 574 bp, Homo sapiens
tacactcccaccaatagtgtaagagtgttctcttactacacttccaatttggctggactttgagctttgtctctggtcccctgctttttacagtcccaagaaacatggcctcatccttatcaggaccagagaatgctctcaaggtaaaaccttaattttcataaaattgttgtcttcttgcctgatcattgtgacactaaagcaagatttttttaatgtttcatccaacttttaagaattattttagtggtaggactgagccaggtttctaatccacactactgcagataaaaaaatgacaaaaggtaactttcaaaaatagaggccgggcgtggtggctcacgcctgtaatcccagcactttgggaggccaagggggttagatcaccgggtcaggaaattgagactctcctggctaacacgrtgaaaccccgcctctactaaaaatacaaaaaaaattagccggacgtggtgtcgggtgcctgtagtcccagctacttgggaggctgaggcaggagaatggtgtgaacccacaaggtggagcttgcagtgagccgagatcgcgccacaggact

SEQ ID NO: 727562 - DNA, 574 bp, Homo sapiens
tacactcccaccaatagtgtaagagtgttctcttactacacttccaatttggctggactttgagctttgtctctggtcccctgctttttacagtcccaagaaacatggcctcatccttatcaggaccagagaatgctctcaaggtaaaaccttaattttcataaaattgttgtcttcttgcctgatcattgtgacactaaagcaagatttttttaatgtttcatccaacttttaagaattattttagtggtaggactgagccaggtttctaatccacactactgcagataaaaaaatgacaaaaggtaactttcaaaaatagaggccgggcgtggtggctcacgcctgtaatcccagcactttgggaggccaagggggttagatcaccgggtcaggaaattgagactctcctggctaacacggtgaaaccccgcctctactaaaaatacaaaaaamattagccggacgtggtgtcgggtgcctgtagtcccagctacttgggaggctgaggcaggagaatggtgtgaacccacaaggtggagcttgcagtgagccgagatcgcgccacaggact

SEQ ID NO: 727563 - DNA, 579 bp, Homo sapiens
caacaaatttagtgacttaaaaccctcgtttattatatcacaggtttgtgagtcagaggtccaggtacaaggtggctctgctgggtcctccactcgggtcctcccaggaccaaaattaaattatttgctctccttggcttttatctagatgctctggttargactcaacttccaatttcattcaggttgttctcagaattcagttacttggagttgtatgactaaagtccctgttttcttgccacttcatctttaagccaacaagtacacactggatttttcttgtgcttcaaatctctgacttcctcttctgctatcagaatgagaaaaatccctgcttctgatggtgcttctgattatattaaacccatccacatagtccacatagcccatccacatagcataatctttctaatttaaggtcatttgattggtaaccttaattacaactgcaaagccctttagccatgtaatatatttatgaaagtatcgccaaggagcaaattacaaaagccaaaattttgtctaccacacatgtagactgaaacatctttatatgtatcttcatggttttcaaga

SEQ ID NO: 727564 - DNA, 579 bp, Homo sapiens
caacaaatttagtgacttaaaaccctcgtttattatatcacaggtttgtgagtcagaggtccaggtacaaggtggctctgctgggtcctccactcgggtcctcccaggaccaaaattaaattatttgctctccttggcttttatctagatgctctggttaagactcaacttccaatttcattcaggttgttctcagaattcagttacttggagttgtatgactaaagtccctgttttcttgccacttcatctttaagccaacaagtacacactggatttttcttgtgcttcaaatctctgacttcctcttctgctatcagaatgagaaaaatccctgcttctgatggtgcttctgattatrttaaacccatccacatagtccacatagcccatccacatagcataatctttctaatttaaggtcatttgattggtaaccttaattacaactgcaaagccctttagccatgtaatatatttatgaaagtatcgccaaggagcaaattacaaaagccaaaattttgtctaccacacatgtagactgaaacatctttatatgtatcttcatggttttcaaga

SEQ ID NO: 727565 - DNA, 1279 bp, Homo sapiens
aaatgttcattattaagagtggagagaatgtcagctgacactttcttgtttgctcgtgcttgcattattagtattacctttaaatgatggtatctttaaacgaattttttttaggccactagtctctttgtgagggctaattttcttaaagctagataatagcaaacctcttaaccaagcacactcaaactgcaatacatcacattacactgaaagtgattaaatggcagaggtttgtactgtcagcccctatgagtttgagaactcccactctgcctcaaagatccttttgtattatacatgatatatgactgtatgacatagttaccaactgagagaatcaggatcaatccacatattaaatatttataaagcttaatttctttccttagataaaaagtttgctagaatattagaaacattagactattagaaacaaaaattagaaatattaggaattctaatattttctcactttaatagatcttcttagatactccctggcttgcatatccccgacttaagcgatgctgcactcgtgtatatgcttctatagagtagaacttctgtctcaatcrctgtttgttcctcccaatgccttgtataggcctgatactttatacgatggcaatgcatacttacttgatgcataaatgaacacatggtccctgacatcaggaagccttgtcattcaccaaatggatccatccggtcaattatgacgaacatgtgaaaaaaatagaaacctatctaagatgatatattataactaaattgtaccatagtgatgacatccatttgatttttaaaaaggcagttaaatacaaattgatatcttggagaaaagtacatagaaaaagtccacttgggctgagccttgacattggggagcattgcagtagtcagaaataaaaatgttgttttccatcaaagagaacaacacaagcaaagtagagcataagcagggtctggagagttcagatcataaggagtgggagcagccgtccctgcaatttgaccacaccagcagcatgggagttgggagggctgagaaatttattcaggcagagacacactcactggccctaactgtgattgtcacttctggtcttcagtgccttctagctggttcagcagaagccaatgcactggagcagccacagaaccacagaagcccaagcagaaatggatatcgccatggcctcttctccctccatatcactccctgctgcatgaatttgtccttgcttagcttgcttaccttaaaaaacaaatattt

SEQ ID NO: 727566 - DNA, 626 bp, Homo sapiens
atccaaataaccagctgtcaccctgtgaaatgggaaggaggcagaacacctttttattggcagtagtagagttttaaatttttgatggtacattactggattgagcagactgttacttccatctattcacacctccatgcatccatccaactgtccattcaaaaagcacttacggagcaccctgtgcattcaaggagctgagtacagttcttgaggtggctgtygctatgcaacaggaaaagatataagtagcaaacctcctgactaacacagggaagttatgatattgtgaaaattcttgctaggagagtcaacaccactaacaaccaaaagataaacaactctcttaagagttctgatgcaaagccagtgagccttaggtccaagaaagtttagtcatcaagatttagagtgacaaataaatactagggttttagttgaaggtgatgtataagatcaggaatagggtaaattataattaacagttaagccttagtggcctggcgcggtggctcacacctgtaatcccagcactttggaaggccgaggcgggtggatcacaaggtcaggagatctagaccatcctggctacacatggtgaaaccctgtccctactaaaaatacaa

SEQ ID NO: 727567 - DNA, 626 bp, Homo sapiens
atccaaataaccagctgtcaccctgtgaaatgggaaggaggcagaacacctttttattggcagtagtagagttttaaatttttgatggtacattactggattgagcagactgttacttccatctattcacacctccatgcatccatccaactgtccattcaaaaagcacttacggagcaccctgtgcattcaaggagctgagtacagttcttgaggtggctgtcgctatgcaacaggaaaagatataagtagcaaacctcctgactaacacrgggaagttatgatattgtgaaaattcttgctaggagagtcaacaccactaacaaccaaaagataaacaactctcttaagagttctgatgcaaagccagtgagccttaggtccaagaaagtttagtcatcaagatttagagtgacaaataaatactagggttttagttgaaggtgatgtataagatcaggaatagggtaaattataattaacagttaagccttagtggcctggcgcggtggctcacacctgtaatcccagcactttggaaggccgaggcgggtggatcacaaggtcaggagatctagaccatcctggctacacatggtgaaaccctgtccctactaaaaatacaa

SEQ ID NO: 727568 - DNA, 614 bp, Homo sapiens
aatgagaatctcactttatacaccacaaaacaccacagagcccaattgttcgcctttagactgttgtgcagatgcagctccagcacatggggyacacaatttaaagcacaaagcaagacagactttctctgttattaacagaagtctctggaaagagctactcttgatgtgacgaactcacagaggtgaaaatgtccttctagggcgatggctcagcagaggctggcgatcggccaggaaagcacatctggtgctgctcaaccggatgccctgggtgggtgatatttacagtaaaatacagcagctctaatgaaatttccacagtggttacttggcaaattgatggttttgttgagataaggagaaagatgggacgaggggggaaagggggagagccaaactgagaaaaacacacacacacacacacacacacagaccattttagtcattaggaaagaaagttgtgagcataccagtcagggcacttgtgatttaagtcagaaaacggttttgatttaagttggaattcagctttgagggcatgggatgacctggccttataatcccatagatttgaaagtgattgcggatttatagacactcactgcacacat

SEQ ID NO: 727569 - DNA, 614 bp, Homo sapiens
aatgagaatctcactttatacaccacaaaacaccacagagcccaattgttcgcctttagactgttgtgcagatgcagctccagcacatggggcacacaatttaaagcasaaagcaagacagactttctctgttattaacagaagtctctggaaagagctactcttgatgtgacgaactcacagaggtgaaaatgtccttctagggcgatggctcagcagaggctggcgatcggccaggaaagcacatctggtgctgctcaaccggatgccctgggtgggtgatatttacagtaaaatacagcagctctaatgaaatttccacagtggttacttggcaaattgatggttttgttgagataaggagaaagatgggacgaggggggaaagggggagagccaaactgagaaaaacacacacacacacacacacacacagaccattttagtcattaggaaagaaagttgtgagcataccagtcagggcacttgtgatttaagtcagaaaacggttttgatttaagttggaattcagctttgagggcatgggatgacctggccttataatcccatagatttgaaagtgattgcggatttatagacactcactgcacacat

SEQ ID NO: 727570 - DNA, 614 bp, Homo sapiens
aatgagaatctcactttatacaccacaaaacaccacagagcccaattgttcgcctttagactgttgtgcagatgcagctccagcacatggggcacacaatttaaagcacaaagcaagacagactttctctgtyattaacagaagtctctggaaagagctactcttgatgtgacgaactcacagaggtgaaaatgtccttctagggcgatggctcagcagaggctggcgatcggccaggaaagcacatctggtgctgctcaaccggatgccctgggtgggtgatatttacagtaaaatacagcagctctaatgaaatttccacagtggttacttggcaaattgatggttttgttgagataaggagaaagatgggacgaggggggaaagggggagagccaaactgagaaaaacacacacacacacacacacacacagaccattttagtcattaggaaagaaagttgtgagcataccagtcagggcacttgtgatttaagtcagaaaacggttttgatttaagttggaattcagctttgagggcatgggatgacctggccttataatcccatagatttgaaagtgattgcggatttatagacactcactgcacacat

SEQ ID NO: 727571 - DNA, 524 bp, Homo sapiens
caggataattttcttactaagctcttttgatgaacaccctgataataaggcatcgttctgtcaggactgattttgcttctttccctttggattcaagttgacccagcttcagaaaatgtcatctagtattgtggcagaagtctgttactcttactccaagtgaaagtgaaattttttcaaatattctccttcttatgaattgaattgtgtactctttccagcttcttcccaatttcctgggccagatcttatgaggcttcaagtgatatgggattggagtctgcctaaagtctccatcttgctctgtggccacagagtcctactagtgacactcttgagtatcctccaaacaagcgctcctagcttcttgaaagttgcttctctcctcttctctcccttctcccttcctctctttctcccagcttttatgcttcattcattgactcatgaccccaaagtttcacagaaatttgtgaggaaatcattyatagtttcacttgaaaaacactcttcaagaggtcaaa

SEQ ID NO: 727572 - DNA, 1450 bp, Homo sapiens
ttcaaggagaggaacccatcaatgattgtgccttcccagcctgtgttaattaagatgaacagactgaccttgaatgacagttattagtttagttgctgttctatttccccagatttattggctcaaagtgaaaagagcactgaatcttgagactgtgtttgaggaccagttccatgatcttgggccacgattttagcctagctgagactttctctcagtctagcaagactttctctttgctaaaatggcagcaatgctaattgttttgcctacattaaagggctcttgtgtggatccagggtgataaataggatactgctctgtgtactacaaaagtttaacaaatggaatgcgtttgctaaataatgcattaaaatattaaataataataaatatactgagttttatggttgaggttacttctagtttatagaacagtaggctgaaacaataactacagaggcacacactgaggctatttatgaaataaaaacatttcaggagacaacaaaatttaaatatttgatcccagaaattatccctgccttccctctcctgttgtctttttatgtaaggagaaaaaaaacagaatctaatttgaaaaaagagtcatgggcctttctaggtaaataaagattaaagaaaacatggggccaatttaggttaagacaaacctgtatgtccaagtttattttcagtcaaaaatccccttagtcttattcaactcagaaaaatgaaaattgatggcctaaaagtgaaaatttgtatatcttcctacttagtctcataagtcattcagttttaattcctttttgaattcatataatcctttgccaatgaattaatgaatagtattcttctgaatgtattcctttgagaatggatttttgtgtgtgtgtataacttattaaatccttgttaatatctatgatttcaccatattaatgacagtttccaacttatgcccttgaaatgtggaggaaaagttacaatattattacctcaatattcaataaccttttctgtaaatcgccacactacagcattcttcctcatgaaaataatgagtgatatgatccactccatcaggctgttaggaaatcggcttgataggcaaagtcacctttgaaattctcataattgtcactgcaytctgacagtccctacattttaagaaatgggactaaaataaaataaagagaaactaccctgaaaggactaggtgacagcctggagcatttcacattgctgtggtatggaatgatagttgaaagtctctgattaatgcggctgcctgataaaagctggatgagactgcgcctgtttgctggcagctcaacattgctgtaaggcagagtataaaacatctagatgaggatgggcatttcctttccccatacccatgacccatatacattcctgggctctcagagtattttttgccttaata

SEQ ID NO: 727573 - DNA, 642 bp, Homo sapiens
tgcttcccaactccacacttctgtattatgacataaagtttggttgctggaggagctatgactctgataataatccctgaattcaacctttatacttttaaaagttttttkgcctccttcaaaataatcttaagacatatgtatcatattatactttcagcaaaaatataagcttagtggaattttataggaaattgagacacagagaaattaacaacttgggtcatacagagaattaatgtcatggtctgaaacaaatcccaagacccttagagtgttaaagctatatttggtgacacattaatgggtcatgaaatcaactatgtcagccacaaccagaatgtttctacaaagatatagaccaaactagaatccaaaatatcactgggcattgcaaatagcaagaatatgtattatataatttttgttgcatttttatgtatatgtgtgcgtatccaattacctaaaattggatgatggttagaagtgctggaaaactctgttcttacagcttagctcttttcattgaaattcccagataattatcttgtaatttccctgtgcctaaaaaagtcttatagtagtcaaactagaatagaggtacaatttgtaattcttaattaatatcagaataaatgtgag

SEQ ID NO: 727574 - DNA, 791 bp, Homo sapiens
aaatgtctatttctataggggaaagtattctatttaactagtccatagtttatgatttttattataagtaaatctacattccctgcagatgtgtgctccccaaattattatttctacaagtgaatatcctaaaaagtctggagatcgctgacctgtattaatgttcttccttcagcaaacctattattaagaagaaaaacagagcataatctttttcctctctgaaaatgaaattgagttcgatcacaatgatctgatgaataaagttctaaaataagagcacaagtaactcacttaggttgatgccttgtcatggacaaagtccagtaatactttttggaagatagatgcttgaagataatttgtcaacaaaaaaaaaaaaaaaaaataactcattcccttgactaatttcccagtgggaagtgctgactattattggtaaaaatgatacctatggtcattgcccagatggctctttgaagaatgtagttggagacaaaagccctataaaatgtgtatgtcacaaaatcatactaaacctgtattgtgcactggggctattttaaccagttacactgtttcatttattttattaattcttttgactatttctmgggttgaatgatttgatttaaaatctctgttaagcttaaaggctagagtgaagaagaccgatgcacatacaagtgattggggcaaggtataaaatatttacactgcctctcactgctgtgttacttacaagattgcaagtgatcagttacactgaaaaaggtgctgtattgggaagg

SEQ ID NO: 727575 - DNA, 2619 bp, Homo sapiens
aacaatcagctcgaattgtttataatacacatttcttacctgatactcatactctgtaaaaggcaatagttcggaatctataaaagatgttgagcttccgttatagattaggactggattggattttctaggctgagttgctatttgtcttctgtataattcgtaatacaaaacttttccatttggctgcagcggtcctgtccacaaaagagaaacagttggctggaatcctcctggagccatttgtacctccagatgtggagggggttgcatcaaaggtgcaatctcaggggtctgtatgaatgtccagtcacttgatgcacatcccagggtggtgcacgcttgaattcgtatttcataccttcaggacataaggcagaaattagtgattttcagcaaaatagattttcatgggaagaatctttaaaacaccaggccttaaaaaaaaaagacaagcttacatgtattcttattcacagctaattcttaagaataacaaagttgagaatggcttgaacctgggaggcagagcttgcagtgagccgagattgcgccactgcactcccgcctgggtgacagagcaagactctgtctcaaaaaaaaattatatttccatggaaatttttgaacaatcaaaatccccctggctttctaaactaaagttcctgatctgttcgaaaggggtgagtgcaattcttcccctaaacaaggatgtatggaataaataactctcaagattctttccggcatgaaaattctggtactcttcagaattacttaacatagcaatgaagaatgcagaccttagaaagtatgaagcagttctcagcagtcctggactcctacctttgcagctagagctaaatgatccctcaggaatgtttccaggtcatgaaggaacatcatggaatgatcccccaggaatgtttccaggtcatgaaggaacatcatggaattacggtctcagtggtaataaatcccctcacctgatacctaacagcttaaaacagcctcccttacatgatacaaagaccttgcggggccaaagttaacccaactacacaccagattatcaatcatgaagacaccttatcaccatccagttaaattcaactaatcaattatgttttgcctcatagctggtctctgctacttgaaaaggtctatttacatagcagggacttctcctttccaacaaaatgagtttttgtgagtatttagtgcctatggctgtaaatgagcacttttttctctattcccaaccaccattgattttatgacaccttcaattttcccgcaggcacccagctatcttctttctacctttattccttttagttctagccttttcctcttctattttctacctcccctctttgctctttgaatcactgctttctgttcttgtacatgttctgtctcttccacctttttgctttcttaattacacctttttccctttgtgacttattttattcccactttcttctcctcctcccctggttctcctctcatgccgatctccaccatgacagggctaccagtttattggtgatcaaatccatagctgtgtatggtagatctgacttctaagcaattctgtgaagtcaattttgatttcccacataaagattattcattttctgggttatccgtggtagtttttaaattttgggctggattccttctgctacttaggactttcccagrctatttcttcttactgaccagctgggggtgctgaaaggaggacacacacatttgcaatattcagtgaacattaatccactaaaaacaaaaacaaaaaaccacgcatgaactccaacttcatatagaagtgatactctgttttatgtcaatgccacttacagattcagttagagtggataatgaagagatttctctcacattcttaaatatccttgcaatttatcagataaattaaacttttctttccagcctggaaaaagcattcctttcatgcctggacaaactctttcacctctagaatactttttgaataagagtttcaaaagggagcaaattgatatggtttttgaaagttggaggtacagtcaggtatagaggaagccagtctagaatatacagctctgcagctacagtggacctttttaatgccctgaatcagtgtaaggtaatataaaagccaactcacatagcatgtggattagctgcagaggatacctgaggaagttttaattactgtttaatatttaatagaccctaaataattgtcatgagtagatgcataaaaccacgaatgtttcatttcaacagcactatatatcagaggtaattataggaggatctaatctacacatcactagattacaataatagctgaattttacctgaggtagttggaaatcaacactctttcagcctttaatttttttaagtgattctgttcattttactaaattttaagcataaaatgtctcttattacccttctctctggggatgtaagttacttaaaatgtgatggggaaaactgccaaacaattatttaaacaatgggcaagattcttttgtgtggagaacaacgcacttccatgcatgtcacagagcccagatgggaccgctaggaaaacatgag

SEQ ID NO: 727576 - DNA, 645 bp, Homo sapiens
tatcacatcccttaaaatttgttccaaactggctttgtttccaaagcccatttttaagatgatgcatacttctaatttgtctttacagtggagctcagggcaaacaatgycacacaaatgtgacccttggaaacagattttgaacaactgccatggggcaaagctagtgctttttgtgttcacttgatttttctcatatatccaattctacaaaataatataataactgctgcttatcttttttaaaaataaaataactgtagcaacaacagattacatttgcatattactttacagtttacagaacactttgaataactgagagatacggagatgaaaattatgacaacccacattcactttcatatttcataggcctcctctatctcatacattgtattacatagatcgagcttccctacctatatgcaaaccccttaagggttgaaagtgagccacaagtgccaggatcagaatttaggtatgggaaataaaggggagcaattttcttttttaaaagaagttgattacgccacccaaagctgctggggctcagaatttaaggccaaggatgaatcccacctggccaactatctgatagatcattagaggtaaagtcaagttaatcagcaacagcattgacga

SEQ ID NO: 727577 - DNA, 645 bp, Homo sapiens
tatcacatcccttaaaatttgttccaaactggctttgtttccaaagcccatttttaagatgatgcatacttctaatttgtctttacagtggagctcagggcaaacaatgccacacaaatgtgacccttggaaacagattttgaacaactgccatggggcaaagctagtgctttttgtgttcacttgatttttctcatatatccaattctacaaaataatataataactgctgcttatcttttttaaaaataaaataactgtagcaacaacagattacatttgcatattactttacagtttacagaacactttgaataactgagagatacggagatgaaaattatgacaacccacattcactttcatatttcataggcctcctctatctcatacattgtattacatagatcgagcttccctacctatatgcaaaccccttaagggttgaaagtgagccacaagtgccaggatcagaatttaggtatgggaaataaaggggagcaattttcttttttaaaaraagttgattacgccacccaaagctgctggggctcagaatttaaggccaaggatgaatcccacctggccaactatctgatagatcattagaggtaaagtcaagttaatcagcaacagcattgacga

SEQ ID NO: 727578 - DNA, 542 bp, Homo sapiens
ttgttcccatatcctgaaatcagtaaatttaagcaattttatttttcattctgtgcttcagggatctatgagggtcaacacatatttatcacacgctgaccttgtgctcaggcctataggaaaatgaacctccctgcccgcaatgaccttagaacctaactaaggatatggttaaaacaagcgcaggattgggtgagacctgctcaagggtcaggcgctggtttgtcggggagaaatgttgcccaggaaggacaggtgtgaaagaaagagaagatcctgcaagaccrgagggcccaggaaagtctgggggactcaaaggagagtttcaggattgaccatgggtggacagggctctgcagaccaggatcttttctatgcacacttggggccagaaagttctttgtggtggggggctgtcctgtacaatgcaggaagctcagcagcatccctggcctccacccactcaatgccagtggcactccctccctagttgtaaatgtgtgcagacattagtacttgtcacctgcagggaagaatcaccc

SEQ ID NO: 727579 - DNA, 637 bp, Homo sapiens
aatgcttcatgcaatggttaaatcaagctaattaacatatgcattgccacacattcttatattttagtggtgagagtacttaaagtccactattttagtaatttgcaagcatacaatacattgttattaattatattcactgaattgtacaatggatgctttgtacttattctacaatgtttacgtattttcaaaatatattgtacgccataaacatatacaatttttgtccattaaaatttgttgaaattaagaagaaatgaaatgctttrcgttcattggtagagaaggtggtcaataagcgtggaatggattcgcagtccagtcactcggccgtgcaggaagccagcgtctggcaagggctgagtggcctgaggaatttcactgtttttagggctgatgtcacttttccctggctgcgcactaggtcatagtatgtctccaaagttgggataaacatttcctgagtgccagagtccccatttaaaaaataatagtaatggccgggcgcagtgcctcacgcctgtaatcccagcactttgggaggttgaggcaggtggatcacgaggtcaggagatcgagaccatcctggccaacatggtgaaaccccctctctactaaaaatacaaatgttagg

SEQ ID NO: 727580 - DNA, 1386 bp, Homo sapiens
tttctttgccctaaatattctttctaaacagagaagaggttcccactgtttggggtcctttatcccttgggtatgctcgaaaaccacaaaccctgtaatggccatttatcttattggttttccagtctctgaaaccctttcctaggtttggggataccctggccccagggagtcttggtgggaagcagagcccagctgttagtatagaagctgccaatgccagatacctgctcacgtaagcctttgctgctacatgggtgtgacccacgtgtaacaagtctgcacgccggctgcagggatagcctagagtgtcctctttggcaacagaggcagcagggctggtggcacattcagtgtccactggctgtagcatcagcatcttgcggtagccccagaaatgctctcactgaccacttacagcatstgctcctgccaaggttgcccctgagtctggctctccagccttccaggctgtctgccctgttctacctaaggtaaccacatttggatgctgttgcttacagccaaggaccctgatgtgggctttcaacctggaaaaatgcataaatgcagaagagtgcacagatcttgaggcaagtcacaggcacagcaggtctgttcctgccctgcctctagtaccgagacctacccgccctgctaggaccagctcaaccaggaaccctccagagatcactccgacaggagactctgccctttctggacttcactgctgctcatttgccatttacttccacgcagcagctctcccactcatgtgctcctctttgaactttcaggctcagcttcttagcgtctcccttctgaattcctgcagcagcttcctagtgagctccctacctccagactgagtggtccctccaaaggattcctcaaaccatctcaagtgcaaagttgattgtgtgactcttcagcttagggctccgtgtagctttcagcatgaaacccaaattctacaccttggcaagggagacctttcaggagtggaccctcaaatgtcttcagcctgagcccgagcccgaaggcattctccaatctcacccacatctaaggaagtgaccacggtgcaaccaaccaacatggctatgcagagacgcaggccagggcccccaaattccaggctgttttatgggaaacagcccaattttcaaatattgtcaattaaattttaaaaaccactaaaatactgtggttgacaaactaaacccatctgtgggctgaccagggcccatggacctccagtctacgatctctacctgctgcctgtatcttctttgtaaatatatttttgaactcgattggttctcccttgggtaggtactcaagtcaacatttctccaatgaatgagtgaacaaacagacaatgtg

SEQ ID NO: 727581 - DNA, 1386 bp, Homo sapiens
tttctttgccctaaatattctttctaaacagagaagaggttcccactgtttggggtcctttatcccttgggtatgctcgaaaaccacaaaccctgtaatggccatttatcttattggttttccagtctctgaaaccctttcctaggtttggggataccctggccccagggagtcttggtgggaagcagagcccagctgttagtatagaagctgccaatgccagatacctgctcacgtaagcctttgctgctacatgggtgtgacccacgtgtaacaagtctgcacgccggctgcagggatagcctagagtgtcctctttggcaacagaggcagcagggctggtggcacattcagtgtccactggctgtagcatcagcatcttgcggtagccccagaaatgctctcactgaccacttacagcatctgctcmtgccaaggttgcccctgagtctggctctccagccttccaggctgtctgccctgttctacctaaggtaaccacatttggatgctgttgcttacagccaaggaccctgatgtgggctttcaacctggaaaaatgcataaatgcagaagagtgcacagatcttgaggcaagtcacaggcacagcaggtctgttcctgccctgcctctagtaccgagacctacccgccctgctaggaccagctcaaccaggaaccctccagagatcactccgacaggagactctgccctttctggacttcactgctgctcatttgccatttacttccacgcagcagctctcccactcatgtgctcctctttgaactttcaggctcagcttcttagcgtctcccttctgaattcctgcagcagcttcctagtgagctccctacctccagactgagtggtccctccaaaggattcctcaaaccatctcaagtgcaaagttgattgtgtgactcttcagcttagggctccgtgtagctttcagcatgaaacccaaattctacaccttggcaagggagacctttcaggagtggaccctcaaatgtcttcagcctgagcccgagcccgaaggcattctccaatctcacccacatctaaggaagtgaccacggtgcaaccaaccaacatggctatgcagagacgcaggccagggcccccaaattccaggctgttttatgggaaacagcccaattttcaaatattgtcaattaaattttaaaaaccactaaaatactgtggttgacaaactaaacccatctgtgggctgaccagggcccatggacctccagtctacgatctctacctgctgcctgtatcttctttgtaaatatatttttgaactcgattggttctcccttgggtaggtactcaagtcaacatttctccaatgaatgagtgaacaaacagacaatgtg

SEQ ID NO: 727582 - DNA, 1083 bp, Homo sapiens
  misc_feature 932, 1071: n = A,T,C or G
cagattcaatgtagaaaatgcctgtaaccctacccacccaactgtaatttcttccatgaaaaacagaaattgcacagaggtctctgctctgaagcctgcacaatgacaaaggagtctgtgagatggagaactaaaagagcgaagggatcttcaccctgtgtgccatgatgccttgacactgacaccaaacaatgttgtgtctgtctctataatccggaggatgggcaatatggattttgtgacataaaaatcagcgtgacatatgactaccataaaagaaggaattaacagactaagtattttcttcatacttgactaataaacatttactacatgtacagttacttgtactgtactttatgttatgaaatcggagcaagcaagaaaagaatccaagagaaaatcattccttcccccttctccgtttaattgttctttcctctgcccagctggaagaagctctgtggacaagagctggcaaggtttccaaattgcaaataacatatcatgatttattatagatacattccattgcttagcctcccctagagcccttgccatattatgccctttttgtctctgttttttatgcatggagcaarttccatcttaatccaccacatataggtgtccaaaaaattctgctctttattttctttatatcaacttaaattcatctcaagtctctggctctctgagctggcaagaaactcaatctgtcattactggagtcctcttacctccttggcttacaccagaatctggggaaagtgcatctatagaaactgggagaagggtttctaatctcacacctagcttgatcccatctgatattctcactgcccaacctttctttccccatgctaagtaggaaagggggagtgtggtgaggggaatttgcctcacctgaaagccctggtgcttggagtgangataaatgagacaccatgcagctgtcctttctgacgtattacccagcaggacatgaccacagaacaggcaagagtccccattacccatagacccatgaaccttcatcccttcccagtgacccaaaactttcactctttnttggtcttcaaa

SEQ ID NO: 727583 - DNA, 1944 bp, Homo sapiens
ctgtcacctaggctaaagtgcagtggcatgatcatggctcactacagcctcgacctcctgggctcaagtgatcctcctgcttcagcctcctgagtagctgggaccacaggcatgcaccacctaggctggctaattttttaattttttgtaaacacggggtcttgccatgttgcctagggtgacctcaaaatcttgggctctagcagttctcccaccttggcctcccaaagtgctgggatttcaggtgtgagccacagtgccagcatttatttagtttttagagatgggatcttgttctgttgctcaggcttgagtgcagtggcctgatcatagctcactgcagcctaaaactcctgggcttaagtaatcctcttgccttagccttcccagtagctgggactctaggtatgccacgggctaacttttttaaagatgaggtctcactgaaaaaatacacattttaaagtgctcaaattagttgaagtttgtaaattacagcagttcatttcttagggcttgttactaaggttcatttttacatactaaagctgacttgcctatttctcaagtggctggtatgctttttcacaaccattactggaggaagtgggtgacttgtgtcagttctgaagttatattttgtctaagtgtttagtgtgcccaggaaggctgtttgagctggttctttgaggatctcatttgattttgattggcttatcagtgaatctcagattttccttcctctaaaatagttgtttttaatagcctttagtgcacattggagtgacctgaagggtttgtgaaactacagatgctgggccccaccctcagagtttctgattcacttttaggtctggggtgggtcacatttctaaccagagttcccaggtratgctggtgatgctggtcctgggtactttgagaacctctgccttaaactatcctttctatgagacctttttcttcactcacttttcatctctctgtctctcctcatttttctccaccttccctgctttttgctgtcatttaagagattctttcataaccttgctgtctttatctgtgtcttacatcaccttagttgttggttggttggttgtttttatttggagatgaggtctcgctatgttgcaggacatagtgcagtggctgttacaggtgcagtcatagctcactgcaaccttgaactcctgggctcaaacaatcctcccatctcaacctcccaagtagctggaactacaagctccactttaggtctttatctggcctcttgcctgaaacaaattcaatttcaaccaaactgctatctgccatctttgtttcctacatacaaacttcttcctttttatgttagaatttgaaaataaattagaaaagaacgaatcactcattttggcgccacagtgtcagtcagtgcatcctctccgtccttcttttattcccaggagactttcttatgaagcctactgaggagttgcgcctacttcaacctgtttagcttgcaatcttaaaaaaacaaaaacataaacaaaaaaaaccagtaaaacggtacgaggtgcaggaagcaacattaatcatgtgaaaatgacgttttaatttaaattattctagtgcgctaagaagtattttcatgtaaatatttccattttatgtagtgaagaaacaaaaggaaaatttgtacatgtagaccatttattttacttaagtataaagtacagttgtgttattaaatgtaaactgtttatctcatagtacaactgatttttaaattgaagggattttctttttgggggataggtcatattggaatgcttcaagcaactcaaatgacccaggaagttacaattaaagatttagaatcagaaaaatcgagagtcaatgagagattatctcaacttgaagaggaaagagcttttttgcgaagcaaaacccaaagtctgg

SEQ ID NO: 727584 - DNA, 1944 bp, Homo sapiens
ctgtcacctaggctaaagtgcagtggcatgatcatggctcactacagcctcgacctcctgggctcaagtgatcctcctgcttcagcctcctgagtagctgggaccacaggcatgcaccacctaggctggctaattttttaattttttgtaaacacggggtcttgccatgttgcctagggtgacctcaaaatcttgggctctagcagttctcccaccttggcctcccaaagtgctgggatttcaggtgtgagccacagtgccagcatttatttagtttttagagatgggatcttgttctgttgctcaggcttgagtgcagtggcctgatcatagctcactgcagcctaaaactcctgggcttaagtaatcctcttgccttagccttcccagtagctgggactctaggtatgccacgggctaacttttttaaagatgaggtctcactgaaaaaatacacattttaaagtgctcaaattagttgaagtttgtaaattacagcagttcatttcttagggcttgttactaaggttcatttttacatactaaagctgacttgcctatttctcaagtggctggtatgctttttcacaaccattactggaggaagtgggtgacttgtgtcagttctgaagttatattttgtctaagtgtttagtgtgcccaggaaggctgtttgagctggttctttgaggatctcatttgattttgattggcttatcagtgaatctcagattttccttcctctaaaatagttgtttttaatagcctttagtgcacattggagtgacctgaagggtttgtgaaactacagatgctgggccccaccctcagagtttctgattcacttttaggtctggggtgggtcacatttctaaccagagttcccaggtgatgctggtgatgctggtcctgggtactttgagaacctctgccttaaactatcctttctatgagacctttttcttcactcacttttcatctctctgtctctcctcatttttctccaccttccctgctttttgctgtcatttaagagattctttcataaccttgctgtctttatctgtgtcttacatcaccttagttgttggttggttggttgtttttatttggagatgaggtctcgctatgttgcaggacatagtgcagtggctgttacaggtgcagtcatagctcactgcaaccttgaactcctgggctcaaacaatcctcccatctcaacctcccaagtagctggaactacaagctccactttaggtctttatctggcctcttgcctgaaacaaattcaatttcaaccaaactgctatctgccatctttgtttcctacatacaaacttcttcctttttatgttagaatttgaaaataaattagaaaagaacgaatcactcattttggcgccacagtgtcagtcagtgcatcctctccgtccttcttttattcccaggagactttcttatgaagcctactgaggagttgcgcctacttcaacctgtttagcttgcaatcttaaaaaaacaaaaacataaacaaaaaaaamcagtaaaacggtacgaggtgcaggaagcaacattaatcatgtgaaaatgacgttttaatttaaattattctagtgcgctaagaagtattttcatgtaaatatttccattttatgtagtgaagaaacaaaaggaaaatttgtacatgtagaccatttattttacttaagtataaagtacagttgtgttattaaatgtaaactgtttatctcatagtacaactgatttttaaattgaagggattttctttttgggggataggtcatattggaatgcttcaagcaactcaaatgacccaggaagttacaattaaagatttagaatcagaaaaatcgagagtcaatgagagattatctcaacttgaagaggaaagagcttttttgcgaagcaaaacccaaagtctgg

SEQ ID NO: 727585 - DNA, 615 bp, Homo sapiens
aagctggaatgtgattaagtctaaaagtaaatattccaataataaatgctgcaggaattagagaaaaaaaggcattattttgagctgggtaatacctttttttataaaaattattgagctcgtgattgcaataagctatacaaatctcaatcatcaaaaaattaatgttaacaacatgtctaaaaataagtatgtaagcactaagaagtttaatgtcatcatctattcttcttttcctcttaagaataaataatttactgttagaagttcaattaaagaacatgctgagaaagagtaggaccytagaaaaaaataagatggccattcactgaggcccacatttatacgtacctcagaaaattgctcactatctggggtcgctggcacacataccatgtaggaccagaaactggatctcaccaatgtctcagagtgataaaactcaggaatgctaagttatgcaaaacaaacccatatgaaacgaatgctaatggattacttcacacagataaatgtaattgtcagtcgaataggggcattggcctaaatagtacagtctttttttggacacatgcttcatggaaacaaaattttcaaagaagcttggtaaaccta

SEQ ID NO: 727586 - DNA, 630 bp, Homo sapiens
tgtagagtgccgtaactatcataaggaaatcagcagagcagtggacagagtgtgaacagggcctgcactggaggyggacatggaaggtcctctgagaaggtaacgtttgatgaagtagggagcaacaagtccagtgcagatcaagagagaggactccaagcagagccaacagcaagtgcaaaggccctgaggcaggaatgaggtggctgtgtggctgaagcaaagtctgtgcctaatgactaatcaaaagttgcttctggcacccagcctggctcctgccccaagctgaaaacagatcaccagcaacaactctagcttcccaagcctctcctgcctagacatgcagctccacccaggtcagaggtacagctgcagggaccacaaaacaatgggcttagctctgtgaagacaggaaaagccaccatggttttgacaaagaacccaggaatggcgttaaagacttctttgggcagtgtccaatttatggagcaattttgttggccacatctacggaggtataaaaaagacagacataaggcaaggatggaactactttgtttatgtgtgttgatatcccttccccatgctcctgtacgcctcatagctcctgcagcgtggtgggtgatccca

SEQ ID NO: 727587 - DNA, 630 bp, Homo sapiens
tgtagagtgccgtaactatcataaggaaatcagcagagcagtggacagagtgtgaacagggcctgcactggaggtggacatggaaggtcctctgagaaggtaacrtttgatgaagtagggagcaacaagtccagtgcagatcaagagagaggactccaagcagagccaacagcaagtgcaaaggccctgaggcaggaatgaggtggctgtgtggctgaagcaaagtctgtgcctaatgactaatcaaaagttgcttctggcacccagcctggctcctgccccaagctgaaaacagatcaccagcaacaactctagcttcccaagcctctcctgcctagacatgcagctccacccaggtcagaggtacagctgcagggaccacaaaacaatgggcttagctctgtgaagacaggaaaagccaccatggttttgacaaagaacccaggaatggcgttaaagacttctttgggcagtgtccaatttatggagcaattttgttggccacatctacggaggtataaaaaagacagacataaggcaaggatggaactactttgtttatgtgtgttgatatcccttccccatgctcctgtacgcctcatagctcctgcagcgtggtgggtgatccca

SEQ ID NO: 727588 - DNA, 2330 bp, Homo sapiens
cttctacctgtgaagtttcatcattccttggaacaacagacgaacttgccttctccaaactctgcatctcactgagcctctatatttgcaagtgggtgccaccagcttctctgtgcacagtggttaagatcttgcttgggccctcaagtcagacatatttgggttaagattcacttcctggctgtgtggacctcacagaatttactgtctcttctggagtctttgttcccttgtcagtaaaatggagtgctgtctaactcaggggattgctggaaggatgaactgaggacaaccaagcggagaaccacacacattgtgttagcacggagtattcaattggatgttctaccaagaaatggcatggagaagtgctttgcaagctagactgaccaattcaatttatttattatgatttttgttacttgtaagctccacaagagcaaggatttttgtctgttttgaccacagttataccgcagagcctaaacagtgactggcatatagcaggcactcagtaatatgtggaatagatgaatgaatgctagctagcccaagaagaggtatacaacctgagaagtcagcaggcagaaaatgcactccccctttatctggccaggactggaagcagctgctgctccacatggagcggcccccagcccccaaaagcctgccagcttgtggagtgagggtgtaaccctggcagcttctctggagctcagttctccccacccccccaagacctgactcttccagaactctctstagcctagctgcaggctggatggcacgtgcatgtcgctgctacatctgagctggtcccaggcaccacctccaggtcagggctattttagatctcagggtgtcagaaacataaaaggaccagtcttggaagctgtggctgagacatgggcagagagtgctggattctctccccacatctaagctagagcctgaaatagtggaaagatctcagaatagctcctggcttcaccacaactccaggctggagcataacacacaccagagagaggccaaatacgcagcttacacaggcagctcggggcatgggaaagtcctctggatgaaaaaaatgaaagtcacggtataaaacccaggactgtccttgttcagggaagagtggcagcatcttccgaggatccagtgatagggccaatgaatggtgactggtgtaggcaaggtcatggagccagcagtgtggccatagctagttgcggttagccctggagagccctagaatggaagcttgtaaacatccagggggtttcaaaagcatttgactcaacaaggacgtgacctgccatggccctgaggagggcaccagggccttataatcatcaaaagcctcatgtgccaggcattgggttgtgcatcttaaaaaccttatcttattttgttctcaccgtaagtctgagcaaaaggcactattactttcactttagtggtaagagagacccagaagcattaagaaacatggctcaatgagtaagtggtagaacttggatttgaatgctggtctgtgtgattccaaacagcattttagcagggtctttatgaaagggtaggattttgctatcttgagaggggacatgtagtgaagagcctatgattccagcccttaggtatttgaaaagagcctcctgaagctactgtgaatgctggtgacgttaccagggccgaggccaacagtttaacatgggcagagatgggggctggagaatcctgagctctccagatggccttgcagtccaaagcctgctcctggggcaggcatcccgtctccagcttcggagggagcccaggggcagcccacctcctgtgggcccactccatttgctgctcctgccttgggagtcccaatcactgactctgagaggggctacatcccccctcccagggtctgagactcctcctcaaggactgacactgtgccacttttcaacaatagccatggtacctgtagaagtggctgtgggaggcaaagaaggaggagcatgtgagataaagaactcagacttaaccaagacctaagttacctcacccacattctcatcctgttgcccaagacgctcagcccagccatgtcaagattccctgttgctatcctctctccccttcccgtcttaggcactgactgacacgcctctagaactatgctgggtaggtagatactagcaactgtgtggttgaggaggaggccaccatgagggagcagtgtggagcaaaatccccacctgccatctcacaaagagcttttctttttctcctccaaagtcccgggacaaaacagccacccgtaaacatattctaag

SEQ ID NO: 727589 - DNA, 2330 bp, Homo sapiens
cttctacctgtgaagtttcatcattccttggaacaacagacgaacttgccttctccaaactctgcatctcactgagcctctatatttgcaagtgggtgccaccagcttctctgtgcacagtggttaagatcttgcttgggccctcaagtcagacatatttgggttaagattcacttcctggctgtgtggacctcacagaatttactgtctcttctggagtctttgttcccttgtcagtaaaatggagtgctgtctaactcaggggattgctggaaggatgaactgaggacaaccaagcggagaaccacacacattgtgttagcacggagtattcaattggatgttctaccaagaaatggcatggagaagtgctttgcaagctagactgaccaattcaatttatttattatgatttttgttacttgtaagctccacaagagcaaggatttttgtctgttttgaccacagttataccgcagagcctaaacagtgactggcatatagcaggcactcagtaatatgtggaatagatgaatgaatgctagctagcccaagaagaggtatacaacctgagaagtcagcaggcagaaaatgcactccccctttatctggccaggactggaagcagctgctgctccacatggagcggcccccagcccccaaaagcctgccagcttgtggagtgagggtgtaaccctggcagcttctctggagctcagttctccccacccccccaagacctgactcttccagaactctctgtagcctagctgcaggctggatggcacgtgcatgtcgctgctacatctgagctggtcccaggcaccacctccaggtcagggctattttagatctcagggtgtcagaaacataaaaggaccagtcttggaagctgtggctgagacatgggcagagagtgctggattctctccccacatctaagctagagcctgaaatagyggaaagatctcagaatagctcctggcttcaccacaactccaggctggagcataacacacaccagagagaggccaaatacgcagcttacacaggcagctcggggcatgggaaagtcctctggatgaaaaaaatgaaagtcacggtataaaacccaggactgtccttgttcagggaagagtggcagcatcttccgaggatccagtgatagggccaatgaatggtgactggtgtaggcaaggtcatggagccagcagtgtggccatagctagttgcggttagccctggagagccctagaatggaagcttgtaaacatccagggggtttcaaaagcatttgactcaacaaggacgtgacctgccatggccctgaggagggcaccagggccttataatcatcaaaagcctcatgtgccaggcattgggttgtgcatcttaaaaaccttatcttattttgttctcaccgtaagtctgagcaaaaggcactattactttcactttagtggtaagagagacccagaagcattaagaaacatggctcaatgagtaagtggtagaacttggatttgaatgctggtctgtgtgattccaaacagcattttagcagggtctttatgaaagggtaggattttgctatcttgagaggggacatgtagtgaagagcctatgattccagcccttaggtatttgaaaagagcctcctgaagctactgtgaatgctggtgacgttaccagggccgaggccaacagtttaacatgggcagagatgggggctggagaatcctgagctctccagatggccttgcagtccaaagcctgctcctggggcaggcatcccgtctccagcttcggagggagcccaggggcagcccacctcctgtgggcccactccatttgctgctcctgccttgggagtcccaatcactgactctgagaggggctacatcccccctcccagggtctgagactcctcctcaaggactgacactgtgccacttttcaacaatagccatggtacctgtagaagtggctgtgggaggcaaagaaggaggagcatgtgagataaagaactcagacttaaccaagacctaagttacctcacccacattctcatcctgttgcccaagacgctcagcccagccatgtcaagattccctgttgctatcctctctccccttcccgtcttaggcactgactgacacgcctctagaactatgctgggtaggtagatactagcaactgtgtggttgaggaggaggccaccatgagggagcagtgtggagcaaaatccccacctgccatctcacaaagagcttttctttttctcctccaaagtcccgggacaaaacagccacccgtaaacatattctaag

SEQ ID NO: 727590 - DNA, 700 bp, Homo sapiens
tacatttcaagaaaaggtcatttttttttcccctcagcaatatctcgcaattcctcaggatagtacagcatgtaaaccataaaccactttcaaccagatctcaattctccagctattggctttggtttattgatgaatgacattctccactccgctgacagggaataaacataagcaatttagtcccttgaacaaaaattaagtcacaagagcaccctcatgtttaccattttctgcctgactaaaattggtacaagagaagagattatcagcacaactttcatgtaactgctgagaatcccaagtgagggccaacacagcctacccgggctcaagtgagaaaacaagtagcttagcacttctcacgcgctgcccaaattctcccaatctcgattactgcacagagctcaacccccacgtgctaatgtttgggacatgacatgttagtgtctatcttggaaagatgtggataggtcatgcttcctgtagcgttttccaacgtggcactgtaatacgggtcctttgagggttggctcatgatacactgtagacccattccaatgggtacacaaaggaaaaaaaaaaaaaaaagcagaatcagagctgagttcccctttaaaagccaaaygcctacatctagaaggaggctcccctacctgagagccctagccctattggggttcccactgtggaaaccctc

SEQ ID NO: 727591 - DNA, 595 bp, Homo sapiens
ctgcctctactaaaaaaatacaaaaattagccgggcatggtggcatgtgcctgtaatcccagctactcaggaggatgaatcgcttgaacctgggaggtggaggttgcagtgagccgagatcacgccattgcactccagccygggcaacagagcaagactctgtctcaaaaaaaaaaaaaggacactttagcaggcatgaagaaaacttgtctttatcattctgtctactcttgctccaagacttatttgtatttatcaagcatttttatttgatttaagtaaagtacattaatgagaaaataaagtcttttctcacttcactttctgcaccacctgaatttctgtgccctttgaccttgcagtaaatcgcagtaacattcaggaaagccaaagagttaagaaaactaagtcttgattgggacataaaatttaaaaaaagaaaagattatgcacagagatgcaaggaaggacaataatcatatgatatacttgcacaatatttactaattttttcagaaattttacatctattgtccttctcagtgcaattacatcaccctttctgctctgaaatgtttttcagatattaaaatgc

SEQ ID NO: 727592 - DNA, 601 bp, Homo sapiens
ccattagtcttaagagttcacacctcttttaccttctgccagacagcatttcgaagacctaaaggtatttatatcttttttagtttctttagcctaaaaagcttcagtctcctaaaatttgagatggtttgtataccctgtacaccctccagggtaacccccttgaatacttgctaactagacaagaacctttttaaactgcgatgctcataaataaagaccctcactcaagagagaaacaatgtggagtttacaaagttgtgatctgcacagagaaagctctaacaatgccaactaaagcttggcccaatcttctctgtcttcaaaacaggagagatgtgatagattttctgaataaaaactccgatttactgttgcactggttctcaacccyttttcaatgctgcaacatctgaggatgaggaatatgatcattctcataagaaacaagattcatgaaaggaacagaaagggggtgaggtgggtgaaaaagccactagtatgtctgattctgataattctacatgtaagagtaacgatgtttactatactaacagcagaaatacagattaaatgctaaaacaaaataaaaattgaaacg

SEQ ID NO: 727593 - DNA, 638 bp, Homo sapiens
ttttttttgagttgccaaaacatttctgtaataatgtatacattctccatagctattagtacccgttagctttttttaattgaacagttggcccttcatatctctgggttctgcatatgtgtggattcaaccaaccatggatcaaaaatattcttaaaaaaattgcatctgtactgaacatgtacagacttttgttctcatcactattccctaaactagtgctccccagcctttttggcaccagggtctggtttcatggaagatttttccatggacaggagggagtcrggggtgggggttggttttggcatgattcaagcacattacacttactgtgcattttatttctattattattacattgtaatatataatgaaataattatacaactcaccataatgtagaatcagtgggagcctgagctcgtttccctgcaactagatggtctcatctgggggtgatgggagacagtgacagatcatcaggcattagattctcataaggaacacgcaacctagatcccttgcatgtacggtttacaatagggtatgtgcttctgtgagaatctgatgccaccactgatctaacaggaggtggcgctctggcggtaatgcttgttcatctgccactcacctcc

SEQ ID NO: 727594 - DNA, 593 bp, Homo sapiens
catcttctgaagaagaaataagaaagtactgttttcctggtttttcagaaaataagaaatataatactcatttaatgagcatactctgcacatgttatacatacaaattaactcatttggttttcaaacaagacccccccactcccccgtttttccaagacagagtcttgctctgttgcccaggctggagcgtagtggtgtaatcatggccyactgcagccttgacctcctcggctcaagtgatcctcctgtgtcagcctgccaagtagccaggactataggtgtgcgccagcatgctcaggtaatttttaaattttcttgtagagatggggtctcaccatgttgctcaaactcctgggttcaagcaatccttctgcctcagcctcccaaagtgctgggattataggcatgagccactgtgcctggcctcaaacaacccattcttattaccagtcccattttacagatgaggccaatgaggctcagggagcttgtgtaacttgcctgagggctcacgaatagaaaaggaacaggaagcacagcactaatatacataccttgctctttgcccatccccaccctctcttcccaca

SEQ ID NO: 727595 - DNA, 593 bp, Homo sapiens
catcttctgaagaagaaataagaaagtactgttttcctggtttttcagaaaataagaaatataatactcatttaatgagcatactctgcacatgttatacatacaaattaactcatttggttttcaaacaagacccccccactcccccgtttttccaagacagagtcttgctctgttgcccaggctggagcgtagtggtgtaatcatggcctactgcagccttgacctcctcrgctcaagtgatcctcctgtgtcagcctgccaagtagccaggactataggtgtgcgccagcatgctcaggtaatttttaaattttcttgtagagatggggtctcaccatgttgctcaaactcctgggttcaagcaatccttctgcctcagcctcccaaagtgctgggattataggcatgagccactgtgcctggcctcaaacaacccattcttattaccagtcccattttacagatgaggccaatgaggctcagggagcttgtgtaacttgcctgagggctcacgaatagaaaaggaacaggaagcacagcactaatatacataccttgctctttgcccatccccaccctctcttcccaca

SEQ ID NO: 727596 - DNA, 593 bp, Homo sapiens
catcttctgaagaagaaataagaaagtactgttttcctggtttttcagaaaataagaaatataatactcatttaatgagcatactctgcacatgttatacatacaaattaactcatttggttttcaaacaagacccccccactcccccgtttttccaagacagagtcttgctctgttgcccaggctggagcgtagtggtgtaatcatggcctactgcagccttgacctcctcggctcaagtgatcctcctgtgtcagcctgccaagtagccaggactataggtgtgcgccrgcatgctcaggtaatttttaaattttcttgtagagatggggtctcaccatgttgctcaaactcctgggttcaagcaatccttctgcctcagcctcccaaagtgctgggattataggcatgagccactgtgcctggcctcaaacaacccattcttattaccagtcccattttacagatgaggccaatgaggctcagggagcttgtgtaacttgcctgagggctcacgaatagaaaaggaacaggaagcacagcactaatatacataccttgctctttgcccatccccaccctctcttcccaca

SEQ ID NO: 727597 - DNA, 437 bp, Homo sapiens
tactagggcagtgccaaggggaaatgggaggttggagctcccacacagagtccccagtgggccactacctagtgragctgtaggaatgggactgctgccctcccaattgcagaattgtagagccatcagcagcttgcaagacttattgcaataagatactcttaagtcatttggaaatgtattcctatataaaaaaggcaatggcaaatagatgttaaaagttctgaagtgaaagatgatcaacatatttcttaaggtggtcaaagtttacagagaagaaaatgcttaagctgatttttaaatgggctatctttaggcaggctaaaggacaaggaattctaaagtggatgcatggcatggaggcataaaaactagcatgatttggagtgaattaaatttgctacattattgttagagcacagtgcatagaggaggca

SEQ ID NO: 727598 - DNA, 651 bp, Homo sapiens
gtggtgatggagggcactatttttaagactttagggcaggcatatagcaggaaggaagccatcaactgtctgcccttagtgatagttaccctgacagcggctgctatggatacgtttcctgaatactaaaccgggttcatacagggcttcggatcccaaatttgacaagagtcatactcaggccctgaaccatcaacctgacacaactcaaacagttccccagggcaaaacagcacctttggaaccttaaatcaacaactgagtgttgaaaccaacagctgcacatacgcacacacaccttgctacaaggtaggaggtgatttttaccaaacggggagttttcacaaagccttcttctctgctcccctatccaccccactcacactattatttttgcagcctttcactgataaatatgagttcaaccttaaaacaccacattttcatcttgaaaccaaggtagctaacataaaggataaaaraaatagaaaaaaaacttcttttataatgaagctaagtcagttgcttactggtgatgctttcagccacaaagaaaggtttaaatactcttcagggtaaattactattgttactcaaaaagtaagagggagagagccaatgattacattagcttccattcattgaaagcct

SEQ ID NO: 727599 - DNA, 513 bp, Homo sapiens
  misc_feature 403, 410, 411, 412, 413, 414, 415, 416, 417, 418, 419, 420,421, 422, 423, 424, 425, 426, 427, 428, 429, 430, 431, 432,433, 434, 435, 436, 437, 438, 439, 440, 441, 442, 443, 444,445, 446, 447, 448, 449, 450, 451, 452, 453, 454, 455: n = A,T,C or G
  misc_feature 456, 457, 458, 459, 460, 461, 462, 463, 464, 465, 466, 467,468, 469, 470, 471, 472, 473, 474, 475, 476, 477, 478, 479,480, 481, 482, 483, 484, 485, 486, 487, 488, 489, 490, 491,492, 493, 494, 495, 496, 497, 498, 499, 500, 501, 502: n = A,T,C or G
  misc_feature 503, 504, 505, 506, 507, 508, 509: n = A,T,C or G
attgtccgagataaccagtttagattaggaatctaggctgagaaccaaattcctaaagcccattctatttttctggtgcagacccatayatcttgcctctttcccttctagcagctcaacgtctataggttagtgctctaaaagaacttcacaggtggcagaactgaaaaaaaaagccttttttccctctcataaaaatacctctttactttatgcctttccatcatctcatgtagctttccaaaaaatgaaacacgtacataaagaccaactacactcaaaatgctgagtgggtcagggagagactgggatcttgatcattaaccaaggctctgtggaggaattaagttgtttgacttgtagctccaggcttggtgaattaggtagtatttcatttcacatnctttgtnnnnnnnnnnnnnnnnnnnnnnnnnnnnnnnnnnnnnnnnnnnnnnnnnnnnnnnnnnnnnnnnnnnnnnnnnnnnnnnnnnnnnnnnnnnnnnnnnnnntttt

SEQ ID NO: 727600 - DNA, 1130 bp, Homo sapiens
agcctgggtgatgagcaagaccctgtctcaaaaacaaaaacaaaaaaatttctattaaaaaataccctaatctgaaggatttagaatgacagtgaagggttttgactttgacatgaggcagaccagtttgactcccagctctgccaattattcatcatctaaatttgggcaattaaaataattgctctagcctcagttttctcacctataaaataggaataataacatccatcccatgatgtcaactgtgaggactgcataaaataatccaggaagatgtgtattgggtgttctctgttactgttacttaacatggaacaatttagatgtttggagcagtaacatgaaaagagcttttctcatttggtgtctattttcatatctaaaattaacctttttttgttcattttccagaacaatatgccccaaatatatatcctaatttctatttttttgcaggagaggaaactacatatatatttgagatgtcagcttttctttctggtttctaccagccccattaaggtttcaaaccttttagatccaagtcttggcctgagctagggctctgggagtgaggaactgcctatctccccggtggggaggaagcttctccaagcaccgcgcattgtcagagtgggcatggggcctgagcatgtcctgtgccatgcatagctctgggggacactctgtctgcccctgaattgcctcactgttacagttaagaagatgaacctcgtcaggggctattaccagtgctgccttttgttccaaaccactgcagaggaacaaaaaaaaaacaaacaaaaaactgcactagttttaaaaattggaagtggcaaaataggagatgtaggcttgatgtagatatkaagtaattattctaaattagtgaaaactgacaactgaacaacactgattatgaaacaaagattttggaccgcccaccctgaataatgaagagttatgtcaagcaaaattgatatgaaacgatgtgtagtgatttcaagttgaccccccttccactgttgataagtactcggtcacttcgatagttttatttctatttttttcttaagaaggcttattctaaaggtccttttttcactatcattgtaaaaaataaaata

SEQ ID NO: 727601 - DNA, 662 bp, Homo sapiens
agacaaactatggttattcaagcttcggtatttggcaaacattttcttgaagataaatagagtccatactttcaagggaaaccaaaaacagtatatgttgctaatgataaaaatgagcttccaagcaaaaatcagaattttaaaaacttgcatccactagaggctcattttgctatgttaactgaaatacacgcatggtggaaccaagtccccactttgcactggttctatcagcttctcaatgcccaaagcctttgctgagaagacccayggtggtattaacaaatgtgattttttttttttttggcattttgtatcaacattgggaagatctgcatgattcggtgaaccaatattttcccattttctactaacacattagaaaatcatgcatgaacgacatccattaaaagctcaagattgatcaatggatttaaagttccaatacaataattttatttctatactttcagattttacactgaaacttatctttaagaaactgccatatatctttggtgtaacagcaaatatccacagttaactgaataggctattaaaatactcctcccttttccaactacagatctctgtaagttcagtttttcttcatatccttcaaccggaacatacagcaacaaaatgaaagtagacacagatac

SEQ ID NO: 727602 - DNA, 637 bp, Homo sapiens
cttgatggtgggggtggcaggatgatggcagggacatgcagaaggtggagggagagaagcaaagccctgaccagtgagggaagaagggatcgggcactgtctgttgtactcactgaaagcagcacagccagcctggtttctgagaatgacggtctctcgggctggatggggatgcggagcccttctgacggccttggcctcttcctcaccctgccccagcccctacygccattcctgggtccccaccctgtgcccagctggcccgagggtcttttgtgcatgggtttgtcatgtctcagagaaatctcacggatggcctgctgcccacgtgcaggaactcgggccagtcacgcatcggacagcggtggagcagggctggggtccaggatctgggcttggagctcttctccactcagccctactggctgggggaggtggagggacagcgagtcagcccaggactcccagcacctcagggttactgatccactgtgaggcagagacccgcgtactccctttgagtgcctgccctgatccaccatatcactgagaaatcacattagcagaacggctgggagcctcccaccacagaggtccccctcctccgcctccacaggactcagataacctcacgaca

SEQ ID NO: 727603 - DNA, 637 bp, Homo sapiens
cttgatggtgggggtggcaggatgatggcagggacatgcagaaggtggagggagagaagcaaagccctgaccagtgagggaagaagggatcgggcactgtctgttgtactcactgaaagcagcacagccagcctggtttctgagaatgacggtctctcgggctggatggggatgcggagcccttctgacggccttggcctcttcctcaccctgccccagcccctaccgccattcctgggtccccaccctgtgcccagctggcccgagggtcttttgtgcatgggtttgtcatgtctcagagaaatctcacggatggcctgctgcccacgtgcaggaactcgggccagtcacgcatcggacagcggtggagcagggctggggwccaggatctgggcttggagctcttctccactcagccctactggctgggggaggtggagggacagcgagtcagcccaggactcccagcacctcagggttactgatccactgtgaggcagagacccgcgtactccctttgagtgcctgccctgatccaccatatcactgagaaatcacattagcagaacggctgggagcctcccaccacagaggtccccctcctccgcctccacaggactcagataacctcacgaca

SEQ ID NO: 727604 - DNA, 637 bp, Homo sapiens
cttgatggtgggggtggcaggatgatggcagggacatgcagaaggtggagggagagaagcaaagccctgaccagtgagggaagaagggatcgggcactgtctgttgtactcactgaaagcagcacagccagcctggtttctgagaatgacggtctctcgggctggatggggatgcggagcccttctgacggccttggcctcttcctcaccctgccccagcccctaccgccattcctgggtccccaccctgtgcccagctggcccgagggtcttttgtgcatgggtttgtcatgtctcagagaaatctcacggatggcctgctgcccacgtgcaggaactcgggccagtcacgcatcggacagcggtggagcagggctggggtccaggatctgggcttggagctcttctccactcagccctacyggctgggggaggtggagggacagcgagtcagcccaggactcccagcacctcagggttactgatccactgtgaggcagagacccgcgtactccctttgagtgcctgccctgatccaccatatcactgagaaatcacattagcagaacggctgggagcctcccaccacagaggtccccctcctccgcctccacaggactcagataacctcacgaca

SEQ ID NO: 727605 - DNA, 637 bp, Homo sapiens
cttgatggtgggggtggcaggatgatggcagggacatgcagaaggtggagggagagaagcaaagccctgaccagtgagggaagaagggatcgggcactgtctgttgtactcactgaaagcagcacagccagcctggtttctgagaatgacggtctctcgggctggatggggatgcggagcccttctgacggccttggcctcttcctcaccctgccccagcccctaccgccattcctgggtccccaccctgtgcccagctggcccgagggtcttttgtgcatgggtttgtcatgtctcagagaaatctcacggatggcctgctgcccacgtgcaggaactcgggccagtcacgcatcggacagcggtggagcagggctggggtccaggatctgggcttggagctcttctccactcagccctactggctgggggaggtggagggacagcgagtcagcccaggactcccagcacctcagggttactgatccactgtgaggcagagacccgcgtactccctttgagtgcctgccctgatccaccatatcactgagaaatcacattagcagaacggctgggagcctcccaccacagaggyccccctcctccgcctccacaggactcagataacctcacgaca

SEQ ID NO: 727606 - DNA, 2174 bp, Homo sapiens
tcgcataggacaaccatacttcctttcccttctccaccagttctacctcccaggggcaatggtgagtgggaaacgctgtgcttgcagcccctgcctaactctgggcctgcatgtcggtttgctgggctgaggcgctggcatgccccgggcaaggcaggctcatgcacgcagcgacatgaggaacgattttctgctgaaaacacggagcacatcaacaatttcctctcctccctgatgtgccttatgtgtgtagaaaattcctgaaaccactagatcagataagatccactggttttgtcctccagggagaggccgcttcaggcaggcagggtgtgactgctggcccctcctatcccgtgggtgccagcccaggcaccgcccccctccccttttctgacatgcaccttggctgattgcttaactttgcttttaagaaacagacaccaaggctccatggcttttcttgttttaataagcctacattttgggaaaatgaaatcagcttctcaacttcaataggcattacaactcagaagcccaaaagccgaaatcaaacataactccatcgaaaaccactctgacagggccccacacagctcaggtgcagatgcatccgtaggccatctcgggcctctacggagaaagccagtgccatcaagagagcttygaggacttttccccgggttggtaccagggaggtccctgagccctggtgcctgaccaacccacacctgtgtcagacgagactttctgcccgagcaaaacaaagccccacacaacccaggccagcttgatgctagggccccggggacaaagtctctttctggggcatggttttagagagtcattttgaagacagaagcctgactgtttcagcaccactagggaagtggaaactgaagcagcattttctgctgtcttctatagctaatggacaggttgatttccaagatgcaattcccctcccacgcatctacttctcattggctttgcttttgggcctcgtctcccatgcccttgtttctctgagctgaagtcaggtctttgagcagagagctttggggaggtggctttccctccttaggtctctaatattctgagaaaggagtcttcagaatattagaaaagtctgctgttagaaattaacaggaaacatcaaatatcggaaacatggtcaggcctcctgcaggactgctgtcagcaggaaaacactgccgggctgggagcccaggagggctgatggcacacaggctgtctcctctgtcagctccagggaacacctgctgtcagcacttgggggcctcctgaccccacctctgggtgccggaagggagctgggagccaggatcctggaagatgagtttccgtttccccagggctcctctgccatcacttcccttccaagccaggagaaatcctttaaccagaacctacgctgtgccttatccccaccctgtctgcacccccagccctcccccagcccctcagggctgtttctttttctggctgccacactccagctcctcacatacacacacaaagtgaagcagaagctccgcgaccccatgctcatgagtagaatcaaagagagcctctcattcctcaagggtcacagatgtccagtctgtgataagattggggtttccagctgttttactgggcgggacattaaaacaacacccctggccttctggtagctcagtgggagggttgagaagctgcctcctgctactgcctttactcctgctctgcctggtccctcacggcagtcagaggggtcttggtaaatcaatttatgccacaccacatcactctttgggtttcagaatcaaccaccaagtccctcccatggccacacgcccctgagtgacctggccttgacactctctcagttcttctctctcaccctctccctggccatttctattcagcccctctgacatcctggctcttcctctaagactctgagcatttgcacttactgttccctctgcctggagcactcatcccctcgatatccccatgattctctctgccactgcattcagtcctctcagaagtgactttcttggccaccttatctgaaatcaaacttcaatggcatcccacattctctggttcccagactgtaactaagagttacttatccctgtctttgatcataaactccatga

SEQ ID NO: 727607 - DNA, 611 bp, Homo sapiens
tccctacccaggcaaatttatctgctcttatgttttcaaatggcatctctatgttgatgacccctcgacttacgtatttagctaagacttctctttagggttctggtctcttatgtccgatatccaatttcctccctgacaactgcactttgctaacttataagcatctcaaaattgatgtttcyaaaactagacaatgttctttcttctgaagtttgtttctccccctagaattgtccaattcagtcaactgtatccatcccatggttcagtcagacacctggctccatctatggtcctccctgtctttcatcccctacgtatcattcagcatgtactgtcactcatgtctagccacagccatgcagctggtacaaagggtctgggatttctttaggtttccttcttcctgactccactataagaacagtatgggaagatctgtctggaggcaggcagatgttgaacaattagtcatgcatacatcttaggtcaactcccaaagtgccctttgtgggctgcttagtttctcacaaaggcacagagagatgcaacaggtctgaggatcctgaattcattcttatcattttgataaagctatattctttatt

SEQ ID NO: 727608 - DNA, 659 bp, Homo sapiens
gctcataggccatgcaaacacaggaggtaggctggatttgactaccggaagtagtttactagcccttgtttttggctggtcactgatctccacaccatggaaggaattaatgtattcaggctcatggccctgggtaaaaaggtccacctgcttaggaaagtgctcaggagataaaatcctcctgggaatcacataatcttttttttttttttttarcatctttttcttttcctttgtcctgtggcttttcacgtggtttcaagacaagtgtcaaactttacatttgacttagaaaagccacaactcatattcagactccttctgcagtggcagaagactgctgggctctaagccccaggaagacggggactgtgtgtctttttccttgctactatattgctggggtctaatgtagcatctgacagagtaaggcactaaataaatgtttgttgattgaatgactaaatgattaaaaagtccctttaaagcactttttttttggtgttttttgtttttgtgtttgagaagaagtctcgctctcttgcccaggctggagtgcagtggcacgatcttggctcattagaacctctgccttccaaggtcaagtgattctcctgcctgatcctaccgagtagctgggatgacaggcggcctgccac

SEQ ID NO: 727609 - DNA, 659 bp, Homo sapiens
gctcataggccatgcaaacacaggaggtaggctggatttgactaccggaagtagtttactagcccttgtttttggctggtcactgatctccacaccatggaaggaattaatgtattcaggctcatggccctgggtaaaaaggtccacctgcttaggaaagtgctcaggagataaaatcctcctgggaatcacataatcttttttttttttttttagcatctttttctyttcctttgtcctgtggcttttcacgtggtttcaagacaagtgtcaaactttacatttgacttagaaaagccacaactcatattcagactccttctgcagtggcagaagactgctgggctctaagccccaggaagacggggactgtgtgtctttttccttgctactatattgctggggtctaatgtagcatctgacagagtaaggcactaaataaatgtttgttgattgaatgactaaatgattaaaaagtccctttaaagcactttttttttggtgttttttgtttttgtgtttgagaagaagtctcgctctcttgcccaggctggagtgcagtggcacgatcttggctcattagaacctctgccttccaaggtcaagtgattctcctgcctgatcctaccgagtagctgggatgacaggcggcctgccac

SEQ ID NO: 727610 - DNA, 613 bp, Homo sapiens
tttatcatgaccctaccaaagtccctctcccaggggtcattggcagagaaaccccaacagctctctcaatcaatcactggggcagcagggaaggctgagggccctggctggggaaaagctggtctttggagaggtatgaatgtgcagatataaaaagcaagaagagcatccttatctccttgccttggctaaggcactgacaggaaaaatgcaaggtaggaatggcaaagaggggaaaggaagaagacaaaaatataggaactggaggggtatggggactaccacatgggccccatacttgtgcaaagaaatgggtagagccatgcctgcatgtctgttacccataacattcccctcaccctgctccagagtggaaggaaaatgagttgcaggaatccagggagcacaataacatagggtatttccctgagccttagggttaagggctaaagaataaagctttatacacatggcaatttctatcccttcctatccttctcagtccccatcagcctaatgctgaccatccttccactataagagagatgagggaggtgtcggcacttgaggaaaaggctcagttggcttgaaaygtccactcctacagtggaaa

SEQ ID NO: 727611 - DNA, 1258 bp, Homo sapiens
tcccaagcactttgggaggctgaggcgggtgaatctcctgaagtcaggagttcaaggccagcctggccaacatggtgaaaccccaactctactacaaatacaaaaattaggcaggcgtggtggcagaggcctgtaatcccagctacttaggaggctgaggcagggagaattgcttgaacccaggaggtgagcttgccatgagctgagatcataccactgcactccagcgtgggtgacagaacaaaatttcaacctccaaaaaaaaaaaaaaaaaaaaaaaaacagctagcaggtgacatttgctatggggagactagggatatgatcttgctgcaatccttccattttagtaaatctaaacagtgtgaatccattctgtttygtcccaactccactccagagccaaaacaagaaaatcaattatatttctagttctttaaaaacatatctaactaaatcatctaattaaaagataatatgcatggttccatactctaaaagaaaacttatgtcctgcatatcatggacatttgatgaatgcttattcagttgactggtgtagacttcaataataacctgttcaaatgcattatgccagatgaatcttgcatctcaaaagtagaacaaatattgttctttcagttttgtctacccataaatgcaatatttactaataaaaagaaaatgagtttattgttctagagagtatgagaattttgacaacatgaattctcctgtcctaggacataattaatacttagaggcatactatttcatgtggaagctaccattaaatcaatgttaagtgttaattacctcacataatcttctaatctgacttaagactgaagacgtacctcacaaagttgatttatcaagttgtaaatcttcacctgttgaattcataagttcatgtctgaaaggtgagaataaatacttaatattcactaggcaatattcagcaaagtaatatccactagtacatatttaatatttcatcatgaactgtgggtgtgaagagaaaagacaggctgggcacagtggctcatacctgtaatcccagcagtttgggaggccgaggcaggcagatcatgaggtcaggagttcaagaccagcctggccaacatggtaaaaccccgtctgtactaaaagtacaataattagctgggcatggtggcaggcacctgtaatcccagctactcgggaggctgaggcaggagaattgcctgaacccaggaggtggaggttgcagaaacca

SEQ ID NO: 727612 - DNA, 1258 bp, Homo sapiens
tcccaagcactttgggaggctgaggcgggtgaatctcctgaagtcaggagttcaaggccagcctggccaacatggtgaaaccccaactctactacaaatacaaaaattaggcaggcgtggtggcagaggcctgtaatcccagctacttaggaggctgaggcagggagaattgcttgaacccaggaggtgagcttgccatgagctgagatcataccactgcactccagcgtgggtgacagaacaaaatttcaacctccaaaaaaaaaaaaaaaaaaaaaaaaacagctagcaggtgacatttgctatggggagactagggatatgatcttgctgcaatccttccattttagtaaatctaaacagtgtgaatccattctgtttcgtcccaactccactccagagccaaaacaagaaaatcaattatatttctagttctttaaaaacatatctaactaaatcatctaattaaaagataatatgcatggttccatactctaaaagaaaacttatgtcctgcatatcatggacatttgatgaatgcttattcagttgactggtgtagacttcaataataacctgttcaaatgcattatgccagatgaatcttgcatctcaaaagtagaacaaatattgttctttcagttttgtctacccataaatgcaatatttactaataaaaagaaaatgagtttattgttctagagagtatgagaattttgacaacatgaattctcctgtcctaggacataattaatacttagaggcatactatttcatgtggaagctaccattaaatcaatgttaagtgttaattacctcacataatcttctaatctgacttaagactgaagacgtacctcacaaagttgatttatcaagttgtaaatcttcacctgttgaattcataagttcatgtctgaaaggtgagaataaatacttaatattcactaggcaatattcagcaaagtaatatccactagtacatatttaatatttcatcatgaactgtgggtgtgaagagaaaagacaggctgggcacagtggctcatacctgtaatcccagcagtttgggaggccgaggcaggcagatcatgaggtcaggagttcaagaccagcctggccaacatggtaaaaccccgtctgtactaaaagtacaataattagctgggcatggtggcaggcacctgtaatcccagstactcgggaggctgaggcaggagaattgcctgaacccaggaggtggaggttgcagaaacca

SEQ ID NO: 727613 - DNA, 834 bp, Homo sapiens
tgttcctaaactcttttctttgatttattgcttttgtagaaaagttcatgtgagcaaaaattcaagcttgtttttgctaagcttagaggcattctccttcagggcagtaggggacatggtgtggaggtaccccttggtattattccctgtctgttgaggttctgtcgggtgtgacttgcctgggtcttaaacatctttgagtgggagaagcaggtttgattgagtgctaacagcctgtgaaaggaaggtgattaatgctatccatttaacccctgcaaccctgaaaggcagagaaggaaacaggtttggaaagtttcagagctcraaatcacagagctgggattggaacccagacttcccctgactccaaaagctgttgctctgtggggagtgaaggatctctgagtaccgtgttgaaattcagacctgttttggtggctgaggtgaatattaaacattaaccaccaccacaaacaacaaacattcaccaccaccgcaaacaccattgcaactcacaacattgcagaatcttgaatgtggaaatcagcccttgattctttcgaaagcctccacatcctttccagatggcacagaaagggccctcctacaatcccccggcacccacactgacccctcctgccgtgcttatcacatggtgtcatcactgtccacttatgtatctgcctctcccttgggactttgtgctgcagagggcaggagctgtgtcttgaatctttgtgccattgactttctcgtgctgtgacgtagcacctgcctggctcagaacaggcactcaataactgttgagtgactgattggatgaatgaatgagat

SEQ ID NO: 727614 - DNA, 1064 bp, Homo sapiens
tatgaacaatttatttgtgaaatttatcatgtaatattttcataccatatttaatcacaggtaactgaaagcacagtatgcaaaaccaaagacaaagggaggaatactgtaattttaatctgtgacagggatgaaaatcccttcaatcaatgcaacaggtattgtaggagagagtgcctgtgctccaaaatgtgatagaaaatttagggtccttttcccagtgttgtatgcttgaaatttacaaaccaaacttaaatttatttattgtagtacaaaagaaggccaaaaaagactttatrtcattcagcagtgtctcttccatttgaggcaaatatttggctttattgtaatctggcaaagtttcattcatttctgtgtcagatatgaacaaatgtaatcatcaacatgggttctgcagtacagaaatttcttatgcttttacagtaacatgaagatttaagtgaagaaagtgaacctgtaaattagtcaatgtgcatcagataagaggactagattgcttatatgcaaatatcaaaacaattgggtcactgaaaagaagcattagaagctgctttttaagaaacagaagctgaaaatagtgctcttgcttctaattatagcaactctacttctcccctatattgacatcttggaagcaattcgttctaattattttgtccacagatatctaaggaagatttaaaaaaaaaattatcaagcaacaaacctcagtttaaattagggatttttactgttatgtgctgtttcactataatgagtctccctttttatcatagaaatattcaatgtaagaactctctagttctgtggatttaggtacaatgttaatatctgtgtcagaaaatgttaaagaaatagatataagatgaatgactgaaggttttcagcatctgtgattttattgaaccaaaaattttcaaaggtaatgattttcaaacttttataatggatccaaactatgttcaataattttctggcaaactaagataatctcagatgactccataagttttgaaaatgtcaaagtaatgagaatttaaata

SEQ ID NO: 727615 - DNA, 1429 bp, Homo sapiens
acttgtgctcctttttgttctgtgtttctatgtgggtcaattggcagccacagaatcactcccttaaacagggattctttgtggcccatttattgtcctcttaattgttgtcagtgacaccaaagtttggcaggttaacctaaatttctttgcacaggtcacgattgatatagtctgggtttaaacgatgtctttgctatctaagatgagacctcctgatcccttctgaaatttattcacagttggctaagtctagcttccttgcgggtggcgcgtaattgcaggcaaaactacaggttggcctcatcatgatggatggaattcagttgagagtagccttaattaaatgctatcagaaatatttagtcctagcctctgtcagtcasattaattagaatggccagtggagtggcataatccttggtttttgttttcagccaagaacacactaggaaggcacaggaatatattattgagaaaggaaatcctccaaagttcctgaacatccctcaaaattgttccctgcaccccaacccttggaaatggcccaagaaaacagtcatcaggaccttgcattcctccagtgtcccctctaaacttattttaaaacagagtgcttccaatgagacgcctccttgtgaatagcttttgccagcgccccctagagggaagattaaacagcgagtttcagatcgcaaatctctagcaggtattgacaatgtgccatcatatgtgttcttcgtcattagggagccaagatcctgccttacccaacatgacctggatctcaggactgaggagggggggtcttccttgggtgttctgtctcacctctaggagtagtgtctattatatactgtgatgcatttaacatatctgctattgtattataaatttcatctgctattatatttgttggagttttcttgaccttttactagtcaattccaccttattctgatcccttgaagtatataataataggattatcatggcaccagcatgaggtcaaacttgattctgatatctttgttttaaaatgctatgccacccaaagatgaatatcaggtgtgctatgtggattgtgttgaaaagtaattaatagtgaagtatttctactaaatgctttttcaaccaagtagtaatcatttttacaggaacttaataattttctgcataggtttgcagtagtttcacttttcatttgctatttctatatttagtaacttttcaaatttctacaacagttgatattgtttttgataatcaaagaagcttaaatatgttaatatcactgaaaaaattgacctagccaacaaattgtaatgtagcttaaaaataaggcctaagttttttgagaatcctttatgtgatgatagtttagctatcaaatttccccctcaatgttatatataattatgtatgtata

SEQ ID NO: 727616 - DNA, 1429 bp, Homo sapiens
acttgtgctcctttttgttctgtgtttctatgtgggtcaattggcagccacagaatcactcccttaaacagggattctttgtggcccatttattgtcctcttaattgttgtcagtgacaccaaagtttggcaggttaacctaaatttctttgcacaggtcacgattgatatagtctgggtttaaacgatgtctttgctatctaagatgagacctcctgatcccttctgaaatttattcacagttggctaagtctagcttccttgcgggtggcgcgtaattgcaggcaaaactacaggttggcctcatcatgatggatggaattcagttgagagtagccttaattaaatgctatcagaaatatttagtcctagcctctgtcagtcagattaattagaatggccartggagtggcataatccttggtttttgttttcagccaagaacacactaggaaggcacaggaatatattattgagaaaggaaatcctccaaagttcctgaacatccctcaaaattgttccctgcaccccaacccttggaaatggcccaagaaaacagtcatcaggaccttgcattcctccagtgtcccctctaaacttattttaaaacagagtgcttccaatgagacgcctccttgtgaatagcttttgccagcgccccctagagggaagattaaacagcgagtttcagatcgcaaatctctagcaggtattgacaatgtgccatcatatgtgttcttcgtcattagggagccaagatcctgccttacccaacatgacctggatctcaggactgaggagggggggtcttccttgggtgttctgtctcacctctaggagtagtgtctattatatactgtgatgcatttaacatatctgctattgtattataaatttcatctgctattatatttgttggagttttcttgaccttttactagtcaattccaccttattctgatcccttgaagtatataataataggattatcatggcaccagcatgaggtcaaacttgattctgatatctttgttttaaaatgctatgccacccaaagatgaatatcaggtgtgctatgtggattgtgttgaaaagtaattaatagtgaagtatttctactaaatgctttttcaaccaagtagtaatcatttttacaggaacttaataattttctgcataggtttgcagtagtttcacttttcatttgctatttctatatttagtaacttttcaaatttctacaacagttgatattgtttttgataatcaaagaagcttaaatatgttaatatcactgaaaaaattgacctagccaacaaattgtaatgtagcttaaaaataaggcctaagttttttgagaatcctttatgtgatgatagtttagctatcaaatttccccctcaatgttatatataattatgtatgtata

SEQ ID NO: 727617 - DNA, 1429 bp, Homo sapiens
acttgtgctcctttttgttctgtgtttctatgtgggtcaattggcagccacagaatcactcccttaaacagggattctttgtggcccatttattgtcctcttaattgttgtcagtgacaccaaagtttggcaggttaacctaaatttctttgcacaggtcacgattgatatagtctgggtttaaacgatgtctttgctatctaagatgagacctcctgatcccttctgaaatttattcacagttggctaagtctagcttccttgcgggtggcgcgtaattgcaggcaaaactacaggttggcctcatcatgatggatggaattcagttgagagtagccttaattaaatgctatcagaaatatttagtcctagcctctgtcagtcagattaattagaatggccagtggagtggcataatccttggtttttgttttcagccaagaacacactaggaaggcayaggaatatattattgagaaaggaaatcctccaaagttcctgaacatccctcaaaattgttccctgcaccccaacccttggaaatggcccaagaaaacagtcatcaggaccttgcattcctccagtgtcccctctaaacttattttaaaacagagtgcttccaatgagacgcctccttgtgaatagcttttgccagcgccccctagagggaagattaaacagcgagtttcagatcgcaaatctctagcaggtattgacaatgtgccatcatatgtgttcttcgtcattagggagccaagatcctgccttacccaacatgacctggatctcaggactgaggagggggggtcttccttgggtgttctgtctcacctctaggagtagtgtctattatatactgtgatgcatttaacatatctgctattgtattataaatttcatctgctattatatttgttggagttttcttgaccttttactagtcaattccaccttattctgatcccttgaagtatataataataggattatcatggcaccagcatgaggtcaaacttgattctgatatctttgttttaaaatgctatgccacccaaagatgaatatcaggtgtgctatgtggattgtgttgaaaagtaattaatagtgaagtatttctactaaatgctttttcaaccaagtagtaatcatttttacaggaacttaataattttctgcataggtttgcagtagtttcacttttcatttgctatttctatatttagtaacttttcaaatttctacaacagttgatattgtttttgataatcaaagaagcttaaatatgttaatatcactgaaaaaattgacctagccaacaaattgtaatgtagcttaaaaataaggcctaagttttttgagaatcctttatgtgatgatagtttagctatcaaatttccccctcaatgttatatataattatgtatgtata

SEQ ID NO: 727618 - DNA, 1429 bp, Homo sapiens
acttgtgctcctttttgttctgtgtttctatgtgggtcaattggcagccacagaatcactcccttaaacagggattctttgtggcccatttattgtcctcttaattgttgtcagtgacaccaaagtttggcaggttaacctaaatttctttgcacaggtcacgattgatatagtctgggtttaaacgatgtctttgctatctaagatgagacctcctgatcccttctgaaatttattcacagttggctaagtctagcttccttgcgggtggcgcgtaattgcaggcaaaactacaggttggcctcatcatgatggatggaattcagttgagagtagccttaattaaatgctatcagaaatatttagtcctagcctctgtcagtcagattaattagaatggccagtggagtggcataatccttggtttttgttttcagccaagaacacactaggaaggcacaggaatatattattgagaaaggaaatcctccaaagttcctgaacatccctcaaaattgttccctgcaccccaacccttggaaatggcccaagaaaacagtcatcaggaccttgcattcctccagtgtcccctctaaacttattttaaaacagagtgcttccaatgagacgcctccttgtgaatagcttttgccagcgccccctagagggaagattaaacagcgagtttcagatcgcaaatctctagcaggtattgacaatgtgccatcatatgtgttcttcgtcattagggagccaagatcctgccttacccaacatgacctggatctcaggactgaggagggggggtcttccttgggtgttctgtctcacctctaggagtagtgtctattatatactgtgatgcatttaacatatctgctattgtattataaatttcatctgctattatatttgttggagttttcttgaccttttactagtcaattccaccttattctgatcccttgaagtatataataataggattatcatggcaccagcatgaggtcaaacttgattctgatatctttgttttaaaatgctatgccacccaaagatgaatatcaggtgtgctatgtggattgtgttgaaaagtaattaatagtgaagtatttctactaaatgctttttcaaccaagtagtaatcatttttacaggaacttaataattttctgcataggtttgcagtagtttcacttttcatttgctatttctatatttagtaacttttcaaatttctacaacagttgatattgtttttgataatcaaagaagcttaaatatgttaatatcrctgaaaaaattgacctagccaacaaattgtaatgtagcttaaaaataaggcctaagttttttgagaatcctttatgtgatgatagtttagctatcaaatttccccctcaatgttatatataattatgtatgtata

SEQ ID NO: 727619 - DNA, 850 bp, Homo sapiens
ttagatttagggccaacctagttaattcaggatgacctcatcttgaaatccttaactaattatacctgcaaagaacctttgtccaagtacagtcacattcgcattcacagatacaaggggttagaactcagacataagttttgagagaccacaattaaatgcactgtaattaacagagtaacatcattataactgatataccagctctaggtaatttccttttaatagtctgttcaaagattaggaggaaaacaaaaaaacctcttgcattgaatgttatgtgatacacaatggttttatgactacttatgacagttatgttgggataaaagcacttttccagcagtggcaaatttcttttgacatgttctataagaaatagctgtatgttttattttgtttatatatatatatatatataatatatatatatatatatakagagagagagagagagatgtgtctaaatctgctagtgtaatttttgttgttgtgcaaaaacatctgtcaaagtatctgtaatcacccagaatatgttttttgaaagaaaagaagaatatgaacaaggaataacaacataaccatgcccaaggataacaatacattattgctaagctggaaatatgaatagaaatgaaaataatcaatggtttccagtaatcagagaattcattagagaaagacaaacagtaagccaaaaacatctttgtattggatactttttgcagtggatatttattttgtaccactttaaatcctagtggcctcacctcttattctatccattgctctggcaactagcttacatacgcttagacaattttggagccagtgcatgcccacttcctgc

SEQ ID NO: 727620 - DNA, 666 bp, Homo sapiens
cttgagcttcaggcttactccgtgctagacttggtgttgagtgcttgagacacactgtctctctcctacttccctatgaggtagagattgcactgcatctttgaggagactgacactcaaagaggttgagtaacttctccaagctgacccagctactaagcagcagtgctgggatctgaatccaagcccattgtcagccctctgcagacttggctgggcagttcgtagaagagtctcacrtccgttgttgcatttgatggcgtagcaacctcagggttttgccaagtgtgtgattgtcattattatgatcccatcctacaggagaggaaatggagattcccacatcacacagtaagtaaagatgggacagggacttgcacttccgcactgtgctcaggtctccactgtaagcacagcctccctcctggtttaaaagcattcccttactgcttaacatcagtgttccaacgggatagttcattcatccatttggtaaatatttatcaggcacctactatattttaggccctgtgtgggagattagtgctgaacaagccagaacctgttcccttcctgaagctttccatctctgtgggtgagaaaaacttgaaataactgcacacacaaaaatgataaaaactgtgataagtattgttcttgaggtgg

SEQ ID NO: 727621 - DNA, 607 bp, Homo sapiens
tgatccccagcgcgctacacagtatcattagttcactgatgcctgacaagttttatcctaaagtgaacgatacaagtggagacacgttcaagtgttccctgaagtagaagcattcctggtttctggaggagatgatatgtaataacaattacatggtgctttcatcttcaaagccctaygcaagcatcatctaattaaccctcactacatacctggaaggcagggaagcatcattaaacctgggtttcaggagaggagattggaaactacacattaaatgacaagccctctaccagaaagtctcagccttggtgccaaaaccagcaaggaagaactcctcacccttactgctaagctgaggccgagaagaaaaatcaacattgaaattttaaaatttattgcaaaggtcatatacgatagcttcttgtaaagcttatcagagaataggaaaataaatggtattcatacagagaggcaggattctaaggtgctggctctggattttttactgcctagcggtgtgacctagccatactttgaattcctcatctgtcaaagaagccctattagtctgtgattcccaacacataacagccctaaaacaatt

SEQ ID NO: 727622 - DNA, 1885 bp, Homo sapiens
ttatcgtcgttgcttttaagtagatattcacctgcaactgagtttacaggttcctatgtacagtagcttcctctgtctccattgcttcctccctgagaacagtcctagcccttatcctgggtcgcacagagaacagctccagtctaattccagagtttcttctatggggcgtgtgccactgtgtacccccagagaccctgcagtcttggttcagagccaccttcttttttttttttttatttttttaagatgaggtctagctgtgttgcccaggctggcctggaactcctgggctgaagcaatcctcccacctcagcctcttgagtagctggaacttcagagattcctttgctgtggaatctctggcaggagacgggggttcccagatgattctgatgtgctgacatacattcagctgaggaccactaaccatgcctggaaagttctgggaaggcagggactgccttactcatccttgaacacctaggaaagaccctgcacaggagacagatgcccagaatctacttgttggcaggtgaatgtggcatgtggacagtagtggattagtcactgtgtgctcagcaccatgcaaagccctttacgaatacgtgcatttaagttttcccataagactctcaggagggctacagaatctccattttacagataagaaaataaggttgcaaagatgtggaaccagcccaaaggcccatcaatcagcaagtggataaagaaactgtggtatatctatgatggaatactactcagtcataaaaaggaatgaattaatggcatccacagcaacctggatgggattggagactcttattctcagtgaagtaactcaggaatggaaaaccaaacatcatatgttctcactcataagtgggaactaagctttgaggatgcaaaggcgtaagaatgacataagggactctggggcctcggcagggaaagggtaggaagggggtgagggataaaagattacaaattgggttcagtgtacactgctcgggcgatgggtgcaccaaaatctcacaaatcacagctgaagaaattactcatgtatccgaataccacctgttccccaaaaacctatggaaatagaaaattaaacaagaaagttaggttcagggagatgaagtgacttttccaaggtagcctgactaggaaggggagggtagtggatggttagacagactggcacccaccggacaggcaggacctagcctcaccctgggggctgtccctgctcgtcagcacctgcccactggagccatgtgacagagggacacagcgtagccaagacatttacaaagcgaggatcctttgtgcctgagtgaagtgatcctttcaaaaatgatcaccagctccccttcaccacctccggagaccaagtcctggctgatttttccccgtctttatctcaagtacatttaaatgtcaattaaatttgaaatatctacatttgtcagcatttcattttgggccagcgtgacgtgctgctgatttgtccacgcgatgtgacacatraaaaaaactcccgagatgcagatcttcctcattaaaaaataagccggtgcgatcccggcgcggcagagagcatggagcacgtccctgcttcctgacgccgtgtctctgacatggtatttaaaaaggaacagcctcgcctgtcaccactgtcacacgcgcgcgctaaccggcgacacgttaaaccaaacattagaaggggttcgggaagtcatctgcatgggaactccacgcggagacaaggtgggcagaggcgggagcagccgtgggggatgatggggtctgatccatgacggacggccagcctttcttctgcaccaagactctggcagccctcgctgggcagccaagtttg

SEQ ID NO: 727623 - DNA, 1885 bp, Homo sapiens
ttatcgtcgttgcttttaagtagatattcacctgcaactgagtttacaggttcctatgtacagtagcttcctctgtctccattgcttcctccctgagaacagtcctagcccttatcctgggtcgcacagagaacagctccagtctaattccagagtttcttctatggggcgtgtgccactgtgtacccccagagaccctgcagtcttggttcagagccaccttcttttttttttttttatttttttaagatgaggtctagctgtgttgcccaggctggcctggaactcctgggctgaagcaatcctcccacctcagcctcttgagtagctggaacttcagagattcctttgctgtggaatctctggcaggagacgggggttcccagatgattctgatgtgctgacatacattcagctgaggaccactaaccatgcctggaaagttctgggaaggcagggactgccttactcatccttgaacacctaggaaagaccctgcacaggagacagatgcccagaatctacttgttggcaggtgaatgtggcatgtggacagtagtggattagtcactgtgtgctcagcaccatgcaaagccctttacgaatacgtgcatttaagttttcccataagactctcaggagggctacagaatctccattttacagataagaaaataaggttgcaaagatgtggaaccagcccaaaggcccatcaatcagcaagtggataaagaaactgtggtatatctatgatggaatactactcagtcataaaaaggaatgaattaatggcatccacagcaacctggatgggattggagactcttattctcagtgaagtaactcaggaatggaaaaccaaacatcatatgttctcactcataagtgggaactaagctttgaggatgcaaaggcgtaagaatgacataagggactctggggcctcggcagggaaagggtaggaagggggtgagggataaaagattacaaattgggttcagtgtacactgctcgggcgatgggtgcaccaaaatctcacaaatcacagctgaagaaattactcatgtatccgaataccacctgttccccaaaaacctatggaaatagaaaattaaacaagaaagttaggttcagggagatgaagtgacttttccaaggtagcctgactaggaaggggagggtagtggatggttagacagactggcacccaccggacaggcaggacctagcctcaccctgggggctgtccctgctcgtcagcacctgcccactggagccatgtgacagagggacacagcgtagccaagacatttacaaagcgaggatcctttgtgcctgagtgaagtgatcctttcaaaaatgatcaccagctccccttcaccacctccggagaccaagtcctggctgatttttccccgtctttatctcaagtacatttaaatgtcaattaaatttgaaatatctacatttgtcagcatttcattttgggccagcgtgacgtgctgctgatttgtccacgcgatgtgacacataaaaaaaactcccgagatgcagatcttcctcattaaaaaataagccggtgcgatcccggcgcggcagagagcatggagcacgtccctgcttcctgacgccgtgtctctgacatggtatttaaaaaggaacagcctcgcctgtcaccactgtcacacgcgcgcgctaaccrgcgacacgttaaaccaaacattagaaggggttcgggaagtcatctgcatgggaactccacgcggagacaaggtgggcagaggcgggagcagccgtgggggatgatggggtctgatccatgacggacggccagcctttcttctgcaccaagactctggcagccctcgctgggcagccaagtttg

SEQ ID NO: 727624 - DNA, 382 bp, Homo sapiens
gttctatgtgtcatgtaaaagaagataggaataaaaattgatgacagtgttcttttttgttggtggacaccatttaataaggtcattgatcaagggatgcactgtaattccacagaatggaaaaacaaactatgtcatgamaggtggtattatgtggattaacaaatcaaatttatagaacaattttcagtattattaactttaaacaagggcatattcagtatactggcttataatgctaatattgaggtgtctccttattgataaatatttaatgggcaatggaataaaataaattgaatgtgactactgtagaagatacgttacaatgtaaatggaacacatgtaactgcataaaattttataagcaaattttgaaaaa

SEQ ID NO: 727625 - DNA, 643 bp, Homo sapiens
aatcctgatcttttaagacttttttttacccaactttagtatccaccttttctctcaagtctacctatcagcatactcaatatggtcattttcttgtctcttctttctacatgtgctttctgcatccacttggtcttaagctttgaacagatgttcctccatccttagggcctcctgttatccaagatcaggattcctctccttttcattacgtccaacagaaccctcatcatcctatttctcatctaatgcacaagtcaagatagcccctgcccagtccctcttcaaaaaaatgagaatcttgggactttaattattgaactgtggtcaaaccatcggtacccaacatcatcctatggcaaagccaacattcactatattkttttgagacagagtctcactctgtcacccaggctggagagcagtggtgcagtctcagctcactgcaacctctacctcctgggttcaacagattctcctgccttagcctcctgagtagctgggattacaggcacccaccaccacccctggctaatttttgtatttttcatagagatagggtttcaccatgttggccaggctggtctcgaactcctgacctcaggtgatctgcctgcctcagcctcccaaagtgctgggatta

SEQ ID NO: 727626 - DNA, 643 bp, Homo sapiens
aatcctgatcttttaagacttttttttacccaactttagtatccaccttttctctcaagtctacctatcagcatactcaatatggtcattttcttgtctcttctttctacatgtgctttctgcatccacttggtcttaagctttgaacagatgttcctccatccttagggcctcctgttatccaagatcaggattcctctccttttcattacgtccaacagaaccctcatcatcctatttctcatctaatgcacaagtcaagatagcccctgcccagtccctcttcaaaaaaatgagaatcttgggactttaattattgaactgtggtcaaaccatcggtacccaacatcatcctatggcaaagccaacattcactatatttttttgagacagagtctcactctgtcacccaggctggagagcagtggygcagtctcagctcactgcaacctctacctcctgggttcaacagattctcctgccttagcctcctgagtagctgggattacaggcacccaccaccacccctggctaatttttgtatttttcatagagatagggtttcaccatgttggccaggctggtctcgaactcctgacctcaggtgatctgcctgcctcagcctcccaaagtgctgggatta

SEQ ID NO: 727627 - DNA, 643 bp, Homo sapiens
aatcctgatcttttaagacttttttttacccaactttagtatccaccttttctctcaagtctacctatcagcatactcaatatggtcattttcttgtctcttctttctacatgtgctttctgcatccacttggtcttaagctttgaacagatgttcctccatccttagggcctcctgttatccaagatcaggattcctctccttttcattacgtccaacagaaccctcatcatcctatttctcatctaatgcacaagtcaagatagcccctgcccagtccctcttcaaaaaaatgagaatcttgggactttaattattgaactgtggtcaaaccatcggtacccaacatcatcctatggcaaagccaacattcactatatttttttgagacagagtctcactctgtcacccaggctggagagcagtggtgcagtctcagctcactgcaacctctacctcctgggttcaacagattctcctgccttagcctcctgagtagctgggattacaggcacccaccaccacccctggctaatttttgtatttttcrtagagatagggtttcaccatgttggccaggctggtctcgaactcctgacctcaggtgatctgcctgcctcagcctcccaaagtgctgggatta

SEQ ID NO: 727628 - DNA, 600 bp, Homo sapiens
ttggatatatatctaggagtggaattagagggtcaaagggtaactttcaatttagctttttgaaaaactgccaaactgttttccaaaggggctgtgacattttatattcccaccagcaatgtatgagggttctactttctctatatccttgccaaaacgctatctgcctttttcattatagcctctcaagtgtgtgtaagtggtatctcactgaggttttggtttccatttctctaatgactaatgatgtttagcatcttttcatgtgtttattggccattggcatattttatttggagattcatatcctttgcctcccttgctttttgttgagacagggtctcactttgtcacccaggctggagtgcagtggcacaatcatggcttactgcagcctcaaactcctgtgctcaaaygatcctcctgcctcagcccaacaaatagatgggactacaggcatgtgccaccatgcccacctttgtccatttttaaattgtgttatttgcctttttattattgagttgtaataattattttttatcgactcgccagaattacaactcaataataatagtaagtaaatacaagtgttttatctga

SEQ ID NO: 727629 - DNA, 527 bp, Homo sapiens
gtaaaacttctcattgatatgaatttttaaaaatatgtgacttgttgggaattttcctccggagtgctgtgcacactgtcttggatctgaaggtgggttagtttgccggagctgctgtaacaaagcaccatgaatgaggtggcatagaacagtggaaatccatggtcccacagtgccagaagctggcagtgtagaatcaaggtgtcggcatagttggcacyttccgaagcctcgaggaaggatccgttccagcttctccagcatctggtgtccccaggtgtcccctggcttgtggcagccatccccatgttcccatggcattctctctggatcggcacaatatcttctctccatgcatctaagtccaagtttcccccttttataaggaccccagtcatatggattaggggccttatctcaggtatgaccttatcttgcctaattgcaactgcaaaggttctatttccaaataaggtcactttctaaggtactcggggtttcagaacttcaatgtagaaatttggggg

SEQ ID NO: 727630 - DNA, 649 bp, Homo sapiens
ccttggtgttataccttgaataatctccttcccttcagtctgtggagaactggtgacttgcttctggtcaacagaacatggcaaaggtgatgcgctgtcattcccttcataaggttaygttattttcaggcgggaaagagactccccagctggccttgaagaagcaagcagccatgttgtgagctgcttcccaagcaagtcacagggcagagagctgcaggcacctctagggacctgagggctgaccacctgtaagcaactggagtcctcagccgcacaaccaaagggacataaattctgctgatcatcatgtcagtgagcctggaagtggattcttccctagttgagtctccagttgagaactcagcccagtgaggccttggttgcatgccagtgagaccctaagcaaagaacccaatgaagttgtgcccagacccctgacccatggaatctgtgagataataaatgagtgttgttttaagctgttagatttgtggcaatttgttatacagcatactatatggatacagtaatgaacgtcatcacctaggacaggaggaggccctgcagtctttagcactccagtccaagaagctatgaccactagctaaatgtggcctctgagatgaaatctgttgaaatttgtatt

SEQ ID NO: 727631 - DNA, 2615 bp, Homo sapiens
gatgtgtatattaattttttcaggttttacatgaactgttctattttagcttaaaataatagtaaaataattttcaaccaccaagctattagaggggcaaaatgaaatacatagaattcttgattagttttttaaatgacaagaatgaagataatacaagtagggcaagagggaaaccaatggtaagatgataaaaataaacccaaatacatatcaaaatatatttaatataaatagaaaaattatccagttaaaagacaaacattgctagactggaccgaaagaaataaaacaacataaaactaaacaaagtgctttctgctttcaaggtccattaggaaagaatgaacatgaactcttggaaaacatagaccaaatattaaccaaaaaagaaagttggcttatttatactaatactgtatatcagacagagtacagtttaaattatgatacattactacaggtaaaggatcatttcataatgtcaatagggtcaatctaccaggaaggtataacaacataaacgtttatgtacctaataatataggttcaaaatatgcaaaatgaaaagctcctgcaaggttccccaaggaagttatcacaaagttacctcattgctgatgagcrggtggggtattgttgagcagatggaaaaggggcaagtgctttgtcacaaaaaggagctggattagggccagataactcaatagagataagctgattttgtctttgattaagaaaaaagttaagtggaagggctggtgtctgttaaaaattgaatgtacagtgtggataaacagagagtgtcctgataaaatatccaacttcacagatgatgaagatttcttccaggtggcaaaatgcatgcaattctacgaggcaattctgctgtaagccaattaaaagatggcaggggagtcttggttacattttcgcattaaggaaataagtaatcctgactctacatattcaatgataactatgagcaatcagtaacaaaacaataaagagccattgtgtattgttaccacagacattggcttgatctgccgccacaactgaaaaagccaacaacatctggccaagcaccataatgaagtcaattttagaaacaaagtgagaaatataagcttgtataaaaccatgatacagctgaatgctaagttctgcacatgctttccatcaccatacatccagggacaaagaagacaaagaagacccaaggacaaagagctgtaacaatttagggaatattataaaagactttacttaaaaacaattggactctttagtctgcacaggttaagagaatagggtggaatctgtaaaactatggatgttgtaattaggaaaaatccagactccattcaatcctggtacatggagtagtttcctgtggctgccaaattaccacaaaattagtggcttaaccacaataaaaatatattgtctttgagttctgtaggagaggagcatgggtctcatgaggctaaaatcaaggtatcagcagggctggttccttctggaggctcagaagagcattttttcctgaattttttagtttccagaggctgcctctgcaccttggctcatggccccttggccatctttggctagcagcagcaggttgagatctcacatggtcttaccctcacctctcctgcctgtctcttctacttttgattgcactgggccaacacagataatccaggacattctcctcagtttaagtttggctgatcagagaccttaattctatttacaaccttaattctccttggcatataacatgactattcataccttcttaggattagaatgtggatatctttgttggcggggattatcctgctcatcacaatatacaaaggtaatgagtaataataccctgaggtctgaaagtagcagtgtggttttttttttaaggacaaataaaggaggtacaattttttcagcaggtgatactggctgaaaatatacttagcttaaaaacttcacggatgataaatgcttgacagatcagcaaaggatgccagagattctggggatgcattcttaaaattttatgctttatttttctcatttacaagaatcatataaatatttaaatagaaataagaaaaatggtgggaagagtcaagatggctgactaggtgcagccaggaagagcttattctatggagagaccagaccatcaagaagactgccacactctgagcagatctttgggaggaaggcattgagagcggacagagggaggacacagcctctgggctgaatgggaaggaaaccgcgaaccttgcatggggttgccaagcacgaggactagttcctggccccaagcagctcctggggaaggggcaagttaaatgggcatcaagtggtccactcctgccacagacctccagaagcctacctgcaggagaacccatgacctacatggacattagagctggcaaggagagctgcttggagagttgctaggaacagcacttccgcctgtgtgaagcccagaggatttggcacgggaacgtctgcagtggagcaagcccaagggtgcgcatcttggaaggctcaccgtgcttctctagctggcttgggtctttgtcgattgt

SEQ ID NO: 727632 - DNA, 2265 bp, Homo sapiens
gtcttcagaaaagaggcaaacacttaagccaggtcttgaaggttgggtaggagttcaccagggcaaaccaatgagctgggcacagagctaggaagcaccgcaacactggccaggtgttgaatccagacgctgcacctttctcactttctaggcaagtaacttcacttctctgagcctcagtttcctcctctagaaaggagggcatgatgatagtgcctctctccaggagctgatggaggagcaaacaggatgaaataggaggggattggagcagtggactcagtttcatctttcatggagcttgcattttctcatccataaagtgggcacagtaacagcgccctcctcagtgagttttctaaaggttcagggaatgtatgctcagcgcagtgccaccacgtgctggctgccgactgttaccaccgttaagcagttctgaagatgaggctgagaagtctgggcgggagacgcgggaagcaggcaggctgccagggaggaggcaggtggctgggaggcctggctacatcccaatcccagcactgccctggccgctgtgtggcccactgattgcacctgctgggggagccgctgggggatggaacgggggttcctagtccctcagcagagtgcactttgaaagccttcagtggtggaggaggggagtggtgttcctttggggctctgaggacctgagtgtcaggaggaaggttacccggaactctgctggggacgtggctgtgtgggtgctgatggggaccctgagtccatctcaggccaggatcctgcctcaagggcagggctgtggctacaaaaaccccaaagtcagtagaggctgctgaggcctctggagagtcaccccaaccccttcaggcccaggtgctggtgggtggacgggcgttttgtgagagggcgctgggagggtcagaggacggggccggcacagttctagttctggagctggttggtggttacaaaggtgtcccccaggcagcactcattaagctaaatacgaatgttttgtttcatagcaaaaaaggtaaatatatggggtttattcgaaaggcagcagtgcctcccaccgcccttacattaaaggcagccaaggagtctccaacttagggagcgccaggcccggctcagtctcggcccatcccacttcagccccagcccattttacacaccagaccactgaggctcagagaggccaagcgactcgcccgccgccccacagcggctccagcgctgctgcctgtttacagcgcggggaaccggcggctacacctcccgcccggctgtccctttaacgtttctagggcatccctggaaggcccgggcacggcgctgaggtctccgctcccgctccygctcgcccgggcgaggctgcggctccgggcgggtcaaggtcgcagcggagcccctcggagcccccgcccggcggagaggccggcctcgcgtggcggcgccgcccccggccctggtcccggtcccgccccgccggcgcctccccgcggccccggctccgctccgcggccctccggcgggatgcgtggccgtggcggggggcgcgcccgctgtcctgcgcccctgcgctcgctgctgggcgccttcggggcccgggacgctgccgccgccgcccgagatcctgcgcaaggtaagcgcgcgctgcggggaggggacgcgggacgtggggcccggggtgcccgccgggcacgaggcgctgggggacgactcctcctgaatcccttgcccttggccgttgcgggtggccgggaggcccgctgcgcccccagccacagaggtgggcgccccgggtctcgggcttaccgcccccctcctccccctcgcagcaaagtcaccagagtctctccctaaacaagggcagtgtccgcagggtcagaagcgctggcgttggggtcgacagtctggggtttggaattcccctctgcccgctgtatgagcctgtgcgcatggcgtttgaccttgctgcgcctcagtttctgcatctgtgaaatgggggatacctgtgtcttgggggcagcagttgggatcgtatggacagcgctggccacccaagggagggctctgtgcttgatcgcccttcttccccagggagggccatgggcctccacccacgtgggactggcccctcgccccctgctgggcagacacctgaccctggagagggtccagctgcagttcaagggatgggatctaggaagaggggcctgaggaatccagaaaatggccagggccccagctgggcca

SEQ ID NO: 727633 - DNA, 621 bp, Homo sapiens
ttgctcttatttttttttattaaggaaatattaaatacctactaagggccaagcattgttttaggtgctggggccataggatgaacaaggcagacaatgccttgctctcttgtcatttacatttcattgtggaaatctgtccgccacgcaccccccaagcttaaaggcaaataaataaataattgcatgtgtggtgaaactgtgaagcaaacgtagagcttaaagaaagaaytttttagaatgtagcagtatgcccagaatgggagaaattccaggcagagaccagcatgtgctcagggcatgggtgaaaaaggtcttggggtgttaaagacactgaaatcagaccaggaggactgaaacagtcactccaccacttctttgtgtgtgaccttatacaaggccctgcagctccctgagttattctgcggggtagtggggagacagtacctatccaatcagggaagcacctggctctgtgctggacatagagcaggtacccaaatatcattcctcgccctctccatctatcccctcctgacatgctggctgcagtctattcctccatcctggattgcatattcttcctctctctctctaaaaggacagacatcccctaaaaga

SEQ ID NO: 727634 - DNA, 1606 bp, Homo sapiens
tttttttttttkggggacagagtttcgctcttgccgcccaggtgggagtgtagtgtcgcgaactcagctcgctgcaacctccacctcccgggttcaagtgattctcccacctcagcctcctgagtagctagggttacaggtgcccgccaccacacctggctaatttttgtatttttagtagagacggggtttcgccatgttggccaggctggtctggagctcctgacctcaggtgatccacccacctaggcctcccaaagtgttgggatcacaggcatgagccaccgtgcctggccagatgagactgcttcttaagccatcttgggcgtttcattcaccccttttctccctttgttaccttcccacatcctgtccacacatcaagggctgggatctggctccattttctagttctgtacccaggaatgggagcaaagcaccttaggccaaagttttaagaggcataaactgaagcagcgtttgtttttggggtctgccatttaaaaggaggccagaaaatgacctctgagtgattcaattcagcagacactaacatgacagggtagaggctgctgccacagaacttacagccggtggtgttgctggcaggatccccccaacccaggctaggctgtcaggagcaagagggatgcgtgtcttagctttagcacctgcaagcaccagaggccagtctggaagggaactgggaaaccagatcagagaggaagaggctgtgcccatttcacagagaggaagggtaaggtttaaggcccagacccagcactcttgacttggtgatttctttgactcctttcttccttttacattttgtctctattttttttaattttaatttttaattttattttttatttccataggtgtttgggaaacaggtggtatttgattacaagagtcatcctttagtggtacactcatcactgagtagtatacactaaacccaatttgtagtcttttatccctcacccccaccccacccttttctccaagtccccaaagtccattgtatcattcttatgcctttgcatcttcatagcttagctcccacatatgagtgagaacatacgaagttttttccatttcctgagttacttcacttggaataatagtctccagttccatccaggttgctgcgaatgccattagttcatttctttttatgactgcattatctctcttttcaaaacttcaggagagagaagaaggccccagcaacccatgatgggtggaagtcccacatgtagataggggccctggacggaggttgttgcctgttctgtgaaggagcatgaggaagggtgaggatgagggagttttagcagcaggagaggagatgaagtgacttgctcagggacacagaacttttctgcttccaggaagacagtatcactgtatcacttctcatctggcaagctgaaggctccttctttttgagacagagtcttactctgtctcccaggctgaagtgcagtggtacgataacagctcactgcagcctttacttcccaggctcaagtgatcctcctacctcagcctcccgagtagctgggaccacagctgtgcaccactgtgcccagctaatttt

SEQ ID NO: 727635 - DNA, 1606 bp, Homo sapiens
tttttttttttgggggacagagtttcgctcttgccgcccaggtgggagtgtagtgtcgcgaactcagctcgctgcaacctccacctcccgggttcaagtgattctcccacctcagcctcctgagtagctagggttacaggtgccygccaccacacctggctaatttttgtatttttagtagagacggggtttcgccatgttggccaggctggtctggagctcctgacctcaggtgatccacccacctaggcctcccaaagtgttgggatcacaggcatgagccaccgtgcctggccagatgagactgcttcttaagccatcttgggcgtttcattcaccccttttctccctttgttaccttcccacatcctgtccacacatcaagggctgggatctggctccattttctagttctgtacccaggaatgggagcaaagcaccttaggccaaagttttaagaggcataaactgaagcagcgtttgtttttggggtctgccatttaaaaggaggccagaaaatgacctctgagtgattcaattcagcagacactaacatgacagggtagaggctgctgccacagaacttacagccggtggtgttgctggcaggatccccccaacccaggctaggctgtcaggagcaagagggatgcgtgtcttagctttagcacctgcaagcaccagaggccagtctggaagggaactgggaaaccagatcagagaggaagaggctgtgcccatttcacagagaggaagggtaaggtttaaggcccagacccagcactcttgacttggtgatttctttgactcctttcttccttttacattttgtctctattttttttaattttaatttttaattttattttttatttccataggtgtttgggaaacaggtggtatttgattacaagagtcatcctttagtggtacactcatcactgagtagtatacactaaacccaatttgtagtcttttatccctcacccccaccccacccttttctccaagtccccaaagtccattgtatcattcttatgcctttgcatcttcatagcttagctcccacatatgagtgagaacatacgaagttttttccatttcctgagttacttcacttggaataatagtctccagttccatccaggttgctgcgaatgccattagttcatttctttttatgactgcattatctctcttttcaaaacttcaggagagagaagaaggccccagcaacccatgatgggtggaagtcccacatgtagataggggccctggacggaggttgttgcctgttctgtgaaggagcatgaggaagggtgaggatgagggagttttagcagcaggagaggagatgaagtgacttgctcagggacacagaacttttctgcttccaggaagacagtatcactgtatcacttctcatctggcaagctgaaggctccttctttttgagacagagtcttactctgtctcccaggctgaagtgcagtggtacgataacagctcactgcagcctttacttcccaggctcaagtgatcctcctacctcagcctcccgagtagctgggaccacagctgtgcaccactgtgcccagctaatttt

SEQ ID NO: 727636 - DNA, 634 bp, Homo sapiens
gacctcatcctcattttgaccagcccttcttcaagatggagtcgctctgatttgattgcctctgacaattatcttacctgtaatcaataggattgtaattgtgaaagtgagagacaggactagctggatttcctaggccaactaagaatccctaagcctagctggaaggtgaccgcatccacctttaaacacggggcttgcaacttagctcacacccgaccaatcagagagctcactaaaatgctaattaggcaaaaacaagaggtaaagaaatagccaatcatctattgtctgagggcacaacgggagagacaaggatctggatttaaacccaggcatttgagccggcaacagcaaccccctttggstcccctccccctccttttgtacgggagccctgttttcaccctattaaatcttgcaactgcactcttctggtccatgtttattacagctcgagctgagctttcgctcaccgtccaccactgctgtttgccgccgtcgcagacccgccgctgacttccatccctccagatatggaagggtgtccgctgtgcttccgatccagtgaggcgcccattgccactcctgatgaggctaaaggcttgccattgttcctgcacagctaagtgcc

SEQ ID NO: 727637 - DNA, 634 bp, Homo sapiens
gacctcatcctcattttgaccagcccttcttcaagatggagtcgctctgatttgattgcctctgacaattatcttacctgtaatcaataggattgtaattgtgaaagtgagagacaggactagctggatttcctaggccaactaagaatccctaagcctagctggaaggtgaccgcatccacctttaaacacggggcttgcaacttagctcacacccgaccaatcagagagctcactaaaatgctaattaggcaaaaacaagaggtaaagaaatagccaatcatctattgtctgagggcacaacgggagagacaaggatctggatttaaacccaggcatttgagccggcaacagcaaccccctttgggtcccctccccctccytttgtacgggagccctgttttcaccctattaaatcttgcaactgcactcttctggtccatgtttattacagctcgagctgagctttcgctcaccgtccaccactgctgtttgccgccgtcgcagacccgccgctgacttccatccctccagatatggaagggtgtccgctgtgcttccgatccagtgaggcgcccattgccactcctgatgaggctaaaggcttgccattgttcctgcacagctaagtgcc

SEQ ID NO: 727638 - DNA, 635 bp, Homo sapiens
tgctggctgctggttcatcctgtgcactgtggctcatgctgcagatgtcaactctgacactttagttctaatcccccagcagctgcctgaagggaccagcaatgcaagycagcagtgtgggaaactgagcccccgtcaggtggactttggccagtgggagatagttaagttcttctttctcttgtcatgagatttctatatgctctttctgggaatgtccctaagtgtataaacaaccagctgcattttctgttgaagctgtggccagtccagtgatgttaccacctggcatttgcttttgtccctttcctggctcactccttccctcttgcctccctggggctgtgtaactcctctgccccatgcccccttcccatgaattgttagcagattttttttttttttttttttttttgctggagtcagtttcctagagaactgaggaaaagatagtaagtatgatcaatgttttcttttaccttctgttaagtatgagaaccagtggtccgggtgagcatggatggaagaactattttgggaggcattaagttagataggacgagaggtgctgttcaactctgtgtagtcatcctgggctgcataagtctaaaaagacatctcttctttctttttag

SEQ ID NO: 727639 - DNA, 1172 bp, Homo sapiens
gagctacgagtgacattaacacacacacacacacacacacacacacacactactctggggactagggtggatgcaggcagaccagttaggaaatgactgcagaggcacaggtaaaatgatgatgacgtggtcctcaggtgttgtagtggcaatggaaagaagtgttcagatttcaggaarccttacttatgtcttcaggtcagagtgaaccctcctgccagtatcctcagagcaccctggcatcttcctatcttagcacgtaccataattaaagagaactaatttatttagatacctgtctatctcctccattaccttgcaagctcctcaggggcagaggccacaatttgtggcacatagtaggcatgtgctgtcctggataaaacttaaattgtgtgtgtatgttcatctattttacttctagtttagtttaatgcaactacattaaaactacttacattaaatcttattctactacattgtggttggattttttgttatattagtaaaggtgttaaaatatactcttctgacatattgactatttgagttaaaggcacttgaaaaacagcaggggcaagaagatcactttgacttccctgctgtttcttaaaatcagaaggtgaaactcccatatgaaagacactccctgtactagaaagtcaacaacatctttatcttcaaggatgagaaattgagaccaagagaattttgtacagactttggcatccccacataatttagtcacatttttataggttactattctttgctcaatccaatatttaagtaactgactctacttctttgggtcttcattttttcatgtctcccatgtcccataatatttgttgagtaaatttgtattatttttttcctgttaatctaatgtcaatttaatcctcagactcaaccaagaccctaggaggatggagcggagtttttctacccctatagtagctatgttagctgctgcattaaaatttggaatattctggcatagataaaattatggattgaactggaagataactgaatgaatggctacatagggattaagtaggtttctgcttcctaactgcaaaagatatctatggcgcccctttgtagaaattttcaacatggatcaaaatttatgaagctataacattctccaaatagtaaaatactca

SEQ ID NO: 727640 - DNA, 1172 bp, Homo sapiens
gagctacgagtgacattaacacacacacacacacacacacacacacacactactctggggactagggtggatgcaggcagaccagttaggaaatgactgcagaggcacaggtaaaatgatgatgacgtggtcctcaggtgttgtagtggcaatggaaagaagtgttcagatttcaggaagccttacttatgtcttcaggtcagagtgaaccctcctgccagtatcctcagagcaccctggcatcttcctatcttagcacgtaccataattaaagagaactaatttatttagatacctgtctatctcctccattaccttgcaagctcctcaggggcagaggccacaatttgtggcacatagtaggcatgtgctgtcctggataaaacttaaattgtgtgtgtatgttcatctattttacttctagtttagtttaatgcaactacattaaaactacttacattaaatcttattctactacattgtggttggattttttgttatattagtaaaggtgttaaaatatactcttctgacatattgactatttgagttaaaggcacttgaaaaacagcaggggcaagaagatcactttgacttccctgctgtttcttaaaatcagaaggtgaaactcccatatgaaagacactccctgtactagaaagtcaacaacatctttatcttcaaggatgagaaattgagaccaagagaattttgtacagactttggcatccccacataatttagtcacatttttataggttactattctttgctcaatccaatatttaagtaactgactctacttctttgggtcttcattttttcatgtctcccatgtcccataatatttgttgagtaaatttgtattatttttttcctgttaatctaatgtcaatttaatcctcagactcaaccaagaccctaggaggatggagcggagtttttctacccctatagtagctatgttagctgctgcattaaaatttggaatattctggcatagataaaattatggattgaactggaagataactgaaygaatggctacatagggattaagtaggtttctgcttcctaactgcaaaagatatctatggcgcccctttgtagaaattttcaacatggatcaaaatttatgaagctataacattctccaaatagtaaaatactca

SEQ ID NO: 727641 - DNA, 427 bp, Homo sapiens
caaaacagatgtggctgtggctgccgatgaattggaacacaccatgaccmcacacacacacacacacacatacacacacacacacacacacacacacacacacacacacattgcttgagctgataaaccacagttttgtagtatctccagctcattcctcctttggttctggcacagtaagttcatagcacttcccatgacaccagacacttttttctgaactagtgaactagcactgcttgctttcctggcctttcagcaagcctggtttggtgagaggagggctggctggatgtccgccaccacctgctgatcacaggggtcccgtttataatacaaagcataacccacacagcatttgcaaagatctgggtaatttgtgtgctaattcttttattcagcacatattttactggtggccttccat

SEQ ID NO: 727642 - DNA, 574 bp, Homo sapiens
ttgccctaaactccatcacccttcttaaatgcatggtacactttttacagcataaatatttggtgatagccctgaggctaaagtgcaagatcacagcacgcatcggggcccatttggtgcaggctcccatcccacggccccctgcccatgcgccatgctgtagcatgtgtaattcctatcaactttctgaaaatagcaggctccaggcctcgtgttgcatactacctggaacaccttccctcttccttctcaactggctgcatctgactgatcactaaagatgccattcaggtgcctcctccaagaagctagctgggtcatatgcacctccactggtgggacggggagagtggacagaacrcctatgaaaacatgtgccagactgtatgttgctggtgctgatctccttgactaaacagacttttattattactgagataggatcttattctgtcacccaggctggaatgcagtagcacagtcacggctcactgcagcctcaaccccttggacttaagagatcctcccacctaagccccccaagtggctgggatgacaggcacatgcaactatg

SEQ ID NO: 727643 - DNA, 574 bp, Homo sapiens
ttgccctaaactccatcacccttcttaaatgcatggtacactttttacagcataaatatttggtgatagccctgaggctaaagtgcaagatcacagcacgcatcggggcccatttggtgcaggctcccatcccacggccccctgcccatgcgccatgctgtagcatgtgtaattcctatcaactttctgaaaatagcaggctccaggcctcgtgttgcatactacctggaacaccttccctcttccttctcaactggctgcatctgactgatcactaaagatgccattcaggtgcctcctccaagaagctagctgggtcatatgcacctccactggtgggacggggagagtggacagaacgcctatgaraacatgtgccagactgtatgttgctggtgctgatctccttgactaaacagacttttattattactgagataggatcttattctgtcacccaggctggaatgcagtagcacagtcacggctcactgcagcctcaaccccttggacttaagagatcctcccacctaagccccccaagtggctgggatgacaggcacatgcaactatg

SEQ ID NO: 727644 - DNA, 426 bp, Homo sapiens
tcccttagccccaccctcacctgccatcctcattcctttctccatctttctttctctgtcttcgtggaagctcctctgctgtgggccccagaatgtactgggtgctgactcaggcaaktgggttattagtgatgtcagcaaaggacaggaggaagagcaggcatggggatgtgggaataataataatgcatttgtacagcatgaggactgggagttttgtgactggtgagatgcagtggacagaggagatgagagagaaaggtcaggactgcaccaggaggctgcgtgtcatcaggatacaggatacagggtgtgcttgagccatgatggtctatgggatggggcctcccttttcctcatttcttacatcaaattaggttcaaaggtcctttgtttttccactctagccatcttttgagtccacct

SEQ ID NO: 727645 - DNA, 606 bp, Homo sapiens
attaattcataaacagaaagggggaatatgtagggagccgaaggcctgtgggacatgaccaactcagcattccactggaggctatatgatcaaacagcaaactgtttatcatgaatgcaggatgtgagcaaactcaggactgctcctggtgacagaaggtttgctggaggcaatcactccctgrcgccaaagttatctactgtgacatctagagcctgttgatcgaggaatgcagtcttgcaagcctactccggactgagcagctgaccctttcttccaccccctttctcactatctcttttgcctaataaatacagagggctgtgtaaagctcagggcccttgtccactagaggcaaggcgccccccgatccctccttccaaatatactcttttgtctcatgtcttttattcccacatttgccccgctttgttcagtccccctaagtccatgcgggttatatagtggcaccccgagcagcgacagaatcgggtgctcaacattacttgactagacttctcagggatatctgttttccgttcagaaaactagagttttgatttgtttatcaactgtgattttgttttataatatgctaatttctca

SEQ ID NO: 727646 - DNA, 1400 bp, Homo sapiens
gaacttcttgttcacagttactcattccagcaggcagggactgccagagcctgcctccttccacaaactgtgtgtggctgagataagtttccagccaacctaggagcctctttcatgccaagtttgcagacctctgggaacggtgcacacagcactgtatgcccaactctgtgctttcaaaccagaaccagagcccaaggacagtcaccatcattgagttataatgtacaaaagatgaaatatacaaaaatccaaattcacccaaggagtctcaagggagctgattgcttatccattgtgtttttaatgggatctccatgtgatgcacaaagcctggatttttatccgcagtagcagcttaactgatgcactggtccaaacataatgctgtagcttgctcacataaaagccagggagcccctcacagggataggaatgaggttcccctttatcagcagtgccttggatcagaagtgtagtgccccagactatgtgactcttacgcaggagaattgggggattaaattacggcaagctttttattccaatactatatcacagcatgaaataaagtctcaaaaatgacaacaggctttgatttttaatgaaaatctcagacagttgttttccagacatacatctgctgccgaaggaaaaaacacatctcctcagttatttactcccattctgagagtaacattgaattcctaggagccaatgaccagaagcgaggaggaactcaagccttccctactccggcagcacatacaccagctcacctgggatgctgcagagacagaaacagccgactcggagacctcagggagcccagagctcctggcaacagctggacctttaagccacaggccttcatagagattgcccagcctgcactgaatgcctgcagggtggagaacccactccccatgatgctgagtggaggacaggcaggcttcactcgccaccacattctcaggcccagccttgctctaagtgggtgtcaaggtggtatctcatacacgcctgtcctttggaaccacacgacaaggctaaacttcacaggaacactgcaatcttagaaaacagcaaaggttaatgactttcttcacagaattggaaaaaactactttaaagttcatatggaaccaaaaaagagcctgcattgccaagtcaatcytaagccaaaagaacaaagctggaggcatcacgctacctgacttcaaactatactacaaggctacagtaaccaaaacaacatggtactggtaccaaaacagagatatagaccaatggaacagaacagagccctcagaaataatgccacacatctacaactatctgatctttgacaaacctgacaaaaacaagaaatggggaaaggattccctatttaataaatg

SEQ ID NO: 727647 - DNA, 645 bp, Homo sapiens
ttgtttattcattcatccattggacatttggattgtttttaatttttggctattatgaacaatcatgaacaaatactcacttgagtacctattttcaattcttttgggtatttacctagaagtagaattgctaggtcatatggcagttctatgctgaattttttttggactcatcgtacagttttttacagtractgaaccattttacattcccaccagcgatgcacaagggttccaatttccccacattctcaccaacatttgttattttctattttttgattctaggcatcctaagattgcagaatggcacctcattggggttttgatttgcatgtccagagaagggcattcctggtaaacaaagcagcacaggccattttacaaggccatcattccctaagagcctagtgtttataagtgtcatgccctcagctcgaagctcagctcgagagcagggatcatacatcttacctttcctttgtgtcatcagctttgagcacccatggcttaatgaggttcacagcccctttccactcagatctacagttggcctacatggttgggtcaataggaatagccacctccgaggctatgcccaaggtcaccacggggttgcttgtgaagtacactgaatgtgctggg

SEQ ID NO: 727648 - DNA, 1098 bp, Homo sapiens
ttgcccagacagagagtcagcccaagttggcatgtaagtgagcctcagctgagcagtacctaygggagccccaaaattatattgagtatgcctggaggagaaaagaagctttgaacgtgctcaagggcatctagcatttgaggaataagagacaaaaattaacagttgctaaggccctaaatgagcccagaggatatatgcattgtcttttttaatttatacaacaatcctatgaggtatccacatttcactgaagaaaacactgagactcaaagagatgaggcaacttcttaaagttacagagctagtaagaggtagaactgggatgcaaagtcaggtctgattttttttttttttttactcttgataagttgttttccttccccctctaaaatagattctatttgtttagagaagttttaagttcacagcaaaattgaatgaaagatacagatatttcccatttatccccagcacccacacatgtacagcctcccctgttgtcaacatcccccaccagagtggtacattttttacagttgacgaacataaattaatacatcattgtcacctgaattccatagattatattaaggcccactcttgttgtatattctatggattttgacaatgtacagtgttaggtctgattttgaagtctatatgcttggacaagtaatttacttttttgacacccccctgcccaagggtgctgctatactttatgaaaatacaaagacaattagggaaaaaggcagttaggcacaaaaatgtaagggcagttcaggtagggtttctgtattttctgctctttctgatgtttctccctgtgctagatgcccaggcatcacctccagatagtcgcacaagccactgagcttgccacttggttttctcttagagatgagatgccacgcactaccattcatcactagtggcacttacacctgcacaaatggagtgcttcttgactctcgctgtgactacagctgttccagtggctaccacctggaaggtgatcgcagccgaatctgcatggaagatgggagatggagtggaggcgagcctgtatgtgtaggtaaatgctggttgctccca

SEQ ID NO: 727649 - DNA, 672 bp, Homo sapiens
tgacagtggggatgtgcctcagacttcaattctaagggtctctttcctcagtgtttatttcaccctgtcccatgcagggtgacacttcggggccctgagcctggctctcactttcccgaaggagagcatgtgattcgttacactgcctatgaccgagcctacaaccgggccagctgcaagttcattgtgaaagtacaaggtcagaaagaattatttagtttccatattgttcattaatcctgctctaccctgacccaccccatgtctctcctctctatgcctggaagagacacacctcatttatactgggagaggagaaaaacaagttcaccaaacaggcttatttaggaagccagcgttacatgtgcatacatatgtttctgaaaccttgactctccaacaagactctcatcaacaagactctcattatcctaaatccagataaaatccacaaggatattctttatccatttcttttcttagacttcaaaatgatcacatgtaatcagccatcattctrtcgttcacctctgataaaactggtggtgttggctgcctgattcttcctctttgctttgtgttgtattgttttgttttgcttttctcattataaaaataattcatgcttattgttgaacatttgataaataaagaaatatataaagggggaaa

SEQ ID NO: 727650 - DNA, 1045 bp, Homo sapiens
tgcccaaggtcactagctagtaagtggtggagctgggattgaacacagggagtctggctgcagaatctgtcctcttagccactaccagtagcaaaaaagaaggaaaagcgttatgatatctcaaagtaaaatgagagagttgcatggcagtttttaacataagagatacctagccaaagccactggtagggagaggtcgataggacagaataaatatgattatggggacttataaaagaacaggctaggttactgaagataattcaggatgtgctgacaagactaagagaagcagctctggggagctacaaggggctggatacccacgtgggagaaaaagctacttaggaggcttctaaagattgaatcttagaagttgcctagtgaatattcagaggcccaggatggaagcagttttacaaaaaaaaaaaaaaagaaaaaaaaaaaaaaaaggaccctggagggtctagaccaaaaagagggccttattcatctagagatccaaaaagactgacaaaggcaacagttcctttggaagcaagggagtaagaacaagaaaaggaacctgtcagcaagcatagtgactctgagggtraggactagaggggaagcccaaagatgaaacagaggtggggtgccggggagtattcaaggcctctttaaacctcaccctggtaaatggctagcaggtgatcctgcaagacaaggcaggacagagatctggggtaggactgcaagctgcactgcccagtgcaaggaaggtaacaaggggtaatgaaaagagcactgggcacaattttggagaaatcctggagaccgagcgaaggccctggccaggtagcctattggtaaagagcacacgcttgggcagggggcatcagtcctcagtttgaatcttggctcagcatgttattgtcaccacctggcttgtgaggggtgttgtgaagattagattatgtctacaaagcattaggtttgtgtattcaataaacaacagccattatcatatcacattggctatccatcaagaacttatgtaatttaa

SEQ ID NO: 727651 - DNA, 573 bp, Homo sapiens
cagggggaataaattctgtgatccatcagtttcccacagcatcacctggcagatgggaccaagactgcattcttggtgcattactcaatctgtggtacaaggtctgctataaatgcctgtctgccatctggacagaatgtcacacagcaccctcagggcatcccaccagatatgtttcttcccagctttggctagtgccagcactgaaccccagcaaagctttgcaagggccagggaacccgatttcacttggacttactgctgcaatgtctgcagttgtagcaggcatgctttcaagcaggcagctaaacctttycctgtttctacaactcaggctgttcaaaatgtcttgatggattgtctcccccttctatcagtgtatctgttaaaaacagctaaaatttgacacttcacacacatcatctttggatgggttttttttcctgaataatactttgcatccagatagcaattttctcccagagctttcacagacaagttgttacgctcatcccaatttactagatgagaaaatggatgaggagggaagagatagctttgcctgataattat

SEQ ID NO: 727652 - DNA, 621 bp, Homo sapiens
ctgttctggggaagaaagttctttgccaaagcttttactgggagcgcaaccaaagaaaataaaatggaggccaggaatggatgtctcctaatctctggaaaacattatttaaagacttttattgagatataatttacatactgtaccatttactcatgtaaggcatacaattcaatagtgtttaatatattcacagagttgcacaaccctcaacacaatcgattttagataatttycattacccccaaaagaaactttgtatccattaacagtaattccccattccttcctcatctcaatacctggaaaccaccaacctaatttctttctcaatagatttagacttacctgttctgttcacttcatgtaaatgaattaatacttgattttatgtaaagggcatcacacaatgtggacttttttgaatggctttttttcacttaacctactgttttcaaggttcatccatgttgtacagttttatgaaagcattacattttgtttattcatttatcagttgatagatatttgggttattttcatctttggcctattttgaatagtgctgctgtgaaatatatgtgtacagctttttgtgtggatgttttcatttctcttaga

SEQ ID NO: 727653 - DNA, 1284 bp, Homo sapiens
tgtacttgatagatggagcaaaaattacaaaaatacaaccaaaaaaagaaaaaagaaaaaaaaatagaatccatggaaagtaagaaacaacaaactcaatctagtaaaacaatgaagaaaagtttcagatgacaacatacacaaggtgcagaaatcaactagcacagatctctgcagatcgccccagaaacacaagcwcaaaacaaaaaccaactaaaagcaaacactgctttttatctagtctttcccatgtctatgtattctaccaaaatcacatatattttgtaattatcctcaacttctctgctttttcctccatgccacttctaatacatcagaaaatcttataggccctaccataaaaaaatccagcatctatcttgatcaaagtcattatagtctcccacctgaacctttgcaatattgtccgaacataaatcagattatgttactcatttgttcaaaattttcccatggtttcttatctcacttagagtgaaacccaaagtccacagatgatacttgatctagcctcttgatacatgtctgacatcagttcctacaactattaccctcttcattcttctccagccaaactggctttcttgctgtttcttgagcacacaaatcacattgttatctcagggtcactggacttgctgtttcctttgctcttcccatcaatacccacatgacattttccttcacttccaacagatctagcttcaaatattactttatcatgaaagccttacctgacctccctctttaatcgtagttcttattctcttatccttgttttctttttcttcacaacacttatcaccacttagtactgatatacttatggtatacttttttttgtctcccgtaccccagctacaatataaacaccatgaaagcagggatttttgttttattaattgttgagaccctagcacctataacagaggctcactaagtattcatcgaattagtaaataaaagattaagtaaagacatttcaaaagtgtaagaaaaggagaattcagggctgggcatggtggctcacaccggtaatgccagcactttaggaggccaaggcaggaggatcacttgagctcaggagtttgagaccagtctgggtaacatagtgagacactgtttctacaaaaaaattaaaaataaataaataaataaataatcagttgagtgtaacatctgtagtcccagctacttgggaggctatgacaaaaggatccctttagcccaggagttcaaggttacagtgagccatgattgttc

SEQ ID NO: 727654 - DNA, 1284 bp, Homo sapiens
tgtacttgatagatggagcaaaaattacaaaaatacaaccaaaaaaagaaaaaagaaaaaaaaatagaatccatggaaagtaagaaacaacaaactcaatctagtaaaacaatgaagaaaagtttcagatgacaacatacacaaggtgcagaaatcaactagcacagatctctgcagatcgccccagaaacacaagcacaaaacaaaaaccaactaaaagcaaacactgctttttatctagtctttcccatgtctatgtattctaccaaaatcacatatattttgtaattatcctcaacttctctgctttytcctccatgccacttctaatacatcagaaaatcttataggccctaccataaaaaaatccagcatctatcttgatcaaagtcattatagtctcccacctgaacctttgcaatattgtccgaacataaatcagattatgttactcatttgttcaaaattttcccatggtttcttatctcacttagagtgaaacccaaagtccacagatgatacttgatctagcctcttgatacatgtctgacatcagttcctacaactattaccctcttcattcttctccagccaaactggctttcttgctgtttcttgagcacacaaatcacattgttatctcagggtcactggacttgctgtttcctttgctcttcccatcaatacccacatgacattttccttcacttccaacagatctagcttcaaatattactttatcatgaaagccttacctgacctccctctttaatcgtagttcttattctcttatccttgttttctttttcttcacaacacttatcaccacttagtactgatatacttatggtatacttttttttgtctcccgtaccccagctacaatataaacaccatgaaagcagggatttttgttttattaattgttgagaccctagcacctataacagaggctcactaagtattcatcgaattagtaaataaaagattaagtaaagacatttcaaaagtgtaagaaaaggagaattcagggctgggcatggtggctcacaccggtaatgccagcactttaggaggccaaggcaggaggatcacttgagctcaggagtttgagaccagtctgggtaacatagtgagacactgtttctacaaaaaaattaaaaataaataaataaataaataatcagttgagtgtaacatctgtagtcccagctacttgggaggctatgacaaaaggatccctttagcccaggagttcaaggttacagtgagccatgattgttc

SEQ ID NO: 727655 - DNA, 642 bp, Homo sapiens
ttctattactaacttttatcctaagactgtgtagtaattattgattagtctcagtttaaaattgctgtttagatggaaaaaatgattttacataaaacattagttgaaagatacaagctgggcatggtggctcacacctgtaatcccaacattttgggaggccgaggcaggtggatcacttgaggtcaggagttcaagaccagcctggccaaaatggygaaaccccatctctactaaaaatacaaaaaagaattagccaggcatcgtggtgcatgcctgcaatcccagctactcaggaggctgaggtaggagaatcactggaacccaggaagcagagggtgcagtgagcagagatcgtgccactgcactccaccctgggcaacagagtgagactccatctaaaaaaaaaaaaagatacacattaagtttttcacacaaattcttaagggcagatattactaaatgccattagaaaaaaggaaaccttttatcaagtattttaaaaaaatgcttctacatttcttatttataggtattctaataatactgcatgacattacggacaacttagcctaaattatggaaaatcaaattacttagtagaactgcaagacaatcctctcagttgttgtagtaagtgtt

SEQ ID NO: 727656 - DNA, 662 bp, Homo sapiens
tccccctgctctccaggtctggcccctccctcctcagtggtgtggccttggggccagcttcawctcttcctgcctcagttttctcatctctagagcagggataatagtaagacctacttcacaggggcattacagcattaaaagggcatcaggtacttcaaatggtgcctttataataatcactcagtaaatgcttacagttcattataaatctaaaggaacccaaaggcgaagattgagcaaagttgatttggtctgcccagtgaagaatactttctgtattttgtagtaaggctgactttaaaaatagaggtagtggatgttgttgtttctctttctctgcccttccccatgtatgtgaggcccttcaggagcccaggcacacatgcagtgccaatttgctcccagatccaagggtgttcagaagtggacttcgaatttcaaatagctgtgattttatttaactttactgaattctagttttattatattaccaccagagagtttggcctttaagatctctaattctttgaaatgattaagttttcctttgtggccttctttataattgatttttgtaaatattctattgatgtgtgaaaaaaatacagattctctatttgaaggatgtactttctttctgtttatctaattcttccaca

SEQ ID NO: 727657 - DNA, 565 bp, Homo sapiens
cagaacaatattacagtatactaacttttgtgaaaaataaagagggaaataatatagagtcatgctgaataaccacatttcagtcaacaagcagcagcatattttatgacagtcccataagattatactaccatatttttactgcttcttttctatgtttatgtgtttagatacacaaataccactgtgctacaagtgcctacagtattcagaacagtaacatgccatacagttttgtagtctagcatcaataggctgtaccatatagcctaggtgtatatagtaggctaaaccatctaggtttgtgtaagtaaactctattatattcatacaacaaaatcacttgatgcatttctgagagcacatccccatctttaagcagttcatgactgtactgctaagtagtggcatgcatatgcataaagaaactctaggccgggcacggtggmtcatgcctgtaatcccagcactttgggaggctgaggggggcagatcacttgaggtcaggagtttgagaccagcctggccaacatggcgaaatcccacctctactaaaaatacaaaa

SEQ ID NO: 727658 - DNA, 580 bp, Homo sapiens
aaatatttgtttacttattgagaataaaaacttttcttgtcatatctgcaataaatgtatatccccccagttctttgggattatctatttttgattaaatatagttaaatccatccttcatttacttgataatatcttccattgattttattctgagcaaatctttcctaattccaaactaattaaatttttgttcattttgtttaaaatagttttgacttgtttcaatcagcaatttagtcaaggtggatttattattagagtacatggtacaaattgcagttatagctatgttctttgccccaaatttcccaattttcccataaccaatgataaatattttattgtatgcctcagattttttttattatttatttattttaaaatttatatttgtttattttttaattttaacttttagtgggtacatagcaggtatatatatttatggggtacttgaggtgttttgatacaggcgtacagtgtatragtattacatcatggagaatgggatatgcatcccctcaatgatttattctttttgttacaatccaattacattcttttagttatttaaaaa

SEQ ID NO: 727659 - DNA, 674 bp, Homo sapiens
ttcaagataacaaatggcacatttggatatgttgttacaacccatttgttgaatgacccaaaggctgccagctttgaatgggtcttgaacaaaagacggctctctgctatgactgatatgactagaccacagatgcaatgttcttgaaatatctatgccagattgtgatgctgaataatgactctygcattttggtaaaaaatttacagcagatgtccctaaagtttgaaagtaaatattcttttgataggcagcttttgccttgcttctaagctccaataaaaatggaatgcttaacttctaggagagaatcatgaacctgaactacctttattaactgggtattatcttatcaagcctcacaactgtgatgtcctcagcagcatacaaagtgaatgtagtgtatatgagagtgagtataggtaggtgctaaatgcacaagggagtttcataagcaggtttctcctgtgaatgttgtgcctaaacttccactgccaacccagtcttgacccctactttgggtttgatggggttccctatgatcagataattgagaagaaaacattttagccagttattcaggtttcttggcaggacacagtggcacttgatagaagtagatttatgtggcggtcccgcttatgtgaccatgaagggcacactgatgtcagaaa

SEQ ID NO: 727660 - DNA, 704 bp, Homo sapiens
tcctaacggcctgagtcacmtccgtgcttagtctctttctgaatgtgagtcttttgacaagctaccaaacctctctgagctccagctcccttatcttggaagcaggagtgatcaaatctactctgcaaggttgttgcagggtttagtaatcacatacattagaagcctggcatatagtaggtactcaataaatgtttctacaactacggggtttgataaggtggtaaaacaatcaaccacaatgctatttaaatggcacctatcatgggccaggctctaggcttggagctggggacactaagacaaattgggtgtctggacaaattgggtgggtggaatgtaggataaagacaagaaaatactgctgagctgtgtgcctggtgctatagggaatacaggagaggcaccaaacccagatgctgtagagggttggggggtcagcggagggggcagcggaaaactcaagaagacttcctagaatttgaagaatgaataaaatttacccaggcaaataggaagggaaaggagattggagctgagggaactgcaaggacaaagacccagagccagagaaagtcctaggcagtggatatggagaggggactggagggtgaagaggagtgtgagtggtgtgagaagaactccatctttacctgaagggctaggagcctttgactacagccaggccaacacctaaattctca

SEQ ID NO: 727661 - DNA, 619 bp, Homo sapiens
aatggtcatcgtaggcagagcaaatgtttaaagtgaggatacagcgtttaattgccccttgtcttactgaaaggtgttattcacatattgctcagcaatcactgaaaacatgtgccaatgagggccgataactccgtttggaatgtgctgcttgtttctgagactttacaacaatgactggccaggattttactctccagactcacgtagaaatgagtgtgtcctgtgtgatgtctccaacagagaacaatcaaaaggaatcaaaaagatgttagccattgagctctagaaayccagctgccttctcccggcctccagacacacaacagcttcattgtatgaggagagagcattgaactgaagctttcctgcaagcatatttgaacttggaccttcagtgcacagaccagcagccagcttccagcccaggcaccccctcctctcctcccttctcttcaactctgcaagagaatttcgttccatttaagtccaggagatgtggcaaaaacaacactccaaacaccacttccatttatggcaacgggatcctttaaaccagtgagaaatagtccttcagctcataagtcctttagcttctcctgtgcctcatacattcgtt

SEQ ID NO: 727662 - DNA, 619 bp, Homo sapiens
aatggtcatcgtaggcagagcaaatgtttaaagtgaggatacagcgtttaattgccccttgtcttactgaaaggtgttattcacatattgctcagcaatcactgaaaacatgtgccaatgagggccgataactccgtttggaatgtgctgcttgtttctgagactttacaacaatgactggccaggattttactctccagactcacgtagaaatgagtgtgtcctgtgtgatgtctccaacagagaacaatcaaaaggaatcaaaaagatgttagccattgagctctagaaacccagctgccttctcccggcctccagacacacaacagcttcattgtatgaggagagagcattgaactgaagctttcctgcaagcatatttgaacttggaccttcagtgcacagaccagcagccagcttccagcccaggcaccccctcctctcctcccttctcttcaactctgcaagagaatttcgttccatttaagtccaggagatgtggcaaaaacaacactccaaacaccacttccatttatggcaacgggatcctytaaaccagtgagaaatagtccttcagctcataagtcctttagcttctcctgtgcctcatacattcgtt

SEQ ID NO: 727663 - DNA, 638 bp, Homo sapiens
tgaggagcttggttagaagggacaagatccactctggtttcaggtttagagattagtgttacaggagccgggtgcagtggctcatgcctgtaatcccagcactttgggaggccgaggygggcggatcacgaggtcaggagatcgagaccatcctggctaaaacagtgaaaccccgtctctactaaaaatacaaaaaattagccgggcgtggtggcgggcagctgtagtcccagctactcgggaggctgaggcaggagaatggtgtgaacccgggaggcggagcttgcagtgagccgagatcgtgccactgcactccagcctgggcgacagaacgacactccgtctcaaaaacaaaaaagagagattagtgtcacaggaatctcctgggaacccctcttctggcttgctctctcagctaaatggtaaagaataactgcgggcttttattctaaaggaataagattaaaaaggccacccagacaaaactgaggtttgcttcctccctttcctccatatgaataagctggaactagggtggatgttgagcaactgggtttatttgccttattttaaaaatcaagacaactggggaaaaaagtagagacccatctaatgagaagaagcaaagactttttatt

SEQ ID NO: 727664 - DNA, 638 bp, Homo sapiens
tgaggagcttggttagaagggacaagatccactctggtttcaggtttagagattagtgttacaggagccgggtgcagtggctcatgcctgtaatcccagcactttgggaggccgaggtgggcggatcacgaggtcaggagatcgagaccatcctggctaaaacagtgaaaccccrtctctactaaaaatacaaaaaattagccgggcgtggtggcgggcagctgtagtcccagctactcgggaggctgaggcaggagaatggtgtgaacccgggaggcggagcttgcagtgagccgagatcgtgccactgcactccagcctgggcgacagaacgacactccgtctcaaaaacaaaaaagagagattagtgtcacaggaatctcctgggaacccctcttctggcttgctctctcagctaaatggtaaagaataactgcgggcttttattctaaaggaataagattaaaaaggccacccagacaaaactgaggtttgcttcctccctttcctccatatgaataagctggaactagggtggatgttgagcaactgggtttatttgccttattttaaaaatcaagacaactggggaaaaaagtagagacccatctaatgagaagaagcaaagactttttatt

SEQ ID NO: 727665 - DNA, 638 bp, Homo sapiens
tgaggagcttggttagaagggacaagatccactctggtttcaggtttagagattagtgttacaggagccgggtgcagtggctcatgcctgtaatcccagcactttgggaggccgaggtgggcggatcacgaggtcaggagatcgagaccatcctggctaaaacagtgaaaccccgtctctactaaaaatacaaaaaattagccgggcgtgstggcgggcagctgtagtcccagctactcgggaggctgaggcaggagaatggtgtgaacccgggaggcggagcttgcagtgagccgagatcgtgccactgcactccagcctgggcgacagaacgacactccgtctcaaaaacaaaaaagagagattagtgtcacaggaatctcctgggaacccctcttctggcttgctctctcagctaaatggtaaagaataactgcgggcttttattctaaaggaataagattaaaaaggccacccagacaaaactgaggtttgcttcctccctttcctccatatgaataagctggaactagggtggatgttgagcaactgggtttatttgccttattttaaaaatcaagacaactggggaaaaaagtagagacccatctaatgagaagaagcaaagactttttatt

SEQ ID NO: 727666 - DNA, 1412 bp, Homo sapiens
ggatgatagaggtgggatttaatacaaggtctatctaacaccagagcctgtattaaccattaacagaccacaacgtctttagaaagtcatggaatgtctctgggcatcaatttatctgtaaagcgagaaatttggattcttactcttgctactactacaaataataagtcatcacttactgaaaatcagtgtgtggcaagcagttattaaatagataggcacagatgtgattatctcattgcaaggtgattgctatcatctccattttacagataagaatcctgagattcagagagattaagaacctgcccagacactcagagaatctccccggtataaaaaggcaggattctgcggtctcttgtacaaggtggggacagactcacctcgctagccaggtccctcttggctttggctgccaggaaggtcaaggaatcaagacgcagctcaaacccttttgctttctggttttcccagctgctcttatacagtttctaaggggatttaggagagaaggtgagtgggttttcatgtgagagggttctcacgtgagagcatttctctagattctaatgacgattctaggaaagcaatactgattattacgtccttctctgagagccacagaaatcatgtagtctgaatacagccaggccttcttcctgccttaaggccttttaacacatagggcttcaatcaaaaaaagcagaaattaaactccagaagccttaacaaatactaggagttttcgtggaagtctcaaaaacatgccaaaggcaggataacatcgcacaacacagcgacatttctgaaaagtctattctccatctctgtccacgcaccccaccctgccagcagcggctccagctgcacctctttctctttcctcccgccttcccccagcctctctagtccacctgggtcttttccttgcgcctcctgttctctctcctgctcctatctccaaatgtcragatctttcttctggaagcctcctttccctttctgcatgtgaatcaatttaacctctgtttctcctcccaattctcctccccatctatttctcagatgaggaacccaaagacctgggagctaagcagggagagccaagaaaacactttccccagaagatacagagaaggggaagttggaactatggatgctttcatgactaacagctaccactgtgcacttgcctctgagtgcttgatgtatagagactcactgaaacctcatgacaacccagtaaggacgggactaatattggtatcattttaccaatgggacacctggaaacaaagaatttgcccaaggtcacacacctagtaagtggcaaccgaggatcaaacccagaccatttggagcaaatgtctgagctcttactcccctctaacacgattatgctgtttcaa

SEQ ID NO: 727667 - DNA, 1173 bp, Homo sapiens
tctggttgggttctgaatgaagttagtatgttaaaaccagacgaatgcatgctggaatactccaccagcaggcagcagaacgtgggagacagagcactctataaggaatcaaattgcctcttttctgatctaagctctgttaatggtgtccgrctccacctcagggaaggggttggaggccccgggtctggtcccctatctgctgctaactggatgtctgattccaatttctctgacttttagttttctcatctatgaaatggggggaaaaattaattctgaagggccctttggccttgagaaacctttagttctagagtatacacgtagcactgtctctccccaccccagcaactgggagatcatcttgtaattagcgaataatttaggagtgcaagtcaaattttcactgaacttccaaaggagcttcgattttacttacattgtacttgagttcaggaagtaccagtgggggcggggagggaggggaagttaggaatctttagttccatggctgtttttgttccattttaatggtacttgttctctaggattggatctgtctgtgtgcacatttaagttcccttaacaaaacatctcctgttcctttagaccagggggctttttcttccagcaaatccaggagcaacccccttcttatggtggaggtgacaaccaggtgacaatgcggcgtctgggagagttttcagtccaactcatcactgttcagacaagggggtcaatggcagctttaagatctcagcttgccacgacctccccagctagtgacccagaaaacagaaaagagagaagcacacggaaaggagtggtcagcagttttctgactgcttttccttcccctaaacccattagagaagttcaatcgcaggtctgtagggaagacacctccattgcagacgccctgccagctcaggggcctggcggaggtacggcaggagagcatcttctcccacctccgaaaacaagaggaaaccaaagctggcctcccccacgccagcttcttcaggctgcgtttgcacatcgcctcccccgcccccgccccaacacacaatattgaataaatatgcctggccctggcccatgtgggaatgctggagagctacgattgttatttccaggaatgcacagacaccagcaaaaattcatttccca

SEQ ID NO: 727668 - DNA, 1173 bp, Homo sapiens
tctggttgggttctgaatgaagttagtatgttaaaaccagacgaatgcatgctggaatactccaccagcaggcagcagaacgtgggagacagagcactctataaggaatcaaattgcctcttttctgatctaagctctgttaatggtgtccgactccacctcagggaaggggttggaggccccgggtctggtcccctatctgctgctaactggatgtctgattccaatttctctgacttttagttttctcatctatgaaatggggggaaaaattaattctgaagggccctttggccttgagaaacctttagttctagagtatacacgtagcactgtctctccccaccccagcaactgggagatcatcttgtaattagcgaataatttaggagtgcaagtcaaattttcactgaacttccaaaggagcttcgattttacttacattgtacttgagttcaggaagtaccagtgggggcggggagggaggggaagttaggaatctttagttccatggctgtttttgttccattttaatggtacttgttctctaggattggatctgtctgtgtgcacatttaagttcccttaacaaaacatctcctgttcctttagaccagggggctttttcttccagcaaatccaggagcaacccccttcttatggtggaggtgacaaccaggtgacaatgcggcgtctgggagagttttcagtccaactcatcactgttcagacaagggggtcaatggcagctttaagatctcagcttgccacgacctccccagctagtgacccagaaaacagaaaagagagaagcacacggaaaggagtggtcagcagttttctgactgcttttccttcccctaaacccattagagaagttcaatcgcaggtctgtagggaagacacctccattgcagacgccctgccagctcaggggcctggcggaggtacggcaggagagcatcttctcccacctccgaaaacaagaggaaaccaaagcyggcctcccccacgccagcttcttcaggctgcgtttgcacatcgcctcccccgcccccgccccaacacacaatattgaataaatatgcctggccctggcccatgtgggaatgctggagagctacgattgttatttccaggaatgcacagacaccagcaaaaattcatttccca

SEQ ID NO: 727669 - DNA, 1399 bp, Homo sapiens
atattaattacacatacacatgaatgcatatttatatgtaacatacatacaaaatattatttcaatgtctaaccattataaaagttattaattagatatgtttaattttatttcctactaagtcttcaaaatctggtgtgtgttttaccctgacagcacatctcagtccagcctagccacatttcaagtgttcaatattcacatggctgtggctaccatatttgttagggcagcactaaagcactaaagaacttcttccttggagaagttctaagctttcaaaatgtttggcaaatacattttataaaattcttcagaatccataaataggcaattacacatttagtaagccatagaatccaacatggcattaaaaatgaatccctcgacaaaaaagaaggtaggcaacattttcttcagaccaaatggacaaatcaattatgattacctcacatgcccattattatttattaacatctttcattaatacccccaaaccccatcaacaggtaaatgaataaatgcattgaggcctatctgaacaatgtcccaattccttaccattcttacttcttttgcaagcagaaaagactcagtattagcaaagactattcagatagtttgttcttatgccagtagttgtaattttctggaggtctatgtgatatcaattatgtacttcaatacctctcacaagtacttttcctgtttggccattttctgcggtatatccatgttcctattttctctattcttttatttctatcctagacttttcttttatcctataattctttatcctaaaaatattaatttaaggataaygtcacaaaatattatatttcttcagatgatactccaaatttatacttaatatacagaaatgactatcatggacataacccacaacatgtgaaatgtatggctcattctactgacattataaaggaaagttaatgacaactgaatttctagtcattttccacccaaccagttgcttataaaatgtcaaggaattgtaggtatgtacacagtggctatttttgggtggggtgttcagcaactctcctcttgagagccccccttttctttgaggaccatttcaatgagaaccaactaagcctgacccaacctaccagccccagccctagaggtgatcattaaaaaagccagctggaatacaggatagctctgtcctatagcaacctaaaacactacctcccttgatgtgcatatagaaaatctatgtcttgtggccaggcatggtagctcatgcctgtaatcgcagtaccttgggaggccaaggtgggcggatcacaaggtcaggagatcaagaccatcctagctaacacagtgaaaccatgtaagactctacccttggatcatagccactgtttca

SEQ ID NO: 727670 - DNA, 1399 bp, Homo sapiens
atattaattacacatacacatgaatgcatatttatatgtaacatacatacaaaatattatttcaatgtctaaccattataaaagttattaattagatatgtttaattttatttcctactaagtcttcaaaatctggtgtgtgttttaccctgacagcacatctcagtccagcctagccacatttcaagtgttcaatattcacatggctgtggctaccatatttgttagggcagcactaaagcactaaagaacttcttccttggagaagttctaagctttcaaaatgtttggcaaatacattttataaaattcttcagaatccataaataggcaattacacatttagtaagccatagaatccaacatggcattaaaaatgaatccctcgacaaaaaagaaggtaggcaacattttcttcagaccaaatggacaaatcaattatgattacctcacatgcccattattatttattaacatctttcattaatacccccaaaccccatcaacaggtaaatgaataaatgcattgaggcctatctgaacaatgtcccaattccttaccattcttacttcttttgcaagcagaaaagactcagtattagcaaagactattcagatagtttgttcttatgccagtagttgtaattttctggaggtctatgtgatatcaattatgtacttcaatacctctcacaagtacttttcctgtttggccattttctgcggtatatccatgttcctattttctctattcttttatttctatcctagacttttcttttatcctataattctttatcctaaaaatattaatttaaggataacgtcacaaaatattatatttcttcagatgatactccaaatttatacttaatatacagaaatgactatcatggacataacccacaacatgtgaaatgtatggctcattctactgacattatamaggaaagttaatgacaactgaatttctagtcattttccacccaaccagttgcttataaaatgtcaaggaattgtaggtatgtacacagtggctatttttgggtggggtgttcagcaactctcctcttgagagccccccttttctttgaggaccatttcaatgagaaccaactaagcctgacccaacctaccagccccagccctagaggtgatcattaaaaaagccagctggaatacaggatagctctgtcctatagcaacctaaaacactacctcccttgatgtgcatatagaaaatctatgtcttgtggccaggcatggtagctcatgcctgtaatcgcagtaccttgggaggccaaggtgggcggatcacaaggtcaggagatcaagaccatcctagctaacacagtgaaaccatgtaagactctacccttggatcatagccactgtttca

SEQ ID NO: 727671 - DNA, 1399 bp, Homo sapiens
atattaattacacatacacatgaatgcatatttatatgtaacatacatacaaaatattatttcaatgtctaaccattataaaagttattaattagatatgtttaattttatttcctactaagtcttcaaaatctggtgtgtgttttaccctgacagcacatctcagtccagcctagccacatttcaagtgttcaatattcacatggctgtggctaccatatttgttagggcagcactaaagcactaaagaacttcttccttggagaagttctaagctttcaaaatgtttggcaaatacattttataaaattcttcagaatccataaataggcaattacacatttagtaagccatagaatccaacatggcattaaaaatgaatccctcgacaaaaaagaaggtaggcaacattttcttcagaccaaatggacaaatcaattatgattacctcacatgcccattattatttattaacatctttcattaatacccccaaaccccatcaacaggtaaatgaataaatgcattgaggcctatctgaacaatgtcccaattccttaccattcttacttcttttgcaagcagaaaagactcagtattagcaaagactattcagatagtttgttcttatgccagtagttgtaattttctggaggtctatgtgatatcaattatgtacttcaatacctctcacaagtacttttcctgtttggccattttctgcggtatatccatgttcctattttctctattcttttatttctatcctagacttttcttttatcctataattctttatcctaaaaatattaatttaaggataacgtcacaaaatattatatttcttcagatgatactccaaatttatacttaatatacagaaatgactatcatggacataacccacaacatgtgaaatgtatggctcattctactgacattataaaggaaagttaatgacaactgaatttctagtcattttccacccaacmagttgcttataaaatgtcaaggaattgtaggtatgtacacagtggctatttttgggtggggtgttcagcaactctcctcttgagagccccccttttctttgaggaccatttcaatgagaaccaactaagcctgacccaacctaccagccccagccctagaggtgatcattaaaaaagccagctggaatacaggatagctctgtcctatagcaacctaaaacactacctcccttgatgtgcatatagaaaatctatgtcttgtggccaggcatggtagctcatgcctgtaatcgcagtaccttgggaggccaaggtgggcggatcacaaggtcaggagatcaagaccatcctagctaacacagtgaaaccatgtaagactctacccttggatcatagccactgtttca

SEQ ID NO: 727672 - DNA, 1399 bp, Homo sapiens
atattaattacacatacacatgaatgcatatttatatgtaacatacatacaaaatattatttcaatgtctaaccattataaaagttattaattagatatgtttaattttatttcctactaagtcttcaaaatctggtgtgtgttttaccctgacagcacatctcagtccagcctagccacatttcaagtgttcaatattcacatggctgtggctaccatatttgttagggcagcactaaagcactaaagaacttcttccttggagaagttctaagctttcaaaatgtttggcaaatacattttataaaattcttcagaatccataaataggcaattacacatttagtaagccatagaatccaacatggcattaaaaatgaatccctcgacaaaaaagaaggtaggcaacattttcttcagaccaaatggacaaatcaattatgattacctcacatgcccattattatttattaacatctttcattaatacccccaaaccccatcaacaggtaaatgaataaatgcattgaggcctatctgaacaatgtcccaattccttaccattcttacttcttttgcaagcagaaaagactcagtattagcaaagactattcagatagtttgttcttatgccagtagttgtaattttctggaggtctatgtgatatcaattatgtacttcaatacctctcacaagtacttttcctgtttggccattttctgcggtatatccatgttcctattttctctattcttttatttctatcctagacttttcttttatcctataattctttatcctaaaaatattaatttaaggataacgtcacaaaatattatatttcttcagatgatactccaaatttatacttaatatacagaaatgactatcatggacataacccacaacatgtgaaatgtatggctcattctactgacattataaaggaaagttaatgacaactgaatttctagtcattttccacccaaccagttgcttataaaatgtcaaggaattgtaggtatgtacacagtggctatttttgggtggggtgttcagcaactctcctcttgagagccccccttttctttgaggaccatttcaatgagaaccaactaagcytgacccaacctaccagccccagccctagaggtgatcattaaaaaagccagctggaatacaggatagctctgtcctatagcaacctaaaacactacctcccttgatgtgcatatagaaaatctatgtcttgtggccaggcatggtagctcatgcctgtaatcgcagtaccttgggaggccaaggtgggcggatcacaaggtcaggagatcaagaccatcctagctaacacagtgaaaccatgtaagactctacccttggatcatagccactgtttca

SEQ ID NO: 727673 - DNA, 611 bp, Homo sapiens
ttatgacagaacagaatgtggcaagtgttggtgaggatgtgcctagtcattttgacatgttaataatttcttactcagatagtcaatacttccctcccttttttacactgtaaacatagaaaacattaagttttacgttctgttcttgataattccagtatatgcaagctttgcaaatccaattctctagttttttatatttgtgatgtatcttgtttcctcctgcaggctgtacttttgatttatttagcttaatttttgcatcacaggcccatgtctgatggagccctatctgtgaggacacaggggactgcactgaaggggctttcttccagaccactcactttagattttgacaagcacctggggaccccacaccctatgactacctttcaatactaacttgaggttttttggaccatctatgttgtgcaaattcaggtcaataacttgtgtgtagctamcaaggtggttacagaatctcagaggagattccccacatacccccacccaggatggggtttcttgtcctccttcctgtaagggtggattgctttttctagttattttactgagaggatagtcctttcagtctctggcttcatggaaga

SEQ ID NO: 727674 - DNA, 611 bp, Homo sapiens
ttatgacagaacagaatgtggcaagtgttggtgaggatgtgcctagtcattttgacatgttaataatttcttactcagatagtcaatacttccctcccttttttacactgtaaacatagaaaacattaagttttacgttctgttcttgataattccagtatatgcaagctttgcaaatccaattctctagttttttatatttgtgatgtatcttgtttcctcctgcaggctgtacttttgatttatttagcttaatttttgcatcacaggcccatgtctgatggagccctatctgtgaggacacaggggactgcactgaaggggctttcttccagaccactcactttagattttgacaagcacctggggaccccacaccctatgactacctttcaatactaacttgaggttttttggaccatctatgttgtgcaaattcaggtcaataacttgtgtgtagctaacaaggtggttacagaatctcagaggagattccccacatacycccacccaggatggggtttcttgtcctccttcctgtaagggtggattgctttttctagttattttactgagaggatagtcctttcagtctctggcttcatggaaga

SEQ ID NO: 727675 - DNA, 608 bp, Homo sapiens
gaacccacagagtctcagtcacatggacccgcgttgctcgttgtaaccaactcccgctctgtcctcactcccgttcccagccctcgacccaccactctgctcattggaactggaccctctccctggagcaggctcaggggtaggccgggcagtgtgacgtgttcccgggattgactgccttggaatacagaacttgaacctttcaagaacttggaattaataatattttattgtcttctagctgagtttcattttctataaagaaatattttaaaatatgtgaaatgtgtcatcacagcctcaaaaaatgctacaatagagttagctgagtttgggtgttatataattttttcctatagcaaaggaaaaccatagacattaataactggtcatatttcrcccttttgttgcaattttaaaaatcaaaaatttcagctatgggctgggcatgatggctcatgcctgtaatcccagccctttgggaggccgaggtgggcggatcatctgaggtcaggagttccagaccagcctggacaacatggcaaaaccctgtctttactaaaaatgccaaaaattagccaagtgtaatggtgcttgcttgtaatccc

SEQ ID NO: 727676 - DNA, 757 bp, Homo sapiens
tttcttacttaccactgacaattctcttaaaggaagaaagaaagatgtccttgaagttgactaactcttagaatatcaagcctacttcattctccataacattaataactgatgcagaagcaaaacagaagagtctgagttcagaacatttttgtctaatggaggggcacagggactcatgtcatgcttcaggataccttgtaaccattcctgttttattagagaagataatccagctacattctcaaggtgggtaagtcaacacagcgaggtgccttggacagagcgtgcttcctgtgctgggagctcgggtgcctgcaggcgtgggctccctctggtgcaccctctgcagctccccagatagccaaagcaatcttgagcaagagcaacagagtgggaggcatcctgtttcctgatttctaaatgtatgacaaagctgcagtgatgcagtgtggtactggcataaaaacagacatacacatagatcaatggaacagaatagctacccagaaataaayacgtggacacatggtcaactaattttcaataaaggcaccaaaaaatcaaaatgggaaaaggatggtctcttcaataaacagttttgggaaaagtggatatccatatgcattagaataaaactgacccagatcttatacagcacacaaagatcaactcagaggattaaagacttaaatgtgagacttaaaccataaaactcctagaagaaaacaggaaaaaagcttcttgacattggtct

SEQ ID NO: 727677 - DNA, 1018 bp, Homo sapiens
cactaaaagatgtcttctttaaagtttctgtagtgatatgctggattcaaagcaatcttccaattgttttatcattagcttgaagcaaaagaaaatgaaaagcatgacaaggcataaaattggccttagcaatatctaagcttggttcagccgtgaccattatgctcaatgctcttacagtgtgaacaaaacagccataaaatcagtttattgtttttaattttacgatccatgatttattttgtttaactttagtgacagcctgcgatcccagtaagtgtcttcagttaggaaatgcaagcaggaaatcaagacccaaaagtcattagttgaagcatggactcatctcatttatcttcctgtagaactaccagagtgtgatctatgtgattcctattacacaaattaccaatggcaattgtgaaataagaatcgtttaaagaatgaaatagatcttacgttgttagcttaaaccttcttggcactctatagaccttggacaactagaacctacgtcctatattttaaatattttaaattcaagccctccccaaagcacarttttcaaataaagaggtaagacacaattcctacaagttttgtagtcaggaagacctgacctttaatagctgtatatccttgaatcactccattcaacacattaaacaacaacttcctcatccaaaaaatgggaataataatattagctgtatcatcgcgttgttatgaagaataaatgagacaatgcatgcaaactatttagcaaagtatcagatataaaacccctcagtaagtgaatgaatgaatcctttggtaatgtcaaattaatgggatcttttataaaaaaaaaaaaagagagacattcccttcttgcatttcaatgttggtatttcttggcattgtttaagattgtgacccaaacttccagtatattattctgaatttgttctaagtaaataaagaagtgtataggcatcatttattaatctttataccccatattacttctctaccggtg

SEQ ID NO: 727678 - DNA, 1471 bp, Homo sapiens
acgcggtgtctcccttcccactcaatacgtttctacaatcattgacaggyattttggcaactctgtattattcctaaagacattgctccaagtgtggccaaacatttccttcattcatcacccagctgagtccctctttccaaggtaggtgggctgtggatggagttaaggtctagatatatagagagtgggattctcccatgtcatctgttcttacccatatgtgaatgcaatgcaagtcatttgtgaatcacctgctcttttgaacttcttgaaggcagagagactttttcaatccgagtatttagaatagtgctcactgtgtggtgctggtggtttgggggaggtttcctatacaagaatgtgctgattaaaagaaggtggctaaagccatgttggagcactggttaattcagccctacttaggtatagtgccaacttttgatgaactatgggtaatttattaatagtcacttttttttttttgtaatggagtctcactctgtcacccaggctggagtgcagtggtgcgatctcagctcactgcaacctctgccttctgggttcaagcgattctcctgcctcagcctcctgagtagctgggattacaggcacgcaccaccatgcctggctaatttttgtatttttttttagtagagacagggtttcaccatgttggtcgggctggtttcgaactcctgacctcgtgttctgcctgcctcggcctcccaaagtgctgggattacaggcgtgagccactgcgcctggccgaatagtcacttttaaagttatgtaaattccctgtaatcagaaatgggaatgggaaggaaagagaaggaaaagagaacacagaacaaacgtttctagtacttgttatgtataaggcattttacatacattgaatcatttagttacagtgagggggtagtacttttaggagctgagtatggctatctctgttttcagattaggaaatggaaacttaggatcgtccaggtctgaatcctggctgtgccactattagctgtatcaccttgagtgagatacttaacttccttatatctctgttttctcatctgtaaaacagggataatcatagtacccaccttactgagttgtgaggattaaatacaacaagccaccttaagcacttaaaaaacatgcgtggcctgagtagacgcttggatattagttattatgtcaccacctggctggagggctccctcattcacatgggttcagtgtggggtgtgcacccatgccttcctgaggagaggatcttgaagggaagcagagtggtcgggggtgctcacttgcgcaagatgatctcagaggcgcccttgctgtacatacggaagccaccgttgggattcctgatgacggtgctcattgacttgcgcactgagttaaaggtgtacaccttgtagagcttctcctcgggcacttcattacgcacagcctgataatcctg

SEQ ID NO: 727679 - DNA, 1334 bp, Homo sapiens
ttcttaatttacataattgattttgtgctatgaatcttattctatttcgggccaggcacagtggctgtcacctgtaatcccagcattctgggaggccgaggcaggcggatcacctgaggtcaggagtttgagaccagcctggccaacatggcaaaaccgtctctactaaaatactaaattagccaggcgtggtggtgagcatctgtaatcccagctactcaggaggctgaggtggaagaatcacttgaacccaggagggggaggatgcagtgaaccaaggttgcttcattgctgttcagcctgggtgacagagcgagactccatttcaaaaaaaaaaaaaagaaaggaaaagaaaagcttttattctatttatttgctcactcagtggtagttaagacctgtgcatgttgccatgtggactttttacagcatagtgttccatcatatccacacaccacatgtactatccattcttaagttgcttccaactcccaggcactacaagcagtgctacagtgagcatctcacacatgtctccttattggcctgtgggaatgtttctctgggatggggataccaggacatagagagtttggatacatcctagtcttctcaacccctcctggcaattaatccctgtaacccatgttcagcattgtgttctgccctttaattgttggcgatagcctcagttgtacgtatcttctctcgtctgctacaccctaagtgtaaaatgagaccctgtttcccttcattttgcattttctgcaggttctcatctacatcttatccagagttggtgttacataaaacaattttttaatagactgaactaacatatcctttcctgcaggaatgcatatttccttagagcaagattagctgtgtttcattcatctcaactgagttcagaatctggcactctaaactattcaaaatatcaccagaggacttcctaagacatgattcatgaccttttcaaacatggaaaaatagtaccgttaagaacaaaatgggggccaggcacagtggctcacggctgtaatcccagcactttgggaggccgagtctggtggaacacctgaggtcaggagttcgagaccagcctgaccaatatggtgaaaccccgtctctaataaaaatacaaaaattagctggatgtggtggcaggcacctgtaatcccagctactcaggagactgaggcaggagaattgctagaacccgggaggtggaggttgcagtgaaccgagatggcgccactgcactccagcctaggggacagggagagactctgtctcaaaaaamaaaacaaaaccaaaaaaagaatgaaatg

SEQ ID NO: 727680 - DNA, 1334 bp, Homo sapiens
ttcttaatttacataattgattttgtgctatgaatcttattctatttcgggccaggcacagtggctgtcacctgtaatcccagcattctgggaggccgaggcaggcggatcacctgaggtcaggagtttgagaccagcctggccaacatggcaaaaccgtctctactaaaatactaaattagccaggcgtggtggtgagcatctgtaatcccagctactcaggaggctgaggtggaagaatcacttgaacccaggagggggaggatgcagtgaaccaaggttgcttcattgctgttcagcctgggtgacagagcgagactccatttcaaaaaaaaaaaaaagaaaggaaaagaaaagcttttattctatttatttgctcactcagtggtagttaagacctgtgcatgttgccatgtggactttttacagcatagtgttccatcatatccacacaccacatgtactatccattcttaagttgcttccaactcccaggcactacaagcagtgctacagtgagcatctcacacatgtctccttattggcctgtgggaatgtttctctgggatggggataccaggacatagagagtttggatacatcctagtcttctcaacccctcctggcaattaatccctgtaacccatgttcagcattgtgttctgccctttaattgttggcgatagcctcagttgtacgtatcttctctcgtctgctacaccctaagtgtaaaatgagaccctgtttcccttcattttgcattttctgcaggttctcatctacatcttatccagagttggtgttacataaaacaattttttaatagactgaactaacatatcctttcctgcaggaatgcatatttccttagagcaagattagctgtgtttcattcatctcaactgagttcagaatctggcactctaaactattcaaaatatcaccagaggacttcctaagacatgattcatgaccttttcaaacatggaaaaatagtaccgttaagaacaaaatgggggccaggcacagtggctcacggctgtaatcccagcactttgggaggccgagtctggtggaacacctgaggtcaggagttcgagaccagcctgaccaatatggtgaaaccccgtctctaataaaaatacaaaaattagctggatgtggtggcaggcacctgtaatcccagctactcaggagactgaggcaggagaattgctagaacccgggaggtggaggttgcagtgaaccgagatggcgccactgcactccagcctaggggacagggagagactctgtctcaaaaaaaaaaacaaaacmaaaaaaagaatgaaatg

SEQ ID NO: 727681 - DNA, 1605 bp, Homo sapiens
aaagaaagaaagaaagaaagaaagaaagaaaaggaaaggaaaggaaaggaaaggaaaggaaaggaaaggaaaggaaaggaaaggaaaggaaagaaaagaaacctgagacatctaggccatcagcagggctgtgaggaattccttcagcttcatgcagagagccaagttccaagtcgaaatcgtggctgggggcctgggccaaagaactggggggatagaatttggagtcacatgacccttgagcaatgctttgagagactctggcttaaacctccatctttgccttcacctagtcctcaaggttccaggctttggtagtttctgctgaaactctttcagctgccctttgcccaggctgcaacctcttccagaaatgccctttctccagctgttgaaactcccagcaaatttgcagccatctccatggcacttcagtcaggcgctagcactaatgcccaaccctctggccacttacaggacaaccatagtcctgacgtttgtctcagggtctgaaagtttccaatcagtgcacttaggctaggaatagagaatcccatccaccaaactagaagttcctcaaggagtgggatcaggttcgccttgcccagcacgcaggaggtggtggtcagctaatgtttgttgaatgaataaataagcaaatgcttgaactgtagaaggcaggggaaatgagcttaaccccacctctgccttcaccaataccccttccccatgacgcaaatcttatttccaatccaatcaggagaaaactgaggttcagggaggtcctagtttggccatctctgatctcatctgagtctgtccctttctgagtctgtttccccatctgtatgggaagtagcacccctggtgcagggccagcttcatgagtgtgtgacgggggcagtcataagccggctgtgtctaagactaggtgggagtggtgacgtccccagaaggccccactctccatgcacttttccttaccctgaaggcagaaagaggcaatgatgttctaagacacacaaaggaccaatgtttacttaaaggactcatgtttacttctgcaggaaaagaatgaagggaagaggaagacagagcaacccacagttccttctttcagcctttcctcactcttcagtaagccaaaagtagagagtgttagtacagtatgcatgtgrcaagaagtgaaataaaaacagttgatttggtcaggctcagtggctcacacctgtaatcccagcactttgggaggtcaaggcaggaggatcacttgaggccaggagtttgagactggtctgggcaacatagcaagacacccacctgaacaaaaaatttaaaaatttagcccaggtagggtagcgtgtgcccatagtcgtagctactcaggaggctgaggcaggaggatctcttgagcccaggagtttaaggcggcagtgagctaggatagcaccactatactccagctggggtgacagaccaaggcaatgtctcaaaataacaataacaataataatagtaataataataataataacagttgagttagttttgagcagcgtttctgccattctggtaataatgaaatgcctgtgtgtgtgcaagcta

SEQ ID NO: 727682 - DNA, 1111 bp, Homo sapiens
tactaagtatcggctggggatggtggctcatgcctgtaattccagcattttgggaagctgaggagggcagatcacttgaggtcaggagttcgagaccagactggccaagatggtgaaacctcatctctactaaaaatacaaaaattagccaggcatagtggtrcacgctgtagtcccagctactcaggaggctgaggcagaacaatcacttgaacccaggaggcggaggttgcagtgagccgagattgcacaactgcactccagccttggtgacagagcaagactccgtctcaaaaaaaaaaaaaaaaaaaaaaaaaaagagtactaagtatcatacctgtgggatgcagaagggcagtccagattggcatttacagtcctaaatgacatttgttagaaaaacaggaaaattcataagaataattggaaagaccgttaaaatagataaggctttagcaagcttaatcaaaggggaaaagagagagatcaataaacaacatccagaatgaaagggtggacattactaaaatccaggggaggttgtttcttttaattacaagaatgccaggcacactgttttaccaatgaatttgaaaatctaggtgagattgacacttttcaggaagacacaaattactgaaattagcccaagtggaaataaaaataaatacaacaaaccaaagatcatgaaaatttgttaaatcattaaagagaaagtgcgtttttggtgcccccaccaaaaaaggcaccaggtcccactggttttaaacaagagttccaacaaaacttcaaggaaaggataaatctcatccagcataaactacagagcaaagaaaaagatggaatgctctcccacacattttataagactaacatcaccctaaagctgacactggagttacagcgcatatgacaaatggacaaattgcggtcgtcgctgctgaagttggaaggcccctgcgatcccagcacctaccttcatccatgccctgtgactctttacagaagttttctgcagatcctgtctgagctttagtttccacactggtgaaaagaggggtctggactataattggtatcatttatttgacacctgccccttgcctcgtaa

SEQ ID NO: 727683 - DNA, 2236 bp, Homo sapiens
gaaatgcaaacagtcaagattacttttacagtgctgtgcacttcctccaaatcagcagctaacctgtgttccaagatccaccactgaatcactcccaggctttccttttgacttctgggtttttctggaacaatcagaacagcagctctgccagaccctttgagaccttctaggcaagccaacccctacatttcagcaggcactctgctagctcttggaaagtccctgtggctcagcagaaagagttctcaatttagaaggagatgacatgggtttgagttatgcttcagccacctatgggctggaaagtctcagaatagtcacttaatctcttggaggctcaatttatttatccataaaatggaagcgttggaaagtcagccttttctatcccaggaatattctatacatatgtataatacaataattattttatatattttttttaatttttttctatttaatttctgtttatatatccattatagaagattttgtgcatacagaaaatgttatattagagaaaaatattatccttaaatgcaaagataactactattaatatgctgaatattttcttcctaatttmtttgcatatgtatgtatatatatatatagttgagaacatattttatagttatatatcatttatatatcatttaatatactgtgagcattttcccacattatttgacattatttaatcaatgatttaaataattaaatgatattaattggacatgatgtgaatattcctttgaaatgattattaaaaatttcctagaatttatactttaaatggttctcaagtacattacagtatatgtgaagtcacacagcaatgaatgttcacattattttatagctattcaagtatcacctgtctcctaaattaagaataacaatgaaatcgtattcatgtgtctaagtccggtgcctagtatggtgcctggcataaaacaaagcctttaaaaatgtgtgctgaataaataaggcaatgagagagtgaatgccactgagttgtcatttcttcagtgtcactcctttctcagggagaagtagaggggtgttctccagccagaccagacagagatggggtggtggtgggattcttttccaaggcaactggctagcatccttctcttacctccacctctacacttctgccagctaatttttttcttctgaaactcaagggccaactagcctttttattggaatgcagttgccaaagccgttattggcttagctcatattttgcctttgtcatgagccacctttctgtgcataacaaatgagaaaagtcttaataaataaatcattagtgacctaattaaaaagaaacacactggggtgctagcaagaacaggggccagagcagacaccttggcttcatttcatcagagaagagttgataatcacacaggcactggagaagacttccttaaactagaagggctgtgcccctcaaagatcttgcctgaacaaaataaccttaaaaataatgataataatagtactgagtactatttgtacccagtaatttgctgagatttttagaatatgctaactaaatgttccacgtatattgttttaactgatgcttacaatgcaccataaagaagaaaaataatattacatctacttgacttataaggaaactgagtctctgcaaggttaagtaacaactggaatagctgattttcataatgttgaatggctgtatggctgtgaagccagacggatctgagtttgaatcttggctctaccattatgtataagctgcacgacatgggaaagttatttacctccttgaggctccatctgctcctctataaaatagagattaagggactaaatattattctattgtgactacttgtattgttatcatgattatactgttaatattatttggttatattataatagcaatgccagactctgggctagagcagtgagcatccaaaaatgtacaagacatagtgcttaccctctaggagtttccagtctgacttagcatataaccacatagctactaaataacaaaggtgtaatttgagccagagctatggaattttaaaacacttttctattacctaccgtatcgctttattgtagcatatgtctgatattattgtcattaattatttatatttgtcttccccactaaagtgagtctgtcacggtaggaatttgcatctccagtgtccagcacaggccctgccatggagtc

SEQ ID NO: 727684 - DNA, 669 bp, Homo sapiens
cccacgttatcaatgaggacactgagattctggaaggttaagtacctcccttgctcaaagttacacagcaaacgaagagtagagctgggatgagacctaggaatctaggctctgaggccctccaccctgctactcaaattatggcccagagaccagcggcacaggcagccaccagggccttgtgagaactgctcactctcacgcccacatccagacctcctggatcaggaggctggtggttcacatacatgcttaagttggagcagctctgggtctagtctccttggaaggaaatgggccactttaattccattggtgctgccttggagcatgttagattttggtgtcacagccccttttctatacccttagttggtgctgtcctcaggctcatctttgtcctgcacaggcccttcctacaggagacacattttctcagaatgatagtatgatggttaattttatgagtcaacttggctaggccatggtacccagacatttgattaaacattattatagatatttctatcatagtgttttttagatgagattaacatttaaatcagtggactgagtaaaacmgattaccatccataacatgggtgagcctcctccaatcagttgaaagtcttaatagaaaaacaaaaccaaaaaaactgacttccccct

SEQ ID NO: 727685 - DNA, 663 bp, Homo sapiens
aaattactttttctttctttttctctttcttttcttttcttttttgttgacagggtcttactctggagttcagtgatgtgatcatagctcactgcagcctggaactactggcctcaagcgctcctcccacatcaggtctcccaaagggctgggatgacaggcatgaaccaccacaccccacttaaaatattttcaagactttctctaactgtttattgacggtacattgaattactatttttcacccattcactcaacaggcgtttgttaaatgcttaccatgtgtggtattgcaattctgtttctagaaagggatcccgaactagaccccaagaggggattcttggatctctcgcaagaaaaaattcaaggcaaatccagagtaaggtgaaaagcaagtttattagagaagtgaagaaataaaagaatggctacccgataggcaaagcagccccaagggctgctggtcrgctatttttatggttgtttcttgattttatgctaaacaaggagtagataattaatgagttttcccggaaaggggtgggcaattcccagaactgagggctcctcccctttttagactatataaggtagacattgccatggcatctgtaaactgtcatggcactggtgggagtgtcttctagcatgctaatgcat

SEQ ID NO: 727686 - DNA, 549 bp, Homo sapiens
atggagttgctgaggaaattgaagctcttaggcagaggagcacaatttggcctctccctagtaaaactaccagaycgttcttagctcttttctttccacatgtttagatttcccatgaaaaaggcacagcgtcctctccctcagttaagatctagttatccatttggctaagtgagaaatctcatattacagaattattaattcaacaaatatatattgcatacctgctgagtgccaagcactggggctaggaaaagtaataaagtgttttttgcatttatttaggccctgggctggttcagatataaggaataaaacaacagtgccccgtcttcaattgcccatagtccagggaggcaggatttcatgttgctgcgatgaggacaattgaggtgtacgtagagtaattcctgggcatgcacagaagtagatgacagtgaggggcagtggcttagtgtgctggctgaggactcagacctggattcctgttcttgttaaagactccgctccctgagagccacatctattagatagagatagcaagagtat

SEQ ID NO: 727687 - DNA, 644 bp, Homo sapiens
aacccaaatgagtactttaactcaggattctctgaagaccacaaatgtattgattgagagtgattgaacaacccacaccaagaaaggataatgtatacaatttattatacatttaattcaagcacatttgtttccaacartcacaaatgatatatagtatggtattctaaagctggaggacttactctagctgattttaagacttattgtaaagttaatggtggtattcagacaatgtggtattcatataaggatatacagctaagtcaatggaacagaacagagtcaagaaatagacctatacatatatgttcagttgatatttgatgaatgtgcagaatgattcagtagggaaaaggatagcctttccaacaaatggtgatggaacaactgggtatccttatgggaaaaaaataaaccttgacacctacctcacaccatacagaaaaattaacttgaatggaccatagacctaaacatataacctaaaactataaactacaaaacaaaacacaaaagtacaaaggactttgatccagaatatttaaagagctcttacaacctaagacaaacaaaccaatttaaaaacgggtgaaatgtttgatcagacatttcacaaaagaagatatacacatggccaataa

SEQ ID NO: 727688 - DNA, 1579 bp, Homo sapiens
gtctgaaaatcctggcactacccatgaccttgggaatgaacaatgtgcggtcatctaccatgtcacctgctgtcttctttacaacaagactgatctttcagatccttctttatttttgcgtagctgaggccatttctgaagccaaaaagaaaagaaaaagaaaaacaacaacaacaacaacaacaacaaaaacagctgacacgacagtacagtataaataaaaatgaagaaactttatgttggatcaagctgataaattactgttcaaccagcagcctctctagcaagggcagctatctgagctgaagacacctggactgctctctgactcaactcttatgagttctgctcataccaccgagtcaaggctttaacagtatttgcatttgccgtttttcactgtgatcttaagtcacagtttttcacagtgatcctaagtcttccatgctgtggtacagaccccaagttttcgcaactcagaggtgggccaagtgcaaggggacctgagtcagagccaggtttgatcctgaccgcagagctgacagtgtggacttagccgagtcacttactctgatctgtttgctcatctgtcaaatgtgaataatgacttgtccccagccttctcctcagtgctgggtacaggtcaggtgagatgacaaaggtgaaactgctttgtcaactgtcgaaaacaagttattttcttcttccattaactttccccctcaagcagcaactgctttcttctgttcccttctgcagggtttgataaagaagtctgttgagcacgtgtttatcatggtttttaatcacagcttcatctttccagactgcagcgtccctcctgmctgtaatttcttctcatggtttggtacctctttcagtcgcccctcccttagcctttcccagtctctcttgtagctttcctaccaagcagttcacacacacacacacacacacacacacacacacacacacaattcaaagtgtgtcagatcttgaaatattttctttatatctctcctggaatcgcccagcgcttccttgcccggaacgttcctggctacaataagcaccacatcggccaaatacccattagaaactgaatgattcctatctgaaatactcacaagaagcctggagcccattactttgtgtgtagaatgtagtctttttcccccccttaaatgcattacctcacatctgtctgtattacaatttagtatgccaacttccccactcacagtttcaggcctgtggcaaaccatctttcagtttattttccccactggcttgctgttttatgacttaaaaatacttgagagcaaaatgtaaatttaggcaatctcaaagacattactgattgggtcgttttaattaaaaaccagcattagtatctgtggtactaacagttaatactaggtacgctttgtctgaatcccttattttttctttgattgccactgcctctacttcttttgccaaagaaagttgtttaaaaaacttttaagcttatattccttctgccaaaagctaacacacaatgtgttttatcattattctttgtaatgcgcttgtttca

SEQ ID NO: 727689 - DNA, 1579 bp, Homo sapiens
gtctgaaaatcctggcactacccatgaccttgggaatgaacaatgtgcggtcatctaccatgtcacctgctgtcttctttacaacaagactgatctttcagatccttctttatttttgcgtagctgaggccatttctgaagccaaaaagaaaagaaaaagaaaaacaacaacaacaacaacaacaacaaaaacagctgacacgacagtacagtataaataaaaatgaagaaactttatgttggatcaagctgataaattactgttcaaccagcagcctctctagcaagggcagctatctgagctgaagacacctggactgctctctgactcaactcttatgagttctgctcataccaccgagtcaaggctttaacagtatttgcatttgccgtttttcactgtgatcttaagtcacagtttttcacagtgatcctaagtcttccatgctgtggtacagaccccaagttttcgcaactcagaggtgggccaagtgcaaggggacctgagtcagagccaggtttgatcctgaccgcagagctgacagtgtggacttagccgagtcacttactctgatctgtttgctcatctgtcaaatgtgaataatgacttgtccccagccttctcctcagtgctgggtacaggtcaggtgagatgacaaaggtgaaactgctttgtcaactgtcgaaaacaagttattttcttcttccattaactttccccctcaagcagcaactgctttcttctgttcccttctgcagggtttgataaagaagtctgttgagcacgtgtttatcatggtttttaatcacagcttcatctttccagactgcagcgtccctcctgactgtaatttcttctcatggtttggtacctctttcagtcgcccctcccttagcctttcccagtctctcttgtagctttcctaccaagcagttcacacacacacacacacacacacacacacacacacacacaattcaaagtgtgtcagatcttgaaatattttctttatatctctcctggaatcgcccagcgcttccttgcccggaacgttcctggctacaataagcaccayatcggccaaatacccattagaaactgaatgattcctatctgaaatactcacaagaagcctggagcccattactttgtgtgtagaatgtagtctttttcccccccttaaatgcattacctcacatctgtctgtattacaatttagtatgccaacttccccactcacagtttcaggcctgtggcaaaccatctttcagtttattttccccactggcttgctgttttatgacttaaaaatacttgagagcaaaatgtaaatttaggcaatctcaaagacattactgattgggtcgttttaattaaaaaccagcattagtatctgtggtactaacagttaatactaggtacgctttgtctgaatcccttattttttctttgattgccactgcctctacttcttttgccaaagaaagttgtttaaaaaacttttaagcttatattccttctgccaaaagctaacacacaatgtgttttatcattattctttgtaatgcgcttgtttca

SEQ ID NO: 727690 - DNA, 1579 bp, Homo sapiens
gtctgaaaatcctggcactacccatgaccttgggaatgaacaatgtgcggtcatctaccatgtcacctgctgtcttctttacaacaagactgatctttcagatccttctttatttttgcgtagctgaggccatttctgaagccaaaaagaaaagaaaaagaaaaacaacaacaacaacaacaacaacaaaaacagctgacacgacagtacagtataaataaaaatgaagaaactttatgttggatcaagctgataaattactgttcaaccagcagcctctctagcaagggcagctatctgagctgaagacacctggactgctctctgactcaactcttatgagttctgctcataccaccgagtcaaggctttaacagtatttgcatttgccgtttttcactgtgatcttaagtcacagtttttcacagtgatcctaagtcttccatgctgtggtacagaccccaagttttcgcaactcagaggtgggccaagtgcaaggggacctgagtcagagccaggtttgatcctgaccgcagagctgacagtgtggacttagccgagtcacttactctgatctgtttgctcatctgtcaaatgtgaataatgacttgtccccagccttctcctcagtgctgggtacaggtcaggtgagatgacaaaggtgaaactgctttgtcaactgtcgaaaacaagttattttcttcttccattaactttccccctcaagcagcaactgctttcttctgttcccttctgcagggtttgataaagaagtctgttgagcacgtgtttatcatggtttttaatcacagcttcatctttccagactgcagcgtccctcctgactgtaatttcttctcatggtttggtacctctttcagtcgcccctcccttagcctttcccagtctctcttgtagctttcctaccaagcagttcacacacacacacacacacacacacacacacacacacacaattcaaagtgtgtcagatcttgaaatattttctttatatctctcctggaatcgcccagcgcttccttgcccggaacgttcctggctacaataagcaccacatcggccaaatacccattagaaactgaatgattcctatctgaaatactcacaagaagcctggagcccattactttgtgtgtagaatgtagtctttttcccccccttaaatgcattacctcacatctgtctgtattacartttagtatgccaacttccccactcacagtttcaggcctgtggcaaaccatctttcagtttattttccccactggcttgctgttttatgacttaaaaatacttgagagcaaaatgtaaatttaggcaatctcaaagacattactgattgggtcgttttaattaaaaaccagcattagtatctgtggtactaacagttaatactaggtacgctttgtctgaatcccttattttttctttgattgccactgcctctacttcttttgccaaagaaagttgtttaaaaaacttttaagcttatattccttctgccaaaagctaacacacaatgtgttttatcattattctttgtaatgcgcttgtttca

SEQ ID NO: 727691 - DNA, 980 bp, Homo sapiens
tcatttgtgtagcagtgatgtgcaccattttcattcaacactcacaatacataatacatttcagagtcgagataaactgagaattcagttttcttccttctattctttattgaatgttttaagtttattcttacattcccctttaaagacatgaaatagcttgagaaaaaaatattcaaaatatggagtgatgaatggcaagaagaaaagagaaacaactcataaagggttatgtaaattgtaggaaaaatcaaacataatgtctttgacattccctctgccttatgtcagagcaaactcctcaattctgatcatgacacagtgatcttatctacgacatgatatcatctttttttttcagttcaaattcccatgccagtaagcctttcgactctaggcactcattcaaaaattcaggagtgttctcaagttcttgtgtgaaccaagatgtgtcaacccacagcaggtggttcagctgctctgagattctttgctgagtatatccagcctttggctaaagcctctaacaaacaatacattgctttgcaattagccacccgttcttattagggttaataaattacctgctatttataactgtagacaacaggtcaagggtgtcacatatgatggggcagagaaagtagtaaaagtttgctaacctttaaattctataccaaacaccaactccattcatgaaggcttgtcttccctttcctatgaaagcattccttctcttgtctacttatcctctttatggttgcacgaactttgctttccctgcctttgtggactgatcatattttattggactttttgaaaatatttctagaacaggaataaactacattacgaagttttcagagcctgacttagttttatagattcagctgcatgtgtgttaatgyatttaaaaaaaacaaagtctgagctaataagaatacatagggttaggccaagtgacataaacagttggaaag

SEQ ID NO: 727692 - DNA, 829 bp, Homo sapiens
tattttattttctaatatctgcctgtgccgcatcatttaagattgttttgcttgcaatagcatatctctaatctttaactgattcttccagtagtctctttttgctgttggcattctaatcaattaaagttttctattgtgctgcctcctgattttccttcatccattttttgctccataaagaatgaaatacatgacgaggtgaaagcctatgtttatataggtatacctttattttatttctcacacttgaataggtcctttcattttatttttcttacattttcttatatcaggtcaaatttccccagcatcatatgcttagtggtatttsctttcaatccaagcaaaccaaaaagtacattccagagtttttacagctattaataaaatatctctagtgcttatcaggccattttgtgcaataatgttatcaacatatccttaatgactctatgtgataaacaatgttactgctaggcaccaagtgcctaaataatcctttaacagccatataaaatttgagtgaagtagctgaaagttggtggatatctcagctccacagttcagattccctatctctcctttattgcatatattcgcacatgtatcttggcacagtctctgtatgccagcaactgcaaaattctacttggcagtctcttcacaggttgattagagttgttacttggcagtcagtgtttgagtgtctcaaagatcactgccacatatcttgatatattttaattataccctgcatgtatgaaaaaggaccctttcattttcccgagaaacaataggttgtttgaccttgtgctgggaaaaaaaa

SEQ ID NO: 727693 - DNA, 943 bp, Homo sapiens
ctttttttatttttatttttagacagagtctcgctctgttgtccaggttgcaattcagtggcatgatctcagcgacttgcaacctctgcttcctgggytcaagagattgtcctgcctcagcctcccaagtagctgggattacaggtacctgtcaccatgtctggctaatttttgtatctttagtagagacagggtttcaccatgttggccacgctggtcttaaactcctgacctcaggtgattctcctgcctcagcctcccaaagtgctgggattacaggtgtgagccaccaggcccggcctggggacaaatctttgaggagtgaagaagggtagaggccaagacaattcatggcatcttggattcgatgaaatacagcatattaactcctcaaaacaaccctacaagataggtattagcattatgtccagtttataaaggagaaaagtgggcaagaaggaagttaattggctgggtgtggtggttcatgactgtaatcccagaactttggacagccaaggtgagtggatcacttgagcccaggagtttgagaccagtctgggcaaaatggggagacccccatctctacaaaaaatcaaaaagttagccagttgtggtggtgtacgcctccagtcccagctactcaggaggctgagatgggaggatcgcttgagcctggaaggttgaggctgcagtgagccgtgatcatgccactgcactccagccagggtgacagagcaagactctgtcctaaataaacaaataaataaataatcaattaaaaaaaaaaaaggaagttaagtaacttgccaagggccacacagctagtaaatggtagagctctgagtaaagtctgggggccagtgaagtcaggagacagcactagggaaaaacaagttcttccagaaaaaccataaactgaagagaagaaaaagaagataaa

SEQ ID NO: 727694 - DNA, 943 bp, Homo sapiens
ctttttttatttttatttttagacagagtctcgctctgttgtccaggttgcaattcagtggcatgatctcagcgacttgcaacctctgcttcctgggttcaagagattgtcctgcctcagcctcccaagtagctgggattacaggtacctgtcaccatgtctggctaatttttgtatctttagtagagacagggtttcaccatgttggccacgctggtcttaaactcctgacctcaggtgattctcctgcctcagcctcccaaagtgctgggattacaggtgtgagccaccaggcccggcctggggacaaatctttgaggagtgaagaagggtagaggccaagacaattcatggcatcttggattcgatgaaatacagcatattaactcctcaaaacaaccctacaagataggtattagcattatgtccagtttataaaggagaaaagtgggcaagaaggaagttaattggctgggtgtggtggttcatgactgtaatcccagaactttggrcagccaaggtgagtggatcacttgagcccaggagtttgagaccagtctgggcaaaatggggagacccccatctctacaaaaaatcaaaaagttagccagttgtggtggtgtacgcctccagtcccagctactcaggaggctgagatgggaggatcgcttgagcctggaaggttgaggctgcagtgagccgtgatcatgccactgcactccagccagggtgacagagcaagactctgtcctaaataaacaaataaataaataatcaattaaaaaaaaaaaaggaagttaagtaacttgccaagggccacacagctagtaaatggtagagctctgagtaaagtctgggggccagtgaagtcaggagacagcactagggaaaaacaagttcttccagaaaaaccataaactgaagagaagaaaaagaagataaa

SEQ ID NO: 727695 - DNA, 1035 bp, Homo sapiens
tggatgtgatatattttattaatagatttctgaatattaaaacattattatattcctagaatagacctatatggtatatgaaaatgttgttttctacttggtatttgctatatattatttaggacttttcggtttttgattcaacagctgtggacacatctcaccaggagccagtgccacccactagtcttacttcatcctccagggagctgggtctggagttttcctacactttttcaaattgtagattcaagcctcagatcgttctgtgaaatgtaccaggaagcattctctctcagtggtttgcagtcattcatatagcagggtaattataagttcttacaagagaaatccttcacttccaaactctgaaggattctaaaattaatctggaagaccaaaatactgaacatagagggattgacacaagagattaatatgaaactattgcaaaactataactattaaacctaagacaacttttgaaatttttctccatggttattaccctgtagaaatacgtgaaaatttacatttccttcggaaaaatattcaatttcattgatagtttattaccactaagttttaatatacagcatttctttatagtttttatcaccattatttatagttttattaattatattctcttcttttcctttatttgctcaatcatggttattaaattgctcatttctccatatttacagttttttctttttttgccaaatrgatctttcattggttaaatttttaaggtgtatttgtttgtttttaaagttcttgaatttatcaagtttactgtttccatgttttggttcataaatttctcttttgtagtctttattattttttaaatatccttgaacttaatatcttggattttctaaaactataaaaatattttgttattagaggtttttattgttgtgggtgcttatttattaacaaatatatttaatctgatgtgttcgactctgaaatgactttgggcttcatctttaaattttatatgtctttgttttttaagtagcc

SEQ ID NO: 727696 - DNA, 553 bp, Homo sapiens
accatgttgtccaggctggtctcaaactcctgacctcaaaagatccacctgcctcggccttccaaagtgctgggattacaggcgtgagccaccatgcctggccragcatttgcatttttatttgctaaatctggcaacactatttgtgagattagtggagaatttgatagaggttagtcttgagtaaaaggtgggagctctgctagggactgttgcagtggtctgagtgagagatgcaggtcggggtttgggctagggtgggctccgtggagataaagataaggggatggatctgagaggggccacacaggctttgtgaagggtgggacctaagggcagcaagggaggaagcagtcagaatattctcaggttggagggtccaggctggaggaaaagcatccaaggtggccccactgactgtgacgaggtcactctggtaggaataggcatgggtgagagaggctagggttaagtttcctatacttttattagaaacacctgctgaggtgtggactctgcaaggaagttgtgagtctgggcaggaggagcaggt

SEQ ID NO: 727697 - DNA, 851 bp, Homo sapiens
atatttaatatatcgctattgcatgtgggatatactaaccactacctaattttattcatcaattatcaggctaaagttcttagttagatataattaggacctcaagttactttctaattactctgatatccttcttcaaacatttgtatatatggctccagcagtatctaaaaagaaaagattgcctgtcccacattaaatgaagcaattcagggaagaatatttttctccaaatggcaaattctatataaattctgaacaccacagccaccaccacacctgaggtggacaccctgagggcaggcaagcaygtgtttgttcattagtttgtccgcctgatggttcacttgggaatttttgtttactttaaatctataccttatgaagggaaagaatcacactagagctgaaaatctacggaaggctcagcatcacatgaatttcccttctaattgggctaattgaacagtcaatggtacaaatattataaaagtttttcagctctgtctcaggtgagacttgtgtctagatcattggaatcctagtaataactttaatataagccagctaggtgattctcagccctttcatcacaaagattcaggttgtccacgaatacgccaaagagttacaaaactttcaaatcagtcagttctagttaaacaatgccaaaatgtcagaaaaatttttaaatgactgtaaggcattgatttaacatcaataatagttttaaagtagttgtgctaagattgaccaaaaaatgccacacacgaagatattgataggttatttttgtataagtttctaaaatggtatatgcattaatttgaaagaccagtctacccattcgt

SEQ ID NO: 727698 - DNA, 851 bp, Homo sapiens
atatttaatatatcgctattgcatgtgggatatactaaccactacctaattttattcatcaattatcaggctaaagttcttagttagatataattaggacctcaagttactttctaattactctgatatccttcttcaaacatttgtatatatggctccagcagtatctaaaaagaaaagattgcctgtcccacattaaatgaagcaattcagggaagaatatttttctccaaatggcaaattctatataaattctgaacaccacagccaccaccacacctgaggtggacaccctgagggcaggcaagcacgtgtttgttcattagtttgtccgcctgatggttcacttgggaatttttgtttactttaaatctataccttatgaagggaaagaatcacactagagctgaaaatctwcggaaggctcagcatcacatgaatttcccttctaattgggctaattgaacagtcaatggtacaaatattataaaagtttttcagctctgtctcaggtgagacttgtgtctagatcattggaatcctagtaataactttaatataagccagctaggtgattctcagccctttcatcacaaagattcaggttgtccacgaatacgccaaagagttacaaaactttcaaatcagtcagttctagttaaacaatgccaaaatgtcagaaaaatttttaaatgactgtaaggcattgatttaacatcaataatagttttaaagtagttgtgctaagattgaccaaaaaatgccacacacgaagatattgataggttatttttgtataagtttctaaaatggtatatgcattaatttgaaagaccagtctacccattcgt

SEQ ID NO: 727699 - DNA, 1725 bp, Homo sapiens
aggggggcagctgaggctgctatgttgatgagcacaaggaaggactcggcaaggcactcccattaccctcctccagaaatataaaaaagaaaaattttaaagacctgatgctactgttaactttagactattacctaatgcaaaaatcttgccagctgcaaattgccctcaatatatttttccagagaaaatgagtcttaaatctgcttgacttttcttctctaatcagaagcctcctttgcatagttacagatgtgggcttgataaaccaccttaagcactggtttcagactggggagaaagggggagtgagagaattctttcaaggaataaatgcaaaactcatcgctttaataaatgaaatatatccttctcaaaatgcttgtacactcttatgaaaatgcagataaaactggatggaagttttcttcaaaagaggaccaacgcttttggcttgtcagtgtaaacaaaatatgaaaaaattatgttccagctgacataattaaacttgctcagaaactatacaaatacatggcagaaaatacctttcatgatcacctatttaaaatggagttactaaagggatcactttattcttaaatcataagcaagatgatccaatgccatcttctgtaagtcaatacagaagtgaacaaattaaaagctattagcattccatttactatcgattaggaaaacattcaatcatttctaataaggaaaagatttgattcctttgagacatgttaagggaagtgatcagaggtcagaataatatctatttgagaaatcatgtatcaattcaaaggcttatggaaaatcatagatttgagggtctcccgtctaacagtggtcacaatatatgctacccatggctacctttaaacaccatactaaaacactaatttacatccttgtgaaaatgaatccacgtaaaagttcactgcagtccatttcttcagtgaataatcaagaagggaaaaaactaagggcctattcacaaactactaggatcctagaaataccagttttcaagtcattaaaaccaatgtgtattattttttaaaacacaagactaataataaaagcaggaatattcaaaaggttatgccaaaagtagagcctctcgaaatgagtggtgcaaaaaagttgaaactatctgcaagtgatttcaactcttgacgtgtattttgcttgacttaaaagctgggaatcaatttctttcttcaccctcgtcttcaactactgggaaggaatcaatgatgtgcctagacygactagagaactctggagtaatgcccctgcagtaccaactcagggcttccctgataggcagcagtttcttcacttgacctgtctttggcctgaaggactgaaactgcccaaggactcagccctcgtgagagaggaggccagcgggcaccaagagtgtggcaggaaaaggactaggctggcggagaagaattcgccagcaggagacaaaggggcagcctgttgcccaagaatcctctaccagtgtacagtgaggggaaagggggtgaacaacggggaacaaggggcctaaaaaagagcagtggctataatccctaaaacatacatacagaacttaaaatttggtccagagacccaaaaaatgtagctctaagccactgagggacataataaaacagaggctgggaaagccactaaatcatctaaggcttattctttttcttccaattgaca

SEQ ID NO: 727700 - DNA, 1285 bp, Homo sapiens
agtttgggatgggggcatgacaaaagaatgggaggcacatggacttcagagtccaacagagctaggttcaaatactgacaatatcagctaataatgattctctaaggttccttttcctcttctgtaagacgaggataattcttcctgyagcggtactgctgtgaagagtgtaggagagaatgcacgttaatgttcagggcacttggttctagacatatgatgggtgtgtattacagcaagtttctgcctcatgctctcacatgagcacatcccaagagagggcttgggaaaataattttttttattttttaaaaaaagccgtgttagctttcaagttgtcactaggtaaaacttgtgtaggaaccagttactactaccaggcagcatcatacgttatgatttgatcctcgctacaatcctccaaggacttatgattgctctcattacgtagatggagaaggagaagccagaaaagttggagatgctcatggagatgttgctgggaaaagaggagatgggatttgaaccttctgagtttatattctaagcttttctccccccaagaaaatcaaggaagatatcaaagggcacatctatctaaaggctcagtgaacttcccaatattaaccaggtgataaaaattaaaatacccctatttccactatgaccatttctagatgttctaaaccagctcatccaggaaggaacgagttcatggagtccccactatatatcagacactctgctgaataatttgtacactctctctctctcgcaaccctttgaggtgagtccttatctctgaatgtcaaagatgacaaaaataagttgcaagatgttaggtaagaagatcataagtgggcaagagctggtaagcaaatgcaaacccctctgactccacagctcacactctctgcactcacttgcagagacttcccgatgctcccatgatctctgaagtcctagtcaaaaaagccagcatcatgatttcctcaggtcgtccgtgacacataccacactcagtatttgcctgatattctagaaattgtcctctcatgagtaacaaaacagtaagtggtgagatgtttccttttttaaaagtttttattgttaatcaagaattctgaattcccaaaacaacagtcaccttttagaaaaaaatactgaagcttggctgggcgtggtggctcacacctataatcccagcactttgggaggccaagatgggtggatcacttgaagtcaggagttcaagaccagcctggccaacatggtgaaaccctgt

SEQ ID NO: 727701 - DNA, 606 bp, Homo sapiens
ttttctctaagtatttctttaataacctcaaacagagaggcacttccttctctcctgctttctcctctactacttggccctatttctattactgcattgtgtcgacactactaaagtcattatctcttctatgatatcaaaatgtattcctctttgtaattctagtgcttggcaaatacttggtttttaaaaaattaaaaattttgtgtgtgtgtgtgtgtgcccagaacttggaaggtctcaaggacctaaattgtcttaattcatgtttgcagaattgaaaaatcaacaactggtgggaatggtcacatcttgaatgaggacaaaagcgtgagtctgtgagaagcgcttaagagcatggcccctagagctcttcctggcacctatctccccaccccactactgtctgtctttctgctctaatggaaagggaaatcagaacgtggtgaaacctttccactgctaccrcacagccagaggtgactcgggcagctgagtaattcctccagggaaacgcaggataagcctgagaagcttgaagagtttgagagagaaaacgcagcaaatgcatcccctagtttaaaaagaacaagctaaaacctctta

SEQ ID NO: 727702 - DNA, 2842 bp, Homo sapiens
cataaatcagaataaataaaaacgtaaaacctggaatccccccttctgcccataaaacaattacaaatcaccagattaaaagaagacttgggttctgagccaaactggaagtgagagccctggcaatagttaattatgatatatgacctcggatcaaatgtgttagactttttgcctttgagcactggtttaagtttctctgccttgtgggtttgtgaggaagcacataaaggatgtaagggaatagaggatcccatctctacagataatcatctggcctcatgcaaccagcatgccacttgttggagaagtgtgttcaaaactcatttctggttcgtgcacctgtggcccttggcggcaggtcctgtaacacacagcctgaccactgatacagaggaggcccctgggactgctttccttataagggtcctgcgccttggtagaatttagatttggagttgcagagactcaactcaggaaagcaagtctttaacctctttgaccttggttttctcacgtgttaagctcaggacgtggaaccggtgatttctcatgcctttgatttttaagagtatgtggaatagaattgtgcataactgtgaatcacagtcactgtagaaccacagggctggctggtagctttcggaatctgttagtggctttctctttgctctttgaaagattggtgctgttccatttcatgatgccagaaagtcatgttgggaattggtgttaatttttctgggctcaaaaaatcctgtttcttgactatttttcctacttctttccataatgtgagctattctgcaaaccaaagcactttagtaaaactctctactactagaaatgtgtttaacattattggtgtgttttcaacaatacacatcaaactttgagagccactcttgtgagtgaaattgctgtggagtatggagtgagaagttattctttgatctattttaggctacttgcaaagaaatatartagaatggctagaagagccatctctggagtcaggacagagtatctgtggccaagaattagcaggatgaccctgtagaagttattcacataactgaatttttaatgagataatgcatgtaaactactaagttttagatggtatagtatctgatcagtatacggtagctacttattatttgaatatgttctctaattcctgattgatttgtatttattaaagattattctacagattcaacttgtgctgatgtctttccactggctacagaagattcccagtttacttcacgtatctgaaaaaaagaatttcttatttaaatttacccctacacaactggaggcaggggggcagtgtgtgggaaaggtgaatttttatagaagtataagttcttctgaaagggacccaagctaaagtttccacgacagggtttcaaattcattttttaaaacgggggcagcacatcccggttctgatttggaaacaagcattgctgcctggaatggattaaaaacagaagatctctacttctgcatccatttgtaccttacacagggatgcttttaaaaatatttaacaactgtgactgggtgcagtggctcacgcctgtaatcgcagcactttgagaggccgaggcaggagtatcacttgaggtcagaagttcgagaccagcctggccaacatggtggaaccccatctttaccaaaaatataaaaaattagccgagtgtggtggcatgtgcctgtaatcccagctactcaggtggctgaggcaggagaatcgcttgaacccaggaggcagagcttgcagtgagccgagatagcaccactgcattacagcctgggcaatggagtgagactccatctcaaaaaaaaaaaaaaaaaaaaaaaaaaaaattaacaactgtatggcgtggcaacagctggtcggggaggttgcctaccattgccctgttggaacagatttgtaactcctttaattgtaggatcctggtgagagtttggggccgttgatgtaataggacacatttgggggcttgtagcagtggctgtttgtgaattagcagggaagcattttggtgtggcaacaagtgggatggctgtgcctgtgtgtactggctgaatgtccctgtgtcatgtccacgccagggattttttgcccagtttgtcatagaaggaaggtagaatgtaatgcttatgctcacgataagagtaatacgaattatttacatggatttagttttttagaaaattattggctaaaaatcattgggtcttattggttgtaaagtgctgaacccactgtgcaaaaatcaagacacttagaatacaagaaatactgagactttttcccttcacggagattcccagtatggtattcatgggggcagtgacatctagcgttccctcccaagatagcaggcactctgaatgaagacagtgtgtttatttcacaagtagcctacaaactcagttatttcatccagggcctgaattttaccatttttgaaagtacgtcacattcatctaagtgagggggcctggtttgttccaaattttcatgaccatcggagcgggtctgacggtgagaccagacattttgcttgtatttctggttcagctccagctagggctgaactcagggggccccctggaaatggggcatttctgggaccaatctgaggatttgcaaagaattttaagtaagcacaaaacttttgattaaaaaggagggcacaaactgaagcccagcctttgtttctaacacactttgacaaaatggtcattttgaattagatatgattagaaacctcttaagaaataaaaatgaaaactcgccaaactcttttatggctatgca

SEQ ID NO: 727703 - DNA, 641 bp, Homo sapiens
tttaaggtaggaaaatatagacaagtgagcatgaagaagaaggagaaaatggaggaaaaggaaaatgaagaggtggaggaggagaaggagaagaagcaacagcatgggaggtggagaaagatcacctgtaatctccacctagagatgatcactctaatgttttagtgtatagattatcctcgtggcaattcctctacacacatgcaaaaacagacacatacactcttgatagacagatagaggaagaaagattgagatagataacatttttataaaattgcaatcactctgtgatggttaatattgagtgtcaacttgattgaatttaaggatgcaaagtaggccgggcgcagtggctcatgcctgtaatcccagcactttaggaggccgagaccggcagatcacaaggtcaggagatcaaratcatcctggctaacatggtgaaaccccatctctactaaaaatacaaaaaaattagccgggcctggtggcgggtgcctgtagtcccagctacttgggaggctgaggcaggagaatggcatgaacccgggaggtggagtttgcagtgagccgagatcgtgccactgcactccagcctgggtgacacagcgagactccgtgtaaaaaaagaaaaggatgca

SEQ ID NO: 727704 - DNA, 620 bp, Homo sapiens
aaacatgtccactggctttccattatcacgaaaataaaacccatacaccttatacaaaagaccctacttgatctggtccaaattcctctcaattgctctctcccacaacttgtattccagtgatttccagtcactaaacatgtagcattttctgagtttgctcatttttaataatatacatttccttctgtctaaaaaggctatcctcaggtcttggcctggcaaagtcatcttttaagaccagctcaaatatcatctattctgagccaggcagaggacatgttctcttaaggcattctgttcacccctctggcataatctagccgagagtgacaagagattacgataataatcccttatgaccttgccttgytgttaacaaagttatctcgtttgaaccatataatgactcagatgaggcaagaaggcatcccatttcatagatgagaaaatgggctcaagacagcaagtatcctccccagtgtcatgtggacaggatgggatccagattttgtagccagaatctggccacataaaagatctgagctgaggtgcttcaggagttctgcacacatttgatttgtattttattttaaaacatgtattttaataatttaaaa

SEQ ID NO: 727705 - DNA, 620 bp, Homo sapiens
aaacatgtccactggctttccattatcacgaaaataaaacccatacaccttatacaaaagaccctacttgatctggtccaaattcctctcaattgctctctcccacaacttgtattccagtgatttccagtcactaaacatgtagcattttctgagtttgctcatttttaataatatacatttccttctgtctaaaaaggctatcctcaggtcttggcctggcaaagtcatcttttaagaccagctcaaatatcatctattctgagccaggcagaggacatgttctcttaaggcattctgttcacccctctggcataatctagccgagagtgacaagagattacgataataatcccttatgaccttgccttgttgttaacaaagttatctcgtttgaaccatataatgactcagatgaggcaagaaggcatcccatttcatagatgagaaaatgggctcaagacarcaagtatcctccccagtgtcatgtggacaggatgggatccagattttgtagccagaatctggccacataaaagatctgagctgaggtgcttcaggagttctgcacacatttgatttgtattttattttaaaacatgtattttaataatttaaaa

SEQ ID NO: 727706 - DNA, 620 bp, Homo sapiens
aaacatgtccactggctttccattatcacgaaaataaaacccatacaccttatacaaaagaccctacttgatctggtccaaattcctctcaattgctctctcccacaacttgtattccagtgatttccagtcactaaacatgtagcattttctgagtttgctcatttttaataatatacatttccttctgtctaaaaaggctatcctcaggtcttggcctggcaaagtcatcttttaagaccagctcaaatatcatctattctgagccaggcagaggacatgttctcttaaggcattctgttcacccctctggcataatctagccgagagtgacaagagattacgataataatcccttatgaccttgccttgttgttaacaaagttatctcgtttgaaccatataatgactcagatgaggcaagaaggcatcccatttcatagatgagaaaatgggctcaagacagcaagtatcctccccagtgtcatgtggacaggatgggrtccagattttgtagccagaatctggccacataaaagatctgagctgaggtgcttcaggagttctgcacacatttgatttgtattttattttaaaacatgtattttaataatttaaaa

SEQ ID NO: 727707 - DNA, 623 bp, Homo sapiens
ctggtaaatgcttccatggaaatcccattagaacatcaaagaagaaagccccatgcctttcctagaggccagtttcctggaaggatatttattcgggaagttaatgttcctcttacttccggttttctaaaagtaataagcatttttttcacaatacaccccttacaaaaattgttctaacttttagttaccagtgtgtggggggaggtataaaacctatatttaataatggaggttattaacttgttagaggctaaaataataaagytgcatttaatgagtagttaaaagattaaaaatattaaatatttttgagaaaaataatgtctgcaagaaagttatgaaagtaatggtaaattctgcaatatgctgaataataatttagtttatttgaaaaatattttactaggaaaaattaatgttatagaaaagatgaactattcatcagttatcaaagaaaagcattaaacttttaaatttttattagttactggggtcttcagtattaaacttaaaaaataccaaaacaagaattatacaatattcatttcagcacagagtagagccttagggaaaaatcctgcaataatagttatatattttcgttgtcatttaacaaaaat

SEQ ID NO: 727708 - DNA, 962 bp, Homo sapiens
acttatcacagtctactggtgtcagtgttttgccacttgaattgaagtatggaaaccttacttccatttaggtcacttcatctaccccacttttaaatatcattgtcttgagcattaggattgtaatttttatttcaatcttgcatatgacttatgaaacttgtgaggacagtctatttgatttatccatatacagtatctgtcctttctattgttctttcttctttcttaatgctctgaaattctttcttttataatttcctttcgttttgaagaaattcctctagccattcttaaggatattttgtgaatgaccctaactagctcaccttctgttgttaggttaggggttgagagacacctggcccgtgtctcattctgtcattgggtggggagtgtcaagatgcccaccactatgttgttcctcctgtcctggggcccccaactagcccaccttcctctattcagagttctcttttggttacttcttgcactgtttccagggttgtagttgtacttagcagagaggagcaggagaaatgattttatgccatctttatgccctcagcatcacttttgaaccaaatctttaattggcagtgtgtaggacaaagaagagttacagagcattttgtttgttttcttyacatgtgtgtatgtattcatttgtgaatcaataacaaatccttaaaatcagaagcatcctcataaaagtctacatttctggattctctgagaaaatctaatctggtcacctgggcctgaacttggcaacagccagcagcaggtgagtaggagcatccctcctctgacccggcacctgcaccactctcctctttaggtccagcttcttgagccatttaaatcaccagtctggctccttgagttaacaaaccctgacttagtccactaatgaaatcataagactttataactgcattatacaaacactttcacataca

SEQ ID NO: 727709 - DNA, 1151 bp, Homo sapiens
tgaggggtgggccctggcctgggagcctgcagcgagaccagggaagaaacatgtgaagtaaattgccagtctccagtgagttgtgcgcctgtgatactgagaagagggacagaagcggaagtgacgctcctctgtcatccgctctttggtggccgggcatcccctggtagctgagactcatgacatccccatgcggatcctgacagaggaggacgccagggagcgcgggcccagcgaaggctcctaaacaagatcagcgagaaagggcaaggccccctgcggggcccagcgagactctctagccccggggacccggggttgtcctgctgctgcagagggtgagtgggcccctctgtggggactctgggggaagcggggcctgatctgccagagcccttctcgcctggcacctggcctgggcgctggcttgatactcagtggccctgtcttggccggccctgtcctctggktcacaggggcagagcttgctggaagccaaacacagggccatccagatcctgccaggctccccacggggcctctccagtctctctgtgctgcctggagccaggcctgccttctccatggccgccctggccgctagggccaccagctcccctgcgcaggtttccaaggagaggccgtggtgccctgacctgactggatgctgtccctaccacctcccttcctggcagggtgttgtaatttctttttacaaattccctaaaacaacatttaagtctgtgaccgttcctcaggtgattcaggtggcagtgccccagccaggctttaaactcaggctgattccacagctcacgctctggcctgtgtgcctccttatcgtggagacatcgtgttttctcattctttcctgtagcccgtagggtacttagcacggtggcatatgtgtaataaacacatgcgcacctaggaggaggtctttaccttaactcgcaagttgtctgtggcccacacagggctccagtcctctaagaagatgtagggcagggaccatcaattgtcacacagtgtcatgtcacatttctcttctaatggagacttgcagcccagatgttctttttggtcttgtgtgaaggatctaatatgtaaagattatattctagatccattttggtctaccctgaaagaaa

SEQ ID NO: 727710 - DNA, 1151 bp, Homo sapiens
tgaggggtgggccctggcctgggagcctgcagcgagaccagggaagaaacatgtgaagtaaattgccagtctccagtgagttgtgcgcctgtgatactgagaagagggacagaagcggaagtgacgctcctctgtcatccgctctttggtggccgggcatcccctggtagctgagactcatgacatccccatgcggatcctgacagaggaggacgccagggagcgcgggcccagcgaaggctcctaaacaagatcagcgagaaagggcaaggccccctgcggggcccagcgagactctctagccccggggacccggggttgtcctgctgctgcagagggtgagtgggcccctctgtggggactctgggggaagcggggcctgatctgccagagcccttctcgcctggcacctggcctgggcgctggcttgatactcagtggccctgtcttggccggccctgtcctctgggtcacaggggcagagcytgctggaagccaaacacagggccatccagatcctgccaggctccccacggggcctctccagtctctctgtgctgcctggagccaggcctgccttctccatggccgccctggccgctagggccaccagctcccctgcgcaggtttccaaggagaggccgtggtgccctgacctgactggatgctgtccctaccacctcccttcctggcagggtgttgtaatttctttttacaaattccctaaaacaacatttaagtctgtgaccgttcctcaggtgattcaggtggcagtgccccagccaggctttaaactcaggctgattccacagctcacgctctggcctgtgtgcctccttatcgtggagacatcgtgttttctcattctttcctgtagcccgtagggtacttagcacggtggcatatgtgtaataaacacatgcgcacctaggaggaggtctttaccttaactcgcaagttgtctgtggcccacacagggctccagtcctctaagaagatgtagggcagggaccatcaattgtcacacagtgtcatgtcacatttctcttctaatggagacttgcagcccagatgttctttttggtcttgtgtgaaggatctaatatgtaaagattatattctagatccattttggtctaccctgaaagaaa

SEQ ID NO: 727711 - DNA, 649 bp, Homo sapiens
caggaagcagagaggctggggagatgaaaagtgaggataattaagagttttatggggttgatgtgctactggtagcaacagcagccacaccccacctgcaccaggctgatgagcccacattgcttggggatgagcccacattgcttgggagtgagcctactgctgggggcagaacacagcttgggtggagagggagcttctggtgcccagcccggccacccccagmtccacttctgatccagcatcaacagggcttcttcctgtcccacagaaagagactgggcatgcgggagcttctggctcttgttccgcaaagggccactagtagcagggtgtgagccttgggatgcagctgcggagggaccgttgccacatggagccattgccagttataaagttactgggcagagtgaaggaggagaagaactgagtgcaaatgagacctcatttcagcctcagccagggccaggcggaattggctaaatggtttctctttccttccgttttcatcttttcctctcttcattcctttcctccctttcctcttctccttccttccttctaccacaacttccaatctccaccccgtcgtctcctctctgccctcccctctcctgcctgttctctctcctgcctgtcccccaccaca

SEQ ID NO: 727712 - DNA, 718 bp, Homo sapiens
tctcagattctacccctccctagcctcatttttcaaatggcccctcaccagcctgtgcggttctgatctgcccgcctggtgtctataggatccaggcagcccacaaagactggagtctttgttcctccctctttccctgcccagatctggggatccagcttcaggcaacctttgctgcccctggagaccacccttgtgatggcatcagttcaggggaccaccttgccactcccactctcagggccactctactaccaccccacagtggcccctccagagggacccttggcccactttggtcccactatgtcaaggggacacagcatggcttcagagtcccttggttcttggtccaagctgaagcactatgggggctgtgatgtggctgaacccagctggcatgtgggcagctgaccagcagtgataggcatccccaaagccctctgaccccagcattgtccttactcaagctcatctgaaccagagtgagctctacgtgagcatctcctcctccccctgtctctccttctctcttccctctgcccacctatcccttctacctcctctcacttctcccagcagacacaaaggccaggctgccaaagggtgagggcaacttctcaaactcttaaaagtaactcaatgatctggtttcaataggctttgtccttgatacagtaaagraatttagaaaacattatttcttttgataaaccta

SEQ ID NO: 727713 - DNA, 1288 bp, Homo sapiens
taagacccaggactcttcctttgtcctgggtccatccttgtcctcaagacatgtgtgggctatcagtcagcgggcttcagattctgactcgcagagctgaagtccgcctctagaagctctactggagtgtgggcactgtgctttgcagaggactgttgcttcccaacagtgctctggatcactgtctcccctctcactttatctgcccaaggagggcccaaggcagctgatgggatggagcagggggagaggtgaaggggtcatcttgatggtgggtactaacatgctgctgcagtttccctccctctacacagaggactgcctggacttgccccgggaaagggctgaggatggggagaggattcctaccaggatttcatggtcctggttgcagaaggccctttgctgtctctcaaagctgcttccccacctcccccaaccctcgtcatcatctgggttcttcacattccggaagcactgatgtggcactaaatattcctgcagcttcagccttctcccttgggggcccacgtcatcgctgtgagcctggtttctggaatgtttttgatatgaagcatccaggcaggtgaggggaagggctgtgcagggtgggatccacagtccctcatctaggtctctttggaaccaagaaaatagacattctcttccagctcagattttctttccccagaaggcttcccccacatccaccccctcaccttgcccacccttccctccacctggcttagaagaggttacataagcagatgcaggaggacacagatgttaggaccgaatggttatgttaggacacagatgttaggactctcctttcctgaaagtccacctcccccagcccctgctgagatagcactgatggaaagggctgtgtcctctccctccctccccattccacaccctgcgcgtcccttaggtacaggctytccctccactgtgtcctcctctcctccatcccctccaattctagtcctgtccctcacccttcagcttctcgccgggcgcagtggctcatgcctgtaatcccagcactttgggaggcagaggcaggcggatcatgaggtcaggatatcgagatcatcctggctaacatggtgaaaccccgtctctactaaaaatacaaaaaattagccgggcgtggtggtgggcgcctgtagtcccagctacttgggaggctgaggcaggagaattgcgtgagcccgggaggcggagcttgcagtgaggggagtatcacaccactgcactcccaatagggtgacagagcgagact

SEQ ID NO: 727714 - DNA, 679 bp, Homo sapiens
ccaggccttctgtgccttgcagaaatctcaaggattcatttcaagcgtgtggttcctctttgaggcatcctacacattttccttattttccactccaaatgctatgagcttctctgaaattaaggctatggcacaaatggagaaacctgactccagctgtaaagagatttgttttatgggatagttatctggtcacttctctttgaaagttcattcttgctctccctgatctggtgtttatgtggtccctgaggagaccacctgttcagcatgtcatactgtcctgtcacaggtatgttctatcaggcactggtcctagccctgcagcaggaagtgcaagatggagcagatgacttcctacaactctaaatggttttctctgatggcccaagatggaaggaatggtactgatttaaggcctcaactggtttcactacaaaaagaaaaaaaaraaaaggtggggggtggaactattaacaagttacagggatttctgctgaccagatgagaggcaaatgttaaaaagtttgtagtcagcttgcttgggcttttaaatgacattcactggaaatgagacttggtggcctgctgagcttgagtgggtgaagcctccatatgaactagtgtttgaaggaggcaggggcaaggctgtccaagaaaaggtcaccttgcttccatg

SEQ ID NO: 727715 - DNA, 647 bp, Homo sapiens
cccttgtttgtaaccactcaactttctgtttctaagacctatctatcttctgcactgctcataatgaaagagttaagtaggtgatatgtctgtttaccatcgtttatcttttaaatttttgatgatgatgttaatctctgcgatttcccccagaggattgtttgttttttagtttttaaagtcttgaatttactgttgtggtaagaaggaggaagaacgacttctacttgccgttgtctcccatcgttctcttgtatcgccttgggctagtgagccaatgcagaggagccagccttctaattcctcaggatacccaattcaactatcggttcatggttgggagaaacaacttcagactgtgttaggaaatttactggagttaccatgtgtgagctccatttattgtttgccccatcagatrtctgtctacctggtttgaaacatttttcattaaaaaatcaaatagagtctcagtaacctgcgcgtatattctgtcctaaagacttcctggtccctgccaaaaaactgaaccattttgatttcttgccttggctgttataaaagcaaccctactttgctgctggagattaaggcctttgccagaatccttcagatccaattgaaatcagaaagcccgtttcaataca

SEQ ID NO: 727716 - DNA, 647 bp, Homo sapiens
cccttgtttgtaaccactcaactttctgtttctaagacctatctatcttctgcactgctcataatgaaagagttaagtaggtgatatgtctgtttaccatcgtttatcttttaaatttttgatgatgatgttaatctctgcgatttcccccagaggattgtttgttttttagtttttaaagtcttgaatttactgttgtggtaagaaggaggaagaacgacttctacttgccgttgtctcccatcgttctcttgtatcgccttgggctagtgagccaatgcagaggagccagccttctaattcctcaggatacccaattcaactatcggttcatggttgggagaaacaacttcagactgtgttaggaaatttactggagttaccatgtgtgagctccatttattgtttgccccatcagatgtctgtctacctggtttgaaacatttttcattaaaaaatcaaakagagtctcagtaacctgcgcgtatattctgtcctaaagacttcctggtccctgccaaaaaactgaaccattttgatttcttgccttggctgttataaaagcaaccctactttgctgctggagattaaggcctttgccagaatccttcagatccaattgaaatcagaaagcccgtttcaataca

SEQ ID NO: 727717 - DNA, 667 bp, Homo sapiens
tgccatgtgacaaatatgtggaattggactaatccactagaatagcattaagtttataagtgcatgctcataaatgacttttccagttgagatattaagactattccccaaagaactacttaatcttctggtgaatatccatagcatagaaaagaccaattcactctaaacatgagagatcacatataataaataatctttcatcttatgttagacwtgtctattactattatatattttaaatatatacacctctataagcaataactcacatctttatatatgatcttgaggcaagactcccatttataaagaaaagaataaactctgttcactatagttgcaagtcaagtatattttcttggttacatatttcttaagaaaagccctggccgggcacagtggctcacgcctgtaatcccagcactttgggaggctgaggcgggcggatcacgaggtcaggagattgagaccatcctggctaacatggtgaaaccccatctctactgaaaatacaaaaaaattagccgggcatggtggcaggcgcctgtagtcccagctacttgggaggctgaggcaggagaatggcgtgaacccgggaggtagaacttgcagtgagccgagatcacgccactgtgctccagcctaggcgacagagcgagactcc

SEQ ID NO: 727718 - DNA, 1571 bp, Homo sapiens
tttgttttatattttattttggggagacttcttcattgagattattgtcatagtgtctcaggcataaaggtagtttcctgtgttttactgtggaaaggaaaacctgaagaactgtggggtgtgtgtagaatgaacagctccctggcaactccttgtaacttgagggaggcctggaaggtgcactgcggtatgggcacccttctccccaggttagctggggcttccttctctggtggtctgaccctgctgcgtcacaggggcaggggctgcattgactctaggcacattgtgaaatttgccttcttgtctttttccccttagtataatatgcatctttgctcattccagtttcatgcttctcagaataatacttgctttagagggtaaggcagtatggactgactcatttttaagccgacatttaatgggcagcacctccatgagagagagaaagagagaccgtgtgtgtcaatttttatgtcttgatatcctatccagcaagctatcagtatgctgatttgtgaatgtagacccaggactgctgtacttgcctcctcttcccttccatgttccacggtacargtgctgggctaaaaatcccctttttgttttgtgctaatatgtctgcccctttctggcagtgtaaaaactgtcagagcctctcttaggtagaaaaggcggcagcaattaccgtctcctacggagaaaatgccccttttccagcactgggcccaacatggatgcccttggggcgagggcaggatgcccttggctcgattttgcttataggtagattttcaccaagatggacgcaggagactcgcctgtcacctgctggagaaatcacagcatgcaaatcactttgtgccttctgcctttttattaggttaatacagacattggtaggttttatatttacagctaggcctggatgcctgcctgtgaccttttgaagggtacacactgtttgtttgttcatttgtttgtttttccaaaaaaacctctgtattacttttttttaaaagaagaaaaattgcgtgaaagggagatgcctctgaagcctctcagctcccctcatagtgccaccccagatagttggtgtgacttatctagccttttttttggctagtggggagcccctggtggcctgtgtctgagtgagccactgcataggcccctctagtcctgagtgctccactctctcccagtgacctcacggcagtaactagggagattttatcaactaacatctcagagcaaaaagggaaaattcctcacttttcttaggatatcgtgtgggcagaatagaaaggctgtctgtttctgagcttaatcggcgtacttgcaaaatgacttgtttttccattgctcttatttgtattttaaactgtagcctcaattatgtaccctcttatgttgttagaattaggcatctggagtccagggaatgagtatagagatgtttcagttgttcgaaggggcacatgtaggtaagctaagagcaccaagatgaggtgggggtgggcggcagcaagaggaaacttgaatcagggctacgatagctgtcttgc

SEQ ID NO: 727719 - DNA, 3010 bp, Homo sapiens
gaaagctgccatgtgaggacatagtgagaagagagcaggcagtgtgcaagccaggcagagagccctcacccaaaattgaattggtcagcacctaggccttggactttgcagcctccagacctgtgagaaaacaaaaaaattattagttcaagcagactaagacaactatatgataatctcttagctctttcactgtcactttattttcacaattttatggcaaccttcatatatcaaatgcagacaaatcaataaacaaaatgttcaacactgttaggtattgcatgggatattaatagagtaatggtagagaaatagaagagtgatcagggtaacttcatgttgaatatgtcaaggatcaagtagtgtagttaatgttgtgaaaagtaaatggagggagtgtttcaggaagagggaacagccatctcactgggcctgtgtgtatcctagaattactctttgtgtattctaaatattaaatagaaacaatggaaaggaatagacaaagttgacatttgcttagaatttggctgggagtggagagagactgaaaatatagaatttcacgaggcatgtatagaaattctttaaaggaaaataatggtgaggtattttaaattgaaacaattgttgaaaatgtagcttctyggcaatacaatctatattgttagtttctattcttactgtgactctgttccctacttttatgttgcaaaacaatttgatatgtgtctctgagttctgtaggatccattttactatagtaaatgcctctatacaagcagacattagaaactatgaatggaattgggaagtcagtatacatttgctagagtacagtgttttatttctatcgcgtaagttaaagtctaaccttcggtgccagatttctgcactgatttcctggccgaggctctgtaaatgtggttggcaccatacttgagtggctcaggtagccaggaagtgagattatgtttaccattttcataaatcctcatggaataaatataggcgcctgtcaccgtttcttttgccacccactctagtctttagcaggaaggaagtatcattttcatctctcactacaatgaaagctctgagaatctggttacagtttctcttagcaaatggaatcccagaagtgtctgcatgtagctaaaatgcacatgtattcccctctcagggattttttttcagaccatggttgaaaaatatctgctctttaaattattccattgctttacagaggaagtattaattacatgactgtaagcatagatcaggctgggatgtaattacagggcttactttgtctctgttgtccaacagaattaggcaggaagcattcatgatgccagcaatttaaggtgttttgcagcccattatgtttctggttctctcaagaacctaagcatggatcaaatgacatttctgttgcccagttgtctggaaaaagaacaaagcaagtatgaccaaaaatacatttttataagttttatgtttgtacattgctagaaaatgttacatacaaccttaaaaatgtagtcttttatagcatcattctggttatctaatttttctctaatttgtggtagagtgagtccattattagctttacatttggttatcatattaaacaatgtagttgaggagataaatacgtggttgtattatatagttttatatcttttaaacaatatttgtgtatagaattgttcttaatgcctaatttcaaattagaaaattagaatcaccacaaaactttctaaaaccactgttttgtctcattcacttttatatattatttcctatgttgtgatttttcatcatcttataaaaatgaaatctatttaagtttttacttagcagttcccttactctcagcttttaagctctcttctaattagttaaagatgcttttttacttttctactattttcagtcacttggggctctacatcttctgaaaattctcctcatagttacagattcttctccccctcttctctcattccaaatatttttcttcacatgtttcttgtcactcttggacgatctgcacaacattcctacttgttcctcagaccacagcactatttggtctccctgcagtctatcccaatcacactttgagtgcgtgttcttctaggagcccatgtacgtagaatcactgttagacctagttgcctaaccctcaccttgttaacggtttttgcagtctttgtatctatttcctgtccaaagtttcatttttcatatttttattaccttctttgaaaacaggatgacaatttctatcataaatcagagttgagaaatgaacttccatggctgcatttaccttctttctccctctccgaactctcattccccctctctaccttaaaaaatcatattgataaaagtcatcactcccaagacacaaacttgaattttgactagcatcttcattgtttgctaggagagtaacactaaatctgattggttatctcacttcagaaggaaatgaacaaatcatatttaaggtattgcaatagttagagctagtaaaatttaggtactgagaaagaaaacaaaaatatgtaatgagaagaacttgtgatccagaaggctcccatagtgcagcacaaggaatattgatataaatgcaagaggcctgggtgtgagtcttggctctgccccttacttgtgtgatattgctggacacttttaagtctcagttgtctcacataaataggaaaatgttatccctctcaaagaggtgtcatgttaaaatcaaatgggattattgatttgaaagtatttatttttattatcttttattatcttctgtccttttagtatcttctgtcctctattcttatactagttagtcagtgctcattttcatttttggctctttgtttttaaacctgcgcttatcacagaacaggatgcagggatgaacttcaactgatgcaattctcctttgatgaaggtcacacagggtagctgtcaaaagtgtggaatc

SEQ ID NO: 727720 - DNA, 898 bp, Homo sapiens
ttatgttagtggcaatgaaaacttggagaaaaagggaagcagaaacagtgaattttgcaaatttacaaaattgccatgatttgtttttaccacgtcttctgggaaaaacctgcatccccagtaggcaattagtggaggaactgactagcttctttggatcatcaaggaacaataatacacatatttccccagtgtgaagtattcctttcttcagtattattctggcacctcgtacttcacataggaaatagaagccatcaaacttgtccaacgtgaaagagcgaaaagaaaacccacttaagtcttctgtgtccctcctccttcactctagttaccatagagaagatcttcgtcatcccctttaaagagaatctctttgcccgtactttggatttctaaccttgagcatcattctcttagaactgagatactttatattaaagctatcataacaaatgcctagaataactgtctcttttgcaatctcttcttactctcttaagcccttaatggttggattcatcagtcccagtccagcgggactgatcttctaacaaattaaattttctcytatcggaaactatatgcttattgctatgttaattatgtgtagatttctctactgaggactagattcatgtatcctattttgaaactaccatctccactaggtgagacacctcaaatgcactgtgttcaaatctaaacccttgctctctccattttgtttgctgtaaaagtgaataatgtcactattatccaattatgcaagctagaaatttaggcccatctttgatgtaactgtcaataactttatctactaggtataaaagagttaggactgaaattcaaaactattcttctgagtctggtgatctttgtactacagtcacttggg

SEQ ID NO: 727721 - DNA, 664 bp, Homo sapiens
tgttctcattttatttattctttatgacatctttttgagatcaacttgcattcatttttttgtaattcaaaaataattgacataaaatttatgtattattgtttacagcctaacattttgaagtatagatgcattgtggagtgactacatttagttaattaacatatgatatgcattacctcacataattatcattttcatggtggaaacactgtatacccactctcttagtatttttaagagtacagtatatatggttttctacagagataggaaagccacaatgtcatacaggaaaaaacaaattttgtacaaagagaaataattacaatatactatatttctctcatgagttccttaaattatattttatggttgaaagaaaaattataacaacattagttggtataaaaaaactatacattgtgatgtaataaaaatgctatacayaagttagaatccttaaaaatcttaaagaaaacatcagaaaatcaataaatgaaaagcagagaaataaaagacagaagaaacaaacacaaaacaaattaaaaagtcgacaaattgtagcatattaatgattaccttaaaagtaaatgatgcaataatatatgcaaattgaaagacagagattggacactggataaaaatacataattgaactata

SEQ ID NO: 727722 - DNA, 2571 bp, Homo sapiens
tgacaactttcacagaatcacctgcctcccacacactaagcacacctcagcacatcgtgcagtggttttgtcacatgtagaacagaattggatacatgttgtattcacaggagaatactaggttttcaaatgataataaatgytcctaagatacctttctctctacccttatgattattcttttcagctagctgattaccagagatttcttattacctaaattatcaaggtttatctgtggcagtatgtcagatgtggtctacatgtaattgtaataaacaaacatcctgtaccatgtccaagtctactgcaatcttaaccaactaatcatggataccatctattgagtgggtagtagttgctttgtggtagaaactatgctaagccctttgcatgcattagttcatataactgtcataatacccctgtgatacctatttaacagataagaaattcaaagatttacccaatccaccattgatgggcacctaagtcgattccatgtcttcgctattgcatggcaatgaacatgtaagtccatgtgtctctctggtgtaacaatctatattcctttgggtacattcgattgctggatcgaatggtagctctgttttaagctatttgagaaaacttcagctgaaatttacaaaagaaaagaaattcaaagcttaaaaacgttgtcacatctaaagttacaaattaagaagtggcagaaccaggatttgcatatatgtatttttgattgccaaatgcaagtggttagccgtgaaggctactgagaaattgccaggcaaatataatgctccaatccagatgcagaagtgaggcacagtcactcagaccaaatcataatcattcatatcccttagagactggttatttccttctaaacactcaccaggcagaggatggtgtcacttaggatataaaagaccaaaaattaatttttagggaagaaaaactgataactttgacagatatccacagtacaggcattttaaataaaaatataattatttaaagttatagaataaataactaataaaacacctctataacagcaatcattttttgttgctgctgtaaaatgttaccacaaaggtaatggcttaaaacaacacaactgattctcttatagttctggaagtcatagttcaaaatcaatcttactgagctaaagttgaaggtgttaacagggttggttccttatggaggctctgagagaaaatagttctctgccttttcagcccgtaaaggtcacctgcattcctcagctagtgtctccctcctcacatcaatccaacctcttgtttccatcataacagctactactatttgggtcctcctgccctgctcttataagggtccttgggtttacatttttcccacctggataaccctgggtaatctcccctatctcaacattcttaatcatatcagtaaagtcccttttgccatgcaatgtactttattcacaagttttgggggtgaggacctggacatctttagggaggcattattttatgtactacaattaccaacacttacatttttcaagttaaaaggaaaaaattaattagaaaaaaaaaaaaaatccagtctctattgtactcacctgtgtccaatttccaattaatttgtggtctttcaggacttactttaagggaaagatattatttttctcttcttgttggaaactttctggagcatgtgggtgtagtgactggtattgctctgggttacagagcagcttggatgagcatctgtgcagaaaccactatggtaggctatatttaaaaactgtttatttcaaatgttcaaaaaataaaagggctgggtctctagcaagaagcagccttgaatttgctgcagaaagaagatagagattataagacgtagagggtggttcaatcaatccatttaatattagctgttcactaaaaatgagtgaggaggagagagaaaaaaactgcaacttcttgaatgataattaaacctgttaatcatattctgattagaaaaatatataggaataaacatgtgcttcatattcctgtgggttttctgttctggccatgaaaaataaaagagaatcaaactgccaagaggctttttgaatggggttggataacaaaaattcccccaaaaaacaaaaaactttctgcaaaatcttagtggggcaagcacatgcaaaaaactattttgttttttctccttgaattaataactggagaacatccactcacttaatgccctgggagagagttgtacagtcttctggtgtttcaacctgatgagaaaagacctctacaactgttgctacacagatagagctatgtgtttgaaggttcaaactgcttcttctaagaaaatcaagtgacattcaaagtacttttgaaaagagattaacacagttctaatactaggaaactcatgcttatctaaatgtttctcttttgtttcagacgtgcttctaataacatgtcaatgtatatattcatctcctagaaaggcattaactaatacatggggcgggatttattttatgctataatattatttaaaaatata

SEQ ID NO: 727723 - DNA, 2571 bp, Homo sapiens
tgacaactttcacagaatcacctgcctcccacacactaagcacacctcagcacatcgtgcagtggttttgtcacatgtagaacagaattggatacatgttgtattcacaggagaatactaggttttcaaatgataataaatgttcctaagatacctttctctctacccttatgattattcttttcwgctagctgattaccagagatttcttattacctaaattatcaaggtttatctgtggcagtatgtcagatgtggtctacatgtaattgtaataaacaaacatcctgtaccatgtccaagtctactgcaatcttaaccaactaatcatggataccatctattgagtgggtagtagttgctttgtggtagaaactatgctaagccctttgcatgcattagttcatataactgtcataatacccctgtgatacctatttaacagataagaaattcaaagatttacccaatccaccattgatgggcacctaagtcgattccatgtcttcgctattgcatggcaatgaacatgtaagtccatgtgtctctctggtgtaacaatctatattcctttgggtacattcgattgctggatcgaatggtagctctgttttaagctatttgagaaaacttcagctgaaatttacaaaagaaaagaaattcaaagcttaaaaacgttgtcacatctaaagttacaaattaagaagtggcagaaccaggatttgcatatatgtatttttgattgccaaatgcaagtggttagccgtgaaggctactgagaaattgccaggcaaatataatgctccaatccagatgcagaagtgaggcacagtcactcagaccaaatcataatcattcatatcccttagagactggttatttccttctaaacactcaccaggcagaggatggtgtcacttaggatataaaagaccaaaaattaatttttagggaagaaaaactgataactttgacagatatccacagtacaggcattttaaataaaaatataattatttaaagttatagaataaataactaataaaacacctctataacagcaatcattttttgttgctgctgtaaaatgttaccacaaaggtaatggcttaaaacaacacaactgattctcttatagttctggaagtcatagttcaaaatcaatcttactgagctaaagttgaaggtgttaacagggttggttccttatggaggctctgagagaaaatagttctctgccttttcagcccgtaaaggtcacctgcattcctcagctagtgtctccctcctcacatcaatccaacctcttgtttccatcataacagctactactatttgggtcctcctgccctgctcttataagggtccttgggtttacatttttcccacctggataaccctgggtaatctcccctatctcaacattcttaatcatatcagtaaagtcccttttgccatgcaatgtactttattcacaagttttgggggtgaggacctggacatctttagggaggcattattttatgtactacaattaccaacacttacatttttcaagttaaaaggaaaaaattaattagaaaaaaaaaaaaaatccagtctctattgtactcacctgtgtccaatttccaattaatttgtggtctttcaggacttactttaagggaaagatattatttttctcttcttgttggaaactttctggagcatgtgggtgtagtgactggtattgctctgggttacagagcagcttggatgagcatctgtgcagaaaccactatggtaggctatatttaaaaactgtttatttcaaatgttcaaaaaataaaagggctgggtctctagcaagaagcagccttgaatttgctgcagaaagaagatagagattataagacgtagagggtggttcaatcaatccatttaatattagctgttcactaaaaatgagtgaggaggagagagaaaaaaactgcaacttcttgaatgataattaaacctgttaatcatattctgattagaaaaatatataggaataaacatgtgcttcatattcctgtgggttttctgttctggccatgaaaaataaaagagaatcaaactgccaagaggctttttgaatggggttggataacaaaaattcccccaaaaaacaaaaaactttctgcaaaatcttagtggggcaagcacatgcaaaaaactattttgttttttctccttgaattaataactggagaacatccactcacttaatgccctgggagagagttgtacagtcttctggtgtttcaacctgatgagaaaagacctctacaactgttgctacacagatagagctatgtgtttgaaggttcaaactgcttcttctaagaaaatcaagtgacattcaaagtacttttgaaaagagattaacacagttctaatactaggaaactcatgcttatctaaatgtttctcttttgtttcagacgtgcttctaataacatgtcaatgtatatattcatctcctagaaaggcattaactaatacatggggcgggatttattttatgctataatattatttaaaaatata

SEQ ID NO: 727724 - DNA, 2571 bp, Homo sapiens
tgacaactttcacagaatcacctgcctcccacacactaagcacacctcagcacatcgtgcagtggttttgtcacatgtagaacagaattggatacatgttgtattcacaggagaatactaggttttcaaatgataataaatgttcctaagatacctttctctctacccttatgattattcttttcagctagctgattaccagagatttcttattacctaaattatcaaggtttatctgtggcagtatgtcagatgtggtctacatgtaattgtaataaacaaacatcctgtaccatgtccaagtctactgcaatcttaaccaactaatcatggataccatctattgagtgggtagtagttgctttgtggtagaaactatgctaagcccyttgcatgcattagttcatataactgtcataatacccctgtgatacctatttaacagataagaaattcaaagatttacccaatccaccattgatgggcacctaagtcgattccatgtcttcgctattgcatggcaatgaacatgtaagtccatgtgtctctctggtgtaacaatctatattcctttgggtacattcgattgctggatcgaatggtagctctgttttaagctatttgagaaaacttcagctgaaatttacaaaagaaaagaaattcaaagcttaaaaacgttgtcacatctaaagttacaaattaagaagtggcagaaccaggatttgcatatatgtatttttgattgccaaatgcaagtggttagccgtgaaggctactgagaaattgccaggcaaatataatgctccaatccagatgcagaagtgaggcacagtcactcagaccaaatcataatcattcatatcccttagagactggttatttccttctaaacactcaccaggcagaggatggtgtcacttaggatataaaagaccaaaaattaatttttagggaagaaaaactgataactttgacagatatccacagtacaggcattttaaataaaaatataattatttaaagttatagaataaataactaataaaacacctctataacagcaatcattttttgttgctgctgtaaaatgttaccacaaaggtaatggcttaaaacaacacaactgattctcttatagttctggaagtcatagttcaaaatcaatcttactgagctaaagttgaaggtgttaacagggttggttccttatggaggctctgagagaaaatagttctctgccttttcagcccgtaaaggtcacctgcattcctcagctagtgtctccctcctcacatcaatccaacctcttgtttccatcataacagctactactatttgggtcctcctgccctgctcttataagggtccttgggtttacatttttcccacctggataaccctgggtaatctcccctatctcaacattcttaatcatatcagtaaagtcccttttgccatgcaatgtactttattcacaagttttgggggtgaggacctggacatctttagggaggcattattttatgtactacaattaccaacacttacatttttcaagttaaaaggaaaaaattaattagaaaaaaaaaaaaaatccagtctctattgtactcacctgtgtccaatttccaattaatttgtggtctttcaggacttactttaagggaaagatattatttttctcttcttgttggaaactttctggagcatgtgggtgtagtgactggtattgctctgggttacagagcagcttggatgagcatctgtgcagaaaccactatggtaggctatatttaaaaactgtttatttcaaatgttcaaaaaataaaagggctgggtctctagcaagaagcagccttgaatttgctgcagaaagaagatagagattataagacgtagagggtggttcaatcaatccatttaatattagctgttcactaaaaatgagtgaggaggagagagaaaaaaactgcaacttcttgaatgataattaaacctgttaatcatattctgattagaaaaatatataggaataaacatgtgcttcatattcctgtgggttttctgttctggccatgaaaaataaaagagaatcaaactgccaagaggctttttgaatggggttggataacaaaaattcccccaaaaaacaaaaaactttctgcaaaatcttagtggggcaagcacatgcaaaaaactattttgttttttctccttgaattaataactggagaacatccactcacttaatgccctgggagagagttgtacagtcttctggtgtttcaacctgatgagaaaagacctctacaactgttgctacacagatagagctatgtgtttgaaggttcaaactgcttcttctaagaaaatcaagtgacattcaaagtacttttgaaaagagattaacacagttctaatactaggaaactcatgcttatctaaatgtttctcttttgtttcagacgtgcttctaataacatgtcaatgtatatattcatctcctagaaaggcattaactaatacatggggcgggatttattttatgctataatattatttaaaaatata

SEQ ID NO: 727725 - DNA, 470 bp, Homo sapiens
  misc_feature 390: n = A,T,C or G
tgcctactgtggtctttgaggtcatattatgcaaagaataattttaaataccagagcccatattcagtgcagtgaaatgcttgcattgtaaaaggtacactgtcattgaaagtgaatggagaacaatagatgaacatctcattcatgctcattgtgtgaggtgaatgtaagttaaattgtctacattatataaatttttaatttycctctctgtctctctttctttatctatcctagtgtatgactgtacatgtgtaagttaaataaatgcttaaataatatgactccactgaaatatttttattaaaaatagcaggtaatataagtccattctgcatgtctgtcatctatcatctttctatccatcattgattttttttctatttttcntattgttatatgcacatctttctatttctccgaccatgcattcttttatgtgtgtgtggtatatatttatgtaagtatgt

SEQ ID NO: 727726 - DNA, 2664 bp, Homo sapiens
tgcaaaagcctctgatttataattaatacaattttcatttttatcactgatttcttgttgactacaaaagaatagtgaaagataattatttctgttgaattttgaaagggattctgtgatgctttcatatgaaactatctcccaaacttagcactactccatctcacagaacttcatattcatctaactaccaaatgaataattcatatttgtaataagcagagatgtcatttccttttcagagagagtggaatcatttttgatgaacctaaactgtttatcaaaaccaccttgaaagtgttaccttgatttccttattgactaattataatttgaacgtttgggcacaggcttatggtacagatctgattgcagatctctagtccagaaaacttttcctttctttatcattttctttaaaatgaaacctttggaaaaatcccagcatttgaagtgcttatgtgaaatacatttctctcagctttcaaggaaaactagtaggcaactagtgtgtgtgtgtgtgtgtgtgtgtgtgtgtgtaaatgggggatagatgggaggagagaagtatatagagcatatagaagactacagtgcaatatagcttcctttaaaaggcacaggaacagctcctcattaatatgcatatgagacaacatcataatagttgcctggaaacaaagaagagggcattgaataatgaaaagaatgctgatgccccagtgcaccaaatgaactttaaaactagtagaaaatgggatgttgaccaaattagccgatacagttctgtgcctgaaaatgtattttttaaaaccccatagatttaatttttttcttactgcatcatatttttatcaatgtttcacttagaggtagttttaattggccattctgaagatttgggggaaatagaattgtaaaggcccaaataaatgtgtttcaggtccatttcaaatcatattaataatagggtatctcttagggcaatctctgtcattaaacatttataatcccactttgaaatagtctattctgttgaagaaggtgcctgtaaacttgacagtttaaggcaatgcttaaaaattccctgtaatggcaatatgaaacaaaattgacttcaaaaagtttggagtgagtgatgcaattctactttgggtttttaaatgaaggacacaggaatgccatacagtgagatgagagggtccctctggctaaatgttcttcctggtaagtgcaaagaatactgtatgtatcaaacatgacatgggtaagaaagacaaatgcatatgcttttataaaaacactagatcatttaagtgtgattaaaaaaacatgatagaagaaatttgcccaggagttctaactatttattgttcaaaaatgaaatttacgtatggtattattgtttctttaattctattaagtagctcttttttaagtactaaaatattctgttaagactaatgcatgtttgcttagtagcatgtgatttgacagagtctaatttcatttattcagtgagcatttatcagttatgtactgagaatctattgtgtcaagagtccttggtagtgagagatataaagatgataaagctccaatgcttaaaagttggagctcatagcccagtggaggagaaagtaagtgagtaaataactataaccatacaataagatgctataatggaatgttccccaacatttccccgaaacatataggaaataagttattttctctgggagaattaggaaaagcttcactaaaaaaagtatttgagttgggtattaaatgaggaataagatatttttgccagataagaaaaggaggaacagtctgccaggcaaaataattttatgtaaaaagacagagaagcctgaaaaaagtgagataaaaaaggtagggtgaaaaagtgtaactaaactgttggaaatctacagttgcatctattgaatagggagttttgtaaaaatacagattacctgatccttctcctggaagtttgtattcaatacatcttgaatagaaggaatcttttttaaaaaatggtcccaaggttatcatagtgactagccaggtttagaaaactgtggcctagagtgctgcttaaattttaatctgcataaaaattacctggaatccttgtgaacatttcagattctgattcagttggtatgtgttggggtctgatattccgcatttctaayaatcttccaggtgatgccatttgctgccagttcatggactaagaagtcacaccaagtagataatggaaataccgaatgatagaaattcttaagcgtagaagtaacaaggccaaatttgtattttagaaatctcactctggggcgggcgcggtggctcatgcctataatcccagcactttgggaggctgatggacggatcgcctgaggtcaggagttcaagactagcctggccaatgtggtgaaacctcatctctactaaaaatagaaaaagtagcagggcgtggaggtgggcacctgtaatcgcagctactcaggaggctgcagcaggagaatctcttgaacctgggaggtggatgttacagtgagctgagattgtgccattgcactccagcctgggcgacagagtaagactccatctcaaaaaaataaaataaaaataaaataaaataaaataaaaata

SEQ ID NO: 727727 - DNA, 2593 bp, Homo sapiens
ggtgggatgctgagtcacagttgccctggctgagggacattctcccgagaagtcaaagtgccccagtccttctgcttcatctcctggcatcgctgatcctcaccttggccattcctgggaaggaggcttcagccaggttggacgaggtgtgggcagcacatgcgagggtgtgtgcgagtgggagtggggatgtgagcatgtgtctgtgtgtgtatgtgcgtgtatgtgtgcatgtgtgtgtgagtgtatcagtgtgtgagcgtgtgtgtgcctgtgtgtgtgygcgtgtgtgtgtgtgagtgtatgagtgtgagcgtgcgtctgtgtgtgtgtgcatgtgtgtgtgtagggttctcgcctgttccacagagcgcaccaatctaacaggagcaccaagggacctccggacaggtttccatgccctggcgccctccccagatgtcacgaataacccatctaggtctacctgccctggggtattctctcaggccacgctgaagacaccgtggggcagggcgggccgggagaggtgaacgggcctggagctatttgcaaggctgtgggttggggaggcagcaatctcacccatcttcaggaaggtgggatcactgcttcctctgccctgcacatctcaagagagcatgcatgcagctcctgttggaatgaggctgcagggatgactatcctcaatttacatccgaggcaactgaggcccagacctgcctaggctcctccaggttatagacttgggcagtgcagggaccatttctcatgtttgtttctggccaatatcgtttgtgctcttcctgtgtttgtagagattctgcagtaggaggcctgcttctttgagccagaagtcagaactcatccttccagcttcccttgctgctagggcacaggtgtgtttcatgggctctgccaattagactttcttgtatatgaccttgattgagaaggtagccccttgaagcagtgggctgggggactccatctgttgggagtgggtggcaaaggcatccagctttggctgggggcaggacagagcttctggtgcccagttccaagcaccccgggaaaagttacagtggagtggagctgcaggctgggtgctggctggcagcagggctgttgatgctagtgcaactctagttgtgtggtgggtgttgtcctggctgtgtcccatgcctacctctttttgtcctcctggagattctaggagtcccaaatatcccttaataaattcattttctgcttaagccagtcagagtggattctgttgtttgaaactgaaagtctgacagatacagatagtaacctgctttcaaagctggaccagagccagtctcatcactcacacacaggtctgagtattcaggactcaggactcccaaggcctgtttctacagaggggtgaggcctcttttcctggcttgctgttgttcaaactgcgactcagtcagggagagtagagtaccacatcacatactggttccagaaataggctctggtgtcagggtgacctgaatttaaatcctccttctgccacctgaatgctgtgtgacctcaggtgaattagttcacctttctgagcctcattgtcctcttccgtataatagagataataatatgtgctctgtagggttgctgagaggacgacatcagatagcccatgtaaaaagggttttgggtgcctggtacaattagcaagcgctcatgtagatgaatggagctttgcttccttttcctcctctccatgctgtctctggccccctaaaggtactgagcacttcccagccagacacccctgcctgaggctcccacccacagcctgtgagctccctgggacagagtgtgcatcttttccacaacaggcacacagcccaagcctaacaattggggctgtgaactagatttcactccagcttgagtagcaaaagccttggatgtagtctagtcctgccctcccctccctatctcctcagacctacacagtcaggtccaaactccccagcctggccttcaaggggccactctgcacactccacagatagccccacctcctacaccaagcctttgccacacgtgcctgagaagtttcttctaatttctctgcttcttgaattcccaggcaaataaatgacagccactatcaacctctaggaaccttgtaaaaatgagaaaaatgtgtcccttttgagaaagtgcagccccgtgccagggctcaggttttgtgccatgcatgggctggggttcagctcccacttgtccccttgggcagtgcagtcatgtgtggcagccctgggccactatggcctccttggggtcacctctccatcagaaggaacctctcccacaggccagtgtccaggtctcctgtgtgccatatcccctggggtctcccagcaggactgggatcaggcctctgcctgaggcagatttcctgggaaggactcccaggtttgggcctcaagactcatctccctacccccacccctgctggaagacactggttcagggagcccacagccagcccatgcctcctgtttcctaagacagacgtctgggtcaactcaaatagtccatttaagaaaaa

SEQ ID NO: 727728 - DNA, 2593 bp, Homo sapiens
ggtgggatgctgagtcacagttgccctggctgagggacattctcccgagaagtcaaagtgccccagtccttctgcttcatctcctggcatcgctgatcctcaccttggccattcctgggaaggaggcttcagccaggttggacgaggtgtgggcagcacatgcgagggtgtgtgcgagtgggagtggggatgtgagcatgtgtctgtgtgtgtatgtgcgtgtatgtgtgcatgtgtgtgtgagtgtatcagtgtgtgagcgtgtgtgtgcctgtgtgtgtgtgcgtgtgtgtgtgtgagtgtatgagtgtgagcgtgcgtctgtgtgtgtgtgcatgtgtgtgtgtagggttctcgcctgttccacagagcgcaccaatctaacaggagcaccaagggacctccggacaggtttccatgccctggcgccctccccagatgtcacgaataacccatctakgtctacctgccctggggtattctctcaggccacgctgaagacaccgtggggcagggcgggccgggagaggtgaacgggcctggagctatttgcaaggctgtgggttggggaggcagcaatctcacccatcttcaggaaggtgggatcactgcttcctctgccctgcacatctcaagagagcatgcatgcagctcctgttggaatgaggctgcagggatgactatcctcaatttacatccgaggcaactgaggcccagacctgcctaggctcctccaggttatagacttgggcagtgcagggaccatttctcatgtttgtttctggccaatatcgtttgtgctcttcctgtgtttgtagagattctgcagtaggaggcctgcttctttgagccagaagtcagaactcatccttccagcttcccttgctgctagggcacaggtgtgtttcatgggctctgccaattagactttcttgtatatgaccttgattgagaaggtagccccttgaagcagtgggctgggggactccatctgttgggagtgggtggcaaaggcatccagctttggctgggggcaggacagagcttctggtgcccagttccaagcaccccgggaaaagttacagtggagtggagctgcaggctgggtgctggctggcagcagggctgttgatgctagtgcaactctagttgtgtggtgggtgttgtcctggctgtgtcccatgcctacctctttttgtcctcctggagattctaggagtcccaaatatcccttaataaattcattttctgcttaagccagtcagagtggattctgttgtttgaaactgaaagtctgacagatacagatagtaacctgctttcaaagctggaccagagccagtctcatcactcacacacaggtctgagtattcaggactcaggactcccaaggcctgtttctacagaggggtgaggcctcttttcctggcttgctgttgttcaaactgcgactcagtcagggagagtagagtaccacatcacatactggttccagaaataggctctggtgtcagggtgacctgaatttaaatcctccttctgccacctgaatgctgtgtgacctcaggtgaattagttcacctttctgagcctcattgtcctcttccgtataatagagataataatatgtgctctgtagggttgctgagaggacgacatcagatagcccatgtaaaaagggttttgggtgcctggtacaattagcaagcgctcatgtagatgaatggagctttgcttccttttcctcctctccatgctgtctctggccccctaaaggtactgagcacttcccagccagacacccctgcctgaggctcccacccacagcctgtgagctccctgggacagagtgtgcatcttttccacaacaggcacacagcccaagcctaacaattggggctgtgaactagatttcactccagcttgagtagcaaaagccttggatgtagtctagtcctgccctcccctccctatctcctcagacctacacagtcaggtccaaactccccagcctggccttcaaggggccactctgcacactccacagatagccccacctcctacaccaagcctttgccacacgtgcctgagaagtttcttctaatttctctgcttcttgaattcccaggcaaataaatgacagccactatcaacctctaggaaccttgtaaaaatgagaaaaatgtgtcccttttgagaaagtgcagccccgtgccagggctcaggttttgtgccatgcatgggctggggttcagctcccacttgtccccttgggcagtgcagtcatgtgtggcagccctgggccactatggcctccttggggtcacctctccatcagaaggaacctctcccacaggccagtgtccaggtctcctgtgtgccatatcccctggggtctcccagcaggactgggatcaggcctctgcctgaggcagatttcctgggaaggactcccaggtttgggcctcaagactcatctccctacccccacccctgctggaagacactggttcagggagcccacagccagcccatgcctcctgtttcctaagacagacgtctgggtcaactcaaatagtccatttaagaaaaa

SEQ ID NO: 727729 - DNA, 660 bp, Homo sapiens
tgaacttacacttgtctcctcagtcaggtaccctgactcgtgctcaattcttgtgctgtagtcyggaaaccctttccagacagtaagctgtagcaataataatgattccctggttggtttccactctctcagggatcaccatcctatctgactgatgtccagttttttttaatttcatgaattttttctgcttttttaaattgtttcatgtagaaaagtaaatctagttcctattgctccatctttgctgaaaatcaggagctaacttttattggacatctactatacatgaattactttaaattgatcatttcattcaattctatcagaaaacctatgataaagatacttttaacctattttacaaataaggaaaccaagggataggacagtcacatagtctataaatgacagattctttgattccagatgtgttttgactacaaaagggtgtgactccatgtaaaacagagagaattatagaaaactacacggatgtgcattaaaaatatattctgtaaaattgtattttaatcaaaatcactttactgaacagtttgaactatttctttctctggtggtggaagcaagaacatgatctgagaatgatagctttatactttcaatcactatcttcgctgattttctttcttgttcctt

SEQ ID NO: 727730 - DNA, 660 bp, Homo sapiens
tgaacttacacttgtctcctcagtcaggtaccctgactcgtgctcaattcttgtgctgtagtccggaaaccctttccagwcagtaagctgtagcaataataatgattccctggttggtttccactctctcagggatcaccatcctatctgactgatgtccagttttttttaatttcatgaattttttctgcttttttaaattgtttcatgtagaaaagtaaatctagttcctattgctccatctttgctgaaaatcaggagctaacttttattggacatctactatacatgaattactttaaattgatcatttcattcaattctatcagaaaacctatgataaagatacttttaacctattttacaaataaggaaaccaagggataggacagtcacatagtctataaatgacagattctttgattccagatgtgttttgactacaaaagggtgtgactccatgtaaaacagagagaattatagaaaactacacggatgtgcattaaaaatatattctgtaaaattgtattttaatcaaaatcactttactgaacagtttgaactatttctttctctggtggtggaagcaagaacatgatctgagaatgatagctttatactttcaatcactatcttcgctgattttctttcttgttcctt

SEQ ID NO: 727731 - DNA, 660 bp, Homo sapiens
tgaacttacacttgtctcctcagtcaggtaccctgactcgtgctcaattcttgtgctgtagtccggaaaccctttccagacagtaagctgtagcaataataatgattccctggttggtttccactctctcagggatcaccatcctatctgactgatgtccagttttttttaatttcatgaattttttctgcttttttaaattgtttcatgtagaaaagtaaatctagttcctattgctccatctttgctgaaaatcaggagctaacttttattggacatctactatacaygaattactttaaattgatcatttcattcaattctatcagaaaacctatgataaagatacttttaacctattttacaaataaggaaaccaagggataggacagtcacatagtctataaatgacagattctttgattccagatgtgttttgactacaaaagggtgtgactccatgtaaaacagagagaattatagaaaactacacggatgtgcattaaaaatatattctgtaaaattgtattttaatcaaaatcactttactgaacagtttgaactatttctttctctggtggtggaagcaagaacatgatctgagaatgatagctttatactttcaatcactatcttcgctgattttctttcttgttcctt

SEQ ID NO: 727732 - DNA, 627 bp, Homo sapiens
tggtctctccttgtgtggcatctcattctcccagataattttcttggaatcccacctcattcatttaaattctggaggtgagggaattacctcatgagaaaggatgggaaaggaactacctcccactgagaaaatagcatgctcctcttcctccctgscacccctcgtaatctctttataattatttatttgctgggcagtgattgtggttagtagggcctgtttagctgcctgcctctcagtaaactctggggggattatcaggccccagtgttggcagctctatttagactgtggcatatcagtgcgtcttattttcagacgaagctccaaggcaacagtaaaaatcccactcagtatcttgttatataaacaatagctctgctcaaccttctacggtagctgttcaaaatatgggcacaaaagttgattttaattttactttgcttagtgctgttttcaccactttgaaaatcttgataagcaccgaagtgctctgagcatgtggaaaggcctggggaaggtcagtacggtgtgcaataacacataataaacaaattaacttctctcctgcacgaagtgtgaacagtcatgacagaaaaaacggtgctttcttttgaggctgac

SEQ ID NO: 727733 - DNA, 1329 bp, Homo sapiens
tgtctcagttcccttgggtgggaaagggaaatcccttggccccttgtgcttcctggttgaggcaatgctgtgacctgcttcagcttgctctccatgggctgcatcccctgtccaaccagtcccagtgagatgaaccagtacctcagttggaaatgcagaaatcacccgtcatctgcatcgatctcactgggagctgcagactggagctattcctatttggccatcttggaagcgacccccttcactattcattttaaatacaaagctgatcttagatatatagaaacctaagctatctttaaagataagaaagttcatatttataaaggtcttcctttccactctgatttcatgattttcataaatataactaaactgtgatttgtcataagccaaagtcacaagttggacttgtaactgcaatgtattaaatttatatttaggcattacatctgtgtatcactgtgtccttatgtatctgatactgtgagatcaacaaagcctggagaaagtgctggagacaccttccttatagtctagttcttagaaaactctcaatattcaaaaggcattacatttattctttaaaacattttaaataagaaatgactccattaaacaatccacaaagaaagccatctctcttaaagctttccatgttcataaaactccccaaatgtgtagtttttatttggtaatttaatttctgctgcagatgtctatccaatttatttgcgatttatcaccgattttaatttatagtgaaagtactgggccagatttgtaaagagataatatttttctcctcatttcattctagattcaatgaataattggtctttcccattattattaatttatctttgcacactaatgcttttgaacaatgatgagtttcacaaaattcttctccagctgtcacctggaaactttttgtgccaatgttattttagatttatgctaataaaaatttattccagttttaagactttaaatcctcctacatttacttgccaaatacaccgtgtgagttcttgaacaagttgcctccttgcatcagtccattttcrtgctgctgataaagacatacctgagactggggaatttacaaaagaaatagtttcattggacttacagtttcacatggctggggaggcctcacaatcgtggtggaaggcaaggaggagcaagtcacatcttacatagatggcagcggcaaaatgagagcttgtgcagaaaaactcccgtttttaaaaccatcagatctcatgtgacccattcactatcacaaggacagcacaggagagacctgccctcatgattcaatca

SEQ ID NO: 727734 - DNA, 638 bp, Homo sapiens
tgcaacataatttttctctccagttctgcttttatctgacagcaggaaagaggcaaaaaaaaaaaaaaaaaaaaaaaaaagacagcctttcctcaggtaaatcataaacatatagttttaagtgtttctcgtttagaaaaagaaagaaagaaaagacaaggctaagtgatctcaatatatttttccacatggagcacctgagagagaacataattcttgttgattctcaaaagagtgaaaggaaaaggtggggaaaggaatcagaaaaaataccttcaggagggttctgattactggtcaagccctgcctcaagcctttgagacccactgggctaaataaaagtttcttataaaggatttcaggaatcaagacgttaaagagctccaaagggccttaaatgaaagggttaagcctaaaaatgattcactgtgagttatttttataatcactatattttagttggtatttgctgagtacctactctgtacaaaggagcttgctagatctcttatagacattatctmatttagagttagaaatgtgttatctgcatgagcttgaaagaaaaccagaaattggctgggcgtggtggctcatgcctgtaatccctacactttgggaggacgaggcaggctga

SEQ ID NO: 727735 - DNA, 647 bp, Homo sapiens
cgggaggctgaggcacgagaactgcttgaacccaggaggcgggggttgcagtgagccaagatcatgccactgcactccagccaacagaatgagattttgtctcaaagaaaaaaaaaaaaaacctgtttttctcaagtcctcatctacccatggtttttgtgttgctgtgattttactctagagaaaacctgcaccagaaatgtgtgtcactgctggtgtggaggctggcgttgtcggtcccatgcagagtgggaggaggcaggaacaaaaattccaacaagttctttcctatttttattctttcaccacaaggcagggctgctttctgcccccctcacatccctcctcccttgtacacacaccttttcaaaacagcctcctccaggattctcacagctctttcaatgtcttgctggtttctgtcattgttccctggggtgtcacctttcgtatgtagccagcacttgtgcttgcctgcatctagttgtaacattttctctctctttttttttycttttgaaaatgcatccattttattgaaaggaatttgaggcaaatatatgtttttaatctggtatatttaactttaaataacttttactttctttcacactttatcttagctaaggctgccatacaaaatgcca

SEQ ID NO: 727736 - DNA, 651 bp, Homo sapiens
cggtccttacagtaaagggttgtcatgcaagcagctctcgagcaacttctgtatgtcaggttcttagcccatgttacatcactctaatcagcacagcaaaactggggaagaaatgtatttcaagacgaagaaactgaagtacacagagtctaaataacttgtctgatgacacacagcaggtaagttgcagggtcaggacttgaatcccctgctctgaacccttctttgatattccctagaaaaggtgatctatagggaaagatgggaaggaaaaacactagttctgttacagaaaagaaagctaagacatgtgcatggtggggaggcatttgttcttaccattaaaattatcatcatcatcatcatcatcatcatcatcaccatcccattaaacaatatttatgaagtgcccagacaccatatgctgtatgagggcttttggaccccaagagagaagtaaaagatttgtttttctcagtgcaaaraagaacattttgtgatttttttttatttggtcatacattttttttcctatcttaagataatccaacttcatttttcttcaattgctattgcttctaaaaggaaaaatgaaaacaattgcagagcaaaatgcttctcggcaccaatattctgcattgtcatttctca

SEQ ID NO: 727737 - DNA, 651 bp, Homo sapiens
cggtccttacagtaaagggttgtcatgcaagcagctctcgagcaacttctgtatgtcaggttcttagcccatgttacatcactctaatcagcacagcaaaactggggaagaaatgtatttcaagacgaagaaactgaagtacacagagtctaaataacttgtctgatgacacacagcaggtaagttgcagggtcaggacttgaatcccctgctctgaacccttctttgatattccctagaaaaggtgatctatagggaaagatgggaaggaaaaacactagttctgttacagaaaagaaagctaagacatgtgcatggtggggaggcatttgttcttaccattaaaattatcatcatcatcatcatcatcatcatcatcaccatcccattaaacaatatttatgaagtgcccagacaccatatgctgtatgagggcttttggaccccaagagagaagtaaaagatttgtttttctcagtgcaaagaaraacattttgtgatttttttttatttggtcatacattttttttcctatcttaagataatccaacttcatttttcttcaattgctattgcttctaaaaggaaaaatgaaaacaattgcagagcaaaatgcttctcggcaccaatattctgcattgtcatttctca

SEQ ID NO: 727738 - DNA, 1138 bp, Homo sapiens
gttcaggatctgaacttaatgttttgcactttaaacatctgtctctgaattcttatgtatatttaaaatgcttctctgcaaacatcttagtgccctattgttagactttatagggctttgctggaaatctttataaatcactttgttaatctttctaaactaactgttcttatgctgcttttgacttcwggttttttctgcagtgtttcttcctatgccctgtattctctgatactttatcctgccacttcttctcccttgatctctttctcttcttacgctactgacatctttgatcaggctacacaaactcttctgtctgctaaggttctttctttggctttttctatatctgaacagtgaaaactctacagtaaccatcatctgggcagggaaggactgtattctactacagagaagaaaaacagccttccttctatgacactttttattctttacttaaaagccacagcaaagcaactggtacatcaaatatgtcttttatgtgtgtcacagaagcctttcacaaagtacatttatatttaggaaattacagaacttttataatttgctatgtttgaaatgataccatagtacttgaatatagagaagcactttgaattagaaagcacttgaaatatatgactttctgaactttgctaattcttatttaataataactctgtgtgagaatggtcccaggggccaggtgcggtggctcacggcgtgtaatcccagcactttgggaggctgaggcgggtggattgcctgagctcagaagttcgcgaccagcctgggcaacacagtgaaaccccacctccactaaaatacaaaaaatgagccgggcgtggcattgcgtgcctgtagtcccagctactcgggaggctgaggcaggagaattgcttgaacctgggaggcagaggttgcagtgagctgagatcacgccattgcactccagcctgggcaacagagcgagaatccatctttaaaaaaaaaaagaaagaaaaagaatggccccaggagttttacaaaggaccaataaaataatgtggtagaagatgaagatggataataaatgttaaagcaattatattcacaatctgttacaacaaattatcctaaaattttagcagctcga

SEQ ID NO: 727739 - DNA, 856 bp, Homo sapiens
taacaaagtttttttttttttttggtttctaaaatgggagatcatagttttcaccttcctagagttctttgcttaagactgagattcagtgttactcttggtccctaacaataagaagcactcagtaaatgttaagccttctatgatggctattttatttttttgtatgtcataataatacctaagaataagaagagttaaattaatgtcttcaaatggatttgttgacttaaactgacacaatcctttaaaagaaggaactgatttgaacctttcaaaactgaaagaaagtcgtatactgatacagtttggagccaccgaatgtcatgttgaaccgtattccctaatggaggtggatcctggtgagaggtgattggatcgtgggggccatcccctcttggtacttcactcatgatagtgagttctcatgagatctggcacttcacccctcactctctcttgctcctgctttggccatgtggagtgctcactccccttttgcyttctgccatggctgtaagtttcctgaggcgtccccagaagcccatcagataccagtgccatgcttcctgtacagcccatggaactgtgagccaactaaacctcttttatttataaattaccgagtctcaggcactttttatagcaatgcaacaatggactaatacatatactttagcataaaaacatttaaaagagtctgaaactggagtagttaactcagtaaaaataacttggcaataaaacacagaaaaacaatctatttgatcatgtagtgattcctaatgtaaatcctagtacaactgtcaactgataattttaaatgtaatttagatttgtagatggtgtaacatta

SEQ ID NO: 727740 - DNA, 1557 bp, Homo sapiens
atgtacaaaatggtatactatttgccattttaaaaaggaaggaaattttgtcatttgagacaacatgaatgaatctggatgacactatgttaactgatataagcaaggcatagaaagacagtgcataatctcacctacatatggaatcttaaaaagttaaactcatagtagtagagagtggagtggtggttaccaggggctggaggagtgtagtattgggaagatgttggtcaaaggatacataatttcagttagataggaggaataagtccaaaagatctattgaacaatatggtgactgcagttagtcattagtaacaatgtattatattcttgaaaattgccaagaaagtactttttaagcgttcttactacaaaaaaccataagtatgtgaggtaatgcttatggtaatgcactcaatttgtccattccataacatatatatttcaaaacaacatgttatacctggtaaatataaactgttttgtcaatttaaaaataaacttaaaaggaagaaaaaattctttcttttgaattgtaaacatatgtagatgttgcctatgataaacagatgcgtttaagtatgctctcattgagaataatgacaaaaccatggaaagaaaggttggttgactttttattgaaataaaataaaaaactgggtatggcttgccttatgaaatttttkcaatatattgacataaaaatgctcttggccaaggatatgaaaatgaagcaaagatggcagatagataaatggtgaacaagccattatttccctcaaaaattgttatgctaaatttgtgcctactcaactaataattctgatttgatttgtaataatgttgatttggtgacttgaaatatgatactcttttttagtattgtacaaaggattaatacatttttgagctttgagcaatagaatatccttatatctgtcctaaaaactgtattaaaaacataacggacattcaatggggatcaagaacaaacaaaattatggcacttcacacacaaactaaagatgtttatcaaatattaatgatataatattaaatgacatagtacattgtgctgaaatctaaagcatcttggcacaaagagactgcacatgtttatgcaaattaatttggtgggatattttgaaccaagtaggaaaaaataagaaagctttatttaaaaagaaaagtctttatataaagcagctggcttcatagaagacctacccttttgtttacaacaaatgaaagtaactttgagagtatgtttgataaatgtaaaatgctagtaagagatacgaatacacttcccaaatgtgaaaataaattcgaaaaatgttaagcaattagaaatggagacatcactggattaaagtatcaattcttacatgatctagggatattatttaaaataggggtttattcacatcttaatttcaactctgaaatggagatacgaaaatttaaactaagcatcttcagatgttaaatatttaagggaagcaatttttcaatgaatacatctgatttgcaaaaaagtagctagtaacttgg

SEQ ID NO: 727741 - DNA, 1557 bp, Homo sapiens
atgtacaaaatggtatactatttgccattttaaaaaggaaggaaattttgtcatttgagacaacatgaatgaatctggatgacactatgttaactgatataagcaaggcatagaaagacagtgcataatctcacctacatatggaatcttaaaaagttaaactcatagtagtagagagtggagtggtggttaccaggggctggaggagtgtagtattgggaagatgttggtcaaaggatacataatttcagttagataggaggaataagtccaaaagatctattgaacaatatggtgactgcagttagtcattagtaacaatgtattatattcttgaaaattgccaagaaagtactttttaagcgttcttactacaaaaaaccataagtatgtgaggtaatgcttatggtaatgcactcaatttgtccattccataacatatatatttcaaaacaacatgttatacctggtaaatataaactgttttgtcaatttaaaaataaacttaaaaggaagaaaaaattctttcttttgaattgtaaacatatgtagatgttgcctatgataaacagatgcgtttaagtatgctctcattgagaataatgacaaaaccatggaaagaaaggttggttgactttttattgaaataaaataaaaaactgggtatggcttgccttatgaaattttttcaatatattgacataaaaatgctcttggccaaggatatgaaaatgaagcaaagatggcagatagataaatggtgaacaagccattatttccctcaaaaattgttatgctaaatttgtgcctactcaactaataattctgatttgatttgtaataatgttgatttggtgacttgaaatatgatactcttttttagtattgtacaaaggattaatacatttttgagctttgagcaatagaatatccttatatctgtcctaaaaactgtattaaaaacataacggacattcaatggggatcaagaacaaacaaaattatggcacttcacacacaaactaaagatgtttatcaaatattaatgatataatattaaatgacatagtacattgtgctgaaatctaaagcatcttggcacaaakagactgcacatgtttatgcaaattaatttggtgggatattttgaaccaagtaggaaaaaataagaaagctttatttaaaaagaaaagtctttatataaagcagctggcttcatagaagacctacccttttgtttacaacaaatgaaagtaactttgagagtatgtttgataaatgtaaaatgctagtaagagatacgaatacacttcccaaatgtgaaaataaattcgaaaaatgttaagcaattagaaatggagacatcactggattaaagtatcaattcttacatgatctagggatattatttaaaataggggtttattcacatcttaatttcaactctgaaatggagatacgaaaatttaaactaagcatcttcagatgttaaatatttaagggaagcaatttttcaatgaatacatctgatttgcaaaaaagtagctagtaacttgg

SEQ ID NO: 727742 - DNA, 615 bp, Homo sapiens
ggcctgattgtttaatctttacttgtactttgtgagatataatagtattgacgcaataattaccttgcagcctgtattgatacaggttgtcatattttgtaaaaagcatgtgtgtgtgtgtgtgtgtgtgtgygcatgtgtgcatgcgtgctcacgtgtgtgttaggacagagagaattaagtctaataagtgctatatagaagacttctcatcccccatcatcacagtcatcattgtgattgtctgaattccagtctcccacaatcacccctctgtttttcaacacggcgtggatcaaggtgaaaagtatgcttcctaaagtttaagaatataatgtgtttcccacaatagattcacaatggggagtcagcttatatgtttttgccttcttgtgtgtttaatttttttagcatactgcccagtttccctcacactctgattcgtttatattttttaaatattttcttagtggttaccatggaagttacaattaacattctatatttacaacaatctagtttgaattgataccagcttagatttaacagcgtacaaaatcttgactcctatgctgctctgtctcccctccgacctcttgtctttaaacattgttt

SEQ ID NO: 727743 - DNA, 615 bp, Homo sapiens
ggcctgattgtttaatctttacttgtactttgtgagatataatagtattgacgcaataattaccttgcagcctgtattgatacaggttgtcatattttgtaaaaagcatgtgtgtgtgtgtgtgtgtgtgtgtgcatgtgtgcatgcgtgctcacgtgtgtgttaggacagagagaattaagtctaataagtgctatatagaagacttctcatcccccatcatcacagtyatcattgtgattgtctgaattccagtctcccacaatcacccctctgtttttcaacacggcgtggatcaaggtgaaaagtatgcttcctaaagtttaagaatataatgtgtttcccacaatagattcacaatggggagtcagcttatatgtttttgccttcttgtgtgtttaatttttttagcatactgcccagtttccctcacactctgattcgtttatattttttaaatattttcttagtggttaccatggaagttacaattaacattctatatttacaacaatctagtttgaattgataccagcttagatttaacagcgtacaaaatcttgactcctatgctgctctgtctcccctccgacctcttgtctttaaacattgttt

SEQ ID NO: 727744 - DNA, 585 bp, Homo sapiens
gtgccccagcaatgcaaaatgttactacggttttaaggtaatctcaaagactacagaagtgcccccacttattcgtgattttgatttccacagtttgttacccacggtcagccgtggtctgaaaataggcaagtacagtgmagtacaataagatattttaagggggagagaccacactcacataatctttactacagtgtaattgttctattttattactagttctagttgttcatttcttactgtgcctaatttataaattaaacttcatcatagatacatatgtataggagaaaacattgcatatgtggggattggaattttctgtggtttcaggcatccactggaggtcttggaacatatctcccacggataaaggatgtgtgtgtgtgtgtgtgtgtgcagtcgcagcaggtggtcaaagtgctcaacacaccacaaactgaagcagtaaaactattttagagtagttttttagtcagatgactggagaagggaattaaaggaaacagtagaagacacaatagcaaagatggaagttccttctgtcagcctgaggtacttactcaggaggctgaaaaagca

SEQ ID NO: 727745 - DNA, 585 bp, Homo sapiens
gtgccccagcaatgcaaaatgttactacggttttaaggtaatctcaaagactacagaagtgcccccacttattcgtgattttgatttccacagtttgttacccacggtcagccgtggtctgaaaataggcaagtacagtgcagtacaataagatattttaagggggagagaccacactcacataatctttactacagtgtaattgttctattttattactagttctagttgttcatttcttactgtgcctaatttataaattaaacttcatcatagatacatatgtataggagaaaacattgcatatgtggggwttggaattttctgtggtttcaggcatccactggaggtcttggaacatatctcccacggataaaggatgtgtgtgtgtgtgtgtgtgtgcagtcgcagcaggtggtcaaagtgctcaacacaccacaaactgaagcagtaaaactattttagagtagttttttagtcagatgactggagaagggaattaaaggaaacagtagaagacacaatagcaaagatggaagttccttctgtcagcctgaggtacttactcaggaggctgaaaaagca

SEQ ID NO: 727746 - DNA, 585 bp, Homo sapiens
gtgccccagcaatgcaaaatgttactacggttttaaggtaatctcaaagactacagaagtgcccccacttattcgtgattttgatttccacagtttgttacccacggtcagccgtggtctgaaaataggcaagtacagtgcagtacaataagatattttaagggggagagaccacactcacataatctttactacagtgtaattgttctattttattactagttctagttgttcatttcttactgtgcctaatttataaattaaacttcatcatagatacatatgtataggagaaaacattgcatatgtggggattggaattttctgtggtttcaggcatccactggaggtcttggaacatatctcccacggataaaggatgtgtgtgtgtgtgtgtgtgtgcagtsgcagcaggtggtcaaagtgctcaacacaccacaaactgaagcagtaaaactattttagagtagttttttagtcagatgactggagaagggaattaaaggaaacagtagaagacacaatagcaaagatggaagttccttctgtcagcctgaggtacttactcaggaggctgaaaaagca

SEQ ID NO: 727747 - DNA, 650 bp, Homo sapiens
gcaacctaggacaaccaggtgtcaacataagaatgtgctgctctgctctattctcacttttttccttattttagtccctaaggagttcattgcctttcttcccagttcagctgtgcatttaaaaggatrttaaactccatgcagcaattccaggtgttttgcaaaaggaatgtttctcaggtccttttatagtaacctctctattttactagaaccaagagccctctctgcatactttttacctatttactttgaatagttttcatttttaatgcagccatcatcctaactcatgttatgctttacttcattcatttattaattaatcaattgtcaaaaattacttatatgaattgtataatcctctatgaaagattcaaaaatggcaagaaagagtgcctgtcctctacttgtttgagaatctacaattctgtgtattttatttaaaaatacatgactaaattatttttgttaggctctaaacatagctttgtcattctgacacactgatttatttctctggatgaaaccattctcaagtaatcatcttgtttttggataatgatcgttattgttctttgttttcttttgttgttgttgcctcctgttattccatgacaacattgtgtgtgctcatcatgttttagaaa

SEQ ID NO: 727748 - DNA, 999 bp, Homo sapiens
tggctcatgccttaatcccatcactttgggaggctgaggcgggcagatcacttgaggctaggagtctgaggctagattgggcaacatggcaaaaccccttctctacaaaaaatacaaaagttagccaggtgtggtggtgcccgcctgtagtcccagctacccggaagactgaggtgggaggatcgcttcagccccagaggttgaggctgcactgagccaagatcatgccactgcactccagcctgggcaacagagtgagaccctgtctcaaaaagaaggaaaaagaaagaaaagaaaaaggtcaaaaaagattattaaaatagtgatgaaaataatactacataaatgttcaattacaggagaatagttaagtaaattatgagctcactgaaatgtatgaccattataaatgagaaatatgaggataaagtggctacaatatgcaggctgatggtgtaacactacctgaaaagaaacaaaatacaaagctgtatctatttaagagttacaattatataaaaagtacatccaaaatatggataagaaaaaacagagaaaaccaaaagcaaccaatgtgttcctatcctaggaatgcagaagaatgtctccttttaaatgcattttattgttcttacaaaaatcatgcagtcaataaaaayacattttaaaagagtaagctgatccatgtgcagcacaaaatccctttcgaagctaagtgcttgcccaactgcctagaaaaataggttgggaaagtcaagcaaaggcctgaatccttatcagatctcaattagcaatttcctcactttccctaaaaccagtgccctcacccctccctctgtggtcattcgaaatgaagactatgccctcaacccttgacccaaccacaggcattcaagccaggctcctcccatgaagatctccttcattcttctgaatgcttagtaatgggtacagcaggccaggtgcggtggctcacgcctgtaatcccagcactttggg

SEQ ID NO: 727749 - DNA, 2192 bp, Homo sapiens
gcccctcctgaaccttctatgatttcctctactgcactccatcacctggtcaaatcaatatagggagctacgagacagggaattaaccaagaaagggtgcctcccttttcactgtctcttcctgcaaccagccagacagccttttctctgacttatttgggcttaaaagctttattctgggtaccttacctagtcccacaaggtacattcttcrcctcatctgtctggagtgtggtctggaaacagaggaaacataaagtgctagaagaaggacagtgacaaagtaacttacttttcagaatcctaaatgcctttgtcctggaataactgtttgggttgagcatggcgttcattaaacatgattaccccacctaatcctccttcctcacagggttgctaagccaagtaaaggcccgtgccccagcctcactataagtgaaccaccacatcaacaagctgagtaataatggtttagtgaagatgacactggattgggcatcttaagacttgtgcttgcttctacctcttctatttatgttaggcaccgctttatgttcgaaggcccccagtggatgcttgaaaccggggagagtaccaaaccctataacacatacctatgataaagtttaatttataaattaggtacagtaagtgatcaacaataataaaatagaacaattataacaatatactgtcataaaagttatttgaaggtggtctctctctctctctctcaaaatatcttattgtactgtagtcacctgtttcaaccatggtttattgtgggtaactgagcctgtggaaagtgaaatagtggataagggggagggctgttgtactagttttgaaacagcagattacctatttaacctgtctcagaccctagcacatgctcagcccattctcaggattactacaagactcaaatgagacaatgtacctgaatgcagtttgaaagccacaaagcctggtaaacagcacatgaaacttacagggaaaatgcctagcaggtatcccaagacattctcctgggtcagtgtaaagtgtaaaatcttgttattcttcttagctggacatacttcaagagaatggcaagtccaacttagccaggctttagatttgccacaactaacctcactcctattttagatgtcacctcccctcacttagtttaactcctccccactcactgcaaaaattatgtttgtatttctgaattcaaataagaatcagcaaaattactatgttttctttccatttaacatggtagcctgtgatttaaaacatacacacataaaccctgacttttctttccatatactcagaacaggttcttctctggctttatcttgaaggaataatccccagcctcattttatatatatatagtgtatgtgtgtatatatatatatattatatatatataatatgtatatattatccttatatcattctctagaatggcattttactcatccaatggctaaataatttcaaatcatgcactagttaacagcccaagtttgcagtcgtccagccataccacagaggccaagcatacctgcacagacttatatgatgtgatgaaagggagcatgagatggaaaccagggccgctggtcgaagtcagcagggcaccgcctctgcagaggagggggaagagagaggcagcttcagtttggcaagaaggctctgttagatcaatatcatgagggtcaactttcccttcagccctataaacatataatagagagtgacatgtgctgcagccatggctacagatccctttcttcctctcagctagatcctaatattctaggaagcctgatggtaaaacataaaactattgttcatgcttttgcaaggagaaaaataggcacataggctaaatggaataaagacagcagaacccactagtgcagtcccagcgctttgcggggctgaggtgagaggattgcatgaactcaggagtttgagaccaacctgtctcaaatagtgagaccctgtctctacaaaaaaagaaaaggaaaaaaattagctgagtgtggtggttgtatgcctatagtcccagctacttgggaggctgagatgtaagaattgcttgagcctgggaggttgaggatgtagtgagacataattttgccactgcactccagcttgggcaacaaagtgagactctgtctaaaaaaaaa

SEQ ID NO: 727750 - DNA, 2192 bp, Homo sapiens
gcccctcctgaaccttctatgatttcctctactgcactccatcacctggtcaaatcaatatagggagctacgagacagggaattaaccaagaaagggtgcctcccttttcactgtctcttcctgcaaccagccagacagccttttctctgacttatttgggcttaaaagctttattctgggtaccttacctagtcccacaaggtacattcttcgcctcatctgtctggagtgtggtctggaaacagaggaaacataaagtgctagaagawggacagtgacaaagtaacttacttttcagaatcctaaatgcctttgtcctggaataactgtttgggttgagcatggcgttcattaaacatgattaccccacctaatcctccttcctcacagggttgctaagccaagtaaaggcccgtgccccagcctcactataagtgaaccaccacatcaacaagctgagtaataatggtttagtgaagatgacactggattgggcatcttaagacttgtgcttgcttctacctcttctatttatgttaggcaccgctttatgttcgaaggcccccagtggatgcttgaaaccggggagagtaccaaaccctataacacatacctatgataaagtttaatttataaattaggtacagtaagtgatcaacaataataaaatagaacaattataacaatatactgtcataaaagttatttgaaggtggtctctctctctctctctcaaaatatcttattgtactgtagtcacctgtttcaaccatggtttattgtgggtaactgagcctgtggaaagtgaaatagtggataagggggagggctgttgtactagttttgaaacagcagattacctatttaacctgtctcagaccctagcacatgctcagcccattctcaggattactacaagactcaaatgagacaatgtacctgaatgcagtttgaaagccacaaagcctggtaaacagcacatgaaacttacagggaaaatgcctagcaggtatcccaagacattctcctgggtcagtgtaaagtgtaaaatcttgttattcttcttagctggacatacttcaagagaatggcaagtccaacttagccaggctttagatttgccacaactaacctcactcctattttagatgtcacctcccctcacttagtttaactcctccccactcactgcaaaaattatgtttgtatttctgaattcaaataagaatcagcaaaattactatgttttctttccatttaacatggtagcctgtgatttaaaacatacacacataaaccctgacttttctttccatatactcagaacaggttcttctctggctttatcttgaaggaataatccccagcctcattttatatatatatagtgtatgtgtgtatatatatatatattatatatatataatatgtatatattatccttatatcattctctagaatggcattttactcatccaatggctaaataatttcaaatcatgcactagttaacagcccaagtttgcagtcgtccagccataccacagaggccaagcatacctgcacagacttatatgatgtgatgaaagggagcatgagatggaaaccagggccgctggtcgaagtcagcagggcaccgcctctgcagaggagggggaagagagaggcagcttcagtttggcaagaaggctctgttagatcaatatcatgagggtcaactttcccttcagccctataaacatataatagagagtgacatgtgctgcagccatggctacagatccctttcttcctctcagctagatcctaatattctaggaagcctgatggtaaaacataaaactattgttcatgcttttgcaaggagaaaaataggcacataggctaaatggaataaagacagcagaacccactagtgcagtcccagcgctttgcggggctgaggtgagaggattgcatgaactcaggagtttgagaccaacctgtctcaaatagtgagaccctgtctctacaaaaaaagaaaaggaaaaaaattagctgagtgtggtggttgtatgcctatagtcccagctacttgggaggctgagatgtaagaattgcttgagcctgggaggttgaggatgtagtgagacataattttgccactgcactccagcttgggcaacaaagtgagactctgtctaaaaaaaaa

SEQ ID NO: 727751 - DNA, 2192 bp, Homo sapiens
gcccctcctgaaccttctatgatttcctctactgcactccatcacctggtcaaatcaatatagggagctacgagacagggaattaaccaagaaagggtgcctcccttttcactgtctcttcctgcaaccagccagacagccttttctctgacttatttgggcttaaaagctttattctgggtaccttacctagtcccacaaggtacattcttcgcctcatctgtctggagtgtggtctggaaacagaggaaacataaagtgctagaagaaggrcagtgacaaagtaacttacttttcagaatcctaaatgcctttgtcctggaataactgtttgggttgagcatggcgttcattaaacatgattaccccacctaatcctccttcctcacagggttgctaagccaagtaaaggcccgtgccccagcctcactataagtgaaccaccacatcaacaagctgagtaataatggtttagtgaagatgacactggattgggcatcttaagacttgtgcttgcttctacctcttctatttatgttaggcaccgctttatgttcgaaggcccccagtggatgcttgaaaccggggagagtaccaaaccctataacacatacctatgataaagtttaatttataaattaggtacagtaagtgatcaacaataataaaatagaacaattataacaatatactgtcataaaagttatttgaaggtggtctctctctctctctctcaaaatatcttattgtactgtagtcacctgtttcaaccatggtttattgtgggtaactgagcctgtggaaagtgaaatagtggataagggggagggctgttgtactagttttgaaacagcagattacctatttaacctgtctcagaccctagcacatgctcagcccattctcaggattactacaagactcaaatgagacaatgtacctgaatgcagtttgaaagccacaaagcctggtaaacagcacatgaaacttacagggaaaatgcctagcaggtatcccaagacattctcctgggtcagtgtaaagtgtaaaatcttgttattcttcttagctggacatacttcaagagaatggcaagtccaacttagccaggctttagatttgccacaactaacctcactcctattttagatgtcacctcccctcacttagtttaactcctccccactcactgcaaaaattatgtttgtatttctgaattcaaataagaatcagcaaaattactatgttttctttccatttaacatggtagcctgtgatttaaaacatacacacataaaccctgacttttctttccatatactcagaacaggttcttctctggctttatcttgaaggaataatccccagcctcattttatatatatatagtgtatgtgtgtatatatatatatattatatatatataatatgtatatattatccttatatcattctctagaatggcattttactcatccaatggctaaataatttcaaatcatgcactagttaacagcccaagtttgcagtcgtccagccataccacagaggccaagcatacctgcacagacttatatgatgtgatgaaagggagcatgagatggaaaccagggccgctggtcgaagtcagcagggcaccgcctctgcagaggagggggaagagagaggcagcttcagtttggcaagaaggctctgttagatcaatatcatgagggtcaactttcccttcagccctataaacatataatagagagtgacatgtgctgcagccatggctacagatccctttcttcctctcagctagatcctaatattctaggaagcctgatggtaaaacataaaactattgttcatgcttttgcaaggagaaaaataggcacataggctaaatggaataaagacagcagaacccactagtgcagtcccagcgctttgcggggctgaggtgagaggattgcatgaactcaggagtttgagaccaacctgtctcaaatagtgagaccctgtctctacaaaaaaagaaaaggaaaaaaattagctgagtgtggtggttgtatgcctatagtcccagctacttgggaggctgagatgtaagaattgcttgagcctgggaggttgaggatgtagtgagacataattttgccactgcactccagcttgggcaacaaagtgagactctgtctaaaaaaaaa

SEQ ID NO: 727752 - DNA, 2192 bp, Homo sapiens
gcccctcctgaaccttctatgatttcctctactgcactccatcacctggtcaaatcaatatagggagctacgagacagggaattaaccaagaaagggtgcctcccttttcactgtctcttcctgcaaccagccagacagccttttctctgacttatttgggcttaaaagctttattctgggtaccttacctagtcccacaaggtacattcttcgcctcatctgtctggagtgtggtctggaaacagaggaaacataaagtgctagaagaaggacagtgacaaagtaacttacttttcagaatcctaaatgcctttgtcctggaataactgtttgggttgagcatggcsttcattaaacatgattaccccacctaatcctccttcctcacagggttgctaagccaagtaaaggcccgtgccccagcctcactataagtgaaccaccacatcaacaagctgagtaataatggtttagtgaagatgacactggattgggcatcttaagacttgtgcttgcttctacctcttctatttatgttaggcaccgctttatgttcgaaggcccccagtggatgcttgaaaccggggagagtaccaaaccctataacacatacctatgataaagtttaatttataaattaggtacagtaagtgatcaacaataataaaatagaacaattataacaatatactgtcataaaagttatttgaaggtggtctctctctctctctctcaaaatatcttattgtactgtagtcacctgtttcaaccatggtttattgtgggtaactgagcctgtggaaagtgaaatagtggataagggggagggctgttgtactagttttgaaacagcagattacctatttaacctgtctcagaccctagcacatgctcagcccattctcaggattactacaagactcaaatgagacaatgtacctgaatgcagtttgaaagccacaaagcctggtaaacagcacatgaaacttacagggaaaatgcctagcaggtatcccaagacattctcctgggtcagtgtaaagtgtaaaatcttgttattcttcttagctggacatacttcaagagaatggcaagtccaacttagccaggctttagatttgccacaactaacctcactcctattttagatgtcacctcccctcacttagtttaactcctccccactcactgcaaaaattatgtttgtatttctgaattcaaataagaatcagcaaaattactatgttttctttccatttaacatggtagcctgtgatttaaaacatacacacataaaccctgacttttctttccatatactcagaacaggttcttctctggctttatcttgaaggaataatccccagcctcattttatatatatatagtgtatgtgtgtatatatatatatattatatatatataatatgtatatattatccttatatcattctctagaatggcattttactcatccaatggctaaataatttcaaatcatgcactagttaacagcccaagtttgcagtcgtccagccataccacagaggccaagcatacctgcacagacttatatgatgtgatgaaagggagcatgagatggaaaccagggccgctggtcgaagtcagcagggcaccgcctctgcagaggagggggaagagagaggcagcttcagtttggcaagaaggctctgttagatcaatatcatgagggtcaactttcccttcagccctataaacatataatagagagtgacatgtgctgcagccatggctacagatccctttcttcctctcagctagatcctaatattctaggaagcctgatggtaaaacataaaactattgttcatgcttttgcaaggagaaaaataggcacataggctaaatggaataaagacagcagaacccactagtgcagtcccagcgctttgcggggctgaggtgagaggattgcatgaactcaggagtttgagaccaacctgtctcaaatagtgagaccctgtctctacaaaaaaagaaaaggaaaaaaattagctgagtgtggtggttgtatgcctatagtcccagctacttgggaggctgagatgtaagaattgcttgagcctgggaggttgaggatgtagtgagacataattttgccactgcactccagcttgggcaacaaagtgagactctgtctaaaaaaaaa

SEQ ID NO: 727753 - DNA, 645 bp, Homo sapiens
aactatggggaccagaaaactgctgtgtgtgttgagcacacatgaggcacccccaagtcactctagaaatactgggggacacttgcaaacaggctgccgctctgagtgagctggtgaaagttaagtcattgttggctgggtgcggtggctcacacctgtaatcccagcactttgggaggctgaggcgggtggattgcctgaggtcaggagttcgagaccagcctgggcaacatggtgaaaccctgtctctaccaaaaataccaaaaattaaccgggcatgaaggtatgtgcctgtggtcccaactactcgggagactgaggtaggaagatcacttgagtccaggagrcagaggttgcagagagccgagattgtgccactgcactccagcctgggcaacagagcaaggccctgtctcaaaaaaaaaaaaaaaaaaaaaaaaagaaagttacactaatgggatcacatgcaaatgggctgattgaaacccagaggaccatcaccatcccccgtcctctcttttcctggatgaacattcccagtgttttcaatctcttttctgaactgaccattctgagccctccaccattcttgttactctcttttgaaaccattccaggctgtgagagccaaagctgtttgctatg

SEQ ID NO: 727754 - DNA, 602 bp, Homo sapiens
ttgtaagtttctagaggcctccacagccatgtggaactgtaagtcagttaaacctcctttgtttataaattacccagcctcagrcagtatggactaatacacaaagcaatcttttttttttttttttttttttaatagaggcaggatcttgctctgtcacccaagctggagtgcagtggcatgatcatagctcactgcaggcttgaactcctgggctcaagcgatccttccacctcagcctcctgagcaactgggactacaggtgcccaccaccacacccagctaatttttaatttttttgtagagttgggatctctctctgttgttcaggctcatcttgaatgcctgtcctcaagtgatcctctttccttggtcttccacagtgctgggattacagacatgagcttaagcacttactatgtgccaagcaatctgagaagtgctccacaagcttctcttctaattccacatcaaactgtacttctgctcaaggccacacaggtggttggggatggtgcctgggcttgtctaagggctggcttgtgctccacaggccggaggtgtccactattccgctgtgttattttggagccatctatgtt

SEQ ID NO: 727755 - DNA, 2654 bp, Homo sapiens
  misc_feature 2304: n = A,T,C or G
ctctgtcagcaggaaagctgccacattctcctgcacctctgagaatacgcttagcttgaaataatgttcattttagccaagttgtaaattacaagtgtgttggggtccgaggggatttattaccatttggaaggaggttattgggccttgtgcagagtggctgctgcatatggtgcatgttacaaagtggctgtgtcgtgaagcttgcagcaagggaaaaagtatctttcttgctttctcttttgctctttttcgctttctcctttacagctcctctctggagtctttttattgctaatgctccacagaaacaccagcaataaagagcacaatgttgcaatctgtttttccaattgttgcttggatttgatctgacatcattaatgacacatgacagtgggcttgttgatgagtggtttggctgggttctctgcctccctgggtcagagaagggcaggaatgctgagctgcactcggaggttcggctgagggctcttggagtggggcatgggcagtgcgtcagccgcagcctgcaataacactggcctctccctgccagacccctgcccaccttgtaaccaaagggtggacaggggaggatgccgtgccagagggggaagggcactggcaacctcacaacagtcaccttctttcagccactctgagttacccttttaaaaaagagttatagcccttcagccccccgggacttgagtttaaaacaattctcttttcttggagagaatcatgctggggatggcggcgtagaggacaggtccctggctttggaatcagaaggcctgaagtcgagttcaggttcttctgtggactttttaaacgaccccagagaaatgtatttgagcttcagtttccccatctgtgaagcagaaatttagaaaaacaaaatggccccaccggcctcccagccttgcctgagcatcagtgtgagaaggttcatccagtggacactcctgggcactgcatgaaggtgcaggcctcagcaggcccaggtgggtaaggtgtgggcctggtgatggctttgcaaatcgtgaagggcatgtgcatgccattgtttttattttattgcatgtgaaattgattttctcttactgcctaatagatcgcccgatgcatggtttccatgcattaggagaccaggcacggttacctgggtccattgctcagggtctttctaggctaaatcaaggtgtcagcagggctgtgatcccatttgaagtcagggtcttcttccaagcatattcaggtgttggcagaattcatctctttgtggttgtaggattgatgtccctgttttctgtctggttgttggctaggggtcactgttggcaactggaagtaccctcaggttcaaatcctacctttgattatgtcagagtgaactcattagtaatctaatcttgggagagacagccatcatattctccatccctgcccaaacccaaggggagggatgacacagggcatggacagtagtaggtggaaatctgggatcatcttagaatccttcctaccacatatgtccatttcaagatggcctggatatggcatgtgggccactgacttttttggaagcaatcggggacccacgtcttttcacaggcttcagtcttgagagaggagagagcagggttgatgagctctgttatatgttgggccttgttgctttccctctgttcctccctagctgatagggtgacctacttgttccattggttaccaacagtcccatgaggcagcccttcctttcccaggcttgggttcatccattttattggctaaaatcatcaggggatgcctgaactggaagggcccttgggtatcatctagtccagcagttcctatgagagcagtcacataagaagaatcacctgggaacttgttcaaaagacagacttgcaggagcttctgattcagtaggtctgggttgggtccaggaatctgcattttttacaaatgctgcaggtaaacttgatgaacagctaggtttcaaataaacaaaacaaaataggtagaatccttaaaattggaagtaagagatgagctgaatctgaatgcctgtgggtcctgcccagcttcttcggcagctagctactccacctttttgctcgcatttctctctcagcagtctcatgatgtgtttcttatttatttatttctgttgatacataataattatacttatatatggggtgcatatgatattttgatacatgcatagaatttgtaatgaccaagtcagggtatttgagatatttacaatctcaaacacttatcattttyttntgtgttggtattatttcaaatctcttctagctattctgaaatatacaatacattgttgttaactacagtcatcctactctgctattgaacattagaatttactccttccacctaactgtatgcttgtactcattcatcaacctttcttcaccccctcccacgcccttctcagcctctggtaactatcgttttactctctacctccatgagaccaattttctagctctcacatatgagtgagaacatgagatatttgtctttttgtgcctggtttatttcagttaacacaatgacctctagtgccatccacgtggctgcaaatgacagggtttcattcttttttatgggtg

SEQ ID NO: 727756 - DNA, 452 bp, Homo sapiens
tgtttactgcacaccctgccagtttgagcttattaatcatatttacccaagtatcttaattactccctgtctagcaacttgctttgcactcagctgttgacccctcttttttttattcctttctatcattaatcataggagcagcgtggctagaggaattcctgcagcttagatttcgctggcactgttaccactcccagagaggagcggctggagttcacggctggttcctgacaaacttcctaattaatctgctaaagatcagaggaggactaataggagctgaagactgtgtgcgagaccacccctccgccctctccctttgtgtgtgcacgtgtgtgtgtgtgtgtgtgtgtgagcgcgtgcgckcatgtggtgctgagcttggcgggagagagatggcctcaccagcgacaaagcattcctgctgctgttgctgccacctaccttcc

SEQ ID NO: 727757 - DNA, 1747 bp, Homo sapiens
catcatttatttctacacagtagaagacaaaggcaacaaggtgctaaaagagaatagccccaagaattgcctgcaatgcccmcaagcttgagattgctttggtcgccacctttcccgggggagagctgcagaggttgttattaattaacacaagcaaagctctttcccttccattcccctaccaactctgctgacgaaatcaggagggctgcaggttcctgctcctttgatcctctcctagcttgctaaggataatagcgccacattaattacaaccttctctgtctcctttggcaaggctttgcagtgctggggagacagagcgtagggtccttgtcctccatgtcacacctaggaactgggaagaccttacaggcttagataaacctagttaactctgacctcaactcagagccatgacaattcggaaaggaattcttcaaaggaattcttcactcaacacatgtagattcaaagtggtgcaaatagacctgagtttaaataaatagaaagggggcatttaaaaaaatcaaacaagctgtttattagaggaagcgtcaacacacttcccaagcacccacttaccgaacagcggctcattgcttacaatacactcctgccccagagcaggctccctcggtacctcccagacaagcaagccattagcttggctctggttatcggtacatacttacagttatactgaatttctcttacatcagttaaggattaaaaaagaaatgagttcacagtggcccatcatttggctgctgtgagtctgaattagtgcaattatgtggcgtttctcaaactgcattctggttggacatggcggattccttcagctgtggaagaatctggtccctgacttccatgcactactctctagcccttctgtgtcctgaagcctccgtgggtggaatttggcaagtgggaggcaatagatagcactcactcattcctgcagtacagccacagatgaaatgaaatatgagagctgttttaaaagatttacgcaaccatcaggtaactgatactgagcaggaagatttaacaggcaccttaggtttgtgaaccccattgattttgccttcaacccatttctgtcagttgttgagttggtctgagtctgtctgtcatccagtcaacagcatttactgagaaagacctcagtgtaggctcctgtactttggggttacgagaatcaaccatcacgaggaatccctggatctcaggattgaatggtgctcaaatctcatctcaggctgaatccctggagcagcatccctgtcccatggtactcactcaccaacttttagggaagcctattttattttggcgtaactcagacagtcaggaaactcttctttaggcggagatggattcatcaagacctgaaaattatggtgcgggattactttgtaggcaaggccaagtaataatgaggtcttcttggaactttggcaactaaactccctgggatggatatcaaagagaatcctgtgtgatactggactcctctggtgggaaaaagattcccctaagtctagtggtcccaatttgctcactcactacccatctgctgaccactgtgcaaggtgccttggggggatgcttatggccagttggggagacaaggcacatcctcatggagagtcattgtaatgtttagcaatatgtctttagctgatcaacgaactgtagagcatttgtagtgataaagaggaatgtaatagccttaaatcct

SEQ ID NO: 727758 - DNA, 641 bp, Homo sapiens
gcaaacaagtttttctcagttagataaaagaacttccagagagaaccccttcctgtgctttggaggtggttgggtaggagctggagaaggtgagaaagtccttgattcagaggtatcttcttaagccttccagtttctttaattcaaaagtgctcagcatgaccaagctccattctttggggtatcactgtctgagcgccaacaccaatgatgttactggaattgaattttaaacatctctgcctwtgcagcattaatttagtaacttgagaacagtcatctccagcctcagacagaacacattcctctccctctttgctttatgtttattctcttttgttatctctgtatttatgtatttcctccaccagtcaacaaactttgcttaggacaaaggcacatcatttcaacttggtatgttcttagcagctagcacagtgatttgcacataagtatttaacgaaagtttatttaggaaagaaagaagtgacattgggtagcgtaaggaacctgcttttgcccttgaaccactgcatcttccaatctcagtataaacagccacccctcagagaggccttctttcatcatccattctaaagaaccccactcctgtatttgttttgtccatatcactctctctc

SEQ ID NO: 727759 - DNA, 2612 bp, Homo sapiens
  misc_feature 1015, 1105, 1200, 1237, 1239, 1266: n = A,T,C or G
taggtatgacattaatatagaatactcatttgaattccatcataaaattggagctaccttctgtggaaaacaaattggtcctaagatataataactcatatttatagatgtaatacatgttttaaatgcacatttaaggagagaaattgtaactctccaaawaatttttaaaataactcttcacagtacacctagatttctgatttttttttttttttgcatttgtccaacttctccaaaggcttagagaaaaacaggtcactcttaatttgatgtaataaaacaaatcattgaaaagtaactcaacttgatcaaactctttcctcaagattcaaaagcagaatggtacagcattctggttgctcaggctcacttcttaacattttgtaacatttgctaaatatttgtaattaaagggtatacctggatcgaagtgtagacataaattacacccaaagtaagaaatgaaaaaatataggaaattgacaaatgtactgtcacatttttgtaatcacacaaaatgaacataatggagaagaagaacattgcctggagcagaagactaagaagatttaaaaatcctacaaattcagttgtgcattaacaacaacaaaacaaggtagaaacaaggaggcagatccatcatagctatttacccatatgtcagtatcccagaattctttctccaattattgtgccacagcttaaaatccataatgtagaaataatcaatagaataaacttgtttaggaacaaaatctataagcttcagtattggataattttcaaatatggaaaacaaaattccatattaccaataactttaaaaacttatcaatttatgaattatattttatgttaggttttagcactaaaagaaatgttttaagcaaattttcaatattatgatgcacaggtgaaatgtgttgtgttatggaaattgctataatctatcagagaaagaaagtttgggaagcaaaattggaaacaaactacacagggtatagtaaaactnttcacctttgacctctggtaatagaacatccattacacagcatttgagagctttatttcaagcttttaagcaatgccttatctgtataanacatcatttattctcatcatcatcatttgccagctgttattcaacaacatcaactcctgctaagcttgtttgggtataagaaatgtccttgcatntatgcctggatggcacaggcatgtatgcatgggcttntntgtgtatgtgcaactcaatgtgttgtnttcatatggtatacaaaaggcaatgtacacgtcagtacatatgcattatgcatgaacaatttatgaaagcaaggttgatgttgatgtcttgttccctttcacctcctttctatgacctagcacaattgtcttgttaaaattcgagatagaggcatggacataatgtttatgaactttttttcagaacagtgacctctgtttccagagctaacattaatcattatccatacaagacattgctttttccagtgatgggagagagaagaggcttggccctgtctcttcaggcctcagaatgtggcctgaggtctggcttaccaccctttctgaggcaccaggctatagaagctgactctgttagcttgaaaaactgaatgaagcttagatcttttactaaacacaaaactaccccaaactcatctctgacttcacacagagggatccctaacaaggaaactgaccaagataattcctgttcccttgatgatttgccattttttaacagatctccagatcagcctgaagatcaacaggatgatgagtccactgaagaaggtcacaaaggaagagagaatgaatgctgcttggatctcagttgtgcaggacatttttggcaagtcttcccaagtttcatttcgtagcttagtctgaaacatgttcgagacatcagtagacggaattgccaggtcatttgatgacgccgtggtcgcctggtaacaattccaggaatcagagttcactgtaccacagtgttccaacattaggcgtgataaccagtgagaagttccaggaacaagggtctgccaatcccccggtgccagctcatgggttgtgaatgaatacacaactggagatggctggggcctacaatatgaatagtcaaaaaaatcataattctagatcggattgttacgactttctctatgccttgaagaaatcccattatctgtagcaatgatcagctggttatcagttcagttaatgcagtcaaataatttcaaatcaactctttcggagtgaaacaacagccaactatgtgtgtgaatgagttggttctctatctgggaggatgccacgtgcttagtaggcttggaaggacagaagagagaagtactttaaagtttttgtttatcctttatacaaaggagcagatatgcagaatgaataagtctagaagatctagtgtgcagaacaaagaacataattaataaaattatttgtattcaggatttttgctaaaagagtagattttaagggctcttgttacacgcacacaaaagatgattaactctgtgagatgatagatatatgaatttgcttgactgtagtcactgcttcactatgca

SEQ ID NO: 727760 - DNA, 1980 bp, Homo sapiens
tgaattgtatcaggaactcagcagttttagcaagatcttctttatatttcttttctagtcactgttctctcaatgtgtataagttaatttgaccgtgtcactttaagaaggttctcacttgggtcttggaatcaatttatagatgtgaatagcccatctattcatagaatactgctgttttgcactttggggaaaggctcttaccaataagaattcaacagaagggacctggcagacttttgcagctacaaagagcagaaactagaattaaggcttgtctgcgatagtgttccagccagcactaaatgcaataacacacatattgattgacctctcttctttagccttgcaatttgtgtagtgaaggttagaaacagtttgatttctttgtccctgccttcataatgcaagcaaggtcccttggtccttggacagcataccgagtggggagaagagctcatcttaaagaaggcttatcatagacttggccttagtgaaagaatggaatctccttctgcccctctttcccacatgcttgggttctgagtgttggagaagcagctcacagcccctctgggtctcagttccacagttttaaaatgaaagggatgaaatcaatgatcattgtgaatgctgtcaacttttgaattgttctccagaacctgagattcactgtctgtacttagatgatcctaaaattgactttcagtagcatcagtcaatgcatctcacattgaaactgtgttttaaccaaacccatattaatttctatgaattttttagttgataaaagtaatacatttcctttcagaaataaactactctgagatacaaacccttcacagtgataggtcccctggtgtggtagctcatgcctgtcaccccaggaacttgggaggcataggcasgaggatccgggacaattatttgaggccaggagtttgataccaggctaagcaacatagtttttattgaaaacttgttaacattagccagtgttgtggcgtgtgcccatagtcctagctacttgggagatggagatgggagaatcctgagcccatgagctctaggctacagtgagctatgatcatgccactgccctccagcctgggtgacaaagtgagaacatgtctcaaaaacagcaacaacaacgacaaaacaacaccccaaaaagaaagaggtaaaagtcaaaattatagattgaaactacggactagggaggtacccccttctcccaacttatttgtgaaaggaagccgaaaatgcttctcttgagttaccagaatctatgactctcataaggctgcatctcaggcatttgagaaagtatagggagagtcataataataattataggagctttagaatgagatgagggagggaaatgagaagacatgaacattaagaccagatctgggctgggcatggtggaccacgcctgtaatcccagcactttgggaggccgaggtgggcggatcacgaggtcaagagattgagaccatcctggccaacatggtgaaaccccgtctctactaaaaaaacaaaaattagctgggcatggtggcgtgcgcctgtagtcccagctactcgggaggctgaggcaggagaattgcttgaacccaggaggcagaggttgcagtgagccgagatcacgccactgcactccagcctggtgacagagcaagccttcgtctcataaataaaaaagactagacctgagccaaaccaccaatgggctctgcaactagatgtatgctgtcttcagattatcagtataagactagtttctgggctaggagcatagaagagactgagtaaagacatcccacaaccagaaagtagttataaatgaagagacataggataaataacccccaccatatatggctgcaaagcaaaaatccaaaacacaagtagaaaactcatgctaagaaagactgcaaaaatgtcaactggaacatcattttttcctagatgata

SEQ ID NO: 727761 - DNA, 1980 bp, Homo sapiens
tgaattgtatcaggaactcagcagttttagcaagatcttctttatatttcttttctagtcactgttctctcaatgtgtataagttaatttgaccgtgtcactttaagaaggttctcacttgggtcttggaatcaatttatagatgtgaatagcccatctattcatagaatactgctgttttgcactttggggaaaggctcttaccaataagaattcaacagaagggacctggcagacttttgcagctacaaagagcagaaactagaattaaggcttgtctgcgatagtgttccagccagcactaaatgcaataacacacatattgattgacctctcttctttagccttgcaatttgtgtagtgaaggttagaaacagtttgatttctttgtccctgccttcataatgcaagcaaggtcccttggtccttggacagcataccgagtggggagaagagctcatcttaaagaaggcttatcatagacttggccttagtgaaagaatggaatctccttctgcccctctttcccacatgcttgggttctgagtgttggagaagcagctcacagcccctctgggtctcagttccacagttttaaaatgaaagggatgaaatcaatgatcattgtgaatgctgtcaacttttgaattgttctccagaacctgagattcactgtctgtacttagatgatcctaaaattgactttcagtagcatcagtcaatgcatctcacattgaaactgtgttttaaccaaacccatattaatttctatgaattttttagttgataaaagtaatacatttcctttcagaaataaactactctgagatacaaacccttcacagtgataggtcccctggtgtggtagctcatgcctgtcaccccaggaacttgggaggcataggcacgaggatccgggacaattatttgaggccaggagtttgataccagsctaagcaacatagtttttattgaaaacttgttaacattagccagtgttgtggcgtgtgcccatagtcctagctacttgggagatggagatgggagaatcctgagcccatgagctctaggctacagtgagctatgatcatgccactgccctccagcctgggtgacaaagtgagaacatgtctcaaaaacagcaacaacaacgacaaaacaacaccccaaaaagaaagaggtaaaagtcaaaattatagattgaaactacggactagggaggtacccccttctcccaacttatttgtgaaaggaagccgaaaatgcttctcttgagttaccagaatctatgactctcataaggctgcatctcaggcatttgagaaagtatagggagagtcataataataattataggagctttagaatgagatgagggagggaaatgagaagacatgaacattaagaccagatctgggctgggcatggtggaccacgcctgtaatcccagcactttgggaggccgaggtgggcggatcacgaggtcaagagattgagaccatcctggccaacatggtgaaaccccgtctctactaaaaaaacaaaaattagctgggcatggtggcgtgcgcctgtagtcccagctactcgggaggctgaggcaggagaattgcttgaacccaggaggcagaggttgcagtgagccgagatcacgccactgcactccagcctggtgacagagcaagccttcgtctcataaataaaaaagactagacctgagccaaaccaccaatgggctctgcaactagatgtatgctgtcttcagattatcagtataagactagtttctgggctaggagcatagaagagactgagtaaagacatcccacaaccagaaagtagttataaatgaagagacataggataaataacccccaccatatatggctgcaaagcaaaaatccaaaacacaagtagaaaactcatgctaagaaagactgcaaaaatgtcaactggaacatcattttttcctagatgata

SEQ ID NO: 727762 - DNA, 1085 bp, Homo sapiens
ggcttcatttctctcatcttccagcatcatagcccaaatagaatcacatgtggtcagaagagttcaagaaaggaagaagtaaccttgactggaaactgacataatgtctattagcccaaagcaagtgaaaacccaaagcaagtaaaaagcctcaattcaccaactggaaggtgagagaaagctcagttcaccaggtggggaattactgccagggtttggtgggacaggctgcaaagtgccttgcaaaggatgtgatacaaagaagggccatatttgcaatccacctcactactcatttgtacaaaagatgctaggtaacttttgtatattttcatcaatgtttagaacaactcagaaagtttcccttttaaaggtgaaaaaaacagagaagccatgtaacttgtccagggtcataaatgacaagcaaacaatctctatcttggaccaggatttatgtggtctcaaatctttactttttctttactcttatttcatctatttctctattttcatagtttcagctctgttacattcttatcaaatttagtgcctttcttcctccctctctgttcaaactctcattagactttattactccatctgtttaatgtattcattttctctaattaaaagaaaatttgagatttgatggatttggccaagaccaaaagtgaacattttaggcttattaagtaaaacctaaatagtaatctataccatggatttattacatatcaaaaacatttattgattattatccaatcttcatcaatatactagatagagactggtcggggatggcgggaagggaggcatacaamacacaggcagatataactaggaaatgataacaaaggaggatacatgttctagaatagacacgtagttttagtggtcccctgtatcttgactctctcctgagagggaagatcctccaagatgagtgctctgcacacggtagaatgcaaagagccatgtcttggaagtcataacacttgcatcctgaggccccttgcatgactaactagttgcttgtggttggtacatcacctgatttctctagacctcagtttctccacttatga

SEQ ID NO: 727763 - DNA, 1806 bp, Homo sapiens
tggctcatgcctgtaatcccagccctttgggagcccaaggcgggcagatcacctgaggttgggagtttgagaccagcctgaccaacatggtgaaacctggtctctactaaaacacaaaaaaattagccgggcatggtggtgtgtgcctgtagtcccagctacttgagaggctgaggcaggagaatcacttgaaaccaggaggcggaggttagagtgagccgacattgcaccactgcactccagcctggcaacagagcaagactccatttcaaaaatatatgtattttaaaatgaaatcatttagcaattttttgcttaaatataaaaatactttacttaaaaaatttacttaaatttctatattttataattttatatttacttaaaaattaaaaaaatatatttttctacctctcagagacactgaagatagcatcaggaatttgcttacaatctcatcttcaccaaatatttgaaactctatttagacaaaggtgcagaaacacatgtggtgaagacatgatatttctactcagaaatagaagttctgatcttggcttaaaagtctatgaggtgaggacctctgcattgcagactccagggacacaggctctctggtctattgacttggaaagcagagagaaagagaagaaatgagagactcaggcatcctctgtaattatttctctgtcagaattatagtatctcagaaagcaatctgtcatttgtaggaaactctgtgaatcagccaacattttctacattatcaaagaaatgtgatgtggtttggaggagaggtggagacagtgaaaatgaagatgctattatactatggctttcaattccaagataaactttcagagaaatttgtcaaaattagctacgatgttccttctaagtagtgctcagctgtcacctactctaggaaaagaagaagcatgaaggatgactttgtattcttcaccatgtctccttgtgtctgtcaataaggagatgactatgaatatggaggatagtccctattgacatatttcaatcatgtcaaaagaaccagagaacattaatactaagtataccagaaattataacaactttttctatttaattttgctattgtggcttccatcttcatatttcaaagcttattataatacatgactcttgcatttatcccccaccccaaccccaatcagtcaagagagttttatggattttcctgagtttgatagtgaaatgccaagaaccatggaatacagccataaagagtgttagttatggctgggcgcggkggcacgcctgtaatcccagcactttgggaggccgaggcagatggatcacgaggtcaggggatcaagaccatcctggctaacacagtgaaaccccttccctactaaaaatacaaaaaaattagccgggcatggtggcatgcacctgtaatcccagctactcaagaggctgaggcaggagaatggcgtgaacccaggaggcttgcaatgcctcaaagcgagctcagcttgcaatgagctgagatcacaccactgcactccagcctgggcaacagaacgagactgcatctcaaaaaaaaaaaaaaaaaaaaaagagtgttagttattagatgaatgtactcctcactaaacacagttgtcttaggtaggaaagttgtttatgctacgggaaatagagtatgttaaataattaatcgaattgaatcaaaagatggtaatttgatcagcaaacgttttttattaacaaagttgggagaagagatgagaaggagaaagagatcataaccatactggtgggaag

SEQ ID NO: 727764 - DNA, 1806 bp, Homo sapiens
tggctcatgcctgtaatcccagccctttgggagcccaaggcgggcagatcacctgaggttgggagtttgagaccagcctgaccaacatggtgaaacctggtctctactaaaacacaaaaaaattagccgggcatggtggtgtgtgcctgtagtcccagctacttgagaggctgaggcaggagaatcacttgaaaccaggaggcggaggttagagtgagccgacattgcaccactgcactccagcctggcaacagagcaagactccatttcaaaaatatatgtattttaaaatgaaatcatttagcaattttttgcttaaatataaaaatactttacttaaaaaatttacttaaatttctatattttataattttatatttacttaaaaattaaaaaaatatatttttctacctctcagagacactgaagatagcatcaggaatttgcttacaatctcatcttcaccaaatatttgaaactctatttagacaaaggtgcagaaacacatgtggtgaagacatgatatttctactcagaaatagaagttctgatcttggcttaaaagtctatgaggtgaggacctctgcattgcagactccagggacacaggctctctggtctattgacttggaaagcagagagaaagagaagaaatgagagactcaggcatcctctgtaattatttctctgtcagaattatagtatctcagaaagcaatctgtcatttgtaggaaactctgtgaatcagccaacattttctacattatcaaagaaatgtgatgtggtttggaggagaggtggagacagtgaaaatgaagatgctattatactatggctttcaattccaagataaactttcagagaaatttgtcaaaattagctacgatgttccttctaagtagtgctcagctgtcacctactctaggaaaagaagaagcatgaaggatgactttgtattcttcaccatgtctccttgtgtctgtcaataaggagatgactatgaatatggaggatagtccctattgacatatttcaatcatgtcaaaagaaccagagaacattaatactaagtataccagaaattataacaactttttctatttaattttgctattgtggcttccatcttcatatttcaaagcttattataatacatgactcttgcatttatcccccaccccaaccccaatcagtcaagagagttttatggattttcctgagtttgatagtgaaatgccaagaaccatggaatacagccataaagagtgttagttatggctgggcgcgggggcacgcctgtaatcccagcactttgggaggccgaggcagatggatcacgaggtcaggggatcaagaccatcctggctaacacagtgaaaccccttccctactaaaaatacaaaaaaattagccgggcatggtggcatgcacctgtaatcccagctactcaagaggctgaggcaggagaatggcgtgaacccaggaggcttgcaatgcctcaawgcgagctcagcttgcaatgagctgagatcacaccactgcactccagcctgggcaacagaacgagactgcatctcaaaaaaaaaaaaaaaaaaaaaagagtgttagttattagatgaatgtactcctcactaaacacagttgtcttaggtaggaaagttgtttatgctacgggaaatagagtatgttaaataattaatcgaattgaatcaaaagatggtaatttgatcagcaaacgttttttattaacaaagttgggagaagagatgagaaggagaaagagatcataaccatactggtgggaag

SEQ ID NO: 727765 - DNA, 1806 bp, Homo sapiens
tggctcatgcctgtaatcccagccctttgggagcccaaggcgggcagatcacctgaggttgggagtttgagaccagcctgaccaacatggtgaaacctggtctctactaaaacacaaaaaaattagccgggcatggtggtgtgtgcctgtagtcccagctacttgagaggctgaggcaggagaatcacttgaaaccaggaggcggaggttagagtgagccgacattgcaccactgcactccagcctggcaacagagcaagactccatttcaaaaatatatgtattttaaaatgaaatcatttagcaattttttgcttaaatataaaaatactttacttaaaaaatttacttaaatttctatattttataattttatatttacttaaaaattaaaaaaatatatttttctacctctcagagacactgaagatagcatcaggaatttgcttacaatctcatcttcaccaaatatttgaaactctatttagacaaaggtgcagaaacacatgtggtgaagacatgatatttctactcagaaatagaagttctgatcttggcttaaaagtctatgaggtgaggacctctgcattgcagactccagggacacaggctctctggtctattgacttggaaagcagagagaaagagaagaaatgagagactcaggcatcctctgtaattatttctctgtcagaattatagtatctcagaaagcaatctgtcatttgtaggaaactctgtgaatcagccaacattttctacattatcaaagaaatgtgatgtggtttggaggagaggtggagacagtgaaaatgaagatgctattatactatggctttcaattccaagataaactttcagagaaatttgtcaaaattagctacgatgttccttctaagtagtgctcagctgtcacctactctaggaaaagaagaagcatgaaggatgactttgtattcttcaccatgtctccttgtgtctgtcaataaggagatgactatgaatatggaggatagtccctattgacatatttcaatcatgtcaaaagaaccagagaacattaatactaagtataccagaaattataacaactttttctatttaattttgctattgtggcttccatcttcatatttcaaagcttattataatacatgactcttgcatttatcccccaccccaaccccaatcagtcaagagagttttatggattttcctgagtttgatagtgaaatgccaagaaccatggaatacagccataaagagtgttagttatggctgggcgcgggggcacgcctgtaatcccagcactttgggaggccgaggcagatggatcacgaggtcaggggatcaagaccatcctggctaacacagtgaaaccccttccctactaaaaatacaaaaaaattagccgggcatggtggcatgcacctgtaatcccagctactcaagaggctgaggcaggagaatggcgtgaacccaggaggcttgcaatgcctcaaagcragctcagcttgcaatgagctgagatcacaccactgcactccagcctgggcaacagaacgagactgcatctcaaaaaaaaaaaaaaaaaaaaaagagtgttagttattagatgaatgtactcctcactaaacacagttgtcttaggtaggaaagttgtttatgctacgggaaatagagtatgttaaataattaatcgaattgaatcaaaagatggtaatttgatcagcaaacgttttttattaacaaagttgggagaagagatgagaaggagaaagagatcataaccatactggtgggaag

SEQ ID NO: 727766 - DNA, 1342 bp, Homo sapiens
aattaaaaattaacaaaaagaagaaagggagaaaattgtacttgaagactaaagtatggtttccttctgtgggttccccatctgtccaacagataccaaatacccttccccccactgtcagtggaagttcagctttctgctattggagcttccttctttcactgcacaataagagtgtataccggcttgctgtctacttttaaacttgtataggtgtgagccattattcactgaataccccacattccagtggacatgtcaattgctttgagatcttttcttgagccacccttcctctcacatgaagaacatgggcaactctctaagaacatattctttgccaatcttcaactttatgataaatttttagccttgytttatgaaacctggagatctttggtaagctaggagtcatgaaatcagtctttcatagtcttagtacagcctacatagattatctggcaactactgttctcagcattttaaggccaaacacatagatagcaggaaaagtctcttttgataacctgttttatatgtaatattttacacatagagcatttgttagtgttatccagtgtttctatgcatccaaaatcatagaaatactgcctggcaagtaatgatctttcaataaatatttgttgaacaaacaaatccgcaattttgagggttatctatgtttgctaccatattaaaaaacccatcaaggtttacaaaagttagaagactcataaaaagaaatgagaaattatcaaagatgaggaaaatcttaaaagcaactaaaaagtaatggcatgactttttctgtacagcagattcacatcagcaccaatagattctcaaaggcagtacaatactatctccaaactgctggaaaaaaataataaaattgctttcaatagaaattctgtaccctgataggttatcatgtggcagtggagagcaaaataaaaagtattttctgacaaacaaaatattcacacacttacaaaccccaagtaaaataacttctaaaaggatctatttcattaaataggaaataaaatggaaccagaagaaagcaaggtgatacaaaaaatgagtgtgagtaaagaactggaaatatgttgatagaatttaaatgaggattggctattcacaaaattactaatgacctagtttgttgtgtctcaaagtgagaaaaaactaaaatagtagaagcaataatatggaaaatgagagtaaattggagttaaaatattacaaaatatcaaccataggaatagagattgtggctaactttagatttttacctaaagactattaaacattttttttctttttgagatggagtcttgct

SEQ ID NO: 727767 - DNA, 633 bp, Homo sapiens
ggagaaaggaagggacttggctagcaaaggtggccttcctacatagaggaagcctcctttaaagataataaatgataaatgtttcctagacttttaaaaatatcagactctcaacctctcctagatccaggaaacatagagaaagcctgactacactaatggagattctctacaaatgcaaatttcccctacaaaagacagctttgcaatgtcacttctctgttggctctgtggcagccatttaaaaatatgtcaaatacttatctttgggggtaaaatattttgatttccttcagaggtctgtttttatgaattttcttgagagtataagccacatactgtatgaaatttacttacrtatccagttatagatcatatttagcaatactttaatctgctgctgctttagttctcatgtatattccagaatatgtctatggactccatctgtttttcatttccttccttcctgcattgtttccttccttctttaggaaagccagatcccttcacctaaatgaggaagtagattctggtttattccccttattgattgcttccagactcctccttttataatagatcactagaaggagtgctaaataaggtactgtgaaaggaaaagaaatctca

SEQ ID NO: 727768 - DNA, 633 bp, Homo sapiens
ggagaaaggaagggacttggctagcaaaggtggccttcctacatagaggaagcctcctttaaagataataaatgataaatgtttcctagacttttaaaaatatcagactctcaacctctcctagatccaggaaacatagagaaagcctgactacactaatggagattctctacaaatgcaaatttcccctacaaaagacagctttgcaatgtcacttctctgttggctctgtggcagccatttaaaaatatgtcaaatacttatctttgggggtaaaatattttgatttccttcagaggtctgtttttatgaattttcttgagagtataagccacatactgtatgaaatttacttacatatccagttatagatcatatttagcaatactttaatctgctgctgctttagttctcatgtatattccagaatawgtctatggactccatctgtttttcatttccttccttcctgcattgtttccttccttctttaggaaagccagatcccttcacctaaatgaggaagtagattctggtttattccccttattgattgcttccagactcctccttttataatagatcactagaaggagtgctaaataaggtactgtgaaaggaaaagaaatctca

SEQ ID NO: 727769 - DNA, 634 bp, Homo sapiens
agtatccctttcaatgctgctttgaaattatcatttaaaaaaattcatcacaacatgtttaaaaattaaggcattgttttctttgtttcctttattcacatacgtccccatgggttttttttgttgttgttttgtttttgtttttgcttttttgagacagggtctttgtctgttgcccaggctggagtgcagtgtcgtgatctcggctcactgcaacctctgcctcccaggttcatgcaattctcctgcctcagcctcccaagtagctgggattacaggcatgcccaccgcacccagctaattttggtatttttagtagagacagggtttcacygtgttggtcaggctgctctcgaactcctgacctcaggtgatccgcccaccttggcctcccaaagtgctgggattacaggtgtgagccaccgtacccggcctgtcctcatggtttttaccattaccttgtcctaccagcactatttctgtttatttttccttccatttaaatggtcctgtttaatttaaacatctacctttgccttctcttaaggaatcatatccaggaagtcatggttttgatgtattagttactttttcttagcacacaataaatacataacgaataaaatttaaatgt

SEQ ID NO: 727770 - DNA, 279 bp, Homo sapiens
cagacaactcaactgctcagtaatttctgcacatggctaatttaattgtactgtatgcattgtcccggttattaattttatcaaccaattatttacaccccgtgtrtaattttgaagcccaatctagtgaactaaaaagtaaaatgttatctcttaattgtcatctcttcccttctcttttggtttcctctttttaaaaccacgaagttcgtattttaagatagagagcctgtaagggcatttattaactatttgttggttgattaattaattaatcca

SEQ ID NO: 727771 - DNA, 626 bp, Homo sapiens
catcaagtactttttctctgttgcaattcccctgtcttgataaattggctctgtctaggcagcaggcaaggtaaaccccttgggcagttacagaaagggcagtcagatgtggaggtctcccaccttctgctacccccaggtctaccagcagggtggaggatgggctcagaggcattggggaaagggagagagaaagatgggatgagggttgtggagagaaggaagagaggggagagagatgaaacaaacaggtacacaaagacaaaggggaaatgaaagatggaagagggaggagaaaggaatcacttgagaatcacaagttaaaagagaagtttctctcaagagctctgaaaccaaaaccacacraacttgccttgaattcttattttctaaaattaacagcagagcttcagaaataccgtagtttctgaggagtgcagctttaaaggtatctgcattcccttcaggtccaaaggggatctgcaaaaccacctctctctccctctgtaccccagaagcagcttccgtttgcaaaagaggctgccttttatattcttttacaatgttaatatttgttttgctccattggtttgttttggcttttctaaagtgctgatgagccgccg

SEQ ID NO: 727772 - DNA, 559 bp, Homo sapiens
aatgagatccatgcataaaccaacgatgagagtacatttggaacaaggagtatggttaacccaattctgtgtacctagagtcctaaaatgaaatgaaatattttaagatatttgagtttgtrggccaggtgtggtggctcacacttgtaatcccagcactttgggaggccgaggtgggcaaatcacaaggtcaggagatcaagaccattctggctaacacggtgaaaccccatctctactaaacatacaaaaaaaattagcagggtgtggtggtgggcgcctgtagtcccagctactcgggaggctgaggcaggagaatggcatgaacccgggaggcagggttggcagtgagccgagatcgtgccactgcactctagcctaggcaacagagcgagactccgtctcaaaaataaataaataaataaaaaataaataaaagtccaaggagccagaatggtggctcatggctgtatcacagcacttcgggaggctgaggcgggcagatcacctgaggtcaggagttcaagacccaccctggccaacatggtaaaaccccgtc

SEQ ID NO: 727773 - DNA, 559 bp, Homo sapiens
aatgagatccatgcataaaccaacgatgagagtacatttggaacaaggagtatggttaacccaattctgtgtacctagagtcctaaaatgaaatgaaatattttaagatatttgagtttgtaggccaggtgtggtggctcacacttgtaatcccagcactttgggaggccgaggtgggcaaatcacaaggtcaggagatcaagaccattctggctaacacggtgaaaccccatctctactaaacatacaaaaaaaattagcagggtgtggtggtgggcgcctgtagtcccagctactcgggaggctgaggcaggagaatggcatgaacccgggaggcagggttggcagtgagccgagatcgtgccactgcactctagcctaggcaacagagcgagactccgtctcaaaaataaataaataaataaaaaataaataaaagtccaaggagccagaatggtggctcatggctgtatcacagcacttcgggaggctgaggcgggcagatcacctgaggtcaggagttcaagacccacmctggccaacatggtaaaaccccgtc

SEQ ID NO: 727774 - DNA, 614 bp, Homo sapiens
tcaggattgagccttgaacacatatggccaattggagaaggatgagcctgcccaggagattattaaratgtgaccagagaggtggaacaaagactaagtgtggtgtcatagaagtaagtaaaagagtggtcagcagtgtctgttggctactgagaagccagttacagtggaacttagatttggcaacatggacatcattcactaaccttagggggagctgtcagtgggaagcttgaaacatgccaattagatggggttgagaaatgcaaggaaatggagacagctagcgtaggcagcttttaaaggtgtttggggagagagacccagggtgagtctctttaaatggtaaagaaaacttaccttattcaagagttccagaagaaggtggcactagggttgtatattcagtggctcaacaatgtcatcagagacttagatttttccagcctcagtgtgtgacttggtcctcaggctgtcccctcagaatgtaggatggctgctgtaattcagacatctttagcagaagaaggacaactttgtcttatgtcctttaaaaaaaatcttaatacacatgctgaaaagtatacaagttttaagtgcagctggaattttca

SEQ ID NO: 727775 - DNA, 614 bp, Homo sapiens
tcaggattgagccttgaacacatatggccaattggagaaggatgagcctgcccaggagattattaagatgtgaccagagaggtggaacaaagactaagtgtggtgtcatagaagtaagtaaaagagtggtcagcagtgtctgttggctactgagaagccagttacagtggaacttagatttggcaacatggacatcattcactaaccttagggggagctgtcagtgggaagcttgaaacatgccaattagatggggttgagaaatgcaaggaaatggagacagctagcgtaggcagcttttaaaggtrtttggggagagagacccagggtgagtctctttaaatggtaaagaaaacttaccttattcaagagttccagaagaaggtggcactagggttgtatattcagtggctcaacaatgtcatcagagacttagatttttccagcctcagtgtgtgacttggtcctcaggctgtcccctcagaatgtaggatggctgctgtaattcagacatctttagcagaagaaggacaactttgtcttatgtcctttaaaaaaaatcttaatacacatgctgaaaagtatacaagttttaagtgcagctggaattttca

SEQ ID NO: 727776 - DNA, 651 bp, Homo sapiens
acagccagtcctggggaatcccagctctgctgcccaccagccaagggacccgcagccttaagtcttcatatgcaaaatagggtgaaatktccaccttgctgggttgctgggagaatgaaatgacataatgaactttgggagcctggtgacaaggtgcttggctatagtgcctggtgggcctgggttggaatccagttctcccaactccaatctgcaagtatttgttcaggccacttctgcctcagagtctgtttcctcaactgcataatgaaaataataagacctaccttgaagagttactgtgagaaagaaaaaaatcctgcaaggatggcacctggtccacagcagccattgaacaaatgacagcaattatgatagtgtctgggtcgaagaaggtacacaatttgtaactacaataatcactatttttataagctcaacattgtcctggaaactgtgggaaatccagaaataatctaagaaacagatgggcagacccatctggaagctaagatcctgcttggtaacacaaaacctgcatagtgccccatatcaatgtgcagttgcattctacactgtggacaagaggccaagaatgttctagtgcatcagagacagaggccaacggtggctggactaattggcaaaggc

SEQ ID NO: 727777 - DNA, 608 bp, Homo sapiens
tgtggttggtctaagagttagagtgaattcacaatgaaatacaaaggattctggaaatgtaagataatgtcactactctattattgaaaaggtcctggtgctgactttagttcctttattttaaaattgggttactaygtcatttacatactgcttgtgtttattatttaaaagtgtcccctcctttttctgtgtctactaaaatcacagtcatgaactgaccttctagttacattttgttgtcattgttctgttgttacagaggaaaggtgtatcattaacttgccttctagatatgaaccaagcatgcaactgtttgcctggcactgtattcaccatttctcagtattcttctactctgcctgtctgtggaattaaaggcccttccagggggcacactgggatggtggagctctgcagatttcagggttgtgggagaggttagagagctgctgggataagtattcatgaacaaaccaggtttttgcagaaacaaactcttcatactgaaaataaatgccactaggtacggaacctcacattttaatggcacaccaatattggtcttgtatatgcatatcaaataaaaatgactgagtaggtatttc

SEQ ID NO: 727778 - DNA, 617 bp, Homo sapiens
aaactaaaatgtacctctaagccatatcacaagcctagtgaggtgtttgtttataaatccaggccctgggcaagtcagccaatctgctgtccaagacactcataagcctgcraaaataagatttaacatcttgcatcctcaggaggacagaagttacatttataaagcaggcccaatagagagaactggcttaaatttgagcaatgattcactccatcacaaatggaaatttgatctcaaataaagagcctacctcaagactgtttctgagccttttaaatttctaacttatatgtagagttcatttattgttttggtattgatttctaattttattgcacgttggccagtgaatagagtctgtatgaaattaacattttattttattttatttttttgagatagtgtctcgctctgtcacctaggctggagagcagtggcatgatctgggctcactgcaacctctgcctcccaggttcaactgcctcagcctcccgaataggtgggattacaggcacccaccaccatcgtggctaatttttgtatttttaatagagatggggtttcaccatgttgtccaggctgatctggaactcctgaccttaggtgatccaccc

SEQ ID NO: 727779 - DNA, 617 bp, Homo sapiens
aaactaaaatgtacctctaagccatatcacaagcctagtgaggtgtttgtttataaatccaggccctgggcaagtcagccaatctgctgtccaagacactcataagcctgcaaaaataagatttaacatcttgcatcctcaggaggacagaagttacatttataaagcaggcccaatagagagaactggcttaaatttgagcaatgattcactccatcacaaatggaaatttgatctcaaataaagagcctacctcaagactgtttctgagccttttaaatttctaacttatatgtagagttcatttattgttttggtattgatttctaattttattgcacgttggccagtgaatagagtctgtatgaaattaacattttattttattttatttttttgagatagtgtctcgctctgtcacctaggctggagagcagtggcatgatctgggctcactgcaacctctgcytcccaggttcaactgcctcagcctcccgaataggtgggattacaggcacccaccaccatcgtggctaatttttgtatttttaatagagatggggtttcaccatgttgtccaggctgatctggaactcctgaccttaggtgatccaccc

SEQ ID NO: 727780 - DNA, 617 bp, Homo sapiens
aaactaaaatgtacctctaagccatatcacaagcctagtgaggtgtttgtttataaatccaggccctgggcaagtcagccaatctgctgtccaagacactcataagcctgcaaaaataagatttaacatcttgcatcctcaggaggacagaagttacatttataaagcaggcccaatagagagaactggcttaaatttgagcaatgattcactccatcacaaatggaaatttgatctcaaataaagagcctacctcaagactgtttctgagccttttaaatttctaacttatatgtagagttcatttattgttttggtattgatttctaattttattgcacgttggccagtgaatagagtctgtatgaaattaacattttattttattttatttttttgagatagtgtctcgctctgtcacctaggctggagagcagtggcatgatctgggctcactgcaacctctgcctcccaggttcaactgcctcagcctcccgaatagstgggattacaggcacccaccaccatcgtggctaatttttgtatttttaatagagatggggtttcaccatgttgtccaggctgatctggaactcctgaccttaggtgatccaccc

SEQ ID NO: 727781 - DNA, 617 bp, Homo sapiens
aaactaaaatgtacctctaagccatatcacaagcctagtgaggtgtttgtttataaatccaggccctgggcaagtcagccaatctgctgtccaagacactcataagcctgcaaaaataagatttaacatcttgcatcctcaggaggacagaagttacatttataaagcaggcccaatagagagaactggcttaaatttgagcaatgattcactccatcacaaatggaaatttgatctcaaataaagagcctacctcaagactgtttctgagccttttaaatttctaacttatatgtagagttcatttattgttttggtattgatttctaattttattgcacgttggccagtgaatagagtctgtatgaaattaacattttattttattttatttttttgagatagtgtctcgctctgtcacctaggctggagagcagtggcatgatctgggctcactgcaacctctgcctcccaggttcaactgcctcagcctcccgaataggtgggattacaggcacccaccaccatcstggctaatttttgtatttttaatagagatggggtttcaccatgttgtccaggctgatctggaactcctgaccttaggtgatccaccc

SEQ ID NO: 727782 - DNA, 617 bp, Homo sapiens
aaactaaaatgtacctctaagccatatcacaagcctagtgaggtgtttgtttataaatccaggccctgggcaagtcagccaatctgctgtccaagacactcataagcctgcaaaaataagatttaacatcttgcatcctcaggaggacagaagttacatttataaagcaggcccaatagagagaactggcttaaatttgagcaatgattcactccatcacaaatggaaatttgatctcaaataaagagcctacctcaagactgtttctgagccttttaaatttctaacttatatgtagagttcatttattgttttggtattgatttctaattttattgcacgttggccagtgaatagagtctgtatgaaattaacattttattttattttatttttttgagatagtgtctcgctctgtcacctaggctggagagcagtggcatgatctgggctcactgcaacctctgcctcccaggttcaactgcctcagcctcccgaataggtgggattacaggcacccaccaccatcgyggctaatttttgtatttttaatagagatggggtttcaccatgttgtccaggctgatctggaactcctgaccttaggtgatccaccc

SEQ ID NO: 727783 - DNA, 585 bp, Homo sapiens; identical to SEQ ID NO: 708755

SEQ ID NO: 727784 - DNA, 795 bp, Homo sapiens
attaaaagtaccagggggaagttcccccagaactttcagcttggcctgaaatgcctttcaaagtggggaggaggggatgtgagtcacgacagcattttcctcctctytgagcctctgccttgctcctgctttaggtgggaggggaggaagaattactttctaattcctgtgtggatcaggattgcatctagaaagaactaaagtccaagtccaaatctgatgaattcaagggaagaggaattaagtagctcatcattcactacctggaaaatacgcttgaagcaattcccagtgagcaatgcgattgtggattggtaattacaatcctgagatcacagatccataaaaccatctgacattttcataatcattcaagagcaaagagtgacacatcttttcatccccccggcggctacgtgctgtgcacacgggccctccacgaaaccctttgttaaagggggacccagacttggaccactactctgcaggtcactccactttacccatctttcgtgaaggccaacaccggaagaagaggtctatgttgtacaacaccccggggtcaggtcccccttcatgccaggtccccaagtggaccctggtgacagaagcagaaccaactgctggcacctgtgaccagcatggccatggctgtgtattatgaactctggggaggtgtgggaggggagggtacttcctgcagccctgccggggaaaacactgattccctcctgtcagtacaaaaaaaatgatgaatgccaaagcaacagggctctgctttcttgaagaaaactg

SEQ ID NO: 727785 - DNA, 646 bp, Homo sapiens
tgctctgatgtgtttacacttattttccattgaatctaagtttctaatgttttaggtcactaacaatgaatccaacatctgacattttatgagyggtgggatgttatcaatccttcagcaagttttgatgttttttttatgacttctggcaagctggagtcattaggatttattaccagaaaagggaacaaatactgttgttttactgtgttcgacgtatagtagctgaaagtagagtattttcaagacctatgttccttttgaaataaaaagttcctaggtcttgccttggtctttgggttggctgggcatgcagtacactgcactgaactcactggtgtgatggaccccgttcacgcaccactccagaccttcctggctcagtgcctgggagtttgtcttgcttctgggtctgggtggccttggaaatggggcaaaggatactgtcataaagccacagctgctgctattgccatcacagaccaaagaattcccatgtgtgatgctcactgacaagaggagtcagctgtacctatgtgctacttggccagaacttagagatgcttggatttcccagtggctacctgggggttccaggtaacaacttgcaagtgcagggggaattaatactgtattgggtgaactt

SEQ ID NO: 727786 - DNA, 618 bp, Homo sapiens
gctgagcccccagccagatgtcctttatgtagagagacactaggaatgctgcggaggctgaacaagagcaggggataggccattaggatgcacacctgctcagctcgaaaacaggtcatcctgcccacaatgcaacggctttgccaagtgcccaaatgaaccgtgccacaggcctgggcaacccaaggtgagcacaccgatacaacaactcactctgcctttgcttaacttttgtgttaatcttttttattattaaaaagtttcttttctttaaaaaaaaaaaaaaaaaaagacagggtctcactctgtcacccagactggagtgcagtagtgtgatctcagctcactacagcctcaactgcctgggctcaggtgatcctcccacctcagcctccagagtagctgggactacaggcatstgccaccacgcccggctaatttttgtagagacagggtttcactatgttgcccaggctggtctcaagcaatctccccacctcagcctcccaaaatgctaggattataggtgtgagccactgtgcctggcagaaatttatctttcttctgatgaatatgtgtggatcccctcaaaaagctgttacaagacaagtctcttcc

SEQ ID NO: 727787 - DNA, 618 bp, Homo sapiens
gctgagcccccagccagatgtcctttatgtagagagacactaggaatgctgcggaggctgaacaagagcaggggataggccattaggatgcacacctgctcagctcgaaaacaggtcatcctgcccacaatgcaacggctttgccaagtgcccaaatgaaccgtgccacaggcctgggcaacccaaggtgagcacaccgatacaacaactcactctgcctttgcttaacttttgtgttaatcttttttattattaaaaagtttcttttctttaaaaaaaaaaaaaaaaaaagacagggtctcactctgtcacccagactggagtgcagtagtgtgatctcagctcactacagcctcaactgcctgggctcaggtgatcctcccacctcagcctccagagtagctgggactacaggcatgtgccaccacgcccggctaatttttgtagagacagggtttcactatgttgcccaggctggtctcaagcaatctccccacctcagcctcccaaaatgctaggattataggtgtgagccactgtgcctggcaraaatttatctttcttctgatgaatatgtgtggatcccctcaaaaagctgttacaagacaagtctcttcc

SEQ ID NO: 727788 - DNA, 627 bp, Homo sapiens
ttccttggcccagtcagcccgcctcctggctgaacacacacacacacgtacatactgagcagatgttccagtgctagtcccaaatggcaaggagaaaagaagactctagggcagcaaagaggatccaaaagtgcattctatcaatggcacatttgatcaagctcctgcttaggtgcggcacttgtaaaggtgaggcagggcccacagggaaaggtgtcacactcagccctgcaggaccaaagcccacctgaccaaaagactgggagcccaggaaagacagacatgtacacccacacccacctacatacacgcatgcacacacagacacaagcatgcatgcacatacagacaaaaaaaaagagattttatgtacagttgagccccctgacacttcccctgaaatccctatggcataartcaatctacctaaaggcatgagcagaaaagttttcagaaaaatcaaccaaatgagacaccccagtccagctgacagtgcacaacaggggcaattccagacagacaggcacccatcagtcagctgcagtggccctgcccagatgccttatggcataaggccaagcttccccagagcaccctatgcagaagccagtgtgagtcaggggagtg

SEQ ID NO: 727789 - DNA, 1293 bp, Homo sapiens
gaaacattgttttgctgggtgtggagtaactgagggtggcgcagttgtctgggactgatctgtccccaccccatctctccatagatattgcctaacagagaagccaactgacctcgccactgccatggagaatgaggtcaagatagcaagatagttgagaagtaaaccatttaaaaaaaaytgaattatagattccatcagaagaggaaatgttggaaaagtccaagaagttaaaattagcctaataagcttaataggaaataaagagaaatgaaacaatactaagacaacattaaaaaggaaccacgcataagaaataaaaaatatagtagttgaaggaaagaactcacaaatgtgactaaacagtagaatgaataaaactcaaggacaaattagtgagttggaagttcaaactgaggaagttcttcaaatgagggacaaaaaatagaaaatattagagaaaagccaaaaaaatggagtatttacatacaaatgctaacatccatatgataaggctcagagagtcagaggaataaaatgaaaagaaggaagtatttgaaagaataatgaagctagatttcctagaattcaaaaagaaaaaaagaaatacctcagaatgaaagggcctacagaatgacaaagagaagaaagagaaaaatatatcacaccctatggtaaaatatgagactatgaaagacaaagaaaattctgcagagtaaatcatacaaaggaccaacatcgagaatgacaccagatttccccacagcatcagtggatccaggaaaacaatggagcagtatcagcaaagtactgaaggatatgaccttagaacctagaaatatacatccagccaaactgccctttaattaagtatcagggcatgaaacaaatattctcagtcatataagacctcaaaacttgaataagtagagaaacaaatcaaagagttgctggagaaacaaataaaaataatcaaataccttacaaaagttggttgtagtaaacaacaaatttttaaaattctaagaccaggctgggtgtggtggctcatgcctataatcccagcacttatggaggccaaggcaggagaatcgcttgaggccaggagtttgagaccaccctggccaacatggcaaaacctcatctctactaaaaatacaaaaattagctggatgtggtggtgtgcacctgtagtcccagctactcaggaggctgaggcatgagaatcactgaaacccaggagatggaggttgcagtgagccgagatcaagccactccactccaacctgtgtg

SEQ ID NO: 727790 - DNA, 1293 bp, Homo sapiens
gaaacattgttttgctgggtgtggagtaactgagggtggcgcagttgtctgggactgatctgtccccaccccatctctccatagatattgcctaacagagaagccaactgacctcgccactgccatggagaatgaggtcaagatagcaagatagttgagaagtaaaccatttaaaaaaaattgaattatagattccatcagaagaggaaatgttggaaaagtccaagaagttaaaattagcctaataagcttaataggaaataaagagaaatgaaacaatactaagacaacattaaaaaggaaccacgcataagaaataaaaaatatagtagttgaaggaaagaactcacaaatgtgactaaacagtagaatgaataaaactcaaggacaaattagtgagttggaagttcaaactgaggaagttcttcaaatragggacaaaaaatagaaaatattagagaaaagccaaaaaaatggagtatttacatacaaatgctaacatccatatgataaggctcagagagtcagaggaataaaatgaaaagaaggaagtatttgaaagaataatgaagctagatttcctagaattcaaaaagaaaaaaagaaatacctcagaatgaaagggcctacagaatgacaaagagaagaaagagaaaaatatatcacaccctatggtaaaatatgagactatgaaagacaaagaaaattctgcagagtaaatcatacaaaggaccaacatcgagaatgacaccagatttccccacagcatcagtggatccaggaaaacaatggagcagtatcagcaaagtactgaaggatatgaccttagaacctagaaatatacatccagccaaactgccctttaattaagtatcagggcatgaaacaaatattctcagtcatataagacctcaaaacttgaataagtagagaaacaaatcaaagagttgctggagaaacaaataaaaataatcaaataccttacaaaagttggttgtagtaaacaacaaatttttaaaattctaagaccaggctgggtgtggtggctcatgcctataatcccagcacttatggaggccaaggcaggagaatcgcttgaggccaggagtttgagaccaccctggccaacatggcaaaacctcatctctactaaaaatacaaaaattagctggatgtggtggtgtgcacctgtagtcccagctactcaggaggctgaggcatgagaatcactgaaacccaggagatggaggttgcagtgagccgagatcaagccactccactccaacctgtgtg

SEQ ID NO: 727791 - DNA, 810 bp, Homo sapiens
caaagaagggtgaaattcacttacttgaaaagtagcctttcctctgagcatagcatacaccaaggccacaaacggaaatcactaaggccacaactactacggctgctatgatgccacttatgttgagatcatctggaatgtaaaataaattacgcataaatatatgtggattacacggacagatgcagtcattaaattgaaaaggttcaaaaaaagatcccctttgcagctatatcataaagcatactttaacgattgtgaagcctgttcaactaactcacttctaagacatggttcaaaattgattaaaaatattaacagaacttaagctttggaaaaatactaaattttaaaaacttctcagattaaaaaataaaatgtattcttttgcattcatttggagatgtgtaataattcacaggattaaaagactggaagcaatctttgaagttcaatgagttcaagtattctactgccactccctaccccacrtcttacttaaaattctcctacatcatcaactgtgtcaatttcacaaataaagaaaaactcaacgtcaaagaaaacacatggtgccaggcatgttgactcatgcctgtaatcccagctactcaggaggctgaggtgggaggactgcttgaggctaggaatttgagaccagcctaggcaacatagcaagaatccatctctaaaaaataaaaaaattaaaaaaattatccgggtatggtggtgcattcctggagtcccagctactcaggaggctgaggttggaggatcacttgagcctaggagtttcagattatagtgaac

SEQ ID NO: 727792 - DNA, 691 bp, Homo sapiens
ttgagacagagtcttgctctattgcccaggctggagtgcggtagtgtgatctcagttcactgcaacctccacctcctgggttcaagcaattctcccgcctcagcctcccgcrtagctgagattacaggtatgtgccaccacaccgggctaatttttgtattttagtagagacagggtttcaccatgttggctagactggctcggactcttgacctcaagtaatccgcccacctcggcctccctaactgctgggattacgggtgtgagccaccacacccggcctattattatttatatgattatttttaccccttgaaaaaggcatgtagcctaattatgataatacaatgtgtctgtattatcacagggaaagtgagtgctttggctccgctctctgttggagggtgcccttagggactggattccctttaaccaactacctgggagtccctgtacccccagggcatccctagcaagggctaaccctgaggagggtgcacatattccaggtcaacccggaggttttatctgctccgtgtccagacagcccttgaaagaaaggtttctccaagccactgtgtacatgcggagaaaggagtggctacgctgctgtgcgtctggatgcaggcagagcggagcagcaggtaagactggaggaacaagtcacggcaagatctgcaaagcaggaccc

SEQ ID NO: 727793 - DNA, 691 bp, Homo sapiens
ttgagacagagtcttgctctattgcccaggctggagtgcggtagtgtgatctcagttcactgcaacctccacctcctgggttcaagcaattctcccgcctcagcctcccgcgtagctgagattacaggtatgtgccaccacaccgggctaatttttgtattttagtagagacagggtttcaccatgttggcyagactggctcggactcttgacctcaagtaatccgcccacctcggcctccctaactgctgggattacgggtgtgagccaccacacccggcctattattatttatatgattatttttaccccttgaaaaaggcatgtagcctaattatgataatacaatgtgtctgtattatcacagggaaagtgagtgctttggctccgctctctgttggagggtgcccttagggactggattccctttaaccaactacctgggagtccctgtacccccagggcatccctagcaagggctaaccctgaggagggtgcacatattccaggtcaacccggaggttttatctgctccgtgtccagacagcccttgaaagaaaggtttctccaagccactgtgtacatgcggagaaaggagtggctacgctgctgtgcgtctggatgcaggcagagcggagcagcaggtaagactggaggaacaagtcacggcaagatctgcaaagcaggaccc

SEQ ID NO: 727794 - DNA, 622 bp, Homo sapiens
gccctccagaagctcccagtgttgtgggactctgatggatggacaggggtagtgaagactcagacatggtggggccatgtcgaactggtaatgttttaaaacacttctttcagcaaaagtgtagccagactcctaacaagtgagtgaactatttatctacctccccaagacagtgtggtactggcagaacaaaagagagcacctggaaacagacccacacagacagaaccaactgattcttgacaaaggtgaaaagcgattcactggaagaaggatggctttccaacaaacggtgtggacttattggacatccagaggcaaaataaataaacttcagcagaaacctcacaccttattaaaaaaaattcaaaatagatcacaaacctaaatgaaaaacgttaaacgttttagaagcaaacacaggagaaaatctttgtaatctgggattaggcaaagagttcgtagatatgacaccaaaaaagataaagttgctaaattggactttatcaaaatcaaaaacttgctcagtgaaaagttaagagaataaaaaatcaagctacmgactgggagataatattttttaaatacctaaaaaaagagttggatctagaatataaaaaga

SEQ ID NO: 727795 - DNA, 613 bp, Homo sapiens
tttgaagtaatatctccctaagatatgacaaaaaatatcaaagggtggaccccgtctgtgacatcaaaaataacatctcttgtggatattccgaataatatcactggggagtgtgtattggggaagggggcctgtggggagaaagtgtatgactgaaggcctggaaatgcccaaagccaatcccggcttcataggaagactgataactgatagtggatagaagggggatggagccttagggggaagatgtgttattatttctagtactgttgagacagggatcacccaaacgctggaacaggcagtactggtctgattggcaaatgtctatctcgccggaaggagaaatgggctactatgttttcttagctcctgactgcccgccataaggtcatgccctttctcttgaatccaattctgtacccatcaacttcttaaaattttacagtatagccttccagatagagagstacatgtccacaaacttacatattttacagggtctcaatataatttttaataatattgagaaatgtagaaaatcgttgcataagaacccatgtactgaccatccagttttgtttaaatatgtaggttagtaatcatctagtga

SEQ ID NO: 727796 - DNA, 639 bp, Homo sapiens
aaatttggaattagttggcatatagaggaacccttttgtactggaacgtatgaggctggattgtgaaaaggtaatctttcgattgctagacttggttaacttagggctgcaaatctttttcttctgtcaaggtcacttaatatggaatgtttttgtcagactgtcctttgttggaatactttagctgttcagctactttgactcctaggagagaatttagttaaggttcaaagtaattaactggctttgccagtggtgagtcccacaccattattcacttagtagtcatataaatgtttttatttaaacttctctctctycaatgctgagaataaggctttaaattactgattcacctttaaaggaatgttgtgagaattgatgtaatttctgtttctgtttccatctaaacttctttataaaaagagggattagtttttttgttttggggtaagcacctaatttatccagtaaccaacaaccctaaccattggcatatatagtctttcactcagaaataaacaaaaactgtttggtatatctgtatcattgctaatcttgtgcactttactttttgggcagtaccatacatagtctgaggctattgacttaaaccaataactgtactttatgtaatga

SEQ ID NO: 727797 - DNA, 646 bp, Homo sapiens
gttaataaaaaataaaatgaaaataaaagggtaaaagagccagtggcaaagtcttgagtggattaaagccagctcagctaactttcacagcagactatatcattttaaaggggaaaaagcacatctctgttacatkgcttaggaaatatgcttggtatataccctggggcaatcttatctatttgttaagtttccttccaacccactagcctgtgtggccaggagagggagacaaagatcttagagctctctaaataatagaacttaaaacatcagacagagaagagtatattatcttggtgatggtaattctcaatgaggaaaatcctggggagggatgttctgtgggagaatgcctgcaagtttatttgtttagtaggtttgattattcagctgattgaaattcctttcccagatggggagatctgattctcttttcatgaaggaaagaaaagtcacatgctaaagagacgggcatgtctttagaacggcagcaggcaaacccactgctgggatcctggggcttttactagtggctagtcacaggtttacctcctgcctgtgctccttctagctgtgttgaaacccacttgccccatctatgaaccgtgttcagctccattttctgagcccccttatctttttg

SEQ ID NO: 727798 - DNA, 1075 bp, Homo sapiens
gattttaggtttaaaaaaatcttagcttattaaatactttgatgagagccccttgtaattgtttcaatctttgagctcaggaactcatgtcagctcccagtgaagagatctccagtgatggttttgcattgctggtgtttgccgtgttgtgtgtgttcgtttgtgtctgagagtttaaagaggggctggagcactgagccaggtgggccatctcatggctggagggggcagggctgcctgtctgcatttctgggtagcggctgtgccctccattgtgagcatttagctaaaaggaattcagctgacttctatgaggttaaaaggttacttgaaaagaggctcagtaagaaatttgattttagaattagtagtttggcctcagacacagatgagaggaggagtctttctcaggtgtgtctgattcttttttttttttttttttttttttgagacagagtcttgttctgtcacccaggctggagtgcagtggcgcaatctcggctcacagcaacctcctcctcccgggttcaagcgatctctcctaccttagcttcctgagtagctgggagcacaggcacgcgccaccacgcctggctaatttttgtatttttaatagagatggggtttcaccatgttggccaggctggtctcsaactactgacctcaggtgatctgcccgccttggcctctcaaagtgctggtattacaggcgtgaaccaccacgcccggccaagtgtgtctgattctcgtaagtgctgatgagaattattaaactggggcctttcctcaggccctgacgtgtttccgttccgctgtcgcagggaggaccgctgagcatcacctgcacttggagcggagttgtccccctggccggccactgcacacatttcagtgacagctgctccagggcggcttcaccccttctgccttcactcagcgaacgtttactgagcttagtagatgccagggttagaaaatgtgtttttatcccttcgtgaaatttggactgtgtatgcaattttatatgtcatgctcttgcgcatgtaacgtattgtgaccattttcgtcatattaa

SEQ ID NO: 727799 - DNA, 890 bp, Homo sapiens
ataaagtcttcacatcacacatcccctgttagaacttccaggtatgtgtaggaaaccaaatagtgtgcttacattaagaagtgttttcatgatggtgcatttcctacctcattcctaggtggtttaatttgttttcaggctgtttttccttatgataatttactggaacagccgtcctttttcctcctttcccaaggacaccccttggcctgggacggcttgtgtcccatgggtcccttattgcaatacttgtgaaacttgaacctgcacaggagttactggaggatcttgataaagtgcggatttggattctgtcagtttgggatatggccttagagtttgcatttttggcaagctcccaggggatggtgatcacaatttttaaaatttgaagtgttatttacacacagtaaaattcacccttactcttctacagtggtacagatttttgacaaacgcatatgctcatgtaaccaccactacactcccaacgtagaacagtttcaccaccctcaaaattctcttgtcttttcctcactcccagcccctggcaaccactakctgtatctgacgctatggttgtatcttttccagaatgtcataaaagttgagtattcagtagccttttgagtctggcttctttcactcagcagcatgcatgtgagatctatccaaattgctgtgtgtatcagtagtttgttccttttttattgctgagtggtattccattttatgggtccattatagtttatttgtccagacacttcatggaaggacatcagtgtttccagtttttcaatcataaattgatgtttaattttaaaattttggaattgtagaagaaatgcaattcttttttccattgttgttttaggtgacatcactcaaaa

SEQ ID NO: 727800 - DNA, 890 bp, Homo sapiens
ataaagtcttcacatcacacatcccctgttagaacttccaggtatgtgtaggaaaccaaatagtgtgcttacattaagaagtgttttcatgatggtgcatttcctacctcattcctaggtggtttaatttgttttcaggctgtttttccttatgataatttactggaacagccgtcctttttcctcctttcccaaggacaccccttggcctgggacggcttgtgtcccatgggtcccttattgcaatacttgtgaaacttgaacctgcacaggagttactggaggatcttgataaagtgcggatttggattctgtcagtttgggatatggccttagagtttgcatttttggcaagctcccaggggatggtgatcacaatttttaaaatttgaagtgttatttacacacagtaaaattcacccttactcttctacagtggtacagatttttgacaaacgcatatgctcatgtaaccaccactacactcccaacgtagaacagtttcaccaccctcaaaattctcttgtcttttcctcactcccagcccctggcaaccactagctgtatctgacgctatggttgtatcttttccagaatgtcataaaagttgagtattcagtagccttttgagtctggcttctttcactcagcagcatgcatgtgagatctatccaaattgctgtgtgtatcagtagtttgttccttttttattgctgagtggtattccattttatgggtccattatagtttatttgtccagacacttcatggaargacatcagtgtttccagtttttcaatcataaattgatgtttaattttaaaattttggaattgtagaagaaatgcaattcttttttccattgttgttttaggtgacatcactcaaaa

SEQ ID NO: 727801 - DNA, 623 bp, Homo sapiens
agttaatgggaaaactttattctgccagtacatattttgtttatttaatctcgctctgttgcccaggctggagtgcagtagcactatcatagctcattacagcctcaaactcctgggctaagctatcctccgctttagcctcccaagtagttaggatttcaggtgcactctaccgtgcctacttttaaagtttttttttagattcagagtctcaccacgttgcccaggctagtcttgaactcctggtttcaagcgatcttcctgccttggcctcccaaagtcctgggtttacaggcatgagccactgtgcctggccttatttgtttttgttttttaagagcagtcttaggttcacagcaaaattgagagaaaggtacggaactatcccatattcccccacccttatacgtgtacagcctcccgcattatcagcatcccagtaaatcttttaaaactaatttttgctgtgcagtgagcttgcttctgggtagaattaacataatccttgtggctcaatctttacacctttaaattagctgacattttcagtattgcactggtctattaaaaagactaggaagttatacactgcttagcaaagaaaactatygtcagtgaagaca

SEQ ID NO: 727802 - DNA, 630 bp, Homo sapiens
cattgtttggttcctttttatgataataattttccattgcatacatataacatgtttttatttctgcatttactatttgacagacacttggatcatttctagtttgggctgttaaggttgatgcagccacgaacatgtccttggtaccagtctctatatggacgtatgttttcattcactgagtaaacacctagtaagattgctgggctgtgcaacaaggtgactatttggggaactgccctacgttgtctggagtagctgcaccatcttacatccccagtggccatgtatgaaagcccatttctctacatcctcaccgatgctggttatagtgtatcctaagggagaagggtgtgttccatttgaagtgatgttagagactggttgggatcagagaagagaagcaaagagttaaaagtgggatagaggccaggcgcggtggcttacrcctgtaatcccagcactttaggaggccaagttgggtggattgctttaggtcaggagttcaagaccagcctgaccaacatggtgaaacctcgtctctactaaaaatacaaaaattaaccgggcatggtggcaggtgcctgtaatcccagctcctcaggggctgaggcaagagaatggtttgaa

SEQ ID NO: 727803 - DNA, 704 bp, Homo sapiens
tacagccaggatttccagatcacacccattcccacctttttagaatttttgactattttccaaagtcttgaattcaatgaggtgcaggtggaagaaagcgtttacaaagtcagtgggttacaggagagctggtgtgggctgaggcagagtgggtagagaggctcctttcaaatggaagcctctggaacccgcagaaagcaagtgtaaggtggggcaatcttctggaaagctaacagagaaaggctttagacccaacactcccattcacaaacacagacaggggcatctcaatgttttcttaaatctactctttctatatagacacaaggaaataattaaaaggggataattctggtttagttatttcattaaattatcaacaaacaacttttgaaacaaaaacggtaaaaaaaagataaaagtggaagtcaataaaattattatctgtttaataatctgtatctgtkgctcagatacagatcaggcaaaccaaccaaggatgaagcccctgctgtggatgaagtctccagctgtagatgaagcccccagcctatggatgaagtctccagtcgtggatgaagtccccagtcatggatgaagcccccagcccgtggatgaagcccccagtcatggatgaagcccccagcccatggatgaagcccccagcccgtggatgaagcccccagtcatggatgaagccccca

SEQ ID NO: 727804 - DNA, 953 bp, Homo sapiens
tgagacggagtctcactctgttgcccaggctggagtgcaatggcatgtctagatctttttcatcttgcagaactcaaattctgtccccattcaacaccaacttcccattcctccctcccccagcccctggcacccaccatgctagttcccatctctatatttgggtactctggatacctcctatggatgggaccatacactacttgtcctttgaaagtcctttttaaactggaaagtgctgcatgtgtaataccttcaggggcttattattattattattattattattattttgagatggagtttcactctgctgcccaggctgaagtgcaatggtgctatctcsgctcactgtggcctctgcctcccgggttcgagcaattctcctgcttcagcctcccaggcagctggtctacaggtgcccgccatcatgctaaatttttgtgtttctagtagagacggggtttcaccatgttgatcaggctggtcccgaactcctgatctcaggcgatcagcccacctcagcctcccaaagagctgggattacaggcgtgagccatcgtgcccggccaattatcatattattattattaccagctgacccagttagtgtggcctggaaaatgttgtcaaccatcataaaataaatgaatccttgatgatactgagcttccaaatgccagtcttcaaattttgcactgcaactcagagggtgtaaaattaattccaatggctgcaaccagcattttgttaaagtgaggcagcccagagctgactccagctggagagcgaactgttcaacgggagggatggtgagggttcctggaatgttgcttcagttacctgaatgcgtagatatgctctggataacgatggaagatctacttcttgctggaagtttggatggaaaatcttttggaaagtgctgtcctggaacacctggcccagctgtc

SEQ ID NO: 727805 - DNA, 583 bp, Homo sapiens
agtttcagctactcaggaagctgaggtgggaggatcgcctgagctcaagaggtggaggctgcagtgagccaagatcacaccactgcactccagcctgggtgacagagcgagaccctgtctccaaaaaaaaaaaaaaaaatagcgaggttgaactctcccggctcagcaggactcyaggactgggaagccccgtggttcctcaccctgtcctctgtgttgggatggggtgggggtgcagcaagcatccctacatcaaaacaggatgttcagatttagtctgctcatcagactatcatcatccacatctgcagtcatcactcagggatgacagcttaaaatgctacatgaggagcaaataggaaggtctgttttgcaaagccatgacaattaatggagctcgttaggtttgtgtctaacttgttttcccagacatcccaagagacagctttctatgacttcccataaatctgagcaaggaagaaggaatgagagccacccacggggctcaagggcccgggcctgggaaacagctgagtccctgcctgagcgccatggtgctgagatcctgtgacctgccccccag

SEQ ID NO: 727806 - DNA, 1148 bp, Homo sapiens
agcctaggagtttaaggtttcaatgagctatgattgtgcccactgcactctaacctgggcaacagagggaggagaccctgtcccaaaaaaaaatttgttttaagatgtatatcatggcatttcaagtaccacagtgtagatttttctgccaagggcagatcccaatgatccacctgaagacaaaaaggtatacagagaagtaggagggccaaagggagaaacattcagagttgaggtgccaaggccactaaaatgctattaaaaggggtgtaataaaaaccaatatttgttgaatggcatccagtatccagtcctggggcagccataaggaaattcatacctgggcgagagatttaggtttaaaatcgattcttgtattgggtagacctcaatgcaggggaaattccagaccagctttggaccatggcaactctactcttaagaaggggaacataagaaagaaaaggtactttgtcccagatcactagcccctcagttacttgaacatcatggtgtagatctggctgtgagatttctctgcaaggctagaaagaggaagattgagaaacattcaaacagattgataaaaagggttcttgaactcaaatttgaggaagtgacctaagatttcaaaagatgttagaattataagcaaattatgtggatgtttccacttctgtttaatctgtggacaattacattaacagatggagcttctgctggggcaatctgagaaaacttaaaaaaaaaatctcagtgactatcactaatgttatctttcaagctgrcatccatgatcttattttttattttattttttgagatggaatttcactcttgttgcccaggctggagtgcaatggcgcaatctcggctcactgtaacatccgcctcccaggttcagtgattctcctgcctcagcctcctgagtagctgggattacaggcatgcgccaccatgcccggctaattttgtattcttaatagagatggggtttctgccatgttggccaggctggtcttgaactcccaaccacaggtgatccacccatctcggcctcccaaactgctgggattacaggcatgagccagcacgcccggccatcatccataatcttaatttcatccacagagaaaggtagagagcag

SEQ ID NO: 727807 - DNA, 397 bp, Homo sapiens
atctctactaaaaatacaaaaaattggctgggtgtgrtgacacacgcctgtaatcccagctactcgggaggctgaggcaggagaatcgcttgaacctgggaggcggaggttgcagtgagccaaaatcgcaccattgcactgcagcctgggcgacaaaagcgaaactctgtaacaacaacaacaacaacaacaaaagaagataagagcctgcttgagaaaggaggtgaaagttcattcagtttgaagcattttgagttggctttgaagcctcttccatgagacctccaacaatttctctaagccagaaatcacctctttgcactccatagtatctttttcatctcaaattatttaaatctgctgtatttacaagtttgtctttccttttttttttttt

SEQ ID NO: 727808 - DNA, 2121 bp, Homo sapiens
ggacctgaacaactaccgtgctgagctgatcgagcacccgctgaacatcagcctgggagacgtggtgctgtacatgcccagtgcgccgctcagcgggcccgtgctggccctcatcctcaacatcctcaaaggtgagtggtcgcaccacagccgtgtggtaggacccatgacactgcctctctctccccacgccccacccctcctgcatctctgctcgccccccatgccacgtctttccatcactgagctcccgaggtgtgtccctgcgtcacagttcaccatgtcctgaaggaggcagtgcagagcgacagggctgaagcgggcaatgctcaagggttggaggaggaacaggagtcatcaggagggagagaggtgcaggagctcagggctgcagggccggtccagagggtaccccggtccagtgggtgaccctgccacttggtcattgaatggccagagctgatgcgtgacgtgaggtccaggctcgggagccctcaccttacttcactctcaccacagccttctgaagcagctgctgctattggttattaaacgctccttgaggtgggcaaagtggctcaggcaggtgttaaccctctgagcccctcagagcctctggggctcagcaacatgcacctggctctgatcaaccagggtacaacttctcccgggagagcgtggagagccccgagcagaagggcctgacgtaccaccgcatcgtagaggctttccggtttgcctacgccaagaggaccctgcttggggaccccaagtttgtggatgtgactgaggtaaggggcaggggctggcccactgtgggtgtggggcctgccatagaggcatcaggtgggctccccagggtggctacagcctcacatatgctttatgaatccattcctgccacagacttcgattgcgggcctactgtgtgctcggatggactcgtgggtgacccccagtcttggcttctgccgcacagaactgacagtgtggggaattagtggccaccctcctacctcaggtcctttgcacatgctgtggttctcgagtgctcagtgctgagatgaggaatgcatgggggcattgcagccctcgggcatggtgagatggatgggtgaaagggagagggccaggtgaacagagacctyggccacccactccctgtcactccaaactaacgcttcccagatgccaccctcagccctgcaccacctgacccactcactcagtagttgccccagctccacactgggtccctataagaccctgtcatatcccttcccgctgaggatcctcacatccctccttacctacttgggtccttggcattcctgggcggatctgcagacccccccacactgaccagtgacctcccaggaggggcgtcagctgcccaggtggtgtcttctctttccccgtgagcattctgcacctctgactcccgctgcagccagtgacctggtgtcttgtctctctgaggggacagagccactgcagtgtgtccctctgccctcctttttggctaaggccagctccttcatctactcgctggctcggggtgctgttcctacaatgctcctttctgcctctgatgatttacttctttatcacggcttattcccgaaagaaaggcagctgttgttgctctagaaacttctatctgctgcctccttctgtcctttgctcctcttagagcaaacatggctgggctatgtcctctctcccttcagggtatcccctcccctgctctatccccatgccaccagatcgccatgtccagcctcagtttccccatcaggccccactcagcagcatctcacacagctcaccacactctcctcgagttttcattttgcaaattttcgcacctacaaaaatgtaaaaaaaccccaaaactgcccaagcatcaatgctcccttttcctggagtctgcagtgtggatgtttctgtcggatttcctaactctctccgtctccacccacatctattgggattcgtgtttttctgagggattccacagtaggttactgatgtcgcacctcagggtgtgtctcaaaagtgagacttgaacatagcacagcaggatgtcggggtgacacaacctgttgtcccttctcttta

SEQ ID NO: 727809 - DNA, 873 bp, Homo sapiens
gagggaaggaagaaggttaaggctgaagctccatggccatctagggaaaatgcacaaggcaaaaaaccctgccaactctgggtaccagcgacactcagacaccaacagagccatcaaccagaagaacaaagttgaarctagaaaatgaaatcagctctcatccaaactcccacccctcctccccctcctcccaatcctggggggacttcattaaagctggttgcttcacaaaggccaagtctacacgggtgcatgtggcttctgcctgcatttcctttctgcagccagtggatgttcagttagtgtatgaaaaaaaaagaaaaagaaaaagaaaataatgaacaggtattgccgagtctcttctttttaccaaatataaaagtaaaacaccaattaaataaatagaatgtgtctccaaagatttccaaatttagttctttggaaggaatattttatagccttcatttcagctaaaataatctaatgacctaatggctattataagaggactcaatgttagcggtacaaggaaaaataattagaatacaggaccttagttacatccagataaggaaaattaaagtcaaggaaaaaagccattgattgctgctgcagataaatagtctacaattctctctgcagcccccaacaggaaaaaaaaaggaatttccagcaggctgacccccaaactatattctttttctttgagacagagtctcgctgtcacccagactggagtgcagtggcgtgatctcagctcactgcaacctctgcctcccaggttcaagtgagtctcatgcctcagcctcctgagtggctgagattacaggcatgtgccatcacacccgactaagtttttgtatttttagtaga

SEQ ID NO: 727810 - DNA, 873 bp, Homo sapiens
gagggaaggaagaaggttaaggctgaagctccatggccatctagggaaaatgcacaaggcaaaaaaccctgccaactctgggtaccagcgacactcagacaccaacagagccatcaaccagaagaacaaagttgaaactagaaaatgaaatcagctctcatccaaactcccacccctcctccccctcctcccaatccyggggggacttcattaaagctggttgcttcacaaaggccaagtctacacgggtgcatgtggcttctgcctgcatttcctttctgcagccagtggatgttcagttagtgtatgaaaaaaaaagaaaaagaaaaagaaaataatgaacaggtattgccgagtctcttctttttaccaaatataaaagtaaaacaccaattaaataaatagaatgtgtctccaaagatttccaaatttagttctttggaaggaatattttatagccttcatttcagctaaaataatctaatgacctaatggctattataagaggactcaatgttagcggtacaaggaaaaataattagaatacaggaccttagttacatccagataaggaaaattaaagtcaaggaaaaaagccattgattgctgctgcagataaatagtctacaattctctctgcagcccccaacaggaaaaaaaaaggaatttccagcaggctgacccccaaactatattctttttctttgagacagagtctcgctgtcacccagactggagtgcagtggcgtgatctcagctcactgcaacctctgcctcccaggttcaagtgagtctcatgcctcagcctcctgagtggctgagattacaggcatgtgccatcacacccgactaagtttttgtatttttagtaga

SEQ ID NO: 727811 - DNA, 873 bp, Homo sapiens
gagggaaggaagaaggttaaggctgaagctccatggccatctagggaaaatgcacaaggcaaaaaaccctgccaactctgggtaccagcgacactcagacaccaacagagccatcaaccagaagaacaaagttgaaactagaaaatgaaatcagctctcatccaaactcccacccctcctccccctcctcccaatcctggggggacttcattaaagctggttgcttcacaaaggccaagtctacacgggtgcatgtggcttctgcctgcatttcctttctgcagccagtggatgttcagttagtgtatgaaaaaaaaagaaaaagaaaaagaaaataatgaacaggtattgccgagtctcttctttttaccaaatataaaagtaaaacaccaattaaataaatagaatgtgtctccaaagatttccaaatttagttctttggaaggaatattttatagccttcatttcagctaaaataatctaatgacctaatggctattataagaggactcaatgttagcggtacaaggaaaaataattagaatacaggaccttagttacatccagataaggaaaattaaagtcaaggaaaaaagccattgattgctgctgcagataaatagtctacaattctctctgcagcccccaacaggaaaaaaaaagkaatttccagcaggctgacccccaaactatattctttttctttgagacagagtctcgctgtcacccagactggagtgcagtggcgtgatctcagctcactgcaacctctgcctcccaggttcaagtgagtctcatgcctcagcctcctgagtggctgagattacaggcatgtgccatcacacccgactaagtttttgtatttttagtaga

SEQ ID NO: 727812 - DNA, 1638 bp, Homo sapiens
ttgattaccttaaatatcattgtcttctgacaaggtgttgctgttgaaaagtttgataatcaaattttccttataagtgatttaatatttattttatttacttagatgcccaaagaatattattttcttttttcaaaaagtccaatagcttaactattttgtattggttatactggatcaattttcccaagtgggtggtgggctgtttaaatacatatgctttctgtttaaagttttccttagagcatatgtatttaaatgcatatttaaagcaatgtatttttagtattccatccccctacttttttttcctcaaagattcctattatatgtatattggattttattttttttagatagggtcttgctgtgtcacccaggctggagcataggtcaccgtaacctcaaactcytggactcaagaaatcctcctgcttcagcctcctgagtacctagaactacagacatgcatcactgaacctggctaatttttacatttttttgtagagacaggggtctcgctttgttgcctaagctggtctcgaactcctggactcatgtgatccttccaccttggcctcccaaagtgctggaattacaggtgtgagccacgcacctggcctatattacatctttatctttcttctgtatctgtattttctctcacacctctttcattttctctgattttaaaaattttattgttttccagcttgttttcttagagcattatcttttatatttatttactcttgtgttgcttctagcatagtttttaattctaatctattttaatcttttatttctaaattccttgagttccatctcatctcttttcaagtcattctattttctacacatctcaagttgattttttcaaattgtgatttacattgatcttcataacttccattatttccttaatttcatttagcttattttgaaatgttaggctacagttttcacctgttttgtgggcctttttgataggcattcattattcatggggaagtcagtctgatcttaatctcttttttcatgaaacattgtatgggattcaactgctttttcttttctgttggtcattttcaagtgaaatgagtgagccaggatttcttctagcttcatggctcccaggatgcccatctggtgtgttcacagagtgatacaaatatagtcagattttctgagatctgcctactctgtatcccgtcccatcttcctcttcatttttattttgacctctttccttttcacctttttttttcaactcagcttagactttactccgataatttttttttttctccaaagcaggattttgtcttagaagggaactttagtttctgacttctcagaattcatagagcctaaaacatttcaatgctcagtcctcttgcactcactggcaaattagaatccactagatctgtaccctcccacccgagtctcacatgctctcctgagacagcccacttcactttccagtgagtactttggaaaactttgtaggtttcctgttctttggctatcaggtggccccattactttccctcacaaatgctgatatcacacaggttttgaaattgttgatgcttggtcccattcatatttgggatttgtgaggatcttctgtca

SEQ ID NO: 727813 - DNA, 1064 bp, Homo sapiens
tataatatttttaaaacctctcttacttgttttcctataatgctaatagcacacaatttattttttaagaaagaattcattagatcaggtgtatttaggcagataataaatacaattttaattttgtcatcagttcaaagattgattcagataaagattgtttctaaatgtaccaagatctttcccagaawtagaagcagtctcataacattggcatttttttacaaaatcatttgttacatatgaattacaattcccattttgtggtttctacccaagacaagtgactttgctgaaattataatacccctcagttgtacattatgcatacagtaagatttattaaaataagcacaaatcaatgagctttagaattgctacattaacttgattattaactcctaaagctttttctgagagctttccattaaaataaatgggcctacctttgattcagaaagcaatttgggattcaaaaaattgtaacgtctgtgatttggtacaatgtatttattttcctctttaagcaactgtattttgcacttttaagatgtttctttttaaagactaagaaagctacttatatcctgataatcgagactgaaaaaaaaattcttttccaagaaattgcacaggagaagcctctaaattacaggtacaaggtatacataagaaataatcattttaacactagaacacattttcctttcacaaacaatatataactatataaatgtgctcttgccagtttctccactctgttcctttctcggttttagaacttctacagacagctttctcacattttacctttcttcttccactttgataggattgtatttgtgtgcagatgcaatgccaaattgagacggaagatagactaaaagtagacaatattaaaatgtgaaatctcagctttgggtaaccatctatttttttatgcatgtattcatcaaatagtgatttaatatcttctctctgtgcttggcattgtgctgggagatgggaatacgggatgcaagacagactacccgcccccagggatcttgatgttttgttgagga

SEQ ID NO: 727814 - DNA, 1064 bp, Homo sapiens
tataatatttttaaaacctctcttacttgttttcctataatgctaatagcacacaatttattttttaagaaagaattcattagatcaggtgtatttaggcagataataaatacaattttaattttgtcatcagttcaaagattgattcagataaagattgtttctaaatgtaccaagatctttcccagaaatagaagcagtctcataacattggcatttttttacaaaatcatttgttacatatgaattacaattcccattttgtggtttctacccaagacaagtgactttgctgaaattataatacccctcagttgtacattatgcatacagtaagatttattaaaataagcacaaatcaatgagctttagaattgctacattaacttgattattaactcctaaagctttttctgagagctttccattaaaataaatgggyctacctttgattcagaaagcaatttgggattcaaaaaattgtaacgtctgtgatttggtacaatgtatttattttcctctttaagcaactgtattttgcacttttaagatgtttctttttaaagactaagaaagctacttatatcctgataatcgagactgaaaaaaaaattcttttccaagaaattgcacaggagaagcctctaaattacaggtacaaggtatacataagaaataatcattttaacactagaacacattttcctttcacaaacaatatataactatataaatgtgctcttgccagtttctccactctgttcctttctcggttttagaacttctacagacagctttctcacattttacctttcttcttccactttgataggattgtatttgtgtgcagatgcaatgccaaattgagacggaagatagactaaaagtagacaatattaaaatgtgaaatctcagctttgggtaaccatctatttttttatgcatgtattcatcaaatagtgatttaatatcttctctctgtgcttggcattgtgctgggagatgggaatacgggatgcaagacagactacccgcccccagggatcttgatgttttgttgagga

SEQ ID NO: 727815 - DNA, 628 bp, Homo sapiens
atttgtttctattgaaggccacagggagagaaacttctagcaaatgctagagggtggctgaatagaccggctctatagttttgttcatgaaacatatgatttcatgaactatctaattgtatctctaggkttttttttggtcatttttaagccaatccaataatattaaaaactataatactatgagagtgcctgaagtttccttaaatgcacatctgaaaaagaaaataatgaggtcccaaacagaaaacatgaaatcaaataaaagtataaattccacattggagatgaaagaatgatgttatagctatggatataacaaaagtcccaccggttaggggaaaaacaactcaatgtccagtaaatgtgtatttaaaaaaatgacagataggaaatatagcattgtatagcactaaacacagcaggtctatcagtggtttcagttatctgtgcgtgtgagtatgtgtgtgtgttttgattttgaaatctcatcatctaaaccagtatctctataggacagctttaccctgtcattaaaacagactctcagaggtctcttcaagcatccatcgtctgcttttatcttctctgtaacattccttctggttaactgctcatggctttaaca

SEQ ID NO: 727816 - DNA, 615 bp, Homo sapiens
cacaccagctttctttttctaccttatggtccgttagcattggaacctagtccaaacactttacttggtgaaaataaagcttaagaaaactcaatttggggatgaaagagcacaagataatttcatgttatttgaccaccactcctggatttctgatacataggttatcttttgtgtgttccaactcatctaagcttttaaaatttgccaggtttggaaatcactctttgttgtggttacttcaggccactaagttgttatggactaatccaagttgaaaaaagagagaaactagaatttaattattttggttaggtttgtttttctctgttagtttttaattcttccacttagatgttcctcaacaaattatattttacttttttaaggtagtggtgctgtctccatgactataacctctagaatattttagttatttttacagttattagraataaagaagcagatgtaagttatgctttctattcaacttcactgaattatagctggaagttgcattttttatggatgaattatatatattttactgtttattgtattcttagcaaggatcatttagaagaccaagaaaatgaccatattatacaaaatatt

SEQ ID NO: 727817 - DNA, 527 bp, Homo sapiens
ataactggaaacatcttgctaaaagggctaaaaatgtatttttaaagaaaatcttctaaaatattctaaggtctatttaaatgtatggaacttatatatgcatatatacaagtcttttttttccttcaagaaaataattactttaaaaactttgtttaraaagttttttttggtcttaaggttacttaaagaaataaatagctttactttctaacccaatgcaacagtcctcaaaatttcccattgttaaatcatgaataaggtactaaaacaatttttgctggagcaaatcatgaagagtttagagtacaaaagcaaagggaattatcaaggcaacactcataattccttcattattacatagattaaaatatttataggctttgtactgaaatgttaaaaaataatcttttaaaattctaacattgttacaatattgtgggaaatgaagaaaacactattgagcattcaatacgtgttgggcattctgctgcaaattttttatatgcatctcatttaatttttcc

SEQ ID NO: 727818 - DNA, 670 bp, Homo sapiens
gcaaaatgcctcatgtcattactcacaattagaaaacttaatgcattctcaatgacactatgggaaacagtgctacatttgccatcctctctcttgatctctttaccagtgaccaacagtggacagaccaggagattgtatttgtagccttcaaatagcacaaacttgaatattttctagtaaatttcctgattcttctcttgcgatctcctgacttctgaaaaggcagaatgacctatcaggaataccacagatactaatgggcaggttgcaggtagtcttaagaaaatttccaggctgggcgtagtggctcacacctgtaatcccagcacttttgaggtccagagtttgagatcagcctgaccaacatggtgaaaccctgtctctactgaaaatacaaaaattagctgggcatgggggtgcatgcctgtagtccaagctgcttggggatgggggsgctgaagcatgagaatcacttgaacccagaggcagaagttgcagtgagccgagattgcaccactacactccagcctgggcgacagagtaagactctgtctaaaaaaaaaaaaaaaaaaatttccaatccacacccctgcaagaaatggaagatgataaagaggggaaaatgcataattaattttgctctcgtaagaatctccttaaaaatcta

SEQ ID NO: 727819 - DNA, 670 bp, Homo sapiens
gcaaaatgcctcatgtcattactcacaattagaaaacttaatgcattctcaatgacactatgggaaacagtgctacatttgccatcctctctcttgatctctttaccagtgaccaacagtggacagaccaggagattgtatttgtagccttcaaatagcacaaacttgaatattttctagtaaatttcctgattcttctcttgcgatctcctgacttctgaaaaggcagaatgacctatcaggaataccacagatactaatgggcaggttgcaggtagtcttaagaaaatttccaggctgggcgtagtggctcacacctgtaatcccagcacttttgaggtccagagtttgagatcagcctgaccaacatggtgaaaccctgtctctactgaaaatacaaaaattagctgggcatgggggtgcatgcctgtagtccaagctgcttggggatgggggggctgaagcatgagaatcacttgaacccagaggcagaagttgcagtgagccgagattgcaccactacactccagcctgggcgayagagtaagactctgtctaaaaaaaaaaaaaaaaaaatttccaatccacacccctgcaagaaatggaagatgataaagaggggaaaatgcataattaattttgctctcgtaagaatctccttaaaaatcta

SEQ ID NO: 727820 - DNA, 1553 bp, Homo sapiens
cgggaggctgaggcaggagaactgcttgaacctgggaggcagaggttgctgtgagccaagtttgcaccactgaactccagcctggtcctgatacacttagaagtcaaaaaccgtcattaggaaaacctcttcagttaactacagttctgcatattcatctgtgactctaaaagcatcctgatttatgttgtctttggagggagtgaggggacctaacctcctttcacagccccgcaagtggggtccacccaggagtgagtaagagtggcatggcttccccctagtggaggggaggccggttctttcctgcactcagccccggccactcctaccttccaggcatgtgtttacaggccagaaatgttaaggtctgaagtaacaggatttgtagtacccagcctcttgctgcttttgaaatcttttctttataggccattttgaattaaggaatctctgggtgagggagaggcttagtaaacaaactaggtgttaggcaggctgcamgccacccaggcacaagatgaccacacgaggctgaggcacccctgtgtattcaggatgggaaagaagggaagtgatgctagccgaggccagctgtgtgttggggggtatgcggtactggggacgtgggagtgagttctgtcttcagtaataacaagggcaaaaatgcactggaatccagttattttgaagggaacttggcactataaacaagcggaccttgactcttaaggattttgtgagagcctggcaagttagtaacttgcctattccattaatatttattgagcatcagccacacattaagcactatgtgttaaaccctcacaagtctagtttgctgtttctgtcatcctgtcttctcatcatcatagcccaacaaagctctagtatattgccagcaatggcttcccatttattaaataattgctatgtgctagatactgtcctaagtgtattacaagcattattccatttaatcttcacaaaaattttcctttcacatataaggaaactgaggctcagagatcttagatagtttgattagaagtagtttgatgagtgtataaatgaaaaacagtatttggccagatgtggcagctcacacctgtaattccagcgctttgggaggctgaggcaggcaaatcgctagagcccaggagtttgagaccagcctgggcaacatggcaaaaccccatctctacaaaaacgcgtaaattagccaggtgtggtggcatgtacctgtagtcctagctactcaggaggctgaggtgggaggatcgcttgagcccaggaggtggaggttgcagtgagctgagattgtgccactgcactcccagcctgggtgacagagtgagactctgtctcaaaaaaagaaaaaagagaaacagtattttaaaacctagttctacctgatttatccactccttacatgccttctaaatgagcaaacagagcaagactctggccatgacctctatattcaggctggctggaatattttggactaaaatcagtaggtagcaagacacagtgcctaaatccctgccttt

SEQ ID NO: 727821 - DNA, 608 bp, Homo sapiens
gaataaacaactccaagaaagacaaatacagacagacggccaataaacatattaaaatctgtcaccaccactgataattaaagaaatgcaaaataaaagagccacaaaatactggttttgacacattagcgaggtttaaaagttgttggtgaagatacaggggaaagggtgctttgagcccccttctccacgtctgtcagtagaggagtggatacagacattgggccacatccctaagggaattctgcacagcctgttatatgatgctgtaaactctttattagtaaaaattaatcctatattgttcgctgggtgcagtggttcatgcctgtaatcccagcacttagggaggctgaggtgggtggatgtcttgagctcaggagtttgagagcagcctgggcaacatggcaaaaccccttctctacaaaaaatacaaaaattagctgggcgtgatggcrtatgtctctggtcccagctattcaggaggctgaggtgggaggatcacttgtgcccaggagttagaggttgcagtcagccgagatcatgccactgcactccagcctgagcgatggagcaagactctgtctcaataataataataataataa

SEQ ID NO: 727822 - DNA, 664 bp, Homo sapiens
gctagacaccttacagcagtaaatttatatcttttctcaaggaaggtatctttttaggtctttggaaattcctacaaattgcttttccagggcagtaagcaccagccaaagataactagctgtagaaggaagtgattccaatggtaatgacacttagaaatttactaatgataaatttttctgtattattctttataaagtgattctaaaaagctacatatatgatactttactgtaaactttgggatctgatactaaatttttcttggctgaatgaaatcaccttggaatcagtgacttcattgttctccattttacacttctttgaataacagtctgagtatgtttcatttgttgtcataacttttgtagtttaagaaagtctcacctcacgatagkcaaataggtagtgttaggatttgctaatgttctctgtgacaaaccattctggaggtgtcagaaaataaataaatctgagatttcttctctcctatgtggtacccagatattctgttttagaaatttctgggtggagctcataacttaaatgtttattttgtcatggttcgagaggcagtaagcaagatatcagagacactcctctccccaaggctgtgcttgcctagaacaaattgttttgtgtctatatatatccattatttca

SEQ ID NO: 727823 - DNA, 664 bp, Homo sapiens
gctagacaccttacagcagtaaatttatatcttttctcaaggaaggtatctttttaggtctttggaaattcctacaaattgcttttccagggcagtaagcaccagccaaagataactagctgtagaaggaagtgattccaatggtaatgacacttagaaatttactaatgataaatttttctgtattattctttataaagtgattctaaaaagctacatatatgatactttactgtaaactttgggatctgatactaaatttttcttggctgaatgaaatcaccttggaatcagtgacttcattgttctccattttacacttctttgaataacagtctgagtatgtttcatttgttgtcataacttttgtagtttaagaaagtctcacctcacgataggsaaataggtagtgttaggatttgctaatgttctctgtgacaaaccattctggaggtgtcagaaaataaataaatctgagatttcttctctcctatgtggtacccagatattctgttttagaaatttctgggtggagctcataacttaaatgtttattttgtcatggttcgagaggcagtaagcaagatatcagagacactcctctccccaaggctgtgcttgcctagaacaaattgttttgtgtctatatatatccattatttca

SEQ ID NO: 727824 - DNA, 664 bp, Homo sapiens
gctagacaccttacagcagtaaatttatatcttttctcaaggaaggtatctttttaggtctttggaaattcctacaaattgcttttccagggcagtaagcaccagccaaagataactagctgtagaaggaagtgattccaatggtaatgacacttagaaatttactaatgataaatttttctgtattattctttataaagtgattctaaaaagctacatatatgatactttactgtaaactttgggatctgatactaaatttttcttggctgaatgaaatcaccttggaatcagtgacttcattgttctccattttacacttctttgaataacagtctgagtatgtttcatttgttgtcataacttttgtagtttaagaaagtctcacctcacgataggcmaataggtagtgttaggatttgctaatgttctctgtgacaaaccattctggaggtgtcagaaaataaataaatctgagatttcttctctcctatgtggtacccagatattctgttttagaaatttctgggtggagctcataacttaaatgtttattttgtcatggttcgagaggcagtaagcaagatatcagagacactcctctccccaaggctgtgcttgcctagaacaaattgttttgtgtctatatatatccattatttca

SEQ ID NO: 727825 - DNA, 1888 bp, Homo sapiens
cagagtcttacatcaggaggcacattatgtcaacttttccacttgttagtgatatatctttgatcacttagtttaagtggtgtctgttccccctcctgtagaattactattttctctttctaagtaataagtaattgtggggagatagtttgagactatattcctcatcaaacttatacccactagtttttgcccactaataatkttttacaccatcattacttctaaacttactaatggcccaatcatactggctcctgtgtcttttgacatttatcttcatccgtcttaagcacttttttgctttctggcacaataagatgttccaggttttctggtgttttcctgctctagccctgaatcagccatttcatcaaggagccctggttccttttaatggagaatgatatttagaaaccaagatttgggtgctgtaggtgctcattcatatggtgtgttattgcttccagttggtcctttttattatccattcatttggatacaatggtgagggcgccactgaagaaagtgtggcttagggatggaaaggggaaaggagccagatgacctaggtagagactcccctctccccctctagctctccaggtcttccccactttctctttcctccctttccctcttcatcatgacctcatttcccttttcttgatcaaaattcctctggagattccagctgtgggaacctctgaaaccacgtgctgcagctacacgtgtgataccagaggcagacaactatgtgacctttgtgtgtgaaaagcaaaggcaaagacaatttatgagaaagtttttgctgagaacaatctggtgacagggtgattggggaagacacatttggaagatttccacctggacgtgttccttttccctgcctgaaaagcactcagagcagagcctgtgtggaggctgggatagggtgctgtgggaggtctgttctccagataacctctccaaggctctggggcccaacgaggaggatttaagtgcctggtgaagtccactctctgtgtccacaagtcacagagacagtttaaaatgaaataactggagttcaatgaaagccacttaaatagctttcttagttatgtaaatgtagggtgaagaatgagtggccttggtcccccacctggagttagtttattgttttgcgactagatccaaagcctcctctccctgagatctctggtatgcaaagctggtccctggaggaagcgcatcagttgacagagggagcccagaatctctgtgagggaagaaaacactatccaactgctgctcctgggatttgaagtgaagagaatttgttgggatgaagtgaggtggccacaataaaggcgctggggccatggggcttctgaaatgagattaatatggggaacacctgagtctagggtggtgcccggggctaacaacaagaacccacctgtgtttcctggggtaaggctgtccttagcatagtgtgaggctaactgctgggagctctggagactctgccatgctgacattgtgcctgtgctcctggccagggactgccacctagatatgagtcacagtggggggcccctgggctccagttgactttgaggagtgatactgtaccctgtgaggacgctatgagtgtcctcaatagtgatgtggtagtgctggtcagacccacaatccctattttccttgtttttttgtgtgtttttttttgttttttttttttaaacacgaaaaaacaaacaaacaaaaacctcagaaagtgaaaatccctaaagggagggactggacgtgtcatgtaaattcttgattggttaacagaagaaattaaaagtggattgagggcacctttgtgctctgtgcccaagggaaagttcaaacagctgca

SEQ ID NO: 727826 - DNA, 1888 bp, Homo sapiens
cagagtcttacatcaggaggcacattatgtcaacttttccacttgttagtgatatatctttgatcacttagtttaagtggtgtctgttccccctcctgtagaattactattttctctttctaagtaataagtaattgtggggagatagtttgagactatattcctcatcaaacttatacccactagtttttgcccactaataatgttttacaccatcattacttctaaacttactawtggcccaatcatactggctcctgtgtcttttgacatttatcttcatccgtcttaagcacttttttgctttctggcacaataagatgttccaggttttctggtgttttcctgctctagccctgaatcagccatttcatcaaggagccctggttccttttaatggagaatgatatttagaaaccaagatttgggtgctgtaggtgctcattcatatggtgtgttattgcttccagttggtcctttttattatccattcatttggatacaatggtgagggcgccactgaagaaagtgtggcttagggatggaaaggggaaaggagccagatgacctaggtagagactcccctctccccctctagctctccaggtcttccccactttctctttcctccctttccctcttcatcatgacctcatttcccttttcttgatcaaaattcctctggagattccagctgtgggaacctctgaaaccacgtgctgcagctacacgtgtgataccagaggcagacaactatgtgacctttgtgtgtgaaaagcaaaggcaaagacaatttatgagaaagtttttgctgagaacaatctggtgacagggtgattggggaagacacatttggaagatttccacctggacgtgttccttttccctgcctgaaaagcactcagagcagagcctgtgtggaggctgggatagggtgctgtgggaggtctgttctccagataacctctccaaggctctggggcccaacgaggaggatttaagtgcctggtgaagtccactctctgtgtccacaagtcacagagacagtttaaaatgaaataactggagttcaatgaaagccacttaaatagctttcttagttatgtaaatgtagggtgaagaatgagtggccttggtcccccacctggagttagtttattgttttgcgactagatccaaagcctcctctccctgagatctctggtatgcaaagctggtccctggaggaagcgcatcagttgacagagggagcccagaatctctgtgagggaagaaaacactatccaactgctgctcctgggatttgaagtgaagagaatttgttgggatgaagtgaggtggccacaataaaggcgctggggccatggggcttctgaaatgagattaatatggggaacacctgagtctagggtggtgcccggggctaacaacaagaacccacctgtgtttcctggggtaaggctgtccttagcatagtgtgaggctaactgctgggagctctggagactctgccatgctgacattgtgcctgtgctcctggccagggactgccacctagatatgagtcacagtggggggcccctgggctccagttgactttgaggagtgatactgtaccctgtgaggacgctatgagtgtcctcaatagtgatgtggtagtgctggtcagacccacaatccctattttccttgtttttttgtgtgtttttttttgttttttttttttaaacacgaaaaaacaaacaaacaaaaacctcagaaagtgaaaatccctaaagggagggactggacgtgtcatgtaaattcttgattggttaacagaagaaattaaaagtggattgagggcacctttgtgctctgtgcccaagggaaagttcaaacagctgca

SEQ ID NO: 727827 - DNA, 1888 bp, Homo sapiens
cagagtcttacatcaggaggcacattatgtcaacttttccacttgttagtgatatatctttgatcacttagtttaagtggtgtctgttccccctcctgtagaattactattttctctttctaagtaataagtaattgtggggagatagtttgagactatattcctcatcaaacttatacccactagtttttgcccactaataatgttttacaccatcattacttctaaacttactaatggcccawtcatactggctcctgtgtcttttgacatttatcttcatccgtcttaagcacttttttgctttctggcacaataagatgttccaggttttctggtgttttcctgctctagccctgaatcagccatttcatcaaggagccctggttccttttaatggagaatgatatttagaaaccaagatttgggtgctgtaggtgctcattcatatggtgtgttattgcttccagttggtcctttttattatccattcatttggatacaatggtgagggcgccactgaagaaagtgtggcttagggatggaaaggggaaaggagccagatgacctaggtagagactcccctctccccctctagctctccaggtcttccccactttctctttcctccctttccctcttcatcatgacctcatttcccttttcttgatcaaaattcctctggagattccagctgtgggaacctctgaaaccacgtgctgcagctacacgtgtgataccagaggcagacaactatgtgacctttgtgtgtgaaaagcaaaggcaaagacaatttatgagaaagtttttgctgagaacaatctggtgacagggtgattggggaagacacatttggaagatttccacctggacgtgttccttttccctgcctgaaaagcactcagagcagagcctgtgtggaggctgggatagggtgctgtgggaggtctgttctccagataacctctccaaggctctggggcccaacgaggaggatttaagtgcctggtgaagtccactctctgtgtccacaagtcacagagacagtttaaaatgaaataactggagttcaatgaaagccacttaaatagctttcttagttatgtaaatgtagggtgaagaatgagtggccttggtcccccacctggagttagtttattgttttgcgactagatccaaagcctcctctccctgagatctctggtatgcaaagctggtccctggaggaagcgcatcagttgacagagggagcccagaatctctgtgagggaagaaaacactatccaactgctgctcctgggatttgaagtgaagagaatttgttgggatgaagtgaggtggccacaataaaggcgctggggccatggggcttctgaaatgagattaatatggggaacacctgagtctagggtggtgcccggggctaacaacaagaacccacctgtgtttcctggggtaaggctgtccttagcatagtgtgaggctaactgctgggagctctggagactctgccatgctgacattgtgcctgtgctcctggccagggactgccacctagatatgagtcacagtggggggcccctgggctccagttgactttgaggagtgatactgtaccctgtgaggacgctatgagtgtcctcaatagtgatgtggtagtgctggtcagacccacaatccctattttccttgtttttttgtgtgtttttttttgttttttttttttaaacacgaaaaaacaaacaaacaaaaacctcagaaagtgaaaatccctaaagggagggactggacgtgtcatgtaaattcttgattggttaacagaagaaattaaaagtggattgagggcacctttgtgctctgtgcccaagggaaagttcaaacagctgca

SEQ ID NO: 727828 - DNA, 1888 bp, Homo sapiens
cagagtcttacatcaggaggcacattatgtcaacttttccacttgttagtgatatatctttgatcacttagtttaagtggtgtctgttccccctcctgtagaattactattttctctttctaagtaataagtaattgtggggagatagtttgagactatattcctcatcaaacttatacccactagtttttgcccactaataatgttttacaccatcattacttctaaacttactaatggcccaatcatactggctcctgtgtcttttgacatttatcttcatccgtcttaagcacttttttgctttctggcacaataagatgttccaggttttctggtgttttcctgctctagccctgaatcagccatttcatcaaggagccctggttccttttaatggagaatgatatttagaaaccaagatttgggtgctgtaggtgctcattcatatggtgtgttattgcttccagttggtcctttttattatccattcatttggatacaatggtgagggcgccactgaagaaagtgtggcttagggatggaaaggggaaaggagccagatgacctaggtagagactcccctctccccctctagctctccaggtcttccccactttctctttcctccctttccctcttcatcatgacctcatttcccttttcttgatcaaaattcctctggagattccagctgtgggaacctctgaaaccacgtgctgcagctacacgtgtgataccagaggcagacaactatgtgacctttgtgtgtgaaaagcaaaggcaaagacaatttatgagaaagtttttgctgagaacaatctggtgacagggtgattggggaagacacatttggaagatttccacctggacgtgttccttttccctgcctgaaaagcactcagagcagagcctgtgtggaggctgggatagggtgctgtgggaggtctgttctccagataacctctccaaggctctggggcccaacgaggaggatttaagtgcctggtgaagtccactctctgtgtccacaagtcacagagacagtttaaaatgaaataactggagttcaatgaaagccacttaaatagctttcttagttatgtaaatgtagggtgaagaatgagtggccttggtcccccacctggagttagtttattgttttgcgactagatccaaagcctcctctccctgagatctctggtatgcaaagctggtccctggaggaagcgcatcagttgacagagggagcccagaatctctgtgagggaagaaaacactatccaactgctgctcctgggatttgaagtgaagagaatttgttgggatgaagtgaggtggccacaataaaggcgctggggccatggggcttctgaaatgagattaatatgrggaacacctgagtctagggtggtgcccggggctaacaacaagaacccacctgtgtttcctggggtaaggctgtccttagcatagtgtgaggctaactgctgggagctctggagactctgccatgctgacattgtgcctgtgctcctggccagggactgccacctagatatgagtcacagtggggggcccctgggctccagttgactttgaggagtgatactgtaccctgtgaggacgctatgagtgtcctcaatagtgatgtggtagtgctggtcagacccacaatccctattttccttgtttttttgtgtgtttttttttgttttttttttttaaacacgaaaaaacaaacaaacaaaaacctcagaaagtgaaaatccctaaagggagggactggacgtgtcatgtaaattcttgattggttaacagaagaaattaaaagtggattgagggcacctttgtgctctgtgcccaagggaaagttcaaacagctgca

SEQ ID NO: 727829 - DNA, 1888 bp, Homo sapiens
cagagtcttacatcaggaggcacattatgtcaacttttccacttgttagtgatatatctttgatcacttagtttaagtggtgtctgttccccctcctgtagaattactattttctctttctaagtaataagtaattgtggggagatagtttgagactatattcctcatcaaacttatacccactagtttttgcccactaataatgttttacaccatcattacttctaaacttactaatggcccaatcatactggctcctgtgtcttttgacatttatcttcatccgtcttaagcacttttttgctttctggcacaataagatgttccaggttttctggtgttttcctgctctagccctgaatcagccatttcatcaaggagccctggttccttttaatggagaatgatatttagaaaccaagatttgggtgctgtaggtgctcattcatatggtgtgttattgcttccagttggtcctttttattatccattcatttggatacaatggtgagggcgccactgaagaaagtgtggcttagggatggaaaggggaaaggagccagatgacctaggtagagactcccctctccccctctagctctccaggtcttccccactttctctttcctccctttccctcttcatcatgacctcatttcccttttcttgatcaaaattcctctggagattccagctgtgggaacctctgaaaccacgtgctgcagctacacgtgtgataccagaggcagacaactatgtgacctttgtgtgtgaaaagcaaaggcaaagacaatttatgagaaagtttttgctgagaacaatctggtgacagggtgattggggaagacacatttggaagatttccacctggacgtgttccttttccctgcctgaaaagcactcagagcagagcctgtgtggaggctgggatagggtgctgtgggaggtctgttctccagataacctctccaaggctctggggcccaacgaggaggatttaagtgcctggtgaagtccactctctgtgtccacaagtcacagagacagtttaaaatgaaataactggagttcaatgaaagccacttaaatagctttcttagttatgtaaatgtagggtgaagaatgagtggccttggtcccccacctggagttagtttattgttttgcgactagatccaaagcctcctctccctgagatctctggtatgcaaagctggtccctggaggaagcgcatcagttgacagagggagcccagaatctctgtgagggaagaaaacactatccaactgctgctcctgggatttgaagtgaagagaatttgttgggatgaagtgaggtggccacaataaaggcgctggggccatggggcttctgaaatgagattaatatggggaacacctgagtctagggtggtgcccggggctwacaacaagaacccacctgtgtttcctggggtaaggctgtccttagcatagtgtgaggctaactgctgggagctctggagactctgccatgctgacattgtgcctgtgctcctggccagggactgccacctagatatgagtcacagtggggggcccctgggctccagttgactttgaggagtgatactgtaccctgtgaggacgctatgagtgtcctcaatagtgatgtggtagtgctggtcagacccacaatccctattttccttgtttttttgtgtgtttttttttgttttttttttttaaacacgaaaaaacaaacaaacaaaaacctcagaaagtgaaaatccctaaagggagggactggacgtgtcatgtaaattcttgattggttaacagaagaaattaaaagtggattgagggcacctttgtgctctgtgcccaagggaaagttcaaacagctgca

SEQ ID NO: 727830 - DNA, 606 bp, Homo sapiens
caagcaccaggacttggagagattctcctgaggtcacagccgttgagtggtggagcagtgacaagcacctggcacccttggtctagtccagtattctgggtgccacaagaattgcagaattgcaaccttgatttttayacatttggttattttctctttttttatttccttttttgttgttgttgttgttgttgttgtcgagacagggtctcactctatcacaggctggagtgcagtggcacaatctcagctggctgcaacctccaccttccgagttcaagtgatcctcatgcctcagcctcctgagtagctgggattacaggtgcatgccaccacatctggctaatttttgcatttttggtagagatggagtttcatcatgtttgccaggctggtctcgaactcctgacctcaggtgctcctcccacctcagcctcccgaagtgctgggattacaggtgtgagccaccacgcctggccatttggttattttcttaaccagagaaggaaaatgcatggtgaaaataaagtgcaagagccctaggcccttgccttagatttactgggatgggggatggagagagagaggctgccactgtttctctga

SEQ ID NO: 727831 - DNA, 894 bp, Homo sapiens
catatttggatttttaaatcaccatatctaattttagaacattttcatcatcccaaactgttctccacagtttgagagctgccttctgcagaccagcaagacacagattgttctcagctccccttgtctctggaccctgacttctcttcccccagctgcacagctgataaactgtgtctcctcccaagcatagcccaggaaggatayagggagaggggcccattcccctgatgtcccagaaccccttccacataatcccaatatccaggcccggtgtccccttccctggatcaatctttttctgggaatgaaagagttgcagtgtttccctcccagatctcccctgtgactcactccctctaaatagatatcttgctctatgagttattattctcatatcctttctttgaagctgtgataagatattacaaactattaagagaacatggaggctaggcgtggtggctcacgcctgtaatcccagcactttgggaagccaagataggcagatcacctgaggtcaggagttcgagaccagcctggctaacatggtgaaaaccccatctctaaaaatacacaaattagctgggtgtggtggcagctgcctgtaatcccagctactcgggatgctgaggcaagagaattgcttgaaccaggaggtggaggttgcagtgagccgaaatcacgccattgcactccagcctggcaacaagagataaactctgtctcaaaaaaaaaaaaaaagaaagaaagagagagagagaacatgcaggttaggttctctttttggattctgaggacctgctgtgctggggcagaggcaggtggggagagaagggcaggtggaggggcaggtgctgagtggtgtgcaaccttgctccgtgctcaataaag

SEQ ID NO: 727832 - DNA, 894 bp, Homo sapiens
catatttggatttttaaatcaccatatctaattttagaacattttcatcatcccaaactgttctccacagtttgagagctgccttctgcagaccagcaagacacagattgttctcagctccccttgtctctggaccctgacttctcttcccccagctgcacagctgataaactgtgtctcctcccaagcatagcccaggaaggatatagggagaggggcccattcccctgatgtcccagaaccccttccacataatcccaatatccaggcccggtgtccccttccctggatcaatctttttctgggaatgaaagagttgcagtgtttccctcccagatctcccctgtgactcactcmctctaaatagatatcttgctctatgagttattattctcatatcctttctttgaagctgtgataagatattacaaactattaagagaacatggaggctaggcgtggtggctcacgcctgtaatcccagcactttgggaagccaagataggcagatcacctgaggtcaggagttcgagaccagcctggctaacatggtgaaaaccccatctctaaaaatacacaaattagctgggtgtggtggcagctgcctgtaatcccagctactcgggatgctgaggcaagagaattgcttgaaccaggaggtggaggttgcagtgagccgaaatcacgccattgcactccagcctggcaacaagagataaactctgtctcaaaaaaaaaaaaaaagaaagaaagagagagagagaacatgcaggttaggttctctttttggattctgaggacctgctgtgctggggcagaggcaggtggggagagaagggcaggtggaggggcaggtgctgagtggtgtgcaaccttgctccgtgctcaataaag

SEQ ID NO: 727833 - DNA, 894 bp, Homo sapiens
catatttggatttttaaatcaccatatctaattttagaacattttcatcatcccaaactgttctccacagtttgagagctgccttctgcagaccagcaagacacagattgttctcagctccccttgtctctggaccctgacttctcttcccccagctgcacagctgataaactgtgtctcctcccaagcatagcccaggaaggatatagggagaggggcccattcccctgatgtcccagaaccccttccacataatcccaatatccaggcccggtgtccccttccctggatcaatctttttctgggaatgaaagagttgcagtgtttccctcccagatctcccctgtgactcactccctctaaatagatatcttgctctatgagttattattctcatatcctttctttgaagctgtgataagatattacaaactattaagagaacatggaggctaggcgtggtggctcacgcctgtaatcccagcactttgggaagccaagayaggcagatcacctgaggtcaggagttcgagaccagcctggctaacatggtgaaaaccccatctctaaaaatacacaaattagctgggtgtggtggcagctgcctgtaatcccagctactcgggatgctgaggcaagagaattgcttgaaccaggaggtggaggttgcagtgagccgaaatcacgccattgcactccagcctggcaacaagagataaactctgtctcaaaaaaaaaaaaaaagaaagaaagagagagagagaacatgcaggttaggttctctttttggattctgaggacctgctgtgctggggcagaggcaggtggggagagaagggcaggtggaggggcaggtgctgagtggtgtgcaaccttgctccgtgctcaataaag

SEQ ID NO: 727834 - DNA, 894 bp, Homo sapiens
catatttggatttttaaatcaccatatctaattttagaacattttcatcatcccaaactgttctccacagtttgagagctgccttctgcagaccagcaagacacagattgttctcagctccccttgtctctggaccctgacttctcttcccccagctgcacagctgataaactgtgtctcctcccaagcatagcccaggaaggatatagggagaggggcccattcccctgatgtcccagaaccccttccacataatcccaatatccaggcccggtgtccccttccctggatcaatctttttctgggaatgaaagagttgcagtgtttccctcccagatctcccctgtgactcactccctctaaatagatatcttgctctatgagttattattctcatatcctttctttgaagctgtgataagatattacaaactattaagagaacatggaggctaggcgtggtggctcacgcctgtaatcccagcactttgggaagccaagataggcagatcacctgaggtcaggarttcgagaccagcctggctaacatggtgaaaaccccatctctaaaaatacacaaattagctgggtgtggtggcagctgcctgtaatcccagctactcgggatgctgaggcaagagaattgcttgaaccaggaggtggaggttgcagtgagccgaaatcacgccattgcactccagcctggcaacaagagataaactctgtctcaaaaaaaaaaaaaaagaaagaaagagagagagagaacatgcaggttaggttctctttttggattctgaggacctgctgtgctggggcagaggcaggtggggagagaagggcaggtggaggggcaggtgctgagtggtgtgcaaccttgctccgtgctcaataaag

SEQ ID NO: 727835 - DNA, 894 bp, Homo sapiens
catatttggatttttaaatcaccatatctaattttagaacattttcatcatcccaaactgttctccacagtttgagagctgccttctgcagaccagcaagacacagattgttctcagctccccttgtctctggaccctgacttctcttcccccagctgcacagctgataaactgtgtctcctcccaagcatagcccaggaaggatatagggagaggggcccattcccctgatgtcccagaaccccttccacataatcccaatatccaggcccggtgtccccttccctggatcaatctttttctgggaatgaaagagttgcagtgtttccctcccagatctcccctgtgactcactccctctaaatagatatcttgctctatgagttattattctcatatcctttctttgaagctgtgataagatattacaaactattaagagaacatggaggctaggcgtggtggctcacgcctgtaatcccagcactttgggaagccaagataggcagatcacctgaggtcaggagttcgagaccagcctggctaacatggtgaaaaccccatctctaaaaatacacaaattagctgggtgtggtggcagctgcctgtaatcccagctactcgggatgctgaggcaagagaattgcttgaaccaggaggtggaggttgcagtgagccgaaatcacgccattgcactccagcctggcaacaagagataaactctgtctcaaaaaaaaaaaaaaagaaagaaagagagagagagaacatgcaggttaggttctctttttggattctgaggacctgctgtgctggggcagaggcaggtggggagagaaggrcaggtggaggggcaggtgctgagtggtgtgcaaccttgctccgtgctcaataaag

SEQ ID NO: 727836 - DNA, 894 bp, Homo sapiens
catatttggatttttaaatcaccatatctaattttagaacattttcatcatcccaaactgttctccacagtttgagagctgccttctgcagaccagcaagacacagattgttctcagctccccttgtctctggaccctgacttctcttcccccagctgcacagctgataaactgtgtctcctcccaagcatagcccaggaaggatatagggagaggggcccattcccctgatgtcccagaaccccttccacataatcccaatatccaggcccggtgtccccttccctggatcaatctttttctgggaatgaaagagttgcagtgtttccctcccagatctcccctgtgactcactccctctaaatagatatcttgctctatgagttattattctcatatcctttctttgaagctgtgataagatattacaaactattaagagaacatggaggctaggcgtggtggctcacgcctgtaatcccagcactttgggaagccaagataggcagatcacctgaggtcaggagttcgagaccagcctggctaacatggtgaaaaccccatctctaaaaatacacaaattagctgggtgtggtggcagctgcctgtaatcccagctactcgggatgctgaggcaagagaattgcttgaaccaggaggtggaggttgcagtgagccgaaatcacgccattgcactccagcctggcaacaagagataaactctgtctcaaaaaaaaaaaaaaagaaagaaagagagagagagaacatgcaggttaggttctctttttggattctgaggacctgctgtgctggggcagaggcaggtggggagagaagggcaggtggaggggcaggtgctgagtggtgtgcamccttgctccgtgctcaataaag

SEQ ID NO: 727837 - DNA, 1325 bp, Homo sapiens
catcctccccttctcactctgccccaccacactggtctccaggctactcctcgagctgtctgaccatgcctctatctgttttcctctggcccttccctttgtctggaaygctcttcctatacctcctacaagcctttgcttaaacctcacctttacagtgagttctgccctgacccactatttaaaagtacaacctgccccccgccacacaaacacattagagtccccttaccttgttctatcctttttccctcccctgcattcatgacattcaaacatagtatatcgttcactcatttgtatgttatttctgactgtcctgctagaaggaaagtactacaagggcacagaattttgtttcactcactgatgaatctaagtgtccagaataaggcccagcccatccatagcaggtgctcaaaaaaaaaaaaaaaaaaaaaaaaaaaacaccttgctgaaacagagtaaaaagaaaaagaaaactgcccatccccttctttccctcctccctctgggtggaaatgcagacacggtgatgggagctggtgcagaccttggacatgaagtttgacaatgcatcagaatggcaggaaaataagattgaaggaggtgtgggctcccattattgcagatctctgcactacttatgcccagcagaagaaacatccacctcatctaagccaccattatatttgaagtttagttacagcagccagaaagagcctgcacctaatttattgggttaggtcccagtggagacttttctctgagcacacgtcttcatctccaaaatgggggctgggcgcagtggtttatgcttgtaatcccaacaccttgggaggccaaggcaggtggattatttgagcccagaagttcaagaccaccctggccaacatggcaaaaccctatctctacagaacaattttaaaaattagcagggcagggctgggcatggtggctcatgcctgtaatccaagcattttgggaggccgaggcaggcagatcacttgaggtcaggagttcaaaaccagcctggccaacatggtgaaaccttgtctctactaaaaatacaaaaaaaatttagctgggcgtggtgacagacaactgtaatcccagctactcaagaggctaaggcaggagaatcacttgtaccagagaggtagaggttgcagtgagccaagatctcaccagtgcactccagcctaggtgacaaagcaagactccgtttccaaaaaaaaaaaaaaaaaaaaaagtagcagggcacagtggtgcacacctgtggtcccagctactcagaagtctgaggcaggaggatcactagagcc

SEQ ID NO: 727838 - DNA, 1325 bp, Homo sapiens
catcctccccttctcactctgccccaccacactggtctccaggctactcctcgagctgtctgaccatgcctctatctgttttcctctggcccttccctttgtctggaacgctcttcctatacctcctacaagcctttgcttaaacctcacctttacagtgagttctgccctgacccactatttaaaagtacaacctgccccccrccacacaaacacattagagtccccttaccttgttctatcctttttccctcccctgcattcatgacattcaaacatagtatatcgttcactcatttgtatgttatttctgactgtcctgctagaaggaaagtactacaagggcacagaattttgtttcactcactgatgaatctaagtgtccagaataaggcccagcccatccatagcaggtgctcaaaaaaaaaaaaaaaaaaaaaaaaaaaacaccttgctgaaacagagtaaaaagaaaaagaaaactgcccatccccttctttccctcctccctctgggtggaaatgcagacacggtgatgggagctggtgcagaccttggacatgaagtttgacaatgcatcagaatggcaggaaaataagattgaaggaggtgtgggctcccattattgcagatctctgcactacttatgcccagcagaagaaacatccacctcatctaagccaccattatatttgaagtttagttacagcagccagaaagagcctgcacctaatttattgggttaggtcccagtggagacttttctctgagcacacgtcttcatctccaaaatgggggctgggcgcagtggtttatgcttgtaatcccaacaccttgggaggccaaggcaggtggattatttgagcccagaagttcaagaccaccctggccaacatggcaaaaccctatctctacagaacaattttaaaaattagcagggcagggctgggcatggtggctcatgcctgtaatccaagcattttgggaggccgaggcaggcagatcacttgaggtcaggagttcaaaaccagcctggccaacatggtgaaaccttgtctctactaaaaatacaaaaaaaatttagctgggcgtggtgacagacaactgtaatcccagctactcaagaggctaaggcaggagaatcacttgtaccagagaggtagaggttgcagtgagccaagatctcaccagtgcactccagcctaggtgacaaagcaagactccgtttccaaaaaaaaaaaaaaaaaaaaaagtagcagggcacagtggtgcacacctgtggtcccagctactcagaagtctgaggcaggaggatcactagagcc

SEQ ID NO: 727839 - DNA, 1325 bp, Homo sapiens
catcctccccttctcactctgccccaccacactggtctccaggctactcctcgagctgtctgaccatgcctctatctgttttcctctggcccttccctttgtctggaacgctcttcctatacctcctacaagcctttgcttaaacctcacctttacagtgagttctgccctgacccactatttaaaagtacaacctgccccccgccacacaaacacattagagtccccttaccttgttctatcctttttccctcccctgcattcaygacattcaaacatagtatatcgttcactcatttgtatgttatttctgactgtcctgctagaaggaaagtactacaagggcacagaattttgtttcactcactgatgaatctaagtgtccagaataaggcccagcccatccatagcaggtgctcaaaaaaaaaaaaaaaaaaaaaaaaaaaacaccttgctgaaacagagtaaaaagaaaaagaaaactgcccatccccttctttccctcctccctctgggtggaaatgcagacacggtgatgggagctggtgcagaccttggacatgaagtttgacaatgcatcagaatggcaggaaaataagattgaaggaggtgtgggctcccattattgcagatctctgcactacttatgcccagcagaagaaacatccacctcatctaagccaccattatatttgaagtttagttacagcagccagaaagagcctgcacctaatttattgggttaggtcccagtggagacttttctctgagcacacgtcttcatctccaaaatgggggctgggcgcagtggtttatgcttgtaatcccaacaccttgggaggccaaggcaggtggattatttgagcccagaagttcaagaccaccctggccaacatggcaaaaccctatctctacagaacaattttaaaaattagcagggcagggctgggcatggtggctcatgcctgtaatccaagcattttgggaggccgaggcaggcagatcacttgaggtcaggagttcaaaaccagcctggccaacatggtgaaaccttgtctctactaaaaatacaaaaaaaatttagctgggcgtggtgacagacaactgtaatcccagctactcaagaggctaaggcaggagaatcacttgtaccagagaggtagaggttgcagtgagccaagatctcaccagtgcactccagcctaggtgacaaagcaagactccgtttccaaaaaaaaaaaaaaaaaaaaaagtagcagggcacagtggtgcacacctgtggtcccagctactcagaagtctgaggcaggaggatcactagagcc

SEQ ID NO: 727840 - DNA, 440 bp, Homo sapiens
cagtattagagccaccagtagacactagagggaatatggggtttatcccatagataaaattccttaaaaagtttccctggcacaggatgcccttagaccttccatggtgktctaaagtttgacagcaagcaagagtgtgcttctctagataaatgtatgagccatctaactaagaagtctggcaacagatcagacttcctgttgggaaagtattcagagcccaagttaggagagaaggggtgcttttgtgttaagaaaagctacaaagtgttaggcagtttgagaccctgacatccctgctgtctaagaaagtagaagagggaatcctatgggctctgtcaggttccactgggtcctacaggatgcaatggaagagtgggtctgaggttctcagggaggggttccctgcccaccccaggtctcccagggcagggagaggg

SEQ ID NO: 727841 - DNA, 440 bp, Homo sapiens
cagtattagagccaccagtagacactagagggaatatggggtttatcccatagataaaattccttaaaaagtttccctggcacaggatgcccttagaccttccatggtgttctaaagtttgacagcaagcaagagtgtgcttctctagataaatgtatgagccatctaacyaagaagtctggcaacagatcagacttcctgttgggaaagtattcagagcccaagttaggagagaaggggtgcttttgtgttaagaaaagctacaaagtgttaggcagtttgagaccctgacatccctgctgtctaagaaagtagaagagggaatcctatgggctctgtcaggttccactgggtcctacaggatgcaatggaagagtgggtctgaggttctcagggaggggttccctgcccaccccaggtctcccagggcagggagaggg

SEQ ID NO: 727842 - DNA, 627 bp, Homo sapiens
tgtaattatttccttgggataaattcctaaaagagaaattttcatgtcaaaatgtcagaacacttaggcccggcgcartccctcacccctgtaatcccagcactttgggagaccaaggcgggtggatcacttgaggtcaaggatttgagatgagcctggccatcatggtgaaaccccatttctactaaaattacaaaaattagctgggcgtggtggcacgcacctgtagtcccagctacgcgggaggctgaggcaggagaatcgcttgaacccaggaggtggaggcttcaataagtcaagattgtgccactgcactccagcctgggcgacagagcaagactctgtctcaaaaacgtcagaacatttaaattattgagacattttgcaaaagtgccctttagaagttttgtaccacttttcaatgccatcagtcttcgtaacagtacattttccctgtactctgatcaatactaccatcatttacttctgtctttgccaagctgatggattttaattctggttcccattttgtagtctacattcttattttttgcacatatttattactaatataactatatgacatttcttaatcatttctcaaacgtaatgctgatatttttaaat

SEQ ID NO: 727843 - DNA, 3542 bp, Homo sapiens
tgagtgccactcatgtggtatctaataaacagtcttcattcactagaaacataagagattttttttttttttttttgagacggagtctcgctctgtcacccaggctggagtgcagtggcgcgatctcggctcgctgcaggctccgctccccggggttcacgccattctcctgcctcagcctcccgagtagctgggactacaggcgcccttaaaagcctaaaggagaactaacattttattccttactacacctatctattgaatgtattttgcaagccatgtgtagtttcaaggtacaggaaatgtagcggtaaatgaaacaaagtccctgtcctcatatagcttatgttctaatacaggtcacagacaataaactagtaaaatgtatataaataatatgatttcagaaaatgatacttttttatggtatttatttttatgaaaaaaatatagtcttgtagtaatttgttatacaattttttcctgactaccttagcactacttgaaggcagggactatagcttataaataaactctgcagcaataagctatgctcattgattgatacatggtaaatacttgataaatgtctcaattaaggaaagaaaggaggaaataacttaaaggtaaaaattcaatacattcagtagtttgatacagattacttacattacaaggcaatgtcacatattaaaggaagaaaaacaaaaggttttaaagtcagaataaaatcattcctctaaaggactgttaaattccctaaaacatgattttgggggaataataaggtcctcaaaactagcattcaaagtattaaaccatcattgttgtgttaagtaaattatttggcctcttggagtcttgattttcttaccaatgaaataggaatgagagcataggaatgaacagctctcattatagaaaggggttgtaagcacaaatgagataaattatgatcctttgaaaagtacaaagtattacagagaaagcaatagcattaattctggcagcagtctggaatggagcagtaattccagtcatctggaaatacaggcagtagtgagtcatggctacagactcagagcagggaactggtttggataaagtgtgtgacaagttgtgggggatattaaaaggagctaggcagggtcaggcatggtggctcacgcctgtaatcccagcagtttgggaggccgaggcgggcggatcacctgaggtaggaagttcgagaccagcctggccaacatggggaaatcccgtctctactaaaaatacaaaaatcagccgagcgtggtggtgcatgcctgcaatccccgctactcgggaggctgaggcaggtgaatcgcttgaacccgggaggcagaggttgcagtggccactgcaccactccagcctggacaacagagcaagactccgtctcaaaaaaaaaaaacaaaaaacaaaaaacaaacatcggagctaggcaggttccacacccagagctagtggtcaggaatcaaatggcaaggaatcaaatctagtcatacaagccacagtcgggtcaaacctgaaaagacagttgcagtgaccatggatcctcaagaacagaataggaaggcaatataaagtttggtaaacagtcaggaatctggaaatgtgatgaacaaaaagaaggataatgtaaatgagaggccaaatttgagatcttcaaaaatgcagcaaggcagttttgtgcatcagctccagtgtatgtataaggatcctttgaaggaaagcattcactcttgaggagcaggtgctcaggattacatgattgaggtaagggaatgtaggtggagccgaaccaacactttctcctcaagaaaattctggcaataaatatcttagccagtttttagaagaatctttccagtcattcattttctaattggacagcaagataaagcttcatcaaatctctagacaaatttcccttgggacttatgccatgttttcatgataccacaaaatattttgaaagtaaaaaaactcaaycgtcgatgtatgcactcattattagatcctcagtatgtatggtttcagctatgaatgaaagcattgcctcctttcttgttgacctgagtttactaagtaattggctaaagttaattaatgaatcaattgtactgtagcaacatgcatgtgaatgctaggcaaaaccctcctgtggatgggagagaattactgtctttgggtaactgtttgtttgctttctatctctacattcaaaactgaccaaggaatgccactagctagacatgtgtagtgactaccagtgaacctcagggaggctcactcaggactggctacccccaggatggaggggtggcatgccagtaaggaacctggccttagcagcaagttggttttttttctgcaagtatcttctatttcttctccaaccaattttgttccccttggttcttgggaaccattatactgttaggttaatggatcattggtttatccacctgtacatttcctgaattttggccattcaaccatgcattcctggtgactgggtttataagtattagtttcctaggtccaacaccacatttggatatctcttaactataaattggtgtagtaaccgtgatatatcagcatagagatggctccatccattaaaaatatattggtattggtggtttcaaaaaattgtatatttgttactggcatctaaaacaaatgaatggccagatacaaaattgtacagaacccagattagtatctaataaagaattaataaagaatatgaattaatgtagatatatccatttacatattaattgtttttttcaaattggccaaatttttcaaaacaattacatattaaaaactgagatatacggaaattctaactaataggtttatagtcattcctagggtaggcattaacacttcttggtaagttctgtaagttaattatagtttaacttcctaattaattaattctgtaagtcaatttatagtttaacttcccagaggctttggtgtctttttttaccctcactttaaaatacacacaatagtatataatatatcacatttggtcaacagttcaaatttttttattctttaaagcatgtacaaaaaatatactagttagaattcctgtgaaaaattctaatacagaggaattatatggctatgtttggaaagataatatttctttaaaaatgtgttttctttatgttttatgtttgcaataaggattatttaagtttgattgaagaacttcatgattcttatgtattattttcttgtattgagaaatagtggcccattgttgggctgtatttaaaattaatgtgtatgaaacaagaaatatttaattagagttattaattttccacaagtaatatgtgtacttgacctaaatcagtatcttttatcatatcagcctcacatacaacaagaataatagcaaggacaacaacaacaaatttgaatgtttcctttgtgcctatgctcctaactatcatgttatactcattcatataaacctaacaattaatttg

SEQ ID NO: 727844 - DNA, 2553 bp, Homo sapiens
tattactttgagaaagttggttattatttggaatttgaagaaataaacaataaatttcaaataacttaaagaatgaaataaaaaataaaattaatactacaaggaagtttttaaaatattcatgccttttcctcatgacatgaaatataaatatcatgaagtaaaagacagacaaattttactaactaaacaaactcatttttagcaaacacttgataaataccattgagacaaataacaaattagaagaaaatatttacatggtatayataacaaaaaaatggatattcagaatgtatagagattatcaaataataaagaacttgcaaatcccagtgggaaaatgagcaaagaatataaagaggaattacacagaagaaaacgtatgctatgtattaacaaatgaaaagttgcttcatctgtgtaatggccaaaatgtatgttaaaatataagacagcatttctcccatctcattggtaaaataaaaaatacatatgcacttcataaattcatatgtcacttcagcatttttacagttaatatcacttttgttattcttaaaaagttgaaaaattaaatgagttaaaagcagtatgagagaaattattgcaaatatgtgtataatattgttaggagaaacccaagtaagaccccagaggtgtaagtttaaattgaagactaatcagtttatatatataataatttaaaaatattctgtgcattataaaactcacaaaagaattaaaaggcaaaaaaatcaagaaaaaataatttcaaaataaatgccacaacacagcttcctgtggtcaagatttctctccattctactttgacgtctaaatagatctttgggcatctagactaatattgggtttgtatactcccagaaaattcaagactactaaacgcacccaaccttacaaccccgaagcatattatcacataggggtcttgtgtagtttgctaaagtgtaatgtactacctgtcacagaatgagcacttaactgatgttgggtgtgatgtagcatagtagcaaaaaactttagaattaggccacagtgtttttaagggctttgcacgacccattattttttggcacttaatttaaaaaaatctgcatgcttattttaattttgtcattacttgccattgtatccatctcagcacactgatcaaataatcacaaaaatcacagagatgatactctgctaattaagaaagttttctttttttctttgtgaaaccattcttcattttttttttttttggtatttagaaataatttctagtgctaatttatttttagtgacattttgcacagactctccaaataaaaaaccaagaacgaccaattttattgggaaaatactaaatgtaacaaactttattttttgatgagtgaagactatttttctaattttgcttaaaaattttaggtttagccttaggtaataaagttaatagagagaatgtttactaccatgcataaattcaaaagacttgttagtttagattgtcaatttaatgttgaacaaagttgcttgaaattttcagatgaaataactttaggtaagcttaagaaaagtttgattgcattttgtttataatcttgtacttctattttcattctgatttagtaggctgcacactttttaaaaaaaaatttcaggtggattgtggccattccttttcctcttaagtcttatttgattgttcttccagaacaaatattaacatttgcagtcctgcatctggatcaagcagtttggttagagaaatttaaacctttaaatcacaaaacagcttattttcaattgtcatagctgacactgaatctatgactaatggtgtaagcaatgtggatattggaatgtctctgagtttttatattaataaatttactagctaaataagtgatgtaatcatctgttgatgtctgagatgaagagtgagtaaaaaccacataaaagtcttccataaaactaaacttatcttggaattctttgtaaaaataatttctgtgagatggaactttggaaagttttcctgtaatttcttgaaatcaaatttaacagtgcatggtagtctgaccattctgcattctcctttctgtataaaaaacatcactatttcaaggccagagagccccctttacatggcttgttaagaattcttcaaaatccagcatgattcaagatactgatggattttgggtatttcaagagaattcctctggtggctaaaatgctttgaagatcatttgtgcagcagtcactcaagatgaaagactccctagttaattgtccagtgagattacagttcctgtgacagtggcagaagaagtccagcaaggagttagcagcagcctagttggcttttgttgcattctcaatgaaagcagaaactaatgaatagcactcaaagtaatcaagttcctgctttcttgtcaaaaattgaagatgtactgctccagctactttggggcttaacactttctccaattaagaagagatgttgagagcttctaggaacccatcatccaagactgcggc

SEQ ID NO: 727845 - DNA, 2553 bp, Homo sapiens
tattactttgagaaagttggttattatttggaatttgaagaaataaacaataaatttcaaataacttaaagaatgaaataaaaaataaaattaatactacaaggaagtttttaaaatattcatgccttttcctcatgacatgaaatataaatatcatgaagtaaaagacagacaaattttactaactaaacaaactcatttttagcaaacacttgataaataccattgagacaaataacaaattagaagaaaatatttacatggtatacataacaaaaaaatrgatattcagaatgtatagagattatcaaataataaagaacttgcaaatcccagtgggaaaatgagcaaagaatataaagaggaattacacagaagaaaacgtatgctatgtattaacaaatgaaaagttgcttcatctgtgtaatggccaaaatgtatgttaaaatataagacagcatttctcccatctcattggtaaaataaaaaatacatatgcacttcataaattcatatgtcacttcagcatttttacagttaatatcacttttgttattcttaaaaagttgaaaaattaaatgagttaaaagcagtatgagagaaattattgcaaatatgtgtataatattgttaggagaaacccaagtaagaccccagaggtgtaagtttaaattgaagactaatcagtttatatatataataatttaaaaatattctgtgcattataaaactcacaaaagaattaaaaggcaaaaaaatcaagaaaaaataatttcaaaataaatgccacaacacagcttcctgtggtcaagatttctctccattctactttgacgtctaaatagatctttgggcatctagactaatattgggtttgtatactcccagaaaattcaagactactaaacgcacccaaccttacaaccccgaagcatattatcacataggggtcttgtgtagtttgctaaagtgtaatgtactacctgtcacagaatgagcacttaactgatgttgggtgtgatgtagcatagtagcaaaaaactttagaattaggccacagtgtttttaagggctttgcacgacccattattttttggcacttaatttaaaaaaatctgcatgcttattttaattttgtcattacttgccattgtatccatctcagcacactgatcaaataatcacaaaaatcacagagatgatactctgctaattaagaaagttttctttttttctttgtgaaaccattcttcattttttttttttttggtatttagaaataatttctagtgctaatttatttttagtgacattttgcacagactctccaaataaaaaaccaagaacgaccaattttattgggaaaatactaaatgtaacaaactttattttttgatgagtgaagactatttttctaattttgcttaaaaattttaggtttagccttaggtaataaagttaatagagagaatgtttactaccatgcataaattcaaaagacttgttagtttagattgtcaatttaatgttgaacaaagttgcttgaaattttcagatgaaataactttaggtaagcttaagaaaagtttgattgcattttgtttataatcttgtacttctattttcattctgatttagtaggctgcacactttttaaaaaaaaatttcaggtggattgtggccattccttttcctcttaagtcttatttgattgttcttccagaacaaatattaacatttgcagtcctgcatctggatcaagcagtttggttagagaaatttaaacctttaaatcacaaaacagcttattttcaattgtcatagctgacactgaatctatgactaatggtgtaagcaatgtggatattggaatgtctctgagtttttatattaataaatttactagctaaataagtgatgtaatcatctgttgatgtctgagatgaagagtgagtaaaaaccacataaaagtcttccataaaactaaacttatcttggaattctttgtaaaaataatttctgtgagatggaactttggaaagttttcctgtaatttcttgaaatcaaatttaacagtgcatggtagtctgaccattctgcattctcctttctgtataaaaaacatcactatttcaaggccagagagccccctttacatggcttgttaagaattcttcaaaatccagcatgattcaagatactgatggattttgggtatttcaagagaattcctctggtggctaaaatgctttgaagatcatttgtgcagcagtcactcaagatgaaagactccctagttaattgtccagtgagattacagttcctgtgacagtggcagaagaagtccagcaaggagttagcagcagcctagttggcttttgttgcattctcaatgaaagcagaaactaatgaatagcactcaaagtaatcaagttcctgctttcttgtcaaaaattgaagatgtactgctccagctactttggggcttaacactttctccaattaagaagagatgttgagagcttctaggaacccatcatccaagactgcggc

SEQ ID NO: 727846 - DNA, 2553 bp, Homo sapiens
tattactttgagaaagttggttattatttggaatttgaagaaataaacaataaatttcaaataacttaaagaatgaaataaaaaataaaattaatactacaaggaagtttttaaaatattcatgccttttcctcatgacatgaaatataaatatcatgaagtaaaagacagacaaattttactaactaaacaaactcatttttagcaaacacttgataaataccattgagacaaataacaaattagaagaaaatatttacatggtatacataacaaaaaaatggatattcagaatgtatagagattatcaaataataaagaacttgcaaatcccagtgggaaaatgagcaaagaatataaagaggaattacacagaagaaaacgtatgctatgtattaacaaatgaaaagttgcttcatctgtgtaatggccaaaatgtatgttaaaatataagacagcatttctcccatctcattggtaaaataaaaaatacatatgcacttcataaattcatatgtcacttcagcatttttacagttaatatcacttttgttattcttaaaaagttgaaaaattaaatgagttaaaagcagtatgagagaaattattgcaaatatgtgtataatattgttaggagaaacccaagtaagaccccagaggtgtaagtttaaattgaagactaatcagtttatatatataataatttaaaaatattctgtgcattataaaactcacaaaagaattaaaaggcaaaaaaatcaagaaaaaataatttcaaaataaatgccacaacacagcttcctgtggtcaagatttctctccattctactttgacgtctaaatagatctttgggcatctagactaatattgggtttgtatactcccagaaaattcaagactactaaacgcacccaaccttacaaccccgaagcatattatcacataggggtcttgtgtagtttgctaaagtgtaatgtactacctgtcacagaatgagcacttaactgatgttgggtgtgatgtagcatagtagcaaaaaactttagaattaggccacagtgtttttaagggctttgcacgacccattattttttggcacttaatttaaaaaaatctgcatgcttattttaattttgtcattacttgccattgtatccatctcagcacactgatcaaataatcacaaaaatcacagagatgatactctgctaattaagaaagttttctttttttctttgtgaaaccattcttcattttttttttttttggtatttagaaataatttctagtgctaatttatttttagtgacattttgcacagactctccaaataaaaaaccaagaacgaccaattttattgggaaaatactaaatgtaacaaactttattttttgatgagtgaagactatttttctaattttgcttaaaaattttaggtttagccttaggtaataaagttaatagagagaatgtttactaccatgcataaattcaaaagacttgttagtttagattgtcaatttaatgttgaacaaagttgcttgaaattttcagatgaaataactttaggtaagcttaagaaaagtttgattgcattttgtttataatcttgtacttctattttcattctgatttagtaggctgcacactttttaaaaaaaaatttcaggtggattgtggccattccttttcctcttaagtcttatttgattgttcttccagaacaaatattaacatttgcagtcctgcatctggatcaagcagtttggttagagaaatttaaacctttaaatcacaaaacagcttattttcaattgtcatagctgacactgaatctatgmctaatggtgtaagcaatgtggatattggaatgtctctgagtttttatattaataaatttactagctaaataagtgatgtaatcatctgttgatgtctgagatgaagagtgagtaaaaaccacataaaagtcttccataaaactaaacttatcttggaattctttgtaaaaataatttctgtgagatggaactttggaaagttttcctgtaatttcttgaaatcaaatttaacagtgcatggtagtctgaccattctgcattctcctttctgtataaaaaacatcactatttcaaggccagagagccccctttacatggcttgttaagaattcttcaaaatccagcatgattcaagatactgatggattttgggtatttcaagagaattcctctggtggctaaaatgctttgaagatcatttgtgcagcagtcactcaagatgaaagactccctagttaattgtccagtgagattacagttcctgtgacagtggcagaagaagtccagcaaggagttagcagcagcctagttggcttttgttgcattctcaatgaaagcagaaactaatgaatagcactcaaagtaatcaagttcctgctttcttgtcaaaaattgaagatgtactgctccagctactttggggcttaacactttctccaattaagaagagatgttgagagcttctaggaacccatcatccaagactgcggc

SEQ ID NO: 727847 - DNA, 1387 bp, Homo sapiens
agtggagtactattcagccataaaaatgaaagcctgtcatttgcaacaacatggatggaactgaagatgattatgtcaagaaaaataagccaggcacagaaatacaaacatcatgtgttctcgcttatttccgggatctaaaaataaaaacaattaaactcatggacatagagagtagaaggatgattaccagagcttgggaagggtagtgagagagtgagggggaggcaggaattgttaatggatacaaaaaacaaaaaagaaataatatataataaaaacctactatttgatagcaaacccaggtgactatagtcaataataacttaatcatatatttgaaaataacataaagagtgtaattggaatatttgtaactcaaagaatcactgaggggataccccattctctaggatgtgytttttttcacattgaatgcccttgtcaaaacatctcatgtactccataaatactatgtacccacaaacattaaaaataaaatacaaaaaagaaccatcttctctctgtgtaacaaatactatagtttcaaatccaaggctagagagctgccctgaaataatatacactcttttgacttgaagagttttctctttgctctatacataggtatttgtagaagttaacattctggaacactgacttccaacacagcaagagggacagccacacatgtaaaatacaatgacagagcaggactcacaagtgcattctgctgaaaaggtgagcaagccaaattcaaattatttttcaaactcattgattttagctaccgaaaggtctataggacattatcagacagagtttttgtagaacctaagatttagaaagtgaacttgaatgtgactgtgatcattatgcaacaactgctgtaaaaactcaggttggtgttggccacaaaggactacaacactcttgtgttgccttgacaaagctcctctaaacgtggcagtaaacttagtgcctttcagtattctcctttttcccatagactcacagacagcgagagacacctggctcccccacatcacttccttagcagccaagaacagcatgtcacccagaatgaattctggctgtggcagaaaatggcccacatagagagatgtctggcatttggtagtacctgggtgagagctttccaagctcttaggaagtatacaatgcataaggtccatttctaaatactagaaacatcttgctgtgaaagcacataaagtccatagttaagatgatgatgccatgcagaaaaacacgtggcaatgtaaccaccagtctttactttttcaatggccttgcacatggctgttactgtactgctgaagtccagcgtcagcagtttatgtttccccattgtgtcatcagccca

SEQ ID NO: 727848 - DNA, 953 bp, Homo sapiens
ttgtttagcctacaacaaaggatttagaatattgataaacatagtaaaacagtggcagggtgtgagaggactgactccaattttgaaagaagttctactatgggtaaaatgcttatcaaacagtatcgcatggtacactgaaatctttcgtggaaggaagartcagttaatgtggcaaatttcattgttttcttttaagaaattgttacaaccacttcaatattcagcaaccatcgcccttatcaggcagcagccaacaacatcaaggcaagacccttcaccagcaaaaagactaagactccctgaaggctcaggtgatcattagcattttcagcaataaaagatttttatattttttctttgttttaaataattgagcttcaagtaagggcagcaagtagtttttcttctttttctttctgtttttcttttttcttttctttttttaaagacgtgttttgccatgttgtccaggctggtcttgaactcctgaattcaagtaatcaacctgtcttggcctcccaaagtgatgggattacaggtatgagccaccgaacccagccagcatcaagagttttaaaattaaggacataacgccatttcacactttaaatagactatagtgtagtgtaaacatagcttctttttttaaatagagacaggatctccctatatgcccaggttgatctcacaattcctgggctcaagtgaccctcccgcctccgtctcctaaagtactgggattataggcatgagccatcacacccagccaatataacttcatattcacaaggaaacaaaacaatttgtgtgactcactttgtagcaatatctgctttattgtggtggtctcgaatcaaatctacaatatctttgaggtatggctgtactttctaagcatttcctgagtcagcctactgtttctccatttttattgtcactattctatctat

SEQ ID NO: 727849 - DNA, 960 bp, Homo sapiens
atggtatactcctcagccatcaaacttctggatatcaggtcacttccagcaaggtggagaaacctgaaggacattaagttaaaggaaatgagccaggcacaggaggacaaacacaaacacagcacaatctcacgcacktggaatctaacgaagtgaatctcatagaggagcaacgtcagcagtgcgtaccagaggctgaggggaggcttggaaacagctacaaagtgacactcagatgaatggcaagaattctggtgttctacggcttagcagggtgactaggcttaacaataccctagcatgatattcgatatagcgtgaaggggtgatcggggtacgctctccaccaagaaatcctcactgtagcctgaaacaaagacgcgagttcctgtaatctgatcacaacagcactgatccatatgtcaaacggtcccttgcacccttaaagtaaaagcatagaccatgtgaaatttttgttttcaaataggatcacatcacatttctgaaagtcctgtgggacaacgaagtgccccgcactcccaaagcagctcctacacacataaagtcggtggagcgccattacactcttccactttaaactacttcccaaagctttagttacccagattcctacacacacaaagtcagtggaccatcacactcttccactttaaactacttcccaaagctttagttacccagattcctacacacataaagtcagtggagcgccatcacactcttccactttaaactacttcccaaagctttagttacccagattcctacacatacaaagtcagtggaccatcacactcttccactttaacctacttcccaaagctttagttacccagattcctacacacacaaagtcggtggagccatcacactcttccactttaaactacttcccaaaactttagttacccagatgatttgtgataggcattagcagag

SEQ ID NO: 727850 - DNA, 960 bp, Homo sapiens
atggtatactcctcagccatcaaacttctggatatcaggtcacttccagcaaggtggagaaacctgaaggacattaagttaaaggaaatgagccaggcacaggaggacaaacacaaacacagcacaatctcacgcacttggaatctaacgaagtgaatctcatakaggagcaacgtcagcagtgcgtaccagaggctgaggggaggcttggaaacagctacaaagtgacactcagatgaatggcaagaattctggtgttctacggcttagcagggtgactaggcttaacaataccctagcatgatattcgatatagcgtgaaggggtgatcggggtacgctctccaccaagaaatcctcactgtagcctgaaacaaagacgcgagttcctgtaatctgatcacaacagcactgatccatatgtcaaacggtcccttgcacccttaaagtaaaagcatagaccatgtgaaatttttgttttcaaataggatcacatcacatttctgaaagtcctgtgggacaacgaagtgccccgcactcccaaagcagctcctacacacataaagtcggtggagcgccattacactcttccactttaaactacttcccaaagctttagttacccagattcctacacacacaaagtcagtggaccatcacactcttccactttaaactacttcccaaagctttagttacccagattcctacacacataaagtcagtggagcgccatcacactcttccactttaaactacttcccaaagctttagttacccagattcctacacatacaaagtcagtggaccatcacactcttccactttaacctacttcccaaagctttagttacccagattcctacacacacaaagtcggtggagccatcacactcttccactttaaactacttcccaaaactttagttacccagatgatttgtgataggcattagcagag

SEQ ID NO: 727851 - DNA, 960 bp, Homo sapiens
atggtatactcctcagccatcaaacttctggatatcaggtcacttccagcaaggtggagaaacctgaaggacattaagttaaaggaaatgagccaggcacaggaggacaaacacaaacacagcacaatctcacgcacttggaatctaacgaagtgaatctcatagwggagcaacgtcagcagtgcgtaccagaggctgaggggaggcttggaaacagctacaaagtgacactcagatgaatggcaagaattctggtgttctacggcttagcagggtgactaggcttaacaataccctagcatgatattcgatatagcgtgaaggggtgatcggggtacgctctccaccaagaaatcctcactgtagcctgaaacaaagacgcgagttcctgtaatctgatcacaacagcactgatccatatgtcaaacggtcccttgcacccttaaagtaaaagcatagaccatgtgaaatttttgttttcaaataggatcacatcacatttctgaaagtcctgtgggacaacgaagtgccccgcactcccaaagcagctcctacacacataaagtcggtggagcgccattacactcttccactttaaactacttcccaaagctttagttacccagattcctacacacacaaagtcagtggaccatcacactcttccactttaaactacttcccaaagctttagttacccagattcctacacacataaagtcagtggagcgccatcacactcttccactttaaactacttcccaaagctttagttacccagattcctacacatacaaagtcagtggaccatcacactcttccactttaacctacttcccaaagctttagttacccagattcctacacacacaaagtcggtggagccatcacactcttccactttaaactacttcccaaaactttagttacccagatgatttgtgataggcattagcagag

SEQ ID NO: 727852 - DNA, 3642 bp, Homo sapiens
ctccttagtcttttatttacttatatatgttatgatgctattatcaaatgaattactttattcatttgtttttcagttaacagtttgtcattggtgtatagaaacaagaatactatttgtatgttaattttgtaactctcaactttcaatgcgtttatcagctttaacactttttttcttttttatggagtctttaagattatctctatattggctgggcacggtggctcatgcctgtaatcccggcactttgggaggccgaagtgtgtggatcacgagatcaggagtttgagactagcctggccaatatggtgaaaccctgtctctactaaaaaaatacaaaaattagccgggcgtggtggcacgcacctgtagtcccagctacttgggagactgaggcaggagcagcacttgaacccggaggcggaggttgcagtgagctgagatggtgccactgcattccagcctctttcctatttggatgcctttctgttctttgccttgtatgattactctggctacatgattacatataacgttttcagcatttgtaatttgacatcacatccatctgttgtaatacactgattgttacttttcaacttgaaaacctggacatttatcactaatctccctttctcttcgcctagttcttatccaagaaaacaacctgtcaatataaaccaagttagataattatttttctataaaaccacttcaaatgcatttaaaattttttaacctaacaatttttaaactttgtatgttaatgattttcaactgtggtctctcaaaacaaatccaatacttttagtaggaaaaattacgttaattcctacactaccgttggggctacccaagagttgaccaaaggtgatattaatacatatgcttatttattaccctgttctcacagttctagtgtaagtcttgaaaatcaagtaaatttggaaacatagttgcacaaatcttctcatgagtcacacagttaatccagaatattatttctaagttatcataaagccaacaagcaaatatgatgtactgtttaaaaagaataatcataattttatattatacaaatgaaacatgtattcaatactgtttactgaatatctcaagtatacttatttacgtagaaacaaaggaatcaacggatatctgttatataacgtttaaattactaaaaatactttatatagcatcgctccataaatgctagtgtaaatgctgacgaaagtaaaaatgtcattccctacatttgctaaatatattgtgacacattataagtgtttttaaaacatatcactaaggggcaaaagaagtaggcaaaaataattgtaagtatttaattatggaaaaatttagaacacagcatagtattcatgtgatggaaggattttaaatggaacccagagattagcagcagcaggaagtttctatcatacttaggattgggaaaacaacagaagttactggaacacaaaagcagggtcatgttattaaaaactggggccatggtgagtgtctgtgaccattacctaatatgtcacactgaataaagacagatagcacatgatctgaggcttttttcttccacagatgccttccattggccagaattagcaagtatttagagtgcactgaagactgggagggtctgttctctgtaacagagtgaagagaaggagaaggtgagatgctcattaccttagtgatggcttcaatcgtaccccaaaactcagtatcacacaataaacctgcacatttttattcaatctaaaataaaagttgaatttaaaaaaaaatacagaaagcagtttagactttactaatcagtagtaaagtctttagagctgctcttccaaaagtaagccattgcactgagaaaactgaccattttattcatcagaagaaaaattcaatgaacctttactcactgacaatagtgagaatcagaatgaatgaatcagaatgtctgtcctaactactccctctggttctacttcaattcctgctgcctccatatggttcatcagtgtgtggaagatgaatgtggtaaaactgaagtggctgcttgtacttggagaacaacaacaatgcactgaaaattcactgcttagaagctgttgaaagagtttggcaataaatacaacctaatattcacaataaagagcaatgatctataagcccattttcacatctattgtaaaggccaaccatgtgtttcagccaaaacaaactgattttattaatacaatgaccagacatatataaataataatatgagtttattttaccagaggaattggctctcacacttgcattctattgtaggtttttacacttatccaattctaacaagagttggataaactcagggttttcctaaaataacaatgaccattcctcacaaaagagtcacaagcaaagtctacacctgaaaatgtgtagattgccttccatgtcctgtgtgcattaagaaacgttttatttttacacctggtatacggacaacatggatgaatatgttggctaattagaacaagtttatcaagttctttgaaacccttggtagacaaagtaattcaaggattcagcccagattagtagtgtgaaagcctgcaacaaaccaaactgtagaaaagtaataatgtaaatacaaatgtgatttcaatctccgcttggcgactgacctccctcagaccactaaactctgtgcatcagatgcattaacaatgagacattggtcactcactggggaggtgggcatggtgaaaacctttttttacccatagatctgggggaactgctgaaaagcctgaaatgcattcagttgatgcaccagacatcagttactgaagaagcagaggcaatgaacttcccttaacgttgacctaagtggataaacgcatggcaacatgctgagtgacttcaacaatgcagacacactcaatgtcaaaatgccacagggctacccggtgctgcaaggctgggactcggtttccgtaagactgtcttaaggcagtgagatttctgatggaactgtggacataagcatatgcccccatacgccactcccactactcactgtaggaacagcagtgtaacatttgtcccggctaatgatgacaaacaatccccaagtccctatgcaaaccaagtgctggggccacacagtggcctgagcaacatacctatgggtagtaactattgagaagacatttccaagggattgccattccaacaggcgtggggaatgctcaacatcaccaatcatcagagatgaggtaccggtgccatcacacgctggtcagagtggccatttgtcctaagtcaaaacataacatgctggtgtggcagcagagaaaagcaaacatggctattctcttggaggtaatgcaaactagatctcaaactgtggaaatcagtctgaagatttctggaaaaaaaaaaggacagaaagcagagctacgctttgacgcagcaatcccacccsgtgcgtctaccccagggaaaaacacatgcatctatcaaaaggacacagacactcacatgtccacgggagtgttactgacaggaataaagatgtggaactgacctagatgcccaccaacagaaaattggattttttaaaatgtg

SEQ ID NO: 727853 - DNA, 611 bp, Homo sapiens
acaataaccaaggtggggaatcaacctacttgtctttctacmgatgataaaatcaggaattgaaggatatatgcacaacggtatactcttcggccatcaaacttccggacatcagttcactaccagcaagatggagaaacctggagggcattaagttaaaaaacatgagccaggcagaggaagacaaacacaaatactgtgcaatctcatgcacgtggaatctaacaaagtgaatctcatacagtagcaatgtcaacagtgggtaccagaggctcggaggaggattggaaatggctacaaagggatgctcagatgaggcacaggtactctggtgttctacagcacagcagggtgactaggcttaacaatatcctagcataatattcaatattgctggaaaggatttggaatgctctctccatcaagaaatcctcactgtagcatgaaacagatgctaggtcctgtagtttcattgattcatgtaaaaaggtccattgcaccctttaaataaaaacatagaccatgtcctatttttgttttccaaataggatcacaacacactactaaaaatcccgtgggacaatgaaatgtcctgcattcccaaagcagtt

SEQ ID NO: 727854 - DNA, 611 bp, Homo sapiens
acaataaccaaggtggggaatcaacctacttgtctttctacagatgataaaatcaggaattgaaggatatatgcacaacggtatactcttcggccatcaaacttccggacatcagttcactaccagcaagatggagaaacctggagggcattaagttaaaaaacatgagccaggcagaggaagacaaacacaaatactgtgcaatctcatgcacgtggaatctaacaaagtgaatctcatacagtagcaatgtcaacagtgggtaccagaggctcggaggaggattggaaatggctacaaagggatgctcagatgaggcacaggtactctggtgttctacagcacagcagggtgactaggcttaacaatatcmtagcataatattcaatattgctggaaaggatttggaatgctctctccatcaagaaatcctcactgtagcatgaaacagatgctaggtcctgtagtttcattgattcatgtaaaaaggtccattgcaccctttaaataaaaacatagaccatgtcctatttttgttttccaaataggatcacaacacactactaaaaatcccgtgggacaatgaaatgtcctgcattcccaaagcagtt

SEQ ID NO: 727855 - DNA, 3496 bp, Homo sapiens
aaaatacttaaacacaataaactttactttctcatttattaaaaaaaattaaatccctggcactagaaatgtaaaacatggcaagtatgcatgttctaatctggagttaatttggtatgtgtaatcccataagcaaagcagtagccatgtcctattgtttttttttctttcccaatacacatgctaatctactgcctcccccagcccctggccatattaatattactgaagcccactttcatcagtgtctttccacgatgaaaacaaatgagcaagcaaccaaaaactacacaaaaccacatgcacacacatggccctccttcaatggatctccactgcctagagaattaaatccaattcctctgcatggtatgcaaaatctccacagtatggcccaacctgcctctccagcttgatctctaactgcttccctacacataacacatgtgctgccaagagggacttctggctgtgtcccaaacacgcctgggtttcccagctccagttgccctgcctggtgtctgtgcacatctcacctatccacactcctcccactcttccaagtcacctcatatgcctctctccactccaccagacttaatatgtactgtttccccaccaccccacgtgtataattcttccctgttctatttgtctgggacgtgagctccttgggaacagtctatatcttaagaaagcaccttttaatctctaacactgccgagtatgtgagtagactggaaagaccatgagcttcagaatcaagtggccatggatacctttcttgaaaggtaaagaaagtcttgagagactttcaaggagttacttagccttcctgagctttttgctccttaattagtatagcagtgataataaatcaaccctacaatattaagttatggaaataaatgtctgtgaaagcatctcgctcacagtgattgctcaataatgactcatctcctcccttcccttcttaattcagatttattaacatatgttcaataaagcaataggtatttgtgattccatttttctagttcctaattctagttatttcaggtttttatacaggtgcagaagcccttttcttctacactggttcccctaagaggagttaccttgacctaaaacataagaaaagcaccaaccataaaactctgcctttcttagtcagttatgtgcattttaaaaaataaactttctacttaagctgttattctggaaaaccagaatttcactggcaatccctgatccatttatgccactaaatttccaaggtaaatacagcaaataggcagaaggtggtaatatgaagatagagatgagtcaggatgggaactggtggctgggatgagggccagaagaaaactacaggtataagagccaggaaaattagttgcttaacactgattaatggccatgcttgtcctactcattacaaacattaacttctcatttaagttattttaaaatatttttatgctgacatgctaaagtttttgtgctaacaaaatcaaatttcatctttctggaatatttcagagccaaggtaatctaaaatttttagataggggctaaagaaagggagctcaggcccgacagtctcaggatataggccgaatagaaaatggggggagctgaacgaagagagacgttaggcttgcaaaggtagggaccaggatgtaagcatgaggttcacgttcacagtcccattcactttattaacagcactgagcagtatcactgctgcccaagccatcagaaaggtcctggccaaaaatgcaaatccttctttatcttccagaactggaattcccattcaacagattttctggaaaaataaagtttccttttacagtgtcatggctatttttttgagatcacaatgcccagagtacagcttctagattatcttgatgtctaactcctgattccttaagaacagctgaaatactaagagcaaatgacagctgctagaccccttgaagttactgtttaaaaaaaaaaactgttccctagctatttctctgtttcactgaaagaaaaacaaactcccaggggaaacagaaacctaaaaacctttgaaaataattcttttataacacaggccaattactaaatagagaactcatcaaaagtattttcttaaagcaaaaaactaaacctgcatttaggtaaattaatgtttattcataaggatttttaatgttatttgttattctaaaacttgcaaaaattccatctgttataggagttattgaaatagtcatagatgggtgtatgtgcgggggagaagatggcggcggcgggggaggcagcgtgagcagccggaggagcgccgagtcccattgaaaccggcagccatggccctccacagcccgcagtatatttttggagattttagccctgatgaattcaatcagttctttgtgactcctcgatcttcagttgagcttcctccatgcagtggaacagttctgtgtggcacacaagctggggataaactacctgatggacaagaatatcggagaattgagtttggtgtcaatgaagtcattgaacccagtgacactttgctgagaacccccagctacagtatttcaagcacactgaaccctcaggcccccgaatttattctcggttgtacagcttccaaaacaacccctgatggtatcactaaagaagcaagctayggctccatcgaccagtacccaggctgtgccctcgctttggatggaagttctagtgtggaggcggaagttttggaaaatgatggtgtctcaggtggtcttggacaaagggagcgtaaaaagaagaaaaagcagccacctggatattacagctgtttgaaagatggtggcgatgatagtatttccacagaagccctggtcaatggccatgccaactcagcagtcccgaacagtgtcagtgcagaggatgcagaatttatgggtgacatgcccccgtcagttacgcccaggacttttgacagcccccagaactccacggactctgtcagtgacattgtgcctgacagtcctttccccggagcactcggcagtgacaccgggactgcagggcagcaggaggggggtcccggggttgattttggtcagtcctgcttccctgcaggggctggcagagacaccctgtcaaggacagctggggctcagccctgcgttggtaccgatactactgaaaaccttggagttgctaatggacaaatactcgaatcctcgggtgagggcacagctaccaacggggtggagttgcacaccatggaaagcatagacttggacccagccaaacccgagagtccatcacctcctgctgacggcacgggctctgcatcaggcacccttcctgtcagccagcccaggtcctggaccagtctctttcacgattctaagccctcttcctcctggccggtggcctatgtggaagctaagtattcccctcccgctatatctcccctggtttctgaaaagcaggttga

SEQ ID NO: 727856 - DNA, 3771 bp, Homo sapiens
gagtctggaatttcatagttattcttgtttaggaaattttttttaaaagtgaatttctggccaggtgcagtggctcatgcctgtaatcccagcactttgggaggctgaggccggcagatcatttgaggtcaggagtttgagaccagcctggccaacatggtgaaaacccatctctactaaaaatataaaaattagccgggcatggtggtgggtgcctgtaatcccagctacttgggaggctgaagcaggagaatcgcctgaacctgggaggtggagattgcagtgagccaagattgcaccactgcactctagcctaggaaacagagtgagactcagtctcaaaaaaaacaaacaaacaaacaaaaaaaaaaaccaaaatacttgtaatcataaataataaattcagatgtattgtagacatgattaaagttgtggaggtgacccctatgtgcttgagatttaggtaactcttccttaccttacattatagatgccattcctctcatttataacaatgttaagatttcttcaatttaatcctgtgcaatgtatgaatacaaggaaaaagtaagtaaatgttcattcatgaatatttccctgaacagcatttttgtttctttcttacttttaaaaattacttttccatttcccacacctatgtgactgaacagcattcattgtataccagaagtatttcccttaatccaacataatgacttactacaaatagaaatgaggcaattgatgtacttaaatcctttataaaagcttagaagccatcttaaaatgcttcgcagaagtagcaaatacagtattttgagtaggattttcaagtgcttactgtgggatcagagcacaaatctcctctccaagaagagaaatgtgaacattaaagactcctattgtccagcgtggatgaaaatggaaacataattcacaatttgttgtggacaaggagcctcacagagagaatgtttccattgtcttaaagtgtgttactcagctaccctactagcatttttttcactgtgctgacaagaaagggaaggaaaaatattcacaacccaggttgctaaactaagagctttaattaatgagactccagaaagggccctagcaagataaaaatgtgattgcactgtgctctctgacctcagttgcaagttctttgacttctctttcatgttctcagaccctcagtgtaaagatataagggctttctgagattgcaagttgtttttctaaaaagcctctttacacatctggaatataacctcttaaacctaacccaggcttatgttaacaccgtggctttaaagcatgtttagactgcgtggaatcataaacatgttgaatgtaggaaacactgttagtttataaattgggcctgctattaagttctgaggtcattagtctggtttttttttgttttgttttgctttgtttttgtttttttgttttttgttttgtccttacttttttatttttccaaactatatgtgctttgcaaatctaaggggtgggtaagaaaacagtttagcctggtttttttccatggttgcttccaccaagatggctctggccttttctcatccaaaatcaacataaagctgtttctcccatatcaccaccatgactaccacacaaagccaggatgtctatttttaaatttgttgcttcacagacttactactaaactcctggataatgggggaggtgggcaacacgacgcccagagtcatgtctgtctgtgtgatactgggcaagttactttacctcgttgagatgtttatggttctatgaatggaatgatctgcaccatttgctcactagatccccctttgcaactaagccatgataataccccaaataagatgacaggattttatacaggcatgcctgcatattgacattttgatcaatgacacacagcacgtatgaccctggttctataggattagaacaccacatttttactgtaccttttctatgtttggctattttttgcttgttttgttttttgagagagtctcgctctgttgaacaggctggagtgaagtggcccaatcctggctcactgcaagctccaccttccgggttcaagccattctcctgcctcagtctcccaagtagctgggattacaggcacctgccaccatgcctagctaatttttgtatttttagtagagacagggcttcaccatgttggccaggctggtcttgaactcctgacttcaggtgatccgcccaccttggcctcccaaagtactgggattacaggcgtgagccaccgtacccagcctatttggcttttttttttttaaatcccatcctaaagaaaagctaggtacacaaatacttaccattgtgttacagttaccttcagtattcagtactactctatatgctgtatgggtttgtagcctgcgggcaacagactgtaccatatagcctcagtgtgtagtcagctctgccatgtaggtttgtgagtacaccctatgakatctgcacagtgatgcactcacctaataatgcatttctcagaatgcatccccattgttaagtgatgcatcctgggctttgtgcattaaaaaaatgccagaacactccatacttagtgcatagactttatcaaatgttgaataaaaacagaaacaaaaaggagacaatcctacaatgaaaaggagacactcatgtctaccctagtgattcactgtacgtggaggaggtaagtggggcatggacaggtctacaaatataatacatatatacccgacaaccacagtgctttgcatttctttatcagtgaaaaacaaactgagatctgaagtgtataaacagttccttagtaaagtctatttgagaaaaagaatcaaatgtgcatcaatatatcaaaactgacaaatacaagaaaagcattcagctagagataattcacagcattttattcaagttaatccatttcattcaataatcttccatattgttcccagcaccactattactatcattatttctcttcggagaagaccagatattaagaaatcgggtttgaatttccatgatgcctaactctatggtcaaaaatccttttccttaccaaaaaccaacttcttaatcaccagagaaaagagggaaagactgagatatatttgcagaaatttatgtcaactaaagacaattcatagttcataatctttcaggcttgtgctttacttggtgactctcttttggggaggggcttgtttcttataaatgtttgtctaatacaaatcacttgccccactgtaccatggaagggaaatgagggctagtccccaaagagcaagcaagcagtcctcctgggaagaagccctaatggctcctagtggtgacacagtcattctgccagggtgaggggacacagtcattctgccagggtgaagggacacagtcattctgcctccccaacctgtgagcaataataaaatataaccaagtgaacaggagaggtactaactagctggataatccatggtggactagaatctctaaacaggaatgtttatgtgttttgaataaatcagagctggaaagagacacttttggagaagtgatggagaatagaaaagtatgaaaaagataaaggtttctcaccaaggaacccacaaaaaaggtagtaccagtcaaaggtagtcttgggcttttcttttgagatgagtgtaccccacgtgggttgtgccattttcatataaaaattggaatgataatgaacaagtgaaagtgaaatca

SEQ ID NO: 727857 - DNA, 2939 bp, Homo sapiens
cttgtgattgtgtgagtcaatactctttaataactcattttatatatacatttatcctattagtcatgtccctctagagaatcctaatacaacaagacacagcacctagtcacagtgagaggggtggacattatttagaagcaaagacagttcatccatatgaaaaggagagataacagaatgtaggtatagatatataaagatgagcagatgaagagactagagattttgaaattcttgtcaaatgaccactttttttttttacaagtgaaattgaaaataaagtcatcagtaaagagttaagatgggaaggagagaaaataagtatgaactgttactctgggaaaggatgagagtgaatggggcagggaatatttttttctgggaaacataaagacaggagctttgtgatcatgaatttcagttgaaacaaattaacctgattccctcttactctattttaaatttcagttttatttatttaaaaatctgaacgtaatatccataattatagtattatacagaagagtttcactgccctaaaattcctctgtgctccatctgtgcgtccctctgtcccccataactcctggcaaccactgattttttttaactgtctccatagttttgcctttcccagaatgtcatgtagctggagtcatacagtacgtagcatttcctgattggcttcactcagaaacatgtatttgagattgcttaatgtctttttatggcttgataggtcatttctttttaatgctgaataacatttaattatttggatgtattacagtttatccatttacctaatgaaggacatcttggttgcttccaagtttggcaattatgaattaaaccgctataaacattatcgtgcaggtttttgtgtggacatgttttcaatttctttgggtaaatactaaggagcattattgctagattatatgataagagtttgcttagttttgtaaaaagctgaccaactgtcttcgtaagtggtgtaacatttgcattcctaccagcatcaccagcatttggtgctgtctgcctttcatattcaccaggcttaatcttcataattgtgctgcacttacttttaaaacgaaagtcttcaattcatcccctgctttgtttcttaaacaatcttgaatgagttctttaaagtctaaaaatctccagaaaataaaagtattaactatatattgagagctgaagtttgcagagcaaaggagtgacactaaattggtgatgatataaaacctcagctgaaaattctaatagctaaagaagaggtatgatattttcatttatagttccttctcatttacatgtgtaaacttaagaaagtcaggagtattgtattcttaggaaaatcagagcacttcaaaaaattgttgtttataatgtttagaaatttagaccgaacattttcatggtatagactagagtagtcttagctaaacagaaccatttattagtctgttgtacatattgtttcagacacatttattatattataaacaaaaggagaataaagtaatgtaaaactactttgagaaggtgtctaataaaaataagataattatgggatttctattatccacactcaattaagactaatatttttaatttaaaaaagttttttaaagaagaattcctgaatggtaattgataatacattaccttggcttttctgataaaaatccttgaagaataaaaataatttcttcctacttctatattacgatcagcataattgcaataatatgcttcaattgttagtaaagtaacatttatgttttgggatcaatgaatttaagccagcactaagaattttattactattcctccactacatttcagagagttatttcttcatccttaaacataccacaataataagtctgctaggtccatttagattttcaacccaaccctaaaagaaagaaggtttctattggttacacatttcagaagattgttgtatctttgaaacatctgcagtctcatcttaataaatttcaaacaagagcactgagaccccagccaacagaactatctaattcagtattattaagatctgaaggatcagtggcaaagcattggctattttctgcaccttgactatgcaaaaattaaaatttggccaggattgttgttcrtagcaggagtcatgaatggttttgtggtgttttatgacatcttaagggccacattgaaccttgttcttatattatgatctgctaagcaattcaccaaccatacttctccacctcagtcctgactttagcctccttaggagaatattggagacatgattggtagtaatggcccattccttgacatttttgaccagctatagagcccatgccagatacacatatgtatgtgtgtgtgtgtatatgtagtgtgtgtgtgtgtatatgtagtgtgtgtgtgtgtgtgttgacttgcttaaagatgttacagggaagattatgtttaagaacaattagagggaaatgtctttttgagtttgtttcctaaaccctaagccattcagctgaccttattatgtctctttacctcatagtgtaaaagtcaaaatgtgtgtgtataatgggaaaggagagaggcaggaggagaagatgaagggattaatatccatgagccttttagtaaggacctgccttttactagagactgagcactcctcatacattgtctcattaaaccaggtctccaaaatagtatccctcctgttttatggaagggacaactcaaaaattttgcattgccagtaagtggtggagctggaatttatccgccccaaagcttcacagacttgctttacagaagatggtataattctatctcacaccagttagaatggcgatcattaaagagtcaggaaacaacaggtgctggagagcatgtggagaaataggaacacttttaca

SEQ ID NO: 727858 - DNA, 2939 bp, Homo sapiens
cttgtgattgtgtgagtcaatactctttaataactcattttatatatacatttatcctattagtcatgtccctctagagaatcctaatacaacaagacacagcacctagtcacagtgagaggggtggacattatttagaagcaaagacagttcatccatatgaaaaggagagataacagaatgtaggtatagatatataaagatgagcagatgaagagactagagattttgaaattcttgtcaaatgaccactttttttttttacaagtgaaattgaaaataaagtcatcagtaaagagttaagatgggaaggagagaaaataagtatgaactgttactctgggaaaggatgagagtgaatggggcagggaatatttttttctgggaaacataaagacaggagctttgtgatcatgaatttcagttgaaacaaattaacctgattccctcttactctattttaaatttcagttttatttatttaaaaatctgaacgtaatatccataattatagtattatacagaagagtttcactgccctaaaattcctctgtgctccatctgtgcgtccctctgtcccccataactcctggcaaccactgattttttttaactgtctccatagttttgcctttcccagaatgtcatgtagctggagtcatacagtacgtagcatttcctgattggcttcactcagaaacatgtatttgagattgcttaatgtctttttatggcttgataggtcatttctttttaatgctgaataacatttaattatttggatgtattacagtttatccatttacctaatgaaggacatcttggttgcttccaagtttggcaattatgaattaaaccgctataaacattatcgtgcaggtttttgtgtggacatgttttcaatttctttgggtaaatactaaggagcattattgctagattatatgataagagtttgcttagttttgtaaaaagctgaccaactgtcttcgtaagtggtgtaacatttgcattcctaccagcatcaccagcatttggtgctgtctgcctttcatattcaccaggcttaatcttcataattgtgctgcacttacttttaaaacgaaagtcttcaattcatcccctgctttgtttcttaaacaatcttgaatgagttctttaaagtctaaaaatctccagaaaataaaagtattaactatatattgagagctgaagtttgcagagcaaaggagtgacactaaattggtgatgatataaaacctcagctgaaaattctaatagctaaagaagaggtatgatattttcatttatagttccttctcatttacatgtgtaaacttaagaaagtcaggagtattgtattcttaggaaaatcagagcacttcaaaaaattgttgtttataatgtttagaaatttagaccgaacattttcatggtatagactagagtagtcttagctaaacagaaccatttattagtctgttgtacatattgtttcagacacatttattatattataaacaaaaggagaataaagtaatgtaaaactactttgagaaggtgtctaataaaaataagataattatgggatttctattatccacactcaattaagactaatatttttaatttaaaaaagttttttaaagaagaattcctgaatggtaattgataatacattaccttggcttttctgataaaaatccttgaagaataaaaataatttcttcctacttctatattacgatcagcataattgcaataatatgcttcaattgttagtaaagtaacatttatgttttgggatcaatgaatttaagccagcactaagaattttattactattcctccactacatttcagagagttatttcttcatccttaaacataccacaataataagtctgctaggtccatttagattttcaacccaaccctaaaagaaagaaggtttctattggttacacatttcagaagattgttgtatctttgaaacatctgcagtctcatcttaataaatttcaaacaagagcactgagaccccagccaacagaactatctaattcagtattattaagatctgaaggatcagtggcaaagcattggctattttctgcaccttgactatgcaaaaattaaaatttggccaggattgttgttcgtagcaggagtcatgaatggttttgtggtgttttatgacatcttaagggccacattgaaccttgttcttatattatgatctgctaagcaattcaccaaccatacttctccacctcagtcctgactttagcctccttaggagaatattggagacatgattggtagtaatggcccattycttgacatttttgaccagctatagagcccatgccagatacacatatgtatgtgtgtgtgtgtatatgtagtgtgtgtgtgtgtatatgtagtgtgtgtgtgtgtgtgttgacttgcttaaagatgttacagggaagattatgtttaagaacaattagagggaaatgtctttttgagtttgtttcctaaaccctaagccattcagctgaccttattatgtctctttacctcatagtgtaaaagtcaaaatgtgtgtgtataatgggaaaggagagaggcaggaggagaagatgaagggattaatatccatgagccttttagtaaggacctgccttttactagagactgagcactcctcatacattgtctcattaaaccaggtctccaaaatagtatccctcctgttttatggaagggacaactcaaaaattttgcattgccagtaagtggtggagctggaatttatccgccccaaagcttcacagacttgctttacagaagatggtataattctatctcacaccagttagaatggcgatcattaaagagtcaggaaacaacaggtgctggagagcatgtggagaaataggaacacttttaca

SEQ ID NO: 727859 - DNA, 626 bp, Homo sapiens
taactctagttattctgttttatgtttaaagttgccatcgtttctcatggtgatttttatttccttattaatagtaagaaagagacgtgatgtaatgtactatttctcatgtagagaacttttaaggaagatagaaataaaatttacatcctgctatttgtataaagttatgagatacatgataattgcattgttacaagcaagtgcatacttggggaaataaatacatcacaaaggtgaatgaaatagaattttactttttggcgtgatacattgtgtgtcaaggtcataatgagatatagagccacaagatgcaaggaatcttggtctccaagtagattttgtaggaataagaaatagtcaaacatctgtaccgtttagtcaaggagattttctcattgtttgaaaacacatattgtgtaatctgactaaatcatgttcaacaaattaagccttctccaccaaaataaatattcttaagacatgtaaaagattttcagtatacccaaaaaactttcagactctaacaaagacaactttgaagtaagttttrctatttttgttccaatttgagagatcgatttcatcacataaacacatatcatatatttaattattttacatta

SEQ ID NO: 727860 - DNA, 686 bp, Homo sapiens
caggattatcccatggctggccaggctgagctgtaggggcagctcctgtactctcagcctcctccttcagaatccctcctcctcactccccattcgtgggctgcttctcccaggatcaggcagcctctgcccaccttttctcacttcaccctttctccttgcagaattagaaagaatcggctccagctatttgtttcttactgtggatttatccatgtgtcacctctcccaggcagaattacattctgaaggcatctctaattgagattgctccatggggaaggactcttagggctcagaaagcaggtggtaaagccctggagtgaggcaggaaccccaaagccctatgacaccccatataggtacccccaaacctgcctatacttcaggccaggcccccagtatagagatgraaaaatagtcccacttttggtcacagattctggaaaactgtgagattctggggaaatccattttgagtaataccttttagaagaagaaaaaaatggaagtagcttatcatagaatgggttttgttagacaaagatggcaattcaggaggaaacataaatttaacaactctcaagtatgcacagctgacatctcgtagagcggggctggtgactaagccagaagttactgtctgcatcctttgtaacttacaaataaaaatgaggaccagacat

SEQ ID NO: 727861 - DNA, 583 bp, Homo sapiens
taagaattcaataactactttgagtttaactggaatggtaggaattggaaagccaggaaggtgtgaggtagggcttcccacatgttcatgccataagcatctctgtgtgcttgttaaaactgcaycatctaggtcctcatccccagagattccaattctttgggtctggggtgaggcccaagaagtgccactgcaacaagcatcagctgattctgaggtcatccttcagaaaccctggggagagaccacggaggaattcatgataagaggctatgattaaagaaaaaaaggagaaaggtgttgcattctaagactgtgagaactggaaaagaagaaaaagagatgtgtcaaaggcgaccactaaatctacttatctgcctttgacgatgaatgtagtctttatcccaagaagagaatattctggaagagctgggcaactggtaaaaggaaggggagaggggggagatgcctcctgcatcagtaagtggcaagataccaaacctaagctaaggcttaaaataattattaatacttgatttaagtttataaaagagtaaggaatgaaaataagaggaaagaatgc

SEQ ID NO: 727862 - DNA, 607 bp, Homo sapiens
atccagggctggcgtctggcaagggccttcttgctgcaacatcctatggcagaaggtggaaaggcaaaagagcaagagggggctgaacctgcccttttattacagtaccaatcccatccatgatgtggcctaatcacctcttaaaggccccacttcccgataacattacatttacaataaaatttgagcatgcattttggacaggacaaacattcaaaccacagcaacagctgacctgccctcactgcccccacacacagatagacccatgaggggctgagatgattaagtactagaggggtctactgcgtgctttggcatgattgtcacttgttaaaacaagtattctgcagagttatagaacttcagaagtatattggtaaatctgaaactttattttaaaatcaattataggtcaggtacagtggctcatgcctgtaatcccagcactttgggaggcccaggtgggtggatgacttgagatcaggagttcaagaccagcctgaccaacgtggtgaaaccccatctctactaaaaatacaaaattagccaggcgtgatggtgcgcacytgtaatcccagctacttgaggctgaggcaggagtatc

SEQ ID NO: 727863 - DNA, 661 bp, Homo sapiens
acatgaaaagtctgtgaaggatgctttctaaagacacataagaaaggaggggaggagagtggggagaggacaggaagctgaggctgcagcgaggcaagagtttgcgtccccatcttgtgttcttttggattttttttttttgagacagggtcttcctctgtcacctagcctggtgcagtgttgcaatcttggctcactgcagccttgacctcttgggctcaagtgatccttccacctcagcctcccaagtagctgggactacaggcatgcgtcaccaccccacacccggctaatttgtgtgtgtgtgtgtgtgtgtgtgtagatacaatatatataatgtgtatatataaatttatgtatgtatatacatataaatatgtatatatacatgtatatacatataaatatgtatatatatactcacatatctatctatacatatatatgcatatagatacacacacacacaaacacacattttttttgtttgggtagagacagggtttcttcatgtttcttcttgttgcccaagctggtctcaaactcctgggctcgagcgatctgyccatctcagccccccacagtgctgagattacaggcatgagccaccacacccaggggacctcttttgatttttgaacacagtacctgggcaaacttt

SEQ ID NO: 727864 - DNA, 620 bp, Homo sapiens
caatgtgaatacaatgaacactactgtgcacttataaatgtgcctactatgaggttagccctaggccaagcactgtaggggacgcgtacgtttaagacagtccctgctttcagttgtgtcacggtccacttctgctattaaatcaaggatcctgagcagcagcccagaagcccacgctagccaaccatgatgtcatcactgccactgccattgaaggcactgccagaagcccaaagaaacaaaaacactcctcccttcttccggtcttacaatttcctgctagtgcccccatgacamagcccaataagaagccaattggtgagttattctgagaaatgtgtcatgctgctttctttccccatcactatagaggaaggtataaggatgaatatgaatttgtgttggcgatacactgttaggcacagtccacccctttgtctctttttcatccatacacagccctccacccatatataaacttgataaagcaacaacagcaacattataatgcttctgttgatgcaattatcccttgcacaaatgaaggcatgctcactagttccctgataagggggataagaagtgccattagttggtgcatttacatttatatgttgatg

SEQ ID NO: 727865 - DNA, 620 bp, Homo sapiens
caatgtgaatacaatgaacactactgtgcacttataaatgtgcctactatgaggttagccctaggccaagcactgtaggggacgcgtacgtttaagacagtccctgctttcagttgtgtcacggtccacttctgctattaaatcaaggatcctgagcagcagcccagaagcccacgctagccaaccatgatgtcatcactgccactgccattgaaggcactgccagaagcccaaagaaacaaaaacactcctcccttcttccggtcttacaatttcctgctagtgcccccatgacacagcccaataagaagccaattggtgagttattctgagaaatgtgtcatgctgctttctttcccmatcactatagaggaaggtataaggatgaatatgaatttgtgttggcgatacactgttaggcacagtccacccctttgtctctttttcatccatacacagccctccacccatatataaacttgataaagcaacaacagcaacattataatgcttctgttgatgcaattatcccttgcacaaatgaaggcatgctcactagttccctgataagggggataagaagtgccattagttggtgcatttacatttatatgttgatg

SEQ ID NO: 727866 - DNA, 2246 bp, Homo sapiens
cactccatcctgggcaacagagcgagactctgtctcaaaaaataaataaataaaataaataaaagtatcgtatgttagggactttttatgttttctgtgtctgaattttaactttttgtagaaattttttcaatactctgtaatcctatagaatattaaaactttaccggatagcgtaagaatattctgtaaattcatataattttcagtattgtctgagatttatgaaaaccaatatataaacactggctgtttaatcacagcttgatttagttgttcacccatgtttatgtgtaaataatcctgagttaataatagaggtaacaacaaaataaccaatgttaattagaaagtttcattttagccttttaaaggtagaaaagtcttatgtttattaaaattctatatttgtatcttttttctaccttgtggtttaatcaaagaaaagtcataaagtcatcttttaaactgaaaactttcaaacagtactaatgtaaaacattaaagagtttgttttacattgactatgagtattaaggaaaatgaaatttaaatttttgatatttattttattgaggaatactgtagccttctaagtctacttcacagtacagtcatgcaccccataatggcaccacataacaaccacataactggtcaacagtggaccccatgtacaacagtggttctgtaagattatagattatataatactgtgtttttactttgccttttctatgtttagatacacaaatccttaaccattgtgttacagttgcttacagtattcagtgcagtaacatgctctacaggttcgtagcccaggagccataggctgtaccatatagcctagttgtgtagtaggcaatactattgttaagtacactctatgatattcacacaatggggaaattgcctaatgacacctttcttagaatgtatccctgtaggtaagcaacacattattagtacagaaagttgcttaaaactttttaatttgagactgtatcttcaggttacctttttactaaataaaaggattgagacttgatagctcctgccttcagtgggcatctccttttatcttataactcagcagggacactgagagacctttaagctaaaattagatttttcatttttttaagaacttttttttgaaagacagtttgaaaagaattattagaaagtagagctgggtgcagtggctcacacctgtaatcccagcaccttgggaggccaaggtgggcaaatcacttgaggtcaggagtttgagaaccagcctggccaacatggtgaaaccccatctccacaaaatacaaaaattatccaggcgtggtggtgcgtgcctgtaatcccagctgccctagaggcggaggcatggggatccattgaacctgggaggcagaggttgcggtgagccaagattgcaccgctgcactctagcctgggcaacagagtgagactccatctcaaaaagaaaaaaaaaggaatactatttaaatttataatttagttgtttttatacaattgtttacacattctttttctcagaaaccaaatgttttctatttcaattgagtaagttatatggaaggtactattccaggtagaaaactattgtacagtttagtcctctagaccctaatttaatatctaacacatttgtgaaaattaaaagtttaaattgtttaamgtttaaagcgaaatatttgtaaacatactaactgtggaacctgtattttttttttcctaatctggggagaaaatgggtatattcaaaacatttggtgtttaggcttgatttcttaattgtctgggcagattttaacagctcgtccaggattatgtaagcacttagtggtgcctttcaacaatttaaaaaggaaatccagtatgtgaagcccagtgtggtggctcacgctcgtaatcccagcactttgagaggtcaaggtgggtggatcacttgaggccaggagtttgagatcagcctggccaacatagtgaaaccccatctctactaaaaatacaaaatttagctgggtgtggtagtgcgcacctgtagtcccagctgctcaggaggctgaggcagaattgcttgaacccgggaggcagaggttgtagtaagccacgattgtgccactgcactccagcctgggtaacagagcaagactctgtctcaaaaaaaaaaaaaaaaaaatccagtacatgagagatttagtacttttctagaaatctctcaagcc

SEQ ID NO: 727867 - DNA, 930 bp, Homo sapiens
tacaaattttattggttaaaaattttattttctttacaaatcattccttgmttcttaacagccccatcttactctgtttattgtattttaatctttactattgcttttaattaggtgactaagagatctgaattctaaaagaatttagatttaaaagatatttcagctccaaaatgtgaaagcattttgtttaaatcttaattgcatcttttaatttaatattcaattataatactattataaggtcaaattgagtggagattgtctaactttattaacatcggcataattgctaaaaggatagaattttcagaggtcatctgattcttgttcaggatcatttcttatcgattgaccaggaaatggaacagtttgaggttttcctctaattatttaaagccatcttcacttatctcattatatatttataatgtttcaaactaatcatgatgattatatctttataaaggttactgtaagggattcagccttcactataaaaaaaaactgctgcaatttcttcaaaacattaaataatagaaagtgtagccactgatttggaaaacctgcatgtaaataagagatcatctgttaataattttagtaataatttagaacaatttgtatacttatgctcatagttccataaaccacatattgtggttttctgggaagtaatatggtgctatataatatgaagatatcgttactcttatgcaaaatgcaatattaaagcttctactcaagaagtttacactttccataggtgcaagtgtagttatacatttgcatatttagtttgcattggaaattacagggatcattttaaagaagtaatgttggattaatttttatgcagttgtactttttggaaataaaattgtattaataataccaaatggtgctttttttgtttgtttttaaatggca

SEQ ID NO: 727868 - DNA, 930 bp, Homo sapiens
tacaaattttattggttaaaaattttattttctttacaaatcattccttgattcttaacagccccatcttactctgtttattgtattttaatctttactattgcttttaattaggtgactaagagatctgaattctaaaagaatttagatttaaaagatatttcagctccaaaatgtgaaagcattttgtttaaatcttaattgcatcttttaatttaatattcaattataatactattataaggtcaaattgagtggagattgtctaactttattaacatcggcataattgctaaaaggatagaattttcagaggtcatctgattcttgttcaggatcatttcttatcgattgaccaggaaatggaacagtttgaggttttcctctaattatttaaagccatcttcacttatctcattatatatttataatgtttcaaactaatcatgatgattatatctttataaaggttactgtaagggattcagccttcactataaaaaaaamctgctgcaatttcttcaaaacattaaataatagaaagtgtagccactgatttggaaaacctgcatgtaaataagagatcatctgttaataattttagtaataatttagaacaatttgtatacttatgctcatagttccataaaccacatattgtggttttctgggaagtaatatggtgctatataatatgaagatatcgttactcttatgcaaaatgcaatattaaagcttctactcaagaagtttacactttccataggtgcaagtgtagttatacatttgcatatttagtttgcattggaaattacagggatcattttaaagaagtaatgttggattaatttttatgcagttgtactttttggaaataaaattgtattaataataccaaatggtgctttttttgtttgtttttaaatggca

SEQ ID NO: 727869 - DNA, 1263 bp, Homo sapiens
tattggtggtaagagtggttaataagcctgtcagttaggtaagcccaagtgatttggtctgcattaaaacaaacaaataggaagtttagaagcagtggtagcagcctttggttgtcttatttcttatttcttgattgctgttttatttctctctgtcagtaaatgacttccattctttcagcattctctatttcattactcaagtctctgttttctactttctctttccagtacccgaacagcagagaagacagtgttggaaaagctagcmttgttattagtctaaatattttattgaacaagggctggtagaatattttgaaggagcacaagctataataaatcatggcatctaccaatgacagtttcaaatgaacacgttcattgggccagacaagtacatcactaagagtgttatttacctcaggtgctgacatatagtgccagatgttgaatttaaaccctgactcagtgattgtggctgaaaactgcattggcattttaaaaagcatctgttataaaccctgatctgagtaagacacaaaccacagaccttaatgcaggcaataacgaatgagagtttaaagtgattaccttggcaagttcagaaagcatgaaggctgaggtcaactcagagtatggaacatgttcctgttaaagggacgtttgtggggtcacttttctaagcactttcccacagaagtatgaaagatgtgtggataacttctaacttagcattaaatgatattttatgaatttgcaatatttttgcacgtgttttattttaaaagatacccttatgagtactgcagttggaccccgcaagaggaatttatgagttactgaatagtcataagagttgtacactgccagtgaggatcattttcaatagggtaacatgcatgtcattcgaagctgtatatgtagttttggaaaataacatataaagcctgatactaattatttacatcagcaaatagattgacattaaattaaaaaaatatagcagcagttctgttctagaaaatatataacaaaaagtaataaactaaaaaataattaagctttacataaataaatttgatttaatatgttgatatccatccactataactggcattttgtctttaattttaattaataattctgtacattttacacaaaaatatgttataaagaatactttttattttttatatttatcatagtttatattttgataaaaacattgaaattttgtaaatatgtaaaattttatttgat

SEQ ID NO: 727870 - DNA, 1263 bp, Homo sapiens
tattggtggtaagagtggttaataagcctgtcagttaggtaagcccaagtgatttggtctgcattaaaacaaacaaataggaagtttagaagcagtggtagcagcctttggttgtcttatttcttatttcttgattgctgttttatttctctctgtcagtaaatgacttccattctttcagcattctctatttcattactcaagtctctgttttctactttctctttccagtacccgaacagcagagaagacagtgttggaaaagctagcattgttattagtctaaatattttattgaacaagggctggtagaatattttgaaggagcacaagctataataaatcatggcatctaccaatgacagtttcaaatgaacacgttcattgggccagacaagtacatcactaagagtgttatttacctcaggtgctgacatatagtgccagatgttgaatttaaaccctgactcagtgattgtggctgaaaactgcattggcattttaaaaagcatctgttataaaccctgatctgagtaagacacaaaccacagaccttaatgcaggcaataacgaatgagagtttaaagtgattaccttggcaagttcagaaagcatgaaggctgaggtcaactcagagtatggaacatgttcctgttaaagggacgtttgtggggtcacttttctaagcactttcccacagaagtatgaaagatgtgtggataacttctaacttagcattaaatgatattttatgaatttgcaatatttttgcacgtgttttattttaaaagatacccttatgagtactgcagttggaccccgcaagaggaatttatgagttactgaatagtcataagagttgtacactgccagtgaggatcattttcaatagggtaacatgcatgtcattcgaagctgtatatgtagttttggaaaataacatataaagcctgatactaattatttacrtcagcaaatagattgacattaaattaaaaaaatatagcagcagttctgttctagaaaatatataacaaaaagtaataaactaaaaaataattaagctttacataaataaatttgatttaatatgttgatatccatccactataactggcattttgtctttaattttaattaataattctgtacattttacacaaaaatatgttataaagaatactttttattttttatatttatcatagtttatattttgataaaaacattgaaattttgtaaatatgtaaaattttatttgat

SEQ ID NO: 727871 - DNA, 615 bp, Homo sapiens
tatgcagtccattgttgactgaaacgttacgtggcacatgactgtagtttcaaatcaaattccattatgataattacgatgataatttcaataaaaatctctgtatgacaaaatatttaaacattcaaatttacttatttcagacactgttaggcctayagcaattcaaatacaacaaaaaaatcctattgattggtcccttgatgtttgtttcagtggcatgctgaagttggttcctactggcttgtaagagccaactgttaaatttgtaagaactttgagagctggttgtgaaactgttggtagcttgaaatcagccctgcagggagtatttacaccatagaaattggcaaacaccgcgaattaggatggcccccattccctggccgcaaacaactagtttaccggcatgccactggttgtaatgtattataacctatggcagaaaatacaagtaatcttataattaactgcccaatatataacaaattttgcatattacatgtatacaagaaacagacagtgacccttatattagttatcacagcgatttgaataatgactgtagaacaaatagaaaaaccagacacttttgatgagaggaggtaaattttt

SEQ ID NO: 727872 - DNA, 615 bp, Homo sapiens
tatgcagtccattgttgactgaaacgttacgtggcacatgactgtagtttcaaatcaaattccattatgataattacgatgataatttcaataaaaatctctgtatgacaaaatatttaaacattcaaatttacttatttcagacactgttaggcctacagcaattcaaatacaacaaaaaaatcctattgattggtcccttgatgtttgtttcagtggcrtgctgaagttggttcctactggcttgtaagagccaactgttaaatttgtaagaactttgagagctggttgtgaaactgttggtagcttgaaatcagccctgcagggagtatttacaccatagaaattggcaaacaccgcgaattaggatggcccccattccctggccgcaaacaactagtttaccggcatgccactggttgtaatgtattataacctatggcagaaaatacaagtaatcttataattaactgcccaatatataacaaattttgcatattacatgtatacaagaaacagacagtgacccttatattagttatcacagcgatttgaataatgactgtagaacaaatagaaaaaccagacacttttgatgagaggaggtaaattttt

SEQ ID NO: 727873 - DNA, 615 bp, Homo sapiens
tatgcagtccattgttgactgaaacgttacgtggcacatgactgtagtttcaaatcaaattccattatgataattacgatgataatttcaataaaaatctctgtatgacaaaatatttaaacattcaaatttacttatttcagacactgttaggcctacagcaattcaaatacaacaaaaaaatcctattgattggtcccttgatgtttgtttcagtggcatgctgaagttggttcctactggcttgtaagagccaactgttaaatttgtaagaaytttgagagctggttgtgaaactgttggtagcttgaaatcagccctgcagggagtatttacaccatagaaattggcaaacaccgcgaattaggatggcccccattccctggccgcaaacaactagtttaccggcatgccactggttgtaatgtattataacctatggcagaaaatacaagtaatcttataattaactgcccaatatataacaaattttgcatattacatgtatacaagaaacagacagtgacccttatattagttatcacagcgatttgaataatgactgtagaacaaatagaaaaaccagacacttttgatgagaggaggtaaattttt

SEQ ID NO: 727874 - DNA, 335 bp, Homo sapiens
aggtaaataggactatttcttaagcaagaaattgagatgctagaaattaagaaaccccaccgtgggtcaaactggccaaaggcaaaagcaggatgaagaaagcaaactttctgagcacatcttccgcaactggactctgccatttttattaaatgaaggaagggtgggaaaagtgacccggttgagtttccctagttgmagaggcctcctgctcagtgctgttgaaaaacaaatgcttgcatttgagaaagtgattgcaggaggagcatcttccttgggaaatatatatgtctgttttgtgacatagataagctcttctgggagattatgtttat

SEQ ID NO: 727875 - DNA, 2014 bp, Homo sapiens
tttttttttttttttttttttgagacggagtctcactctgttgcccatgctggagtgcagtggcatgatcttggctcactgcaacctccgcctcccgggttcaagcaattctcctgcctcagcctccctagtagctgggattgcaggcatgcgccaccatgcctggctaatttttgtatttttagtagagacggggtttggccaagttggccaggctggtctctaatgcctgacctcaggtgatccgcctgccttagccttccaaagtgctgggattacaggcatgagccaccatgcctggcctcaatgttttttctctatcttcatgtagcaggaactttaggaccagattgcctgggttcaaatcttgcctcagccacttagttttctgacttgggcaagccatttaaagcctctgatccttgttaactttatctgtaaaatgaggataaaataatattacctgcctcataggattttgtgaggtttcaatcagtaagtacatgaaaatgaactcccacatggattacatacagtaaggactaaagcagtgttggacataattgtaatgattatcagtagaagtgccataattcctttagtcatttaacattcctttcgctgggtcttcatcaagtccattatgtctcttggaaggatagtgtgcaaactgcacctagtaaatgtgccactgaagcacggtgtggtagaaggagattgcaatcattttccttgtgcttttacacctcttcctcacaacgcttaggaatttgttcacttatgtgccactgccttatactgaaccaatmtcttcaaacatcagtcaaaagtgacaccctaatttacaagctgcactttatagcttagactctttaagttttataaatatttttttccctcccttaaatgagttatcttaatgctttaatgcaatgttgtttattccccatgttgagctactttcactgatatttatcttaagcgaggtggcttctactagataaaataaaataataactgcgcaattgtcttttctagctgatttacaaacatgtaaggccatgtctctaccagtcgccagaatattgaataaccaattgtttgcatataggtcttctattcttattccttcattttaatttagcaaacatttattgagcagttaaagagatgtgcttcgtggcacaatttagcatgggaaaaacatataaacagttctcctacccttgaaaactaaataaatgagtcacgtctcccctgctccttctggttcaggcatattcaccctgacatagaacattaggggtttagtcaagactgtgctttctccactcttctcagagttcactgtctgaagctatcgagtagctcagtgttaggacagagggaagtcgggaaatgactgtgtgtgcctttctgttactaatcctgaactcgccaattaattaccacgctatctgaagcttcggtccttgcctatttgtgatctgaaggacaggatacacctgtagatcctgcactggaaactctaaatttatacttgttgttgtttgctagtaatattcattccctttctcagcagtatacctagttctttttggggaatttcccttcctccagtgggcgcagtcttggtatgatgataagtcctagaagctaacggagaccctgaagcctccttttgttaggattttcaactgagtggagaaatgaaagacagaaaaaacggtcagggttaatgccttgattctggggaaggacgggggttgagtggttcagccacactgttcctgccacccacagctctggaaagtccaggttcctgccttttctgagactgactctgcggccctctcttcaaatttgttagtttcctcaagatccttctaatacattcttgcttgcttatgttatccagagttagtttcttttttcagcaagaggccctaaaagactccatttataaagaaaaaaaaaaaggaagcaatttttgcctgagttatgagtagattaa

SEQ ID NO: 727876 - DNA, 1371 bp, Homo sapiens
tttctatttccatttgacagtaaccaagcaaaacttgtgattcactatgatgataacacagcagggttcaagtgctgtacattttcaatatgttcttagttatgcacccagccaatttaatttcaaatgtataaactcttctacccttccttctgagaacaataatttactttgaaagatttctttggatttttaacttttatagaaagaatatattaaatggaaaatattttatataatacaggccttttgttcttcaaattataaaaacaataacacttctttgaatcatattttagcaaatatataccactagaagaatgacaggtgaacaaatttagtgccactcagataactgtagtaattatatactatgtcaactctctacaagtctcagcatcaactctcactacacccatttcaactcacggcaatttggatagatgctgacgttctttttttcctgttttacttattcacgaaaacaaatctaaaagaatagtttaaaagaagtaaaagaaaggcatgtcataaaaaaaggatgtgcacgtgaaccctgaactttgtgtttaaatcttccttccttcctcccctcccttgttctccccttctctttcttgatatgggaagaaaaagaaaatttcagagatgactttacttcatttgtgaagcttcctgacttctgcccagtcagggttgttcccttttctgagcttacccacaatatttttgtctctcttcgaacaccctactcaaacctgttttccagcttattggaagcacatattcttctgtcccttggtgaagcactccttcaaattagaagaatgacacattcattttgtaccctcacgggcccaccacatagtggacacccattaaccacttattaagttgaattttagaaaaattgtttgattttaaaaattcaaaaagtgcatatattcaatggagaaaactggggaagcactgagcttgctgcactccctcccctcaaatgtgaggggtaactgggggccagaggagacatcgtgagagtaacatcatatgaaccacttgggaattgctcatgttggcctgtaaaatagcagttactctgcaaatcaagctataatccatgaaattatctaagctttgtttgaacctgctgtttttttaattcctagcaccatttggaataatgtgttacataaaaatttctttgttcatttgtttttgccagcactgcttaaatgaacactttctcttatttgaytgaaaatacaacccattttcagtgttttgagaaataaaagataaacccaagttatgtctgtcaacatggtttacagttttataaatttcaatttcaatgtcttttttttttttttt

SEQ ID NO: 727877 - DNA, 1043 bp, Homo sapiens
ttttttttttttttttttttttttttgagacagtctctcactctgtcgcccaggctggagaacagtggtatgatcttggctcactgcaacctccgcctcagcctcctgagtagctgggattacaggcgtgagccaccacactcagctaattcttgtatttttagtagagatgaggtttcactgtgttggccaggctggtcttgaactcctgacctcaagtgatccaccctcctggattctaagtacacttaamattacagcagccgttcgtttctatagatggaagaaggtggcaggaagaagagtaattactaagagtaatttactaagtaaagctgattacaaatatcttttaaataaaaaatttttaagtaattgaaagagatcacagcaacagaataatttaaacaaccatcaccagtttttcaggtggtcgagaaaatcttgaattagaactgttgtgaggaaccagctatggaagagaaaattggagtcaaagatggacctgaaatgtccacgtggaaaaaaataagtcaaggaatgtgaggatgaggggttcctacatgatgccgatacattttgtgataattttcacttatattttctttggattgtcttaatgatataatcaactcttgctcaccttatttgttgtttgttgctgtttttgggggacaagctttaagctatctcactttttgatctggagtataggaacccagcactggcttcttccagcaccttcacttggcctcagtgttgtgatgcactgagccacccctgttattgtgagtctataacaagtaatttgtttctgaaaagattaaagcactacactttgaaaattatttagtgttttaaaatttgatgatagtaagacttgcatttcaacaggattttttgagtttgaatgaaatgggggtgatataaccccagaacagaaaatcgtatacctaagggtgtcatcactgtgcaaactgctattcagaggtgaaatgggagaagaaaaagacatttaaacagaaacaattaggcaattaaca

SEQ ID NO: 727878 - DNA, 1043 bp, Homo sapiens
ttttttttttttttttttttttttttgagacagtctctcactctgtcgcccaggctggagaacagtggtatgatcttggctcactgcaacctccgcctcagcctcctgagtagctgggattacaggcgtgagccaccacactcagctaattcttgtatttttagtagagatgaggtttcactgtgttggccaggctggtcttgaactcctgacctcaagtgatccaccctcctggattctaagtacacttaaaattacagcagccgttcgtttctatagatggaagaaggtggcaggaagaagagtaattactaagagtaatttactaagtaaagctgattacaaatatcttttaaataaaaaatttttaagtaattgaaagagatcacagcaacagaataatttaaacaaccatcaccagtttttcaggtggtcgagaaaatcttgaattagaactgttgtgaggaaccagctatggaagagaaaattggagtcaaagatggacctgaaatgtccacgtggaaaaaaataagtcaaggaatgtgaggatgaggggttcctacatgatgccgatacattttgtgataattttcacttatattttctttggattgtcttaatgatataatcaactcttgctcaccttatttgttgtttgttgctgtttttgggggacaagctttaagctatctcactttttgatctggagtataggaacccagcactggcttcttccagcaccttcacttggcctcagtgttgtgatgcactgagccacccctgttattgtgagtctataacaagtaatttgtttctgaaaagattaaagcactacactttgaaaattatttagtgttttaaaatttgatgatagtaagacttgcatttcaacaggattttttgagtttgaatgaaatgggggtgatataacccyagaacagaaaatcgtatacctaagggtgtcatcactgtgcaaactgctattcagaggtgaaatgggagaagaaaaagacatttaaacagaaacaattaggcaattaaca

SEQ ID NO: 727879 - DNA, 555 bp, Homo sapiens
tttttttttttttttttttttggtcttttgaaggtcatccttttaaatgctggctgaatctttcagtgctatccttgtcatcaaatggaaatggaccttccccctgtaagtgtggtatcttcatgacagtcaagaaataggacttttgttttaggacatctccctgtcccaagtgaattaactagataactttgttgtatttaaatttcctggtttgtttgttttgtcttactaatgagacatacctacaggtcagatggaccataggtgctgatcctgagagttggaaaggaacttttcctaattaaaagcaaaacaaaaaaagccttacaatgcttatatttgcttggtgttcctattttccttcccttaagtagttttcatttctgtaaatrtgattcttattcattaggctatatcacataatagttctatttatcttttaaaatcttaagtatttatttttatatgtaatttaaacatttaagtacatagtactgtgaggtttattatgaaaaaccccagttctctttctcacagctgattactgctccc

SEQ ID NO: 727880 - DNA, 817 bp, Homo sapiens
ggtaggctcactagccaagtgacagtgtgcactgaaatgaaaactctgaggcctgctaagaggatatattgagggaccatacaagattrctggttaggcagtttgggggagtaaattctctgaaagtctttgttttcaaagcatgctcgccacagatgaactcaggaatttgggggggagtagttttgggactgtggacatgaatatgtttcggctatttgaaaattatttattattcatttttatatttgtgcccccatctgttttcagtaaggaaggatttagaagtagtttacaattaaaacatacatgcacacagactgcctccacacacactgtatattgcatagctaagcctattaatgtagaggaaacaaaattgtcttcatttagcaaatatttattgtactacaactgagtccagtagatgcatgtaaatcaatttttttttgtttgcctccactaatatgtcggaattttttgctgctctgggtttatgaataacacagctgggcagatatccagcaaatggctgtatgaatgctaccatgttgagtttgcctggatacttggtcctgattacatactcagcatactcagtgcgttagagtgcctggtgagccctgttttgtagatgtgatccaggtgtagtcttcgtgcattgggaaaacacaccttagttacatcactgtgcctttaggtgtcccaaaaagtgaggctgctggcctggcctagaggagatggacacaactctgaaaggatctaaataaaaatctcagttgggcatggtggctcacacctgtaatcctgcactttg

SEQ ID NO: 727881 - DNA, 662 bp, Homo sapiens
attcatttttgagtgaaatgttcctaagttctatgaacttttctaggaaattactgaaccttggaggaggtcatgggaactcctgatttgtagctagcagtcagaaatacagatgcagtgtgggacttgcaattggtgtctgatgtggggaaagtcttatgggactgagccctttaacttgtgagatctgatgctaactccrggtatatagtatcagaatttgattgaattgtaggacacccagtgggtgtctgcagataatcgaagaactgcttggtgtagaaaaaccatacacatacttatccacatttggtatgaggagaaaaatagttttttcttacaagtccatacccactctcactttgtctcctatcgcaaagattgacaactctctcttgctgtcctgaagatgggaggcaaataataggtccattgctccacaggttccccctttttcaaagtagttcactgtacttagagcacttgggacttctgcagttgaatgattaatggacaagtgtcttaaactctagtgtctttagcctggtattatgattttcatttatgcaagacaaattcatcctccaatcatatgaagaatgccccatatgaagaaaaaatttcattaaaatcttaaaccacttcattgaaaattaatatgt

SEQ ID NO: 727882 - DNA, 1388 bp, Homo sapiens
aaataaattgttcggtaaatatttaaagatacttaatcacctaaaaagtataaaacagcctataatcccagcactttgggaggccgaagaaggtggattgtttgagttcaggagtttgatacctgcctgggcaacatggcaaaaccgaatccctagaaaaaaaaatacagaaaattagtcaggtgtggtggcgtgcctgtgatcccagctactcaggaaactgaggtgggaggatcgcttgagcccaggaggttgagactacagtgagctgtggttgtgccactgcactccagcctgggcaacagagcaagaccctgtctcaaaaacaacaacaacaacaacaactgtttaaacaaaaaaagacaaaactgtgttcccataggaacgttgtttttgttgagtcccaggctataactttttttacaattttattttatttacttatttatttaggatacagagttttactgtcagaggctggagtgcagtggcacaatctcagctcacagcaacctctgcctcccgggttcaaggaattctcctgtctcagccttccgaatagctggagttacaggcacccgccactacgcctggctaatttttgtgttttcagtagagacagggtttcaccatgtttgccaggctagtcttgagctgccgacctcaggttatctgcccatctcggcctcccaaagtgctgggattacaggtgtgagccacagcgcctggcccgaggctattatttttgataagaaaatgttttgtgattttgcatttgcctaggaaggcaatgactgacacatctgacacatttataatcacaaattaaaacaaaagcaccagaactccccaggtcagataggatgctgggtatgccaaattggagcatgcaggatgtcagacgacttctctgagggcacttatatttccttatttctttattcgcatctggttctcctttgttactctgtaatgccctatacttctccaaatacagcacttacccactgtattataagtacctgttgatttgtctctctctcccccttgaactgcaattgaaaaaagtaaatgataaatatgagtagaattaatgaattcaacaacaatttattagatacctagtgtatgacagacagcttttaggcattggggtttggagcacagtggcaaatagaatccctgacttcatggagtttttattgtagtcagaggaaacagatcataacaaggaaatagacatcttcactaccwcagatagtgataagtgctatggataaaaataacacagggggctgggcatggtggctcacgcctgtaatcccagcactttgggaggcctaggtgggaagattacttgagctcaggagttcgagaccagcctgggc

SEQ ID NO: 727883 - DNA, 657 bp, Homo sapiens
agacagggtttcaccatgttgtccaggcttgtctcgaactcctgacctcaagtgatccgcctgcctcagcctcccaaagtgctgggattacaggcatgagccaccatgcccgccagtgatccctttttctccactctggttatggagagcagccaggggtgctgactgtgctttccatggcacattcaggtggaacaatgggcccatgaaccatctattccctggctatgggcattcaaggcatataaggattggatcccaggagacctggggcttccagggctgcaggacagagataagaagcagtgagtcatagtccggatagggaagatgctctcacacttgcttggcaaataagagtagcttagaagaaaattctcctatttctggaagggagtaaggagtgaatcccaggaaaggagggacctgctgcactgcagaccccatgtgggggcagtayctcagggactggcctgcatgctacacctagggggctgtgtcctgggtctgggtcccacctcagcaagcctgtctgggccagcttgttatgggagtagtgttgtcctctatctcttaaaacccacaataaaccagatccatccaggcacacacctataatcctagagctttgggaggctgaggcaggaggattgcttg

SEQ ID NO: 727884 - DNA, 1324 bp, Homo sapiens
tgcttggtaataagcacattttagactacctttatcttttcccccaaagtttcaagtgctcggggtgcttaactgatgtttgatgtgtgcagagctgtrtgcatttagtccctcagtttctccccaggtgagcctgcagagagagtgtctctactcattggctcagacacttccctcttttctctacccaggtagcaacatgctgagcttttcctactctagagagcacagtgcaagaaactccagtctgtcaggcacctactaaatgtcatatccgtatacgtgcaatgatctatcaccttttatagttgtagaatctgaggctcagagagatcagatagcttgtctgaggtcatactgctgttggtattgcagctaggagttgaactcaagactgtgttttggcaaagctgtcctctttccatacttactgttaaacgttttgttgtgttttcttaaaccaagtatagtcccaacaactttgaacagcgtttggtaggtaaaagctttaaggggatcttttagggtgttaatgagacttcttaacagatatgcatttctcaaacgtgacaacgtaacattcatattaaatgtaaagcttggtatttctatagaatttttcatacatttctgcatcttagtgcatgtatttgcctgagatatattagtctttcaggaaatatttgaagacagaaaggcaggatgagaggagaggaaggcggtggggatatgtggggtgctggtgggctgtgtgtggggtgggggatgcctgctaccaggagcctgagagctgcagggccgactcaggattggtacatcgtcgctgctttagcgtgcttctatcgccacctagccaccttggggagaaatgccctctccgagcaagtctgtccagacttcccctgaatgtagtttgcccacttacaggtgggtacctttagaccatgagacttggatagtccttcccacaatggaagcctgtgtgccctaccttttttttaattagtggctttctttagcagttgattccaaggcctattacatttaaagagaagtttttgaaaattggtaccactaaggattggcaccgttaagcctcctcagcacaaaagaaggggattgttactcctttgagagccctttcctgtgggagtccctgatactgccatggaccctccctgtgcacatgtccatatccagatcaaatgtggtctccatgaaacttgcgaagcaacagcttccatttaatccacacttgccgtgtgctgggggctttatgagtgttttctcatgtaattctcacagcaatcttctgaggtaggta

SEQ ID NO: 727885 - DNA, 1324 bp, Homo sapiens
tgcttggtaataagcacattttagactacctttatcttttcccccaaagtttcaagtgctcggggtgcttaactgatgtttgatgtgtgcagagctgtgtgcatttagtccctcagtttctccccaggtgagcctgcagagagagtgtctctactcattggctcagacacttccctcttttctctacccaggtagcaacatgctgagcttttcctactctagagagcacagtgcaagaaactccagtctgtcaggcacctactaaatgtcatatccgtatacgtgcaatgatctatcaccttttatagttgtagaatctgaggctcagagagatcagatagcttgtctgaggtcatactgctgttggtattgcagctaggagttgaactcaagactgtgttttggcaaagctgtcctctttccatacttactgttaaacgttttgttgtgttttcttaaaccaagtatagtcccaacaactttgaacagcgtttggtaggtaaaagctttaaggggatcttttagggtgttaatgagacttcttaacagatatgcatttctcaaacgtgacaacgtaacattcatattaaatgtaaagcttggtatttctatagaatttttcatacatttctgcatcttagtgcatgtatttgcctgagatatattagtctttcaggaaatatttgaagacagaaaggcaggatgagaggagaggaaggcggtggggatatgtggggtgctggtgggctgtgtgtggggtgggggatgcctgctaccaggagcctgagagctgcagggccgactcaggattggtacatcgtcgctgctttagcgtgcttctatcgccacctagccaccttggggagaaatgccctctccgagcaagtctgtccagacttcccctgaatgtagtttgcccacttacaggtgggtacctttagaccatgagacttggatagtccttcccacaatggaagcctgtgtgccctaccttttttttaattagtggctttctttagcagttgattccaaggcctattacatttaaagagaagtttttgaaaattggtaccactaaggattggcaccgttaagcctyctcagcacaaaagaaggggattgttactcctttgagagccctttcctgtgggagtccctgatactgccatggaccctccctgtgcacatgtccatatccagatcaaatgtggtctccatgaaacttgcgaagcaacagcttccatttaatccacacttgccgtgtgctgggggctttatgagtgttttctcatgtaattctcacagcaatcttctgaggtaggta

SEQ ID NO: 727886 - DNA, 1290 bp, Homo sapiens
tctagagaaagactaaagaagcaaactctttatggctcttatgttgaagttaataaacttattcctaaagctggatagaatagaaataatagaaataattggtccctaagatataaaagctacagcctacactcggttaacctcttctttctccttcctcgtagaaccaaaattgttaatagctgttaaacccactctttttcccagaaaccccatacatctcaagcgaagtctacctcagctttaggggtggacttgacaactataggtgacctcaaacctcttgccagtaatttcttcaggaatggttacatgacttacaccgagcaaatggtataggggagtggtttactggaagcgtctaggaaaattcttcctaactcttctgagaaatttttctaaaacaacctcccctccctttgcttgaacactgccaagcatggatatgaggccatatatctacagacatcttaccagcctcaggatgaagccaacatacagagaagtataaacaccaagactcctgaaaaagagaaatgaagcccaaatcatggaaatcctgaccaatacctcatatccaaatattccattaagttagagaatacttttttttatttttaaatatgagttgggtttctattaaaactgaaagaatgttaacagatacaaaggtttagggcaagcttgccttctcacaattactaaattatgcactattaaattcattgttttttgttaagatactctcttcaaagagcccatgtttaaatggaatatttagtagattaaggcatatctcttgactaaaatcttagtacattatcaytggcacctactagaaagaacacacttgtcagattgatagttatcatcaagaaacagggattttttttcattaattaagcattacttttaaacatagtatttattgagtgcctacaatgtgcccaatcatactctaggcaatgaaaatacagtaatgaacaaaacacacaaaaatccttgccctcatgaagcttacatgctggagggggaaacatacaatgacatatttataaaatatatagtatgccagatggtggtaagtgttaagaagtaaaatcatacagaccagagagatagagagtctgaggatgaaaagacaatctaatctcaaaaagagagtcaaggaaagcctcacttcttgttcacatttgagcaaatgcctgcaggaagttagagagcaagagcatcgctggggatagggagatagctacaggcaaagagaagagggtgtgtgaaatgccctgg

SEQ ID NO: 727887 - DNA, 761 bp, Homo sapiens
agaagttgacaacttaatcaagaaggaagcaattcaaaagtgatattcagcgatgtccttgagctcattacatacagagtacatttttcaagtacttttgcattgcctttctctcttctattatttgccttcacatagccaacctctcaaggacattaacaaattctttcaaaccctttctcttagttttctcccctatgggccttcatctgcttcctcaaatttaaaccarttgctttctggtccagctgcacaactatcattatggggataatgtactttgttacacccctggatatatttcttgaatcccacaaggaaatctttcctagaaagcttcagtaggacatctcttcatacttcatcggtcaaaattagatcctctgcctacttctataccaactaatggcaagaagacaggatgaccgtcactagaaaaataaaggtccctttgacctagagataggattcctccctgaggagccgatgtctagagaaatcaggattttattgtcaacaagaaagaaggaattggatgctgggtatgaagccaacggtatctgattcaatgatgaatagaaaactctatttaaagcacacaaaaggagcagtgagttgtaaaaagaagaaaatataattgcaaaactaaaaagccatccatttgatttcacagttgttgttcatgaaatatgaaatagctagaagattgatgattaggatttttctttctttttctttttttttttttttttttttttgga

SEQ ID NO: 727888 - DNA, 1990 bp, Homo sapiens
gtttctctgcctttcaccagtaatcctctgcatatgcccttcattaaactctcagccttttgacttgcatctataatcagcaacaccctaaaagaaaagtggctagatggtatcagcccacctctgcatgtggattctactctcccaagatcttgtgccctgaagtcttgttgtagaagctctctgatgccttcaaagaaatgttattgtttgtactttctttggtttttctagattatctcagcaggacttccacaaacaactccatcagagccagaaatggaaatgccaaataatggcttttcaaattgcagaattatcccatcattgctttttaaacttacagaagtcttctgagtttatggataatgatttacaatattaaaagtggtcatgaatcatggacatgcttttctttagacttaacatgattttgttccttttggatgctaaacattttcattgcagccactttttcaagagaattcaagattatgttcacatgttacaaatcagctgtgggagaagtaaaatccaagcaatggcattttaaaaatgtttttaatgtcattatatcagtgaaaaatcaacaaagtgatagttttgcattacaatatgtaagcagttgaggacctcttttttttcctctcttttatgggttatttaaacatttaaaacactaaatgcatctccatcgagtatcaaatttttaccatgtgactgataagacaggagctgattcagggttatcatagcccaaattcatatctcttagaaatcagaagtaaatgggccatatttcttgaaaacttgatcatctttcttgagaatctccattaacacacccwtacctaatagctctgcattctttgatgcttacatttatatttttcttttcatttcctcttttgacaaagaaaatggcttttattaagataaaagttctctgcatcaaagtttagaagcaaaaaagaagcaatctagaggatcacttaacaagaacatgtcaattttttttgaaataatctatataaaattgtcataaatgtcaagaaagttgaactttgatcctttcaaagaagactttcagcatttaaatgaaatcttaacttaataaatacaatttaattttctctattaatataattgttcaatgtccataacataattttgtgtgttatattaaaaattataaatattatgaatgttctgagtatagaaagagcacagactctaaaaaataaaaaaggaaataaggttcaagggattggactggtaatggaagattttttgaaagatctcttagtttaccctatcatttttaaaattgatgagtaaagataagtcattttcacacttcaaggtaactgaaaatgaatcatcaactaaaagcagaacagcaaagattttcctttcatcatgacttcaatcacttaagttttcctgcccatatttatcctactgagaccccaaagaactgagagaggctctcttcaggtcaagtacagctctgcaaccaagtaatatacacacaaagcaagaataatctatcagtctcatttggcattcaagtctatcatcaaaatagcataaacaagtagctcttttaagtctatctcccaggaagattccctgaggccataatatgaagtagttctaattctgtgtttattaggtagttgacctaccattctctctattgctttatctacaaaaatcatgagtattgagaacaaataattgcattatatttaccatgtttcaaaatgtttttaaaatgactgtgattccaaaaaaatatgattttaaatttgacttaattcttttcaatttatattccattgtgttatttctaaaccagcactatgagatgaatcaatattatttcacatggaatctcatgaattatagaatatgtaagctgaaaactgctcagtataggaaaacaaaatttaacacaattattttaattgtatataatgccttttca

SEQ ID NO: 727889 - DNA, 1894 bp, Homo sapiens
gaggcatgtctaccaggattttgaaggtggacacacaatttctttcagatttatgggtcataaatctttagtcatattaatttcaaaaagtcttcagattcataaagatttgggtaaaattctggatctatcaattgccagctgtgtgacctggggcaagttcctaacattctctaggcctcaattctgtcttctgtaaatgtttttttttttttttgtgagacagagtctcactctgtcacccaggctggagtgcagtggcacaatctccactcactgcaagctctgcttyccggggttcacaccattctcctgcctcagcctcctgagtagatgggactacaggagcccaccaccacacacgggttaattttttttttttttgtatttttagtagagatggggtttcaccgtgttagccaggatggtcttgatctcctgaccttgtgatccatcagccttggcctcccaaagtgttgggattacagatgtgagccaccgtgcacagcctgtgaatgttttatgctcaaaacgtgttagtaattatttaatattttgtttttaaaaaatgatgttatgatgatattataataatggacattaatcatgtaaatattataataagcaaggtgtggtagacattagcactgttcattaatatttggttctcctctcattctggttgcactggaggattaaagctccctgccccttgaagttaagcatggccatgcgacttacttttggttaatgaaatatttaagagctggtacgtgactcccattattctcccatctctttctctccctgccaaggtcattgcagaatcaattgttgatgaggctgagccaacacatggagtactgctgttttgaaaagattaagccatttagattttggtatcatttattgccaatacgtaattttcttactgtgaatgattcacaaagtcaatgaaggaaaaagtggttaacgtggtgattgtttcttggataagcttgtctgcaagaaaagttagagtcttagccatggttaagagaaactatctctaggggtggcagggagtagtttaaatgtaatattctaaggcctgtggtgaactcatgttttggctgagctggctgttatagcagaaagtagcagagatagagaggtaagttagagccactgtcccagttttggggagaatgccatgtagtcactggagtataaagaggtccaatttccaggaggggcaaattgtcaaaatgcaaccacctatagaaagggattcaatgaagaagtacagctatggaaggtgaaccaaaattcatatcataaaaatgagatggaaaccctggtattgaacctggtaaatatggtattgttggagccaagggctgtagtttaatagaatggaaatgctgaactgtacaatcctttagaataaaatactaaaagtgttgcattgtgttctaaaaactctagactcaaactattagacaaatgcaacccaaattgcctgagcaagtagtcataaaattagcttaatttagtatgactttcacttctgaaatttcattagatcttggtaaaattttagtaattacaaatgctgtactatagtaattagacatgaaatagtatagcttgaaaacgagagattgggccctgcaagaaatgatcatgtcacaaaaattattagttttatattacagctacatcaaaagcttgaagaaaaagaatccttagggatttttatttgtctctcaggaagaataaattgatggagcaaatcatgccttttaaagattaagctgtggcaagaacattattaacaaaggtttagccaccttatgtgagaatgccagtctcattcaaatttttcagaaattgctccaggacttgctaccat

SEQ ID NO: 727890 - DNA, 1894 bp, Homo sapiens
gaggcatgtctaccaggattttgaaggtggacacacaatttctttcagatttatgggtcataaatctttagtcatattaatttcaaaaagtcttcagattcataaagatttgggtaaaattctggatctatcaattgccagctgtgtgacctggggcaagttcctaacattctctaggcctcaattctgtcttctgtaaatgtttttttttttttttgtgagacagagtctcactctgtcacccaggctggagtgcagtggcacaatctccactcactgcaagctctgctttccggggttcacaccattctcctgcctcagcctcctgagtagatgggactacaggagcccaccaccacacacgggtwaattttttttttttttgtatttttagtagagatggggtttcaccgtgttagccaggatggtcttgatctcctgaccttgtgatccatcagccttggcctcccaaagtgttgggattacagatgtgagccaccgtgcacagcctgtgaatgttttatgctcaaaacgtgttagtaattatttaatattttgtttttaaaaaatgatgttatgatgatattataataatggacattaatcatgtaaatattataataagcaaggtgtggtagacattagcactgttcattaatatttggttctcctctcattctggttgcactggaggattaaagctccctgccccttgaagttaagcatggccatgcgacttacttttggttaatgaaatatttaagagctggtacgtgactcccattattctcccatctctttctctccctgccaaggtcattgcagaatcaattgttgatgaggctgagccaacacatggagtactgctgttttgaaaagattaagccatttagattttggtatcatttattgccaatacgtaattttcttactgtgaatgattcacaaagtcaatgaaggaaaaagtggttaacgtggtgattgtttcttggataagcttgtctgcaagaaaagttagagtcttagccatggttaagagaaactatctctaggggtggcagggagtagtttaaatgtaatattctaaggcctgtggtgaactcatgttttggctgagctggctgttatagcagaaagtagcagagatagagaggtaagttagagccactgtcccagttttggggagaatgccatgtagtcactggagtataaagaggtccaatttccaggaggggcaaattgtcaaaatgcaaccacctatagaaagggattcaatgaagaagtacagctatggaaggtgaaccaaaattcatatcataaaaatgagatggaaaccctggtattgaacctggtaaatatggtattgttggagccaagggctgtagtttaatagaatggaaatgctgaactgtacaatcctttagaataaaatactaaaagtgttgcattgtgttctaaaaactctagactcaaactattagacaaatgcaacccaaattgcctgagcaagtagtcataaaattagcttaatttagtatgactttcacttctgaaatttcattagatcttggtaaaattttagtaattacaaatgctgtactatagtaattagacatgaaatagtatagcttgaaaacgagagattgggccctgcaagaaatgatcatgtcacaaaaattattagttttatattacagctacatcaaaagcttgaagaaaaagaatccttagggatttttatttgtctctcaggaagaataaattgatggagcaaatcatgccttttaaagattaagctgtggcaagaacattattaacaaaggtttagccaccttatgtgagaatgccagtctcattcaaatttttcagaaattgctccaggacttgctaccat

SEQ ID NO: 727891 - DNA, 1894 bp, Homo sapiens
gaggcatgtctaccaggattttgaaggtggacacacaatttctttcagatttatgggtcataaatctttagtcatattaatttcaaaaagtcttcagattcataaagatttgggtaaaattctggatctatcaattgccagctgtgtgacctggggcaagttcctaacattctctaggcctcaattctgtcttctgtaaatgtttttttttttttttgtgagacagagtctcactctgtcacccaggctggagtgcagtggcacaatctccactcactgcaagctctgctttccggggttcacaccattctcctgcctcagcctcctgagtagatgggactacaggagcccaccaccacacacgggttawttttttttttttttgtatttttagtagagatggggtttcaccgtgttagccaggatggtcttgatctcctgaccttgtgatccatcagccttggcctcccaaagtgttgggattacagatgtgagccaccgtgcacagcctgtgaatgttttatgctcaaaacgtgttagtaattatttaatattttgtttttaaaaaatgatgttatgatgatattataataatggacattaatcatgtaaatattataataagcaaggtgtggtagacattagcactgttcattaatatttggttctcctctcattctggttgcactggaggattaaagctccctgccccttgaagttaagcatggccatgcgacttacttttggttaatgaaatatttaagagctggtacgtgactcccattattctcccatctctttctctccctgccaaggtcattgcagaatcaattgttgatgaggctgagccaacacatggagtactgctgttttgaaaagattaagccatttagattttggtatcatttattgccaatacgtaattttcttactgtgaatgattcacaaagtcaatgaaggaaaaagtggttaacgtggtgattgtttcttggataagcttgtctgcaagaaaagttagagtcttagccatggttaagagaaactatctctaggggtggcagggagtagtttaaatgtaatattctaaggcctgtggtgaactcatgttttggctgagctggctgttatagcagaaagtagcagagatagagaggtaagttagagccactgtcccagttttggggagaatgccatgtagtcactggagtataaagaggtccaatttccaggaggggcaaattgtcaaaatgcaaccacctatagaaagggattcaatgaagaagtacagctatggaaggtgaaccaaaattcatatcataaaaatgagatggaaaccctggtattgaacctggtaaatatggtattgttggagccaagggctgtagtttaatagaatggaaatgctgaactgtacaatcctttagaataaaatactaaaagtgttgcattgtgttctaaaaactctagactcaaactattagacaaatgcaacccaaattgcctgagcaagtagtcataaaattagcttaatttagtatgactttcacttctgaaatttcattagatcttggtaaaattttagtaattacaaatgctgtactatagtaattagacatgaaatagtatagcttgaaaacgagagattgggccctgcaagaaatgatcatgtcacaaaaattattagttttatattacagctacatcaaaagcttgaagaaaaagaatccttagggatttttatttgtctctcaggaagaataaattgatggagcaaatcatgccttttaaagattaagctgtggcaagaacattattaacaaaggtttagccaccttatgtgagaatgccagtctcattcaaatttttcagaaattgctccaggacttgctaccat

SEQ ID NO: 727892 - DNA, 617 bp, Homo sapiens
agtattttattttaccctttaaaagcatgaagtgactcaacaggaaattatacatacatttttccctccaatgtaaaaactgcagatctagtaccgaacatgtcacgctggcattcaattttctattgctatcatatctggttccttagtgacataaggtcacaaaacttctactcctgtggccaagagacataatagatgttgcggttgctcattatattaaatttgaattcctaagctaaacattctagacctgcactattcggcatggtggccactagccacatgtgactatggagcccttgaaatgtgaccagcccagatggagacgtgctgtaaatatacactacacaatggattttgaagatttcatatagaraaaaaataaagtcaaatatctcatccatattttacactgattacatttgaaatggtagtattttcagcatgtgttacataaattacattattaaaattaattccacctgtccctgtcttttttaatttggctactggaagatttaaaactacccttgaagttcatgttctatttcctttgcccagcactgccaggaccttacacggactctgcctccacgtcactcgctcccttccgg

SEQ ID NO: 727893 - DNA, 630 bp, Homo sapiens
tttatttttttagtagagatgtggtctcactatgttgcccaggctgttctcaaactccygggctcaagtgacccgcctacctcggcctcccaaagtgctggtattacaggcgtgagctgccgcacccagccctcctccaactgctgctggttgctatcataggttctcactgggtgtccacctaacatgtcccttcaggaaggctggtgtcctgacattcggtagcggaggcctggtgttgagctcacctgcatttctgcccccttctctggctttctggggatgccctcctcaacctgaaaatgacttccaactcctcagcacagaagtgggcacgtgacccaagcaggtccaggattccataagatcccaaacacaaaggatcctgtaatcctggggctccagtggccgtcttgttccttttggagaactaacctattgcagagaaagtagtagagctaaaagaaagagaaagaatcctgatagcatctgtgactctggatccagctatccataaagcgccatacgctaatgcgctcaattacccaagtcaatgagtccccttagaagcttaagccagtttgatctgagtttctgccactttcaggaggaagaatcttattggtatat

SEQ ID NO: 727894 - DNA, 630 bp, Homo sapiens
tttatttttttagtagagatgtggtctcactatgttgcccaggctgttctcaaactcccgggctcaagtgacccgcctacctcggcctcccaaagtgctggtattacaggcgtgagctgccrcacccagccctcctccaactgctgctggttgctatcataggttctcactgggtgtccacctaacatgtcccttcaggaaggctggtgtcctgacattcggtagcggaggcctggtgttgagctcacctgcatttctgcccccttctctggctttctggggatgccctcctcaacctgaaaatgacttccaactcctcagcacagaagtgggcacgtgacccaagcaggtccaggattccataagatcccaaacacaaaggatcctgtaatcctggggctccagtggccgtcttgttccttttggagaactaacctattgcagagaaagtagtagagctaaaagaaagagaaagaatcctgatagcatctgtgactctggatccagctatccataaagcgccatacgctaatgcgctcaattacccaagtcaatgagtccccttagaagcttaagccagtttgatctgagtttctgccactttcaggaggaagaatcttattggtatat

SEQ ID NO: 727895 - DNA, 630 bp, Homo sapiens
tttatttttttagtagagatgtggtctcactatgttgcccaggctgttctcaaactcccgggctcaagtgacccgcctacctcggcctcccaaagtgctggtattacaggcgtgagctgccgcacccagccctcctccaactgctgctggttgctatcataggttctcactgggtgtccacctaacatgtcccttcaggaaggctggtgtcctgacattcggtagyggaggcctggtgttgagctcacctgcatttctgcccccttctctggctttctggggatgccctcctcaacctgaaaatgacttccaactcctcagcacagaagtgggcacgtgacccaagcaggtccaggattccataagatcccaaacacaaaggatcctgtaatcctggggctccagtggccgtcttgttccttttggagaactaacctattgcagagaaagtagtagagctaaaagaaagagaaagaatcctgatagcatctgtgactctggatccagctatccataaagcgccatacgctaatgcgctcaattacccaagtcaatgagtccccttagaagcttaagccagtttgatctgagtttctgccactttcaggaggaagaatcttattggtatat

SEQ ID NO: 727896 - DNA, 576 bp, Homo sapiens
ttgaaatcaaagattgcaggttagggtatatcttctcccacaatgcccagctgccttatatttttgtttcatatcatcaatataaataaaagcaaatgacatgaaaccagtaagcatatatgctcagctactcctgctatatatatatatatatrtatatatatatatatacatgtatgtatgtatatatacactttaagtactgaggtaaatgtgcaaaacgcgcaggtttgttacataggtatacatgtgccatggtggtttgctgcacccatcgacccatcgtctatgttaggtatttctcctaatgctgtccctcccctagtcccccaccccctgacaggccctggtgtgtgatgttcccctccctgtgtccatgtgttctcattgattaactcccacttatgagtgagaacatgtggtgtttgcttttctgttcttgtgttagtttgctgagaatggtggttccagcttcatccatgtccctgcaaaggacatgaactcatccttttttatggctgcagagtattccatggtatatatgtgccacattttctttatccaggaacctcaaag

SEQ ID NO: 727897 - DNA, 1411 bp, Homo sapiens
aagatgactaaccttagaagtgtaccaacaagtgttcatcacactgaatgtggttttaaaaatatatgcgacaccacccagaaggacagaaagcatacagaaagcaaagcgtaagccaatgaagcgcattcagccagctgaggggtgaggcacgtcctctctggcactggcttcctcaagtcttcacctgtgtaccgaaagcaagcctagtttcaactggaaatgtcataaggtctacctgtatgtgacttgcagagtaacataaacatactgcatttagcaaagacaaaccaatgcaaactggaaagaggttttaaaccaataacaacctgaaatgtaagggtcttggatgcctcaacacaggtttaatgcagacagacataaaaaaatgtccctcttacctcctctccatttcaaggttacaggacacagtaatactgaatcaggacacaggcacatgttatataaatcttatttaatatgtagtaccacctacatcctgctttcatactttcaacataatttaacacattcaaggagactatgcaaatcaattcaaaatatctatctataccaatggttttcaaacttttttttttttttttttgagacgaagtcttgctctgttgccaggctggagtgcagtggtgcaatctcggctcactgcaacctctgcctcccgggttcaagtgattctcctgccttagcctcccaaggagctgggactacaggcatgcaccaccacgcccagataatttttgtatttttagtaaagaagggatttcaccatgttggccaggacagtctccatctcttgacctcgtgatccgcccgccttggccttccgaagtgctgggattacaagcgtgagccaccacacccggcccaaactgttttttttgtttgtttcttttgagatggagtctcgctctgtcgccctggctggagtgcagtgacgtgatctcagctcactgcaacctccatctcctgggttcaagcaattctcctacctcagcctcctgagtagctgagattacaggtgccctccaccatgcccagctaatttttgcatttttagtagagatggtgtttcaccacgttggccaggctggtcttgaactcctgacctcaggtgatctgcccacttcagcctcccaaagtgctgggattacaggcatgagccaccgcgcccgaccaaactgtttttaaatgataactgccccctttaaaatacttaagccttatgcagaaatcttatgtrgcatataaagagacaaggcagagatgctgtggttgaaagtaacctcttgacccacctggacatccaatgagcatagtttgaaaaccactgaaataaggtatgctatccataataatgtatgctatccatgcctcctagcaattaaatttg

SEQ ID NO: 727898 - DNA, 430 bp, Homo sapiens
tttttgtattttcagtagagatagggtttcgccatgttggccaggctggtctcgaactcctggcctcaagtgatccacctgtctcggcctcccaaagtgctgggattacaggtgtgagacaccgcgcccagcctcactcaaatctctatcatgataaacagcatcgctggctgtcagacaagctcgtgactttgcacagccatcccaaggccgtggcaaggactcggaatgtggtgaagacagtggagatccagagaagctcttcttttccaagaggcagtgaatgtgaacagacatgtttaagaacctttcccccgggggttgctttttcagtgactgcamcctcaaatgccacagagaagaaaccgcaaaaggcacaggtgtcttggcagagtcaacagcctgctctgggaacccgggggtttgctcg

SEQ ID NO: 727899 - DNA, 916 bp, Homo sapiens
ttcacgttgtcctcacaaagacaggtctgaagactcccagaccctgcgaataggctttctctagttccttcccagtggctgactgaatcatgtccccgtcaggggttaaagctctggattgcatgggtgtggccaggagaaaccatgggatgcacactaaaaattcccatcttggagatactccyccgccctgggatcacagcatacacaacagagctcagctccagccgaacctgagctagacaatctgccttgacaggccccacgcccactgccgggtgtgtgtctcagccaacctgggaattcctgcacagcccaggagtctcctgtttcattgccatcacacacacatacgggtctggtttagggcaaagtccagtgttggggtgaatgatccctccagcgtctccattacccccgtgcctctcaaaggcctctaaagtacttgatcttacttcatcccgctccaatttttactcatgctctctaagccctggagggtctgagatacacaaatatgtgcacctaacacatgggatttctaaccgatgataactgtattagtccgttttcatgctgccgataaagacatacccgagactgggaagaaagaggtttaattggacttacagttccacatggctggggaggcctcagaatcatggcgggaggcgaacggtacttcttatgtggcggcgcaagagagaatgaggatgaagcaaaagcagaaacccctgataaacccattagatctcgtgagacttattcactatcacgagaatagcatgggaaagacatgatgtagaggaattcgatgagaaaggaaaggcagagagtgaagcatgaatgtggcccagcatctcaggccagctgaattccaggctactgcaaacaaaagactgtgctagtcaccggg

SEQ ID NO: 727900 - DNA, 934 bp, Homo sapiens
tgtytatagtcacagcatcttcacttctcccttctccttccttccactatccttcaagcccaaggagcatcttggggtgacttttctttccaggagaatcctcaggacttcgtctcagagctccatggagcactctcctccagacagcgagaggtgtgggtgtgccggatcctcagggaacacgggacgggaacctacctcccgtggggagtcacaaccgaaagaatatctgccaatttgcaaaactcatctttcactaaggaagcaagctgtgtactttagaacccatgtgcaatccaaccaagaaaaaagggccacggtgacagagggaaggcgcgcagcacggatctgcaccccggatgcatctggtgcagcttgtgccgggcctgctgcatgtgggctcggtgatgcccagaccgaagctgcccccctgcaccgccactgcacagcgcagcatggcctgtggagcggggatttcctgctcagcccgcctcaggtcccattccctccccgctcatcatttcagtaaagggttagtctctggcagacaactggggagaacacagatgtaagaatgagacactgagtttcctctgaattttaagacgaaattttaagaacaaacacaatcaaatgaagaaagtaagttttgattagaaagtaaaaccgttttaataacattaacaggtgcttttattacaaaaatgaacactaatttattgtggtaaatttagaaagaaacattaaaatacaaaataaaataaaagctttcataatcccacaatgcagatatatgctactagcattttgttgtgttcctattctaggcctattagttaagacagcccaattaattaacaaacagcccctaggtcctggggacgtcacataacaaagcgtgatttctgtcccctgctgcagtccagtgtggagg

SEQ ID NO: 727901 - DNA, 1861 bp, Homo sapiens
atcattttgagttccttgaaaatagtagctaatggaggaacagcagagggaatgtgcctggttactcagcagcagcagctgatacacacattaggctcgccacacacacaccaggctcactacacctacaccaggcttgctacacgcccagcactgttctaggagctctgcacagtgcattcatgcagccttcgcaacaatctcatgcagtagatactactgctgtctctatttaataaaagcagaatctgatggcgagtgcggtagctcacgcctgtaatcccagcactttggtaggccaaggtgggctgattgcttgagctcaggaattcaagatcagcctgagcaacgtagcaaaaccccatctctacccagaaatacaaaaattagctgaatgtggcagcacgcacctacagtcccagctacttgggagaaggatcacttgaacccaggaagtcaaggctgcagtaagccatgatgacgccactgcactccagcctggacaacagagtgataccctgtcccaaaaaaaaaagcagaatctgaggcacaaagaggttaagaaacttgcccaggatacacgacaagaaaaaggtagaactaggatcaaaatccagtcagtcagtctacagtactgccatcctcatagttcagtagaggctaactgatttcaaactagataactaggggagatgtccctttaaggatgtactctgaccttattatgaatacagagttcagacctctagccttcatcctttgggaagcctgtagagtcaagcacagtggaaagaacatggaagagcagttgctgggaaaagcagttgctgggagttaaggtcccactcaccgctataaatagttagttgtatggcctcaggcaaatcactttgcttcaggagaccttatttttaaaatgtaaaatcccagaggcaggggaaagaggatctgtataatagtttccagtatacaccgcctgatccagtttcagatccaccagtactggccagtatgtttcatcataatagttacccccaccccctgcatgattttctatagtccttctctcataatttggtctcacagttcactccaagtgtgcccaaggcagaacagtgcagcaagaaagagctggggttggtccagaaagtcctgtgtccacctccatggctgaccagcttgcagccaccagtttgtttttttaggaggaacaatgccacctacctcacatgcttgttctgggggtaagtaaagtgtcaaacacctgtcacatgggaggagcttgtgaataagagttatttttaatattctaggcctcttacctgaactgttaagcctcataaaaaatgcaagcaaagacactcaaggtaacattattaataatgaaaaactgttaggagcctaaataccaacaacccaaaaaataatatataaattatggaatagtattaaagtcacatgcagctattaaaaatcatattttctaagactatttcmaagcatggaaaaatcatgatgatctcgaccactgaaacaggcaggctgtaaaaactgcctatatagctgtattcactattatacacaacagtaagtacacatgtataatacatatatacgtgcatggaaatctgcaaaaatacaacaaattgttagtagtgctactttgagtaggtagtatgttttatcttccttttaatactttctggtatttcctagtttttcctacaataacaatattagactcataatcagaaaaagggttaaaaacaaagtgattctgacacccaatacatatttttccaaaaaaaggtaagatttacactaaaagcaaaatcgttttaagtaactaaattgtaaaata

SEQ ID NO: 727902 - DNA, 1861 bp, Homo sapiens
atcattttgagttccttgaaaatagtagctaatggaggaacagcagagggaatgtgcctggttactcagcagcagcagctgatacacacattaggctcgccacacacacaccaggctcactacacctacaccaggcttgctacacgcccagcactgttctaggagctctgcacagtgcattcatgcagccttcgcaacaatctcatgcagtagatactactgctgtctctatttaataaaagcagaatctgatggcgagtgcggtagctcacgcctgtaatcccagcactttggtaggccaaggtgggctgattgcttgagctcaggaattcaagatcagcctgagcaacgtagcaaaaccccatctctacccagaaatacaaaaattagctgaatgtggcagcacgcacctacagtcccagctacttgggagaaggatcacttgaacccaggaagtcaaggctgcagtaagccatgatgacgccactgcactccagcctggacaacagagtgataccctgtcccaaaaaaaaaagcagaatctgaggcacaaagaggttaagaaacttgcccaggatacacgacaagaaaaaggtagaactaggatcaaaatccagtcagtcagtctacagtactgccatcctcatagttcagtagaggctaactgatttcaaactagataactaggggagatgtccctttaaggatgtactctgaccttattatgaatacagagttcagacctctagccttcatcctttgggaagcctgtagagtcaagcacagtggaaagaacatggaagagcagttgctgggaaaagcagttgctgggagttaaggtcccactcaccgctataaatagttagttgtatggcctcaggcaaatcactttgcttcaggagaccttatttttaaaatgtaaaatcccagaggcaggggaaagaggatctgtataatagtttccagtatacaccgcctgatccagtttcagatccaccagtactggccagtatgtttcatcataatagttacccccaccccctgcatgattttctatagtccttctctcataatttggtctcacagttcactccaagtgtgcccaaggcagaacagtgcagcaagaaagagctggggttggtccagaaagtcctgtgtccacctccatggctgaccagcttgcagccaccagtttgtttttttaggaggaacaatgccacctacctcacatgcttgttctgggggtaagtaaagtgtcaaacacctgtcacatgggaggagcttgtgaataagagttatttttaatattctaggcctcttacctgaactgttaagcctcataaaaaatgcaagcaaagacactcaaggtaacattattaataatgaaaaactgttaggagcctaaataccaacaacccaaaaaataatatataaattatggaatagtattaaagtcacatgcagctattaaaaatcatattttctaagactatttcaaagcatggaaaaatcatgatgatctcgaccactgaaacaggcaggctgtaaaaactgcctatatagctgtattcactattatacacaacagtaagtacacatgtataatacatatatacgtgcatggaaatctgsaaaaatacaacaaattgttagtagtgctactttgagtaggtagtatgttttatcttccttttaatactttctggtatttcctagtttttcctacaataacaatattagactcataatcagaaaaagggttaaaaacaaagtgattctgacacccaatacatatttttccaaaaaaaggtaagatttacactaaaagcaaaatcgttttaagtaactaaattgtaaaata

SEQ ID NO: 727903 - DNA, 2242 bp, Homo sapiens
ttttccaagaaaaccatcttttgtcaaacaagtgggaaaagattcaaatgattcaggtgcatctttcagaggtgtggatataaatgggtacaatgtttctggaaggcagtttggcagagatccactaatatatctagggtgatttgttctacgtaaataatcagacaggcaagcctcaaatggcttcagctgtgcacaaattcaaatattctcagatgaacagcaaagatgcaaaaattacacaagaaatagtcttaataatatcactatgaagatcatcatctattgctgatagtaaacatgttaaaatgcagatagagtaacattactattgaagtctgtgccacgactttctgcttttaatgtagccacctgagacttcactgtagactaaaatgcatttgacatgctgggcctcccttacaatgctaagtctcctaggatgacattatcatagagcaatgttaccaaacaaccttcatctcattattgtccccctaaaaggctcaacattaactatgccagaacaaaatcactgtttgacagacattccccaacacttacatagctaataaaaaagccattccatcctcaggtcaatctgcctcattacctagaggcgcattttgcagccaattcctcctcagaggcacatcaggaaagcatcaatgttgcttagattctgatacttcatgggcaccttcctaaagttctcctatagtcataatggctccccacacaatacctgttccaaaatactccaggcatgcttctcatgctggcttcaaggtaaatggaaattaaaatagtccagcaaaagccatccctgccttcatcaacagcagcagctctaggatcacaaccaagacctttctgggccttaagagaatggcttgtcttcygtcaacatcaggcctagcaagtcactgaaggagctattcaacgagtggcacattggctgccaaggtgattctacaacacccttagccagaaagaccccagaactccaagacacttcaagagtactactgttgtccccactgtcaaaactcagtcccgagaagtgggctttgaggatgatcatttaaaagaagctattttttaccttgtgaggtaggctgatttgtttctaaatcaaatcagttatacatcatctttgcctcccatagaactaccttcactcaattgttttcaagttattcctttaatttggagaccagatttttaaaaagcacacattattctgccatattgacaagaaaattgttaatgagaagagcatcacccattctgttgtccaactttctgacataaaaccctgggtggaaacctcagagtagcaacaaggaaaatggtttctctctgagacaaaggctttctgcatttccttctgcaggacagcaggcgagcttaaaaccaacatctaatgagcgatatacacaccttactttttcaccctgatgtgagtaattttcttatccttcttttttttgtttgtttggttttttttttcgtttttgagacagagtctcgttctgtcgcctgggctagagtgcaatggcacaatctcggctcaatgcaacctctgcctccagggctcaagcgattctcccacctcagcctccccagtagctaggattacaggcacctgccatcatgcccagctaatttttatatttttgtagagacagggtttcaccatgttggccaggctggtcttgaactcctgacttcaggtgatccacccaaagtgctaggagtacaggcatgagccaccacgcctggacaattttcttttctttttatgacccacttcaaataatttaaatggaactgactttactattttgtctataaatttgaatttgttactttttccaataaaaaatgtgtactgcttccttaacatcaacagaaacttgactgggaaagaacggagagggtcgtatagagtgacaaagctacttaattctacccctcaaggagctctctaatccatttagagaaaataatattacatcggacctaagaagttctgggttcaaatcccagctctaccatttaccttccatgaaacctcagataagccatgtaggttttctaagtcttggtctccacatttgtaaactgtgggtgtctggtcttcttcaccaagctgttgagatttacaatgtgcagggtaggcaaaggcaagctgaaatctgtaaagcattatatctgagtaagctctttatgtcattaa

SEQ ID NO: 727904 - DNA, 1034 bp, Homo sapiens
tgcagtggcgcgatctcggctcactgcaagctccgcctcccgggttcacgccattctccwgcctcagcctcccgagtagctgggactacaggcgcccgccaccacgcccggctaattttttgtatttttagtagagacggggtttcacgtgttagccaggatggtctctatctcctgacctcgtgatccacccgcctcagcctcccaaagtgtggggattacaggagtgagccaccacacctggcaaattttgccatattgtactttaaagtttcttttttcctagtggttcttaacttacaaaaattacactggaatgacagtggtttgggtagggcgctatttctctttttcccctaaccatgcccagctattaaacactagtaactgctggtttattgctctattgttttcgtttttcttttttttttctttttttcttcttcttctttttttatttttattttattttttttttttgagacggagtcttgctctgtcgcccaggctggagtgcagtggggcgatctcggctcactgcaagctccgcctcccgggttcacgccattctccagcctcagcctcccgagtagctgggactacaggcgcccgccaccacgcccggctaatttttttgtatttttagtggagacggggtttcaccatgttagccaggatggtctcgatctcctgacctcgtgatccgcccacctcagcctcccaaagtgctgggattacaggcgtgagccaccgcgcccggcctgctctattgttttcaacaatcccccgggggcataagaagttagtctgtatcttgaatctcctctcagttgcctcaacatagcctctactgttcttgataggtttaaacttcttcatgctctgctgcaaattgggaagagattaagagctatcctttttataacaagcttcttcttccaaggaaaatctctaagtcagggctctggaactggggtgggaataatgcaacctctagtccccctgctctaggagctgagtgcttgctggactgg

SEQ ID NO: 727905 - DNA, 1034 bp, Homo sapiens
tgcagtggcgcgatctcggctcactgcaagctccgcctcccgggttcacgccattctccagcctcagcctcccgmgtagctgggactacaggcgcccgccaccacgcccggctaattttttgtatttttagtagagacggggtttcacgtgttagccaggatggtctctatctcctgacctcgtgatccacccgcctcagcctcccaaagtgtggggattacaggagtgagccaccacacctggcaaattttgccatattgtactttaaagtttcttttttcctagtggttcttaacttacaaaaattacactggaatgacagtggtttgggtagggcgctatttctctttttcccctaaccatgcccagctattaaacactagtaactgctggtttattgctctattgttttcgtttttcttttttttttctttttttcttcttcttctttttttatttttattttattttttttttttgagacggagtcttgctctgtcgcccaggctggagtgcagtggggcgatctcggctcactgcaagctccgcctcccgggttcacgccattctccagcctcagcctcccgagtagctgggactacaggcgcccgccaccacgcccggctaatttttttgtatttttagtggagacggggtttcaccatgttagccaggatggtctcgatctcctgacctcgtgatccgcccacctcagcctcccaaagtgctgggattacaggcgtgagccaccgcgcccggcctgctctattgttttcaacaatcccccgggggcataagaagttagtctgtatcttgaatctcctctcagttgcctcaacatagcctctactgttcttgataggtttaaacttcttcatgctctgctgcaaattgggaagagattaagagctatcctttttataacaagcttcttcttccaaggaaaatctctaagtcagggctctggaactggggtgggaataatgcaacctctagtccccctgctctaggagctgagtgcttgctggactgg

SEQ ID NO: 727906 - DNA, 1034 bp, Homo sapiens
tgcagtggcgcgatctcggctcactgcaagctccgcctcccgggttcacgccattctccagcctcagcctcccgagtagctgggactacaggcgcccgccaccacgcccggctaattttttgtatttttagtagagacggggtttcacgtgttagccaggatggtctctatctcctgacctcgtgatccacccgcctcagcctcccaaagtgtggggattacaggagtgagccaccacacctggcaaattttgccatattgtactttaaagtttcttttttcctagtggttcttaacttacaaaaattacactggaatgacagtggtttgggtagggcgctatttctctttttcccctaaccatgcccagctattaaacactagtaactgctggtttattgctctattgttttcgtttttcttttttttttctttttttcttcttcttctttttttatttttattttattttttttttttgagacggagtcttgctctgtcscccaggctggagtgcagtggggcgatctcggctcactgcaagctccgcctcccgggttcacgccattctccagcctcagcctcccgagtagctgggactacaggcgcccgccaccacgcccggctaatttttttgtatttttagtggagacggggtttcaccatgttagccaggatggtctcgatctcctgacctcgtgatccgcccacctcagcctcccaaagtgctgggattacaggcgtgagccaccgcgcccggcctgctctattgttttcaacaatcccccgggggcataagaagttagtctgtatcttgaatctcctctcagttgcctcaacatagcctctactgttcttgataggtttaaacttcttcatgctctgctgcaaattgggaagagattaagagctatcctttttataacaagcttcttcttccaaggaaaatctctaagtcagggctctggaactggggtgggaataatgcaacctctagtccccctgctctaggagctgagtgcttgctggactgg

SEQ ID NO: 727907 - DNA, 1034 bp, Homo sapiens
tgcagtggcgcgatctcggctcactgcaagctccgcctcccgggttcacgccattctccagcctcagcctcccgagtagctgggactacaggcgcccgccaccacgcccggctaattttttgtatttttagtagagacggggtttcacgtgttagccaggatggtctctatctcctgacctcgtgatccacccgcctcagcctcccaaagtgtggggattacaggagtgagccaccacacctggcaaattttgccatattgtactttaaagtttcttttttcctagtggttcttaacttacaaaaattacactggaatgacagtggtttgggtagggcgctatttctctttttcccctaaccatgcccagctattaaacactagtaactgctggtttattgctctattgttttcgtttttcttttttttttctttttttcttcttcttctttttttatttttattttattttttttttttgagacggagtcttgctctgtcgcccaggctggagtgcagtggggcgatctcggctcactgcaagctccgcctcccgggttcacgccattctccagcctcagcctcccgagtagctgggactacaggygcccgccaccacgcccggctaatttttttgtatttttagtggagacggggtttcaccatgttagccaggatggtctcgatctcctgacctcgtgatccgcccacctcagcctcccaaagtgctgggattacaggcgtgagccaccgcgcccggcctgctctattgttttcaacaatcccccgggggcataagaagttagtctgtatcttgaatctcctctcagttgcctcaacatagcctctactgttcttgataggtttaaacttcttcatgctctgctgcaaattgggaagagattaagagctatcctttttataacaagcttcttcttccaaggaaaatctctaagtcagggctctggaactggggtgggaataatgcaacctctagtccccctgctctaggagctgagtgcttgctggactgg

SEQ ID NO: 727908 - DNA, 1034 bp, Homo sapiens
tgcagtggcgcgatctcggctcactgcaagctccgcctcccgggttcacgccattctccagcctcagcctcccgagtagctgggactacaggcgcccgccaccacgcccggctaattttttgtatttttagtagagacggggtttcacgtgttagccaggatggtctctatctcctgacctcgtgatccacccgcctcagcctcccaaagtgtggggattacaggagtgagccaccacacctggcaaattttgccatattgtactttaaagtttcttttttcctagtggttcttaacttacaaaaattacactggaatgacagtggtttgggtagggcgctatttctctttttcccctaaccatgcccagctattaaacactagtaactgctggtttattgctctattgttttcgtttttcttttttttttctttttttcttcttcttctttttttatttttattttattttttttttttgagacggagtcttgctctgtcgcccaggctggagtgcagtggggcgatctcggctcactgcaagctccgcctcccgggttcacgccattctccagcctcagcctcccgagtagctgggactacaggcgcccgccaccacgcccggctaatttttttgtatttttagtggagacggggtttcaccatgttagccaggatggtctcgatctcctgacctcgtgatccgcccacctcagcctcccaaagtgctgggattacaggcgtgagcmaccgcgcccggcctgctctattgttttcaacaatcccccgggggcataagaagttagtctgtatcttgaatctcctctcagttgcctcaacatagcctctactgttcttgataggtttaaacttcttcatgctctgctgcaaattgggaagagattaagagctatcctttttataacaagcttcttcttccaaggaaaatctctaagtcagggctctggaactggggtgggaataatgcaacctctagtccccctgctctaggagctgagtgcttgctggactgg

SEQ ID NO: 727909 - DNA, 1107 bp, Homo sapiens
cacaatcctaaaacacgtttgttttttcaaagacagtttttgctttattcacactccttcctctgctttgtgggatgatctcaatgaatttctgaggaactgagaagaccaatttccaaatcatctggagtaattaattccagtggttggagttaattatgattaggcaattcataaagtatacrgtagaaaaaaagcagcaattgatgagacttcatctgcagtgagatttttttcaaaggcattcttctggcaatgcatttcaaagttaaacatatgtgtgcttcaatggtgggaaaatagtttacgagggtatcattaggtacgggtttcaattatgtgcatatggccctatgtatatttttacagatatgatacatggctaattggtgtataacatgggaaaattaatgactatagcaaagacctccactctgtcatgttttttatactatttactgtagtatatttaccaaaaaatccattagtaaaatggcattatattatgaaataattttaatatctatatgaaaaattaacaggaatatattgagtataaaaacaataatttgggaagcactctgtattataaaaataaagaatttgtaataatgcaataacaggctgtatttctgttttatgattctgataataaagcacttaagttccactttcatggtttatgctgttatcagaaccccctaatataattagatggccttgttttagataattacttatatttccttattgcatagcaaaaatcccactggaaaaatcctcaatattttaaatgtaagagctatattgctggaataggccaagagaactggaaatcaactttactcataatacaggggccaggatttttgcaagctgggtaaaaatgataataccactctctttcatttttactttttttatatttcacaaattgattttactttcatgatttctcttatactattctcttaccactcctgtgagttagttgtcattatccacattttatagatggggaagttcatgctgaggggttgtggtcagattaagtggtggagcagagattcaaacaaacacccatcgtcttactctaaaactccattc

SEQ ID NO: 727910 - DNA, 1107 bp, Homo sapiens
cacaatcctaaaacacgtttgttttttcaaagacagtttttgctttattcacactccttcctctgctttgtgggatgatctcaatgaatttctgaggaactgagaagaccaatttccaaatcatctggagtaattaattccagtggttggagttaattatgattaggcaattcataaagtatacagtagaaaaaaagcagcaattgatgagacttcatctgcagtgagatttttttcaaaggcattcttctggcaatgcatttcaaagttaaacatatgtgtgcttcaatggtgggaaaatagtttacgagggtatcattaggtacgggtttsaattatgtgcatatggccctatgtatatttttacagatatgatacatggctaattggtgtataacatgggaaaattaatgactatagcaaagacctccactctgtcatgttttttatactatttactgtagtatatttaccaaaaaatccattagtaaaatggcattatattatgaaataattttaatatctatatgaaaaattaacaggaatatattgagtataaaaacaataatttgggaagcactctgtattataaaaataaagaatttgtaataatgcaataacaggctgtatttctgttttatgattctgataataaagcacttaagttccactttcatggtttatgctgttatcagaaccccctaatataattagatggccttgttttagataattacttatatttccttattgcatagcaaaaatcccactggaaaaatcctcaatattttaaatgtaagagctatattgctggaataggccaagagaactggaaatcaactttactcataatacaggggccaggatttttgcaagctgggtaaaaatgataataccactctctttcatttttactttttttatatttcacaaattgattttactttcatgatttctcttatactattctcttaccactcctgtgagttagttgtcattatccacattttatagatggggaagttcatgctgaggggttgtggtcagattaagtggtggagcagagattcaaacaaacacccatcgtcttactctaaaactccattc

SEQ ID NO: 727911 - DNA, 1107 bp, Homo sapiens
cacaatcctaaaacacgtttgttttttcaaagacagtttttgctttattcacactccttcctctgctttgtgggatgatctcaatgaatttctgaggaactgagaagaccaatttccaaatcatctggagtaattaattccagtggttggagttaattatgattaggcaattcataaagtatacagtagaaaaaaagcagcaattgatgagacttcatctgcagtgagatttttttcaaaggcattcttctggcaatgcatttcaaagttaaacatatgtgtgcttcaatggtgggaaaatagtttacgagggtatcattaggtacgggtttcaattatgtgcatatggccctatgtatatttttacagatatratacatggctaattggtgtataacatgggaaaattaatgactatagcaaagacctccactctgtcatgttttttatactatttactgtagtatatttaccaaaaaatccattagtaaaatggcattatattatgaaataattttaatatctatatgaaaaattaacaggaatatattgagtataaaaacaataatttgggaagcactctgtattataaaaataaagaatttgtaataatgcaataacaggctgtatttctgttttatgattctgataataaagcacttaagttccactttcatggtttatgctgttatcagaaccccctaatataattagatggccttgttttagataattacttatatttccttattgcatagcaaaaatcccactggaaaaatcctcaatattttaaatgtaagagctatattgctggaataggccaagagaactggaaatcaactttactcataatacaggggccaggatttttgcaagctgggtaaaaatgataataccactctctttcatttttactttttttatatttcacaaattgattttactttcatgatttctcttatactattctcttaccactcctgtgagttagttgtcattatccacattttatagatggggaagttcatgctgaggggttgtggtcagattaagtggtggagcagagattcaaacaaacacccatcgtcttactctaaaactccattc

SEQ ID NO: 727912 - DNA, 1107 bp, Homo sapiens
cacaatcctaaaacacgtttgttttttcaaagacagtttttgctttattcacactccttcctctgctttgtgggatgatctcaatgaatttctgaggaactgagaagaccaatttccaaatcatctggagtaattaattccagtggttggagttaattatgattaggcaattcataaagtatacagtagaaaaaaagcagcaattgatgagacttcatctgcagtgagatttttttcaaaggcattcttctggcaatgcatttcaaagttaaacatatgtgtgcttcaatggtgggaaaatagtttacgagggtatcattaggtacgggtttcaattatgtgcatatggccctatgtatatttttacagatatgatacatggctaattggtgtataacatgggaaaattaatgactatagcaaagacctccactctgtcatgttttttatactatttactgtagtatatttaccaaaaaatccattagtaaaatggcattatattatgaaataattttaatatytatatgaaaaattaacaggaatatattgagtataaaaacaataatttgggaagcactctgtattataaaaataaagaatttgtaataatgcaataacaggctgtatttctgttttatgattctgataataaagcacttaagttccactttcatggtttatgctgttatcagaaccccctaatataattagatggccttgttttagataattacttatatttccttattgcatagcaaaaatcccactggaaaaatcctcaatattttaaatgtaagagctatattgctggaataggccaagagaactggaaatcaactttactcataatacaggggccaggatttttgcaagctgggtaaaaatgataataccactctctttcatttttactttttttatatttcacaaattgattttactttcatgatttctcttatactattctcttaccactcctgtgagttagttgtcattatccacattttatagatggggaagttcatgctgaggggttgtggtcagattaagtggtggagcagagattcaaacaaacacccatcgtcttactctaaaactccattc

SEQ ID NO: 727913 - DNA, 1107 bp, Homo sapiens
cacaatcctaaaacacgtttgttttttcaaagacagtttttgctttattcacactccttcctctgctttgtgggatgatctcaatgaatttctgaggaactgagaagaccaatttccaaatcatctggagtaattaattccagtggttggagttaattatgattaggcaattcataaagtatacagtagaaaaaaagcagcaattgatgagacttcatctgcagtgagatttttttcaaaggcattcttctggcaatgcatttcaaagttaaacatatgtgtgcttcaatggtgggaaaatagtttacgagggtatcattaggtacgggtttcaattatgtgcatatggccctatgtatatttttacagatatgatacatggctaattggtgtataacatgggaaaattaatgactatagcaaagacctccactctgtcatgttttttatactatttactgtagtatatttaccaaaaaatccattagtaaaatggcattatattatgaaataattttaatatckatatgaaaaattaacaggaatatattgagtataaaaacaataatttgggaagcactctgtattataaaaataaagaatttgtaataatgcaataacaggctgtatttctgttttatgattctgataataaagcacttaagttccactttcatggtttatgctgttatcagaaccccctaatataattagatggccttgttttagataattacttatatttccttattgcatagcaaaaatcccactggaaaaatcctcaatattttaaatgtaagagctatattgctggaataggccaagagaactggaaatcaactttactcataatacaggggccaggatttttgcaagctgggtaaaaatgataataccactctctttcatttttactttttttatatttcacaaattgattttactttcatgatttctcttatactattctcttaccactcctgtgagttagttgtcattatccacattttatagatggggaagttcatgctgaggggttgtggtcagattaagtggtggagcagagattcaaacaaacacccatcgtcttactctaaaactccattc

SEQ ID NO: 727914 - DNA, 1583 bp, Homo sapiens
aaaaaaaaaaaaaaaaaaaagtgcaggaaacgtgaattaggtgttcagaggatccaggaagctctaatatttacatttgatccagaccctgccacaggggagataggcttaatcgtcatgttgatgtgaaaggcatattccaggcagaggtgaggcatggaaaaatrcaggttggataaccattcttggaatcataagatgttttgtttggtgcagagtatgttttgtatagatatctttcacagtgccatgtccatacaccctccagtcactacctatctaattttatgaggtctgcccaaggtagattgtcatagcattgtgtattttggtcctcagcaatcatacctttaaaattagaggaatcacatgctagttacatgttttttgatactcactatagtctaaaagggaaatctccagattgaaaatggctataaactgacactctagtttctcttaaatttccttttagggttttctcattcgaaacaaatttttcatcaccttagccacacttgggaatattctgcaatattattgagaaaaacaatacttttgtcttttccattcaccttaacatagttaagggaggttgaacttttcttaaggaatatcactttaggagcatgtgagtagtatttctgcttccggttttggcagactaccttgtattagaaaagccctcccctcaagccaagaaccagtaaaaaaagcaggaaagagcttaaaagtctctaattggttgcaaaaccctctgattggagagttaggattagggttagttatcgaggctgttaatatttgagggcccatgtgttcagaaagaggaagtacatcaaagttatctcaattattttgttcatatttcccctcaatgcatctgccaattcatatgttgggtggatctgagagctaagtagctgaacagacttttatagcagttttacaatgctggagaaacaaaaattggagttcaaggctgtgacaggagccagagtttgaaaagtacacgtcctaaaaagaagtgacatttgcctatttgtgagcaacacctaagagattcagaaagccaagaaaaacctttagtcaatgggatgggaagccaagtaaactttcagcaatctagtggtcctggggaaacaaattaaaattcagggcccacctataaaacatgcagactttcagctgaagtctatattctactggtaaaggtagaaaaaaattagttctcacaaacactgaaaattagcttcagttcacctctgcccagcctggattagtatacatcaccctactcttacgatttgccagaagcaaaagcaaatcatctctgtaggagaataatattattcagagcctcaaaccaccatgcacaatgtctggcattcaacaacagcaaactaccaggaagaaaaataccaggaaaaaataccaagttgcagaaaactaagagaaaacaattaagaaaagagaaagagaccaacaggtgagttagataatagacataaaggtcatggactttaaagtaactgattatagaactgtgccaatgttaaccaaaaaaagaaaaaaaagctgga

SEQ ID NO: 727915 - DNA, 1315 bp, Homo sapiens
ccgcatcatatgatgctttgaagatccatgctctgttttaccctggagctgtgattctcttattttttctatgtgaatgagtacattgtgctgttttcctaggcgccaatcagtacatacttgactggtctccggcaaactgccagggttataaggcggagtcctctgatctctgcattgacccaggcttcagggatcggtcctgtgttggcagcccctcagctgacctgtctttttgcaatgctaatgccaagctttcccatctcttctcctactcctatgtagaatatggcttccttcctttaacttcttcattacatgcacacaccccacatgtacacactcaactctcytcatcaaaatttattagagacacccattcgataaatatgtttcaggtatcttctgtgtgccaggcactgtgctaagaattaggaatataaattaaacaagacagatcttgaccttgaatgtactagacagtaggaaatagacagcagacaaatatgtgaataggtaactaaaacattttcagactatggttagtgctttcagggaaataagtggggcgatgggccagaaagcaaccggggcatttactccagttggagtgaactcagaaatcttctctaaagaaaatacccaaagaatgaagagaagccaagcaagtgaaagttacagggaaatacttctcaggcaggagacacaagcaaatgcaaaatcctcaaagtgggaaagaactgaaaaatttcaagaacccaaaacacccagtgaggccggagcttagcgaggctgtgcctgtgtgaggagaaggaggggctagaaaagaaggaggggctagaaaagaaggaggggctagaaaagaaggaagtgctagaaaagaaggaagtgctagaaaagaaggaggggctagaaaagaagaaggggctagaaaggagccgggacatgcagggctttgcagggttagggagttgtggtgggagaggtttgggttgtgttctaaacaggactgaaaacctatgccggtttttcagctacagggagacctcctgcaatgtatggtgtaaaaaactttaataacagtagggtagagaaaggaatctaccaaaaccagacttagaaaaggaaggccagtttggaagttacagaagctttccaggcactggggtgtgaagggaggatggggcaggagttggcaaagactgaatggaaaggaactcaatgacagattccaggaggaggcgggtgaggagaatgaaagaaataagggaattcccggtgactgcaggtttctgaactgagtagatgaatcatt

SEQ ID NO: 727916 - DNA, 990 bp, Homo sapiens
tattgagcacctaccatgtgccaggctctggagatagaaagatgaataatgcaagccttgtcttggaatcttcaagagtgatcaaatgtgtagggaagtaataacaatgtaataacaatgcaatgggtatcggcaatggtttgcactgtttgctatccatgtaattcaaaccaaatcagaaaaaaaaaatgcccctgccaaactactgaagttaaataattgacatttttagcatctctattgcctttcaaaaagtagcatgatgaaggaagcacctcagcaagaagtttcctgagaaggaagagtgtgagtggtttttttttttccaattagctttgtgtccttgccttgaaatggtcacaactgcaacatcacggatgtcatctggaatttcttcatcattctcaagcttcaagatgagatcraggagccatagtgtgcattttcctcagccgatttgaagatttcagcagggattccatcagctccagatgccttgttgtttttcatctgcttgatggctttcctcacctcataaagagttggagggattttgagattgccactgattgggagttgtgggatggagttgaaaacactcccactgataaaataatttccactgaagacctggaaatgctcttttcaatatgtgttgacattttctctctcactgagcagttttcaagcacccttatcttcttgatagctcatatagagtttcagcgttatccgacctaatccatgtgggtgttgaatcgacttcgccatgacatctcaccatctgccctgtgtgttggagggctctctgaatctttaccttgacttacaaatgtaacaatgtctttcttttgggatcaacaacaatgtcaaatgccaaaaaattaaaaacaaaaaaactcattgcagacttatgtttaagattattataagattgccaatttgcatctgttaaataatgtttaagaaagtcaggctcttggccaggca

SEQ ID NO: 727917 - DNA, 2125 bp, Homo sapiens
gaatacaaaaaagggaaggtcttgctccagtttttagtttctcatctgtataaaatgaggaagaaggaagggctagaagaaagaaatcctcaggcgagtgcaaaagctgtattcattcccaaatcattttatattgtatattttgcatcacaaagctcttcacaatcagtgacaaaatatagagggattacaaattcaagagatggatcaccatcactgttttgtgaagcggcatgccactgttggctgctgagggtacgtaggaaattacaaagggctgaaatcccctgtgctaagacagtgatctggagtacaaaggcatgggcatgacacctcctcccaaaagaagtgcctgaaactgcccttgaggggcaaagaacaacaccatctgattgcttctcacacaaaccattgccatatactgaggcctggctggttcgctttaggggtgacccaggtaggccaagtaaaaagaacagtgatgtgaagaagaatatggcaagacatcggattttgttgaaggaagagaacatgcagctgagaggaggctgttccagaataatttatcagggaataaagaatgaacagaggaaaataggtcttttactcaataatagccctttgcattgattcttagggttcctttaacagtaaagccctcctctctcttctcagcaaacccaaatcctgtctaatctttagaactcagccaatccatccttctctgcaaatgttcycacattgttaggagcctgaaatgagttgtactcatccttctctgaattcactcaccaaatattgtttctgcaatcattttggcaattaagtgaaagtcaatgactttttggttggcttacatatttcattaatttttgttggtttctattgaaattggaggtttcttgaggcgaggtgttagccttaattttatcttaggtttgtactgaagtagggcaaagatctcaactttgcaccctaagtcactgcactgtacctgtaggtgggtatccctgtgccacctttagaggccaggaaatcaattctgagaggccatgtctcatgtccatgtcacagcctaagttgtggagccaagcttggcatcctgactgatgaaaaagttttttcttagatagaaactaagtaattgctttctgtgtttataaaaaaatcagggagatgtctcatgagtatgttcattcttttgtttcagagtgaaagcatcccttacatctctgttccttagaagccctgtctttgcttactccaggagaagagaaggcataggtggccattacatgggttttgatgtgaattgctggccaaggtactttggagtcttgctgtggtagtttggagtttgctgttagaagagtgatgttgcagccagtgtttccaattgctgtcgaaacagaaatcagtctgctcctgattactcatcagcagttgtaccactcaggatttgttcttgagattatgaggggctctccaccctggcggcatgttaaaatcactttggaggcatttaagggggcaaaataatgcctggaccagattcccagggatcttgatatccagttggtttgtagcggggcacaggcatctgttttttgtttttgttttcattttataagctccctacttgcttctaatggcactcagggttaaggaaccccgagagaccatgctggagacctagcaggtgcagtgagtaagccgctgggggagaatttagtgctggcaaaaagaacgctcttacagccccttacttctcttacatgaagcagtcactctcacacacacgttcccactccgcccagtaatccatgttaatcctggtctggagcaagcacttctaagtagtaaaagcctaaaaaatgcttttccactttcatactgtgatgcttttggggggctgttgttgctggtaatgtgatgtattatgtgctgggcatataatgaagacgtggggcaatccactagatgtgagtccaagccatggtctgaatctgagtgcagattttccagagccccgtgaaacaatgggagtgactgtgtcttctcacctattgtcctggagccattgcccttgcaggtacctgccacatccctatgcttcctgggccca

SEQ ID NO: 727918 - DNA, 608 bp, Homo sapiens
atgtagtgctgatagttgttgctacatagagaactagaaaagggacttaattttgtggactaatatttgatctagggtgttgttcttaaagcaggtgcactttgagatgggtctacaaataaacataggagtgaaattgaactgagaaactgcctggataaagacaccctggtggaaagagctaggacagctgtgccactctcaaatatatctcaatcccccaagtatcatttatgcagaaagaaaacaggagcaacaaggaggaaacacatttcttacttgtgtaaatttcagtcataaataataatagtgataatgtatacctgagtttttgaaaaaaataaatgagaaaatatgttaatacaaatttaaaatatacaataacacaaatattagtaygattatgtatgatgtgctctgcatacatgtcctgacttattttacaaatgtagtcaaaatgatactttgataactgaatagtgaagaacttggaattgaaacctggatctggtttttgaaatagtttcaacaaattttgtagctagaatataaattatcaaataaatgatagttgacaaattaatttaatgtaaagacctatagaaagc

SEQ ID NO: 727919 - DNA, 1699 bp, Homo sapiens
tatatccatgtcttttagagctcaacccattcaaaaagctttctctaacccatcagcctaatttaactcatgcactctatcatcagggtttcaaagtcaggaataaggatgtttctcagtgagaaggaaagcccatcctgcttgtcgattgctaccttctagctcccagtctaactggagattttgcttcttaaatatgtcattatcacatgagagtaaagatttttgtcatgaatattggcaaaactgcatccagcagggaaaatgtttgcataggccaccaaaatctccagaaacaggagtatcaaatgccgcttgttgcacctgttctgttctcgacatcagttctgctaatgttttatcaaactattcttttaatatcgtcaatgactcttagcaacctaattatctgtcttgccattcttattgctataaacttttttaaaaattatatggcccaagctttttcttccttacctataggccactttacctttatctacttcacctacttctgccatcatcttagactgtgaataatttccacccttcatttacaatgctaccttcaagatatttacaattcttattcatgtccttgtttagccttccttttctatatctctagctttcccaaactctcctgtttatctctggagacttgtttttattctttatatatttctctagatttcttgtttccttccaaagaaaaccaaataatactggatgttccaggtgccgtggcatccaggaggggaggcgtgcagacattatccctccaaactgtgtgtgtcctctttagagtaaagcctcagaactgataatagtgccacacataaaaacaagcatcatcccagtcaactagccctgtcaataaatcagagaaacccaccattcactggctgctttcactgctcctagggtctctgcgatagaagagggcataattcactcctcacaaacacttaataccacatttctacratttacaatctgataatattcaaatactattgctgtattatgcagctcacaattgcagatgcgattccataacagcctgtcactttggcatgcattatgtaagttggtataaaattgcctgtcttaaaactcttcttcaattgcaacccaatatcatcgtttcacacagagctttgggaacattaaaaattcagcttcttccctatttagcaagttctgcaaaagggagcaaaacagacaaacagatgttccctcttctgagtccccaggaggtctgaggcaaagtagaaagaccccaaaatgatacaacagcaatgacactcaagatacatttgttcagtttttttgttgttgttgtttttaagaaaaaaaaaagaaagggaaaagaaagaaatctcttactgtctcctctggaaaagtagaaatactctacattggtactggtaaatgcttttccacataggtggaattttctaggaggttaccaccttacaaaacttcctcatcttacagttgttcaccattttctcacatagttttctggaaggtgaggtgatgtgtgcattttgtatcgctaataatagatagtttctcagaaactagagtgtcaaaaactattccaattctacccccaatttgccctgatgacagatcttttaacaggacacacatcttccattcctcaattcagaatatatggctgaacacgaat

SEQ ID NO: 727920 - DNA, 621 bp, Homo sapiens
tctctcaggacctgccagaacagtaggcaactgtggaagcagcagcaattagttaataaaactgtattgttcctgacagcttttacacatctattttcttctgctgactaagaaggtcacccaaattctatcttttccagcatcttatttttgactggatcaagaaagagcagtgacaaactctacagaggtgccacagtggaatttttaagattaattagaatctttgtttttgctagggaatctcataagcagaagaaagaggttaagtacaagaaagaatctgacattaattcaaatttaagtcttggctcctacagtgactagctgtgtgatcttgcagaagttatttatattttctacatctcaatttatttattggtagtaataatgaaacttatctaatagggttgttatgagaatttaaaaggtctatttaaataatttatcacagtgccaaaatagcagtaaacatttgtggttgtggtggttgtaatctttcttgagactagagaatgatggattaaaaaccaagcttctgtrtacagaaggaaagacactacaaagtacttgtctggtggctactcctcaaccttctttgtttttgtaaaaatcacaaca

SEQ ID NO: 727921 - DNA, 963 bp, Homo sapiens
attacttgagaatctaatacatatacctattaagtcattaaattcaaaatgactattcagaagatgcatatttaataaaataaaataaccaagtttgacaggttattttaaaacacttacagaccaagatttccaaaggtgtgtttaaaaagtaatagatggcatcaactttaactgtcagcaaagtcagtccttatggagttgcctaagaaatgtgattcatttgaaagtcatatttgataattctagggtaatattcaatctaaatttaaatttcatttacattaagtgaaagctcaaatttttatttttgtttttaattctgtggtataactctctcctttttggaaactaccacttggcttaagagttaatcatgattttgagagcactcttagttctgagatggaaagtaatatagtagtaccttcttctaaagagttttttttatgagtgaattgaatgtcattgaaggacagcagtggacatagttgagaaaaggaataaagacaaagattggttcacaaatttaatctaatgctaatgagacttcttatttagtttgtgtaaataaaataatacatgtaattagtgctgagcagcatatggaacccattgggaatgtgtatttctatgtgtatttcaagggcaccagagtcattttgtttacaagtacataaactgtaatgtaactttccactacaggcggcaacatcttaaaatatttcacacatatctgtttcctgatgtattttaataatcttcttccccaaatattaaatttgaattctactcaactttcagttggactctactcttaagtaatattaaaatgtttcatrccctttttttttgagatggagtcttgctctgttgcccaggctggagtgcagtggtatgatcttggctccttgcaaattctgcttaatgggttcaagtgagtctccggcctcagcctcccgt

SEQ ID NO: 727922 - DNA, 777 bp, Homo sapiens
catcttggcctcccaaagtgctgggattacaggcatgaaccaccatgcctggcctatttagcacaaatcttgatgcagatattttaattacatcataattgagtatagtaaatcaggctgggagttctttgagttggtttgtagtataaaccattatggtaaatatttatgcatgactcaaattggaaacaggaacacacattttgcttaagtctactggtctgtagaaagcctgtggtctaaactctaaactcttaggatacctgcttcatatttttaaaatgttagtcctatttttgaagccttggaatcaggaatttcttcacctattactcatcaaagttctaggtaaataacttttacygctagaattatttataactttgcccgtggactcccattgttgtaaaatgtttatttttttagatattacttctggatgggtcaagtgcatatttaacaaagaaatacaccctgcttctcagaatttttgtttattaagagtttgcattgccagtgatgaggttttagaaattgctatctttctgttaatctaaaggaaggagataagttagcatctgacttaaaagcatttattatatatcctgtatctttttaaaatatcctatgaaaggaatcaactataggctcaataattagtataatgaacacattggtcatgaaactttggtcatctaaccaatttaatgaaaaggagagtttattggaagactcataagttagaagccattgcagcaaaatgggaggttctaggta

SEQ ID NO: 727923 - DNA, 1343 bp, Homo sapiens
tgcatatttatactaacactttaatccagaagttcaaacgtcattacactgttgatttcctgcttagaattgattcctttattcctttacaatgaactttaacaaattttacaactggaatcaaagtattttcttgggcaactatatttttttaatagggtataataactactaggagttgtaaaaatgacttcataagtgaaatcagttttcttctctctaactttgaccctaatttaggggagactcactgtatgacacctgttcataatggtcagtggtgaccttggccttagaatgctccttactaaaagaacaggcactaatgtgtaatctaccacatgcatgattctccccctcaaactgtctctttttcatatttaggacaaagctaatgttaagtcatttaccattcctgcataaactggcagctaagaattacacatacatatattattaagtaaattatgtaagagaacaaaaagagaattatgtaaatattagagggcaatactaagtatttagtaatccaatatgctagtggtagtggattatacatggacaaagacacccttccaggctatgaagctgccacttagtagcctgtacaaaagagaaagaaagtggcttaatgcacagaatagtatgttattcaggttaagtgattttgtgtttctctattaactgccttatgcatagactagaatcagctctgtaagttagattgcctattatgtgcaattacttgaaaatctgtaatttaattgagtctatagttattttacatacactgaagcagataccgatgaacaggatttgacgttaartatcagttagctaagaaatgaataatatataggtaaaattactttcctccataaagaatttccatcttattaaataaattatatatacctccatacccaccataaagcccaaatggtgagaatgaaaatatccaagcatgattggccagaatatctctggctatgtatgatttactatcaccagtaagtgacttaggcaagaagaaataatggatcttctaagtacttttagatacgctttcagactcagcgaaaaagccaaagtgtcagttccattaaaataattacatttcaaacacacacttacttttacctaaaggcttaagatactagtatttttcatatatttaatacttttgaattttataatcttttaagtaaattgacatttcattatatacactatttgtagaataaaataacagtataatttttaaatcaatatattcagtacatagagcaatctctaagaggagcctgagttatcgaaaatgtatgagctatttccacggaggg

SEQ ID NO: 727924 - DNA, 1400 bp, Homo sapiens
ttacttttgtaggaaaaaagaaaatactttttcctcctacaaaaaccaaatttaataatattaaaagtcaaatttattcaggtaagccagtagaggatggatatttctacattaattacattattttcacgacaatgatgatgcttttttgttccactgttttttctactaacatatttacaaaatgctttcttaattttatttagaattgcagtttgttttaaaaattttttctcattgcattaccccacaggcattatctagtccaaaacctattaggataaaactgaacagctcagcattctctaagctgtcgcttagtgaaacttatctgaatgcttgtgtgtttttattttcataaaagtacaatgacacaattcttgtataaatgtgccattatttttaatacaataatgtagcctaatttgaatwataatttatgttaggatctaaagtatttatttgtatccatcatagcacttatcaaagaacaagtgatttatccagtatttattcacataaatacttcattgtaatcaaacataattatgttatttacaaggaacccagctagcagtgtagttgatagaacagttttgggcttcttgctagagaagagaattgaacagaaatcctagaaagtgtttcacatcccataaaattatttgaagtctttctttaactgtagatcgcctagactgaatatttcaagtgaagatcacacacagtgcttcacagtgatctgcaaaaatgaaaagttgaaataatcaaatgtcacaactaatttagaagtctaaattgagtgatgaacccagtactcatccctatagaaacttttaaccaagttgccaatgtaactaccatagactcactacttagaggaaaatcacctgagttaacaaaacaaaggttgaagttttgaccattttatttaaccagttttaagttctgcaactatagtaaatatcccattgtgctacctgaatataagtaaagcatgtattaaaaatatttagcaatcttgtaagggtcaaccaaccaatctaaacacatgctacacaaaagaagtggccctataaaaacaaatcagtgaagaatggctgaatgtcagttctgtgaatgaaggagccccctgagtctgcttttatcggtagtttggatttttacgtagtaccttcattgcatttatgggaaagtctgtttcggaggtactttcttttttaagctaaaattaccagctaaagtctcatttaaaaatttttattcattgtaattcacaaattatagttgtacatatttatggggtaaaaagtgatgttacaatttatgaatacaatatggagtagttaaatcaagctagtgaacgtattcatctcaaatacttgtttttgtggtgagaa

SEQ ID NO: 727925 - DNA, 1400 bp, Homo sapiens
ttacttttgtaggaaaaaagaaaatactttttcctcctacaaaaaccaaatttaataatattaaaagtcaaatttattcaggtaagccagtagaggatggatatttctacattaattacattattttcacgacaatgatgatgcttttttgttccactgttttttctactaacatatttacaaaatgctttcttaattttatttagaattgcagtttgttttaaaaattttttctcattgcattaccccacaggcattatctagtccaaaacctattaggataaaactgaacagctcagcattctctaagctgtcgcttagtgaaacttatctgaatgcttgtgtgtttttattttcataaaagtacaatgacacaattcttgtataaatgtgccattatttttaatacaataatgtagcctaatttgaattataatttatgttaggatctaaagtatttatttgtatccatcatagcacttatcaaagaacaagtgatttatccagtatttattcacataaatacttcattgtaatcaaacataattatgttatttacaaggaacccagctagcagtgtagttgatagaacagttttgggcttcttgctagagaagagaattgaacagaaatcctagaaagtgtttcacatcccataaaattatttgaagtctttctttaactgtagatcgcctagactgaatatttcaagtgaagatcacacacagtgcttcacagtgatctgcaaaaatgaaaagttgaaataatcaaatgtcacaactaatttagaagtctaaattgagtgatgaacccagtactcatccctatagaaacttttaaccaagttgccaatgtaactaccatagactcactacttagaggaaaatcacctgagttaacaaaacaaaggttgaagttttgaccattttatttaaccagttttaagttctgcaactatagtaaatatcccattgtgctacctgaatataagtaaagcatgtattaaaaatatttagcaatcttgtaagggtcaaccaaccaatctaaacacatgctacacaaaagaagtggccctataaaaacaaatcagtgaagamtggctgaatgtcagttctgtgaatgaaggagccccctgagtctgcttttatcggtagtttggatttttacgtagtaccttcattgcatttatgggaaagtctgtttcggaggtactttcttttttaagctaaaattaccagctaaagtctcatttaaaaatttttattcattgtaattcacaaattatagttgtacatatttatggggtaaaaagtgatgttacaatttatgaatacaatatggagtagttaaatcaagctagtgaacgtattcatctcaaatacttgtttttgtggtgagaa

SEQ ID NO: 727926 - DNA, 459 bp, Homo sapiens
ttcttggtttttatttctatttagtttcctaatgccttgaacttgtgagtaaagggactgattgatgaagtttaaaagcataagttcaggacagattcacacacttttcattatctggaaaaacaacttgggtagaagaagtggaacattacctgtgagtcacagaatgtgtatttttttgctgtgaattttctactttaaagtataggtatttaatatgcactggtartacttttttcacatctgctgaagttctagggtaagtaataaaatattgaggggattttcaagatggctgactaggaacatcagatgccagttctgctcaggacaaagatcaaagtgatgaatggacattttcctaatggaaaactaagggaaaagagccaagaattgtcagagtgcccatgggaactaggtggggtgaaaaaaacaaaagcagagagagtctggtagaga

SEQ ID NO: 727927 - DNA, 601 bp, Homo sapiens
aataggccagacgcagtggctcacgcctgtaatcccagcactttgggaggccaagacgggcggatcacgaggtcaggagatcgagaacatcctggctaacatggtgaaaccccgtctctactaaaaatacaaaaaattagctgggcgtagtggcagacgcctgtagtcccagctactcgggaggctgaggcaggagtatggtgtgaagccgggaggtggagcttgcagtgagccgagatcacgccactgcactgggtgacagagagagactccgtctcaaaaaaaaaaaaaaaattaataaaataaaaatttaagtcccagaatactaacttttttcacatcttaaaatatctcctaactactgtctggttttatraaaataattttattttgcttatgatgttagatgattgaaaagagtcagttgactaaccagaattttcagtaaaactcttgtaattccagtcaattttcagtctctccttatgatcatattaaggaacacattaaagagaatacacttagaaaaacacaccaagctttttgatatctatggtttataatttttaatgttatataatatttagttttatagtctgta

SEQ ID NO: 727928 - DNA, 604 bp, Homo sapiens
taatcacagtgtattggaatttccagtttccttatcggatgcttcaattcattgtgtattgttcaaagtcagagccagactcatttaattattatatgtttaagcctrgaggaatatacatacatacgtataaattaggtcctgaaaataatttggtgtatatttaacataaagaagtacagttttccttgagtcttgaaaaaaatgtttccagtaatgaaactcaggagagcagataaatcagaagtttaaacctgtgcaattatatggataccaaaaaagtattataaattcagaaaccacaatatatagcatactgttcttttatgtgcttattttgcaaaatcaatccctattattgaaatttggtaatatatgtattaaaattatataactctgtgtggaaggagaatatggcatattggaaaattaaagtctgcgctgaaaatgtggtgtcttggattggtattcttggcatacaactggctgcctagggcactttaagctacttaatttatctgattactgttttcctcaattgaccttcaagtgaaaatggcttaagttccttcctcctttagaatcccaaaatcctaatattact

SEQ ID NO: 727929 - DNA, 604 bp, Homo sapiens
taatcacagtgtattggaatttccagtttccttatcggatgcttcaattcattgtgtattgttcaaagtcagagccagactcatttaattattatatgtttaagcctagaggaatatacatacatamgtataaattaggtcctgaaaataatttggtgtatatttaacataaagaagtacagttttccttgagtcttgaaaaaaatgtttccagtaatgaaactcaggagagcagataaatcagaagtttaaacctgtgcaattatatggataccaaaaaagtattataaattcagaaaccacaatatatagcatactgttcttttatgtgcttattttgcaaaatcaatccctattattgaaatttggtaatatatgtattaaaattatataactctgtgtggaaggagaatatggcatattggaaaattaaagtctgcgctgaaaatgtggtgtcttggattggtattcttggcatacaactggctgcctagggcactttaagctacttaatttatctgattactgttttcctcaattgaccttcaagtgaaaatggcttaagttccttcctcctttagaatcccaaaatcctaatattact

SEQ ID NO: 727930 - DNA, 604 bp, Homo sapiens
taatcacagtgtattggaatttccagtttccttatcggatgcttcaattcattgtgtattgttcaaagtcagagccagactcatttaattattatatgtttaagcctagaggaatatacatacatacgtataaattaggtcctgaaaataatttggtgtatatttaacataaagaagtacagttttccttgagtcttgaaaaaaatgtttccagtaatgaaactcaggagagcagataaatcagaagtttaaacctgtgcaattatatggataccaaaaaagtattataaattcagaaaccacaatatatagcatactgttcttttatgtgcttattttgcaaaatcaatccctaytattgaaatttggtaatatatgtattaaaattatataactctgtgtggaaggagaatatggcatattggaaaattaaagtctgcgctgaaaatgtggtgtcttggattggtattcttggcatacaactggctgcctagggcactttaagctacttaatttatctgattactgttttcctcaattgaccttcaagtgaaaatggcttaagttccttcctcctttagaatcccaaaatcctaatattact

SEQ ID NO: 727931 - DNA, 604 bp, Homo sapiens
taatcacagtgtattggaatttccagtttccttatcggatgcttcaattcattgtgtattgttcaaagtcagagccagactcatttaattattatatgtttaagcctagaggaatatacatacatacgtataaattaggtcctgaaaataatttggtgtatatttaacataaagaagtacagttttccttgagtcttgaaaaaaatgtttccagtaatgaaactcaggagagcagataaatcagaagtttaaacctgtgcaattatatggataccaaaaaagtattataaattcagaaaccacaatatatagcatactgttcttttatgtgcttattttgcaaaatcaatccctattattgaaatttggtaatatatgtattaaaattatataactctgtgtggaaggagaatatggcatattggaaaattaaagtctgygctgaaaatgtggtgtcttggattggtattcttggcatacaactggctgcctagggcactttaagctacttaatttatctgattactgttttcctcaattgaccttcaagtgaaaatggcttaagttccttcctcctttagaatcccaaaatcctaatattact

SEQ ID NO: 727932 - DNA, 604 bp, Homo sapiens
taatcacagtgtattggaatttccagtttccttatcggatgcttcaattcattgtgtattgttcaaagtcagagccagactcatttaattattatatgtttaagcctagaggaatatacatacatacgtataaattaggtcctgaaaataatttggtgtatatttaacataaagaagtacagttttccttgagtcttgaaaaaaatgtttccagtaatgaaactcaggagagcagataaatcagaagtttaaacctgtgcaattatatggataccaaaaaagtattataaattcagaaaccacaatatatagcatactgttcttttatgtgcttattttgcaaaatcaatccctattattgaaatttggtaatatatgtattaaaattatataactctgtgtggaaggagaatatggcatattggaaaattaaagtctgcgctgaaaatgtggtgtcttggattggtattcttggcatacaactgrctgcctagggcactttaagctacttaatttatctgattactgttttcctcaattgaccttcaagtgaaaatggcttaagttccttcctcctttagaatcccaaaatcctaatattact

SEQ ID NO: 727933 - DNA, 604 bp, Homo sapiens
taatcacagtgtattggaatttccagtttccttatcggatgcttcaattcattgtgtattgttcaaagtcagagccagactcatttaattattatatgtttaagcctagaggaatatacatacatacgtataaattaggtcctgaaaataatttggtgtatatttaacataaagaagtacagttttccttgagtcttgaaaaaaatgtttccagtaatgaaactcaggagagcagataaatcagaagtttaaacctgtgcaattatatggataccaaaaaagtattataaattcagaaaccacaatatatagcatactgttcttttatgtgcttattttgcaaaatcaatccctattattgaaatttggtaatatatgtattaaaattatataactctgtgtggaaggagaatatggcatattggaaaattaaagtctgcgctgaaaatgtggtgtcttggattggtattcttggcatacaactggctgcctagggcactttaagctrcttaatttatctgattactgttttcctcaattgaccttcaagtgaaaatggcttaagttccttcctcctttagaatcccaaaatcctaatattact

SEQ ID NO: 727934 - DNA, 595 bp, Homo sapiens
tgccaaattgcaatttaacattataaaatattaatgatggctaaaagttggaggagtaattataccaaatattttgttttttaatatatatataaatacacacacacacacacacatgcatatactgagggttcaaatattattcagagttagcttcaacaatgcagattttcctctgagagtttcatatcttaatctgcaaaaaagaaaagaaagtgtggttacattatcataaaggatatagcttctagcttcagagtgctataccttgataggtatatgaataaaaccttgggcatatttcttaattatcaaaaattcaatctcttcgattgtaaaatgagaataagtacctacatmctacatttctagatgatgggggcgtgtacaaatgtgcataaagcacttaacaacagtgcctagcgcacgacaagcaggcattaaatgacagctattactagatattaactggacatgtgttctcataaattcatatggcctgcttcctatgttgacactggtagggataagggaaaggaaaagcaaagtatacgggtaattaaactgcccctaaaaaccaagaaattctatgaag

SEQ ID NO: 727935 - DNA, 783 bp, Homo sapiens
aatggtcttttggactctttaataaattttttttctgatttcctaatgaggtcttcccatgtagccaatcattttccaaaaggcctgatttagtagtcacccacttctctgaataattattcaatttagccaggtgcagtggctcacgcctgtaatcccagcactttgggaagccaaggcatgtggatcacctgaggtcagcagttygagaccaggctggccaacatggcaaaatcctgtctctactaaaatacaaaaattagccaggtgtggtagtgctcgcctgtagtctcagcttctgaggaggctgaggcagaagaaccatttgaagctgggaggcagagcttgcagtagtgagccaagatcgtaccactgcactccagactgggtgacagagcaagactctgtctgaaataaaaaaataaaaaaataaaatcagtttacatgtgtgtgttttatatgagctttgtagaaaaaaattaaataacatttatttctgacagccttttatactcgatgatttaaaaataaaagaaaaaattatgaatttagtttacattagtttatagcaagccatgtagtattacattgttaatatttcacttctccagtccctttacataagagatgtgctgaaatagctgggtcatgactttaaataataaagaagattttgctattggatggtgccaatttcggtaagacaaattggtgaaattggaggatttacttgtggtcagcttttgttttttatttatactgattctgtattctcatttttga

SEQ ID NO: 727936 - DNA, 783 bp, Homo sapiens
aatggtcttttggactctttaataaattttttttctgatttcctaatgaggtcttcccatgtagccaatcattttccaaaaggcctgatttagtagtcacccacttctctgaataattattcaatttagccaggtgcagtggctcacgcctgtaatcccagcactttgggaagccaaggcatgtggatcacctgaggtcagcagtttgagaccaggctggccaacatggcaaaatcctgtctctactaaaatacaaaaattagccaggtgtggtagtgctcgcctgtagtctcagcttctgaggaggctgaggcagaagaaccrtttgaagctgggaggcagagcttgcagtagtgagccaagatcgtaccactgcactccagactgggtgacagagcaagactctgtctgaaataaaaaaataaaaaaataaaatcagtttacatgtgtgtgttttatatgagctttgtagaaaaaaattaaataacatttatttctgacagccttttatactcgatgatttaaaaataaaagaaaaaattatgaatttagtttacattagtttatagcaagccatgtagtattacattgttaatatttcacttctccagtccctttacataagagatgtgctgaaatagctgggtcatgactttaaataataaagaagattttgctattggatggtgccaatttcggtaagacaaattggtgaaattggaggatttacttgtggtcagcttttgttttttatttatactgattctgtattctcatttttga

SEQ ID NO: 727937 - DNA, 783 bp, Homo sapiens
aatggtcttttggactctttaataaattttttttctgatttcctaatgaggtcttcccatgtagccaatcattttccaaaaggcctgatttagtagtcacccacttctctgaataattattcaatttagccaggtgcagtggctcacgcctgtaatcccagcactttgggaagccaaggcatgtggatcacctgaggtcagcagtttgagaccaggctggccaacatggcaaaatcctgtctctactaaaatacaaaaattagccaggtgtggtagtgctcgcctgtagtctcagcttctgaggaggctgaggcagaagaaccatttgaagctgggaggcagagcttgcagtagtgagccaagatcgtaccactgcactccagactgggtgacagagcaagactctgtctgaaataaaaaaataaaaaaataaaatcagtttacatgtgtgtgttttatatgagctttgtagaaaaaaattaaataacatttatttctgacagccttttatactcgatgatttaaaaataaaagaaaaaattatgaatttagtttacattagtttatagcaagccatgtagtattacattgttaatatttcacttctccagtccctttacataagagaygtgctgaaatagctgggtcatgactttaaataataaagaagattttgctattggatggtgccaatttcggtaagacaaattggtgaaattggaggatttacttgtggtcagcttttgttttttatttatactgattctgtattctcatttttga

SEQ ID NO: 727938 - DNA, 783 bp, Homo sapiens
aatggtcttttggactctttaataaattttttttctgatttcctaatgaggtcttcccatgtagccaatcattttccaaaaggcctgatttagtagtcacccacttctctgaataattattcaatttagccaggtgcagtggctcacgcctgtaatcccagcactttgggaagccaaggcatgtggatcacctgaggtcagcagtttgagaccaggctggccaacatggcaaaatcctgtctctactaaaatacaaaaattagccaggtgtggtagtgctcgcctgtagtctcagcttctgaggaggctgaggcagaagaaccatttgaagctgggaggcagagcttgcagtagtgagccaagatcgtaccactgcactccagactgggtgacagagcaagactctgtctgaaataaaaaaataaaaaaataaaatcagtttacatgtgtgtgttttatatgagctttgtagaaaaaaattaaataacatttatttctgacagccttttatactcgatgatttaaaaataaaagaaaaaattatgaatttagtttacattagtttatagcaagccatgtagtattacattgttaatatttcacttctccagtccctttacataagagatgtgctgaaatagctgggtcatgactttaaataataaagaagatttygctattggatggtgccaatttcggtaagacaaattggtgaaattggaggatttacttgtggtcagcttttgttttttatttatactgattctgtattctcatttttga

SEQ ID NO: 727939 - DNA, 390 bp, Homo sapiens
tatatatatgttawatacatatatatatcttatatgtagatatatataagatatatatgtgtatatgttatatataagatatatataatatgtatatatcatatatatacacacacacacatatatatacatctaattcagcaattattccttaggacaattatttgatcatactctggaaccacagctttggggaaaagctaagatactgataaaattattttatgactctagcttgtgccattgacatgcttagatttagtatgtgcagaatgttcagacaaagatgttttagatatgttaagatgaggcaactaggcatgtcaatgttaagtgaaacagatggacttatttgctaccacatgtgtgtgtgtgtatgtgtgtgtatac

SEQ ID NO: 727940 - DNA, 390 bp, Homo sapiens
tatatatatgttatatayatatatatatcttatatgtagatatatataagatatatatgtgtatatgttatatataagatatatataatatgtatatatcatatatatacacacacacacatatatatacatctaattcagcaattattccttaggacaattatttgatcatactctggaaccacagctttggggaaaagctaagatactgataaaattattttatgactctagcttgtgccattgacatgcttagatttagtatgtgcagaatgttcagacaaagatgttttagatatgttaagatgaggcaactaggcatgtcaatgttaagtgaaacagatggacttatttgctaccacatgtgtgtgtgtgtatgtgtgtgtatac

SEQ ID NO: 727941 - DNA, 390 bp, Homo sapiens
tatatatatgttatatacatatatatatcttatatgtagatatatataagatatatatgtgtatatgttatatataagatatatataatatgtatatatcatatatatacacacacacacatatatatacatctaattcagcaattattccttaggacaattatttgatcataytctggaaccacagctttggggaaaagctaagatactgataaaattattttatgactctagcttgtgccattgacatgcttagatttagtatgtgcagaatgttcagacaaagatgttttagatatgttaagatgaggcaactaggcatgtcaatgttaagtgaaacagatggacttatttgctaccacatgtgtgtgtgtgtatgtgtgtgtatac

SEQ ID NO: 727942 - DNA, 624 bp, Homo sapiens
tttattaaaatgagatattgccatgcccccatggcttctctcctgcctctctgggctgggtttagcagttgaactagtttgtgctgttggcttgctgaagagggaagaagtctgttgaaattccatgcttcaggcatttgaaattttctctcttcctgggcaccctttccttccactttgcctgcccacagtgctcccttcacctctaacctggtgtgaagacctcttcaatggccaccatgtgggacactggtgggaagccccttagaaagtgcaggaagggaacacgtatagaatttgagttttttgtctgaaggggttgtttttttctttggtcattatggtgacttaggrtttgcaagatggaactaatgcgtgacttaacatatattatttggattgctaatatttcagttaccacgttccaagtacctttcaaatgaaagcttttgctagtaataagatttacagaggtaatataagcaaacactaccctttaggttggtttgccaaactccctatcttcttaaatatgacatgttaatattctggatttaaaggacattaccaaaaaaagaaacccactatctcaaagcttacatagccaaacaagtatgttcctca

SEQ ID NO: 727943 - DNA, 624 bp, Homo sapiens
tttattaaaatgagatattgccatgcccccatggcttctctcctgcctctctgggctgggtttagcagttgaactagtttgtgctgttggcttgctgaagagggaagaagtctgttgaaattccatgcttcaggcatttgaaattttctctcttcctgggcaccctttccttccactttgcctgcccacagtgctcccttcacctctaacctggtgtgaagacctcttcaatggccaccatgtgggacactggtgggaagccccttagaaagtgcaggaagggaacacgtatagaatttgagttttttgtctgaaggggttgtttttttctttggtcattatggtgacttaggatttgcaagatggaactaatgcgtgacttaacatatattatttggattgctaatatttcagttaccamgttccaagtacctttcaaatgaaagcttttgctagtaataagatttacagaggtaatataagcaaacactaccctttaggttggtttgccaaactccctatcttcttaaatatgacatgttaatattctggatttaaaggacattaccaaaaaaagaaacccactatctcaaagcttacatagccaaacaagtatgttcctca

SEQ ID NO: 727944 - DNA, 612 bp, Homo sapiens
tgggagcccgaggcgggtggattgccggagctcaggagtttgagaccagactgggcaacaaggtgaaaccccgtctctactaaaatacaaaacaattagtcaggcggggtgttgtgcgtctgtaatgccagctactcaagaggctgagacaggagaatcgcttgaacccaggaggcagaggttgcagtgagccaagattgcactccagcctgggtgacagagcaagactccatctcaaaaaacaaaacaaaacaaacaaaaaaaaaaagaaagaaagaaagaaaagaaaatgagcttgtggggaagtttccaggaaacataccccaaagccttgaactggtctaacaggagaaaaagcrtcactgctgctgtcactgagcatgagacttcagatttgttctgaaccctcttctgcataaggcagttgaatttaccaggcccaatccactcctgtgccaagaattcaaccttgcaatcgcccgccagcctcagcatgctaacttttgtccttaggcctgttgccccagggtctcaaaatggctgccactgctctaaacacaatcacattctaagcaggaaaaaaggcaagaggtaaattttcctctttcatca

SEQ ID NO: 727945 - DNA, 612 bp, Homo sapiens
accctccttctcagagtgtcaggtcagttgaggaaactaagtcatgagacagaagttctaactcctttcgaacgttctctctaccttgcaaaaagtatgtggcagagtaactctggttcacctatcactggcccctcctacttctggaagatactaggaaggagtggcctttcccacccacctacagttaggcatggtcagatgacttgttttggccaaagataggtaagcagaagtgtcacttctggatggtagcttcttaatagttggtgcaattttctagggcttccttctcccatgtcttggtttggtacctccataggctgaccctgaggcaaggatttgagtgcaaatagtttgggaagaaacaccagtaagggaacagggaagtaagacaagcaaggaaaggaagccagcaaagggtgccttatgaagccagaaattgctattggcaactggatttcaacactacgggggaactcttggagtcagggtagaacttgctgcagaattattccaattgaggctcaggtacttatccaccgattccctatctgttgctggctgagagcygcttctgggcataataattctctagcacttccagttttc

SEQ ID NO: 727946 - DNA, 654 bp, Homo sapiens
aattgytttttagaaagattaaaacaatttacagcatcatcaacaatatgtttccctgaagccacattcagggaatgtattaatcaagccacattggattattaagattattatttatttttgctagtgtataaggtataaaatggcattaaagttgctttaaatgtgcatttccttaattgcaagcaaaaatgttctttcttccatctggtgacacattgtctgtaaatccaagtctgtgaattgttcatctttacactctgaatgttgactttgtgcatgtattctctccttaaatgtggtaagtaaggtgtgtttttaaaatgtttagtgtattctggtaggaaaaacaatggccacccaaagatatccacacactagaccccagaagctgtgaataggttagcttatataacaaaagggactttgttgatgtgatttagggcacaggggaaatgatcctgggttatctggatgggccgaatctaatcacatacatgtttaaaagcagagaaccttttcagtctgtttggagagaaaaacgatgacagaagaatattcaaaaagttgtaatattactagctttgaagatggaggagagggccatgaaccaaggaatgtgggtagcctttcgagtttggaaaagacaaggaa

SEQ ID NO: 727947 - DNA, 917 bp, Homo sapiens
gcaagactgaaatgctgaggggkctgcagggagaggcacaagttacttgcatatagcggtgataagcctaagtgaggcaaactgaagtcctcagggttttctatgtttttgttttccatgtggctaaaaattctgtgatttttgtatactactgcagaaatacagaatcaggtcttttatttcataacttactgacactggcttaatttctttgcacagttctaccctatttccaaaaagctaaagagaggaatgtgctagaccaccctccctgcctcactatgccatagtctcttttgggcacacattatattcctatccatgacaagcagccagggcagaagagctctctacatatgtgccaccttgtctccaaaacctgctgtcccctttggacagactggcccatccctgaccactgttctcccctgtcttcaattcctgatggcaacaagagagattctctgactgtttccaaggatgtcattctcagcctcacctccaagtttgattttatagaacaaccaataaatgtggtttcaccttccttgagttcacaaccattctccaaagtgtattcagaagaacacgagtcctgggagatgtttctcacaaacagagcttgaaggccagtttggaaaatattgcatgccgtaactccctttagagattcacagtgcacgctttcatttccaaggcttggagagccttttctcacattttatgggcaagaaatgatttttaacgttgtgttaacattcttcagagcaggtattccatggagtatgctttgagagataccaatttaagagcatagtttatgatcagtaaattataagcaaatattttattaattctactattacaagaacgtcactttaaataatttgaaacagactaggaatgttcttttacct

SEQ ID NO: 727948 - DNA, 596 bp, Homo sapiens
ctaaagttttctggccatgttcagtggctcacgcctgtaatcccagcactttgggaggccgaggcaggctgatcacttgagcccaggagttcgagaccagcctgggcaacatgagaaaacctcatctctacaaaaaatgcaaaattaaccgggcatggtagcccacacctgtagtccccgctactcgggaggctgaggtaggaggatcgcttgagcccaggaggcagaggttgcagtaagccaagasagagccactgaactccagcatgggtgacataatgagaccctgcctcaaaacaaaacaaaacaaaaacatgcagaatgtactgttttacctggtaaggaagggtaatatggtcttccttccttttaaaataagatgcagcccaaaatataccattcaaagactatgcttggatttaacacataatgctgtaagagtaaacaggataatggatgataaaatagataacaaaagttgaaaaaaatagatacattagaccttcctcattttagaaaaattagacatgtcaattgggaaaaatacaaaacagtacctaagtggggaaaaaaagacaacagaaacgaagtaggtg

SEQ ID NO: 727949 - DNA, 926 bp, Homo sapiens
ttttttaaataaacaagattctgagatgaactgagtcctgcagctgagcttcgatattagtttcagtgttctggtagttaaagcaggaagagaaataatcattattacgcttttccttggctgataagcagatgaatatatgttagattccattgagacgacaagacagaccagagaggtacaggatggcacatgtggtcagacaaccactatttgatttaattcccttgtgaattgctcacatgggtgcttatacaatgggcattagcaacctatagggaaatttgatcaattacagcttataaaatgatgtaaaaatattattcagggctctttctctttacacacacacacacacacacacacacacacacacacacagtctctcatacttctttttattttattattattttktgagatggagttcgcactgtcacccaggctggagtgcagtggcgcaatcttggttcactgcaagctccgcctcccaggttcatgctattctcgcctcagcctcccgagtagctgggactacaggcaaccaccaccacgcccggctaattttttgtatttttagtacagacagggtttcactatgttagccaggatggtctcgatctcctgacctcgtgatccgcctgcctcagcctcccaaagtgctgggattacaggcgtgagccactgcgcctggccttttctcactttcttaatatctaattttaaaatgtgagaatacagacatcaagaggaagggactcattgcacacacactgtcatgtctttgcagcctgcctttctacactatccattgtttcaaataagcctttggcttttgcaaatagattgcaataaactcctggtcatattggctaatgagtttctgaagggtgaaagattaatatatttcatacacgttcattatg

SEQ ID NO: 727950 - DNA, 592 bp, Homo sapiens
tcacctgtggaagtgaaagtggtacagtggaagaatgaggtaacaaggcagaagaaaacaaaggtgcttgtgattattcaaaacagcgcatatagtatgatctcatttaagtaaaatgatatgccaaaatactcttctgcaggttcatttcttccaggtgtaacctccttcctgtgttgtgctgtcttgaggtgaagacctcctctgcttatctttcctgttacctcctgggtttctgtccctcatctcctcaactaatcacacctccccaaaaatgtaaagcacaaacaagtaaaatatatttgcaattcacggcgggaaagacaacttttctaaggcaaagtataatttgtggacatccactactgcctttggcataaatacactcctttctctttcccatagtagttacacytttgtactcacagcacagaaaacatcaccttttactagcaagccttttagatggagttgagaaggtaaaattccacaatggaatagaatccaattttctctgacaagttgcttgtttgctttttttttttttttaataagtgttttgttgttagtgttttcaatttctaatataaag

SEQ ID NO: 727951 - DNA, 592 bp, Homo sapiens
tcacctgtggaagtgaaagtggtacagtggaagaatgaggtaacaaggcagaagaaaacaaaggtgcttgtgattattcaaaacagcgcatatagtatgatctcatttaagtaaaatgatatgccaaaatactcttctgcaggttcatttcttccaggtgtaacctccttcctgtgttgtgctgtcttgaggtgaagacctcctctgcttatctttcctgttacctcctgggtttctgtccctcatctcctcaactaatcacacctccccaaaaatgtaaagcacaaacaagtaaaatatatttgcaattcacggcgggaaagacaacttttctaaggcaaagtataatttgtggacatccactactgcctttggcataaatacactcctttctctttcccatagtagttacacttttgtactcacagcacagaamacatcaccttttactagcaagccttttagatggagttgagaaggtaaaattccacaatggaatagaatccaattttctctgacaagttgcttgtttgctttttttttttttttaataagtgttttgttgttagtgttttcaatttctaatataaag

SEQ ID NO: 727952 - DNA, 508 bp, Homo sapiens
ggcacaattgcacaattatccccccaaaaactgaatgccttgcagaaatgtttacaaaggtcacacaatattaacatttttgacagatatttatttatttcccctagctgacttgtccaaatatgtatttgcatgtataaattatctcaattattatggaaataaaataaggtatatcatgctgtttaaaagaatactattttatctaccaagcaacatgccaaaatcatgaggaaatattgtacatttaaytggaagtgtttctttcctccaaattttcagaagctctggtcttgcacatagtagagatgcaatgttggtctcagttaatgtaaaacgtaaaaaacggaatttaaaaagttgatctcatggaggtagaaaacagaatgatagttcccagaggctgggaaggatatggggataaagagagattggtcaatagatacaaacacacagtgagacggaaggaataagttctagcgttcaacagcacaacagggtgactata

SEQ ID NO: 727953 - DNA, 2021 bp, Homo sapiens
atttttttaaaaacatgttactttctctaaccaaacaaagcaatggacattagaggaaaagcaacttttccaggtattctgagacatagactatgaaatccactaataagagatcagagcaaagttttgaaaaatgtcctaattttccaagcttggaagaatagactctaaccttatttataatattaatatatataaaacaagaacctatttatggtgaagaatcagcagtttacacaatttaaagactttctacaatttgtacaatttaaagactcttttgttgtatgcaagagccttttgcaagcaactaaaatgtatgtgagtaattcttagtcttctatccatggttacggctttccttagtcacatgtccctcaaataaatggtcaaactcttcaaagaatttataatttcaaccttcactttcatttctttagcacaaaaataagagtaggtgccccaatgaaaatagtaaatttaactgatttagctgtcttctctccctgattcaaaataaaatccacataatatttcaggttttccattttatattaattctcagtccctttcttatttcttatttttaatcccaaattattcttaatcagaaattaaaacttctttcaccaaagcaaccaataaaagatagttatgaaataaaataaatcccatccattaataatttttaaaagcacttgggtaacatattttctttatatattattccgtgaaagcctcagtgattttttttccattctacttataagacctttccagcaggtcataatattgtatgatgatcttccttatatttaaaaaatattgactattgtgcacatcctcataaatggtagtttgacagcagtatagcattaaaaatatttcttatttcataataacctgtatgcccacaaattgttcaatgaggactgctgattcttcaccataaataggttcttgttttatatatattaatattataaataaggttagagtctactcttccaagcttagaaaattagaacatttttcacaactttgctctggtctcctattagttgatttcatagtcaatgtctcagaataccaggaaaagatgcttttcctatgaccattgctttgctggaagaaaggaaatcttgtgtctcatgtaccatgtctggatgattggttagtttgtttgtttgttttgttttttccaagatgatggtaacagcacatttcactcaacatgctcttttcacaatgtgacatttacagctcctttgaattgaagccttaaacctgggaagagctttgtgatggctttgatgaggaaactaatagaacatggcagaagtgatgctctgtgacttctgatactgcatcacaaagatgccgcgcacgtgtcttgttctcttgggatgctccttcctagagcccagccagctacaatgctttgatgaagccatgaagtcacaggaagagctcacatgtagatgccacagcttcaggtccaggtcaatagccaaaattgaccaccacacatctgagtgaacaagccattaagaaatttgaggttccatccttcaagctacctttttaatgccacatgaagcagggtcaagtttttcttatcaactcctgtttgaattgcagagtcatgaacaagataaataactgatattgttttaggctactaactttgttgtagcagcaatggataactagtagaccacacttacagtaaacatagtaaactagtagaccacacttatagtaaacctgcttctacgtttttgttcatggccttctttttctattatttcatctccaaattgttttcatggtgcaaacactagatcaaaaaccatctgattaaraatatcatctctgatttttttagctattattttctttcactcaatccttagagtacatgatgtatacacctctcatggcaactataacacaatatatcacctcatattttgtggtttatgttcatatctaatctttttctattagaatttaaggtc

SEQ ID NO: 727954 - DNA, 1109 bp, Homo sapiens
tagagtgtgtttaaagcatcaaagagaaaaaactgaatgggctttagaaagatcatatgtaggagctttctaatggaaagatctcataattaggagaccattacaattgaagaggcaaaaaacaagggcttgaagctgggcgcagtggctcacgcctgtaatcccaacatttaggaaggctgaggtaggtggagttcaggaccaggctgggcaacacagcaagaccccatctatgcaaaaaatagaaaaatcagccaggcatggtggcacatgcctatagtcccagctagtcagaaggctaaggtgggaggatcaattgagcccggacattaaaggctgcagtgagccttgattgcggcactgtactttcagcctgggtgacagagcaagaccctggctcaaaaaataatagtaatttcaaatgagggcctgaaagctattaaacataaataccactgagtgatattcacacataaaaaatggtaagacttgatgaatgactagatgtgagaaggcaggataagggaaggggagtttctaggagggtatccaggttttggaatgctgcaactgaagagatggccatgctactcaccaggacaagaagaggcagagcaagttatagcatcaatctcccaaaccacccagtgaggtggtgatcattattccaattttgcatgctgagaaagtgaggtttagtcacctgtctaggggcatacggacctaagtggttggttcagaattcactttmtacttagtattactctaaagaccatactagctccctcaaaggtagagttgccttgctgagttttaaatattcagaatgacataaaagaatcaatgaagggccagacgcggtagctcacgcccataatcccagcactttgggaggccgaagcgggtggatcatgaggtcaggagatcgagaccatcctggctaacatggtgaaaccctgtatctactaaaaatacaaaaaattagccaggcgtggtggtgggtgcctgtagtcccagctactcaggaggctgcggcaggagaatggcgtgaactcgggagtcagagcttgcagtgagccaagatcacgccactgcactccagcctgggt

SEQ ID NO: 727955 - DNA, 605 bp, Homo sapiens
cagctcaattctcytcccacctatttacaagataaacctcattcagggagctctggaggcatcgccagtattgcactacgatcctcttcgtgaggcagctggaagtctggaaacacagcaaatttacttatttctctgcacaacacggagggtaattctcagaaaaggcttaacacccgaatccccattccccgattctcaggctataacgattatctttctgcagaagagacacacacacacacacacacacacacacacacacacacacacacacacacacactgagagagagagagagaaagtcatgtgagaatgtaaacattacgcgaaatcgccgccgacagcagaaacaatagccgacaccatagacacttcaaatggttctgttttcctcatttggactgaaaggtgagagtggaactcggctgcccaaaccgtggcaccagtatcagctgcaggccagagcaagcctttccgaggagattttaaacaaccggtgggagcaagatcctgaagcatttcttccaagattggtcacaggagatgaaacctggctctaccggcaggatcctgaagaccaagcacgaagccatggctaccaa

SEQ ID NO: 727956 - DNA, 605 bp, Homo sapiens
cagctcaattctcctcccacctatttacaagataaacctcattcagggagctctggaggcatcgccagtattgcactacgatcctcttcgtgaggcagctggaagtctggaaacacagcaaatttacttatttctctgcacaacacggagggtaattctcagaaaaggcttaacacccgaatccccattccccgattctcaggctataacgattatctttctgcagaagagacacacacacacacacacacacacacacacacacacacacacacacacacacactgagagagagagagagaaagtcatgtgagaatgtaaacattacgcgaaatcgccgccgacagcagaaacaatagccgacaccatagacacttcaaatggttctgttttcctcatttggactgaaaggtgagagtggaactcggctgcccaaaccgtggcaccartatcagctgcaggccagagcaagcctttccgaggagattttaaacaaccggtgggagcaagatcctgaagcatttcttccaagattggtcacaggagatgaaacctggctctaccggcaggatcctgaagaccaagcacgaagccatggctaccaa

SEQ ID NO: 727957 - DNA, 928 bp, Homo sapiens
caaattctgggtcagtcatgtcttaactacgtaatcttgaataagttaaattctaagacgttccagagataaaaccttaagtctctcatctataaaacaaagatgataataatggcatctacttcataggattaaatgagcaaatcatgagatgataaaaatagtgcctggcaatcaaaaatgtatttttaaaaagttcttgggattattatcatattttttagtttgaaactggctatgttaaaattagtttatgggttgatgttagttttcattggaatgttatctatattcaaatgttttagacaactcttacaccaagtgaaagcattttgatagttgtagttggttccagagaaccatatggtcataaatcaaaaaatcaagatgaatacaaaggcgccaaagtactatatatatatgtataattctttatttcttaaaggcatgccttctgtaattttttagaaatcaaacacaaatatcagagctggagaaatttattttagttcactaggtgtttactgatgaggaacgaagcacacagtctggactagggataagagcacaggactcattgtcctacaagctccaccactttgtaygaccttggattgctccgggattttattttccacagttgcaaaatgaaggagctgaactcaattatcttataaagtctatttcttttttcaggtcttacttttctactttttgacaattatataaaattgattttgttagctcttttaaagctgtgataaaatacacattgttaataataaaagataatgggggccgggtgtggtggctcatgcctgtaatcccagcacttcgggaggccaagtcaggaaaatcacaaggtcaggagatcgagaccatcctggctaacatggtgaaaccctgtctctactaaaaattaaaaaaa

SEQ ID NO: 727958 - DNA, 866 bp, Homo sapiens
taaaccagtgatcaagaaaagtgttaacagccagagaaaaaaagacaatttgatgtgcacatcaatgatgaatctctatgcaggtatgctaagtaacagaagatagaagaaaaaagtaaacactgtaggattccatttttatacaattctagaaaatgcaaactaatctatggtgacagaaaatagatcagttgttgcctggtgggggcacaccatgtgcagacatcacaagtaacaaaagtgattagatgtcttcaggtctatggcaatatgttcctctccaaaattgagacatctttctgaggacagtggggagaatcccagatagattaagtcaaaacctgagattagatttcctgaagtggattagcatgaaggcattcatcataccttaaactgaggtacacaaaaaagaaaagactaaaaataaaaacttcaragtgtaacgatacatgcacaaagttgtttactgaaaaattgtgcacagggacaaaagatggaaaaaaggataatgtgcaccattaggaaaataattcaataaattgtggaatcatcacattgtgaaacattctgaagccattcaacgtcactagtttccttggagttttggccatgagatgttgagtaagaaaatcattcatgtgatccagtacatgaaaattacaaaacactataggtatctgtacatatttgtctttagttatatgtacacatatactatgagtatataactatatagctattcatacatattggcatatggttttgtattgagcattaggaagataaaggaatctgcagtgagtgatacaaggtaagtggaacaggaaagaaagcaaaatgtatatgcaaaaataaagtctaca

SEQ ID NO: 727959 - DNA, 866 bp, Homo sapiens
taaaccagtgatcaagaaaagtgttaacagccagagaaaaaaagacaatttgatgtgcacatcaatgatgaatctctatgcaggtatgctaagtaacagaagatagaagaaaaaagtaaacactgtaggattccatttttatacaattctagaaaatgcaaactaatctatggtgacagaaaatagatcagttgttgcctggtgggggcacaccatgtgcagacatcacaagtaacaaaagtgattagatgtcttcaggtctatggcaatatgttcctctccaaaattgagacatctttctgaggacagtggggagaatcccagatagattaagtcaaaacctgagattagatttcctgaagtggattagcatgaaggcattcatcataccttaaactgaggtacacaaaaaagaaaagactaaaaataaaaacttcagagtgtaacgatacatgcacaaagttgtttactgaaaaattgtgcacagggacaaaagatggaaaaaaggataatgtgcaccattaggaaaataattcaataaattgtggaatcatcacattgtgaaacattctgaagccattcaacgtcactagtttccttggagttttggccatgagatgttgagtaagaaaatcattcatgtgatccagtacatgaaaattacaaaacactataggtatctgtacatatttgtctttagttatatgtacacatatactatgagtatataactayatagctattcatacatattggcatatggttttgtattgagcattaggaagataaaggaatctgcagtgagtgatacaaggtaagtggaacaggaaagaaagcaaaatgtatatgcaaaaataaagtctaca

SEQ ID NO: 727960 - DNA, 1171 bp, Homo sapiens
ccccggagttctaattatacaatatccttcatgtcaaagataatgctatttaactatgtcagtaaataaaatatcttgtatttcatctaaaatttctggctagggcaatccccctagcatcattcacatttgctgtacagctcccaaactgttgacaacttacactgaaaggtatgatctctggtgaatactgtacccctcactgaaggctgttctctgaaggcaagtccatttctacatcccacaccattgagttaccagaacacagcacagcagatacaatattcgcagaactaaagattaaatattaaataaatatctatatgtgctttcttccttttttgctgttaactattaaataaacttttatacaacatgttgtacaatgtttaatgaaagatgcttctcagagctgagggtcaagaaaaagagatatctatcctgatagtctgattcctcttagaaaacaaaagttatgaaagccaccaatttttccctttgacttaggaagatttgtattcaacmgttcagcctttctcataatggacctcttgaaacatgccatctcaccccaacaccccttttaggacttatagaagagctgtcaacggatggcattgatgtgatgaggaggaacacagggaggatataattctcctaagcagcttagctgttaagttccaatactagagcactctgtctcagaaaactgttcccttgcagtatatacattttccaaaatcctgtttcatgattattattaatattattattactattattttaatctggagactgacactcagagatgcttatggagttgaccagaataaagtaatcaggagctgatttctagctccaaaatctgtatatttcccattgcactatattcatctgatgtaaatatactctgatgtcagttcagaatttgaagagttatataaggaagaaaacctaatacaaatcagttttctaccagcctacagttgcattaaattcatttcagtctgtaaattgctcttacacatttgtttccaagatattttcccagaattatctgttccaagacaagtaatttgtgattttccatttttaatgtcatcatgctattttctatgaagtacaaataattcaatcccttctcctttctacaaggacaataattctgttc

SEQ ID NO: 727961 - DNA, 970 bp, Homo sapiens
tgccactgcactccagctgggtgacagaacgagactccgtctcaaaaaacaaaccaaaccaaaccaaacaaaaccaaacaaaacaaatttatactagggtccaggygtggtggctcacgcctgtaagcccagcactttgggaggccgaggcgggcggatcacaaggtcaggagttcgagaccagtctggccaacctagtgaaaccccgtctctactaaaaatacaaaaattagccaggcgtggtggtgcatgcctgtaatcccagctactcaggaggctgaggcagaagaatcacttgaacccaggaggtggaggttgcagtgagccgagactgtgccactgcactccagcctgggcaacagagtgagactcttatctcaaaaaaaaaaaaaaattatactaacacttacatggtatttttataatgttttttctataattcctttctgtctagtcatttattttcttcacaaaatatctgtgtgcttggataccgttatctgtatatgaaataatgaaacagaaggttttagagttttgaccaagtcacataacaaatatctaaaccgaagaggtgcaccaggtttccaacccaaatttcagtgtgcaatttaaagtaataacagaggctgggtgtggtggctcacacctgtaatcccagagctttgggaggccaaggtgggcagatcacttgaggtctggagttcgagaccagcctggccaatatggcaaaaccccatatctaccacaaatacaaaacataaaaataaaaaatttgccaggtgtgttggcatgcacctgtaatcccagttagtcagaaggctgaggtaggagaattgcttgaactgggaagtggaggttgcagtgagccaagatcacaccactgcactctagcctgaccaacagagcaagactccatctcaaaaataaataaataaataaatagcataaagtaatgacagagtagggg

SEQ ID NO: 727962 - DNA, 970 bp, Homo sapiens
tgccactgcactccagctgggtgacagaacgagactccgtctcaaaaaacaaaccaaaccaaaccaaacaaaaccaaacaaaacaaatttatactagggtccaggtgtggtggctcacgcctgtaagcccagcactttgggaggccgaggcgggcggatcacaaggtcaggagttcgagaccagtctggccaacctagtgaaaccccgtctctactaaaaatacaaaaattagccaggcgtggtggtgcatgcctgtaatcccagctactcaggaggctgaggcagaagaatcacttgaacccaggaggtggaggttgcagtgagccgagactgtgccactgcactccagcctgggcaacagagtgagactcttatctcaaaaaaaaaaaaaaattatactaacacttacatggtatttttataatgttttttctataattcctttctgtctagtcatttattttcttcacaaaatatctgtgtgcttggataccgttatctgtatatgaaataatgaaacagaaggttttagagttttgaccaagtcacataacaaatatctaaaccgaagagktgcaccaggtttccaacccaaatttcagtgtgcaatttaaagtaataacagaggctgggtgtggtggctcacacctgtaatcccagagctttgggaggccaaggtgggcagatcacttgaggtctggagttcgagaccagcctggccaatatggcaaaaccccatatctaccacaaatacaaaacataaaaataaaaaatttgccaggtgtgttggcatgcacctgtaatcccagttagtcagaaggctgaggtaggagaattgcttgaactgggaagtggaggttgcagtgagccaagatcacaccactgcactctagcctgaccaacagagcaagactccatctcaaaaataaataaataaataaatagcataaagtaatgacagagtagggg

SEQ ID NO: 727963 - DNA, 636 bp, Homo sapiens
ggtgtgtctgggttggagaagaggagtcttagcaccaccatggtaaaagggttcctgtgrcagaatccctattgctggtgccacctcgatgctctgatgtcttggagcaaggtcttaggttatggataaaaaggttttctggactgggccccttatgtggtggggttgcacctgtcggtgctgcctggctctccctaatgagagagaccagtctcgggcatgaggggcacagagccttactgggccagcagcttgtagtggcaagttccccttactgctactgcccagatgccccggtatcccctgatgggagaggggagcctcaggccccagtatcccttggtggaagaggggagtctcaggaagtcactgctgccttcttaccttcttccagaactttcctttgattggctcttgcttaattactaggatttatagttggacttaactggggaggagcagagaaatgggtctgtggcattttgtctggaccagaagttgtgcttctacattattttctgaagttgggttttattttatcgtggtaacatacacatagtttataaagttaagtggtgcttttacaaggcttgcagtaagatattgtgactcaacctgtatgttggtaactattct

SEQ ID NO: 727964 - DNA, 636 bp, Homo sapiens
ggtgtgtctgggttggagaagaggagtcttagcaccaccatggtaaaagggttcctgtgacagaatccctattgctggtgccacctcgatgctctgatgtcttggagcaaggtcttaggttatggataaaaaggttttctggactgggccccttatgtggtggggttgcacctgtcggtgctgcctggctctccctaatgagagagaccagtctcgggcatgaggggcacagagccttactgggccagcagcttgtagtggcaagttccccttactgctactgcccagatgccccggtatcccctgatgggagaggggagcctcaggccccagtatcccttggtggragaggggagtctcaggaagtcactgctgccttcttaccttcttccagaactttcctttgattggctcttgcttaattactaggatttatagttggacttaactggggaggagcagagaaatgggtctgtggcattttgtctggaccagaagttgtgcttctacattattttctgaagttgggttttattttatcgtggtaacatacacatagtttataaagttaagtggtgcttttacaaggcttgcagtaagatattgtgactcaacctgtatgttggtaactattct

SEQ ID NO: 727965 - DNA, 1534 bp, Homo sapiens
agccataaaatggcatcagatgcacttttggaaaatactttttactttgaaaggagagtgctaccgcaaaggaaagatggagcagtatcagcagtgaggagtccatttcccacttcggacagaagagacagctggagtcagagctggagccaggccaggagctgcagggccgccagtaaagtcccatcagccaggcccagctaagggctgttcaaaggctgcggggggcagacctcagtcsgctttagtgactaagaagtatctccctggttagaagcactggtgagacctagaggtagcacacacatctcaagtgaaaaggaaggatggaaagacttgtagttgatatatcatgaagaaatgaattcacacagatcctctaagggtgacctgagaagaaacagtggtaatgagtttatgtatctacttgagtgtgtgtgtatgtatgtttataaccactcctggatctatatggccacacctgagtgtatctacccacttgagagtgagtgtgtgtgtgtgtgtgtgtgtgtgtgtgtttataaccactcctgagtctatatggccacatctgagtatatctaccttggtccagccacagagaactaataataaaaaatggaaggtgttcatgaaatatcattacatagcagaaatacaggttggtgcaaaagtaactgtggtttttgccattacttccaatgacaaaattacttggtgcaactatttttgcaccaatctaataccaggatgtatactgaatgttcctgaatgaaatactgggatggatccttttcaaatgctgctcaggtgtcagaccacggaaacaaaaatgatttaagtacacttcaagaaaggctgggcatggtggctcacacctgtaatcccagcactctgagaggctgaggcgggtgcattatttgaggccaggagtttgagaccaacctggccaacatggtgaaaccctgcctctactaaaaacaaaacaaaacaaaaacaagcagtcataaacaagaagaaagtaaagtaacagcaacatacatagaaaattcctacacccaaaaaagttatcagaaaataaaacacaagataactcaaaataatttcagtgtgattgtgataatatactggttaaaatattttctgcttccaaacaaagcgtatttataagtggctttccttttcaaaagaaaaaagtaacagagaacattcttccagtttacttctataagaatgtgcttgagaactccaaaatgacacagtccaaatgttgtaaatatggtccagcaaactacagaaaggcacacaaggaggctgccatcaatgccattcaaagaggtaactgtgaaatactggaaactgaggaggaggtcaacagaaaatattcttaataaaaaagtaaattttaaactgtgctcaataataagcctaaactgatgcattttttaatactacggattttactcatcaaacatctgtatcagaaccaccagccatgaagcagtgtgccacagctgaaagaacactggattag

SEQ ID NO: 727966 - DNA, 953 bp, Homo sapiens
ttgtgtgtcagtttggagagtgctgccatcttaacaatattaagtctttcaactcatgaacatgactttccacttatttagacctttcttttttttcaaaattcttttatagctttcattatgtaatttcatgctttaagcttattcctataattttctttttgatgagattataaatggaattgttatcctaattccattttgggatggtcactgctagaaatacaagtgacttttgtatgttcatcttgtatcctgcaaccctgctaattcattttgtttagttacaatgtttttgtgtgtagattccctaggttttcctataaacaagatcatgccatctgtgactagagatagacagtcytctttctttccatctagatgccttttacttcattttcttaactaactgccctatacaatgttgaacagaactggtgggagcaaacacccttgttcctaagtttaaggggaacacattcagtcttttatgattaagagtgatgtcagctgtgtgaagtacaaaattttaagaacagaagaaatttttatattatgataaacgtctccataatagagtgaagaatatacaatagggaatgatggccagtttcttcaaagctggtaacaagttatgacaaagcagcaatgaaataaaagtggttatcaaaaagcctgttagagacaaagaagaacttgaatataaattcatcattttattgaactagagttagcaacagaaaaacaaagaaaatgaatatgaaaagccaaagcagcagatatccccaaaaaagttctaagaaagttggtgctgtcaaaagccttaaaatttgcacatatttaaacaagcagtttcacttctagaaacttatcttaaaggaaaaattataggatcacagcatgaatatgaaaaattagaaataacctgaatgtccacaagtaagaaattcata

SEQ ID NO: 727967 - DNA, 3421 bp, Homo sapiens
ctttttctttatgaattttttgaaagaactgtttcttttttatttttgcttgtaattaatttcaaatgtatagaatgttgtgggaatacttaaaagaactatatataccatttatccagatttaccaattattaacattttgtctcatttgttttacaattctctctatatatacaatatttatatgttctgaatacatataaatattttacatagagagaaaatatatatacacacatatatagcaacttattcctcaatagttctgaatacatatatatacacacacatctatgtaacttattcatcaatagtcatgaatacatatatatatgcatgtgtatgtgtgtatatatgtgtgtgtgtatatttatatatgtattcagaactactgatgaataagttgcatacatcctgtctattagctctaaatattttgtcattcatttcctaaggaaaacggcatgctcttacccaaccatagcacaagtactgaaatctggaaatgtaacataatccacagttcatagttcatattccaatgtcaccagttatcccaaaaatgtcttttatgtccagttttctcagtccaggatccaacccaggattgtacattgcatttagttgtcatatcttttttgtcttctaatctagggaagtttctgtgcctttctttgactttcatggaattaacattttgacgggtaagggccagttattttataaaatgtcccttagtttggggtattatttttaagtttcctcatgattagattcgagttacgcatttttggcaagcacaatgcctgagctatctcggggcatcacctcgggaggcatatcatgttcctttttcccattctacctttgatcattctacttttgatcatttggttgggtgatgtcttgtagatttctccattgtaaagttattactgccccttttattggataaatacgaaggaggaagatattttgagactgtagctatgcttgccctcatcaaacattttcaaatgttagcatccactaatgatttttgcttgaatcaatgactaccataatgttttaaaagttattttctaaccagtattctctctatatttattagttggtaacctggaaaactgttctgaaaaatccataaaccattagcaatattctgactgagcatagtttgtctatattttgctttccatctctcatctaaaatattttaagaaaaatattcttcctttgagacatttactctgctcatggtaaatctaagggtgttccacatgcatacgtgcctgtggtctgcactcttttgttggtcataatgtgttgtgaatgagaccatgttctgcagtttcaatttccaaataggttcgatcacaggaaaacagcttcctcctccacccaatcattataccagaagccacaaagacaaatgtgttattgcaaagtgtcaccactactggaaaagcaactcataaaacaagtactgacggctacagagaaactatattagaatggaaatgagtacaaattaccagggagtctgcttgatccggtttctcctaaacatctattctttctaccaggaaaaaagaaaaaaaagtttgtgaatttcaggttatttccacgttccactagattaaagcctcagaaatcaagtctacaatctgtatcagcagagtctagcttttctgtgctggccaatatcatgccggttcatgaaaagttcataaaacaattgtatgagtactaagtaattcagattcagaaaatctggtccttttgtgtgataaataatacaataaggcagcaaggacatagctgacaaattcagggccctttaactttagtaactccccacaagtacccacagataattgttaggtgtttttttgttttgttttgttttgttttgttttttaatgtgttgtctccttataaaacagactatcaattgctactagccttacaattgcttttgatgagtgtgttctttatttttagattctaagactgtcagtgaagccacattaatttaaaaatattggtgaggaatttttcaacaaggcctgtgagttgagtgacagggattaatttttaaaatcatgccataaaacaagccagaatcaagtctaggacaagtaagactggaagcagtaggatgtgtcattgtgatttcaaactctacccagagcagtgtttgtgcatcccaaaactacctcacaaaacagatttgttctctggagatgatatacattcttgaagaattcaacctattcccatttagtcagtaattctctttatgcctatttctcagccccaaaatttcaaaaagtttacatctaggaaaatatgagggatggaaaaaaatctccccttctccaaatatgtttatttcccacatgcacatgtggatttctgtaattctaagcttgtagatgtattcctttggcgatgaaagttcaagaggtgggagggtacacataaagggaggtgggaaaacaccagagttacaaatattctattatagatagtgttgtgcaaactaatctctaaaatcctggctctgggtcagcagtgaaagatatcagcacctattcattacagtcaggagggaatctggattaacatgttttcaaaaggattaaaactatgcctctgttccattatctgcaaaattaaagggttggataaatgaaactctaagactgctctcagctctgctcttctataatttcagactcggcattaagtgtaattgggtgccatatttgttcacatgagaattgtatgggaggacagtggactaactggtaatcatatcaaattgtcaaggttgaaagatctgattgaatatcatagtcaggattcaaccttcttacacattcccaaccaccagaacttaagttcgattcattcattaagaaatacgaggccgggcgtggtggctcatgcctgtaatcccaatattttgggaggccaaggtgggcggatcacgaggttaggggttccagaccagcctggccaacatggtgaaaccccgtctctactaaaaatacaagaattagccaggcatggtggtgggcgcctgtaatcccagctattcaggaggatgaggcaggagaatccctagaacccgggaggtggagttgctgtgagctgagattgcgccactgcactccagcctggacaacagagcaagattctgtctcgaaaaaaaagaagaagaaacatgaaaggagtacttactaggtaccaaagatttacataataaaaagcttctattacctgttaggtcaagtttttcaggctcagaaaggtatagraacccactacaaacatattctggtctaaaaacaagaatggcgatggggtttgcttctgctgctgttgttgttttccttacttttcaactagattc

SEQ ID NO: 727968 - DNA, 604 bp, Homo sapiens
atgggcgtttccctgttcttttgtccttgtcaccatcctctgccagacagtaacagctgcttgagtttgtgaaagctttttgagaaaagagatcaaactgtttcactaacggcaaatgactattcctctcccaaggcctggaacagacaaaggaaatggcattattctccattagagatgagatagatacagacgtgtccctggaacttctgaccgcatttgaggagtcttgmcagttgcacgtggcctgaaatgacagccctccctgtctctatcacaggctgctttgcacttctcacatctcctgggacaggatctatcacacagtaaaataaataccaaggcatattttcaatggatggaaaatagagtttgaatgggcaggtgatctatgtgtttgtgttggttgcctcttgcatctaatgagggcttctctgatgacataaaacaagatcgtcttgtgtttctgaaagtgtgtctggaggaacagtagttgtgtagggtatgagaagctgctatgaaataggagtccgtggttgaaaaatcttgaaaaagctgttttgaaccaaattaaacaggttctgcagtactcttcaagctttca

SEQ ID NO: 727969 - DNA, 604 bp, Homo sapiens
atgggcgtttccctgttcttttgtccttgtcaccatcctctgccagacagtaacagctgcttgagtttgtgaaagctttttgagaaaagagatcaaactgtttcactaacggcaaatgactattcctctcccaaggcctggaacagacaaaggaaatggcattattctccattagagatgagatagatacagacgtgtccctggaacttctgaccgcatttgaggagtcttgccagttgcacgtggcctgaaatgacagccctccctgtctctatcacaggctgctttgcacttctcacatctcctgggacaggatctatcacacagtaaaataaataccaaggcatattttcaatggatggaaaatagagtttgaatgggcaggtgatctatgtgtttgtgttggttgcctcttgcatctaatgagggcttctctgatgacataaaacaagatcgtcttgtgtttctgaaagtgtgtctggaggaacagtagttgtgtagggtatgagaagctgctatgaaataggagtccrtggttgaaaaatcttgaaaaagctgttttgaaccaaattaaacaggttctgcagtactcttcaagctttca

SEQ ID NO: 727970 - DNA, 2621 bp, Homo sapiens
taatggaaccatccatttttatgtctttaagtcatatataattttttctttgctattcctccattgtttctgttttatataattattaaataaatgtcaattgttttgctatctgaagaatgcaaaccacaactgcttctgaagaccctatcatatctagcttttaacctaccagttatgcacctagcgtcaaaaacaccatttcctccgagattcacaagcctactgaaatcaccatagttctttagtaagcatcagaagcctggagtatggatgtatatttttctcctgtctttattataaaaccccttagaaagcagtgacatttactagatcagggattaaacactataatctacttgcagtgggagtcattaaaatgttgacccaactcttcacagagttgcaacaagaactgtgaagtgtgtctttgctatttaaagtgggaatgcactcctgtgatgtagcaatgttcattggagaaaagcacaactgggactggcctaggagaagaaaacattgaagcagtcatttgcagagcatatggggaacaaaaattactcctttagttatggaaatattcccatatttatgccccagtttgcaaagtccaacaattggaaaattattcttttaggctaaggcaatttgtctgcagcaaatacttgcttactggaagttgcgtattaaaggaagtatcatgcattaaagtttctgacaatacattaaaaaattagcgcaaactaatactgatagctgtttcgagggataggtgaatcatagaaagggggacgttggaaagtccaacatagccaggaggagagaagagaggtagtatgtagtaccttagatgaatagtgtaaaaattaaattataaaaataaactttaaacattcagttcaatgcttactacaaggaaagtacttaataaaatatagtagaaataatagcagggatgtttataataattatcattatttttgaagtgttcataatggattatccaggaagatacagatgtggattcacaacccaaaaccataagccaagggtcttgccatatttacctgcaggtcaatsatttatctgtggcttgctctctaagcacgacttgtttcccaaatacctgaaagactgaactcttcacaactgtcatatccatcgtacattccccacaggtctggcaatagaccccaagaaaatcttccctagctgaccacatttctagcactctttgaaataaggaagcacgtttagttttaagatgtttttccttctacgaagaaaaaggaaatgattttttaaaaacttaacaaaactggtataaagatttaatagttttctagttgtcccttggtatccatagaagattggttccaggaccctcgctgataccaaaatccatggatgttcaaatccctgagttaaaatggcatgatatttgtatacaatctaaacacatcctcccatatactttaaatcatcttagattacttatgatgcctaatacaatataaatgctatgtaactagttgttatacggtatcactttctgaatttgtattatttgtattgttttttattaatattttggatccgctattggttgaatccaagaatatggaacccacagaaaaagaggtctagctgtaaatctaaaatatgtatccaattgtaaaacaaaaaataaggatatatagtaattattagagtaatcctggaaaactgtataaatcctggaaaacaggtataattattattagagtaatactggaaaaggcaagagaataaacagaaaaataatagaaataaaaataattcaaaaaaaataattcagaaagagagcatgaaggagttttttggtattagtaacctgttgtatatcttggttgtggtgctgattacataatatatatgtatgctaaaattaatggattgtttaccagaacaaagaaaaggtccattttactttaagataattttataaagtagaattttaaaaagtaaacccagataattcagtacaagggcaaatttcaaaatgagaaaataaattcaataaccttcttataaattattcaacaatatattgaacttaaatatattgaacttaaatatatttaattgttaaatatattgaacttaaatatatttaattgttaaataaatatatttaacattatattaaatatgtaatatattaaaatgtaatatgttaaaatgtagccaaaaagaacctattcaaatgaacaataggctatataaagtaaataggaataatcttaaacagaaatgtgttgtttataaatgacaaaagctatactattctaaaaaaagaaaaaagttgacaaatacatttaaatacttattatggtattggagaaaaatgcaacatcgttcaacacatacattttccctcctataaaatgaaattcaataaaccatgagatatttttgagttcacaaaataattttcaaaatttgtctgaaggcaaatcagattaaagtagtcaagaattagaaatattatttcgtttgtttgctttatgttttggtttttagctaacttaagctttttttattcgtacaaatttatgggatacgtgtggaattttgttaca

SEQ ID NO: 727971 - DNA, 1505 bp, Homo sapiens
gcagaagcactgaagctcctggagggtctcctttgcagtctggaagatttcctccacgagaaacaagtccactaagtgggcacagacatcctcacagcaacgggccacacggaccctctggtctgtctctactgcattcctagaaacagggcaatcagcatggaagacactgcacttggggcccacagacactgagggcttgcttgaaaagtgcaagagtcagtcaggcgcggtggctcacgcctgtaatcccagcactttggaaggccgaagcgggtggatcatgaggtcaagagatccagaccatcctggctaacatggtgaaaccctgtctctactaaaaatacaaaaaaattagcctggtgtggtggcgggcgcctgtagtcccagctactcgggaggctgaagcaggagaatgacgtgaagccgggaggcagagcttgcagtgagcagagatcgcgccactgcactccagcctggacgacagagcgagactccgtctcaaaaaaaaaaaaaaaagaaaagtgcaagagtcggccaggcacagtggcttacacctgtaatcctagctctttgcgaggccaaagcaggcaaatcacttcaggtcaggagttcgaaaccagcttggccatcatggtagaaccccgtctctactaaaaatacaaaaaattagctggcggccaggcacggtggctcatgcctgtaatcccagcactttgggaggccagggcaggcggatcacgaggtcaggagatcgagactatcctggctaacacggtgaaaccccgtctctactaaaaatatgaaaaattagccaggcatattggcaggctcctgtagtcccagctactcaggaggctgagaatggcgtgaacccgggaggcggagcttgcagtgagccgagatggcaccactgcactccagcttgggtaacagagtaaaactccatttcaaaaaaaaaaaaaaaaaaaaaattagctgggcatggcggtgcatgcctgtaattccagctacttgggaggctgagctaggagaatcgcttgaacccaggaggcagaggttgcagtgaacccagatcacgccactgcactccagtgtgggcgacagagcaagactccgtctttaaaaaaaaaaagtgcaagagtctgcatcctcagtattaaaatgtaattctatcttcattgtaaaagaagctttaatacttaaactacagacacctagaaagacagggtaaaaagaattaagtggaacagggtgccaaattataggtccataggggccctcgtaacagttaagaaataaacctttatcttaataaaatagtcagaatttttaattattttagagacagggtctcactatgttgcccaggctggagtacagtggccaccacaggtgcagtcatagcacactacctggaacttctgagcttaagtgatctttgcacctcagtctcttgagttgctgggactacaggtgcctggcrtagaatttgtaaattacca

SEQ ID NO: 727972 - DNA, 1351 bp, Homo sapiens
ttggcaaatgcatcatgacatgtatccattagtataggatcatatagaatagtgtaactactctaaaaatcttctgttgtattttatttattaaaaaagagagatatgaattatatatggcaaaatgttaaagtctgacagctggactgaatgtacttgtgtttaataatcaattctctaaaattttcttaatgcttaaaatattttaaaataggaaaagatcataggtatctcttaggtgagactttaaaaaaaatacatgggggtgatatatatacatttggtttcaaaagttctctatcatcaaagaaaagcaaacgggcctattcctctaccttcagcatctcccagtcttctctcattttcacccaatttcatcaacataaaaatgcatataggatcattccatgtggcttgcccttggtccggggcacacctaggaatgagggcctgaaacaagtgtgtggatggtggaccctgggaactggtctttgctggagaagcagctcagctcagatttgcagatgctgactcagcaaagtgctacattcttggtgttccattgtgactgctcgactgctgagctgtgtgactgattctttagggacaagcaaacccccctgtcctcactgtttttcctcattactttttaaactggggtcctcaggagagttccatttggtgggctctagggacctaaaggagttccttaaaccacttaatttgcaaggcatatggggattacagaactagaggaatcgagtttattaactagtctcagccccactcccccagaacatgacacacactcatcagattcttctctttgtgattgggaaagcaccagtgacaccarctctggtgtcacccgaccagctcaggggtacagctacagtgtgcacagtgtgcacagtacagatgtggatttatgacacatgataggctgaataatggcctccaaaagtattcatttctgaatccccagaatttgtgaatatattattttacggcaaaatgactttgctgatgggattaaattatggattttgaggtgggcagattacgttgggttctgtgggtgggccttaaatgtatttacaagtgtccttaaatgagagaggcagagggagatttgactacagaattggagtgttagagtaacacggagtgagaaaaacttgaccaaccactgctggcttaagaaatggaggaaggatcccaggccaaataatgcaggagacttctcaaagctggaaaaatccaggaagcagatctccctgagagcctgcagaagcaatgcagccctgctgacaccttgattttggcttggtgaaaccaattttggacttct

SEQ ID NO: 727973 - DNA, 1641 bp, Homo sapiens
gtagagaaggggtttcatcatgttgttcaggctggtctcaaactcctgacttcaagtgatctgcctgcctcagcctcccaaagtgctggaattacaggcgtgagccaccgtgtctggcctagaatcagggattaaaatagcaccacaaatctctctctctctatctatctatctatctatctatctatctatctatctatctatctatctatctatctgtctgtctatatctatctatctatatctatctgtctgtctatctatctatctatctatctatctatctatctatctatctctgtctgaattctatatgtgcttctttcttcatagcaacttctttctttcctactgtgtcgtgctgcacagtggcgtcctctatatggctgggacctggctattggattctttccttagctccaacttgggtgctacctggagaaacattttgattggtctcccttgggatgggtgctctctctggtcccatcaactgtagcctgatgaccatgtactcttgcccagtgtagtcgggtgtttactctggctttattagctgtggtcaaggggacagtctatagcatagacatggccaccagtcaccattgttttaatattcattgaaagaaaagctagaaacccatcactatttatgcagactcttcctttttcttgggttcctgttcctgcttcatagttgattcctttgtcactcatcacagcctgcactcaggaattaaccatgttgtactttatactgatccctgctaaggaatctctcaaactctcagaaatgcccaattctgtgacaaagccagaccaccctctacaggtcggggcttgtgcccaccacaggctaaacagtctaggtttggccaagagcagggtttgaagaaagaggcatatcacagctgggcactcagtaggtgtcagtacattgtgttgaatgaaaggttctgagccagagtcctgaagcaggcacctgggcaggcacgatcacagggctctcacctctctagctgggacctgggcctgagctcagtccccgtgatggcscttggtgaactttctcaacatatccctttcttctcctttggtgacttcccatggctgaattctacctttactgtgtacagggttgctgtctatctcaagcccctccctgccacctatcataagctccataagggcaggcagtctttttcacaccgcatgcctgtcatctagctcactgcctggcatatagtaggtagttgaatacatgaatagggtaatgggtgatcagggcctggaggaaggtagcaggggaatctgtactagacccagagtcaggaaaggcatccccaagaaatggcattaaagctagggtgagaatagcctgggaggaggataagcacagagctccagggactctcctctctccttctctgcccagggacctgctgcaagctggcagcacagacacagccagtggggaacagcttgcagcaggcccctggacagggaaggaaattagtggcagagccaggcctagactttgactctccacactcgctgtcacagccagaagagtccctggtttggttccattccagaaggattatagtaggttgatgctttcttgaactccaatgtggttaa

SEQ ID NO: 727974 - DNA, 1641 bp, Homo sapiens
gtagagaaggggtttcatcatgttgttcaggctggtctcaaactcctgacttcaagtgatctgcctgcctcagcctcccaaagtgctggaattacaggcgtgagccaccgtgtctggcctagaatcagggattaaaatagcaccacaaatctctctctctctatctatctatctatctatctatctatctatctatctatctatctatctatctatctgtctgtctatatctatctatctatatctatctgtctgtctatctatctatctatctatctatctatctatctatctatctctgtctgaattctatatgtgcttctttcttcatagcaacttctttctttcctactgtgtcgtgctgcacagtggcgtcctctatatggctgggacctggctattggattctttccttagctccaacttgggtgctacctggagaaacattttgattggtctcccttgggatgggtgctctctctggtcccatcaactgtagcctgatgaccatgtactcttgcccagtgtagtcgggtgtttactctggctttattagctgtggtcaaggggacagtctatagcatagacatggccaccagtcaccattgttttaatattcattgaaagaaaagctagaaacccatcactatttatgcagactcttcctttttcttgggttcctgttcctgcttcatagttgattcctttgtcactcatcacagcctgcactcaggaattaaccatgttgtactttatactgatccctgctaaggaatctctcaaactctcagaaatgcccaattctgtgacaaagccagaccaccctctacaggtcggggcttgtgcccaccacaggctaaacagtctaggtttggccaagagcagggtttgaagaaagaggcatatcacagctgggcactcagtaggtgtcagtacattgtgttgaatgaaaggttctgagccagagtcctgaagcaggcacctgggcaggcacgatcacagggctctcacctctctagctgggacctgggcctgagctcagtccccgtgatggcccttggtgaactttctcaacatatscctttcttctcctttggtgacttcccatggctgaattctacctttactgtgtacagggttgctgtctatctcaagcccctccctgccacctatcataagctccataagggcaggcagtctttttcacaccgcatgcctgtcatctagctcactgcctggcatatagtaggtagttgaatacatgaatagggtaatgggtgatcagggcctggaggaaggtagcaggggaatctgtactagacccagagtcaggaaaggcatccccaagaaatggcattaaagctagggtgagaatagcctgggaggaggataagcacagagctccagggactctcctctctccttctctgcccagggacctgctgcaagctggcagcacagacacagccagtggggaacagcttgcagcaggcccctggacagggaaggaaattagtggcagagccaggcctagactttgactctccacactcgctgtcacagccagaagagtccctggtttggttccattccagaaggattatagtaggttgatgctttcttgaactccaatgtggttaa

SEQ ID NO: 727975 - DNA, 1587 bp, Homo sapiens
ctctgcctcccaggttcaagctattctcctgcctcagcctcccaggtagctgggattacagggacccacgaccaagcctggctaattgttgtatttttagtagaaacagagtttcaccatgttggccaggctggtttcaaactcctgacttcaggtgatccacctgccttggcctcccaaagtgctgggattacaggtgagagccagcatgcctggccaaattcatacatttatgaatttgatttgtaccaagacaatccagtgggaaaagaataggcttttaacaaatggtgttgggacaactggctatccacatgcaaaaagaatcaagttggacttcttccttatgccattttaaataaactcaaaatgaagcatagacctaaataaaagagctgaaactacaaaaccttttgaagaaaacaggtatgaatatttgtaaccttgaattaggtaattgcttcttagctatgacacctgaagcataagcaaccatggaaaaagaaggactgctagtttattttctcattgatttgtgggggggtccatgtatctagggaaacaatccttttctcagttttaggaattgcaaatatcttcgaccgttctgttatctctcattaattttgtccatgattatccttttttgatcttaaatatttatctttgccttgtggcttatgctcttaaagttttgctaaaagtgtcttttttcatccttaggtgacaaatatatttttctatatttccttctgttaagttggcggttttatctttcatgttcaagccaataatccatctaaaatccaccttttcatgtattttcatttagggatccagattcatttttctccatacagtgaatttgtttccctcaaagtgtataccatataatcatttccccattgttgtatggacccctctttatcataaattaagtttcaatatgtaaataggtctattcctgagttcctatactgttccatagatctatgtttgttcttacaacaatattttaaaaaaattaataaggctattagaaaagtaggactagaaggacattttctttttcttttttwaattttatttatttatttatttatttattttgagatggagtctcgctctgtcgcccaggctggagtgaagtggagtgatctcggcctactgcaacctccacctcccagggtcaagcaattatctgcctcagcctcccgagtagctggacttacaggcatgcaccaccaaacctggctaatttttttgtactattagtagagatggggtttcaccatgttttccaggttggtctcgaactcctgacttcaggtgatccacccgtctcggtcttgcaaagtgttgggattacagacgtgagtcattgttcccggccagctacacttatttcaaaacaaaaaaggtagctttttttaagtccatgagcagcagaatcaatatcaagtagaatggtgacagcctgcccttcaagacatatttatttattcttgctagaaatgagtatataagttgctatggtgatggttgtcaactggaccacagagctggactggaccttcaatggggtga

SEQ ID NO: 727976 - DNA, 1587 bp, Homo sapiens
ctctgcctcccaggttcaagctattctcctgcctcagcctcccaggtagctgggattacagggacccacgaccaagcctggctaattgttgtatttttagtagaaacagagtttcaccatgttggccaggctggtttcaaactcctgacttcaggtgatccacctgccttggcctcccaaagtgctgggattacaggtgagagccagcatgcctggccaaattcatacatttatgaatttgatttgtaccaagacaatccagtgggaaaagaataggcttttaacaaatggtgttgggacaactggctatccacatgcaaaaagaatcaagttggacttcttccttatgccattttaaataaactcaaaatgaagcatagacctaaataaaagagctgaaactacaaaaccttttgaagaaaacaggtatgaatatttgtaaccttgaattaggtaattgcttcttagctatgacacctgaagcataagcaaccatggaaaaagaaggactgctagtttattttctcattgatttgtgggggggtccatgtatctagggaaacaatccttttctcagttttaggaattgcaaatatcttcgaccgttctgttatctctcattaattttgtccatgattatccttttttgatcttaaatatttatctttgccttgtggcttatgctcttaaagttttgctaaaagtgtcttttttcatccttaggtgacaaatatatttttctatatttccttctgttaagttggcggttttatctttcatgttcaagccaataatccatctaaaatccaccttttcatgtattttcatttagggatccagattcatttttctccatacagtgaatttgtttccctcaaagtgtataccatataatcatttccccattgttgtatggacccctctttatcataaattaagtttcaatatgtaaataggtctattcctgagttcctatactgttccatagatctatgtttgttcttacaacaatattttaaaaaaattaataaggctattagaaaagtaggactagaaggacattttctttttctttttttaattttatttatttatttatttatttattttgagatggagtctcgctctgtcgcccaggctggagtgaagtggagtgatctcggcctactgcaacctccacctcccagggtcaagcaattatctgcctcagcctcccgagtagctggacttacaggcatgcaccaccaaacctggctaatttttttgtactattagtagagatggggtttcaccatgttttccaggttggtctcgaactccygacttcaggtgatccacccgtctcggtcttgcaaagtgttgggattacagacgtgagtcattgttcccggccagctacacttatttcaaaacaaaaaaggtagctttttttaagtccatgagcagcagaatcaatatcaagtagaatggtgacagcctgcccttcaagacatatttatttattcttgctagaaatgagtatataagttgctatggtgatggttgtcaactggaccacagagctggactggaccttcaatggggtga

SEQ ID NO: 727977 - DNA, 1587 bp, Homo sapiens
ctctgcctcccaggttcaagctattctcctgcctcagcctcccaggtagctgggattacagggacccacgaccaagcctggctaattgttgtatttttagtagaaacagagtttcaccatgttggccaggctggtttcaaactcctgacttcaggtgatccacctgccttggcctcccaaagtgctgggattacaggtgagagccagcatgcctggccaaattcatacatttatgaatttgatttgtaccaagacaatccagtgggaaaagaataggcttttaacaaatggtgttgggacaactggctatccacatgcaaaaagaatcaagttggacttcttccttatgccattttaaataaactcaaaatgaagcatagacctaaataaaagagctgaaactacaaaaccttttgaagaaaacaggtatgaatatttgtaaccttgaattaggtaattgcttcttagctatgacacctgaagcataagcaaccatggaaaaagaaggactgctagtttattttctcattgatttgtgggggggtccatgtatctagggaaacaatccttttctcagttttaggaattgcaaatatcttcgaccgttctgttatctctcattaattttgtccatgattatccttttttgatcttaaatatttatctttgccttgtggcttatgctcttaaagttttgctaaaagtgtcttttttcatccttaggtgacaaatatatttttctatatttccttctgttaagttggcggttttatctttcatgttcaagccaataatccatctaaaatccaccttttcatgtattttcatttagggatccagattcatttttctccatacagtgaatttgtttccctcaaagtgtataccatataatcatttccccattgttgtatggacccctctttatcataaattaagtttcaatatgtaaataggtctattcctgagttcctatactgttccatagatctatgtttgttcttacaacaatattttaaaaaaattaataaggctattagaaaagtaggactagaaggacattttctttttctttttttaattttatttatttatttatttatttattttgagatggagtctcgctctgtcgcccaggctggagtgaagtggagtgatctcggcctactgcaacctccacctcccagggtcaagcaattatctgcctcagcctcccgagtagctggacttacaggcatgcaccaccaaacctggctaatttttttgtactattagtagagatggggtttcaccatgttttccaggttggtctcgaactcctgacttcaggtgatccacccgtctcggtcttgcaaagtgttgggattacagacgtgagtcattgttcccggccagctacacttatttcaaaacaaaaaaggtagctttttttaagtccatgagcagcagaatcaatatcaagtagaatggtgacagcctgcccttcaasacatatttatttattcttgctagaaatgagtatataagttgctatggtgatggttgtcaactggaccacagagctggactggaccttcaatggggtga

SEQ ID NO: 727978 - DNA, 609 bp, Homo sapiens
agtcagaattattaaagatctagaatgaacagaaaagattcaaattaagagtgactatttgagagtcattaaaagtctgtgaaacgaggggatgtctgggagtgcagctgggcggcagcatcatgacgtcacagatgaaacacaagcactggagccagggaaactgactcctccattcaaattctgactttaccatttgtcagatgtggaaccttggtctgataatgcaacatttctgaacctcagtttccccatctgtaatatggggtgaatctctgtcttataagattgatgacagaattagagacaaggaatgtagacacttagtctgcaataagtagacttattcagtggagctcartaagtaattggtcattatttttcgtacattaagggctaggttactgaaaccttacaaatgctttcagaaattggcaggaggaaaccacacatgtgtactcaagcaaggacaccacacggagatactgtgttaagcagttaggcaagaatagagtcaactaatcatagcaagccttctctcctccccctatattacctgaatggaaggaacactagagaaacacaaatttttgctgcagcattgccttt

SEQ ID NO: 727979 - DNA, 696 bp, Homo sapiens
atgccatcacattggcaatatctgaatttaggagattaagttttaacatgaattttggaggagacagacatattcaaaccataacacatactacaacaaagaaaggtactatctgtgttgtcatggaataataagaaaacctgatgaaastagattccataagtagagttgtattcttgcaaatggcattgaacaaatgaaagtttggttgtgttaataaaaacacgacaaagtagcatctatcttaagcatttaaatgtaagtcatttaaatgtacctttatttacctgcattttgatacagggccaaggtcttttatgtgagcccaatgtctagattccataatctattttttaaataattcatactcataatactactgcttttctcaaatggagaggggacttaaatccattgtgaaacaattattacatctcagattttttaatttttgggggtcaatattttatatttgtctcatctatacataatataacaatttaaccattcaaatttttcccaaagagccaacagatttttaaaatggaaaccacccttctctttcttctcataattatttatcagtttgtgaaatacttaattaaatttcatatttaaattaacaagtacaactggcataacatgtctggggtggaaatagaggaagacaacaaactcttggcaggcatacaattc

SEQ ID NO: 727980 - DNA, 696 bp, Homo sapiens
atgccatcacattggcaatatctgaatttaggagattaagttttaacatgaattttggaggagacagacatattcaaaccataacacatactacaacaaagaaaggtactatctgtgttgtcatggaataataagaaaacctgatgaaagtagattccataagtagagttgtattcttgcaaatggcattgaacaaatgaaagtttggttgtgttaataaaaacacgacaaagtagcatctatcttaagcatttaaatgtaartcatttaaatgtacctttatttacctgcattttgatacagggccaaggtcttttatgtgagcccaatgtctagattccataatctattttttaaataattcatactcataatactactgcttttctcaaatggagaggggacttaaatccattgtgaaacaattattacatctcagattttttaatttttgggggtcaatattttatatttgtctcatctatacataatataacaatttaaccattcaaatttttcccaaagagccaacagatttttaaaatggaaaccacccttctctttcttctcataattatttatcagtttgtgaaatacttaattaaatttcatatttaaattaacaagtacaactggcataacatgtctggggtggaaatagaggaagacaacaaactcttggcaggcatacaattc

SEQ ID NO: 727981 - DNA, 696 bp, Homo sapiens
atgccatcacattggcaatatctgaatttaggagattaagttttaacatgaattttggaggagacagacatattcaaaccataacacatactacaacaaagaaaggtactatctgtgttgtcatggaataataagaaaacctgatgaaagtagattccataagtagagttgtattcttgcaaatggcattgaacaaatgaaagtttggttgtgttaataaaaacacgacaaagtagcatctatcttaagcatttaaatgtaagtcatttaartgtacctttatttacctgcattttgatacagggccaaggtcttttatgtgagcccaatgtctagattccataatctattttttaaataattcatactcataatactactgcttttctcaaatggagaggggacttaaatccattgtgaaacaattattacatctcagattttttaatttttgggggtcaatattttatatttgtctcatctatacataatataacaatttaaccattcaaatttttcccaaagagccaacagatttttaaaatggaaaccacccttctctttcttctcataattatttatcagtttgtgaaatacttaattaaatttcatatttaaattaacaagtacaactggcataacatgtctggggtggaaatagaggaagacaacaaactcttggcaggcatacaattc

SEQ ID NO: 727982 - DNA, 1940 bp, Homo sapiens
cccaagatgcattattcctttttctttattaaaataaaaacaaacatttctcaaatattcactgtgcatgcaaagtacttctattgacatgatttcagtcctcccaacaattatgtgaaatattgttgcttccgttgtaaagatgtggaaactgaggctcatactgtggaggtaaactggcctagagccgtgggactcaatggcagaatcacaatataaatcttcccattatttctcttattatataggtaattttgtattcacctttttgacatttgatccgattcaatttagcaaaggattagactttctctttttgtaggtgttagatgaataaaaaggcacgtgggcctccatatcaagcagatgtactatcgatctcatagaagagatgccttggcctgatcaaggataagaatatgtaactgaaccattttattcctaacccttctccactgacacaaggaggcttatttcctggagcactctagttatcatggcatcatctcgctgtgcttttcccccagtgttctggactagtcaagttccctgatggcattcagttaaccaggtccttcataaccagttcatcctctgggaacctcaagggaagtatcagccaggtgtttctgaatcatttacactacccctaccaggctggcgtttgcaaagagctcttttcatgtcctgttggccagctgcacctctattttatgagccgaacttcttgtctcaggaagtcctgygctgctgccactaaatggccttcagaactgcttagttttgaagttcagacaccataaagcgtgaatggcttcaagatatagccaaccattcctcctgcagatcattctttctccttgtgttggtcatgagcaggcacatgtgtgatacctgtgtgcacatgcacacacacacacacaaatgggcacatacactcacacagactccatggctccaccttcaaggtggccactccccctggctgtttataaacataagaagtgtgtcttcactgagttctttgccgctatgatttacgctgcatgttcaacccgaaaggagcccatgtggaagacctacgcatagagggaagtgtgttgcattttatcattttggtttgttgtttcctcccattattacttttgtacctactaatagagaagcagaataaatatcttaagagagaggaggaaaaaagacgcttaaaacatggataccattctcacttattgtgggtactcccacttgattctttcctctgctttgtcccatttctctctcatgctgtgcccagcacagattgccaggagggttttatttgaagttatttacacccccagcttcatggagtggaaagagctgagtcccacaggccaggtcaaaatgttacagcttttggccaaaggtcagtgagactgaccgagcaatgaataactactgaatgatctttaaaataagttataaagatcaaaatagaacaaagccagagtgagcttctgactacaaaaataaaatttttgtagttagttttgtaaaagaaaaaggttgcctggttgtaagttatcagaggcaagaaccaatgcctgtctgtctttatgtccctcaaagggcctagcagggtgccttgtatataaaagagatttaagaattgtttctggactgacaaatcagtctaatcaggccttgtagtcgtattccctagaagagttctagtttggatttttaaagtgatcattgcaaatatagtgatactaaaacttagcccaccttcatgtcagtgacagataatttaccttgtccacatagttcaggaatcaatggcaactagtcagtagtaatactccacaaaacttgacagtattccaagcaaagctttcatttacagtttgccctctctttagtttatatcagtcatagaggaagcaaatgctatgtga

SEQ ID NO: 727983 - DNA, 639 bp, Homo sapiens
ggattacaggtgctcaccaccatgcatggctaatttttttgtatttttagtagaggcagagtttcaccacgttggccaggctggtctcaaacttctgacctcaggtgatccacctgtcttggcctcccaaagtgctcgggttacaggtgtgagccaccgcacccggccaagttttctcttttcatatatggtctgaccattgtccatttgtatattcagtctctggcagggcagtggccaaaacgtggcggaagcatagagtgtggaaagggaaggaatggaagctaagaaggtgtctagaagaacagccttgagagtttggacttaatcttccaggccagtcattaccaaatattttcgtctgcacacaaytgtctgtaaaacaattttgagtaggcatctcaaatatatcgatctttaggtatttctaaattttatacatgttccattgaattcatatttttaagaaaatagaaacagggattctatacattgttattaattttagtgacattttgcaaataattggattattatatgacactaaattttgctacagattcgtagttcgacatggtgttgtcaaagctgtttttttcacttaatgttttgaatagttaatagagtcatattgttcca

SEQ ID NO: 727984 - DNA, 2239 bp, Homo sapiens
tgaatgtgctcaagtctcagcctcaatgttattcaccatattccagaagtaaagactttaaatatagactgtgatagtgaagaacaaacaacttaattatctgttcttatcaaatggagcttgtcaccaaataaagcaaaatgagagttaaaaaaaaaattcagcaactgctttttggaaattgtaaataagtctctttctctctctctctccctactccccccaaccccccatgtccaggtattagttctcatgatttctctcatgattttgtttttgttggatgcttcctttgttaaattttatttatattgtttcttttttctaatcattgcatctattttaattcatttattagttgatgacccttatatttgtagaaattttagctgttctatgtctttcacatgacaattttttttgaaataagttttatctgaaatttktcagaagctcatgagaaagaaaatatctcattttataccattgtatatgattttattatggtcttcccttaaggaagatctccctcacacaaatatgcacacacacacacacacacacacacacacgcacatgcacacacaatctcgcaagagcaaaatcgagacgagttactgattagtaaactagaaagtgaaacataatttctctattagcatggttccatactatcagtgctcaagttatcttttctataaaatgtcattcctctgggatgaatgaccgcccataatccaattatatttcaaagtcacagtttcttttaaaatatttaataggttgatttttaaagttgaggaatagttatggaaactttttactgttagcctttactcaaactacacagcttgagatttagtttctaaaataaaagtaacatcatgtaattttactgtatacagttagtaatataaataaagtgtgtgataaatgttccatatgtatgctccacatgtgtgcatattagaaaatgttaattttctcccctagaagaatattttatatattctacatcatgcttcattaaattatgggtaatgataaagtatatgtacattttataaattacacttcaaaggaagattatgctaaaactcaaatgtctgcatgcttattacgcagttgtctcctatccaaattttatttgaaggttagttttctaatataattccacagctaggactttaaggtcatcgtaatggtagagttgaaaaaaaagtcttccactcttgacagatgcaaaggaaagagaaaggaaaaagctaatttaaatcttatataaacacacgttaaaataaaataaatggttttggggatggtatacaagcaacaaaatcagttttgatataccaagttatgagaaaaaaaatcaaaaagaatgcagctgtcattttgaattatagccaaataatgttctcttctcactttgaaaaaaaaaaaactaccaaacaaagaagagtgtgatgtgagtctgaaatggtgagaattagaggtgagaattaccaaagttccataaaaatggggttatctaacattttaaagcatttgcaaaggactgtcttaatatcagaatttgaagaaaaatactgctactgtattctaattttccttacattatggattctagaatttaatttccagggcattgtacagctgcatccattaccgaaccttatcataattatgagacgaaaaaaatgcactgtcaacaattgtctgtatgtgatgaggcacttatattctgatgtctggttaccttctgcttgttaaccttgtcgtggagggcctctctccacgacaaccaaatgcaatccaccaaccaaatgcaatccacagtaattactataattcagcggagatatgtagtcacttgaggctgaccgttttacccccacaatcaaccttctgcaactcaaggagaacacaactatggccgggctccgacaaattaggcatgaacaaatgtttcacattaactgagttaaaggaccttgctgaaaattacaagggctgcttaggaaagcaatgagtcccattatggaagtaataggtctcaaagcaggcagcttgttagagattcatctatagttgcaggatgtagacaccttagtgaaagcgtctctgacctggacactttcagactctgggatggtgatggcaacacggtcctctctgggagatgtcatcaaaatcagaagctggagacacctctcctgaaatgtaattagaaaattca

SEQ ID NO: 727985 - DNA, 1070 bp, Homo sapiens
tcagatttagataattttaaagagaaaatatcccatatcttatttgctatgtagaatattccaaataaactgacatatggcttagaaatctgaggacagataaagtgataccatatcaacattttcagtctagaacctatagcctaaaatttatagactataagtcaagccagaaattcctgggaaaattatacagatttaacataatgaaaaattaagttgtttttaaaattaaactgtatatttgatgaagacctagtgacaaagaggaagaagaatagaagtcgagacgccaaaaacaattctggtatgtaaatttttccttgtgagattctgggcagcagagtttcagacaaatactaaatcagataactcaaatagggcactccagcattgagggaattattatagataggacaaaaaaagatggctgggcaaggtggctcatgcctgtaatcccagcactttggaaggccgaggcgggtagatcatttgaagtcaggagttcaagaccagcttggccaacatggtgaaaccccatctctactaaaaatataaaaattggctgagtgtggttgcacatgcctgtaatcccagctactcaggaggctgaggtaggagaattgcttgaatctgggagacggaggttgcagtgagctgagatcctgtcactgcactccagcctgggagacagagactccgttgcaaaaaacaaaaaaacaacaaaagtagaaactgggttttcatttacacaaaaacaaccagaaattttataatattttgttttagaacaaaaagttatatcatttaaatgaaaaaagaggcaagattaatgttgtttcagttggcaaatgtaatagtcattttatccatgcatggtaccatatattaaatagtcacaacacaaatcagagcctgggacttcataagaggtaaaaaattaaattacatttaattatatttcaaaatagtttgcacattttagtaggacagacagtgttatggatttkcaaacccatagtcaacaccagcacactatgggcacagtgaagagccagcttgatatttct

SEQ ID NO: 727986 - DNA, 1354 bp, Homo sapiens
tcctaataccatcttcttggtgattaggtttcaamatatgaatttgggaagacacggacattcagaccacagcatgtgtgtttacaacacagcaatgcatggaagagccaatggctccgcatccccccggcatttggtgttggccacagactgactctataagcagtttaaaatagttgctaatgataagaagtttgttttatttgtttgttttcctaaaagcacagcttctataggttttagatctatccaaagaagttaataatgagataaagtatgcttctgggtaattgcactcttacatgatgactttttccctcttatcatttaattaagacttttacaatcaacatccttgataccaaagcagtaggtaggatagcaattggttctgtgttcaagaagtgtttttaaacattcaaatgagcttgcattgtcattaaaagaaagctttccacttcttagtgctgttttgaaatgaatgtaaagattcctgtgctctgggaaaaagcaaacccataattagaacaatggcagccttggactgttctcatttctcttccaggaaatggttttttaaaagttattggtctacatgatgcatatggattatcttctttcagaatgacgcacagccaatttagaatactgagttgccccaaatttccctataactcccttcactgcccaatccaaccgattttgttttctactcagtacaaacatgctacaaactaattttaaatcattagcattgtccaaatggaacataattagagaattaacactgttacaaaaataattacgtaaaccaatataaagactagtactcatagcttcaggtgttcactgtgtttggagcgtcagttttacagttcttcattcgcctaggaaattgaaaataaaatgtgttcgttcagcaacagtgtgacagcggaagacacagaggaggagagccacttggggtaggactcctctgccctctttggcctgttgtccagcagcggttcacaagccaagtcaacactatttgtaaactcagcactttacaaacaaaacacagagacttctgtgcaggcttttgctaattgtccttagcagcattgttgaatgtttgaattatcagatagaccggggctgtgggcttagtttccctagaatggcttctagatgtctctcttgaggtcctcaggcctgagggctgtgcagggaagaatgagaagctgtgatttaggtccttgattggaaactactgaagccccatagaaacagaaaggtaaaagatgaaaactttgcaggacgcagtactgttcactatagcctccaggattccagcaaaattatttgtgtcctc

SEQ ID NO: 727987 - DNA, 1354 bp, Homo sapiens
tcctaataccatcttcttggtgattaggtttcaaaatatgaatttgggaagacacggacattcagaccacagcatgtgtgtttacaacacagcaatgcatggaagagccaatggctccgcatccccccggcatttggtgttggccacagactgactctataagcagtttaaaatagttgctaatgataagaagtttgttttayttgtttgttttcctaaaagcacagcttctataggttttagatctatccaaagaagttaataatgagataaagtatgcttctgggtaattgcactcttacatgatgactttttccctcttatcatttaattaagacttttacaatcaacatccttgataccaaagcagtaggtaggatagcaattggttctgtgttcaagaagtgtttttaaacattcaaatgagcttgcattgtcattaaaagaaagctttccacttcttagtgctgttttgaaatgaatgtaaagattcctgtgctctgggaaaaagcaaacccataattagaacaatggcagccttggactgttctcatttctcttccaggaaatggttttttaaaagttattggtctacatgatgcatatggattatcttctttcagaatgacgcacagccaatttagaatactgagttgccccaaatttccctataactcccttcactgcccaatccaaccgattttgttttctactcagtacaaacatgctacaaactaattttaaatcattagcattgtccaaatggaacataattagagaattaacactgttacaaaaataattacgtaaaccaatataaagactagtactcatagcttcaggtgttcactgtgtttggagcgtcagttttacagttcttcattcgcctaggaaattgaaaataaaatgtgttcgttcagcaacagtgtgacagcggaagacacagaggaggagagccacttggggtaggactcctctgccctctttggcctgttgtccagcagcggttcacaagccaagtcaacactatttgtaaactcagcactttacaaacaaaacacagagacttctgtgcaggcttttgctaattgtccttagcagcattgttgaatgtttgaattatcagatagaccggggctgtgggcttagtttccctagaatggcttctagatgtctctcttgaggtcctcaggcctgagggctgtgcagggaagaatgagaagctgtgatttaggtccttgattggaaactactgaagccccatagaaacagaaaggtaaaagatgaaaactttgcaggacgcagtactgttcactatagcctccaggattccagcaaaattatttgtgtcctc

SEQ ID NO: 727988 - DNA, 672 bp, Homo sapiens
tattmtagtatatatacataatagtatatatttctgtaattattgtttatctataattgtttctataattatttctataaaagaaataatagtatatatttctataaattgaagtcaacatattttagcaatatagatagtcttaaatttttttatatcctttaagccagtgattttaatcctggaaatctattctaatgacttcatatgaagaatggacaaagaatatacaagagagttcatttaatctttaaaaatgaagatacaagtcatacaaaatgtttaaaaaattgcctatttggaaaccatgtatctgataaggggttaatattcagaatacataaggaattcatataacttgatagcaaaaaatcccaaataacccaattaaaaaatgagcaaataacctgaatagacatttttccaaagaagacttgcacacagccaacaggtgtatgaaaagttgctcaacatcactaatcgtcagtgaaatgcaaattaaaaccacaacgagatatcaactcatacctgttacgatggctatataaaaaagacaatagaaaacaaacgttggagagggaacattgttgtacattgttggtgggaaggtaaattggtacagcctataaggtaaacagtatagaggttcctccaaaaattaaaaataaaacc

SEQ ID NO: 727989 - DNA, 946 bp, Homo sapiens
ttgaaaatattctcagaggaaaagagtatacagatatagagaataaaaacagtagtctgaatagtgwcagaaattacagtaacaattaaattatgattacagatttaaagataatcccaaaagtcttcttctcactgctggtactgcaaatgaggttaacatccattcacagttgtactaccactgaaggttcctggtgattctccatatctgtgctatatatgtatgcctttccagactagaaacaatttcaaaataaatttgtttttggtgttgatattttgcaaatgttttaattttcctattatactgcaaaactctcatttttcatgatataagagaattaatgaagcaaagtaaatatttggattttatttttggctatgaatttccctaactataaatagcaagtagtatatgcagtatttgttcagcaccagatgactcacaagagatagaatatacagttctgcttttgataacagtccagataatgtacagttctatttttgataacatttcaatacaattgaagggaagactaagactattaatgctaaataactgcagaattatggccatataaatttattcgtgtgggctgagaaaggagatatactatggataagaaaggagagatgaagtattcaaagtatctttcttagtactgatgggatgtgaacatattgataaatttgttatgaataggcggaagaaggtgaacatgtgctagagtatatgccagaggcaataatgcaccttgtattttggtatataaattggggcactaactgctacagagcagcacatttgaagcaggagtgaagtctggagtaatgccataaattggtacctagcactggctgggtgaatagtagcaactaaataaatatagtaggagggaaatgactgaaataatgcattatggggagaaaagaatcaactt

SEQ ID NO: 727990 - DNA, 946 bp, Homo sapiens
ttgaaaatattctcagaggaaaagagtatacagatatagagaataaaaacagtagtctgaatagtgacagaaattacagtaacaattaaattatgattacagatttaaagataatcccaaaagtcttcttctcactgctggtactgcaaatgaggttaacatccattcacagttgtactaccactgaaggttcctggtgattctccatatctgtgctatatatgtatgcctttscagactagaaacaatttcaaaataaatttgtttttggtgttgatattttgcaaatgttttaattttcctattatactgcaaaactctcatttttcatgatataagagaattaatgaagcaaagtaaatatttggattttatttttggctatgaatttccctaactataaatagcaagtagtatatgcagtatttgttcagcaccagatgactcacaagagatagaatatacagttctgcttttgataacagtccagataatgtacagttctatttttgataacatttcaatacaattgaagggaagactaagactattaatgctaaataactgcagaattatggccatataaatttattcgtgtgggctgagaaaggagatatactatggataagaaaggagagatgaagtattcaaagtatctttcttagtactgatgggatgtgaacatattgataaatttgttatgaataggcggaagaaggtgaacatgtgctagagtatatgccagaggcaataatgcaccttgtattttggtatataaattggggcactaactgctacagagcagcacatttgaagcaggagtgaagtctggagtaatgccataaattggtacctagcactggctgggtgaatagtagcaactaaataaatatagtaggagggaaatgactgaaataatgcattatggggagaaaagaatcaactt

SEQ ID NO: 727991 - DNA, 733 bp, Homo sapiens
atattttatatttactttctgtttaatgacttaaaatatgtaatatttaggtactttgatcaactgttcactgaaaacaatggtaaagataatttaatccagaaaaattttaaatacagagctttaagatcgaagtaaataattttttaaaatttcaatgtgtacacctatttttgttacagaaacataaggaagttcaataaaagacttttagacagaaaaacacattccattaggatataattctgtagaaaacgtggaagggcagaggtccrgagcccgggtctgtgaactgcctttgcccccaggccctcagaccttgccctccgtgctgagatttagaggctggaggccctaatgactgctgatctcatatcaggtgagagctcatctccttgatgataacaggcatcattaagccctaattagtcaggccacaggaagctggtatctattatttaaaggaaagtaaaacacattttccttcttctttggtagaacaagaagcaaggccacatgctgagcaggaggagccagcacagggtggagtagtgaagggccactctgccgcagccgcgtctcaatggtgagcctatatgtatttcccactgggcacagcggagcgtcagggattgagtggggtgtgtgtgtgtgtgtgtgtgtgtgtgtgtgtgtgtgtgtgtgttttgcttatttgcttcacaaagtcattctggacctcagttgagagaga

SEQ ID NO: 727992 - DNA, 733 bp, Homo sapiens
atattttatatttactttctgtttaatgacttaaaatatgtaatatttaggtactttgatcaactgttcactgaaaacaatggtaaagataatttaatccagaaaaattttaaatacagagctttaagatcgaagtaaataattttttaaaatttcaatgtgtacacctatttttgttacagaaacataaggaagttcaataaaagacttttagacagaaaaacacattccattaggatataattctgtagaaaacgtggaagggcagaggtccagagcccgggtctgtgaactgcctttgcccccaggccctcagaccttgccctccgtgctgagatttagaggctggaggccctaatgactgctgatctcatatcaggtgagagctcatctccttgatgataacaggcatcattaagccctaattagtcaggccacaggaagctggtatctattatttaaaggaaagyaaaacacattttccttcttctttggtagaacaagaagcaaggccacatgctgagcaggaggagccagcacagggtggagtagtgaagggccactctgccgcagccgcgtctcaatggtgagcctatatgtatttcccactgggcacagcggagcgtcagggattgagtggggtgtgtgtgtgtgtgtgtgtgtgtgtgtgtgtgtgtgtgtgtgttttgcttatttgcttcacaaagtcattctggacctcagttgagagaga

SEQ ID NO: 727993 - DNA, 733 bp, Homo sapiens
atattttatatttactttctgtttaatgacttaaaatatgtaatatttaggtactttgatcaactgttcactgaaaacaatggtaaagataatttaatccagaaaaattttaaatacagagctttaagatcgaagtaaataattttttaaaatttcaatgtgtacacctatttttgttacagaaacataaggaagttcaataaaagacttttagacagaaaaacacattccattaggatataattctgtagaaaacgtggaagggcagaggtccagagcccgggtctgtgaactgcctttgcccccaggccctcagaccttgccctccgtgctgagatttagaggctggaggccctaatgactgctgatctcatatcaggtgagagctcatctccttgatgataacaggcatcattaagccctaattagtcaggccacaggaagctggtatctattatttaaaggaaagtaaaacacattttccttcttctttggtagaacargaagcaaggccacatgctgagcaggaggagccagcacagggtggagtagtgaagggccactctgccgcagccgcgtctcaatggtgagcctatatgtatttcccactgggcacagcggagcgtcagggattgagtggggtgtgtgtgtgtgtgtgtgtgtgtgtgtgtgtgtgtgtgtgtgttttgcttatttgcttcacaaagtcattctggacctcagttgagagaga

SEQ ID NO: 727994 - DNA, 733 bp, Homo sapiens
atattttatatttactttctgtttaatgacttaaaatatgtaatatttaggtactttgatcaactgttcactgaaaacaatggtaaagataatttaatccagaaaaattttaaatacagagctttaagatcgaagtaaataattttttaaaatttcaatgtgtacacctatttttgttacagaaacataaggaagttcaataaaagacttttagacagaaaaacacattccattaggatataattctgtagaaaacgtggaagggcagaggtccagagcccgggtctgtgaactgcctttgcccccaggccctcagaccttgccctccgtgctgagatttagaggctggaggccctaatgactgctgatctcatatcaggtgagagctcatctccttgatgataacaggcatcattaagccctaattagtcaggccacaggaagctggtatctattatttaaaggaaagtaaaacacattttccttcttctttggtagaacaagaagcaaggccacatgctgagcaggaggagccagcacagggtggagtagtgaagggccactctgccgcagccgcgtctcaatgrtgagcctatatgtatttcccactgggcacagcggagcgtcagggattgagtggggtgtgtgtgtgtgtgtgtgtgtgtgtgtgtgtgtgtgtgtgtgttttgcttatttgcttcacaaagtcattctggacctcagttgagagaga

SEQ ID NO: 727995 - DNA, 1632 bp, Homo sapiens
cattcgcaggttctttggttcagagtttactaaaacgtagtcaatagacttcccttcagatggagaaatgattttctattttatatataaacgggtttggtatgcttcatggtatctttaacttcactaaataaaacgctgcacagaaacatcctacactgcagtccctgaagatattacttttctttttctttttttagatggagtttcgctcttgttgcccaggctggagtgcaatggcacgatctcggctcaccgcaacctccgcctcccgggttcaagtgattctcctgcctcagcctcccgagtagctgggattacaggcatgtgccatcatgcccggctaattttgtatttttagtagagacggggtttctccatgttggtcaggctggtctcgaactcccttcctcgggtgatccgcccgcctcgacctcccaaagtgctgggattacaggcatgagccactgaggccggccaatttacttttcataatttgtttttgcatttttcttcatctccaaggccagcctcatagatgtgtaatatttaattttacttttagctaatagttacaaatatcacatttctttgtcattgaatacttttgaaattattccgatgcttatttatcgaactttatgaggctaagaacctttgtgattttttttgggggagcatagacaatattttatatgctgatagctattaccaaagcataggggttacttaaatgaacaagcgatgatctatcacaagagaaatggaaacagacatttaatacatcattttgctaatggttcttccctatacactcatcagcccccattcattttttgctctaataaatggactatattgttttataaattttcttttgagtgttaatataagaaggaagttattgcagccctctttacacagagacctaacggaataaaggacttgaccaacatcacagttttcctatcagtgggtaggttttctagctggattaatgccagctcttcctcctttttttttttttttttgagacagggtctcactctttcacccaggctggagtgcaaatggtacaatcttggctcactgcaacgtctgcctcccaggttcaagtgattctcctgcctcagcctcctgagtagctgggactacaggtgtgtgccaccatgcctggctaatttttgtatttttttgtaragacagggttttaccatgttggccaggctggccttaaacctctgatctcaagtgatctgcctgcccgccttggcctcccaaagtgctgggattacaggcgtgagccaccacacctgacccttcctcctgttcttagctcaaatctcatccaaaggaaattggcactctccatttccttttatattaagaatgagtttcatgttcataagtatatactctgaaatagtaaaccaatattctctttgaaatgggtccccttgatgtcaacacagggatataaggtagaatggcaagacaaggccctgtacttaaactgctctgcagccaaaatggaaactaaagaccattggtttggtcaggccattaacctacataatcataaaagcagagatccttgtccattggtgatatctaccctaaagcacagtgaaa

SEQ ID NO: 727996 - DNA, 641 bp, Homo sapiens
catataaaaaaaccaagtgatcacatgacttactataaaaaacacctttattaataaattaaatcaatcttcctttaaaaacactatcaaacattttcaaatgtaaatatcctttaaagatagaatttagaatggaagtctctgattcatttgaactagttctttggattgacatttgtattgtatgtgctataaaatagtaatattgatattaaaatagcacaacattaaaaataaatggctaaagtaatgatttgtaatgctttagacatttaatattttaaatattaatatcttatatttataatggaaaagtagttctgattgtggttgatgccattgtcccatgattgaaagctgtaattaattcctacaagattttgcaaacgacrttgagacaaacacagagtttacacttcaacattttggattgctcgtccaggctctatattgtgtaatttactcatttagctgggactttctagtaaggatttttttaagagaattgaagattctaaattcaaaatgttattttaactttaaaaagtaattatatcgttggcatgaacattaaaaaaaacacaagttaatgactaaatacaggctaattaagtctgtttggctatagcaacaactgtcaa

SEQ ID NO: 727997 - DNA, 1142 bp, Homo sapiens
catgaaatgtgtagtattctaaagaacattcattatgtctaaatagaattatcaagagatgagaaaatttatggtagaatattatttatatgtgtcatttttaatatcttaaattacatgatttagcactgggtcaactaccataatttggaagtaagaatgactaaaaaatattttatgatatctgcgacaactgtattgtcatatgaaattatttaccacatctattgataataatttcgtagatactgctaatagtattaacaccactgaaacaatttttaaacttgtttttattttatttgtgttttaaactttttaaaaactcaattaacataaaatccatcaacaaattacttgcattcctgtttttttttttgtttgtttgggttttttttgttttttggtttttgtttttttttggagacggagtctcgctctgtcgcccaggctggagtgcagtggcgggatctcggctcactgcaagctccrcctcccgggttcacgccattctcctgcctcagcctcccgagtagctgggactacaggcgcccgccaccacgcctggctaatttttgtatttttagtagagacggggtttcaccgtgttagccaggatggtctggatctcctgacctcgtgttccgcctgcctcggcctcccaaagtgctgggattacaggcttgagccaccgtacccggccatttgcattcttaatcatcagcacttctttttgactacgattgtatcttttcttaacctcattccctaaaaataaaaaaaaaaaccttatagtataacatatccttaaaatttgcacatatcataggtgtgaaacttaaagaattttcattgagtaaagacactcataaacatagcaagggaataaaaaatgatatcattggtaaagccttttaaacctttctctctgcccctttctagtcatcaacccctgaatagcaaatacctgactttaagtgtcatagataattttgactatttttgaacttatctaaatggaatgttacaaagtatactctggcttttttttttttttaacttaagactattgttataaggaaatgctgcatgtaggcatacttatatattctgtattcttattacagtatgaaatttcattg

SEQ ID NO: 727998 - DNA, 1142 bp, Homo sapiens
catgaaatgtgtagtattctaaagaacattcattatgtctaaatagaattatcaagagatgagaaaatttatggtagaatattatttatatgtgtcatttttaatatcttaaattacatgatttagcactgggtcaactaccataatttggaagtaagaatgactaaaaaatattttatgatatctgcgacaactgtattgtcatatgaaattatttaccacatctattgataataatttcgtagatactgctaatagtattaacaccactgaaacaatttttaaacttgtttttattttatttgtgttttaaactttttaaaaactcaattaacataaaatccatcaacaaattacttgcattcctgtttttttttttgtttgtttgggttttttttgttttttggtttttgtttttttttggagacggagtctcgctctgtcgcccaggctggagtgcagtggcgggatctcggctcactgcaagctccgcctcccgggttcacgccattctcctgcctcagcctcccgagtagctgggactacaggcgcccgccaccacgcctggctaatttttgtatttttagtagagacggggtttcaccgtgttagccaggatggtctggatctcctgacctcgtgttccgcctgcctcggcctcccaaagtgctggrattacaggcttgagccaccgtacccggccatttgcattcttaatcatcagcacttctttttgactacgattgtatcttttcttaacctcattccctaaaaataaaaaaaaaaaccttatagtataacatatccttaaaatttgcacatatcataggtgtgaaacttaaagaattttcattgagtaaagacactcataaacatagcaagggaataaaaaatgatatcattggtaaagccttttaaacctttctctctgcccctttctagtcatcaacccctgaatagcaaatacctgactttaagtgtcatagataattttgactatttttgaacttatctaaatggaatgttacaaagtatactctggcttttttttttttttaacttaagactattgttataaggaaatgctgcatgtaggcatacttatatattctgtattcttattacagtatgaaatttcattg

SEQ ID NO: 727999 - DNA, 1142 bp, Homo sapiens
catgaaatgtgtagtattctaaagaacattcattatgtctaaatagaattatcaagagatgagaaaatttatggtagaatattatttatatgtgtcatttttaatatcttaaattacatgatttagcactgggtcaactaccataatttggaagtaagaatgactaaaaaatattttatgatatctgcgacaactgtattgtcatatgaaattatttaccacatctattgataataatttcgtagatactgctaatagtattaacaccactgaaacaatttttaaacttgtttttattttatttgtgttttaaactttttaaaaactcaattaacataaaatccatcaacaaattacttgcattcctgtttttttttttgtttgtttgggttttttttgttttttggtttttgtttttttttggagacggagtctcgctctgtcgcccaggctggagtgcagtggcgggatctcggctcactgcaagctccgcctcccgggttcacgccattctcctgcctcagcctcccgagtagctgggactacaggcgcccgccaccacgcctggctaatttttgtatttttagtagagacggggtttcaccgtgttagccaggatggtctggatctcctgacctcgtgttccgcctgcctcggcctcccaaagtgctgggattacaggcttgagccaccgtacccggccatttgcattcttaatcatcagcacttctttttgactacgattgtatcttttcttaacctcattccctaaaaataaaaaaaaaaaccttatagtataacatatccttaaaatttgcacatatcataggtgtgaaacttaaagaattttcattgagtaaagacactcataaacatagcaagggaatamaaaatgatatcattggtaaagccttttaaacctttctctctgcccctttctagtcatcaacccctgaatagcaaatacctgactttaagtgtcatagataattttgactatttttgaacttatctaaatggaatgttacaaagtatactctggcttttttttttttttaacttaagactattgttataaggaaatgctgcatgtaggcatacttatatattctgtattcttattacagtatgaaatttcattg

SEQ ID NO: 728000 - DNA, 1142 bp, Homo sapiens
catgaaatgtgtagtattctaaagaacattcattatgtctaaatagaattatcaagagatgagaaaatttatggtagaatattatttatatgtgtcatttttaatatcttaaattacatgatttagcactgggtcaactaccataatttggaagtaagaatgactaaaaaatattttatgatatctgcgacaactgtattgtcatatgaaattatttaccacatctattgataataatttcgtagatactgctaatagtattaacaccactgaaacaatttttaaacttgtttttattttatttgtgttttaaactttttaaaaactcaattaacataaaatccatcaacaaattacttgcattcctgtttttttttttgtttgtttgggttttttttgttttttggtttttgtttttttttggagacggagtctcgctctgtcgcccaggctggagtgcagtggcgggatctcggctcactgcaagctccgcctcccgggttcacgccattctcctgcctcagcctcccgagtagctgggactacaggcgcccgccaccacgcctggctaatttttgtatttttagtagagacggggtttcaccgtgttagccaggatggtctggatctcctgacctcgtgttccgcctgcctcggcctcccaaagtgctgggattacaggcttgagccaccgtacccggccatttgcattcttaatcatcagcacttctttttgactacgattgtatcttttcttaacctcattccctaaaaataaaaaaaaaaaccttatagtataacatatccttaaaatttgcacatatcataggtgtgaaacttaaagaattttcattgagtaaagacactcataaacatagcaagggaataaaaaatgatatcattggtaaagccttttaaacctttctctctgcccctttctagtcatcaacccctgaatagcaaatacctgactttaagtgtcatagataattttgactatttttgaacttatctaaatggaatgttacaawgtatactctggcttttttttttttttaacttaagactattgttataaggaaatgctgcatgtaggcatacttatatattctgtattcttattacagtatgaaatttcattg

SEQ ID NO: 728001 - DNA, 672 bp, Homo sapiens
tgtagtatctagatgtcttgatgaattctgttattacttcttcagctttaactttagatatttgatttactgtagaaacaatcacatctgaagataatgttcatctcttcctttctgaaacttatattcttatttgtttttcttagtttattccattggctaaacattgaataggtacaatgatagaacccttttatttattttaatgggaatgcttccaatttttactattaaacctgatgtttgatgtaggtttatggaaaggcatactttatcaggtcaaggaagttcccttctagtacaaatttgctaataatttttatcatgaaagaatgttttatcaaacaccattcctgcatctatctagattatcatgtattttttctcctttattgtgttcatggacaaattacattgttaatttttgataaaaccaaccatgcaatcatggaataacccctacttggtcatgatgtgttactcttttatatgttgctagacttggttagctaatattttatttgtgatatttgattttatgttcataaatgaaattggtctataattttcctttttcattatctgtaaaattttgatatcaaggttgtrcttgcctcataaaatatattgatggttgttccgattttttctattttctagaaaaacttaaga

SEQ ID NO: 728002 - DNA, 672 bp, Homo sapiens
tgtagtatctagatgtcttgatgaattctgttattacttcttcagctttaactttagatatttgatttactgtagaaacaatcacatctgaagataatgttcatctcttcctttctgaaacttatattcttatttgtttttcttagtttattccattggctaaacattgaataggtacaatgatagaacccttttatttattttaatgggaatgcttccaatttttactattaaacctgatgtttgatgtaggtttatggaaaggcatactttatcaggtcaaggaagttcccttctagtacaaatttgctaataatttttatcatgaaagaatgttttatcaaacaccattcctgcatctatctagattatcatgtattttttctcctttattgtgttcatggacaaattacattgttaatttttgataaaaccaaccatgcaatcatggaataacccctacttggtcatgatgtgttactcttttatatgttgctagacttggttagctaatattttatttgtgatatttgattttatgttcataaatgaaattggtctataattttcctttttcattatctgtaaaattttgatatcaaggttgtasttgcctcataaaatatattgatggttgttccgattttttctattttctagaaaaacttaaga

SEQ ID NO: 728003 - DNA, 666 bp, Homo sapiens
tgtattaccctgcaatattacttcatttcctcaataaccttaagttatrtcttccttttttatccatcttccaagttcttccacaaagatttcaatgcttcaaaaaatactgtgcaggggaaaagcaaagatttagaatcaaatcaactcaagttcagttcctgtgacttctaaatctcttgagtccagtctcagctactaatttgtgttattatagctacttctacttcttccctcatttcacttgttcatgtgcattgccttgattgtgtcaacagttacctttgttatctttctcagaaaggcaccatcatcctgctaacctgagtttggagaactgtatatactgtggtcagcactgacctcacaggaacaataattgtttccacaaggaatgccacattatcttcccaatgggcaactgcacgcactcccatgccaaatcctagatgctggaagctcagcatgggctgccttctggaccaccacgtggccagctggcagggctgacatgaaggagtgggctggctgacactcaaagacatgacttggaagtccagaagactgtcagagaaagaagtctatatggtgactcacactgagaggctctataaggcagtaaaatgccctttcaaactcaggtctccatgatccttcctggaggct

SEQ ID NO: 728004 - DNA, 666 bp, Homo sapiens
tgtattaccctgcaatattacttcatttcctcaataaccttaagttatatcttccttttttatccatcttccaagttcttccacaaakatttcaatgcttcaaaaaatactgtgcaggggaaaagcaaagatttagaatcaaatcaactcaagttcagttcctgtgacttctaaatctcttgagtccagtctcagctactaatttgtgttattatagctacttctacttcttccctcatttcacttgttcatgtgcattgccttgattgtgtcaacagttacctttgttatctttctcagaaaggcaccatcatcctgctaacctgagtttggagaactgtatatactgtggtcagcactgacctcacaggaacaataattgtttccacaaggaatgccacattatcttcccaatgggcaactgcacgcactcccatgccaaatcctagatgctggaagctcagcatgggctgccttctggaccaccacgtggccagctggcagggctgacatgaaggagtgggctggctgacactcaaagacatgacttggaagtccagaagactgtcagagaaagaagtctatatggtgactcacactgagaggctctataaggcagtaaaatgccctttcaaactcaggtctccatgatccttcctggaggct

SEQ ID NO: 728005 - DNA, 666 bp, Homo sapiens
tgtattaccctgcaatattacttcatttcctcaataaccttaagttatatcttccttttttatccatcttccaagttcttccacaaagatttcaatgcttcaaaaaatactgtgcaggggaaaagcaaagatttagaatcaaatcaactcaagttcagttcctgtgacttctaartctcttgagtccagtctcagctactaatttgtgttattatagctacttctacttcttccctcatttcacttgttcatgtgcattgccttgattgtgtcaacagttacctttgttatctttctcagaaaggcaccatcatcctgctaacctgagtttggagaactgtatatactgtggtcagcactgacctcacaggaacaataattgtttccacaaggaatgccacattatcttcccaatgggcaactgcacgcactcccatgccaaatcctagatgctggaagctcagcatgggctgccttctggaccaccacgtggccagctggcagggctgacatgaaggagtgggctggctgacactcaaagacatgacttggaagtccagaagactgtcagagaaagaagtctatatggtgactcacactgagaggctctataaggcagtaaaatgccctttcaaactcaggtctccatgatccttcctggaggct

SEQ ID NO: 728006 - DNA, 1168 bp, Homo sapiens
tgatgaaagggattctaaagatcatgctggcctatatattagttgagggcagcatggccaacatttttctaatgctggggtataatctcagcctttaaatttgatttaaagctggggagagggaagtgtctcaaatctggcttttataaatgggtgtgctgatttgcaggagctgaacccacttatccattaattcactcatcaagtctttcctgagaatctacaatgtacaatgtaatgttcagtggtttggaagatagaaagacatagaycttagctctaaataggatgtagaatattgggagagagaaaagtttatatcacaaattattatttgaggcaaaaaaataagtcgcattgtagtctagaggatataattttattttacctaggaaattcagggcagagtccctgaaaaagtggaatttgaactgccaacccagaaaatttggatgttgagattaataggcactattccaggagaattgctttagaaaattatctagaaaatagacagctattttctagatagtaggctccagtgtaacctactttggaagataattttcattgttcaaaaggaccccaacaacaaaacaccaaaaacctctaaaattgaaccaacacatagaattgatcaacaaattaaagcaatttattccggtttacaattcatggcttggttgacatgttgaattgctgcttcaaaaggcaagggaagccagatgcactatgcaattgtattttacaacctatcttacggtatttgcacactttcatttcggcttttgttttgcctatcccaaattcagaaggaaggaagaaaacatacgaaaatgacactatcatatctattaatgacaggtgaaagtgatggaggaggagatttggtctgaaaggctattgcctgtcaaaggaaatttcaaacaaggttaagaaggccacagagaaagagtctttcttattctcctgttataagggtcaccaattcctgctagcttccttagtccttgtgtagacctttttcagttttgtctatcatatgtatctctatcacttttaattttcttaagtcagatggagaaataagaaaaaaagtcattccaagtcaactgattagagaatgaagccataagctctctcttcaggcccattctggtgagattag

SEQ ID NO: 728007 - DNA, 1168 bp, Homo sapiens
tgatgaaagggattctaaagatcatgctggcctatatattagttgagggcagcatggccaacatttttctaatgctggggtataatctcagcctttaaatttgatttaaagctggggagagggaagtgtctcaaatctggcttttataaatgggtgtgctgatttgcaggagctgaacccacttatccattaattcactcatcaagtctttcctgagaatctacaatgtacaatgtaatgttcagtggtttggaagatagaaagacatagatcttagctctaaataggatgtagaatattgggagagagaaaagtttatatcacaaattattatttgaggcaaaaaaataagtcgcattgtagtctagaggatataattttattttacctaggaaattcagggcagagtccctgaaaaagtggaatttgaactgccaacccagaaaatttggatgttgagattaataggcactattccaggagaattgctttagaaaattatctagaaaatagacagctattttctagatagtaggctccagtgtaacctactttggaagataattttcattgttcaaaaggaccccaacaacaaaacaccaaaaacctctaaaattgaaccaacacatagaattgatcaacaaattaaagcaatttattccggtttacaattcatggcttggttgacatgttgaattgctgcttcaaaaggcaagggaagccagatgcactatgcaattgtattttacaacctatcttacggtatttgcacactttcatttcggcttttgttttgcctatcccaaattcagaaggaaggaagaaaacatacgaaaatgacactatcatatctattaatgacaggtgaaagtgatggaggaggagatttggtctgaaaggctattgcctgtcaaaggaaatttcaaacaaggttaagaaggccacagagaaagagtctttcttattctcctgttataagggtcaccaattcctgctagcttccttagtccttgtgtagacctttttcagttttgtctatcatatgtatctctatcacttttaattttcttaagtcagatggagaaataagaaaaaaagtcattycaagtcaactgattagagaatgaagccataagctctctcttcaggcccattctggtgagattag

SEQ ID NO: 728008 - DNA, 1173 bp, Homo sapiens
ctcttattcacagttgaacctaaatctgactgatacacctgatgaaatcctttcaacacatagcaatatcatgatcaaaagctaaagaataacagaagctaaagtgaaatactattcaagttgtgaaaaaaatttaaaaatagatgtaatgatataagttaaacagactttaataaggcctattttcactttcttagttgcaacaaagatatggtgtgatacttcaaacttaataacatttagtctgtggcccaattttaagaaagtccttttttaagtggcctgacattacactgctaccagtcagtgtctagaccagtcagggtcagtaattacttacgagatagaataagaccaatcaacacacaccagcaaaacaggtgcaaatgatatggtaggaaataaaagtaaaatttccagtaagtaccatatatcactgtgaaagaaaaaaaaaaactgtggcttgaaaaaatgcctaaaatctttcgatcatcacacaatattcactcaattttgtaagtgcaatataaaaacataatactataaaattttcatattcttttcctcttcataaggaatcagagacttctgcaaacaaaacttgtttaaactaattcaattctcattttaatatgaaacgtttgatttctagctacacaaggagtacaaaatttgtataaaacactgataattttgtttcaacttttttgttctggaatgtcctattcacattacaggtgtcactttggataacttaaaaattaaaacctttttaaaaaacatatttcaaaggacttccaattctccctcttatatgagaatggcctgcgaaatgcccatttacaaatttttaaaaaatatgtaaataggccaggcacagtggctcacacctgtaatcccagcaccttgagaggctgagatgggcggatcaccagatcaggagattgagaccatcctggctaacacggtgaaaccctgtctctattaaaaatacaaaaaattagcagggtgtggtggcaggcgcctgtagtcctagctactcgagaggctgaggcaggagaacggtgtgaacccaggaggcggagcttgcagtgagctgagatcgtgccamtgcactccagcctgggcgacagagcgagactctgtctcaaaaaaaaaaataaataaataaat

SEQ ID NO: 728009 - DNA, 1173 bp, Homo sapiens
ctcttattcacagttgaacctaaatctgactgatacacctgatgaaatcctttcaacacatagcaatatcatgatcaaaagctaaagaataacagaagctaaagtgaaatactattcaagttgtgaaaaaaatttaaaaatagatgtaatgatataagttaaacagactttaataaggcctattttcactttcttagttgcaacaaagatatggtgtgatacttcaaacttaataacatttagtctgtggcccaattttaagaaagtccttttttaagtggcctgacattacactgctaccagtcagtgtctagaccagtcagggtcagtaattacttacgagatagaataagaccaatcaacacacaccagcaaaacaggtgcaaatgatatggtaggaaataaaagtaaaatttccagtaagtaccatatatcactgtgaaagaaaaaaaaaaactgtggcttgaaaaaatgcctaaaatctttcgatcatcacacaatattcactcaattttgtaagtgcaatataaaaacataatactataaaattttcatattcttttcctcttcataaggaatcagagacttctgcaaacaaaacttgtttaaactaattcaattctcattttaatatgaaacgtttgatttctagctacacaaggagtacaaaatttgtataaaacactgataattttgtttcaacttttttgttctggaatgtcctattcacattacaggtgtcactttggataacttaaaaattaaaacctttttaaaaaacatatttcaaaggacttccaattctccctcttatatgagaatggcctgcgaaatgcccatttacaaatttttaaaaaatatgtaaataggccaggcacagtggctcacacctgtaatcccagcaccttgagaggctgagatgggcggatcaccagatcaggagattgagaccatcctggctaacacggtgaaaccctgtctctattaaaaatacaaaaaattagcagggtgtggtggcaggcgcctgtagtcctagctactcgagaggctgaggcaggagaacggtgtgaacccaggaggcggagcttgcagtgagctgagatcgtgccaatgcactccagcctgggcgacagagcgagactctgtctcaaaaaaaaaaawaaataaataaat

SEQ ID NO: 728010 - DNA, 1064 bp, Homo sapiens
acaaaattggaaaaatttgaaaatagagtagtcctagcaagctttaccatcaccactcactcccccaaaaagttttcctttggcataagtaaattatggaggctaatgactgcaatagtagtaacagagtgaagtttcaggaatataggtaaaacataagaaaatacatatttgtgtatattaaaaataccatttaactttttaattcaaaatgacttagcagaaaatcaaataaatttgtactataactggaaatatttttaaaatwtttttttgtgttacttatgagagtattgttaagatttattgaagactaacagtaacattaaaaccccacccagaataaattttagattactagcctgccacagtgatctacactaaaatgtcaccaaattgtagtatcattcaaaaatggaagaaattaagtcagtgactaaaaatataacaaaaatacttattaactaactggatttttaatctgtaagaaggatgtcatgagaattttggcatatggaaacaatgtaagaataggaccttaggaaagaacgatatgaaattcatatttgatccaaaaaatggtagtagatccttttttcccaccagatgctcctaggtgtagattgcgttggtgaaggaggcactctagtctcagttgatgtcgagtgtgtaggtgtgggtgtgtaggtgtgaccagaattcctgaatatggacatgctaaataacaaattaaaatttctcgtgcagtttaaactatgtgtatggaggatttggattggatacaaaattcctcaagttggatgctcttcctctgggctgccatttgcagggaatttcatgtacatattcagacatgcagacttgcacaactgcttattatagaaatattctttgttactaagtgtctaacagacttaaacatacagggtttccgtatatggagaaaagtgattccacccactccatgccctggcacgtcatgatgccagcccttagatttatttggcttccagaatttaaatagacagtgatgtaaatcagaagttagtgtttcacctactggc

SEQ ID NO: 728011 - DNA, 1064 bp, Homo sapiens
acaaaattggaaaaatttgaaaatagagtagtcctagcaagctttaccatcaccactcactcccccaaaaagttttcctttggcataagtaaattatggaggctaatgactgcaatagtagtaacagagtgaagtttcaggaatataggtaaaacataagaaaatacatatttgtgtatattaaaaataccatttaactttttaattcaaaatgacttagcagaaaatcaaataaatttgtactataactggaaatatttttaaaatatttttttgtgttacttatgagagtattgttaagatttattgaagactaacagtaacattaaaaccccacccagaataaattttagattactagcctgccacagtgatctacactaaaatgtcaccaaattgtagtatcattcaaaaatggaagaaattaagtcagtgactaaaaatataacaaaaatacttattaactaactggatttttaatctgtaagaaggatgtcatgagaattttggcatatggaaacaatgtaagaataggaccttaggaaagaacgatatgaaattcatatttgatccaaaaaatggtagtagatccttttttcccaccagatgctcctaggtgtagattgcrttggtgaaggaggcactctagtctcagttgatgtcgagtgtgtaggtgtgggtgtgtaggtgtgaccagaattcctgaatatggacatgctaaataacaaattaaaatttctcgtgcagtttaaactatgtgtatggaggatttggattggatacaaaattcctcaagttggatgctcttcctctgggctgccatttgcagggaatttcatgtacatattcagacatgcagacttgcacaactgcttattatagaaatattctttgttactaagtgtctaacagacttaaacatacagggtttccgtatatggagaaaagtgattccacccactccatgccctggcacgtcatgatgccagcccttagatttatttggcttccagaatttaaatagacagtgatgtaaatcagaagttagtgtttcacctactggc

SEQ ID NO: 728012 - DNA, 623 bp, Homo sapiens
cgaccaaacttccagtgacaaacaatatttgaaattagtctattcctttaccccagaaatgcagaaatacatggttttggatgtttgacctcattggttggtgggcatgaggaggtggtctgctttggtgccaatgaccgtctgtgagtcacagagtgagtgaatgctgagccgctgtgatgggaaagctctctgctgagttggttcagtctgggtcacagagtgagtgaatgctgggccgctgtgatgggaaagctgtctgctgaattggttcagcagtgcacctgcttcctcacggggcattagccggtcrgggcgatgtctctggatcactcaacttgtccctgacagagcaaggaataagaaacccagttagattgtctgtatcatcagatgccatttacatcccagtcaaattagcagccagatcactgatttcttataggtatacatcttttgacttcagcataatctcttcccctttttctgcatccttgggttttaaaggatgtttactatgtaaatgtttaacatgtttactatttaaacttaatagttgaggtagcttttaaaatttgtgtccattaaacccaaggactcttgcagaagtcgtatggtttttc

SEQ ID NO: 728013 - DNA, 671 bp, Homo sapiens
aactatcagctgccctggactcccaaagtgctgggattacaggtgtgagccactggcccagcctattctgttaaattttgagagagcagtgtaataactccaactatgattgtacatttgacttaagcacatataccttatgtgtttctgatggattgattctttaatcataaatgtctctctatatctctggtaatactctttgtcttgaagtttattttgtctgaagttaggagtatagtccttctatctttattctgattgttttcatggcattgcttttcccatttttttactttccatatatctgtgtctttgtatttaaaatatgtctcttgtggaaagcaattagatgggtctttctttgttaatccagtgtgaaaaatctctgctttttaaattggaattattctatttacatttagagtacttattgatatgatttatttaggkcaaccattttgctatttgttttctagttgtctcatatgtgtttagtttttctgttctttttcacctgtgtccttatgtgttaatcagaatttatcctaattccctttaaatttcttttttatgattgctctagggactgcatcatgtatctttaatgtatcacttagatttaacatattatgctactttgcataaaatataggaaactcgtaacttta

SEQ ID NO: 728014 - DNA, 534 bp, Homo sapiens
ctcccatgaccagttaaaaactgcctctcgtgatttaaacaacatacttctttcattctgagatgccactcattcgtcagtttttattgttttcataggcagccatatgttatttcaagaaaatatttgataatgagtatactaagtttaatataacaattttctttgatttcatttgggtaggatatttctaatacttaaaactcaacttgattataatttttttttttttgtcacccagactggagtgtaatgacacaactgcagctcactgaagcctcaatctcccaggctcaagtggtccctccagagtagctgggactacaggcgcatcaccatgcccagctagttcttgtatttttttgtagagatggggtttcaccatgttgcccaggctrgtctcaaaatcatgggctcgagcaatctgcccatcttggcctcccaaaatgctgggattacaggagtgagccaccacacccagccaattataattcttcatactactactatgtatattctgtgaaactctcaaaa

SEQ ID NO: 728015 - DNA, 1082 bp, Homo sapiens
ttaatgactcaaaacagtaatgatttatgatttcttatgattctatagtttatatgaacagtttctctgctggttacacttggcctcacttatgtgcatttggctgagagagaggtttcaagatggcctcactcacatgcccgacagctagtgctkgctgttgactgagtgcctcagttattctccacgtgactttctgtcttccatttggctagacttacatggtagtgtcagagacagcaatggcaaaagctgtaaggccttttgagaccgtggctgcagagctcatgcagcgtgactttcaccataatctaccagtcaaagcaagatacaaggccaggccttatttacaacaagagtaaaaggcatcccttttggattagagaatattaaaaaattttttgatcattaatctagcacaaagttgtaaaatgtatgaactacttactattaatgaaaaattgtgttccttttgggggaactttcttactatttgaacttatcaaatgatataaagaaataccaaacttattggggaaataagatcatgtttttctggcaaaagctgacattttcatatgaatgtatgtacaaattccaatgcctatgaagctacgatggtaacaaacatcactgaaatgagccaagtcaagattggagtaatctggaccatatatgctctatctgaaaatggaaaagtcgatggttcttttttttttgggctgaataagtccagtgatgcctggaccactgatattttaaaacaaagattaaatattggtaagtaattttgttaaacaacatgaatctaaaagttacatggaaagacaagagacccagaatagagagcacaatactgaataagaagaacaaagtcaaaggatggacaccacctgacttcaagacttactataaagttacaacagtcaagatagtgtggtattggcaaaataatagatccatggaacagaggagagctccctaaaatagacccagacaaatacagtcaactgatctttgagcaaaatcaagtcagtggagaaaaaaatcgccttttcaacaagtggtactggaacaataga

SEQ ID NO: 728016 - DNA, 1082 bp, Homo sapiens
ttaatgactcaaaacagtaatgatttatgatttcttatgattctatagtttatatgaacagtttctctgctggttacacttggcctcacttatgtgcatttggctgagagagaggtttcaagatggcctcactcacatgcccgacagctagtgctggctgttgactgagtgcctcagttattctccacgtgactttctgtcttccatttggctagacttayatggtagtgtcagagacagcaatggcaaaagctgtaaggccttttgagaccgtggctgcagagctcatgcagcgtgactttcaccataatctaccagtcaaagcaagatacaaggccaggccttatttacaacaagagtaaaaggcatcccttttggattagagaatattaaaaaattttttgatcattaatctagcacaaagttgtaaaatgtatgaactacttactattaatgaaaaattgtgttccttttgggggaactttcttactatttgaacttatcaaatgatataaagaaataccaaacttattggggaaataagatcatgtttttctggcaaaagctgacattttcatatgaatgtatgtacaaattccaatgcctatgaagctacgatggtaacaaacatcactgaaatgagccaagtcaagattggagtaatctggaccatatatgctctatctgaaaatggaaaagtcgatggttcttttttttttgggctgaataagtccagtgatgcctggaccactgatattttaaaacaaagattaaatattggtaagtaattttgttaaacaacatgaatctaaaagttacatggaaagacaagagacccagaatagagagcacaatactgaataagaagaacaaagtcaaaggatggacaccacctgacttcaagacttactataaagttacaacagtcaagatagtgtggtattggcaaaataatagatccatggaacagaggagagctccctaaaatagacccagacaaatacagtcaactgatctttgagcaaaatcaagtcagtggagaaaaaaatcgccttttcaacaagtggtactggaacaataga

SEQ ID NO: 728017 - DNA, 1082 bp, Homo sapiens
ttaatgactcaaaacagtaatgatttatgatttcttatgattctatagtttatatgaacagtttctctgctggttacacttggcctcacttatgtgcatttggctgagagagaggtttcaagatggcctcactcacatgcccgacagctagtgctggctgttgactgagtgcctcagttattctccacgtgactttctgtcttccatttggctagacttacatggtagtgtcagagacagcaatggcaaaagctgtaaggccttttgagaccgtggctgcagagctcatgcagcgtgactttcaccataatctaccagtcaaagcaagatacaaggccaggccttatttacaacaagagtaaaaggcatcccttttggattagagaatattaaaaaattttttgatcattaatctagcacaaagttgtaaaatgtatgaactacttactattaatgaaaaattgtgttccttttgggggaactttcttactatttgaacttatcaaatgatataaagaaataccaaacttattggggaaataagatcatgtttttctggcaaaagctgacattttcatatgaatgtatgtacaaattccaatgcctatgaagctacgatggtaacaaacatcactgaaatgagccaagtcaagattggagtaatctggaccatatatgctctatctgaaaatggaaaagtcgatggttcttttttttttgggctgaataagtccagtgatgcctggaccactgatattttaaaacaaagattaaayattggtaagtaattttgttaaacaacatgaatctaaaagttacatggaaagacaagagacccagaatagagagcacaatactgaataagaagaacaaagtcaaaggatggacaccacctgacttcaagacttactataaagttacaacagtcaagatagtgtggtattggcaaaataatagatccatggaacagaggagagctccctaaaatagacccagacaaatacagtcaactgatctttgagcaaaatcaagtcagtggagaaaaaaatcgccttttcaacaagtggtactggaacaataga

SEQ ID NO: 728018 - DNA, 1082 bp, Homo sapiens
ttaatgactcaaaacagtaatgatttatgatttcttatgattctatagtttatatgaacagtttctctgctggttacacttggcctcacttatgtgcatttggctgagagagaggtttcaagatggcctcactcacatgcccgacagctagtgctggctgttgactgagtgcctcagttattctccacgtgactttctgtcttccatttggctagacttacatggtagtgtcagagacagcaatggcaaaagctgtaaggccttttgagaccgtggctgcagagctcatgcagcgtgactttcaccataatctaccagtcaaagcaagatacaaggccaggccttatttacaacaagagtaaaaggcatcccttttggattagagaatattaaaaaattttttgatcattaatctagcacaaagttgtaaaatgtatgaactacttactattaatgaaaaattgtgttccttttgggggaactttcttactatttgaacttatcaaatgatataaagaaataccaaacttattggggaaataagatcatgtttttctggcaaaagctgacattttcatatgaatgtatgtacaaattccaatgcctatgaagctacgatggtaacaaacatcactgaaatgagccaagtcaagattggagtaatctggaccatatatgctctatctgaaaatggaaaagtcgatggttcttttttttttgggctgaataagtccagtgatgcctggaccactgatattttaaaacaaagattaaatattggtaagtaattttgttaaacaacatgaatctaaaagttacatggaaagacaagagacccagaatagagagcacaatactgaataagaagaacaaagtcaaaggatggacaccacctgacttcaagacttactataaagttacaacagtcaagatagtgtggtattggcaaaataatagatcmatggaacagaggagagctccctaaaatagacccagacaaatacagtcaactgatctttgagcaaaatcaagtcagtggagaaaaaaatcgccttttcaacaagtggtactggaacaataga

SEQ ID NO: 728019 - DNA, 1082 bp, Homo sapiens
ttaatgactcaaaacagtaatgatttatgatttcttatgattctatagtttatatgaacagtttctctgctggttacacttggcctcacttatgtgcatttggctgagagagaggtttcaagatggcctcactcacatgcccgacagctagtgctggctgttgactgagtgcctcagttattctccacgtgactttctgtcttccatttggctagacttacatggtagtgtcagagacagcaatggcaaaagctgtaaggccttttgagaccgtggctgcagagctcatgcagcgtgactttcaccataatctaccagtcaaagcaagatacaaggccaggccttatttacaacaagagtaaaaggcatcccttttggattagagaatattaaaaaattttttgatcattaatctagcacaaagttgtaaaatgtatgaactacttactattaatgaaaaattgtgttccttttgggggaactttcttactatttgaacttatcaaatgatataaagaaataccaaacttattggggaaataagatcatgtttttctggcaaaagctgacattttcatatgaatgtatgtacaaattccaatgcctatgaagctacgatggtaacaaacatcactgaaatgagccaagtcaagattggagtaatctggaccatatatgctctatctgaaaatggaaaagtcgatggttcttttttttttgggctgaataagtccagtgatgcctggaccactgatattttaaaacaaagattaaatattggtaagtaattttgttaaacaacatgaatctaaaagttacatggaaagacaagagacccagaatagagagcacaatactgaataagaagaacaaagtcaaaggatggacaccacctgacttcaagacttactataaagttacaacagtcaagatagtgtggtattggcaaaataatagatccatggaacagaggagagctccctaaaatagacccagacaaatacagtcaactgatctttgagcaaaatcaagtcagtggagaaaaaartcgccttttcaacaagtggtactggaacaataga

SEQ ID NO: 728020 - DNA, 915 bp, Homo sapiens
gcattgtaaaccatggagatttattttaagccaaattttgttttcttaatttgcctaaaatagagaacatgttgtacttttgagatgtgtgagcatttcttagctgaattgaaactgatatttttgtaaaggcatcacatcaaatgagggtttttatctaaattatatgaattcaaatataaactttagaaaaaattgagttaagatagtacrtgcacgtgtgtacacatgcatgcgcacacacacacaggttattgtcatacttggctaagcctgtctcgtatgctagctgccaaataaagaacctgctaaaggagaatgcttttaacacattctcgagtttgcaagttggtttagaggtcaaattcacagatgcgcaataagtacaagattgagtgagtgcatgaatgaatgaatgaatgaatgaatggcaaatctctgcttctcttagttgccacttagcgttctctcatttcaaaaatcatcgtaatcctttatgaatcaattttcactctctgtaagtaccaatgtgaggcagtaataaattacatatataatacatatgtgtgtatacatgttaatacatacatgcacatatacaaacatcatattattggcatgacttaggactattcaacatggtaccagaatggttagaactcttgaaaggtatatcttttcctggagtcactaaattaccatgttgactgatgaagtaatttatatcttgctttagtttgagatgtagatgttaatgagaaattttgcaactttccccaacattaatttttaccatagttcataagaagtgtttgaatttatgtgtgtttatagttatataattctaaataatatttaatgtaatatacttattcaagtctatgtgaaacttatttcaggttgcctcttttatat

SEQ ID NO: 728021 - DNA, 915 bp, Homo sapiens
gcattgtaaaccatggagatttattttaagccaaattttgttttcttaatttgcctaaaatagagaacatgttgtacttttgagatgtgtgagcatttcttagctgaattgaaactgatatttttgtaaaggcatcacatcaaatgagggtttttatctaaattatatgaattcaaatataaactttagaaaaaattgagttaagatagtacatgcaygtgtgtacacatgcatgcgcacacacacacaggttattgtcatacttggctaagcctgtctcgtatgctagctgccaaataaagaacctgctaaaggagaatgcttttaacacattctcgagtttgcaagttggtttagaggtcaaattcacagatgcgcaataagtacaagattgagtgagtgcatgaatgaatgaatgaatgaatgaatggcaaatctctgcttctcttagttgccacttagcgttctctcatttcaaaaatcatcgtaatcctttatgaatcaattttcactctctgtaagtaccaatgtgaggcagtaataaattacatatataatacatatgtgtgtatacatgttaatacatacatgcacatatacaaacatcatattattggcatgacttaggactattcaacatggtaccagaatggttagaactcttgaaaggtatatcttttcctggagtcactaaattaccatgttgactgatgaagtaatttatatcttgctttagtttgagatgtagatgttaatgagaaattttgcaactttccccaacattaatttttaccatagttcataagaagtgtttgaatttatgtgtgtttatagttatataattctaaataatatttaatgtaatatacttattcaagtctatgtgaaacttatttcaggttgcctcttttatat

SEQ ID NO: 728022 - DNA, 2993 bp, Homo sapiens
tgcacccctacctgcactgactgcattacttaatgagaattcccagatcacccactcattcagtcagtcagtcagtgtggtgactaattctacgtgtcaccttgactgggccgtggggcacccagccttttggccaaacattattttggatgtgtctataagggtgtttctagataaaattaaaatttaaatcaatagactgaataaaacaatgtcttccccagtgtgggtgggctttatccaatccgttaaaggcccaaatagaacaagaagcagaataaaagaaaattcatcttctgcctgactgcttgagctgggacattagtcttctcttgcctttgaactgagacttgaactggaactttcaccatcaagtctcctggttctgaggccttcagattctaactggaactataccatcatgtctcctgggtctccagcttgccaattatagatactaggacttctaagcctccagaaccatgtgagccaattccttgtgatcaatctctttctctgtctctatttatctttctaaatagatggatagatcctatatattatataaaatatttatatatcacataaacatatattaatatataaaaataatataaatacatacttatattgtgtgtatgcatgtgtgtgtgtgtgtgtgtgtgtatgtgtcctgtttctggggaatccagagtcagtcagcatttattggacatctaatatgtgccagggatcatcctaattgcctgaggaatacagtgatgaacagtaccagtttctttcctcaaagagttcatagtctagtaggaaaggcaaatatatagcatagcgcactgtgacaaaaatgaaagatgctggtggagcaaagatagcgtaatcctcagtgatgcctattgggaaatcaataatcagaaaagagcttcagaaatggtggactatggctgggtctggaataaagaatgggagttcaccagatgcccaagatacaaaaggacattctagacagagaagcaacatgtgtaaagaaaaaacagtgaatctaaagactgcacatgtttttagagatggcaagtaagtcagtaaataatgggaagcagtgagttcgaaaacttatgttttttctccttcataagagagcctgatactgttttttttaaattgtattataagccttgtgtgttttgactacagaagtactgtgatcttcatgaggggggaatctatgactcctgtgttttggtattattccctaggtacacagtagcactcaataaatattgactaatacccaaattaattaacagatagtaacatatgtttccggtatattaacatgttatatcatgttatgtaacaacttgtgctatgttatagttaagtcctgttactgttcagaaaatgattcaatcttctggatttcagaattccaaggtaggaatacagaattcacatccagcatattttctgaaggaaacattacaaaaccctaacaaggattttcataaacaaagaaacttggcaagacatttccctattcatttcaaaggtcattgaaacaagaatttattgggttataattgtttcaaacttttaattgagcatgttacccaaaggattaaatgatcttctatctgaccgtctattaacccaagttcctatttttcttcttcccagtggcagtcattgaatacataccaggcactgtattaggtttattaatataagcttttgccttcatatggctgtaaatggccctgctgagattctctggcaatactttttactctacatttgtttcataggactaccctcttctcaatataagtgattttttttcctgccaaagacatgtgcctgagtgctatattcaaaatctttagagagagacaaaaaaaaggagaagcctaaatgaaacaagttttcaatacaaagatgcagtagagagagtagtctgcccaaagcctttattccgtattatataattcattaaagttaatttggtaatagctaagattcacatcaaatataccaaaaggagtcaattttttcctcttataattttaatatatttttcctccccataaaatccattttgtaaaataagaagccagaaatcccaacagaaataataatttagattaaagacttctggtaaatctatataattttaatttcaatttggaagtacctactgggggaaaattggagctaataaaatgcattttcatactgtgcatgcatttgcacaatgaaaatggaaaaccaaaatatttctgcttaactatgtaacttgtgtgattttcaaccttctctactgagactctgaaaaaatcaaaacttgtttaagaattaccaaatttttgataacctgacccagaataacatgatataatagccactcgaagggaaaatgacaatgtttgacgctaaagtttatagtctgaaatgtgtctcaaactcaccagaatcaaagctcaccacaaaagcctgaaatgatcttttatctcaacacattttgttctgtacttactccccagcaatgattgggctgtagaaaaatgtcagtacgttggagaatagtaaatcatccttcataaaaatctttcagttgtggggtcattctcctgggtccagttatatcacatgacacctagtctgagaagaaagatggggaaaggacacacctgggaagtcagatatatttctaccctgcttctttggggccactatctggctgcaggtatgtgtggtaggaagtaaattatcccttcagaacagctttaaacctcaagtgtcagggtacttatgcagtttttatagaatcagcaacaacattgcttccaagcttgtttatgacctttcctgatggtaatatccatgaacttaaaaagaagtattaaagcatcaagaagtatttatttaaaagatgcgtggttcaataggacatgggctttgaagctcagtgggccaagaggaacatggcaaaagaktaa

SEQ ID NO: 728023 - DNA, 610 bp, Homo sapiens
gctcaggtcatggctctcattcctgtgggggccaattatctcttctctgacaaacacagacacagtcagtccttgggaggcctctctgaaggcatgcccaaygttaatgggtcagtggaaacacctttggatatgaagacaccaaagatttcttttctggaattacatatagccccaaaccctgctggcgggctttctgtgatggataactaataaacaacttctgtacaagcaagtgcttacaaggcgattctattttctcaagctcacagtcagttaaaaacagaaaagaatagttacctgtggcatgtctagggtgcatgtgagtctagcaagtaaatcaactattttagatgaaggatgcctggttaattattaaatgatttgatacttactttcaaaatatttttttatctaagaggaaaacatggagagagggaagtccacacaatcttcatggtaggtttactcctggtaggtttactttaaggtaggtttactcttcatttagaatttttcataaacctgagaaatattaattcctctatctccatcttccccatctcgtctcacagaaatacccagccaaaccttcaaataattcctccaa

SEQ ID NO: 728024 - DNA, 618 bp, Homo sapiens
caaatcacattaaaatattttactactacaagtcagctttcttttataggtctaaagaggaaagagggaggggttgcatttacttctccatagaaagatttcagcaatctaattaaataaatattatagcagtgcatttgaatagttttcccatcagtgaggaaagaaaatgctctatttccctgaagtcagacatttatgtcacagttgaagaagggcaagtcaaccatcacagaatgaatagttttgtcaagtcgatatctgatttgatggagtcgagttttcttaatgggaactaaaactgtgaaatgcacmttaatccactctctgcacaccatctttccctttaaggttccagaagaattcctatttccgttttaaagccatctgctattgctttttgccagtgagtatgtggatagataatttctcagggtgcaattagaggaacgtgaagaaactacttcatgccataaagggagctgaaaaagctaaagcataaatggcaacatctgcatgaggtatggagccagggaggagacagaagcatgcaaatcagtcgcgcactctcaacagaattccaaggtccaaaaaacaatctgggaagatgtttacaga

SEQ ID NO: 728025 - DNA, 618 bp, Homo sapiens
caaatcacattaaaatattttactactacaagtcagctttcttttataggtctaaagaggaaagagggaggggttgcatttacttctccatagaaagatttcagcaatctaattaaataaatattatagcagtgcatttgaatagttttcccatcagtgaggaaagaaaatgctctatttccctgaagtcagacatttatgtcacagttgaagaagggcaagtcaaccatcacagaatgaatagttttgtcaagtcgatatctgatttgatggagtcgagttttcttaatgggaactaaaactgtgaaatgcacattaatccactctctgcacaccatctttccctttaaggttccagaagaattcctatttccgttttaaagccatctgctattgctttttgccagtgagtatgtggatagataatttctcagggtgcaattagaggaacgtgaagaaactacttcatgccataaagggagctgaaaaagctaaagcataaatggcaacatctgcatgaggtatggagccagggaggagacagaagcatgcaaatcagtcgygcactctcaacagaattccaaggtccaaaaaacaatctgggaagatgtttacaga

SEQ ID NO: 728026 - DNA, 796 bp, Homo sapiens
tcccttgagtgctcagctcacaatagggttttcactcctatgagastctaatgccgccactgatctgacaggagggagagctcaagccataaagctccctcgcttgccgctcacctcctgctgtgtggccccattcctaacgggccacggactggtctgcagcccaggggttggggacttgtcttacatgacagggtgagctaccctgagttaatctgagtgagcttcattctgtcgaccttcttccactccaccacagcgctacaccaacctgaacttcgcttcctgagacctaagattcagccccgtgctcagcagacatcagggatcaccgactctgtgccaggagctgttcttgatgctgggaacgcaggggtggacaaaacagagaaagccctgccctcaggtgtggtcagaagagacagggaaggatttggaagctaaagctcagatccagactgggcttgtttcaactcgttccgtgggcctgatgtagtctagagatgattcttggtgtgggctgtgggagctcctgcggtgtagtttggtgaggggccagcccgaggcaaactggggacctgtgtctccaaccttcagcacttctgcccttcagggtcatccctccaggtgccccaccctggggacttgaactctgcccttgtcccccaaaccaccttaccctaatgctgtggttctcctggtccatgcagggcgcagtgtcctgctgagtgtgcaggtgcctgtccctgccctctgcaatgtcatctccatgcagcagcagcgtttacccacggat

SEQ ID NO: 728027 - DNA, 1371 bp, Homo sapiens
tggggatggggctgtatgatttccttggtgtggattttcctataatggacaagggctgaaagatgccgaaacacccacaactcacccgtggaaggctaagcaatagtcaagggccgttacagaggcttgtggtctcagacctggaagcctctcagagcagggccccagcctggccacgccctaatcatggggtcttaagcaattcagaccatgtctctgtgcttccgatacctcctccgaactggagatggtcatcccacctcccagcacccctgtccctgttagggttgtggaggtaataagaggcataaactatataggttagagtttaatagtcacatggtaattgctggatcaataaacactattgtttataatcacttacctagcatgcacaagccattattatttaatactttacattgcaagtacttgattctggcttctctctttcttactcccaaatcagtttagtcacccagttttatcctcctggcctgtcccctttccttcacccccactaccaacagcagatccaggccaccatcaccccacctggctcacagcaggagactcttctgcagttctggtcctgttattccctcggggctccccaaagatctctagataaaatgcaaaacccgtaaccaagttggcaagcccttccccatggggaccttgtttgcccctctagtctcatcttattctaaagccccctactctcctgccccgaccctaccagcccaaatccacgctccagcccctgcgtttcttacaggtctctgaacgcttcactgtctcatgctggtgggactttgtctatgctgttccctagcagaggccaccaggagccagcactcctccatgtcaccttgctaaactcaactaagattctatttctgcagaaagatttcgtcctgcgtctccccatctcagggtctgtgttgcgttagatatcccttctgagttacccatagtatgctttccgcctggctcttggcttgacctattgtaattagttggtcttcctcaaaatgaaagaagcagatcataggcacacatggggaaaakgcacccaccaagagtcctcaaggcgacggcccagaggaaaataaccaaagcatcaagaagcacagctgagcttctcaacaatctggaggcacttatgctttcctcctggctcttgccttaacctattgtaatgagttgcctgttttcttgcctggggccagatcttgaacttgagcttgccaggtcaggggccatgtctgcctggctaattgctgaccccagggctttatctggtgctcagtttgtccagtgaatgagtgagtgagacagtgagtgagtgagcagatagtgagtctagca

SEQ ID NO: 728028 - DNA, 596 bp, Homo sapiens
ggacagtaagtgcctcaccatcctcagtatgaacagcccctggggcttggggaattatctctgagatggaaattggccaattttctgaacctatgaatgcccctacttctcctgcctgcccccgcccccattctccagcaacaaagttttcatcactgctgctgctgctgcagtaaccgggtgcacagacacacactcccctgccgcccaggccctgggaccccccatcctgggactgagtgctgatgggaggggaatgatctctgagatggaaattggccgattttctgaacctatgaatgcccccacttcccctgcccgccccccaccattctccagcaacaaagttttcatcactgctgctgctggtgcagtaaccgggtgcacagacacacactcccctgccgcccaggccytggaaccccccatcctgggactgaatgctgatgggacccaggccagcagggtcacacaatccacccatgtccaagggatttgagtcagcttcctgggaaacaaaagagacagagagagaaagaacaaccaacttccaggtggcgcccccttccctgacccatcacacgggtctcctaacc

SEQ ID NO: 728029 - DNA, 566 bp, Homo sapiens
aacatagtgaaccctcgtctctactaaaaatacaaaaaaaaattagccgggcgtggtggcaggggcctgtagtcccagctacttgggaggctgaggcaggagaatcgcttgaacctggaaggcagaggttgcagtgagccaagatcacgccactgcactccagcctgggcgacacagctaagaaagagaaaagaaaggaagggaggggaagggtggggtgggraggggggaaggaagggagggagggagggagcagttgaagttaattttaatactatgtttttactcaatacttctaagtgatgaagcatttccctagaagggtgagaagcgtgttcccgtcagcagaaacctccctcacgtgcctggcgaggcaagggagctgcagagaccccagcgagagatggtgaaggggaggggccggggggctgcaggccagagaactccagagctggatcactagcgaactaaatgcaagtcagaagaagctatcctgaggcacacaccagtgactggccttcttaaacaggaaatgtttggatcaaaaccaggaaaacacaggcaac

SEQ ID NO: 728030 - DNA, 623 bp, Homo sapiens
ggtggaccttggccagcattcagtctggtcatcgttctctccaacgtggctcatgttaccaggaagtatctgtgttggaattattcttaccatggaaagaaaactcctcagcttacctttacagcctttcaaacaaataaaacccatcttaaaaccacttgtctttttgtgttcatttttatttaatttacacctttaccttaatcttgttttcagtatctggatatggtatgaggccaagatccacgagaacaggcacaatgtggctaaagacccagtgaccatgcaggacgataaggacaattcygaccctcccagaccgggcgtcccaaagaggacacacccatctcttttctggattcatgtcctagggctgccattagaaaacaccacaaatggggtggcttgaaaccatagacatgggttctctcatagttcaacggcccgaagtctgaaatccaggtgtcgtggggccgcgctccctctgaggcctgtaggggagaatccttcttgcctcccggcttctggcatttgcagtcaatccttggcattccttagcttgcaggtcactccaatttctgccttgtcatttggaatgctctgtatgtctctgtcttcttata

SEQ ID NO: 728031 - DNA, 935 bp, Homo sapiens
agtgcatggctgtggggtggagcctgctgactaaaacgaagtgccagtaaacaatgcaaccaggccaggtgtgggggctcacgcctgtaatcccaacactttgagaggccgaggtgggtggatcgcttgagtccaggagtttgagaccagcctgggcaacacggtgaaaccccgtctctacaaaaactatgaaatttatcaggcgtggaggtgtgtgcctgtagtcccagctaccaagaggctgaggcaggaggatggcttgagcccaggaggttgaggctgcagggagccatgatcgtgccactgcactccagcctgggtgacagagtaagacctgtctcaaaaaaaaaaaaaaaaaagcaacagtgaaatgcaaagacatttttggtcaatttatttataacaaaaaatggtgtcctaaaatcaggagttgtttttgctttactccttttaaaatgtgtatacatgcaagcttacagactagggtaaggtcatctgatagccttaaatacaaataagaaagggcccccaaaatgtacttactggatggagctccccaatgatgaatgttttggacatttccctggcatctgtagagtgcccgacatcctcaaagttctcagtagcgtcacctccagcttgttcccttaaaacttcttccccaccaggatgctgttcaaaggagaggtagaayaaaaatttttttttcaggcaaatgaattaagagaaaacggccagaatttatttaaccaaacaggtgactccttcagaagacacagatgacaacaggagactaacttgtccataaatgtggattaaaacaacacaggcctttatattccatttccatcatgcaagtacaataggcctaggcagcagaatcacttgggcccaagttcaaagccaacctgggcaacattgtgagaccccataac

SEQ ID NO: 728032 - DNA, 935 bp, Homo sapiens
agtgcatggctgtggggtggagcctgctgactaaaacgaagtgccagtaaacaatgcaaccaggccaggtgtgggggctcacgcctgtaatcccaacactttgagaggccgaggtgggtggatcgcttgagtccaggagtttgagaccagcctgggcaacacggtgaaaccccgtctctacaaaaactatgaaatttatcaggcgtggaggtgtgtgcctgtagtcccagctaccaagaggctgaggcaggaggatggcttgagcccaggaggttgaggctgcagggagccatgatcgtgccactgcactccagcctgggtgacagagtaagacctgtctcaaaaaaaaaaaaaaaaaagcaacagtgaaatgcaaagacatttttggtcaatttatttataacaaaaaatggtgtcctaaaatcaggagttgtttttgctttactccttttaaaatgtgtatacatgcaagcttacagactagggtaaggtcatctgatagccttaaatacaaataagaaagggcccccaaaatgtacttactggatggagctccccaatgatgaatgttttggacatttccctggcatctgtagagtgcccgacatcctcaaagttctcagtagcgtcacctccagcttgttcccttaaaacttcttccccaccaggatgctgttcaaaggagaggtagaataaaaatttttttttcaggcaaatraattaagagaaaacggccagaatttatttaaccaaacaggtgactccttcagaagacacagatgacaacaggagactaacttgtccataaatgtggattaaaacaacacaggcctttatattccatttccatcatgcaagtacaataggcctaggcagcagaatcacttgggcccaagttcaaagccaacctgggcaacattgtgagaccccataac

SEQ ID NO: 728033 - DNA, 935 bp, Homo sapiens
agtgcatggctgtggggtggagcctgctgactaaaacgaagtgccagtaaacaatgcaaccaggccaggtgtgggggctcacgcctgtaatcccaacactttgagaggccgaggtgggtggatcgcttgagtccaggagtttgagaccagcctgggcaacacggtgaaaccccgtctctacaaaaactatgaaatttatcaggcgtggaggtgtgtgcctgtagtcccagctaccaagaggctgaggcaggaggatggcttgagcccaggaggttgaggctgcagggagccatgatcgtgccactgcactccagcctgggtgacagagtaagacctgtctcaaaaaaaaaaaaaaaaaagcaacagtgaaatgcaaagacatttttggtcaatttatttataacaaaaaatggtgtcctaaaatcaggagttgtttttgctttactccttttaaaatgtgtatacatgcaagcttacagactagggtaaggtcatctgatagccttaaatacaaataagaaagggcccccaaaatgtacttactggatggagctccccaatgatgaatgttttggacatttccctggcatctgtagagtgcccgacatcctcaaagttctcagtagcgtcacctccagcttgttcccttaaaacttcttccccaccaggatgctgttcaaaggagaggtagaataaaaatttttttttcaggcaaatgaattaagagaaaacggccagaatttatttaaccaaacaggtgactccttcagaagacacagatgacaacaggagactaacttgtcsataaatgtggattaaaacaacacaggcctttatattccatttccatcatgcaagtacaataggcctaggcagcagaatcacttgggcccaagttcaaagccaacctgggcaacattgtgagaccccataac

SEQ ID NO: 728034 - DNA, 935 bp, Homo sapiens
agtgcatggctgtggggtggagcctgctgactaaaacgaagtgccagtaaacaatgcaaccaggccaggtgtgggggctcacgcctgtaatcccaacactttgagaggccgaggtgggtggatcgcttgagtccaggagtttgagaccagcctgggcaacacggtgaaaccccgtctctacaaaaactatgaaatttatcaggcgtggaggtgtgtgcctgtagtcccagctaccaagaggctgaggcaggaggatggcttgagcccaggaggttgaggctgcagggagccatgatcgtgccactgcactccagcctgggtgacagagtaagacctgtctcaaaaaaaaaaaaaaaaaagcaacagtgaaatgcaaagacatttttggtcaatttatttataacaaaaaatggtgtcctaaaatcaggagttgtttttgctttactccttttaaaatgtgtatacatgcaagcttacagactagggtaaggtcatctgatagccttaaatacaaataagaaagggcccccaaaatgtacttactggatggagctccccaatgatgaatgttttggacatttccctggcatctgtagagtgcccgacatcctcaaagttctcagtagcgtcacctccagcttgttcccttaaaacttcttccccaccaggatgctgttcaaaggagaggtagaataaaaatttttttttcaggcaaatgaattaagagaaaacggccagaatttatttaaccaaacaggtgactccttcagaagacacagatgacaacaggagactaacttgtccataaatgtggattaaaacaacacaggcctttatattccatttccrtcatgcaagtacaataggcctaggcagcagaatcacttgggcccaagttcaaagccaacctgggcaacattgtgagaccccataac

SEQ ID NO: 728035 - DNA, 935 bp, Homo sapiens
agtgcatggctgtggggtggagcctgctgactaaaacgaagtgccagtaaacaatgcaaccaggccaggtgtgggggctcacgcctgtaatcccaacactttgagaggccgaggtgggtggatcgcttgagtccaggagtttgagaccagcctgggcaacacggtgaaaccccgtctctacaaaaactatgaaatttatcaggcgtggaggtgtgtgcctgtagtcccagctaccaagaggctgaggcaggaggatggcttgagcccaggaggttgaggctgcagggagccatgatcgtgccactgcactccagcctgggtgacagagtaagacctgtctcaaaaaaaaaaaaaaaaaagcaacagtgaaatgcaaagacatttttggtcaatttatttataacaaaaaatggtgtcctaaaatcaggagttgtttttgctttactccttttaaaatgtgtatacatgcaagcttacagactagggtaaggtcatctgatagccttaaatacaaataagaaagggcccccaaaatgtacttactggatggagctccccaatgatgaatgttttggacatttccctggcatctgtagagtgcccgacatcctcaaagttctcagtagcgtcacctccagcttgttcccttaaaacttcttccccaccaggatgctgttcaaaggagaggtagaataaaaatttttttttcaggcaaatgaattaagagaaaacggccagaatttatttaaccaaacaggtgactccttcagaagacacagatgacaacaggagactaacttgtccataaatgtggattaaaacaacacaggcctttatattccatttccatcatgcaagtacaayaggcctaggcagcagaatcacttgggcccaagttcaaagccaacctgggcaacattgtgagaccccataac

SEQ ID NO: 728036 - DNA, 935 bp, Homo sapiens
agtgcatggctgtggggtggagcctgctgactaaaacgaagtgccagtaaacaatgcaaccaggccaggtgtgggggctcacgcctgtaatcccaacactttgagaggccgaggtgggtggatcgcttgagtccaggagtttgagaccagcctgggcaacacggtgaaaccccgtctctacaaaaactatgaaatttatcaggcgtggaggtgtgtgcctgtagtcccagctaccaagaggctgaggcaggaggatggcttgagcccaggaggttgaggctgcagggagccatgatcgtgccactgcactccagcctgggtgacagagtaagacctgtctcaaaaaaaaaaaaaaaaaagcaacagtgaaatgcaaagacatttttggtcaatttatttataacaaaaaatggtgtcctaaaatcaggagttgtttttgctttactccttttaaaatgtgtatacatgcaagcttacagactagggtaaggtcatctgatagccttaaatacaaataagaaagggcccccaaaatgtacttactggatggagctccccaatgatgaatgttttggacatttccctggcatctgtagagtgcccgacatcctcaaagttctcagtagcgtcacctccagcttgttcccttaaaacttcttccccaccaggatgctgttcaaaggagaggtagaataaaaatttttttttcaggcaaatgaattaagagaaaacggccagaatttatttaaccaaacaggtgactccttcagaagacacagatgacaacaggagactaacttgtccataaatgtggattaaaacaacacaggcctttatattccatttccatcatgcaagtacaatrggcctaggcagcagaatcacttgggcccaagttcaaagccaacctgggcaacattgtgagaccccataac

SEQ ID NO: 728037 - DNA, 1992 bp, Homo sapiens
tcagaactgttagttatctatttaattttgtttcctgttgttcttttaagaacattgaatgccagaacttcagtggttggtgtagtactactcccttaactcaaaatgtagagatgctggtatctctaccttggatgctctcattttactattctggaatgccccctctctgctctttatgattcaaatccttctcactttcactacttaagtaaatgtctaccccagacaataaatatgtgtcaatcaaggatccatctcatttactgggcactacatatggggatatattaaaaggctaaaaaaaaattaggggtaaggaggccaatcagggtgcatgttttccaagaaagtctctagaagaagggtgacataaattgcaaggacgtgggttagtgtgaggttttcatgacttcatctgccacccaaattatttattttccattaatataaattttatgcttgacttaaataaaacaatttaatcagaaaaattcatatccttgaaattaatcaagtaaatagatttgtgtgtgtgtgtgtgtgtaaattttccctgaatttaagatgttagagcaagaaacaaaaccaacaaaaataaaataatattttaaaactgtagctctcacctattgcatgcttaaagctaggagtctaatatctactccaattttcttaaaaaggaatacttactatggtttgagtctgtcccctcaattttatgtgctggaaacttaatacccaatttcatatgttgattggaaggggggcctttaggtgtaattaggattagataaggtcatcaggttggggtctctataatgggataggtggctttctaaaaagagaaagagaggcctgagctgacctgcagatgcttgcccttgctccatgtaatgccctccacgatgcattaagaatgtccttgccagatgccacttccatgcttttggacttctcagcctccagaaccttgagccaacttcttttctttataaattacccagtctgtggtattcagttatagcaacagaaaatgaaataaaacaccccaacttgcaaaggagacttccatcttcccataaccagcaggattggagtagaattgaaaaaagaataactctctcattatgtgattcaatgatatttaatgccttatgcacacatcactggaatgagtctgaatcttgcacaggaagtcatgttgtattgtgttagcactacacatcttacacattgaaaatattgagttatcagaaagaagaaaaggagaaacttagattaaattaaaattaaaaagcaagagtcatggaaagtatatgactaagatgtttctggaagaccatgaagcccttttaaacaagattgttttctttcttaagcctctgttgaacaagcatctacacttaatttagatatgaccttttccctttgggagaatgcagcttgctttgtgtacaaacaatttcccacatttctttgttactcctytagcaacgattgcagaacaaataacataatacaagaataaaaaatataaattgattggagtttatgttgtgtaagtagccacactcacatgtaactacaggaaatctttggaaataatcatttagttgccactcagttatgactccattgagctttgtggggcatgatgtgagtacagatacacaggtaaaactgaatccgcaactgagttggtgtcctagtctcagacataaggccctgtagctgcacaaagagaagaattaaacaagcacttatttgaatcctgttctacaactgttctcaacctagtcacctgatgtacttgaaataagcttgtgtctcttcaacagtcttttctgccattgaataaatagtaacatcattcttgaatttctaaaatactatgaaattcattgacatgaaatattttgtaaaagattcatggtcattcaacctttgaaatttgtgatggttaattttatgtgtcaccttgagtggacc

SEQ ID NO: 728038 - DNA, 647 bp, Homo sapiens
atcatttctaatgttctctcttcagggacatagatataccattcactacttgcctgaaaagcaagattattactgtcgtatttttccatcactgagctgtgccaaggatgtttatgtctgttttgttgccttgtaaacagatgaacaagatccaaaaggagaaccatggtggctgtgctgggataaagggctggcttgctttttaaaagccatcaataagaaatatgaggatgcatgaggactggttgtaaatggaagacatctatctgagacagaagaatctgtccatgaatacagtgggctttccctaagccagcaataagaagaaatgggtgtaaggcacaggagacacatcaaarcattattttttaagaaagttgaaaaaaatcacatctttaaagaggattcccaagatagaattgttttcaaaattttctgtttggtcaatgttgcatgaatttctcatggattaattattgatttaacttgaaatattaatgagagtactcagtaggtaccatgcctttttctggaggccaaagcataatcaatcatgcttcaaacttcaagtacagaaaatggcacaaacctattgcatatacctttaagtactttgtagtttagcaagtggttttgtgtacattacc

SEQ ID NO: 728039 - DNA, 999 bp, Homo sapiens
tttttattcctttacaccttaagctgattggcttttaaattttttcactctataagccaataattaaatcttagactgaatggcaataacaataatgtttgttttaagaatattatacttacrtaaaaactcagtagatgctaatcaatgggtctattttagtctaccatgtaaataataaagaatttcaaactattttctctaagttatcttctggcaaaacagaatggctcatctgatttatatagtgtaaacaatcactgtaacaaaaacagagtttactagttcctttaattgttctattgtttggtgaaattgatttcagtaacaggactatttttttaaaaccctgggttcagctgggcttggtggttcacacctgtaatcccagcattttgggaggccgaggcaggcagatcacctgagctcaggagttcgagaccagcctgaccaacatggggaaaccccgtctctactaaaaatacaaaaaaaaaaaaaaaaaaaaaattagctgggcgtggtggtgggcacctgtaatcccagctaatctggagcctgaggcagaagaatcgcttgaacctggaggcagagtttgcagtgagccaaggttgtgccattgtgccccaacctgggttacaagagtgaaactccatctcaaaacaaaataaaaaaaccctgggttcatagaagcataatgcaatatcacagtggctggggttggaatggggaccaggttggaatggggatcgttgccaactctgcatgttccattgctgctgccaacatcatgtcttccattgtgctgctgaagttctacaaaaaacaaacaaacaaacaaacaaacaaaaaacagaagagacaaaaccctactacaccaaaatctgatcaagtcagtggaatattatccagccctaaaaatgaagaaaatcctgacacttgttcaatgtgaatgaatcctgaggacatcatgctatgtgaaataagccagtcacaaatgga

SEQ ID NO: 728040 - DNA, 999 bp, Homo sapiens
tttttattcctttacaccttaagctgattggcttttaaattttttcactctataagccaataattaaatcttagactgaatggcaataacaataatgtttgttttaagaatattatacttacataaaaactcagtagatgctaatcaatggktctattttagtctaccatgtaaataataaagaatttcaaactattttctctaagttatcttctggcaaaacagaatggctcatctgatttatatagtgtaaacaatcactgtaacaaaaacagagtttactagttcctttaattgttctattgtttggtgaaattgatttcagtaacaggactatttttttaaaaccctgggttcagctgggcttggtggttcacacctgtaatcccagcattttgggaggccgaggcaggcagatcacctgagctcaggagttcgagaccagcctgaccaacatggggaaaccccgtctctactaaaaatacaaaaaaaaaaaaaaaaaaaaaattagctgggcgtggtggtgggcacctgtaatcccagctaatctggagcctgaggcagaagaatcgcttgaacctggaggcagagtttgcagtgagccaaggttgtgccattgtgccccaacctgggttacaagagtgaaactccatctcaaaacaaaataaaaaaaccctgggttcatagaagcataatgcaatatcacagtggctggggttggaatggggaccaggttggaatggggatcgttgccaactctgcatgttccattgctgctgccaacatcatgtcttccattgtgctgctgaagttctacaaaaaacaaacaaacaaacaaacaaacaaaaaacagaagagacaaaaccctactacaccaaaatctgatcaagtcagtggaatattatccagccctaaaaatgaagaaaatcctgacacttgttcaatgtgaatgaatcctgaggacatcatgctatgtgaaataagccagtcacaaatgga

SEQ ID NO: 728041 - DNA, 999 bp, Homo sapiens
tttttattcctttacaccttaagctgattggcttttaaattttttcactctataagccaataattaaatcttagactgaatggcaataacaataatgtttgttttaagaatattatacttacataaaaactcagtagatgctaatcaatgggtctattttagtctaccatgtaaataataaagaatttcaaactattttctctaagttatcttctggcaaaacagaatggctcatctgatttatatagtgtaaacaatcactgtaacaaaaacagagtttactagttcctttaattgttctattgtttggtgaaattgatttcagtaacaggactatttttttaaaaccctgggttcagctgggcttggtggttcacacytgtaatcccagcattttgggaggccgaggcaggcagatcacctgagctcaggagttcgagaccagcctgaccaacatggggaaaccccgtctctactaaaaatacaaaaaaaaaaaaaaaaaaaaaattagctgggcgtggtggtgggcacctgtaatcccagctaatctggagcctgaggcagaagaatcgcttgaacctggaggcagagtttgcagtgagccaaggttgtgccattgtgccccaacctgggttacaagagtgaaactccatctcaaaacaaaataaaaaaaccctgggttcatagaagcataatgcaatatcacagtggctggggttggaatggggaccaggttggaatggggatcgttgccaactctgcatgttccattgctgctgccaacatcatgtcttccattgtgctgctgaagttctacaaaaaacaaacaaacaaacaaacaaacaaaaaacagaagagacaaaaccctactacaccaaaatctgatcaagtcagtggaatattatccagccctaaaaatgaagaaaatcctgacacttgttcaatgtgaatgaatcctgaggacatcatgctatgtgaaataagccagtcacaaatgga

SEQ ID NO: 728042 - DNA, 999 bp, Homo sapiens
tttttattcctttacaccttaagctgattggcttttaaattttttcactctataagccaataattaaatcttagactgaatggcaataacaataatgtttgttttaagaatattatacttacataaaaactcagtagatgctaatcaatgggtctattttagtctaccatgtaaataataaagaatttcaaactattttctctaagttatcttctggcaaaacagaatggctcatctgatttatatagtgtaaacaatcactgtaacaaaaacagagtttactagttcctttaattgttctattgtttggtgaaattgatttcagtaacaggactatttttttaaaaccctgggttcagctgggcttggtggttcacacctgtaatcccagcattttgggaggccgaggcaggcagatcacctgagctcaggagttcgagaccagcctgaccaacatggggaaaccccgtctctactaaaaatacaaaaaaaaaaaaaaaaaaaaaattagctgggcgtggtggtgggcacctgtaatcccagctaatctggagcctgaggcagaagaatcgcttgaacctggaggcagagkttgcagtgagccaaggttgtgccattgtgccccaacctgggttacaagagtgaaactccatctcaaaacaaaataaaaaaaccctgggttcatagaagcataatgcaatatcacagtggctggggttggaatggggaccaggttggaatggggatcgttgccaactctgcatgttccattgctgctgccaacatcatgtcttccattgtgctgctgaagttctacaaaaaacaaacaaacaaacaaacaaacaaaaaacagaagagacaaaaccctactacaccaaaatctgatcaagtcagtggaatattatccagccctaaaaatgaagaaaatcctgacacttgttcaatgtgaatgaatcctgaggacatcatgctatgtgaaataagccagtcacaaatgga

SEQ ID NO: 728043 - DNA, 999 bp, Homo sapiens
tttttattcctttacaccttaagctgattggcttttaaattttttcactctataagccaataattaaatcttagactgaatggcaataacaataatgtttgttttaagaatattatacttacataaaaactcagtagatgctaatcaatgggtctattttagtctaccatgtaaataataaagaatttcaaactattttctctaagttatcttctggcaaaacagaatggctcatctgatttatatagtgtaaacaatcactgtaacaaaaacagagtttactagttcctttaattgttctattgtttggtgaaattgatttcagtaacaggactatttttttaaaaccctgggttcagctgggcttggtggttcacacctgtaatcccagcattttgggaggccgaggcaggcagatcacctgagctcaggagttcgagaccagcctgaccaacatggggaaaccccgtctctactaaaaatacaaaaaaaaaaaaaaaaaaaaaattagctgggcgtggtggtgggcacctgtaatcccagctaatctggagcctgaggcagaagaatcgcttgaacctggaggcagagtttgcagtgagccaagrttgtgccattgtgccccaacctgggttacaagagtgaaactccatctcaaaacaaaataaaaaaaccctgggttcatagaagcataatgcaatatcacagtggctggggttggaatggggaccaggttggaatggggatcgttgccaactctgcatgttccattgctgctgccaacatcatgtcttccattgtgctgctgaagttctacaaaaaacaaacaaacaaacaaacaaacaaaaaacagaagagacaaaaccctactacaccaaaatctgatcaagtcagtggaatattatccagccctaaaaatgaagaaaatcctgacacttgttcaatgtgaatgaatcctgaggacatcatgctatgtgaaataagccagtcacaaatgga

SEQ ID NO: 728044 - DNA, 999 bp, Homo sapiens
tttttattcctttacaccttaagctgattggcttttaaattttttcactctataagccaataattaaatcttagactgaatggcaataacaataatgtttgttttaagaatattatacttacataaaaactcagtagatgctaatcaatgggtctattttagtctaccatgtaaataataaagaatttcaaactattttctctaagttatcttctggcaaaacagaatggctcatctgatttatatagtgtaaacaatcactgtaacaaaaacagagtttactagttcctttaattgttctattgtttggtgaaattgatttcagtaacaggactatttttttaaaaccctgggttcagctgggcttggtggttcacacctgtaatcccagcattttgggaggccgaggcaggcagatcacctgagctcaggagttcgagaccagcctgaccaacatggggaaaccccgtctctactaaaaatacaaaaaaaaaaaaaaaaaaaaaattagctgggcgtggtggtgggcacctgtaatcccagctaatctggagcctgaggcagaagaatcgcttgaacctggaggcagagtttgcagtgagccaaggttgtgccattgtrccccaacctgggttacaagagtgaaactccatctcaaaacaaaataaaaaaaccctgggttcatagaagcataatgcaatatcacagtggctggggttggaatggggaccaggttggaatggggatcgttgccaactctgcatgttccattgctgctgccaacatcatgtcttccattgtgctgctgaagttctacaaaaaacaaacaaacaaacaaacaaacaaaaaacagaagagacaaaaccctactacaccaaaatctgatcaagtcagtggaatattatccagccctaaaaatgaagaaaatcctgacacttgttcaatgtgaatgaatcctgaggacatcatgctatgtgaaataagccagtcacaaatgga

SEQ ID NO: 728045 - DNA, 1591 bp, Homo sapiens
caacacggtgaaaccccgtctctcctaaaattacaacaaattagctgggtgtggtggcatgtgcctgtaatcccagctacttgggagtctgaggcaggagaatcgcttgaactcaggaggtggaggttgcagtgagctgagattgtgccattgcactgtagcctgggtaacagagcacgactctgtctcaaaaaaaaagaatacttaattaaggtttgcaattgaaacacaaatgataagctaataaattacattgtattcaagtttttttaatttaagtttttattttgagataattgtagactcatgggcaatttttaaaaaatagtacagagagattccacatacacttacccagttttgcccaacaggagcatgttgcagaactgtagtataatatcacaaacagttgttatcattgataagccaagatacagaatatttccatcatctcaaggacccctcatgttgctttttataatgacttcaagaccctcttaaccctgacatctgccactctgttctttatttctgtaattttgctrtttcaaaacaacaagaagttgtaatttttcccttgatatacctatacaagctaagactctcaaatatcttacctttagtttgggaatatattaatttattgagccaattggttcttatgtgcatcagaatttctgaccagcagtttttttggtctttgattaataaaacaaatgtgaattaataagtccaggttgattaatacagtttttcaaattgggtagtctgataagggtggtggcagcagctgtcaacagacatgtcacaaaaaagtatagcattcaccggtatttgaaaatagcaatattcaatcaacttctctatgtagggaggtagggaacatgaagctttgttagtataggtaggaacttcaggtgcagtggctcacacctgtaatcccaccactttgggaggccaaggttggtggatctcctgaggtcaggagttccagactagcctggcgaacatagtgaaacccccatctctactgagaatacaaaaattagccacacgtggcgcatgcctgtaatcccagctacttgggaggctgaggcacaagaatcacttgaacccgggaggcagaggttgcagtgagctgagattaagccactgcactccagcctgggtgacagcgcaagactttatctccaaaaaaagaaaaagaacttttcaatttagatcatgtttatgtaaaaaattaggctgatatatggagatacctaaaatagcctaattttgcttttttaaaaagctgcatatgggaagtaaggaacccaaatcaagttagaagctctctttctctggaatccctgatgatgactgtatgtttttggcttctattttgccacctgccactctttcccttaagaagtgaacctaaaattctctgatggaggaagtttttaaaaatgccatctcagtcctatttttcctccactgtgtctgatatagtttggccgtgtccccacccagatctcatcttgaattcccatgtgttgtgggagaaacctggtgggaggtaattcattcatgggggcaagtctttccc

SEQ ID NO: 728046 - DNA, 1305 bp, Homo sapiens
taagaagacgaactgcccagagaatcaaacaaactacaatttataaagtttatgcttaagatcatacaatatgtagattacttaataattgcaaatatatagaataataaatgtttacacacatgtttacgtatatcgatgtgtgtgtgtacatgtatgtgtgtacttgtgtgtatgtgcggatttgtgtgcccatgtatggggactgagatgcccctgaaaattgtgaaccccctggactcttaggaasccctggagcctggagaaaggagctgcccttcccgagaaggaatgatgtttgcaccttgcctggagacactgtggtacctcttgctacaataaaccatgtgtcttcctcagcttcaacctccacttctcttggccactaggctgatggggatgatgttacttatccagcagaaatatggggggcctgataaagaaggaaaaggaggtgcaggagcatcccaaaggcacatgacccagccagaatatccaacttgagatggggaaggtgagtggctctggttttcggagcacctgatagaagggtcaggaggttcgggagtgtttacagatgcttgtccctgcagtcgtgagatacagaacataattctctggcaagaacccaggaggcagatttgctgctaggatggcagctcaaggttcagaaaaggcgatgctccgtgctgtgtgaaattgaaataccactgtttctgtggtcagcggtggagggttgtgggtgtgctacagtgatcatggtgtaagtggctgcattgatgtgcatgagtgattgatgtgcatgtagaaggatggaggggatgccatttcacagccaggagatgcgctggtgcaatgggcacctatctctttaagctttccagtagtggctctcctctgtcaagcagggctgccggtagcagagactgttatgggatgagatttgctagtggcagtggggaggacaggaccctggccacaggaggctgggtgggtgagcaggggcaggtcacagtgggacccagatgccttgccccgcacagagagatggagacagctgaggggcatcaaatctctaaaaaaaggtgggaaagatggatgatgggagagtgggggagtcactcccacaaaaactcaaccactattgcattgtttctgggtctgggtcagtttacagatctagactcactgactgaggtgtggccaggtccccaggcggaagggccctgcagccccatgacatgcagatatggagagggtttccagtcttccccaaagggaccttggccattccttggtgtgggg

SEQ ID NO: 728047 - DNA, 1305 bp, Homo sapiens
taagaagacgaactgcccagagaatcaaacaaactacaatttataaagtttatgcttaagatcatacaatatgtagattacttaataattgcaaatatatagaataataaatgtttacacacatgtttacgtatatcgatgtgtgtgtgtacatgtatgtgtgtacttgtgtgtatgtgcggatttgtgtgcccatgtatggggactgagatgcccctgaaaattgtgaaccccctggactcttaggaagccctggagcctggagaaaggagctgcccttcccgagaaggaatgatgtttgcaccttgcctggagacacygtggtacctcttgctacaataaaccatgtgtcttcctcagcttcaacctccacttctcttggccactaggctgatggggatgatgttacttatccagcagaaatatggggggcctgataaagaaggaaaaggaggtgcaggagcatcccaaaggcacatgacccagccagaatatccaacttgagatggggaaggtgagtggctctggttttcggagcacctgatagaagggtcaggaggttcgggagtgtttacagatgcttgtccctgcagtcgtgagatacagaacataattctctggcaagaacccaggaggcagatttgctgctaggatggcagctcaaggttcagaaaaggcgatgctccgtgctgtgtgaaattgaaataccactgtttctgtggtcagcggtggagggttgtgggtgtgctacagtgatcatggtgtaagtggctgcattgatgtgcatgagtgattgatgtgcatgtagaaggatggaggggatgccatttcacagccaggagatgcgctggtgcaatgggcacctatctctttaagctttccagtagtggctctcctctgtcaagcagggctgccggtagcagagactgttatgggatgagatttgctagtggcagtggggaggacaggaccctggccacaggaggctgggtgggtgagcaggggcaggtcacagtgggacccagatgccttgccccgcacagagagatggagacagctgaggggcatcaaatctctaaaaaaaggtgggaaagatggatgatgggagagtgggggagtcactcccacaaaaactcaaccactattgcattgtttctgggtctgggtcagtttacagatctagactcactgactgaggtgtggccaggtccccaggcggaagggccctgcagccccatgacatgcagatatggagagggtttccagtcttccccaaagggaccttggccattccttggtgtgggg

SEQ ID NO: 728048 - DNA, 1305 bp, Homo sapiens
taagaagacgaactgcccagagaatcaaacaaactacaatttataaagtttatgcttaagatcatacaatatgtagattacttaataattgcaaatatatagaataataaatgtttacacacatgtttacgtatatcgatgtgtgtgtgtacatgtatgtgtgtacttgtgtgtatgtgcggatttgtgtgcccatgtatggggactgagatgcccctgaaaattgtgaaccccctggactcttaggaagccctggagcctggagaaaggagctgcccttcccgagaaggaatgatgtttgcaccttgcctggagacactgtggtacctcttgctacaataaaccatgtgtcttcctcagcttcaacctccacttctcttggccactaggctgatggggatgatgttacttatccagcagaaatatggggggcctgataaagaaggaaaaggaggtgcaggagcatcccaaaggcacatgacccagccagaatatccaacttgagatggggaaggtgagtggctctggttttcggagcacctgatagaagggtcaggaggttcgggagtgtttacagatgcttgtccctgcagtcgtgagatacagaacataattctctggcaagaacccaggaggcagatttgctgctaggatggcagctcaaggttcagaaaaggcgatgctccgtgctgtgtgaaattgaaataccactgtttctgtggtcagcggtggagggttgtgggtgtgctacagtgatcatggtgtaagtggctgcattgatgtgcatgagtgattgatgtgcatgtagaaggatggaggggatgccatttcacagccaggagatgcgctggtgcratgggcacctatctctttaagctttccagtagtggctctcctctgtcaagcagggctgccggtagcagagactgttatgggatgagatttgctagtggcagtggggaggacaggaccctggccacaggaggctgggtgggtgagcaggggcaggtcacagtgggacccagatgccttgccccgcacagagagatggagacagctgaggggcatcaaatctctaaaaaaaggtgggaaagatggatgatgggagagtgggggagtcactcccacaaaaactcaaccactattgcattgtttctgggtctgggtcagtttacagatctagactcactgactgaggtgtggccaggtccccaggcggaagggccctgcagccccatgacatgcagatatggagagggtttccagtcttccccaaagggaccttggccattccttggtgtgggg

SEQ ID NO: 728049 - DNA, 1308 bp, Homo sapiens
caaattggcccaaaaaaaaaaaaaaaaaaagcaatggggaaaggattccctatttaataaatggtgctgggaaaactggctagccatatgcagaaaactaaaactaggccccttccttacaccttatacaaaagattttctttaataatcccctatgctattataagctctcttccctaaaatctgtgtgagattccttggatgaacatactgtaatatatagaactgatttcctacttggactatctataacttttgctatgtaaagtttgcccatatactctctcataaactgtgcataaattaatacccatttccctacactttcctaatacatggcatcatcattttaaggaactgtgccttaaacacatataacactgtmattttcaaaatacacaaatgctaaccactaacgactatgttgcaagattacagctcagattcagaatcattgattaaagacagaggatacaaaaacattttgaaaataaaaactagcccaatttcttacttccttaatatactcaaacatagttctaaaaactaaattaagaaggatcagaaaggatattttttaacagttatattgtagtttagatacagtgtatttggaagaaaaggaaatttccagaaaaatattttggtgaaatattttctatattaagatgttgacaacaatcaccatctaaaactgatttttcctctgtgtttccattagctgctgggtaaacgtctagtcactaatcttaggtaaccacgaactatatattttttttaacttcagtggataatgcattggctttttcatctttacctgctcaggagcagctcaaagttggccataggtcagtggccaatgggtgtatgggtgttacctgaacgactgaatcaacatataactgagaaaaaaagaaaataatattttgaggaccccagtatttatttttgacttttgacacacttcccaaaaactatatgtgtgtgtgtgtgtgtgtgtgtgtgtgtgtgtgtatacccacacatatgtgtgtgtgtgggtatatatattacataattcttaaaacttcctggtcattgattctttccagcaataaaattgattcctttagtttgatcttttaaaaatgtctactattctctcacagaagacaataaccaaatttgagttgtttttttttttttctaaggcggggagtggttaaaaaagggaagaacaagcaaaaagcatggatgcatcattaactgagtcaatttttgcttaacaggaaatttactatatgcttttgaaagtgctataaacactga

SEQ ID NO: 728050 - DNA, 1308 bp, Homo sapiens
caaattggcccaaaaaaaaaaaaaaaaaaagcaatggggaaaggattccctatttaataaatggtgctgggaaaactggctagccatatgcagaaaactaaaactaggccccttccttacaccttatacaaaagattttctttaataatcccctatgctattataagctctcttccctaaaatctgtgtgagattccttggatgaacatactgtaatatatagaactgatttcctacttggactatctataacttttgctatgtaaagtttgcccatatactctctcataaactgtgcataaattaatacccatttccctacactttcctaatacatggcatcatcattttaaggaactgtgccttaaacacatataacactgtcattttcaaaatacacaaatgctaaccactaacgactatgttgcaagattacagctcagattcagaatcattgattaaagacagaggatacaaaaacattttgaaaataaaaactagcccaatttcttacttccttaatatactcaaacatagttctaaaaactaaattaagaagkatcagaaaggatattttttaacagttatattgtagtttagatacagtgtatttggaagaaaaggaaatttccagaaaaatattttggtgaaatattttctatattaagatgttgacaacaatcaccatctaaaactgatttttcctctgtgtttccattagctgctgggtaaacgtctagtcactaatcttaggtaaccacgaactatatattttttttaacttcagtggataatgcattggctttttcatctttacctgctcaggagcagctcaaagttggccataggtcagtggccaatgggtgtatgggtgttacctgaacgactgaatcaacatataactgagaaaaaaagaaaataatattttgaggaccccagtatttatttttgacttttgacacacttcccaaaaactatatgtgtgtgtgtgtgtgtgtgtgtgtgtgtgtgtgtatacccacacatatgtgtgtgtgtgggtatatatattacataattcttaaaacttcctggtcattgattctttccagcaataaaattgattcctttagtttgatcttttaaaaatgtctactattctctcacagaagacaataaccaaatttgagttgtttttttttttttctaaggcggggagtggttaaaaaagggaagaacaagcaaaaagcatggatgcatcattaactgagtcaatttttgcttaacaggaaatttactatatgcttttgaaagtgctataaacactga

SEQ ID NO: 728051 - DNA, 1308 bp, Homo sapiens
caaattggcccaaaaaaaaaaaaaaaaaaagcaatggggaaaggattccctatttaataaatggtgctgggaaaactggctagccatatgcagaaaactaaaactaggccccttccttacaccttatacaaaagattttctttaataatcccctatgctattataagctctcttccctaaaatctgtgtgagattccttggatgaacatactgtaatatatagaactgatttcctacttggactatctataacttttgctatgtaaagtttgcccatatactctctcataaactgtgcataaattaatacccatttccctacactttcctaatacatggcatcatcattttaaggaactgtgccttaaacacatataacactgtcattttcaaaatacacaaatgctaaccactaacgactatgttgcaagattacagctcagattcagaatcattgattaaagacagaggatacaaaaacattttgaaaataaaaactagcccaatttcttacttccttaatatactcaaacatagttctaaaaactaaattaagaaggatcagaaaggatattttttaacagttatattgtagtttasatacagtgtatttggaagaaaaggaaatttccagaaaaatattttggtgaaatattttctatattaagatgttgacaacaatcaccatctaaaactgatttttcctctgtgtttccattagctgctgggtaaacgtctagtcactaatcttaggtaaccacgaactatatattttttttaacttcagtggataatgcattggctttttcatctttacctgctcaggagcagctcaaagttggccataggtcagtggccaatgggtgtatgggtgttacctgaacgactgaatcaacatataactgagaaaaaaagaaaataatattttgaggaccccagtatttatttttgacttttgacacacttcccaaaaactatatgtgtgtgtgtgtgtgtgtgtgtgtgtgtgtgtgtatacccacacatatgtgtgtgtgtgggtatatatattacataattcttaaaacttcctggtcattgattctttccagcaataaaattgattcctttagtttgatcttttaaaaatgtctactattctctcacagaagacaataaccaaatttgagttgtttttttttttttctaaggcggggagtggttaaaaaagggaagaacaagcaaaaagcatggatgcatcattaactgagtcaatttttgcttaacaggaaatttactatatgcttttgaaagtgctataaacactga

SEQ ID NO: 728052 - DNA, 609 bp, Homo sapiens
tctgcttgctttatttgtttttttcttttttctgttagagcacttaccttacatcctgccattgcaagatgctccaggtttattagatgtatttgctaccatattcctatcatcagccatttctctaaaagtccggagcattttccctttggttgaataatggtatcagaaattgatcagtgtttttaattttaaaaacatcacaatctttytattcaaaaatgaaccacattaattattactcaatgggagtcagcagggatgagatttaatccctcaagaagggatattttagtagaaacagcgtagtagaaaaatgtgttgtatttattgaaattaagggcctttttttattcttagacatttagctattgattttagacttacaggagtgagtcacactttatattgttcataaaatatgttaagctttctatatctcctcaataaatttgatttttgcaattcgcacaatggagaaaaccatgctgccagccgtgcagtggatgtgacatacagatggactttattattgacttcaggtttttgtaattccaccagtacatgtaaaaatagctttctccctatagtataacaacatcaagttca

SEQ ID NO: 728053 - DNA, 630 bp, Homo sapiens
tattttaaaatataaaatattaatatttaactatataccacacttttaaaaaacattcatcagttgatgaatgcttggatgttccaaccttttgtctattgtgaagaatgctgatatgaacattggcgtacaagtatctatttgagtccctcttttcaattcttttgggtatatacctgggagtagagctgcttgatcatatgacaattctatgtttaacttcttgaggaaccatcaaactgtttttccgcagtgataatggctatacctccaccagcaatgtatratttcctgagttggttttagtacttactagaccccaggcatgtgggcaggagggaaaccactggcttggttgaaggtggcacctgcaaatctagtccaaagatgccttggggaaccagctgatacttagtggctgatctcagccacaggtggacctagaggctttgggataaggagctcaaggtgattatatccccaccaggaatgtatgaggtttccaatttctccacatccttgtcaacacttcttttttttttagataatggccattgtcgtgggtatgaagtggtatctcatgtggtttcagtttgcattatctaatgactactgatgctgagctttttt

SEQ ID NO: 728054 - DNA, 2635 bp, Homo sapiens
tattttttgaatgaataagtaaatgaatgacttccccttctggaatgttttcttttctgcctatgtaaacctgttatattctttagccccctgttgaaatctcatccttctgtggaggcttcattcatctcagtttgtgtgaaggcatcatcttgcactgttcaagtggcagcaaatgctactacggtttaatttttcttgtgtgtaggatgtgtcctcccaagtggatttgaagcttcacaagggcagagacaggattccaagcctcctgtgcccttcatgtccaggggtctcaccaagcaagtgcttggtacctactggagtgattggtgaagatcgtcacatgggcaggtgtgtccatctacagctttgggtatcagtgaatgcattctcaatggatcaatatggccccctgggggcaaaaataggtttccagggctgtgatgaaaaaagtctcagcattactagtttgtggcccactaaaggccagttctacccaacaaaacttattccttagtattgcattttatgtggggtgggtgggcgtggcaatcaggaaagaaagtctaaaaagattccacagggaggagaaaatggaaaaatatgtttgagaaatcctggtttagtactatgggaagctggaacactgaaggcaaatagttatgcgagaattgcatgatgaatgtaagaaaggaatctatggataattgaatttaatgaggaaactcaaactgggctttctcccgcacctctgcaacgggtgcgtccctctgggcccgaggtctgtgctctcttgggttaggtactcactctggggaaagcggggtgggttatcattgacatctgagagggtgatgttcactgttgtggtcccagctaatcctccaagctgccctcccatgtccttggcttggataatcacttcgtagtattctttggcttctctgtccatgttcatgagcgctgtcctaattacacctggaggatagaaatgactttgtttataaaaataaaaccacaggtccagtttttaaagattggtttctaggtgtctccctggtgcaccattaatgcctagaagtgaggtgcaagtcacctgtgcttttaaatttgaggtaaaaaaatctcagcttcaaaaatgggctgtactgaaaccagtggtgaatgaaaacttttattccagcaggaagagctcagagggctggtttcttctggcaacattactgaaagtgaacaggaggtggcagcaatgtttctcttacagatctgggaaattgtggtccaaggcgatttcagacagtgctgtctcaccaaggaaaactgggggctttgggtccagaaaacaaagcctcataagtctacaaatctgtgaatttagataattctccctcagtttcttcagcccctagagcccttgtagtgtgaatggctcttctttaggtaactcattcctgctttttcttgcttccctactacctgtaagcagggttggaattctaattggattttcctgttgttacatattcattctgttttgtgacattcttctgtttacctctgtgcttttaattttgtgagctaggacatgaaagatgctctgtgagctgtttatttttaccatgcataagatatgaatttccccagagagcaagcagcagatacggtttcatttaagaagagaggcctacaccaaatccgttgaaatgtgttgtgatcctgccaagcctgtacagtaatgttttrtctcccttttaaccctgcaacttaaaaaagttgacttctctacactgtaggcaaagattaaaggcttacttactacagctttacaacatgactcttggctagatagaccttttgcatgaaaatggaagggactgggaacaataatccgtccccagtttacccctataatgtatatattgcattgtagtataacattctccagtgatatatgcagcattttcttttttaaaaggccccccatgggcacagctataactctctgttcatgtatttttgaccttaacactacagatgccccccgggagctgtcaaaataatctaagactcttcttaggatataaaggacacattaccctcttcctccctgcatttttcctccctgtgggcacccttcctctcttcattctcccccttgcccttagtagaattgttaaagttactgttttatagaagtctctaactgcaatcttttttctttcctcctcctaatttacactcccttactacttttatgatacaattttctgaatgtctggtttccctcaggacttctgggaaaaaaattcgatcaggttgctaataatagaaatgtattttttctttttcaaataaagaggtgactttgagtgttcaccattaactttattctgtggctgtaagtttctttactcaagttccttgttaattactcctaggtcccatgtttaccctcatataaaatggaagtaataatacttcctatatcttttgctagtttacaagattattgggaagctcaaatatggcaatgtttatgaaagtattaataagaggggaagcctggcacaagtataagataataatgatatcacaataactttgccaagctcaaacatattaaatgaaatctttc

SEQ ID NO: 728055 - DNA, 1258 bp, Homo sapiens
atcacagccgacaaacctgcagcctcagttcaagaccagtggacaagtcagcaagatccagatcatccaactcgactgatcttgcggaggaaccaaggcacagcagaaaaagatgactgccctgccccaaccacaccagaggctggttggtaaatgcactgatgaagcttgaggaaacgtcaagccctgctctagtcacacaacaggaagctgactagtctacgcatggctgaagcctgaggaagttggtgctagataagtaaatgtggattaaatttgcaagtgtagttatactattgcttatactgattgttttgctgtcatgctatctttgcaattgctatcaaacttgttgcccaggaggatgcctgtgcatagtgtaaacttgatcacagtagtgacaataatgctaacaggcacgggaggaaaccaagataattgtcatcattatatgatagaagcttggtttggtaaaggtataacaaaaaccctgttatatcaaacttattattagtgtacaggaatcccctggggacatgtgtttataatcaaaccagctactctgtctatgacccaagtcatgggcaacctcaagtatgttatgatctaggcctcctaccctacaacttttggtttgaaattcaaatagggaaacctttgttacccacatatgccaatcctaataacgttggaactgggaaactcataagcaaaacacgggtattaccttattcacataaagaatcagtttctatatattttgatgcctgtcaggctgcacacctcagcaacctaatccaggagaagtctgcaagaacttaggacaagaaagagtcagcagtaaggctgctaagatcataatagaagaaccagaagaagaatgtcctgattgtaactttcaayggaccacacatgaattcagccaacacctatatacagggggagtagctctgcttgccagccaaaaagcaaagattggttgtgtgactaacacatgcaacccccttaatttgaccatattaaagccaaacatacctttttggactaaaggacatcaaggagagctaagctttgatcaagaaagagcaaacctaggtgtttcattggtcattattaaaaagactcaatgagctaaagttcaagtcagtccaatgtcacagttcagatttttcagatccttcaataaacattttaaccccaaggatccaaaagttcagattccaccaatgtcagccaagaacctatttactcagctagc

SEQ ID NO: 728056 - DNA, 1258 bp, Homo sapiens
atcacagccgacaaacctgcagcctcagttcaagaccagtggacaagtcagcaagatccagatcatccaactcgactgatcttgcggaggaaccaaggcacagcagaaaaagatgactgccctgccccaaccacaccagaggctggttggtaaatgcactgatgaagcttgaggaaacgtcaagccctgctctagtcacacaacaggaagctgactagtctacgcatggctgaagcctgaggaagttggtgctagataagtaaatgtggattaaatttgcaagtgtagttatactattgcttatactgattgttttgctgtcatgctatctttgcaattgctatcaaacttgttgcccaggaggatgcctgtgcatagtgtaaacttgatcacagtagtgacaataatgctaacaggcacgggaggaaaccaagataattgtcatcattatatgatagaagcttggtttggtaaaggtataacaaaaaccctgttatatcaaacttattattagtgtacaggaatcccctggggacatgtgtttataatcaaaccagctactctgtctatgacccaagtcatgggcaacctcaagtatgttatgatctaggcctcctaccctacaacttttggtttgaaattcaaatagggaaacctttgttacccacatatgccaatcctaataacgttggaactgggaaactcataagcaaaacacgggtattaccttattcacataaagaatcagtttctatatattttgatgcctgtcaggctgcacacctcagcaacctaatccaggagaagtctgcaagaacttaggacaagaaagagtcagcagtaaggctgctaagatcataatagaagaaccagaagaagaatgtcctgattgtaactttcaacggaccacacatgaattcagccaacacctatatacagggggagtarctctgcttgccagccaaaaagcaaagattggttgtgtgactaacacatgcaacccccttaatttgaccatattaaagccaaacatacctttttggactaaaggacatcaaggagagctaagctttgatcaagaaagagcaaacctaggtgtttcattggtcattattaaaaagactcaatgagctaaagttcaagtcagtccaatgtcacagttcagatttttcagatccttcaataaacattttaaccccaaggatccaaaagttcagattccaccaatgtcagccaagaacctatttactcagctagc

SEQ ID NO: 728057 - DNA, 1111 bp, Homo sapiens
acaaccacaaaatgtattttagtattttttccccagagtagaaacaattgcatccagatttcatacatttaataaattttcatagtttatccatgtttaaattttacataaaagttaaaattgcatacttgttctgttttcttttgctctgttgcatatcctaatgacttcaccctattttttacctaacacatgaataagtaaaatataatatttctctatgtaaaaatgattaagaagacagtgagataaataaaatatggacagacctgtttgtcttttccctttcctttataataagtggctaagaaaaagaaatgtatgcagagaacaatggttgtgtgctcaccaacattctgtactaaggtgtaaatatcataacctgagatagaagatttaaaaatgttcctcctccttgaygtctcttctaagcatatataaaaatgaaattgtctaaaatgaagatagttacatatgtatagatattaactatttatgataaaacaaactttggggaaaaatgaaggatccaataataaaggacactaaatttaataatccacaaaagatagaatacaaagtagccattaacttagggaaaaaaaatgcttacaacccagttcatgatataacatagaaccaataacgttgtgttcaccttgttttttatgtaaataatgagacttgaagatactgcagtgtaggctgaatgatgtatacacacagacactgtgtcatataatgtaaaaaattaaatgcatgtttcaactgtaacatatgtgtttatgagtaaatataacaaaatattaacaattactatctcatagttgcagaattacatatgaattaaaatttccaaatcttccacaatgggaataattgactatatttcttattgaaaaagctgttatttttaaactagtaataactaaaaacaaaagaaaaataaaacaaggacaaattaaaaactccaagaaagattttagtttcaagtcattgcaaaggtgcttctgagctgagaaaccttaggtagcctgtgtatcaactctggatttctatttcttaaactaatagagaggatacctcatagatttgttgcaaggactgaaaa

SEQ ID NO: 728058 - DNA, 1048 bp, Homo sapiens
gacccacaggtaagtgggctccttaacactaacctcagaattagagacatttcccaccaacatagagtaagaaaacacaggtctccccagtgcgaccagcytcactttgtggcctgataacgctttttgtaggaaggtcatccccaaggagaaaaagggaagagaaagggagtgttgtcatatatggacagatcgtttttcttacaaacatataaatcagattgggccactggttaacactgagtgagagaaggagagaggcctggattgttccatatgaaaaaaaaaatcaagagtggaaaataattcctgccacctccatcttcaactatatattttatttttaaattggataaatggccagtgtaagatgaaaaccaagaaaaatgccagaaactgagacttagactgtatgtccattgtggtagatagaaacttgtgaacttactaagaatcaatgtatctctgttgcagtgtgatggtctttcctcatggtctcccaaatttctaagggtagttggttcccagtatgtctgccacattgtgatcacaaatatcatgatcatgaagaaatgctttgtttggaaatgcctacaaataatgatggaagggcccaattgaaagtaaatattttgctgaaattatccatttaccaattcattatcattaacaatgaactcaacataacattagtctaatgagatagctcatttttttttttaaaagttatgtgtcgaatatatcctttaaacatgtcagatatattccctttagggattcacaatgcacttcgtctctttaatgtttgactttatcacaatgtttttcatactttggtaagtaatcccatctaactgctgtttgataatttaagtttgggaaacactaatcaaaaccataatgtgagcaagttctttgtagtaatattttatgatgtttagtttactaataattatgaatagataatttatctttcaatgatgtttgcttttaaaaaagctataaattcatggcatagtaagttgaaataacattttagttgtagaaa

SEQ ID NO: 728059 - DNA, 1323 bp, Homo sapiens
gtctgaatatttttgtatccccttggtggtaaagataacccccaaggtaatgggatgagaaggtggggcctttggaaggcagtttaatcatattagtggagctctcatcaatgcagtaagtgcccttataaaggaggcctaaaagagactccttgctccttctgccatgtgatatttcagtgagaagacagctatttataaagaagtgggccttcaggaaacttggaatctatagtcccttgatcttggactttccaacctccagaactaggaaaaaaatactgtgttgtttttaagctactcagtctatggtatagcaatctgaacagactaaaacctagggtaaactagaggagaattgggactgtgggcagggctgctcatgttccaaggtgactggatctgtggctttgcccaactcaaccttccaatttcctgaaactaagggtttaatatcttgtggcacatcagtatatctcgagcaaggttccacactgtaatccatgcagcaacaatgttcaagtgatcattcataaggagtccacggtcaaatcagcatggggtaagttgggttaaacacacagacttaaacatgtttatcacaagaattgtgacattagcaacccttatttctaccacttctcttttccctatggaatccacctctctgcactttcacttttctccacatggtttgggtggaactggcctatccttggctataaaggagggcacttgacctgttctggtcagtgagagcagcttatcccccaggccatagggattggttcaggctgacagtagactagagcatggcaaatcagagtcagactcaggaacaatggaaaaatttggcaaattcttggtagtattttttgagcatgtagataaaactatgaatgaattttctaagttactcctcgtatccgagataacatacctctcattttgctgaagctagtctgaattgagtactattttcaactggagaagtcttgattgatatttacttttatttcctaagattcagctctaatagatcatgttcctgcttaaaagtctccaggactcaccattrcataggggataaagtctaagtaattataacttaatatataggttttacctataattgcagtaaatatggggcgggttctctctcactggtttattgatgacagtgttagctaagagtaaacagggtggtcagagtctgtagtctagttaagtatccttttaatacattggttgaggggtcctcaacaaacagattgctttttgctcctagagttgatcatgcttttgggtatattttttttttcc

SEQ ID NO: 728060 - DNA, 608 bp, Homo sapiens
cagggtctcactctgtcacccaggctggcgtacagtggtgtgatcatgactcactgcagcctcaacttcgtgggccaagataatcctcctgtctcagccttccgagcagctggttttgccatgttgcccgggctggtctcagattcctgggctcaagcaatcctcccgcctcggcttctcaaattcctgggattacaggtgtgacccaccacaccacgcctgtggttacatttttaaattgcttttatcttttatactaaaataattacacagtgaataatattatacctggtgatagtttcaaaacaattcaatagagggacgtagaggggacaactacaaatgcaaatggattrgccatgagtggacctttgcaggtagatggttcgaattcatgctactgttctctctctccacttttgtttatgtctcatgtttcatctaacaagaagcttttttaactctattaaaatttgctgtcataataactaaaaaagagcaaagaaaacaaattgttacaaaggtggcaagagaggtgtcaggcctctgagcccaagctaagccatcgcatcccaggtgacttgcaggtatatatgcccagatggcct

SEQ ID NO: 728061 - DNA, 2197 bp, Homo sapiens
acacttggggattgactttcataggaaaagctgatgctagaattgtctagcatgactggaaataactgatcagggcaggcctcccacatcaacatttacctcattccttctgtttagagaactgattaggggtggggtagaatattctaaagaatactctttattttaattttaatttaatttaatattattttatttgagatggagtcacactctgttacccaggctagagtgcagtggcacaatctctgctcactacagcctctgcttcccaggttcaagtgattctcttgcctcagcctcccaagtagctgggattacaggcatgcaccaccacgcctggctaatttttgtatgtttagtagaaacagtgtttcaccatgttggccaggctggtctcaaactcctgacctcaggtgatccacccacctcggccacccaragtgctgagattacaagaatactctttaggagagcaatgttcaagatgacttgggcacccaacacttaactactcctcctacaagtagacccagcacttaactattactcctagagactaggaacaagagtggggatttttgtgtaccttcatggcaaattcatgcattgtcttggtagatagactctgctggcagcatcattgaatggggacctgaagaggtcctggtgaaatgcatcattctgaatcgcactaactaaaaatgtttcttgtggtgtgaaagtaagtcaatctaaaaaaggaaccaggaaaaggaatatggtaatgttggaaatttgaattttctgtgtcttcattgagtaaacatggagtaacttttctttgttataaatgtataagcaagtgaaagattaacacctggtccgaattctttttttttttttttttttctttttgagaccaagtctcgctctgtcacccaggctggagtgcagtggcatgatctcggctcacggcaacctccgcctcctgggttcaagcaatactcttgtcttgccgtcctgattagttgggactacaggtgcccgccaccacacctggctgattttatttttggtagagacggggtttcaccatgttagccaggatggtctcaatctccagacctcgtgatctgcctgccttggcctcccaaagtgctgggattacaggtgtgagccaccgcacccagctacctggtctgaattcttatcacagacccaggaattcctgagattataaccctgactatactttcttccaacactgctctctaggaactattaagttggaagatgtatacggaatattaactggttcatgatatgcgaagcagaagatatttgattatcggaattatttattgtgaaacccctgtttgatgggacagttacactgggattaatggggttggcacatattcccagaagagttgtggacaagcatgtttgtgtgtttgtgtattgtctggatcctgtgggaccaggttcagggtcacatttgcagttctcaactgaagagaacattacagcagaacatgtcccaaaaaggaacctgagttgggtggtaggggatggcacatgatgtggctcagttcactcatggcaggagccgtgactgcccggcagtaggaatggcctttttatattaaactttgaaccccagcatgtcctaagaatgggtaagtgggaagcattgacacagttcaccctgagttactcctggggagaattttatagccaagtcagccttcagttcaaaccaaggagggggagaggggataaactggggatgagaggagaaagcagggaagtgattgccgaagagaagtagggacgactggaactctgatctggacgaggttgtgtcagagccagagaattccttgtagctttttcttccatgtttttagatgagtcgtgactgctgctgggagaaaccaccagaattatattctctcgaaggtgaaaattaattggattgaagcttatctgttagttttgcctggaaattctgcctggattatctggggcaaaagataagatgaagtgccctctagtgacccaactaagtggtggtcactggagctcatttgattgactgatagtggctctgtctaatgctttggttcttttgtgggaaatctgaagtagttgccatcatggcattcacagggtaatggcagtgcattcattgagcttgtgtgttatgtggccg

SEQ ID NO: 728062 - DNA, 635 bp, Homo sapiens
tactgtttgttttacttttatatgtagatgagtagagtacaaatgtatattcaacaggcaagaggcatagcatcaaacctgaaatcagaaggtcttgattaaagcctcccttccacttctaagatgcctggaaatatggtagatttggttaattgtccccataattatctctctttttcttcttgagttgtagccccccagctggactacattccccagccttctctaggttaggagtagccatgtggctaagtttggttaatgggttgcaaattaaaatgatgtrggcaattgtgtacaatgtccttaactataagaccctgcttcctaatctttcctcttctctctgggctggcgtgcagatgtggtggatcctgtttttgcctaatgacatgggcaaacccaagaacagcaagatagcagcctgggccctcaatttcatgacatcttttgactgtttcaggagagaaaaataaggaataattttttttgagctattgcattttcgaaatcttcttgtaaaaatagcttagcttgtgccctaaccaacacagtgaaatatgggcaagtcaccacctctcaaaacttccatttcctcacgtgtaaaataagggcgataatatcaagcctggcaa

SEQ ID NO: 728063 - DNA, 635 bp, Homo sapiens
tactgtttgttttacttttatatgtagatgagtagagtacaaatgtatattcaacaggcaagaggcatagcatcaaacctgaaatcagaaggtcttgattaaagcctcccttccacttctaagatgcctggaaatatggtagatttggttaattgtccccataattatctctctttttcttcttgagttgtagccccccagctggactacattccccagccttctctaggttaggagtagccatgtggctaagtttggttaatgggttgcaaattaaaatgatgtaggcaattgtgtacaatgtccttaactataagacsctgcttcctaatctttcctcttctctctgggctggcgtgcagatgtggtggatcctgtttttgcctaatgacatgggcaaacccaagaacagcaagatagcagcctgggccctcaatttcatgacatcttttgactgtttcaggagagaaaaataaggaataattttttttgagctattgcattttcgaaatcttcttgtaaaaatagcttagcttgtgccctaaccaacacagtgaaatatgggcaagtcaccacctctcaaaacttccatttcctcacgtgtaaaataagggcgataatatcaagcctggcaa

SEQ ID NO: 728064 - DNA, 630 bp, Homo sapiens
gattataaatcatgctgctataaagacacatgcacacgtatgtttattgcggcactattcacaatagcaaagacttggaaccaacccaaatgtctaacaacgatagactggattaagaaaatgtagcacatatacaccatggaatactatgcagccataaaaaatgaagagttcatgtcctttttagggacatggatgaaactggaaaccatcattctcgcaaactatcgcaaggactaaaaaccaaacaccgcatgttctcactcataggtgggaactgaacaatgagaacacatggacacaggaaggggaacatcacactccagggactgttgtggggtggggggagtggggagggatagcattaggggatatacctaatgctaaatgatgagttaatgggtgcagcacagcaacatggcacatgtatacatatgtaccaaacctgcacattgtgcacatgcatcctaaaacttaaagtatrataataataataaaagtagctactttctgtgttcaattgcctcaacaattgaatatttttgttgaatattaaattacaagatgcttttcttttgtgtttggaatacaatatgtctcaaatatatctcaaatgtatccaaaatacca

SEQ ID NO: 728065 - DNA, 638 bp, Homo sapiens
atcaaataattcaaataatacacttaattatttgaaactgattttctacaaaaatcactcattcatgggtatgtatacacatgcttacatacatgatgaaactaaacaaattacagtatttttgtgatgaagttgataatttattaaaaaaagcctttagcatcrcaatatagactcttagattatgtttgagaatgtgaaggatactctacatataataataataaaaatatattatattattgaacatacttctagataaattcattcttatttatcattatttttaaacattacttggaaatctgtaaatgaattagaaaattcaatagaatacctcaaacattgagcttttgaaacttataggaaataaataccaattattgaaaacaaagattgcaaacaaggagacactgaaaaatttccccttataaaagcatgagagaatttggataatttatacaaagggagctcaaactgtgtaaaagatttattctgaagtcctataattggctttgtaatatattgtcttgtgagagggtttttgttttgaaagagccctcatttttaataggacaaatttatattctgtaacagactgaaatgaaattgtgaaagccctatgagtttgcagcatc

SEQ ID NO: 728066 - DNA, 638 bp, Homo sapiens
atcaaataattcaaataatacacttaattatttgaaactgattttctacaaaaatcactcattcatgggtatgtatacacatgcttacatacatgatgaaactaaacaaattacagtatttttgtgatgaagttgataatttattaaaaaaagcctttagcatcgcaatatagactcttagattatgtttgagaatgtgaaggatactctacatataataataataaaaatatattatattattgaacatacttctagataaattcattcttatttatcattatttttaaacattacttggaaatctgtaaatgaattagaaaattcaatagaatacctcaaacattgagcttttgaaacttataggaaataaataccaattattgaaaacaaagattgcaaacaaggagacactgaaaaatttccccttataaaagcatgagagaatttggataatttatacaaagggagctcaaactgtgtaaaagatttattctgaagtcctataattggctttgtaatatattktcttgtgagagggtttttgttttgaaagagccctcatttttaataggacaaatttatattctgtaacagactgaaatgaaattgtgaaagccctatgagtttgcagcatc

SEQ ID NO: 728067 - DNA, 1826 bp, Homo sapiens
acccactgatggtaaattataccataaaattttaaattatattttacaatatagaaatgtgcataaataaaacacactgtgtaaaaaaaaataatctacacactgagagacagactcatactcaagcaattctctgctcctgctcctagtaactatcaaattcagcaactcaaccttttgttatcacaatatctttaatagaattgcttcagattaactttttttgtgtattttctttgaataatatattctagctgcctgttgggaaatatcagagactaaattaaactacacatcttctccatattcttttctccagactatatgcaaatatatttattttttattttctgcataatattacaacttttaattttgttagataagcaaattttggctcctattctcatgttctttctaccagctgccgtccattttccatcatttatgccattattttacatttaaaagtaattaatacctattttccatgttaattttaaatctttgtgctttgtgagatagtgtttgagaataaaataaaaatcatcatttaactgattaggattgtgaaaatgcaattcctttctgaagccatagagtcctgaaggttctttctactttctcattctatatattggcagttacaaaatatctcagttagttagctttatatttgtcatttcttaaatgaatttttgttttcctaagaatttttcctggcacttgctttgtttcccacrccctctttctctatctgctaaagtcaaacataaagttcttctagtgctctactactaagagtaatcctcacctttccagcattagatattgacagtgatgggcattaccagctttgatgcaaagcagctttgcctgagatggtagatgtgacactatgggacagatattgcatcctctacaagactacgggaagttttgcaataatgttaaaagactttagtagctacattcattcttctagcagacagggaggcttttggcaggaaatgatgccataactactgctttggataggggcgatatcatcaaagataacttaaaaagtaaaggaagatattgtgggttttatttgaacactgagcaaactagttcatggagtgcacgtaagttataccttggaatttcaaaaaactattaaggtattattttaagatgataagatctttgaaaaagcaggtcgtaataaacccagagaaatgtttggtgtgtgacagcctgtgtcaacataattttgcccaagtctctgaaacattagaaaaatatagaagcagtaaatatctattctaatggcttcaagacatttttccccctcttctctgcaatggcctctaattcaaattaatggacccccaatgctactgcctctgagaaaagctcattgaaacataagtaagtgtgtctcttactccatgatccaaccgaggctaatgagagaatatcatatcacacttgattaatttgaaagtgggcactggccaaattacctgagtcagagttcttgcctgaggtttttcaaatgctaccctagaagaaaagcaatttctttatggtgacgaaagttataagtcataaaaacactggcatgttcactggttatgtttcctgctatttagagaaaacagctttaaagtgaaagacagtaaagccagcatattgaaagaaaaataaattagtaccaagagagttctgattgcatttttgtccctggtccagttgttcataaatttgttccatctctgccatctgtattttggttgttacattttcattgaattctctgaagaaatgttcttcatttttct

SEQ ID NO: 728068 - DNA, 1826 bp, Homo sapiens
acccactgatggtaaattataccataaaattttaaattatattttacaatatagaaatgtgcataaataaaacacactgtgtaaaaaaaaataatctacacactgagagacagactcatactcaagcaattctctgctcctgctcctagtaactatcaaattcagcaactcaaccttttgttatcacaatatctttaatagaattgcttcagattaactttttttgtgtattttctttgaataatatattctagctgcctgttgggaaatatcagagactaaattaaactacacatcttctccatattcttttctccagactatatgcaaatatatttattttttattttctgcataatattacaacttttaattttgttagataagcaaattttggctcctattctcatgttctttctaccagctgccgtccattttccatcatttatgccattattttacatttaaaagtaattaatacctattttccatgttaattttaaatctttgtgctttgtgagatagtgtttgagaataaaataaaaatcatcatttaactgattaggattgtgaaaatgcaattcctttctgaagccatagagtcctgaaggttctttctactttctcattctatatattggcagttacaaaatatctcagttagttagctttatatttgtcatttcttaaatgaatttttgttttcctaagaatttttcctggcacttgctttgtttcccacgccctctttctctatctgctaaagtcaaacataaagttcttctagtgctctactactaagagtaatcctcacctttccagcattagatattgacagtgatgggcattaccagctttgatgcaaagcagctttgcctgagatggtagatgtgacactatgggacagatattgcatcctctacaagactacgggaagttttgcaataatgttaaaagactttagtagctacattcattcttctagcagacagggaggctttkggcaggaaatgatgccataactactgctttggataggggcgatatcatcaaagataacttaaaaagtaaaggaagatattgtgggttttatttgaacactgagcaaactagttcatggagtgcacgtaagttataccttggaatttcaaaaaactattaaggtattattttaagatgataagatctttgaaaaagcaggtcgtaataaacccagagaaatgtttggtgtgtgacagcctgtgtcaacataattttgcccaagtctctgaaacattagaaaaatatagaagcagtaaatatctattctaatggcttcaagacatttttccccctcttctctgcaatggcctctaattcaaattaatggacccccaatgctactgcctctgagaaaagctcattgaaacataagtaagtgtgtctcttactccatgatccaaccgaggctaatgagagaatatcatatcacacttgattaatttgaaagtgggcactggccaaattacctgagtcagagttcttgcctgaggtttttcaaatgctaccctagaagaaaagcaatttctttatggtgacgaaagttataagtcataaaaacactggcatgttcactggttatgtttcctgctatttagagaaaacagctttaaagtgaaagacagtaaagccagcatattgaaagaaaaataaattagtaccaagagagttctgattgcatttttgtccctggtccagttgttcataaatttgttccatctctgccatctgtattttggttgttacattttcattgaattctctgaagaaatgttcttcatttttct

SEQ ID NO: 728069 - DNA, 1826 bp, Homo sapiens
acccactgatggtaaattataccataaaattttaaattatattttacaatatagaaatgtgcataaataaaacacactgtgtaaaaaaaaataatctacacactgagagacagactcatactcaagcaattctctgctcctgctcctagtaactatcaaattcagcaactcaaccttttgttatcacaatatctttaatagaattgcttcagattaactttttttgtgtattttctttgaataatatattctagctgcctgttgggaaatatcagagactaaattaaactacacatcttctccatattcttttctccagactatatgcaaatatatttattttttattttctgcataatattacaacttttaattttgttagataagcaaattttggctcctattctcatgttctttctaccagctgccgtccattttccatcatttatgccattattttacatttaaaagtaattaatacctattttccatgttaattttaaatctttgtgctttgtgagatagtgtttgagaataaaataaaaatcatcatttaactgattaggattgtgaaaatgcaattcctttctgaagccatagagtcctgaaggttctttctactttctcattctatatattggcagttacaaaatatctcagttagttagctttatatttgtcatttcttaaatgaatttttgttttcctaagaatttttcctggcacttgctttgtttcccacgccctctttctctatctgctaaagtcaaacataaagttcttctagtgctctactactaagagtaatcctcacctttccagcattagatattgacagtgatgggcattaccagctttgatgcaaagcagctttgcctgagatggtagatgtgacactatgggacagatattgcatcctctacaagactacgggaagttttgcaataatgttaaaagactttagtagctacattcattcttctagcagacagggaggcttttggcaggaaatgatgccataactactgctttggataggggcgatatcatcaaagataacttaaaaagtaaaggaagatattgtgggttttatttgaacactgagcaaactagttcatggagtgcacgtaagttataccttsgaatttcaaaaaactattaaggtattattttaagatgataagatctttgaaaaagcaggtcgtaataaacccagagaaatgtttggtgtgtgacagcctgtgtcaacataattttgcccaagtctctgaaacattagaaaaatatagaagcagtaaatatctattctaatggcttcaagacatttttccccctcttctctgcaatggcctctaattcaaattaatggacccccaatgctactgcctctgagaaaagctcattgaaacataagtaagtgtgtctcttactccatgatccaaccgaggctaatgagagaatatcatatcacacttgattaatttgaaagtgggcactggccaaattacctgagtcagagttcttgcctgaggtttttcaaatgctaccctagaagaaaagcaatttctttatggtgacgaaagttataagtcataaaaacactggcatgttcactggttatgtttcctgctatttagagaaaacagctttaaagtgaaagacagtaaagccagcatattgaaagaaaaataaattagtaccaagagagttctgattgcatttttgtccctggtccagttgttcataaatttgttccatctctgccatctgtattttggttgttacattttcattgaattctctgaagaaatgttcttcatttttct

SEQ ID NO: 728070 - DNA, 524 bp, Homo sapiens
gagttagaggtctactgtttgctccttgagcagsctttgcttctatcaaagcatttgtcagaacagaatatctctgtaaatttgtctctcttgctggcttatgcatttttgaggtcaggaagctctattataatcagtaatagtagtagtaacaacagcaagagtagtaataatggcagtacagtagtagtaacatttatattcccagcttcttaacgtggtacatggaacctggtctgtgcctgatatttggatagatgactgaatgaatgaataaagttgtatctttggtatttggtggtacttattactccattttattattactttgctggtaattattatttccatgtaacaggggagaaaactgaagttcaaattgttggaactagttttttatagatatccaagccgaacttggaatctagacccaagctgaacactataaatcatcttttttttttttttgagacagggtctcactctggttgcccaggctggagtgcagtggtgtgatctcagct

SEQ ID NO: 728071 - DNA, 524 bp, Homo sapiens
gagttagaggtctactgtttgctccttgagcaggctttgcttctatcaaagcatttgtcagaacagaatatctctgtaaatttgtctctcttgctggcttatgcatttttgaggtmaggaagctctattataatcagtaatagtagtagtaacaacagcaagagtagtaataatggcagtacagtagtagtaacatttatattcccagcttcttaacgtggtacatggaacctggtctgtgcctgatatttggatagatgactgaatgaatgaataaagttgtatctttggtatttggtggtacttattactccattttattattactttgctggtaattattatttccatgtaacaggggagaaaactgaagttcaaattgttggaactagttttttatagatatccaagccgaacttggaatctagacccaagctgaacactataaatcatcttttttttttttttgagacagggtctcactctggttgcccaggctggagtgcagtggtgtgatctcagct

SEQ ID NO: 728072 - DNA, 612 bp, Homo sapiens
gaatcctaaytttgcaatcttccactcctcttaagaaatgttgtgtacttcatggtacatttagagatgtcatgagaaactggaacaataaattctattgagtatagacatataaagattatgttcatatatgtgttagtggtttctggaaagtagaaccagaattcactggaaggaactgcttagtgtatcagagaaatgtttgattttattttagaaaatagttttaataatatttatagagatttttttaaatttacaattgtatggacaagcaaatgtctccataccaatggacaaattccagaactttccattagtggttttaaaatcaattcagtcatgcaaaatactattataagaaaaatacaggaggggatgcaaagaagagaaaagaggaaaaaagatgaataaaatgaaaggagaatacacaatataaaacgatttcacaaataccgagggaaatcatagaaatagttcagattttaatatattgaaaatatttcttactgtagattatagtaaaaaatgtttgaaagccgtggttggttttaaaggacaacttagactagaatggagcagagtgagatgtatttcagtagagaaaaaaaa

SEQ ID NO: 728073 - DNA, 590 bp, Homo sapiens
tgaattcatctcgtgtcaaacctccaaaactgttatttttctttattttytcctgtctactctccctcccctgatttccttccttcctgttcttgcagggacattgctatcttaccactcagacaagtcaagccttacattttatgtctcacatatatattgatgatcatctcttttagtgaacatccgaagcattatcataatcttactccagattgtcaaatctcccagcactaaaagctaatggaaaactggccatttttctcattccatgtgttttttattttacttttccatcttcccttttctctgatcttgatttctcaataattagaaaccgacatcattgaactgcttcttctaaagtccttttacaactctctgccattattactgttatccttctttttacaactatcacactttgcttatgcacttctctcacattctttcctgaatatcaacatggatggttatgtttcaagtttcctacgaaattcattaagcaatttgaatggaagtgggttcattttggtaatttttaatagtattgagaacaattcctcctttacatggtagttcctcagtaa

SEQ ID NO: 728074 - DNA, 590 bp, Homo sapiens
tgaattcatctcgtgtcaaacctccaaaactgttatttttctttattttctcctgtctactctccctcccctgatttccttccttcctgttcttgcagggacattgctatcttaccactcagacaagtcaagccttacattttatgtctcacatatatattgatgatcatctcttttagtgaacatccgaagcattatcataatcttactccagattgtcaaatctcccagcactaaaagctaatggaaaactggccatttttctcattccatgtgttttttattttacttttccatcttcccttttctctgatcttgatttctcaataattagaaaccgacatcattgaactgcttcttctaaagtccttttacaactctctgccattattactgttayccttctttttacaactatcacactttgcttatgcacttctctcacattctttcctgaatatcaacatggatggttatgtttcaagtttcctacgaaattcattaagcaatttgaatggaagtgggttcattttggtaatttttaatagtattgagaacaattcctcctttacatggtagttcctcagtaa

SEQ ID NO: 728075 - DNA, 649 bp, Homo sapiens
taattagtgtgaccaccatgaggtcaccatggtgtgatgaagcacagccccattggactttttaaattcaccatttgtgtaatgatgtggaaaacatattaatgtgtaaatatttgtaaattatcagtaaacatatttcccacaagagtaattaaccgtcatgaacattaacaatgtttttactgcaagaaaagtatatttaaaaatcataggtggtcccttcatccttatacagaagcctacagagaggcagaaaagaaaacatgaggttggctttatgtgtaaatttcagatagctttaacagcwtattctctgccaatttatacttcttttgtaaaaatggatacagctcattatggatattttgaacagagtccatggctttgagatcaaactaaagtcacactgacaaaataaaataagcatgaatagtcataaggctaaaaaggtgacttcctatcaattaattgaagaagaaattccattttggtctaatttatattttggccacttttattggctacttaagtaaaataaaagacttgttttaataattgtaatgtggaggatgttttacaaacttaatttttccttgttcaaataatataagtgaatatacagtttaactccagttctaataaattctct

SEQ ID NO: 728076 - DNA, 642 bp, Homo sapiens
ccaatctattttcaaaaacataaagtgtgagttattttrgtgaagcttattgtgcaaaaatgcttagtaacatgaatacttagtagtacattctttcaaatgtattgtgctattaaatgtaacagattagaatcataatttctacataacattaaaaagcagctgttgtatttattttccgacaccaaattcttctcataaatatacaacatttatttaaaatctggtatacttactcagaaactgttcattgcaccattaattttcaaactataacctgaaggttatcagatttttcatcattactattgtgaatgttatgtttagaaaagtcgcatgtcaaaaatattttataaatgtagatggtgcccaaagattttaagaaatatattgtgaccaaaattttagcatctctgtcattacctaccatcaatttcaagtaacaattgaactaatatataaaattaaaagaaacatgttactgagatatgactacaacaaaagatttcattttagaagggaagacaagtgtaagtaactgctggacagcagactgtgttctctcctacagaaattatctttaacaggtgggaattgctcagtgatcaagcacagctcatcaaaatgttaataacatgacaa

SEQ ID NO: 728077 - DNA, 573 bp, Homo sapiens
tctgaaatagaagaaaaagcaaaagataatttttgaagagataaaactgacaaatctttagtgagactaatacgggaaaaaaacacataaatacacattgttaagaatacaggcttggtgtggttgctcacacctatactcccagcattttgggaagccaaggcgggaggatcacttgaagcatggagttccagactagcctctgaaacatagagagaccctgtctctacaataataattataaaaaattagctaggcatggtggcacatgcctatagtcccagctactcaggaggcttatatgagcccagagttcaaggctgcaactagccatgattgtggcattgcactgcagactgcgtgacagagcaagagtccatctctacaaaaaaawaataataataataacataaatgcaggaagaaagtgcagagactagaaacatgagtatcaaagttggacacataaaaatatgtatacatttaattatataaatataaaaattacaatatatatcatacaacacatctctatttgcatctctatctctatgtccttatatttatagctaaa

SEQ ID NO: 728078 - DNA, 1281 bp, Homo sapiens
aagtctgatcatcacatttaaaaaaaattcaacaaaatgttttccaattgagtacagtgacaagcttctgctaacaagagagagcaacagaggataactacctggttcaacgccacgtgctagagacagatgcactaacagtcacaagtacctcaagtttgtatctggaaagatttgttgcacctgacaaatgtttgtaaacttcttgaatgacaagcagagtctggttggggctgactgtcatgtacccaaggtagtggtaactaacagacactgcatcccacagtgtgctgtggatgatggtaaactccaaacaggtaaaagatgaaagataaattccgggggtgggtgcactcaatgacagaaggcagtcacagtcatatacctgcacaggccagctgcatgcatgctctgtgaaacctaaaagtatatatatgtgtgtgtrtatatatatatatatatgtgtgtatatatatgtatatatatgtatatatatgtgtatatatgtatatatgtgtatatatgtatatatgtatatatatatgtgtatatatatgtatatgtgtgtgtatatatatgtgtgtatatatacatatatacacatatacacacatatatatacatatatatatacacatacatatatatatatatgtatatattttctaatgtcagagaagacaagctatagggaaggagcaggggtctccttcactctgaaagtaattgctcacaagataaatatcctaaaaattaaatacatgggtaaagtagtatatggggtttcctgcaggatttatacctctgtgctatgctctaaatttatgcaaattacttctagtaaatcagatggcatctatacttatttagcagtgcccacacaaaccatacttaattgcgtaactaggattttcccactttcttcaactatttactatttcagtattataatttggtatttccacagtctctctctctctaatttgaagatccaaaagataaatatttcaagtgttatagcaattccctaatgagaaaccttagggttcacccccaagtagcaaacatgtttaatgtatatcccagtggaattttcctttgccaatgtattttgcagcttattgtcaaatgaacatatattccgaacacaacagtttctgtgacttatgattttcttatattagtgcatttaatcctggaaaaattttctataccatatgcctgacattgaagctgaaaaaaaaaatcacaaaagaaatggagttcttccaaaggttaaaa

SEQ ID NO: 728079 - DNA, 639 bp, Homo sapiens
aaagaatcagtggtttaaaagggattagtaagtatttcttaaagtgagaatgaatgtaaatctgttagagggtttatttttaaacctaaaggtctgtggtaagcatttttagtcatctattttctctgggtacatcaaagaccaatacatagcagatagtgagtggctaaagtttgaagacccaaggtctasaattaagtcagcttttgaacaaactgggtttaaattctggttttaccaagtctatgtttttagctttggttaaatttttatgtctgcctgtagtccattgctggtgcttacgtatatctagttttccctttctctggctcatgaaagcctgtaccttttcaattagttggaatctaccttttcaattagttggaatcatgtgaccatttttggccaataaaatatgagtggaagtgcactgctgccaggagaaaaggaagacagtgaaaaaagatcctgcatgacttccaggactctctttccctgccagagtaactctgaaagccacaagttctagaggttaagatgaaagcagcctcaatccctgagtaattttttgtaagggagttgctctgaatgtttctagaacagcaacacactgctaacaaatcagtcccagctcaacat

SEQ ID NO: 728080 - DNA, 537 bp, Homo sapiens
aaatcccaaattcacattgtaatattcatgaggtgttcctagtttctcaattcttcttgcattaaattataaatgctcattaaccaagggaatgagatgcaaggttttcagccttaaagtgaaaaaggtcatctaaaccactaacagctgaaaacagagactaagaagaaagatgtatttaggrgttgaataatacgtatttacagaggcctacagtgtactctgcagttgagattgctggaatctattgaaagattcagggattgagcttatttacctatgcagaaaggatactgaaaaaaggaataataagaaatatggtcggacacggtggctcacacctgtaatcccagcactttgggagtccgaggcaggtggatcatctcaagtcaagagttcgagaccagcctgtccaacatggtgaaacctcatctctactaaaaatacaaaaaaaaaaatagccaggagtggtggcaggcacctgtaatcccagctactcgggaagctgaggccggagaatcgcttgaaccagggagg

SEQ ID NO: 728081 - DNA, 833 bp, Homo sapiens
gttcaagatctagtagatacaagagaagtgggtcagtggatggaagctgttaatcaggaatcttggtatgtggtgtgtgttggtggatgccctgaactacagacacaggaagtggcaggaacaaagtgagtttcttggcagagtctggacacaggacaatcagtagaagggccgcaatagatttgacagttgctgaacgcacatttggctggctggcagctggtgggtttgttactgttctcctggcagttgtccaggacccaggttggaaactactaagtaagcagagggcacctctttagctcactcttctagagcagagaaaaacaaatcaggaaaaaagaatgtagcaataactcctcaaagagcaggagctctcatttccaaagcagcagtagctgaaacacatgagttaacaaagtgagtttcagaagatgtatagaagctttttcaaatgtgctcatcaccttctaagcaaatttcttatatatcctcactgctttctggcagttccgtatactcactcacttctgtcttcctgagattctcttacctgatgtcattcccttaatagtttgttcggatgtccatgaaamtgccctccagctttcttgtataattttactcataattttaaatgtcgcagctattaaccttcattcttttcattttgtccaggaaatgttcagaatcataactagctgagatggaattccttctttagaatatggtgcaagaaagaggggaacataagtgctcttttccacaggtggtggatacaacatgccaaagaataggttagtggcttgcaaaacaaagatgacttctcattc

SEQ ID NO: 728082 - DNA, 661 bp, Homo sapiens
gttgttaagtgacacatgactgtgtcagagtgacagtaaatacactgtttgttttaaaatgaggatcacaytcacatcccaaaaaacacaatgtatatttttgaaatattcaagctattccacaattataatacatacaaggaagaaacaaggaggtaatgggatagagattagggataatctgtataataatattataaaataaaacaggagaagatatgttaagggaaatatttttattattatattttttgtttgtttgtttggagacagagtctcactctgtcgcccaggctggagtgtagcggtgcaatctcggctcactgcaacctccgcctcccagatttaagcaatccttctgcctcagccttccaagtagctgggactacaggcatgggccatcacacccagctaatttttgtatttttagtagagacagggtttcaccatgttggccaggctggtctcgaactgctgacctcaagttgtcctctcacctcggcctcccaaagtgctgggattacaggcgtgagctaccgtgcctggctggaaaatatttttatactgagccactaaattaatcctatgtatctgaggtctaaaacacacaagccaacaaattaattcttccatttccatataccttccttcttgtatttca

SEQ ID NO: 728083 - DNA, 661 bp, Homo sapiens
gttgttaagtgacacatgactgtgtcagagtgacagtaaatacactgtttgttttaaaatgaggatcacattcacatcccaaaaaacacaatgtatatttttgaaatattcaagctattccacaattataatacatacaaggaaraaacaaggaggtaatgggatagagattagggataatctgtataataatattataaaataaaacaggagaagatatgttaagggaaatatttttattattatattttttgtttgtttgtttggagacagagtctcactctgtcgcccaggctggagtgtagcggtgcaatctcggctcactgcaacctccgcctcccagatttaagcaatccttctgcctcagccttccaagtagctgggactacaggcatgggccatcacacccagctaatttttgtatttttagtagagacagggtttcaccatgttggccaggctggtctcgaactgctgacctcaagttgtcctctcacctcggcctcccaaagtgctgggattacaggcgtgagctaccgtgcctggctggaaaatatttttatactgagccactaaattaatcctatgtatctgaggtctaaaacacacaagccaacaaattaattcttccatttccatataccttccttcttgtatttca

SEQ ID NO: 728084 - DNA, 661 bp, Homo sapiens
gttgttaagtgacacatgactgtgtcagagtgacagtaaatacactgtttgttttaaaatgaggatcacattcacatcccaaaaaacacaatgtatatttttgaaatattcaagctattccacaattataatacatacaaggaagaaacaaggaggtaatgggatagagattagggataatctgtataataatattataaaataaaacaggagaagatatgttaagggaaatatttttattattatattttttgtttgtttgtttggagacagagtctcactctgtcgcccaggctggagtgtagcggtgcaatctcggctcactgcaacctccgcctcccagatttaagcaatccttctgcctcagcctyccaagtagctgggactacaggcatgggccatcacacccagctaatttttgtatttttagtagagacagggtttcaccatgttggccaggctggtctcgaactgctgacctcaagttgtcctctcacctcggcctcccaaagtgctgggattacaggcgtgagctaccgtgcctggctggaaaatatttttatactgagccactaaattaatcctatgtatctgaggtctaaaacacacaagccaacaaattaattcttccatttccatataccttccttcttgtatttca

SEQ ID NO: 728085 - DNA, 472 bp, Homo sapiens
tgttctggggaacactgtctagggaaacgctaatagtgatcaagtaagtttaggccaatcagttttaaattaaatatatgatttttaaattctgattttcttgcgaaggtgatcacttctaatctctttccctagctttcctcttaagcaacagagatatatctgtacatctttattgaacatctgtatatctttacatccctactgtatatctatacatccrtatgtctctactgtacatccatacatctatacatctctattgtacgtctatacatctgtctctactgtacatctatacatctgcatgtctctactatatgtctgtacagctatacatgctacatctatatatctgtacatctctactgtatgtctatacatctatacatctatactgtacatctacacatctgcccattgttactgtacatctgtacatctctacttgtctgtacatctatacatctat

SEQ ID NO: 728086 - DNA, 1135 bp, Homo sapiens
gacttttgttaaggcagaaaaactgaccacttcaaccggggcaatccagatcatgtggccatttggcattcaacaatgccaccaacattgttgaactgctggctaggatctagtttttttttttttttttttttttgagacagagtctcactctgtcacccaggctggagtgcagtgacgtgatcctagctcactgcaacctccgactcctgggttcaagcaattctcctgtcagcctcccgagaagctgtgactataggcacaggccaccacacccagctaatttttgtatttttagtagagatggggtttcaccatattggtcaggctggtctcgaattcctgacctcaggtgatccacctgcctcggcctcccaaagtgctgggattgcaggcatgagccactgcacctggcccaggatccagtcttattgcaatggtttgcaccaccggcaagaattcactgtcatccccacttgcctgtatcacttggtcttaaagcaaattgcactatgattatacgaggcccaagcaacctaggatcacatgcctacgcctgactgcgagggtagctgggaaagaaaatatcttgtgttttcagcttctgtagtgggtgggtagacaagctttataaaaagrgattttctccaattactagaaggggattcagacgttaggcagtcaaaatatctccaatatatgtttcctccaccctttttgaaaaaatacagaaaaatttaaagaagaacataagaataaaatgtaatccaataactcagaaataaaaaatttattaaaatttagatgcgtttcttccacatatcctctaatgaatatttgtcttataagaacaaatatttcatgaggtcagggatgtcatctgttttatttgccactgacttcatactaataaatgcatgcctaaatgaatggttgtttcataaatcttcaactagtattgcaatcatttttcattattaataatgacctttatgcaatcagttttaatggctaggtaaggttttatccaatgaatgtaacattacatttctagtgagctgggtctggtctaagaatgacactgttgggaaatgaagtgattcttgccattccttgcctcttctgcaggcttttc

SEQ ID NO: 728087 - DNA, 673 bp, Homo sapiens
tcatgaaggcaaatttgagggaggaggtgggatgggaggaaggcctaagttaataaggaattacttgattagaatgagttggcatattacagatctataaaatcgagagggcttgtttttcatggataaaagtagattcatactaacaaatgtgtggtccaagaaagtactattaatacttcatttcgtttatttatgtattcattcacacattgatttgttcagcaaacatttctttaagacttatttcaggccccatatttggttttggtgatcaaagatatgcaaaacactatttctgccctcaaggtatttgcagtccactaggactcttcaaatgaccacaattccatgtggcaaatagctcctggtgggttctcagagagcacggagtgaaggacactccccttcttcctgagtgtagagttcaatatttcccagcctcctctgaggttacatgtggccacatgactcacttctcccagtgrcatgtagacagaagtcatgtctacctctgctgggtctaggcttaggagatgggcatacctcctgcctcttttccccttgtaactggggcagaatatagtccaacattgaccatagatgaggacaatgccattgggtctagaggatgatgcagcaaagacttgacaacctggaagaaattgagtcc

SEQ ID NO: 728088 - DNA, 607 bp, Homo sapiens
tcaagaccagcctggccaatatggtgaaacccagtctctactaaaaatacaaaaattagctaggcatgatggcgcatgcctataatcccagctactcgagtgcctgaggcaggagaattgcatgaacccgggaggaggaggaggaggttgcagtgagccgagatagcggcactgcactccagcctgggtgacaaagtgagactccatctcaaaaaaaaaaaaaaaaaaaattgtgagaaacagaaatacttaaaatgaggaataagaatggagatgttacatctggtagatgtaacattctaccagattatggatggactgatctgaaaatcracctcaactcaagggtggtcagctcaatgctacacagagcacggacttttggattctttgcagtactttgaatttatttttctacctatatatgttttatatgctgctggtgctccattaaagttttactctgtgttgcactatatgtgttcatgatactacctgtgtgtcattgttagatactgaaaaaggctctagtttgccatcttgatgtccactcattccacaagtacttcctagaccctgcctgctgttgaccaggcactgtgttagg

SEQ ID NO: 728089 - DNA, 597 bp, Homo sapiens
atccataaaaacaacctatcttcaacccattctctctaaatagaacttggtcgaattttctcctctgtcagagaagagactggctggcagagcaagggtcagtattcctggttgtaatagtgggggttctgtaatcaacttaaaagaaaaattctctgctcagatttattatagaaacacgttaattcactattttgcccttttagagagcagttttctcattattacaatttttattttttgagacagagtctcgctttgtcacccaggctggagtgcagtggcgtgatctcagctcactacaacctctgcctcctgagttcaagcggttctcctgcctcagcctcccgagtagctgggactgcaggtgtacacaaccacacccggctaatttttctctttttagtagagatggggttttgccatgttggccaggctggtctygaactcctgacctcaagcgatccgcctgcctcagcctcccaaagcttagaggtgtgagccaccacacccaaccccctaaaaactttttaaaacgtagagaaagataaagaaagtaattgtcctcttttcttccactcggaggcaattgttgta

SEQ ID NO: 728090 - DNA, 634 bp, Homo sapiens
tgaggatggccagacattgtcctccttcaggaccagcttctcagagcagagtctccaaacataatgtcgcttccagatgaygcaaatctgatatcagagaatgactaaaagcttgaaactttgcttttaatctgttgtggatcaagtttcttttcaaataaatcaaagtctgtgaacttaggaaggaggaaaattgctggatatcttttttggcggagggatggggggccctctgccaatttaaccatttcaaagtgtccaattccatggttttaagtatactctagttccagaatttgctcatcatcccaaatagaatatctatactcattagcagcctctccctggctcttcacccttctcccgttcctggctaccatgaatctgtgtctgtctgtatagatttgcctattttggatctcttctcttctgttctcttctctttttaaagatggagtgtctcactgtgtcacccaggctggagtgcagtggcgtgatctcggctcactgcaacctccacctcctgggttcaagtgattctcctgcctcagcctcctgaatagcagggattacaggtgcctgccaccatgtgcgactaatttttattttctatttttttttttttttagtagag

SEQ ID NO: 728091 - DNA, 634 bp, Homo sapiens
tgaggatggccagacattgtcctccttcaggaccagcttctcagagcagagtctccaaacataatgtcgcttccagatgacgcaaatctgatatcagagaatgactaaaagcttgmaactttgcttttaatctgttgtggatcaagtttcttttcaaataaatcaaagtctgtgaacttaggaaggaggaaaattgctggatatcttttttggcggagggatggggggccctctgccaatttaaccatttcaaagtgtccaattccatggttttaagtatactctagttccagaatttgctcatcatcccaaatagaatatctatactcattagcagcctctccctggctcttcacccttctcccgttcctggctaccatgaatctgtgtctgtctgtatagatttgcctattttggatctcttctcttctgttctcttctctttttaaagatggagtgtctcactgtgtcacccaggctggagtgcagtggcgtgatctcggctcactgcaacctccacctcctgggttcaagtgattctcctgcctcagcctcctgaatagcagggattacaggtgcctgccaccatgtgcgactaatttttattttctatttttttttttttttagtagag

SEQ ID NO: 728092 - DNA, 634 bp, Homo sapiens
tgaggatggccagacattgtcctccttcaggaccagcttctcagagcagagtctccaaacataatgtcgcttccagatgacgcaaatctgatatcagagaatgactaaaagcttgaaactttgcttttaatctgttgtggatcaagtttcttttcaaataaatcaaagtctgtgaacttaggaaggaggaaaattgctggatatcttttttggcggagggatggggggccctctgccaatttaaccatttcaaagtgtccaattccatggttttaagtatactctagttccagaatttgctcatcatcccaaatagaatatctatactcattagcagcctctccctggctcttcacccttctcccgttcctggctaccatgaatctgtgtcygtctgtatagatttgcctattttggatctcttctcttctgttctcttctctttttaaagatggagtgtctcactgtgtcacccaggctggagtgcagtggcgtgatctcggctcactgcaacctccacctcctgggttcaagtgattctcctgcctcagcctcctgaatagcagggattacaggtgcctgccaccatgtgcgactaatttttattttctatttttttttttttttagtagag

SEQ ID NO: 728093 - DNA, 634 bp, Homo sapiens
tgaggatggccagacattgtcctccttcaggaccagcttctcagagcagagtctccaaacataatgtcgcttccagatgacgcaaatctgatatcagagaatgactaaaagcttgaaactttgcttttaatctgttgtggatcaagtttcttttcaaataaatcaaagtctgtgaacttaggaaggaggaaaattgctggatatcttttttggcggagggatggggggccctctgccaatttaaccatttcaaagtgtccaattccatggttttaagtatactctagttccagaatttgctcatcatcccaaatagaatatctatactcattagcagcctctccctggctcttcacccttctcccgttcctggctaccatgaatctgtgtctgtctgtatagatttgcctattttggatctcttctcttctgttctcttctctttttaaagatggagtgtctcactstgtcacccaggctggagtgcagtggcgtgatctcggctcactgcaacctccacctcctgggttcaagtgattctcctgcctcagcctcctgaatagcagggattacaggtgcctgccaccatgtgcgactaatttttattttctatttttttttttttttagtagag

SEQ ID NO: 728094 - DNA, 1420 bp, Homo sapiens
tgcatgcacgtgggcaccaagaaacggacaagaacagttaaagcagagctgctcccaacagcctcagaatttactcagcccaattgtccttaacagtaggatggataaataaattgtggtgtatttactgaataaaatacagtagctggctcacacccagtactttgggaggccgaggcaggcggatcacctgagggcaggagtttgagaccagcctgaccaacatggagaaattccgtctctactaaaaaaatacaaaattacctggccgtggtggcacatgcctgtagtcccagctactcgggaggctgaggcaggagaatcacttgaacccaggaggcggaggttgcggtgagccaagattgcgccattgcactccagcctgggcaacaaggtagaaactccacgaaaacaaatgaaccttggctgcatggagcaacatggagaaatctccaaaaatgattttgagtgaaagaaaccaagcacaaaagaaggtgtactgaaagattccatttatatgaaattcaaaaagcaaaactaaactctaatatttaagaatacaagttgtgatggtaaaactgtcttttaaaaaatcagggaaatgacttccataaaaatcagggtagtggctactttaatcagagagggatggtatggtgattggaatacagaggaggtttctggaatgctggtaatattttatttcttgaatagggttatatggatgttcactttgggataaaccattgagcgatacatttttgttttttccctgttctatatttgttttaacacacacacacacacacacatacacacacacacacacagacatacacacacacacaaacatatgcgcacacacaattataaaaagaaaaaacagaatggttacatatactaagtacagtaaattacgaaatgctgagtatcagtctttaaacatgaagtagatttatacatagagatttggagagtttttgaagctgtaccattaccactgagaaaataaaacagtctgcagaatgatgcacacaatgcaatacatgtatatcaaaacaatgctatacatgtttacatatacagcacagtcatcatgcatagaagtacatagaattaatttcagaggcatacatccagtctaaaaacagtgattacttctagaraagggactgagtatttgctgagagggctatccgtatgactggtataactaaaaataaaaaaaacaaacaaaagaagaagaaagaaaggaggaagagaggaaagaggggagggaaggaagaagagatgagcaaacctagaattttgagccaggccccccaagatcacaatggagatggtattgagcagcttcatctagaatgttccttgaacatttctttcctacttccacttttggggttgccataaattttaa

SEQ ID NO: 728095 - DNA, 1420 bp, Homo sapiens
tgcatgcacgtgggcaccaagaaacggacaagaacagttaaagcagagctgctcccaacagcctcagaatttactcagcccaattgtccttaacagtaggatggataaataaattgtggtgtatttactgaataaaatacagtagctggctcacacccagtactttgggaggccgaggcaggcggatcacctgagggcaggagtttgagaccagcctgaccaacatggagaaattccgtctctactaaaaaaatacaaaattacctggccgtggtggcacatgcctgtagtcccagctactcgggaggctgaggcaggagaatcacttgaacccaggaggcggaggttgcggtgagccaagattgcgccattgcactccagcctgggcaacaaggtagaaactccacgaaaacaaatgaaccttggctgcatggagcaacatggagaaatctccaaaaatgattttgagtgaaagaaaccaagcacaaaagaaggtgtactgaaagattccatttatatgaaattcaaaaagcaaaactaaactctaatatttaagaatacaagttgtgatggtaaaactgtcttttaaaaaatcagggaaatgacttccataaaaatcagggtagtggctactttaatcagagagggatggtatggtgattggaatacagaggaggtttctggaatgctggtaatattttatttcttgaatagggttatatggatgttcactttgggataaaccattgagcgatacatttttgttttttccctgttctatatttgttttaacacacacacacacacacacatacacacacacacacacagacatacacacacacacaaacatatgcgcacacacaattataaaaagaaaaaacagaatggttacatatactaagtacagtaaattacgaaatgctgagtatcagtctttaaacatgaagtagatttatacatagagatttggagagtttttgaagctgtaccattaccactgagaaaataaaacagtctgcagaatgatgcacacaatgcaatacatgtatatcaaaacaatgctatacatgtttacatatacagcacagtcatcatgcatagaagtacatagaattaatttcagaggcatacatccagtctaaaaacagtgattacttctagagaagggactgagtatttgctgagagggctatccgtatgaytggtataactaaaaataaaaaaaacaaacaaaagaagaagaaagaaaggaggaagagaggaaagaggggagggaaggaagaagagatgagcaaacctagaattttgagccaggccccccaagatcacaatggagatggtattgagcagcttcatctagaatgttccttgaacatttctttcctacttccacttttggggttgccataaattttaa

SEQ ID NO: 728096 - DNA, 1420 bp, Homo sapiens
tgcatgcacgtgggcaccaagaaacggacaagaacagttaaagcagagctgctcccaacagcctcagaatttactcagcccaattgtccttaacagtaggatggataaataaattgtggtgtatttactgaataaaatacagtagctggctcacacccagtactttgggaggccgaggcaggcggatcacctgagggcaggagtttgagaccagcctgaccaacatggagaaattccgtctctactaaaaaaatacaaaattacctggccgtggtggcacatgcctgtagtcccagctactcgggaggctgaggcaggagaatcacttgaacccaggaggcggaggttgcggtgagccaagattgcgccattgcactccagcctgggcaacaaggtagaaactccacgaaaacaaatgaaccttggctgcatggagcaacatggagaaatctccaaaaatgattttgagtgaaagaaaccaagcacaaaagaaggtgtactgaaagattccatttatatgaaattcaaaaagcaaaactaaactctaatatttaagaatacaagttgtgatggtaaaactgtcttttaaaaaatcagggaaatgacttccataaaaatcagggtagtggctactttaatcagagagggatggtatggtgattggaatacagaggaggtttctggaatgctggtaatattttatttcttgaatagggttatatggatgttcactttgggataaaccattgagcgatacatttttgttttttccctgttctatatttgttttaacacacacacacacacacacatacacacacacacacacagacatacacacacacacaaacatatgcgcacacacaattataaaaagaaaaaacagaatggttacatatactaagtacagtaaattacgaaatgctgagtatcagtctttaaacatgaagtagatttatacatagagatttggagagtttttgaagctgtaccattaccactgagaaaataaaacagtctgcagaatgatgcacacaatgcaatacatgtatatcaaaacaatgctatacatgtttacatatacagcacagtcatcatgcatagaagtacatagaattaatttcagaggcatacatccagtctaaaaacagtgattacttctagagaagggactgagtatttgctgagagggctatccgtatgactggtataactaaaaataaaawaaacaaacaaaagaagaagaaagaaaggaggaagagaggaaagaggggagggaaggaagaagagatgagcaaacctagaattttgagccaggccccccaagatcacaatggagatggtattgagcagcttcatctagaatgttccttgaacatttctttcctacttccacttttggggttgccataaattttaa

SEQ ID NO: 728097 - DNA, 595 bp, Homo sapiens
agtatagactaaagaagaccctttatggattttctctgatttttccataataatttctcatttgcgctttttctatgcttgcctttacgtaggtttggaatctctgcgtcagtcatatatgtagcacttgctgaacaaaccaataactaggtatttgaggacaactgaaggggaccccgcagagcctgccaggcagtgctaacagttctaggtttctcacccaccttagaagacaaacttccttctacctcttggcttttacatatactcactttgatcattccaattccagtggatttttttttattattcaaatgactggaagaaaaaggtgttttcaatagggtaaggtattaagtgcacagtggctttgatctgttggcatttcctgartccttggattttcaactgtggcccaattcttacttccttagaaagaggatccgttagtttgctgaggctgccataacaacataccacagactagggggcttcaacaacagacattaatttcctcacagttctggagactgaaagtccaagatcaaggtgtccacgggtttgttttctcctgcggactctatccttggcttgc

SEQ ID NO: 728098 - DNA, 1669 bp, Homo sapiens
tcccttgctatttcaggcccaggtggcagaactcctctctctggggacccctccattgtgtgttttcccttccacaggattctgagttggatcctgtgtctgtctgtggccctgagagctgcaggtatcgactacaggctcagcatggtgggatgggctgtatcctcaaccctgtttcaacagggacacttctgctaggagaggagaatgggcccagatgtaaagctgcccttctccagggtttcctgaaccttctggtctctttgccttcatcttgcctcttcctgctccgttaaaaagaaaatgcttcccatttgttaattgttgagagtgtatgctgctgttttattttgcttgacatcttacaatcaatcttctgtatatgtttatatatgcttttctatttaagctttttttttttttaaatctaaaaaacacagtaccataccgccaaaggtgtcaggaaacacgctcaaataaggaagggctccaaagactgctttgccaacaaaatgccagtaaaatctgaaacccaggttcagacacactgggaacgttccaaaatttaaaacttaaagaacttctttattccagtaaatcagcttccctgtgaataccatcaaaatcctgggctttaatgagtaagggaatatcagaggaargggtggagaaggaaaggatttggacgagcacaaaatttaatttaaaaactattatgagaagtttaatttcccctcccccaaccaaacacataaatcttttccatgcattttctttgtttcggtttttcctaaaaaatctggagagggaaaggcatcttgaaccatctgaaatgacagagtcagtggagtctttaataataaatatgtgtttattggattcctatgaattaaatgacatattagctatatgggaggatccaaggaaatcgtaagcaaaattgcattctcaccgaatgtgtaatcaaccagggagaaaagacattgatgggaaggataacgagtgatatgaggccttgggcctcttaaggagtagggacaacagaggtgtcagagtccaggcggggatggctcacttcggcaggggtggtcggggcccagcacacccccaagtgcactgaaagatgcgaccatgtagggagaatgaagctggccttcacagttcataattccatccacaggcagcactgagtgcagccacatttcaacattggaactttccagggcgaagaagcactgaacacgtcgcaagagcatggacttcctaggttttcaccaggccacgcgtgagcatggggctgtgggtgtcggtgtgcctcagcactgccacgtccactctgagtgcaggtccggctcagttttggatgttcctccgagagcagtcctccagggccaccgtgggacgaggcacctctttggtaggccatttgcactccagcacggcctctgttcctaaccacaatgggctgctggttcaaggactccctgccacagccaggaggcacagaagaccccatggaggcacttggctggttaagacccgcaggggtcacctgcctaggcttagcctcaatctccttgtagataaaactggaccctaacccttcactgcccagggcccctagggaataaatgtgccatgctgcgtgggatgcccaaggagagttctg

SEQ ID NO: 728099 - DNA, 602 bp, Homo sapiens
gctctgcaggcactggtggagatttctagtgccaatagctctatgtccccttccccacctccaccagtccccattgggacctgagaccttattaggagtgactacagtgctggtcccagttgactaggaagagggctcctggtcaggctgacgttgcactcaggagtctaactgtccagtggcagaaatcgataattggttccagttcctctccccaggtgccacgatgctggcagtgcccaccactctgctggccttggactgcaggactggtccctcctgtggcttragacaagctccagctagtctgctgcagtgtgacagcctggggatggggagggagaggactccggtacacagcctgggagatggcttttccatggcaacagctcagttcctggtaggcagccctcacctgctctgatcctgccacatatgtgcagctccctgtgttccatccagagatcaacttggccaaaagaatttattttcagttttttggggaaaaccaataaaaacacctccaaatagccctgctttgccaggagtaccaaatccttgggtttgcagaaatactaacgagtgcttttatttgacctttc

SEQ ID NO: 728100 - DNA, 950 bp, Homo sapiens
caatgaaatacaaaggattctggaaatgtaagataatgtcactactctattattgaaaaggtcctggtgctgactttagttcctttattttaaaattgggttactacgtcatttacatactgcttgtgtttattatttaaaagtgtcccctcctttttctgtgtctactaaaatcacagtcatgaactgaccttctagttacattttgttgtcattgttctgttgttacagaggaaaggtgtatcattaacttgccttctagatatgaaccaagcatgcaactgtttgcctggcactgtattcaccatttctcagtattcttctactctgcctgtctgtggaattaaaggcccttccagggggcacactgggatggtggagctctgcagatttcagggttgtgggagaggttagagagctgctgggataagtattcatgaacaaaccaggtttttgcagaaacaaactcttcatactgaaaataaatgccactaggtacggaacctcacattttaatggcacaccaatattggtcttgtatatgcatatcaaataaaaatgactgagtaggtatttccatgtagtggaatactactgatactcaatactcagagaagtgcatttgcatagactttgggatgtctaatttacacaaagaagagggtaagtgtgagtttaatgtttataagataatgttgagcatttacttttagcacttctaatgagctaaacaaatctcttcattcaacaactccatttgaaagataaaaaacagcatttaccttgtacaaaagtcttggagctctgccctaaatggcaaaagtcaggcaagagaattggttgtaagttttctcctaaayatttaggctgggcatttggctctttgctgggcagaggaaggggctgaactcaggataaactcaggaagggaggagaaattaaagtaaaca

SEQ ID NO: 728101 - DNA, 507 bp, Homo sapiens
tctcatctgatctgtactttgaggaaaacactctgacttctgtgtggagaacagtctataggaagccaagaggagaggcagggagatgagggaggggtgacttcagtctccaggagaatgagctagtgatgtgaattaaggtgctggtggtggaggaagtgaggtggagaactggacactgggatctattttgaagagggagcctacagaacttgttggtggatggctatgagggaaagaggattaaagaatgatgctaggcatttgggcttaaacaaacccctgagtaaatggttatcctattattaatactaagatgggtaatgctagggaaggagtagccttggggagcagtgatgagttattttcttagasagaagccacgttacctataggaggctcaacagagtatcaaattagaataaaatatctaatgttctgatttgtgtctttattttttccattaagatacacatggctggccaggcgcggtggctcatgcctgta

SEQ ID NO: 728102 - DNA, 1279 bp, Homo sapiens
agtttctgcaggaagacctatcaggactggtgattgactggaggcagagagcacgaaaaaagaacaatcagagatgatctgtggtttgtggttgttgtgtaatgttaaggcttaacaactgcgaaaatagtgtttttactttacagagaagaagacttgaagaatacaagattggggagagcagatcgggatttgtactttatatcagacgtgctcatagatatacatgttgagatatcagttgggagctggatatatcaggattcgagactgggaatcaccagtttatagatggtttttaagccatgtgattggatctcatttcttagtggggagaagtgagataacaaataaaagccaagattaaagctgaaccttcagcctgcccatcacttagaagcccagcagggacagaagagccagccgacagcacagagtcgaggaggaggatttcygggcttcagtgagtgtgcatcagagattcatggacacaacttaaagtaagaccagccacacagttcccttcattttctcaagcaacattcagcatctcaaagtgcggctactacacacggagccaagccctggtccagttatcacaaaaccttactagatatgtcgattattagctgcattttatagctaaaggtaggcaggcacagagaagttacgtctcttgcccacagtcacagcaagcaaacagacctcagaccaaagtctttctaactccttatttcacatctaaaacactatgtgacgccacctccaaaaaatgtgggggttactctaggacaaaagaagctcatgaaagcaaagagagaagcatagagcttaaatttagaacaatattcagggtgattgggaaaaatagcctccatacaaatataatcggttcatcaccaggtgaataaaatgagagaggaacctggtacaagtgaagttcattgaatttgcttgcaaaaaaacataattcaagtgtggaagtttggaaactaaaatagtaatcagctaaagaaattttcaggccaacttagacacaatggtgacaaagctcccctgaggagacaggaactatactacttgcaactctaactgaatggacttaacttagcaattaagatcaccgtaagtttgatcagataagtattaaagggtgtcttgggtacatttgcagattcagacactcttagttgtgaaattcttcaccaaaaatttgcaacttatggcttgcacattaaaaacatgatatgaatgaaattcagatatctcttggtaaatt

SEQ ID NO: 728103 - DNA, 619 bp, Homo sapiens
agtgatacatttggtatcttgacgtggggcagataaacagaccaacacaatgatacaccagcattgtatagaatctaatacacacacaaacacacacacagggtataaatgaaatctgaataagaccagtggattatatcaaagtcaaatctaactgtgatctagtacaatagtttttcaaactgttaccgctgggggaaaccagacaaagtataagagatctctctgaatgattttcgataactgtatgtgaatctactatctcagtaaaagttggttttatgtgatctgctatctcaataaaagtttccattaaaaaatcatggttttgggaggccaaggtggacggatcacctgaggtcagaagttcgagaccaggctagscaacatggtgagacccagtctctcctgaaaatacacaaatcagccggtgtggtggcacgcacttgtaatcctagctactcgggaggctgaggcaggagaatcgcttgaagctgggaggtggaggttgcagtgagccagcattgtgccactgcactccagcttgggcaatggagtgagactgtctcagaaaaaaaaaaaaaaaaaaaagcatggttaacatgtaaagaataatacc

SEQ ID NO: 728104 - DNA, 600 bp, Homo sapiens
gcaggcggatcacttgaggtcaggagttcgagaccagcccggccaacatggtgaaaccccgtctcaactaaaaatacaaaaattagctgggcatggtggtacatgcctgtcaacccagttacttgggaggctgaggcaagagaatcgcttgaaccccgtggcagaggtttcagtgagccgaggtcacgccattgcacttcagcctgagcaacagagcaagattccatcttaaaaaaaaaaaaaaaaaaagcagaaatttgccacattcttataagacgctatatttaaatgttttgtgaaaggtagagctattttttattattaattaaactctataactttcactgttgggtatattaaagaagaaattagcagggtaaatctccaatgtaatgtgggattcatgatgaatacatgctgaacttgcattattttgrtaaatgttctgccgactaagcctattttgtattactcccttttcacttagggccctcctgacactgtggcctgggtgaccctttgctgggggctgttctgtgccctgcagggtattcagcaccgtccccggcctccacccaggaagatgccagcagcacctcc

SEQ ID NO: 728105 - DNA, 627 bp, Homo sapiens
gcgtcacctcctgggaccttcccttcatgtatggtcccagcggcatgcgggcctggtggaggaggtcctgrcctgccgcccagggatggccggtccaggcgcagggccgattgtccacttctggcccctgaggtaccgggagggctggtgagcagcatgtctcgctctgagaccggccaggctgctggggcaggcatctgatgtacagtagttcccacacgtggcaatgtcaccagcaagagccacgtatgataaattcaggccgtccaccgtggcaacactgggaaggctgattctgtaggaaaggattggccttgggccatcactgttcaaagaagaagaaatccctggatcactgtctgatccaactccagacagacactccacacaggattcctcctggggatcacggctcttctcttggcggagaagaaggagggagaatgagcccatgtcgggggcctctaggcagcccgccacagccctacaactcaaagaaaactcaccagtccctggtcactcggatgtccttggaggcgcttggatttactgcagggaccccaagagtcggccacggcagagccccgtctgccagcccaccgaggactcggggaggggagggagcac

SEQ ID NO: 728106 - DNA, 627 bp, Homo sapiens
gcgtcacctcctgggaccttcccttcatgtatggtcccagcggcatgcgggcctggtggaggaggtcctggcctgccgcccagggatggccggtccaggcgcagggcygattgtccacttctggcccctgaggtaccgggagggctggtgagcagcatgtctcgctctgagaccggccaggctgctggggcaggcatctgatgtacagtagttcccacacgtggcaatgtcaccagcaagagccacgtatgataaattcaggccgtccaccgtggcaacactgggaaggctgattctgtaggaaaggattggccttgggccatcactgttcaaagaagaagaaatccctggatcactgtctgatccaactccagacagacactccacacaggattcctcctggggatcacggctcttctcttggcggagaagaaggagggagaatgagcccatgtcgggggcctctaggcagcccgccacagccctacaactcaaagaaaactcaccagtccctggtcactcggatgtccttggaggcgcttggatttactgcagggaccccaagagtcggccacggcagagccccgtctgccagcccaccgaggactcggggaggggagggagcac

SEQ ID NO: 728107 - DNA, 627 bp, Homo sapiens
gcgtcacctcctgggaccttcccttcatgtatggtcccagcggcatgcgggcctggtggaggaggtcctggcctgccgcccagggatggccggtccaggcgcagggccgattgtccacttctggcccctgaggtaccgggagggctggtgagcagcrtgtctcgctctgagaccggccaggctgctggggcaggcatctgatgtacagtagttcccacacgtggcaatgtcaccagcaagagccacgtatgataaattcaggccgtccaccgtggcaacactgggaaggctgattctgtaggaaaggattggccttgggccatcactgttcaaagaagaagaaatccctggatcactgtctgatccaactccagacagacactccacacaggattcctcctggggatcacggctcttctcttggcggagaagaaggagggagaatgagcccatgtcgggggcctctaggcagcccgccacagccctacaactcaaagaaaactcaccagtccctggtcactcggatgtccttggaggcgcttggatttactgcagggaccccaagagtcggccacggcagagccccgtctgccagcccaccgaggactcggggaggggagggagcac

SEQ ID NO: 728108 - DNA, 627 bp, Homo sapiens
gcgtcacctcctgggaccttcccttcatgtatggtcccagcggcatgcgggcctggtggaggaggtcctggcctgccgcccagggatggccggtccaggcgcagggccgattgtccacttctggcccctgaggtaccgggagggctggtgagcagcatgtctcgctctgagaccggccaggctgctggggcaggcatctgatgtacagtagttcccacacgtggcaatgtcaccagcaagagccacgtatgataaattcaggccgtccaccgtggcaacactgggaaggctgattctgtaggaaaggattggccttgggccatcactgttcaaagaagaagaaatccctggatcactgtctgatccaactccagacagacactccacacaggattcctcctggggatcacggctcttctcttggcggagaagaaggagggagaatgagcccatgtcgggggcctctaggcagcccgccacrgccctacaactcaaagaaaactcaccagtccctggtcactcggatgtccttggaggcgcttggatttactgcagggaccccaagagtcggccacggcagagccccgtctgccagcccaccgaggactcggggaggggagggagcac

SEQ ID NO: 728109 - DNA, 620 bp, Homo sapiens
tcccaccttggcctcccaaagtgttgggattacaggcgtgagccaccatgcccagccaatctctgtaggttctataatctctattttacagatggaaaaactgaggatcaaagaggtcaaataaaaaaacattaaacacacatggattaagcactagggttgggatttgaacccaggtcaagaataatctctacgagggcagggtttttttttaattttatttatttttttgatatggagtctcgctctgtcacccaggctggagtgcagtggcayggtgtcagctcactgccagctccgcctcccgggttcaggccattctcctgtcccagcctcccgagtagctgggactacaggcacctgccaccacgcccggctaattttttgtatttttagtagagacgaggtttcaccgtgttagcctggatggtctcgatctcttgacctcgtgatccgcccacctcggccttccaaagtgctgggattacaggtgtgagccaccgcacccggccgagggcagggtttttaatctgttttgttcaccgatgtactcctgcctgacgcggtttctggggcataaaaactgttcaataagtatttgtagaataagttttatttca

SEQ ID NO: 728110 - DNA, 620 bp, Homo sapiens
tcccaccttggcctcccaaagtgttgggattacaggcgtgagccaccatgcccagccaatctctgtaggttctataatctctattttacagatggaaaaactgaggatcaaagaggtcaaataaaaaaacattaaacacacatggattaagcactagggttgggatttgaacccaggtcaagaataatctctacgagggcagggtttttttttaattttatttatttttttgatatggagtctcgctctgtcacccaggctggagtgcagtggcatggtgtcagctcactgccagctccgcctcccgggttcaggccattctcctgtcccagcctcccgagtagctgggactacaggcacctgccaccacgcccggctaattttttgtatttttagtagagacgaggtttcaccgtgttagmctggatggtctcgatctcttgacctcgtgatccgcccacctcggccttccaaagtgctgggattacaggtgtgagccaccgcacccggccgagggcagggtttttaatctgttttgttcaccgatgtactcctgcctgacgcggtttctggggcataaaaactgttcaataagtatttgtagaataagttttatttca

SEQ ID NO: 728111 - DNA, 620 bp, Homo sapiens
tcccaccttggcctcccaaagtgttgggattacaggcgtgagccaccatgcccagccaatctctgtaggttctataatctctattttacagatggaaaaactgaggatcaaagaggtcaaataaaaaaacattaaacacacatggattaagcactagggttgggatttgaacccaggtcaagaataatctctacgagggcagggtttttttttaattttatttatttttttgatatggagtctcgctctgtcacccaggctggagtgcagtggcatggtgtcagctcactgccagctccgcctcccgggttcaggccattctcctgtcccagcctcccgagtagctgggactacaggcacctgccaccacgcccggctaattttttgtatttttagtagagacgaggtttcaccgtgttagcctggatggtctcratctcttgacctcgtgatccgcccacctcggccttccaaagtgctgggattacaggtgtgagccaccgcacccggccgagggcagggtttttaatctgttttgttcaccgatgtactcctgcctgacgcggtttctggggcataaaaactgttcaataagtatttgtagaataagttttatttca

SEQ ID NO: 728112 - DNA, 620 bp, Homo sapiens
tcccaccttggcctcccaaagtgttgggattacaggcgtgagccaccatgcccagccaatctctgtaggttctataatctctattttacagatggaaaaactgaggatcaaagaggtcaaataaaaaaacattaaacacacatggattaagcactagggttgggatttgaacccaggtcaagaataatctctacgagggcagggtttttttttaattttatttatttttttgatatggagtctcgctctgtcacccaggctggagtgcagtggcatggtgtcagctcactgccagctccgcctcccgggttcaggccattctcctgtcccagcctcccgagtagctgggactacaggcacctgccaccacgcccggctaattttttgtatttttagtagagacgaggtttcaccgtgttagcctggatggtctcgatctcttgacctcgtgatccgcccacctcggccttccaaagtgctgggattacaggtgtgagccaccgcaccyggccgagggcagggtttttaatctgttttgttcaccgatgtactcctgcctgacgcggtttctggggcataaaaactgttcaataagtatttgtagaataagttttatttca

SEQ ID NO: 728113 - DNA, 642 bp, Homo sapiens
cctgtaaatgccctcacttaaataacaaagacacagaataagccagaagaaataactcccttcagagtggcagagcagaatcctaacccatgcctctttgcctaaaacctgtactgtctctggcttgcatgttcccttccatgaatataatgcagtaaaacaccgtgggaaacaagcctttcaagaattcaaacagtatwactagacagtaacgacactaagacaatttccctcccatgttttctacagcaaaaaggaatcactattctggtaaaaatttccatcaggctgggatcttcctttccagtatttcaaatttggaaatcataaaaaataactttaaacacaatacaaatggctaaacatgaccggatattcaacatgaatattactgtcataacagggtaatggggtgatataatgacggggaaaagttagtatctttatttatctctgtctttttgcagaaaggaaggaaaatttataaatctgagtaagaagagtataataaagaaatggttaagtaggagttcacaagagggtttaagcctttctatgtgctaaaatatgacatacacactctattttcttgaacactattttaaggcaacttttttattatcattagttactgattttcct

SEQ ID NO: 728114 - DNA, 642 bp, Homo sapiens
cctgtaaatgccctcacttaaataacaaagacacagaataagccagaagaaataactcccttcagagtggcagagcagaatcctaacccatgcctctttgcctaaaacctgtactgtctctggcttgcatgttcccttccatgaatataatgcagtaaaacaccgtgggaaacaagcctttcaagaattcaaacagtattrctagacagtaacgacactaagacaatttccctcccatgttttctacagcaaaaaggaatcactattctggtaaaaatttccatcaggctgggatcttcctttccagtatttcaaatttggaaatcataaaaaataactttaaacacaatacaaatggctaaacatgaccggatattcaacatgaatattactgtcataacagggtaatggggtgatataatgacggggaaaagttagtatctttatttatctctgtctttttgcagaaaggaaggaaaatttataaatctgagtaagaagagtataataaagaaatggttaagtaggagttcacaagagggtttaagcctttctatgtgctaaaatatgacatacacactctattttcttgaacactattttaaggcaacttttttattatcattagttactgattttcct

SEQ ID NO: 728115 - DNA, 642 bp, Homo sapiens
cctgtaaatgccctcacttaaataacaaagacacagaataagccagaagaaataactcccttcagagtggcagagcagaatcctaacccatgcctctttgcctaaaacctgtactgtctctggcttgcatgttcccttccatgaatataatgcagtaaaacaccgtgggaaacaagcctttcaagaattcaaacagtattaytagacagtaacgacactaagacaatttccctcccatgttttctacagcaaaaaggaatcactattctggtaaaaatttccatcaggctgggatcttcctttccagtatttcaaatttggaaatcataaaaaataactttaaacacaatacaaatggctaaacatgaccggatattcaacatgaatattactgtcataacagggtaatggggtgatataatgacggggaaaagttagtatctttatttatctctgtctttttgcagaaaggaaggaaaatttataaatctgagtaagaagagtataataaagaaatggttaagtaggagttcacaagagggtttaagcctttctatgtgctaaaatatgacatacacactctattttcttgaacactattttaaggcaacttttttattatcattagttactgattttcct

SEQ ID NO: 728116 - DNA, 642 bp, Homo sapiens
cctgtaaatgccctcacttaaataacaaagacacagaataagccagaagaaataactcccttcagagtggcagagcagaatcctaacccatgcctctttgcctaaaacctgtactgtctctggcttgcatgttcccttccatgaatataatgcagtaaaacaccgtgggaaacaagcctttcaagaattcaaacagtattacwagacagtaacgacactaagacaatttccctcccatgttttctacagcaaaaaggaatcactattctggtaaaaatttccatcaggctgggatcttcctttccagtatttcaaatttggaaatcataaaaaataactttaaacacaatacaaatggctaaacatgaccggatattcaacatgaatattactgtcataacagggtaatggggtgatataatgacggggaaaagttagtatctttatttatctctgtctttttgcagaaaggaaggaaaatttataaatctgagtaagaagagtataataaagaaatggttaagtaggagttcacaagagggtttaagcctttctatgtgctaaaatatgacatacacactctattttcttgaacactattttaaggcaacttttttattatcattagttactgattttcct

SEQ ID NO: 728117 - DNA, 615 bp, Homo sapiens
tgtataatctctctccagctaaattataaatttttagaaatcagaaaatatgcaatattttttccttgaggtcatagtagcaactaggatgatgcctcaaatatttatgtgctcaataaatattgggtgaatcaataaaatactgtcagcaaattcaacactaacagcactctaataacatattttatgattctaatattctagttcacagaacaaatattttaagatttggagtatttcaatgtatgacaaggataaaaatttatgaagtgatatttaattccactctgtgattatttcgtttatttcgttggttattttatttgtctatcactagactggaatctccataaaagcaaatacatactttgttcaacattttattctcaagtatgtattgagtatgtgtaagaaggaaggaaagagataaggagagaaaagagagagggggaagaaagaagtgcacagaatttgcgtaagttagtgtactcatcaccccttccactaactagaaagtcacctctgyctcattccctagtttccattgctcctaacacacccaaacagaaagaaactctggtgaatccgggctgctagtgctgggtacctcgtata

SEQ ID NO: 728118 - DNA, 691 bp, Homo sapiens
cagttgtaaaacaccaccaaatacgttaatttaatttgtacatggcaggtttttaaaaaatttatcagtgtgagagttacgtcacatgtttaatcgtggcaacatttctttacacttccaaatatgtcaccttccagttgtcatagaaaaagaattaaaattttctttagagacgaaatgctcagtacataccaattggtacagtaaaaaagtaagaacattattttcttttatattcwtttttttccacttacaatatgactatgagtaataataatttatcaacattttcagatatatttatcagggggaaatttatatgttttatttatttatgtcttttaccctgtacatttcatgccttattatttatttctttgtaattcttgcaggatttttctatgaaaataagtagtcccatctagtaaccaatcattaatttaccaaccactaatttactcatgaattcattcattcagccactatttattaaacatctattatttttaaggtttttcttcaggcactccacgagatacaaaagtaaatgacacttttcccctttgacattacagaaatcctagttttcataaatttttcccaaggatataattgcacaattttgaaaggtttaaatgaaggacatgtgttatagtatctttatagtagataacaaggagcaaaataaaga

SEQ ID NO: 728119 - DNA, 691 bp, Homo sapiens
cagttgtaaaacaccaccaaatacgttaatttaatttgtacatggcaggtttttaaaaaatttatcagtgtgagagttacgtcacatgtttaatcgtggcaacatttctttacacttccaaatatgtcaccttccagttgtcatagaaaaagaattaaaattttctttagagacgaaatgctcagtacataccaattggtacagtaaaaaagtaagaacattattttcttttatattcatttttttccacttacaatatgactatgagtaataataatttatcaacattttcagatatatttatcagggggaaatttatatgttttatttatttatgtcttttaccctgtacatttcatgccttattatttatttctttgtaattcttgcaggatttttctatgaaaataagtagtcccatctagtaaccaatcattaatttaccaaccactaatttactcatgaattcattcattcagccactatttattaaacatctattatttttaaggtttttcttcaggcactccacgagatacaaaagtaaatgacacttttcccctttgacattacagaaatcctagttttcataaatttttcccaaggrtataattgcacaattttgaaaggtttaaatgaaggacatgtgttatagtatctttatagtagataacaaggagcaaaataaaga

SEQ ID NO: 728120 - DNA, 691 bp, Homo sapiens
cagttgtaaaacaccaccaaatacgttaatttaatttgtacatggcaggtttttaaaaaatttatcagtgtgagagttacgtcacatgtttaatcgtggcaacatttctttacacttccaaatatgtcaccttccagttgtcatagaaaaagaattaaaattttctttagagacgaaatgctcagtacataccaattggtacagtaaaaaagtaagaacattattttcttttatattcatttttttccacttacaatatgactatgagtaataataatttatcaacattttcagatatatttatcagggggaaatttatatgttttatttatttatgtcttttaccctgtacatttcatgccttattatttatttctttgtaattcttgcaggatttttctatgaaaataagtagtcccatctagtaaccaatcattaatttaccaaccactaatttactcatgaattcattcattcagccactatttattaaacatctattatttttaaggtttttcttcaggcactccacgagatacaaaagtaaatgacacttttcccctttgacattacagaaatcctagttttcataaatttttcccaaggakataattgcacaattttgaaaggtttaaatgaaggacatgtgttatagtatctttatagtagataacaaggagcaaaataaaga

SEQ ID NO: 728121 - DNA, 604 bp, Homo sapiens
attttgccatgacacagtgtccttaaagccttatcttcataactgggtgtgaataaatttaagaaccctttgttctgagcaaataatcaccatttgttaaaataatattcttgatcaaagatctcatgttttcattatacattaatctattcatgttcttgggataaagcttcttaatgcaattatgaaagcaatgtaggaaatgtatgaaacaatgtatgaaagcaatgtaaaaakgttacattctttaaatgtcacatttaaataattatttaattttcttattttttttatagtaggtgtacatatttatgggttacatgagttttattttttaaaaaattttgggtccatagtagctgtatatatttataggatttcatgagatattttgatacagtcacacagtgcatagtagtcagaacggggtaaatggggtatccatcacctcgagcatttatcctttgtgttaaaaacaatccaattatagtcttcattattttaaaatgtataatgagattattttttactatacaaaataaaaataatttcatcacatattttaaaataattaaattattttaacgaaatataaaaataatga

SEQ ID NO: 728122 - DNA, 604 bp, Homo sapiens
attttgccatgacacagtgtccttaaagccttatcttcataactgggtgtgaataaatttaagaaccctttgttctgagcaaataatcaccatttgttaaaataatattcttgatcaaagatctcatgttttcattatacattaatctattcatgttcttgggataaagcttcttaatgcaattatgaaagcaatgtaggaaatgtatgaaacaatgtatgaaagcaatgtaaaaatgttacattctttaaatgtcacatttaaataattatttaattttcttattttttttatagtwggtgtacatatttatgggttacatgagttttattttttaaaaaattttgggtccatagtagctgtatatatttataggatttcatgagatattttgatacagtcacacagtgcatagtagtcagaacggggtaaatggggtatccatcacctcgagcatttatcctttgtgttaaaaacaatccaattatagtcttcattattttaaaatgtataatgagattattttttactatacaaaataaaaataatttcatcacatattttaaaataattaaattattttaacgaaatataaaaataatga

SEQ ID NO: 728123 - DNA, 604 bp, Homo sapiens
attttgccatgacacagtgtccttaaagccttatcttcataactgggtgtgaataaatttaagaaccctttgttctgagcaaataatcaccatttgttaaaataatattcttgatcaaagatctcatgttttcattatacattaatctattcatgttcttgggataaagcttcttaatgcaattatgaaagcaatgtaggaaatgtatgaaacaatgtatgaaagcaatgtaaaaatgttacattctttaaatgtcacatttaaataattatttaattttcttattttttttatagtaggtgtacatatttatgggttacatgagttttattttttaaaaaattttgggtccatagtagctgtatatatttataggatttcatgagatattttgatacagtcacacagtgcatagtagtcagaacggggtaaatggggtatccatcacctcgagcatttatcctttgtgttaaaaacaatccaattatagtcttcattattttaaaatgtataatgagattattttttactatacaaaataaaaataatttcatcacatattttaaaataattaaattattttaaygaaatataaaaataatga

SEQ ID NO: 728124 - DNA, 575 bp, Homo sapiens
agaacctgcagaattaaggctgttatagaaatgagggcacagtaccaaatctgttgtaacatatgttttactgaacgacacagaggcactgaaatcacagcattgacaaagagcaacttcagtcggtttatcctaatgcatctaggaggaaaaaaaaatcatgtgctaagttttcctagaatcgttaaaagaatgaatttgttaaaatcctgttaaactccactagaaattttgaatacaggaatagtaaggaaaatgcataactgccaggactgaataaatttaaatatttcagtgtacatgttaacaaagcaaaaatttgtagcatttcctgaattactttaagtcaataataggttaatttttcaaattaattcgtaacacagataaaatgaggacatatattcaagtaaataaaactgcttggaatgacagaacaggttataaaattatggaaaatttgaagagaagtgattttaacaaatgtttaaagtttatgctttaaggcaagattgaaccaggccccagatcccttcagaacaatgttgtttcacttgagttragatcatttaaca

SEQ ID NO: 728125 - DNA, 1031 bp, Homo sapiens
ttgtcagcaggaaaagcggtccctgtcacctcctcaacacaaccacacactaaggacaggaaacacgaattttcgataggcggctgtctctgccccatacatccttaattgagatcaacacgtggctctcagctttactctctgctatgcagcctgatgatgtttaggtgaaaaagagagaaataaagttgtaattttttacttccaaatggtagcctataaatcatatcccactatagtaaaatagctaagttctggaattttccttaatcaaggatgtttcagtttgcatattatggactgtattaaacttcttttcacaatcaaattgaacctcttgtgaaaatggtgcctgtgttattttacttacacatgcaggaaagaaaacattccatactatacctttatagaagtattcgacccaatatgagcttaatttaggcacctagtctcttgtgtacccaagggttccactgggccactggctctatcccctagagcaatastttttcaatttgatgcttgtgactcattggtgggtcattgatatggtttggctgtgtccccacccaactctcatcttgaattttagctcccgcaattcccacgtgttgtgggagggacccggtgggaggtaactgaatcatgggatgagtctttcccgtactgttgtcatgatagtgaataagtctcatgagatctgatggttttatatgggggagtttcccttcacaaactctctttgcttgccgccatccacataagatgtggcttgcttctccttgccttctgccatgattgtcaggcttccccagccatgtggaactgtaagttcattaaaactctttttcttccagtcttgggtatgtctttatcagcagcatgaaaacagactaatacagtcatgaagctaatttattatgtcatgaccagcctattttaaataatgaaataaaattgaaataaaattaaagctatcagaaagtatctatgaaaaatgtgaagaattattgtgtgtgtgtgtgtgtgtg

SEQ ID NO: 728126 - DNA, 684 bp, Homo sapiens
tgatgtagggacaaggcaggcatggctggaggtcaggtccaatgtctagctgtgtctagctctatgggttwcagaaatggcaacgcttctaaatccatacattaaatccatggcattagtggggaagaggtggggcctggggacttgggaaagagacatctgagtagactcaagaaatccaagaatcttggctctcccacccctgattcctgggagcctatcttgctagatttgttaggttgaggaaagcaggcttttcttgtgtgaagactgctggttgccctcaagaatggcaactgctggttgccattctcaccatctgtgggaactgcaacctttgcctccagacctattaccagagtcaagtgtcatcattctctgaggaggatggggcagggcgaggaacttcaagttttgcttcccgagcaggcagcttctacaacaaactagtttgctaatttctaaccctggggaatatgtgaggaaatagattatatggatcttacacataatagggtaaaatataactttggattggaccaaaaagtatattggtttgggtgcacttattcaagactcaagatttaatgggctagctgtagcagctggaggtggctctagttcctttcttggttggatgaccaaacctcaggtgtcatggtggccaacattatttttagctcg

SEQ ID NO: 728127 - DNA, 1426 bp, Homo sapiens
tttacctactgtaatatttaagtaaatttaaatacatcacatatatacagcaagttttacaggtatacaggtacatccatatagatgtatttaccctgctcttgtttcacacattattataattttgatatctatgttaacatatacaaatctaatttatttattaaacgaccatacaataatattctgaacaatgaatatattaaaattatctattgatctattattaaactttccccctagttctttgcattaccagcaatcccattatgaatgtttctgtgcacatctcctcaaatacaagtgaaaaaacttcccttgtagacatggcttgaagggaaattaaactgtgtgaaggcatgcagattttaagctttacagattattgacaaattttattccaaaacaattgcactaatttatgtatacatcctctgggataaataaaaattcatctttctatgtcctagttattgaatttacagtttttgctcatccagctaatgttaaattttatctcttccttctgttttgactttcattcttctgattgccacttaggtgggacaatttttcatgttcttttgacgccccgttctgtgtattgtctatttatgtattttgcccaaatttctattattatctgccttttgtgtatgaattgatgaatataaatttcttatatatcccaactaattctttgttatttatgttaaatgtgtatatgccaatctatcatctattttatccactttattatttcagtttcctttcgtgagttgtattttgttatttgtctacaaatttcttcctcagtaggccagaactaatgtagttagggcacactgaaacagcacatccattgttaaactataaaatactcttgtagctctcattaacagttacctcccagacctcaggcctccctcttgcccaagtgatcactgctgctttagtctctcatgcccctctctgggaaactgcttaaattcccaaagatccagtagcttmggactaatacctgacactgcaaagacttatgggaccctattccagtgtcatggccggcatctgtcctgactcattgctacccatagtgtatctgctgaaaagggttttgcttgatgccacaggaatattctcttacattttattctaatactctcaaactttggatttagacaattaaggcttatctaatcatttatttggtttatgatgcaatatagaaatagagtacttttttccattatgtaaatctacttgatcaaatattagatattaattggcactgtcatacaaagaaattcttgtatgtgcctgggtccatttgtaggaacactatacattttatttatcttcctatatagtattataataaatatagcattacaatttataccgctattttgtagggcaaatatcc

SEQ ID NO: 728128 - DNA, 577 bp, Homo sapiens
agttacagcatatatacagtctagcttctgctttttaaacttaaatagcatagatatttttccctgtcactcccagtgtttctggtcatcatttaaaacaattatctaggccaagtacagtggctcacacctgtaatcccaacactttgggaggccgaggcaggcagatcacttgaggtcaggagttcgagaccagcctgcccaacatggcgaaaccctatctctactaaaaatacaaaaaattagctaggcatggtggctggcgcctgtaatcycagctacttgggaggctgaggcaggagaatcgcttgaacccaggaggcagaggttacagtgagccaagatcacaccactgtactccagcctgggtgacaagagcaaaactccatttcaaacaaatacaaacaaacaacaataaaaaaatctaatattctcttgaattaagatattatgattgtatgttcatgttctgttcataatatgaaaaaaaattatgattgatctcaagttccacaattgaggtatttagtttttatttacatgatgatctaatatttttacaaatatttgaatattt

SEQ ID NO: 728129 - DNA, 577 bp, Homo sapiens
agttacagcatatatacagtctagcttctgctttttaaacttaaatagcatagatatttttccctgtcactcccagtgtttctggtcatcatttaaaacaattatctaggccaagtacagtggctcacacctgtaatcccaacactttgggaggccgaggcaggcagatcacttgaggtcaggagttcgagaccagcctgcccaacatggcgaaaccctatctctactaaaaatacaaaaaattagctaggcatggtggctggcgcctgtaatcccagctacttgggaggctgaggcaggagaatcgcttgaacccaggaggcagaggttacagtgagccaagatcacaccactgtactccagcctgggtgacaagagcaaaactccatttcaaacaaatacaaacaaacaacaataaaaaaatctaatattctcttgaattaagatattatgattgtatgttcatgttctgttcataatatgaaaaaaaattatgattgayctcaagttccacaattgaggtatttagtttttatttacatgatgatctaatatttttacaaatatttgaatattt

SEQ ID NO: 728130 - DNA, 1106 bp, Homo sapiens
atctacaccccttccatcaaatcactgaccagaaccacggtcccattattacccatgaccattagggcacttttcctacaccaatgtgaactttttttccctcggctaattattacaaactataggcatattctaaaataacgctttttattccagttacagaagkatatacttgctaaacagatgtgtgcagatgccttgctagttttcaggtggagtttattttaaaatggtgtcactctggatcacctaggctcctgctttcctaacattcccctctctacttacaagaggacccttaatcgtaagggcaaaggctggtcttctgtaacttcttcctgctgacagtggatgttcattttggggacaggattttctcataagggtctacagttggcctctggggtaccaagggaggtcctcatttacatggtatcctgatgagtctacgggcatagaccctgccaagtattggaggagtaaaaatctctagatgcctgatctagatctaaagacacctaaaggcagggtgtctttatttcccggttcagaagacgggatggattggaagctttgtgtcagtatcatctttatgtggaattgttgtaatctaaaaaacacaaactttaccaagaatttaaacaagcaagggccaaagattaataataagacaactatcaaagttcctaggaagggcaacaaccaagtgagactcaggagggtgcttctaatggctgaccagatacagttgggattggtgccttggttatatttacgcaaccacacagcttgttcatgtattttctgtatatcttcttctatgtgacctgaggtgtttacataactgcagcaggttatattgattatggtgcacactcctccttgttcaaccaataagaaatctagtgctaattttcaacgaataagtaatctagtgctaatcttaattcatctaaagcatcccccattttatgagacagtgtttagaaacgaataagtaaagttttgaagagttgcctaataataggcaaattttccctctggggctccaactccagccaatataaggccaattgtccacttggctctcaggtgagtgattttat

SEQ ID NO: 728131 - DNA, 1106 bp, Homo sapiens
atctacaccccttccatcaaatcactgaccagaaccacggtcccattattacccatgaccattagggcacttttcctacaccaatgtgaactttttttccctcggctaattattacaaactataggcatattctaaaataacgctttttattccagttacagaagtatatacttgctaaacagatgtgtgcagatgccttgctagttttcaggtggagtttattttaaaatggtgtcaytctggatcacctaggctcctgctttcctaacattcccctctctacttacaagaggacccttaatcgtaagggcaaaggctggtcttctgtaacttcttcctgctgacagtggatgttcattttggggacaggattttctcataagggtctacagttggcctctggggtaccaagggaggtcctcatttacatggtatcctgatgagtctacgggcatagaccctgccaagtattggaggagtaaaaatctctagatgcctgatctagatctaaagacacctaaaggcagggtgtctttatttcccggttcagaagacgggatggattggaagctttgtgtcagtatcatctttatgtggaattgttgtaatctaaaaaacacaaactttaccaagaatttaaacaagcaagggccaaagattaataataagacaactatcaaagttcctaggaagggcaacaaccaagtgagactcaggagggtgcttctaatggctgaccagatacagttgggattggtgccttggttatatttacgcaaccacacagcttgttcatgtattttctgtatatcttcttctatgtgacctgaggtgtttacataactgcagcaggttatattgattatggtgcacactcctccttgttcaaccaataagaaatctagtgctaattttcaacgaataagtaatctagtgctaatcttaattcatctaaagcatcccccattttatgagacagtgtttagaaacgaataagtaaagttttgaagagttgcctaataataggcaaattttccctctggggctccaactccagccaatataaggccaattgtccacttggctctcaggtgagtgattttat

SEQ ID NO: 728132 - DNA, 1106 bp, Homo sapiens
atctacaccccttccatcaaatcactgaccagaaccacggtcccattattacccatgaccattagggcacttttcctacaccaatgtgaactttttttccctcggctaattattacaaactataggcatattctaaaataacgctttttattccagttacagaagtatatacttgctaaacagatgtgtgcagatgccttgctagttttcaggtggagtttattttaaaatggtgtcactctggatcacctaggctcctgctttcctaacattcccctctctacttacaagaggacccttaatcgtaagggcaaaggctggtcttctgtaacttcttcctgctgacagtggatgttcattttggggacaggattttctcataagggtctacarttggcctctggggtaccaagggaggtcctcatttacatggtatcctgatgagtctacgggcatagaccctgccaagtattggaggagtaaaaatctctagatgcctgatctagatctaaagacacctaaaggcagggtgtctttatttcccggttcagaagacgggatggattggaagctttgtgtcagtatcatctttatgtggaattgttgtaatctaaaaaacacaaactttaccaagaatttaaacaagcaagggccaaagattaataataagacaactatcaaagttcctaggaagggcaacaaccaagtgagactcaggagggtgcttctaatggctgaccagatacagttgggattggtgccttggttatatttacgcaaccacacagcttgttcatgtattttctgtatatcttcttctatgtgacctgaggtgtttacataactgcagcaggttatattgattatggtgcacactcctccttgttcaaccaataagaaatctagtgctaattttcaacgaataagtaatctagtgctaatcttaattcatctaaagcatcccccattttatgagacagtgtttagaaacgaataagtaaagttttgaagagttgcctaataataggcaaattttccctctggggctccaactccagccaatataaggccaattgtccacttggctctcaggtgagtgattttat

SEQ ID NO: 728133 - DNA, 1106 bp, Homo sapiens
atctacaccccttccatcaaatcactgaccagaaccacggtcccattattacccatgaccattagggcacttttcctacaccaatgtgaactttttttccctcggctaattattacaaactataggcatattctaaaataacgctttttattccagttacagaagtatatacttgctaaacagatgtgtgcagatgccttgctagttttcaggtggagtttattttaaaatggtgtcactctggatcacctaggctcctgctttcctaacattcccctctctacttacaagaggacccttaatcgtaagggcaaaggctggtcttctgtaacttcttcctgctgacagtggatgttcattttggggacaggattttctcataagggtctacagttggcctctggggtaccaagggaggtcctcatttacatggtatcctgatgagtctacgggcatagaccctgccaagtattggaggagtaaaaatctctagatgcctgatctagatctaaagacacctaaaggcagggtgtctttatttcccggttcagaagacgggatggattggaagctttgtgtcagtatcatctttatgtggaattgttgtaatctaaaaaacacaaactttaccaagaatttaaacaagcaagggccaaagattaataataagacaactatcaaagttcctaggaagggcaacaaccaagtgagactcaggagggtgcttctaatggctgaccagatacagttgggattggtgccttggttatatttacgcaaccacacagcttgttcatgtattttctgtatatcttcttctatgtgacctgaggtgtttacataactgcagcaggttatattgattatggtgcacactcctccttgttcaaccaataagaaatctagtgctaattttcaacgaataagtaatctagtgctaatcttaattcatctaaagcatcccccattttatgagacagtgtttagaaacgaataagtaaagttttgaagagttgcctaataataggcaaattttccctctggggctccaactccagccaatataaggccaattgtccacttrgctctcaggtgagtgattttat

SEQ ID NO: 728134 - DNA, 2164 bp, Homo sapiens
tccagcaattatctgactcaggtaattcagaggtgatttcaaacagttcactcaatagatttttataggccatctaccttattcaaactcmataaatctattctctctgttatagagggaaaaacttgagacattatatcaaggtaaactttaatacacctgtttttttttcaagaaataaaaaatgtaatgactataatgtagaatttaacttcttatttttctttaagatcccttgtctttaaaataatatctataagatccagctacaaactctttaactctttgtcatgaaattacagtatcaatatattctaattttttctcatgatctcctctctcctacccccaaccctgtcaaaatctctatctctatctccctcttccttttctttctctctttcaggttattaaatgcaaagcagccatcgcctgggaagcaggcaagcccctttgcattgaagaggttgaagtagctccccccaaggctcatgaagttcgcattcaggtaagtggagactttccttgggtgggaacagacagggccccaagtggagacctggcttctgtcaggtcaatcctctgtgctatgattcagaggccttggagtttctagtacagggaagctgtatttttagattcagtcaaaaacaggcattatcccaaaaaggaataaatcatccattattttagtaattttcaaataatgggcttaaaatttaattgatcttaacattaatcatttaccctaagaatcagacaaaggaattcactttggatttgaattagttaggttttctttttgctttccaattgctaattatttgaaagtgttattaaaaggaagatagacaatttgatcgaaaacaagacagaagaaaaaacctgacgtgctgccctaggcagccgaagggtcctgggtatccagaggaagggacaggagtaggtcacagggagaagagagtgcatggaatggagtgagatcactgatggcaagtttggacaatttccccatttttcccaagctgaccaggcttatattttccttgaggacccccacattaagagtctgtacatgagagtgaatgggacattctcactgacagaaccttaaagaagaatataggtatacattggtaattaattcagacaatccttgatttgatattgttctctcaactgtaaaaggtgtattacctcaacttcatttcaataagccctattacctttgattttttcctctcctggaggcaataattgccaatcctatctcttttatgattttctgacaacagcaaaaggtagaaaacaaagatgcattataagaggaaaataatctaacccagtatatttttattggttcttttttcaaaaggtgattcttttattgagttctagaagtcttataaagttttaaaatgatatcaagcctaatcttatatgtaacatccagcccaataatatagttgcagaaacacaattaaagtctgtgattgccttgtagatcattgctacctctctgtgccatactgatgccactgttatcgattctaaatttgagggcctagctttcccagtgatcgttggccatgaggctgcaggtattgtggaaagtattgggccaggagtgaccaacgtcaaaccaggtattttattttattcagaaaaaatggaaatgtcacaatatttcagagataattattgatagagtcctggcttggcatgctataattgatctctatttacaaaaggggaccatcttttccaaagtaaaacgagagacacaatttatcacagtctagcaataggacagaatatttgaaatcagaattgtctaataaaatctaggaaatgtggtcactttatttacacatagcactgagaaactgtcccatgaagcaaagttatgaggttagctctaactgaaacttccatgtttaacaaatgacaccttataaaagaacaagatcatgtcctttgcagaaatatggatgaagctgtcagccattatccttagcaaactattgtaggaacagaaaaccaaatactgaatgttcttacttataagtaggagctaaataatgagaacacatggacacaaatggggcaatgacaggcacactgggtcctacttaaggatgaaggatggagggaggagaggctc

SEQ ID NO: 728135 - DNA, 2164 bp, Homo sapiens
tccagcaattatctgactcaggtaattcagaggtgatttcaaacagttcactcaatagatttttataggccatctaccttattcaaactccataaatctattctctctgttatagagggaaaaacttgagacattatatcaaggtaaactttaatacacctgtttttttttcaagaaataaaaaatgtaatgactataatgtagaatttaacttcttatttttctttaagatcccttgtctttaaaataatatctataagatccagctacaaactctttaactctttgtcatgaaattacagtatcaatatattctaattttttctcatgatctcctctctcctacccccaaccctgtcaaaatctctatctctatctccctcttccttttctttctctctttcaggttattaaatgcaaagcagccatcgcctgggaagcaggcaagcccctttgcattgaagaggttgaagtagctccccccaaggctcatgaagttcgcattcaggtaagtggagactttccttgggtgggaacagacagggccccaagtggagacctggcttctgtcaggtcaatcctctgtgctatgattcagaggccttggagtttctagtacagggaagctgtatttttagattcagtcaaaaacaggcattatcccaaaaaggaataaatcatccattattttagtaattttcaaataatgggcttaaaatttaattgatcttaacattaatcatttaccctaagaatcagacaaaggaattcactttggatttgaattagttaggttttctttttgctttccaattgctaattatttgaaagtgttattaaaaggaagatagacaatttgatcgaaaacaagacagaagaaaaaacctgacgtgctgccctaggcagccgaagggtcctgggtatccagaggaagggacaggagtaggtcacagggagaagagagtgcatggaatggagtgagatcactgatggcaagtttggacaatttccccatttttcccaagctgaccaggcttatattttccttgaggacccccacattaagagtctgtacatgagagtgaatgggacattctcactgacagaaccttaaagaagaatataggtatacattggtaattaattcagacaatccttgatttgatattgttctctcaactgtaaaaggtgtattacctcaacttcatttcaataagccctattacctttgattttttcctctcctggaggcaataattgccaatcctatctcttttatgattttctgacaacagcaaaaggtagaaaacaaagatgcattataagaggaaaataatctaacccagtatatttttattggttcttttttcaaaaggtgattcttttattgagttctagaagtcttataaagttttaaaatgatatcaagcctaatcttatatgtaacatccagcccaataatatagttgcagaaacacaattaaagtctgtgattgccttgtagatcattgctacctcyctgtgccatactgatgccactgttatcgattctaaatttgagggcctagctttcccagtgatcgttggccatgaggctgcaggtattgtggaaagtattgggccaggagtgaccaacgtcaaaccaggtattttattttattcagaaaaaatggaaatgtcacaatatttcagagataattattgatagagtcctggcttggcatgctataattgatctctatttacaaaaggggaccatcttttccaaagtaaaacgagagacacaatttatcacagtctagcaataggacagaatatttgaaatcagaattgtctaataaaatctaggaaatgtggtcactttatttacacatagcactgagaaactgtcccatgaagcaaagttatgaggttagctctaactgaaacttccatgtttaacaaatgacaccttataaaagaacaagatcatgtcctttgcagaaatatggatgaagctgtcagccattatccttagcaaactattgtaggaacagaaaaccaaatactgaatgttcttacttataagtaggagctaaataatgagaacacatggacacaaatggggcaatgacaggcacactgggtcctacttaaggatgaaggatggagggaggagaggctc

SEQ ID NO: 728136 - DNA, 668 bp, Homo sapiens
tgttaagatggtaaattttatgacaggcgttttttgtgacaataatagattcaagttgaacttttagacatctggaataaaaaatacagtggatgagattaacagcaaattgtatgttacagaaaaaaagataaaagccattcagaattaaatacagggaaaaaactgaaaaaagcatcagtgygaggtgagacaacttcaggaggcctaatatatgtgtaattgtagccctaggaagaaaaggaaaacatttttagaagataatggttaacatttttcatatttcatgaaaatcataaacttacaacttcaggaagctcaataagccccaggtacaaacaataaggagaaaactatgtcaaggcacatcatagtcataaccaatgttaatgagaaaaatttttaaaatattggtgatgcttagcagacacaagtaagcaagacaatagatttattactggaaatagcacaagagagaacagagtagaaagcattgaaagaaaatacctttcaatctaaaattctatacccagtgaatatctttccaaaatgaaggtgaaataaagactattttcagcatgtaaaggctgaaagaagtaatcaccgtcagattcacagtacaaaaaatactaaagaaaatccttcaggcagaaggaaaactgacagtg

SEQ ID NO: 728137 - DNA, 605 bp, Homo sapiens
cagtatgtcaaattgcttttcttctgactgggctgmaaaactcagtctggtatccctagttattttttacttaacagaagctcggcattaatgtgtggcttggttaatagcaatgagaaaaatagttactactttaaaatgttgtctagtagaagagttacctcaaaacctgaatcctaagagggggctatcaaaatgaaagagaaattgatgatgactcattaatgaaacataagtcattgaaatgtggtctatgatggtcagcctcttcctgtggttggtgaatcatttcaccagcaattctcaatcacatttggccactgctcctctcaggcagccccttggctatagctccactccatcacttgccagattctagtaacttccttgtcatcgaccttcaggcctaggggcaataatagcttcccactgtagcgaaaccctggatacttcaacatcccttattggagtgattaaccctgcctgtacctctggaaagaaaattatctcccattaagccctaacttgattaaacaggggttccctgctaagaccctgactgatacaggtcctaccttcaggttttccaccagacaaatcaataa

SEQ ID NO: 728138 - DNA, 643 bp, Homo sapiens
atttctccacatcctctccagcacctgtagtttcctgactttttaatgatcgccattctaactggtgtgagatggtatctcattgtggttttaatttgcatttctctgatggccagtgatgatgagcattttttcatgtgtttyttggctgcataaatgtcttcttttgagaagtgtctgttcatgacctttgcccacttttaccccattctttttttttttttttgagatggagtcttgctctgtcgcccaggctggagtgcagtggagcgatctcggctcactgcaacctccgcctcccaggttcaagtgattctcttgcctcagcctgctgagtaaccaggattacaggcacgtgtcaccacacccggctaattttttgtatttttagtagagatggggtttcactgtgttagtcaggatggtctcgatctcctgacctcgtgatccacctgcctcggcctcccaaagtactgggattacaggcgtgagccactgtgcccagccccatccttagtgttagatgatttttatataacatgctagaatgttaaattattgcatgtactatgtgcactgttttctatatagtatttacccagcatttgcctaattttaatgttgtatctagcacatgtatgct

SEQ ID NO: 728139 - DNA, 1462 bp, Homo sapiens
tgaaaagagagaaaattaggatatatgagttgaagaatcacaatatatagatgctttttaaagcaatgggactagatgatgtggagggtaagggaaagagcatgttgagggaagagatgggaatctacattcatttataacagcaacaacattcctcaacctcagaacatgattagcacttaaatcttatgtaacctgtatgaaactgcaagccaatatgcaaacaggttagttaaatcaagcataaagtcacctttgtcctattttcattggagttaacacaatacaagtcttgttcttcatcctcaggcttacatgatttaaactaatcatttcatttaatacatagttaagtgtatcctggcataataattatcattaatcaaacttaaaaggaaatgtttgttacttggaaattaggttttattctggcacagtatctttaactagctgtccagatgttaaaattgatttctggaagatctaagttgagatctcaaggcatataaacctctaattcttactgtgattggtaatcagtaattctcaatttcttaaattaattatttaattctgccaagaaaagtgatcttgggattcaaataaacgtgactttgaatctgaatactatacattactgatgactttagctaagttacttaacattttatgaacagttttcatacatctaaaatggtagtgataatgcctacaccctagaattgttgtgagaattaaataaaataatggatgtatgaagggattaagtatgtgactggcacatagtaagggctcagaaaatgctattattttgttaaagtcagaaaaaaggaaacgtactatcagggattcaagtacttggatataagcaatagtttacaaacatttagtttctttgaatcttgcgttgtattttaaaactgtgtgcatttttaacttttcctcacaacaatctgtttgtgttaacatgaaattctccatcaaataataggtcatattgacctttaaagaaaagagtatgtaaaattctacttcctaacacctagaacaccatgcttcaaaacaagatgctgggatagaggaaagctcatttaacagtcttaatattgtcagttagtattaatgtaacattcatatttgtgagagataacattgactcccagaggaaagaatgaaaataccctaatatttgccatatttacccatctaaatcttatgatctgaatctcagtgacctttrttgatcagtcatagtaagcctaggaatacaggagtgaaagcttattaaaaagttttacagtaggaatgaaaagaagtaaagtaaacatggaaaagggccaagtgggtgacttgagagatccacgtgctctccatccgacccttgacttggggttttatacattggcgtggttctggggtttgcatttcatctcccttgatttttttttgggctggctatctg

SEQ ID NO: 728140 - DNA, 2665 bp, Homo sapiens
  misc_feature 831, 832, 833, 834, 835, 836, 837, 838, 839, 840, 841, 842,843, 844, 845, 846, 847, 848, 849, 850, 851, 852, 853, 854,855, 856, 857, 858, 859, 860, 861, 862, 863, 864, 865, 866,867, 868, 869, 870, 871, 872, 873, 874, 875, 876, 877: n = A,T,C or G
  misc_feature 878, 879, 880, 881, 882, 883, 884, 885, 886, 887, 888, 889,890, 891, 892, 893, 894, 895, 896, 897, 898, 899, 900, 901,902, 903, 904, 905, 906, 907, 908, 909, 910, 911, 912, 913,914, 915, 916, 917, 918, 919, 920, 921, 922, 923, 924: n = A,T,C or G
  misc_feature 925, 926, 927, 928, 929, 930: n = A,T,C or G
agacaggggcgtgggagcaggaagagatcttcccagccagtgggtgcaggctagtatcgcaagttctcatctggccatgtgactgtgtctctttcaggcaaagcactaaagggccagtaccagtgagtggccccacctgtgtccccgatgctgacctcacctggtcctccgcctactgtccctctcagtgccttctctcagctcccaggccaacagtagccaaacccctagagacagtgatgcctgcccgcaccctggcctggtccctggtccttcactggcgccttctcggagctggcccagggggcctggagcatggacagtgtgggcgctctccctaccttgcctccttttttcttaaagcaaagtcacttctccatcacaaccagatttgaggctggttttgatggctgggtccttgggcctggccagtcttcctcttagcctctggatctagaagggaccataagaggagtaggccctggttcctgctgtcctggtggctgggcccagcaggggccctcactcttgaagtccaggactgggtctgacctggtgggagcacctgccagaggatgctctttcccaggacggatgggccctatgtctcaggagtggggttgggggacagccttcagcagcagctcacaccctaccttccccagacttgcactggggtgggatttggagtgatgggaaggtttttaagggccggggatggatcttttctaaatgttattacttgtaaataaagtctatttttctcccgtgagtactgagttgactgatcgggtgtgggaaaaagaggatagacctgcagcatgcagctgnnnnnnnnnnnnnnnnnnnnnnnnnnnnnnnnnnnnnnnnnnnnnnnnnnnnnnnnnnnnnnnnnnnnnnnnnnnnnnnnnnnnnnnnnnnnnnnnnnnnttctactaatgtctccccagctgtttctttgcagccttagcttgtgaaasagcaggtgaaatccgtctttaatatgtaattatggggtctactgtgtgttatgcactgataattcaaagatgagtaagacaggatctttaccaatttacagtcgagtgaagagacatgcaaatagcgtattataatactagataattgctgtaatggaggcatgtaacaaatgcagtggggcacaagagatcaagcacttgagtcagctagggggagtcagtaaagtctttatgatagagatgggtttgagctgaaaaaggttgggtttacaaaagagcagtggtttacatgtggcattaatattgccccctgtgtagcactttctgttttattgatagactctaatgtggagccgagattataattgggtaatgggtagcctggctaagatggagttggtgtacttttctacttctttggaaagaagttacacgctgtgtatattcaggatattatacctatgttttccaatattagatgccattagcatgatacgtagtctggaatggcattcattcatattccttttctctttttttgtctggtttcattaatactttctctagaagttgagacgtaatttaggctttcctaatggcttctttctttagagggataaatagaaaagagggtttaggaaaagagctaccagtagaaaaggctactatttattcagctcttaaccatacaccagcctctgtttaaaaccctttacctgcatcatctcatttattattaacagtaggcatgtgaattagatggagttaaccccattttataaatgaaactgaggctagagaggctaaagaactttcctaggattccacagtttgtgaatggggaagtacagcttctgatccaggcctgcctgtgctatatggagcttagcccatgctatactgagcacctgggttccatttcttactccactatttgtgctctagggggtgggaactttaaaattgtatcgtcttaatcatctcatgtaaaaattgataccgtatatttgataagtggctgtgattcaaaagagcattttgaatctcacatttgtgaggaaggttttattagtattccctatttgtgattgaggaagctgaggttcagaggatttgagataggccaagagtcttgaggctaccaagtggtgtcacaaagatttaaacccatgtttccagattccagagtgtttgtttcccttcattttaaagacccaaactcttttctttgtgtataaaatttccattttcaaaacataaagcagcatgtcatccctgaggggatcaaaatgagggttaaccaaaagaatattggtttttccatacaggtcctttaacttactgataactggtggattctgctgaaccccttttcaggagggatgattagcctgttggtagttagggagaggagagatgggcctagccagctcagctcaggtattaaactggccatgatgactgcctaagctcagttctgtctctcagcctgccaaagtacagcatgcttgagatgctagtaggataagatgtgggtaccagttaggtggcccaaaagccaatctactcctggagctagtgatttcctcctcaaaggggaggctaaccaacctctgagaggaattagatgcacccttttggcacagaaagctagcttgggaattaaggtaaaaaagcacttcaat

SEQ ID NO: 728141 - DNA, 2665 bp, Homo sapiens
  misc_feature 831, 832, 833, 834, 835, 836, 837, 838, 839, 840, 841, 842,843, 844, 845, 846, 847, 848, 849, 850, 851, 852, 853, 854,855, 856, 857, 858, 859, 860, 861, 862, 863, 864, 865, 866,867, 868, 869, 870, 871, 872, 873, 874, 875, 876, 877: n = A,T,C or G
  misc_feature 878, 879, 880, 881, 882, 883, 884, 885, 886, 887, 888, 889,890, 891, 892, 893, 894, 895, 896, 897, 898, 899, 900, 901,902, 903, 904, 905, 906, 907, 908, 909, 910, 911, 912, 913,914, 915, 916, 917, 918, 919, 920, 921, 922, 923, 924: n = A,T,C or G
  misc_feature 925, 926, 927, 928, 929, 930: n = A,T,C or G
agacaggggcgtgggagcaggaagagatcttcccagccagtgggtgcaggctagtatcgcaagttctcatctggccatgtgactgtgtctctttcaggcaaagcactaaagggccagtaccagtgagtggccccacctgtgtccccgatgctgacctcacctggtcctccgcctactgtccctctcagtgccttctctcagctcccaggccaacagtagccaaacccctagagacagtgatgcctgcccgcaccctggcctggtccctggtccttcactggcgccttctcggagctggcccagggggcctggagcatggacagtgtgggcgctctccctaccttgcctccttttttcttaaagcaaagtcacttctccatcacaaccagatttgaggctggttttgatggctgggtccttgggcctggccagtcttcctcttagcctctggatctagaagggaccataagaggagtaggccctggttcctgctgtcctggtggctgggcccagcaggggccctcactcttgaagtccaggactgggtctgacctggtgggagcacctgccagaggatgctctttcccaggacggatgggccctatgtctcaggagtggggttgggggacagccttcagcagcagctcacaccctaccttccccagacttgcactggggtgggatttggagtgatgggaaggtttttaagggccggggatggatcttttctaaatgttattacttgtaaataaagtctatttttctcccgtgagtactgagttgactgatcgggtgtgggaaaaagaggatagacctgcagcatgcagctgnnnnnnnnnnnnnnnnnnnnnnnnnnnnnnnnnnnnnnnnnnnnnnnnnnnnnnnnnnnnnnnnnnnnnnnnnnnnnnnnnnnnnnnnnnnnnnnnnnnnttctactaatgtctccccagctgtttctttgcagccttagcttgtgaaacagcaggtgaaatccgtctttaatatgtaattatggggtctactgtgtgttatgcactgataattcaaagatgagtaagacaggatctttaccaatttacagtcgagtgaagagacatgcaaatagcgtattataatactagataattgctgtaatggaggcatgtaacaaatgcagtggggcacaagagatcaagcacttgagtcagctagggggagtcagtaaagtctttatgatagagatgggtttgagctgaaaaaggttgggtttacaaaagagcagtggtttacatgtggcattaatattgccccctgtgtagcactttctgttttattgatagactctaatgtggagccgagattataattgggtaatgggtagcctggctaagatggagttggtgtacttttctacttctttggaaagaagttacacgctgtgtatattcaggatattatacctatgttttccaatattagatgccattagcatgatacgtagtctggaatggcattcattcatattccttttctctttttttgtctggtttcattaatactttctctagaagttgagacgtaatttaggctttcctaatggcttctttctttagagggataaatagaaaagagggtttaggaaaagagctaccagtagaaaaggctactatttattcagctcttaaccatacaccagcctctgtttaaaaccctttacctgcatcatctcatttattattaacagtaggcatgtgaattagatggagttaaccccattttataaatgaaactgaggctagagaggctaaagaactttcctaggattccacagtttgtgaatggggaagtacagcttctgatccaggcctgcctgtgctatatggagcttagcccatgctatactgagcacctgggttccatttcttactccactatttgtgctctagggggtgggaactttaaaattgtatcgtcttaatcatctcatgtaaaaattgataccgtatatttgataagtggctgtgattcaaaagagcattttgaatctcacatttgtgaggaaggttttattagtattccctatttgtgattgaggaagctgaggttcagaggatttgagataggccaagagtcttgaggctaccaagtggtgtcacaaagatttaaacccatgtttccagattccagagtgtttgtttcccttcattttaaagacccaaactcttttctttgtgtataaaatttccattttcaaaacataaagcagcatgtcatccctgaggggatcaaaatgagggttaaccaaaagaatattggtttttccatacaggtcctttaacttactgataactggtggattctgctgaaccccttttcaggaggratgattagcctgttggtagttagggagaggagagatgggcctagccagctcagctcaggtattaaactggccatgatgactgcctaagctcagttctgtctctcagcctgccaaagtacagcatgcttgagatgctagtaggataagatgtgggtaccagttaggtggcccaaaagccaatctactcctggagctagtgatttcctcctcaaaggggaggctaaccaacctctgagaggaattagatgcacccttttggcacagaaagctagcttgggaattaaggtaaaaaagcacttcaat

SEQ ID NO: 728142 - DNA, 479 bp, Homo sapiens
gttakggaggattgtggtcttaggacacttgcccatcactttctggggctctaaccccgagcacagcatagagatgtctgtagcaggaagaccgagggtgaaggagcaggaggggtctataccagatgggggcgggggagtgggggtcacatggtctggctgcctctttctcatgggaatcatctctgtgttgcctgagacatcgaggctatagagctggtgtttctgagacatcgaggctatagagcaccctttctccatcactctcctacccagccaccccagggctgctgaaaaattgggccctcctctaaggagcctgtgatagtgggggacaatcaaagtgaatagcaaacagttagcaatggagcccttgcctctcccctgtgctgcctggtcatgcttgaactcccagaatgcttggagcagccaagggtgcatggggctgttatgttctctcttttcccctactccctgtg

SEQ ID NO: 728143 - DNA, 479 bp, Homo sapiens
gttatggaggattgtggkcttaggacacttgcccatcactttctggggctctaaccccgagcacagcatagagatgtctgtagcaggaagaccgagggtgaaggagcaggaggggtctataccagatgggggcgggggagtgggggtcacatggtctggctgcctctttctcatgggaatcatctctgtgttgcctgagacatcgaggctatagagctggtgtttctgagacatcgaggctatagagcaccctttctccatcactctcctacccagccaccccagggctgctgaaaaattgggccctcctctaaggagcctgtgatagtgggggacaatcaaagtgaatagcaaacagttagcaatggagcccttgcctctcccctgtgctgcctggtcatgcttgaactcccagaatgcttggagcagccaagggtgcatggggctgttatgttctctcttttcccctactccctgtg

SEQ ID NO: 728144 - DNA, 2077 bp, Homo sapiens
actatcgcaaggagaaaaaaccaaacattgcatgttctcactcataggtgagaactgaacaatgagaacacatggacacaggaaggggagcatcacacaccggggactgttgtggggtggggggagggrggagggatagcattaggagatatacctaatgctaaatgacgagttaatgggtgcagcacaccaacatggcgcatgtatacctatgtaacaaacctgcacattgtgcacatgtaccctaaaacttaaaagtataataataataaaattttaaaaaaagaaaaaagaaaactaaagaatgtacagaatcttaataatttctatactgaatacttattgaaatcaaaatatttaagatatattgggttaaataaaatatactactaaaattaaaaaaaaagaaagaaaaagaaaacagcccaaacttgctggttccaaaaataaaactggtttccctttccagtctctccaaagatctaaagactctcaatgttaataatgtcacctagcttctaatattaaagacaatgccacatgctttaagtgtcagaaataaaagtcatatcaaagttgtcaatggaaggtcctttgagaagacttcagaaagattttaaagtgtgtttcataaatcctaccaatgaaacaaaaataattctaagactcctatggtaattatcccactgcacacacacggactctcagctccaacccaagaagagtcagttgcaaagatatttgtgagtgtggctcttgtatagtgttttaaatgacaatttaaaaaacacagaaatattacaatgttttttaggaaattgcattgaaggaagcaccttagcattttcttgtaaacagtagtgtctatttttggttatttactcctctcttcctccattgtatgctgagaatgagaaagaaaaaccctgtctctagttcatagacctgaaaatagagaaccagaataaaagagctgtgcattggaaattgtaccccaagagctttgtcaacactcactctggatatagaatttgacatcctggatgtcaaattgagctcatgatgggacaagatgttaactgacctgggaactcctgaatcccgctttcccaatctaggatccctgaattgccattacaggtctaacaaactcgctggaaaggctttacctgcattaccctgtacctacatgaaaatgtaccctcttattctatctagagttaatatttacaccagaggtttcctatagcatttttcatctctcagtttctcaatgtgcatattaatggattcaacatgggtgtgataactgtataaaacacagtaatgaatttattaataggaaagtttgaaacaggtctaacatacaggaaaatacagggaacaaaaaacaggacaaccacggtaatgtgggagctgcaggtagacagggctttatgcctcccttcctgactataagttttaagggagattaggatgaccccacaggagattagtagaaggatgaacaagaccatacagattcctccaccattggcaacaacagtgaggcctataaagtaggtgtcagtgtgtgccagttccaataatgggtacatgtcacagaaaaagtggtcaatgatattgggaccacagaaaaggagactgtacgcaactaaaatttgaaacacagaatgcacaaaacccgcagtgacagccaccaccaacagaaggatgcaaacctgtcaattcatgatggtgaaatagtgcagtggcttacagatgactacatagcgattataggccatcaccaacagaatgaaggcctcagcaccactaactaagtggtctataaaagggctgacccatgcaagctcggaaggaaatagtctttttatcatggagatagcttacaatcaatttgggaggaatggtggtggaatacacaacatctataaatgacaagcagacaatgaagaagtacactggggagcctaaggtgggggtggcaataatagtcaccacaatgggcaggttccccaccatagtcataatgtatgtgagtaaatgtacgacaaataatgcattttacacatca

SEQ ID NO: 728145 - DNA, 2077 bp, Homo sapiens
actatcgcaaggagaaaaaaccaaacattgcatgttctcactcataggtgagaactgaacaatgagaacacatggacacaggaaggggagcatcacacaccggggactgttgtggggtggggggaggggggagggatagcattaggagatatacctaatgctaaatgacgagttaatgggtgcagcacaccaacatggcgcatgtatacctatgtaacaaacctgcacattgtgcacatgtaccctaaaacttaaaagtataataataataaaattttaaaaaaagaaaaaagaaaactaaagaatgtacagaatcttaataatttctatactgaatacttattgaaatcaaaatatttaagatatattgggttaaataaaatatactactaaaattaaaaaaaaagaaagaaaaagaaaacagcccaaacttgctggttccaaaaataaaactggtttccctttccagtctctccaaagatctaaagactctcaatgttaatratgtcacctagcttctaatattaaagacaatgccacatgctttaagtgtcagaaataaaagtcatatcaaagttgtcaatggaaggtcctttgagaagacttcagaaagattttaaagtgtgtttcataaatcctaccaatgaaacaaaaataattctaagactcctatggtaattatcccactgcacacacacggactctcagctccaacccaagaagagtcagttgcaaagatatttgtgagtgtggctcttgtatagtgttttaaatgacaatttaaaaaacacagaaatattacaatgttttttaggaaattgcattgaaggaagcaccttagcattttcttgtaaacagtagtgtctatttttggttatttactcctctcttcctccattgtatgctgagaatgagaaagaaaaaccctgtctctagttcatagacctgaaaatagagaaccagaataaaagagctgtgcattggaaattgtaccccaagagctttgtcaacactcactctggatatagaatttgacatcctggatgtcaaattgagctcatgatgggacaagatgttaactgacctgggaactcctgaatcccgctttcccaatctaggatccctgaattgccattacaggtctaacaaactcgctggaaaggctttacctgcattaccctgtacctacatgaaaatgtaccctcttattctatctagagttaatatttacaccagaggtttcctatagcatttttcatctctcagtttctcaatgtgcatattaatggattcaacatgggtgtgataactgtataaaacacagtaatgaatttattaataggaaagtttgaaacaggtctaacatacaggaaaatacagggaacaaaaaacaggacaaccacggtaatgtgggagctgcaggtagacagggctttatgcctcccttcctgactataagttttaagggagattaggatgaccccacaggagattagtagaaggatgaacaagaccatacagattcctccaccattggcaacaacagtgaggcctataaagtaggtgtcagtgtgtgccagttccaataatgggtacatgtcacagaaaaagtggtcaatgatattgggaccacagaaaaggagactgtacgcaactaaaatttgaaacacagaatgcacaaaacccgcagtgacagccaccaccaacagaaggatgcaaacctgtcaattcatgatggtgaaatagtgcagtggcttacagatgactacatagcgattataggccatcaccaacagaatgaaggcctcagcaccactaactaagtggtctataaaagggctgacccatgcaagctcggaaggaaatagtctttttatcatggagatagcttacaatcaatttgggaggaatggtggtggaatacacaacatctataaatgacaagcagacaatgaagaagtacactggggagcctaaggtgggggtggcaataatagtcaccacaatgggcaggttccccaccatagtcataatgtatgtgagtaaatgtacgacaaataatgcattttacacatca

SEQ ID NO: 728146 - DNA, 593 bp, Homo sapiens
cttcctgtctctttaattttgtgctctactggattggaggtcttagttgccaagaaggaaatacttccattaggatttacaacatggttctattgaatttggagttgaaacagctccctggccagctggggctcttcatgccactaaatcagtgggcaaagaaggggattacttttctggctgttgtgattcatcctgataatcaaaggracagtgaggacagggaggactatgtctgaagcttaggggagtcttctaggggcgtatcttcatatttctatgctcaatagtaaatattaataaatatattgcaagtaaggatattcaggactatggaggattcagatccttcagaaatgaaggtttgggtcactctactgggtaaagaatcccagccacctgaggtcctgtctgagggcaagaaaacatggaatggaaggttgaggaagaaatttataaaaatcatctttgacttcatgactggttacagaaacaaggaatgtagcagccaggcatatttttcttccttgatcataatgtgactatatataatggtacacatgggctaatttcttctcccttctcctccctat

SEQ ID NO: 728147 - DNA, 937 bp, Homo sapiens
atataagaagaaaaatactttcaaaacttgcccccagtttctctcaccagaagcaaacatgactcttagactctcttttcatgctttaatattttctttctaaataataagtgtggcaaactatatttttcagtaagatctccatctcatgtgctcttcttgcaatgtaacattgatactcctcccactgagatgtggtgtctgtgtttcttcttccagaatcaaggtgggcctgtgattatggtgaagtgacacttgatgacttcagtgactaggtcataaaaaatggttcagcttccacatgaacctcctggggcaattggcttcagagtcctgagctaccatgtaagaggtctgaagctgctatgctatacagtaattcatgcagtgtagagaagcctcatgtaggtgcttcagccaaccatcccagttgaggtcctggccaattggcagaaycagttccatacatgtgagataataataaaatgatgactattgtactaaactgctgaattttggggtaactttttatattaatacataactgaaacattcatgtacatggcaatcttctatttcattaattttagatatactctattatgtatttttaatagtacttgatcagaaaactctcttataccattaactcttttgcttcctctccctatacttctgatatagtattattatacatttttgttaatcattgcatttgcatccttatgtctatagtgcactttgattgttccttttcatattcttgtataccttaagtgattaattagtaactttttgatttttaatctggttagttttctttgtactaaattgcttttctctcatttcaatagtcttcagtataatttttcattaagttaattatagaaggtaatctaacaatttcatttttttttctggagtcatcccacctgga

SEQ ID NO: 728148 - DNA, 937 bp, Homo sapiens
atataagaagaaaaatactttcaaaacttgcccccagtttctctcaccagaagcaaacatgactcttagactctcttttcatgctttaatattttctttctaaataataagtgtggcaaactatatttttcagtaagatctccatctcatgtgctcttcttgcaatgtaacattgatactcctcccactgagatgtggtgtctgtgtttcttcttccagaatcaaggtgggcctgtgattatggtgaagtgacacttgatgacttcagtgactaggtcataaaaaatggttcagcttccacatgaacctcctggggcaattggcttcagagtcctgagctaccatgtaagaggtctgaagctgctatgctatacagtaattcatgcagtgtagagaagcctcatgtaggtgcttcagccaaccatcccagttgaggtcctggccaattggcagaaccagttccatacatgtgagataataataaaatgatgactattgtactaaactgctgaattttggggtaactttttatattaatacataactgaaacattcatrtacatggcaatcttctatttcattaattttagatatactctattatgtatttttaatagtacttgatcagaaaactctcttataccattaactcttttgcttcctctccctatacttctgatatagtattattatacatttttgttaatcattgcatttgcatccttatgtctatagtgcactttgattgttccttttcatattcttgtataccttaagtgattaattagtaactttttgatttttaatctggttagttttctttgtactaaattgcttttctctcatttcaatagtcttcagtataatttttcattaagttaattatagaaggtaatctaacaatttcatttttttttctggagtcatcccacctgga

SEQ ID NO: 728149 - DNA, 601 bp, Homo sapiens
cacacacatgtgctgcagtgttgaaatactttatggtgcagccagcaatgaattggctgtcatagccaattgtgtttatgtcaatagtttgaaatcagccatggtaggagtatttacaccatggaaatcagcaaagctacaaatgagggactttttccctcagagatttaccagggtagcaggacgagctgcagacaaaactcctgacaccgagttaaagaaggaagtggtttattcggccaggaacattgggaaagactcctgtctcaagagccgagctccccaagtgagcaattcctgtcccttttaagggctcacaactctaaggggatccgcgtgagagggtcgtgatcgattgagcgagcagggggtacatgacaggggctgcatgcaccrgtggtcagagtgaaacagaacagaccaggaagtttcacaatgtcttttctatacaatatctggaatctatagataacataaccggttaggtcaggtgtcgatctttaactaccaggcttaggtcaggcaggcccaggcctggtttcgggtctggttcctaggcgccgggctacctgccttttgtttcgcttttcttttcttttct

SEQ ID NO: 728150 - DNA, 1075 bp, Homo sapiens
gtttagtatttagtacattttatcaaaaagctcattaatgtattggaagtggtaagtggtatggagctgggagtaccaagctcttaatatgcaatacaatgtgaaaaataataccagtatcagagaagtggctggacctctttataggctagagagatatagagaagatattgaaaagcttaatttccacaacacttaactcagggaagtgtttggcaaatcaagtgaatatttgaggtttgaggacttagctttgagagactatgaaaaaaaatccataggcacctggttggtgcctgttgctaaaaagctgagaagacaaggaattgaggtcgaagataaggcaccaccctgggaatttggagacctgggtccctcagagaaggttatgcctgctttgagaaggggttggtgtctgtttgatccattgagagcccagacagaaaggaaaacaggtcctcagtctgctcagatggagcaaagaggggttctggactcacagcaaaggcaaaatccatcctgtgtattttgggtttaagttaactccaaatcagatcaattcaagagtggasgttttaactggctgaaatgagtttataatttctacataagtggtgaaaatacaatcttaaagtgctttgcagtctccagtgttgtaatagtctttggaatcagccagacatgagtttgaatgccagctccacagtctgttagctgaggcaataagtgactggggcaaatcatttaagctctgtcttctccagttctttcttagaggtcctgggaagatgatgtgagattctgattcaaagtgctgagcaaatgtctgttttggtaccagtaccatgctgttttggttgctgtagccttgtagtatagtttaaagtcaggtagggtgatgtcaccagctttgttctttttgcttaggattgtcttgactatacaggctctctgttggttccatatgaaatttaaagtagatttttttctaattctaggaagaatatcaatggtagtttgatgggtatagcattgaatccatgaattactttaggcagtatgaccattttcacga

SEQ ID NO: 728151 - DNA, 897 bp, Homo sapiens
agattatctccttgacaacactactagatgtactaaaggctgtggagcagaggttaattgcaaaacaaaaataaagctgtacttaaatattagaggagaaaattctctttgtgtacacctggccctggtcattattctcagccctgtgagagccaaacctccaggtagtgcatttgagatgcttagataaggagagctcatccagaaacaccctgacctctggtaaagacaatagctttttgccacaatttaggaatatcagggctcgatcttgatagaatagtgtaggcatcatttttagctggggtgattttcctcccagaggacatttggcaatgtctgcagatatttttggttgtcacgttggggggatggtatctagtgagtagagaccagggatgttgctraaaaccctgcaacacacaggacaattgccccacaacaaagatttacttagcctaatagatcaatagtgcaaaggctgagaaacttaggtctggtggaacatttatatatatatatattaaacatacagcatttactgaactaaatggataaaaaagagatctgtctcatttttctaaacaaatgcaagttatatgataactgggttattaacattctacatgcacctcagagacaaatggtcagctgtgcagtcttttcactagatcactaaacagcaaagcaaaaacgttatcctaaaattgcagaacatacatatccttctaatggcatggaagaaataaaaaaaagcatacagaggtccttttcacaatatgaaatagacatatccaaaatttcagtttgcagcactcttaatcctatgccccctaaactacattttaggtatagttacaaatatctgttccaatcatgtcaatattcataagaaca

SEQ ID NO: 728152 - DNA, 2295 bp, Homo sapiens
atccaatcttcacatcagcccaggatagaaggaaggctgggcagagattatgatgctggttgacaaagaagctgagtccagagagaggaaaaggaattgccaaaactcacacatctggccaggacagtactggaaatgcggataactgctgtccctgaaagaggctggtaagtgatggagtttaataggaattgggtttgaaggacctctgttgccagaaagcatgagtatctctaaaggcgaagctgagtcagaggttactagaacagaggcatcagcaaaggatgggagaggtgacgagggcgatctctaagtgtacttggcccaggcctgaggagggcagctgattcccccagcaacagaatgctgtgcctgaggctaactagtcattcaagtctgtacataatctccaatgtcaaaactcaacaagcaaccttaagagagaccactaagtctactgcatgtctgcagggtttggcttccctggactgtgaggtcttccagggaagcgaccatattcatagatttatccccagtttctagcaaggcctggaatatagtaatattgtaactctaatatttttgttcagagcaaaaataaaaaagaatgaatatgctcaaacgggaaactgtagctgagagagcacagataggaggggcctaacatcaaccagcaattctgaagtagtaacagattagttttctgggatgcagcaggacgaatggccctcgcactaaaaggttgctgtcagctcttcttcagaaggggttaacaagcaaatggtgactggcaacaaaagggcaggggttaaacggggcagtggttaaacgagaccgtagtgctggcgccaggatggagacgccgactggctgagactcaaggcggggcagataggtaggcgcggcacacttccttccctaacaatgtgactaaggtaggtcaacgtcacatccggtttagtgggcgggagcggggaaaacaaaaggagacgaaggacgcatgcgtttggtgagtcccggattctggtgggttcttccgctcaggctgggtgaagcgcttccgggtcgccgccggcagcagcctcccggcgcggtaagtacagacgcaaggctgcaaccgtctccttgccccttcattcctttttcccccagagaaacccatttcctttgacccgactccccaggagctccatattgagagtccttaacccttaaagagctccagctcattggccgcttcctcgagactaagccccacccsgtcacacaaggtccgtcattcattggtgtcacttcctgtcacccagcatttctttcagttaattggtcctacccaggccccgcttttttcgcgtttagcaaccctataaggccaaatttctgtctgagacccgccctgctttctttctgttggtcaactgcatggtcattatcgtaatgagcaaagaaagggcggtggctttgcgacggtgggttgggctttcggagccgagatcgctggtctgtcagtacttcttggacatgagggtgtttaccgtcgtgcctaattacgcgggttgggaatctgagatacagggaagggcagcggctggccctgggtcggtcagataaattaagacaaaagcaggaccaggcatcgattattttctcctgctcatccctttcacggaggaattctaagccccgacacactgtatgacctaaagccagtctctgcctgtcgctgggcctcagttcgcctgtcctaagtttaattcagattatctggcactcctggtcggctccctcagccgctcaaagctgattgtacccttataatgttagttcatccattcaatcttccatctacttatttatccacttattcatgcctcctagaatgtcttactgaaccctgcttgcatatgctacaatccctccaccccgacatttggctgtgattcatgagaggtcgttagtgtcctaaatttctgacactgggtgggtgtggtatgggccatcataaagggtcaaaaagcaggttttagtgtgtggaggaggtagggatagtttcagtagaaccctgctacctctaattttgtataatttcataatgccagtctgcattctggattcctatccctacacttgactcccattctcatccctccttgaacagcctgcaaacagctttgttgatccattatttacttaattatcagaataactttgacagtggtataattgttattatccccattttacagatgaagacactgaggctcagagaggttaagtgactcagccaaggtcaaa

SEQ ID NO: 728153 - DNA, 1504 bp, Homo sapiens
taataaatgtgctgaatatacatacatgaaaatacttcctaaaatattagtttattaatgacagtagtcaaccttgaatttatctgtttgaacctatttaagtctacggagttgatctttatttaaaatttacatgtactccctttcgtcttgtggaagtaattaaaatactttatccaagatgaaccatctttctgttttagtagctgtatcctgagacccatttccccagggacttgarttttattatgtgtaaagaaaaaatactacctgttgtgtgttgagtacaagagtacacagggtttttaatagctctgttaataggataatgaataatgtttgtttccaaccaacaggatatctacctaatttattaacaatcaaagatccaactcaaaattaaaatagcatgctattagaagtaggaaaacaaaacagaataatttcttcaccaatgcaaggccttgttcctgatgcctcttatgaaaaccaaaaggaactgatattagctcggcatccgttatgtgtcaggacatgtgctggatgctgccagtacaatggatgatatggcattgtcttatccctcagagagcttacaagctaactgaatgcaggggtgtgaaagaagacagatatgcaacaattagatatggaattggggacgtgttagcatctgaacaaagtcaagtgaaacatacaaaggagtcattctatctgaatgtggtctctgagaaggcatcataaagggacaaacagtacagcaggccttagaggattttataagaactacaggagtagggagtaagggggataccatgcagtgggaaccccaatcaaagcagcaagggccttggaagtatattctccatgttggaagaacaaatggactgtgaattccctgaaggaaagaagcccatattgctttaccactgtttacctagtgctgtggtttggatgtgtccgccaaagtttatgtgttggaaacaatccccaatgcaaccatgtcggaggtagaacctacaagaggtgattaggttagagggctgtgccttcgtggatggattgaagctcttatctcaggagtgggttctggataaaaaggataagctatgccttcttcctctcttgcttttgtccttccaccttccaccatggaatgatgcagcaagaagatcctggccacatgatggcaccttgatgttggacttcccaggctccagaactgtgagccaaataaacttctattgtttatccatttcccagtctcagatattctgttatagcaacacaaatcagactaagacacccagtgtctaaaacactgcacattggaggcactgtaaatttatgttgaattaagtgatctgattgtgtgattaaaactgtaggtgtagcggtgttagacactggaggctaagaatagcacagtggatagatggtgtcaatactacaggatcttgtatgttaatactgaagagtatgcacttaatccagtaattaagca

SEQ ID NO: 728154 - DNA, 320 bp, Homo sapiens
tctgtaaaatgtttgtccataccttggaggtatgagccaaaaggaagagaggattcagcagccccaatacgtccatgtgggtgcatccctgtgtgttgtggtgtaggcggaagaaacatcatctcacacggactcactgtgtctgaatgatataagccagtactgtgtggagatggtgttggagcattaattgctgttgttccaggacaagatccaggctccctcttatcctgttgtcacaaagtacacgcacctgcatgcacagtatgctaggagcacmctggtgaaggagaagaagtgagctaaggccagctagggga

SEQ ID NO: 728155 - DNA, 273 bp, Homo sapiens
tgctaatactataatccckgctgtggacaggggctttcttatcactcccattttccagacaaggaaactgagacacagagagatgaagtaacttgttcaaagtcacaaaggagatagcaaagtagaattagaacccccagagtctcattctgaagcctgcaagctggtgcattctccattataccatgcagcctccgacttggcctgtcccaatggttttgctttgtttggtttgttctgactaggtttcattttacctactattaatgagac

SEQ ID NO: 728156 - DNA, 2694 bp, Homo sapiens
tcagactgagccaccgcagcctccagcttggaattctgaagagaacagagagaacaaggtagattagagtccctgggtctctctgatgcttacctcgatgagaccatgctccccaccaagctgggagcaccccagaacagagcctcttgctttcatcacctgggactcacagagaccacaaccagggactctacatggacagaggggctggagaatgaatgctgagatccagatagggcacacataggctgtgtgaccatggttagaccctcggtctctctgaccttgggcacagatgccccatacctggcacttggcattctccacctcrgccgtcagcctctggatcatgcggttcagctcgttgatctcctccttggtgcggcgcagggtctccccgtgcctgatcaccgtggccttcatctcctcacactgggggaagtagagatgctcatgaggttcagggtgggacctcccacccattcagggcatgacagatgattttgcaggttgtgcagtgctcagcctgtgcaaccacacatggcagtcctgccctaccaccccaacatcagagtggcagccatctcttctcatccctagtgcatccccagaaaaggaagcctatttaatagataatctcaaatccctcccactgccatgtctagaaggcaggtgtcctgtgccactcaccttgctgcggtaccaggactcggcctcagcccggctacgggtgacaatgtcatcgtactgtgccttgatctcggcaatgatgcagtccatgttcaggtcccggctgttgtccagcttgacaaccacggaggtgtctgagatgtgggactggagaacgcggatctcctgcaggaggtgagggcagtgactttagttgagaacacagccccacccaccatgtcctgactccacctcctcaggctttctctggtccccaaccctgccccctcacacagcctcagggactgcaacctctacccacatcctgtccaacactcccacccccatctctcctctctgctggctgccaggtctctgcctggcccctgagcccgcacctcctcatacagccgcctcaggaagtcgatctcctggatcagggcctccacattggcctccaggtctgatttgcggaggtaggcgcagtccacatcctggaaaggtggggagtgttggagctcaaggaccctggtgatccagcctctagattcctctctcttcccacccattccatgaagcctggggaaaggagtccccagtgtctcattcccatgccctctccttcccttctggcccttcccggggtgacctggcatcctctgccattctgaggacaaaccctgtttgtcttgggcacggctcaccagcctttcactgctccttaccctcttatctctcctttctcccctctcctgctccaggaagcctgcccagactgaccccccagctctcacaccctgaccctttcctgtcccccagcagtgctccaaaagcccaagggctactcctggttcttctccatccccccttagaacctgggattgtgtctctgcctcaaggtcagactccccaaaatgctagacagactgcactgtctctcagcagagacattgaatctgctatgtctccagggaactcaaccacaaaccacaacctctggaacagagcaggacacacagaggacagtgcagccatctcctcacccagggcaggtgttggtggatattcccaggtcattgccctttgtcaaggccctggatgctcaatacaaaggcctgcatctgggcagtcctagcctgctgtggaaaggtcattgcaccccacactgaggttgagaccccctgtgtgtccccagaaagagcttgtcattctgagatcccacagatctgtgcttctcaatcctgtgtcacttgccttcttcagagccacaaactcgttctcagctgttgctctcagagaaacctcctcctcatacctgagacagagcagagggaagagaggggaggtcagggcagggcaggtctctgcagagccaccatcacatcacacttcatcacagcgataggggcagtactagaaacacctccacacagccccggcctggcagcctagcttagtcctgtctggttggatgtgggatgtgtctgggattctctatccactttgaactggggatggagagtgctcatctgggacctcccagtcctgttcccaaaggggctctgaggtcccccaggaggcaaataggactcagcccccagccccatcctgggagtggacagcgtggactctcagggcctgtagccctagcctcccctcactggtatcaatcccagctcaggtatggggcctcctggacccgcagaccctcaggacttagaacctaaggcagtgcgacacccagagcccaagacctgtcactcatgagagaccctgggctcacatctgacaggtgctacaagtataggggctgagggtcaggagagaaggcctggaccctgcagaggcttcctccccacccagcgcaggggagagctgctgggtgatgtggttcagggagagaaggctgaagtgggacagagacaggtcatgggagtcagagccctcctcttacacaggtgtctgggcaaagattccacaaaggaaaagaccccgccaccctcggtcaatctagtggtcatggcc

SEQ ID NO: 728157 - DNA, 2694 bp, Homo sapiens
tcagactgagccaccgcagcctccagcttggaattctgaagagaacagagagaacaaggtagattagagtccctgggtctctctgatgcttacctcgatgagaccatgctccccaccaagctgggagcaccccagaacagagcctcttgctttcatcacctgggactcacagagaccacaaccagggactctacatggacagaggggctggagaatgaatgctgagatccagatagggcacacataggctgtgtgaccatggttagaccctcggtctctctgaccttgggcacagatgccccatacctggcacttggcattctccacctcagccgtcagcctctggatcatgcggttcagctcgttgatctcctccttggtgcggcgcagggtctccccgtgcctgatcaccgtggccttcatctcctcacactgggggaagtagagatgctcatgaggttcagggtgggacctcccacccattcagggcatgacagatgattttgcaggttgtgcagtgctcagcctgtgcaaccacacatggcagtcctgccctaccaccccaacatcagagtggcagccatctcttctcatccctagtgcatccccagaaaaggaagcctatttaatagataatctcaaatccctcccactgccatgtctagaaggcaggtgtcctgtgccactcaccttgctgcggtaccaggactcggcctcagcccggctacgggtgacaatgtcatcgtactgtgccttgatctcggcaatgatgcagtccatgttcaggtcccggctgttgtccagcttgacaaccacggaggtgtctgagatgtgggactggagaacgcggatctcctgcaggaggtgagggcagtgactttagttgagaacacagccccacccaccatgtcctgactccacctcctcaggctttctctggtccccaaccctgccccctcacacagcctcagggactgcaacctctacccacatcctgtccaacactcccacccccatctctcctctctgctggctgccaggtctctgcctggcccctgagcccgcacctcctcatacagccgcctcaggaagtcgatctcctggatcagggcctccacattggcctccaggtctgatttgcggaggtaggcgcagtccacatcctggaaaggtggggagtgttggagctcaaggaccctggtgatccagcctctagattcctctctcttcccacccattccatgaagcctggggaaaggagtccccagtgtctcattcccatgccctctccttcccttctggcccttcccggggtgacctggcatcctctgccattctgaggacaaaccctgtttgtcttgggcacggctcaccagcctttcactgctccttaccctcttatctctcctttctcccctctcctgctccaggaagcctgcccagactgaccccccagctctcacaccctgaccctttcctgtcccccagcagtgctccaaaagcccaagggctactcctggttcttctccatccccccttagaacctgggattgtgtctctgcctcaaggtcagactccccaaaatgctagacagactgcactgtctctcagcagagacattgaatctgctatgtctccagggaactcaaccacaaaccacaacctctggaacagagcaggacacacagaggacagtgcagccatctcctcacccagggcaggtgttggtggatattcccaggtcattgccctttgtcaaggccctggatgctcaatacaaaggcctgcatctgggcagtcctagcctgctgtggaaaggtcattgcaccccacactgaggttgagaccccctgtgtgtccccagaaagagcttgtcattctgagatcccacagatctgtgcttctcaatcctgtgtcacttgccttcttcagagccacaaactcgttctcagctgttgctctcagagaaacctcctcctcatacctgagacagagcagagggaagagaggggaggtcagggcagggcaggtctctgcagagccaccatcacatcacacttcatcacagcgataggggcagtactagaaacacctccacacagccccggcctggcagcctagcttagtcctgtctggttggatgtgggatgtgtctgggattctctatccactttgaactggggatggagagtgctcatctgggacctcccagtcctgttcccaaaggggctctgaggtcccccaggaggcaaataggactcagcccccagccccatcctgggagtggacagcgtggactctcagggcctgtagccctagcctcccctcactggtatcaatcccagctcaggtatggggcctcctggacccgcagaccctcaggacttagaaccyaaggcagtgcgacacccagagcccaagacctgtcactcatgagagaccctgggctcacatctgacaggtgctacaagtataggggctgagggtcaggagagaaggcctggaccctgcagaggcttcctccccacccagcgcaggggagagctgctgggtgatgtggttcagggagagaaggctgaagtgggacagagacaggtcatgggagtcagagccctcctcttacacaggtgtctgggcaaagattccacaaaggaaaagaccccgccaccctcggtcaatctagtggtcatggcc

SEQ ID NO: 728158 - DNA, 2694 bp, Homo sapiens
tcagactgagccaccgcagcctccagcttggaattctgaagagaacagagagaacaaggtagattagagtccctgggtctctctgatgcttacctcgatgagaccatgctccccaccaagctgggagcaccccagaacagagcctcttgctttcatcacctgggactcacagagaccacaaccagggactctacatggacagaggggctggagaatgaatgctgagatccagatagggcacacataggctgtgtgaccatggttagaccctcggtctctctgaccttgggcacagatgccccatacctggcacttggcattctccacctcagccgtcagcctctggatcatgcggttcagctcgttgatctcctccttggtgcggcgcagggtctccccgtgcctgatcaccgtggccttcatctcctcacactgggggaagtagagatgctcatgaggttcagggtgggacctcccacccattcagggcatgacagatgattttgcaggttgtgcagtgctcagcctgtgcaaccacacatggcagtcctgccctaccaccccaacatcagagtggcagccatctcttctcatccctagtgcatccccagaaaaggaagcctatttaatagataatctcaaatccctcccactgccatgtctagaaggcaggtgtcctgtgccactcaccttgctgcggtaccaggactcggcctcagcccggctacgggtgacaatgtcatcgtactgtgccttgatctcggcaatgatgcagtccatgttcaggtcccggctgttgtccagcttgacaaccacggaggtgtctgagatgtgggactggagaacgcggatctcctgcaggaggtgagggcagtgactttagttgagaacacagccccacccaccatgtcctgactccacctcctcaggctttctctggtccccaaccctgccccctcacacagcctcagggactgcaacctctacccacatcctgtccaacactcccacccccatctctcctctctgctggctgccaggtctctgcctggcccctgagcccgcacctcctcatacagccgcctcaggaagtcgatctcctggatcagggcctccacattggcctccaggtctgatttgcggaggtaggcgcagtccacatcctggaaaggtggggagtgttggagctcaaggaccctggtgatccagcctctagattcctctctcttcccacccattccatgaagcctggggaaaggagtccccagtgtctcattcccatgccctctccttcccttctggcccttcccggggtgacctggcatcctctgccattctgaggacaaaccctgtttgtcttgggcacggctcaccagcctttcactgctccttaccctcttatctctcctttctcccctctcctgctccaggaagcctgcccagactgaccccccagctctcacaccctgaccctttcctgtcccccagcagtgctccaaaagcccaagggctactcctggttcttctccatccccccttagaacctgggattgtgtctctgcctcaaggtcagactccccaaaatgctagacagactgcactgtctctcagcagagacattgaatctgctatgtctccagggaactcaaccacaaaccacaacctctggaacagagcaggacacacagaggacagtgcagccatctcctcacccagggcaggtgttggtggatattcccaggtcattgccctttgtcaaggccctggatgctcaatacaaaggcctgcatctgggcagtcctagcctgctgtggaaaggtcattgcaccccacactgaggttgagaccccctgtgtgtccccagaaagagcttgtcattctgagatcccacagatctgtgcttctcaatcctgtgtcacttgccttcttcagagccacaaactcgttctcagctgttgctctcagagaaacctcctcctcatacctgagacagagcagagggaagagaggggaggtcagggcagggcaggtctctgcagagccaccatcacatcacacttcatcacagcgataggggcagtactagaaacacctccacacagccccggcctggcagcctagcttagtcctgtctggttggatgtgggatgtgtctgggattctctatccactttgaactggggatggagagtgctcatctgggacctcccagtcctgttcccaaaggggctctgaggtcccccaggaggcaaataggactcagcccccagccccatcctgggagtggacagcgtggactctcagggcctgtagccctagcctcccctcactggtatcaatcccagctcaggtatggggcctcctggacccgcagaccctcaggacttagaacctaaggcagtgsgacacccagagcccaagacctgtcactcatgagagaccctgggctcacatctgacaggtgctacaagtataggggctgagggtcaggagagaaggcctggaccctgcagaggcttcctccccacccagcgcaggggagagctgctgggtgatgtggttcagggagagaaggctgaagtgggacagagacaggtcatgggagtcagagccctcctcttacacaggtgtctgggcaaagattccacaaaggaaaagaccccgccaccctcggtcaatctagtggtcatggcc

SEQ ID NO: 728159 - DNA, 2694 bp, Homo sapiens
tcagactgagccaccgcagcctccagcttggaattctgaagagaacagagagaacaaggtagattagagtccctgggtctctctgatgcttacctcgatgagaccatgctccccaccaagctgggagcaccccagaacagagcctcttgctttcatcacctgggactcacagagaccacaaccagggactctacatggacagaggggctggagaatgaatgctgagatccagatagggcacacataggctgtgtgaccatggttagaccctcggtctctctgaccttgggcacagatgccccatacctggcacttggcattctccacctcagccgtcagcctctggatcatgcggttcagctcgttgatctcctccttggtgcggcgcagggtctccccgtgcctgatcaccgtggccttcatctcctcacactgggggaagtagagatgctcatgaggttcagggtgggacctcccacccattcagggcatgacagatgattttgcaggttgtgcagtgctcagcctgtgcaaccacacatggcagtcctgccctaccaccccaacatcagagtggcagccatctcttctcatccctagtgcatccccagaaaaggaagcctatttaatagataatctcaaatccctcccactgccatgtctagaaggcaggtgtcctgtgccactcaccttgctgcggtaccaggactcggcctcagcccggctacgggtgacaatgtcatcgtactgtgccttgatctcggcaatgatgcagtccatgttcaggtcccggctgttgtccagcttgacaaccacggaggtgtctgagatgtgggactggagaacgcggatctcctgcaggaggtgagggcagtgactttagttgagaacacagccccacccaccatgtcctgactccacctcctcaggctttctctggtccccaaccctgccccctcacacagcctcagggactgcaacctctacccacatcctgtccaacactcccacccccatctctcctctctgctggctgccaggtctctgcctggcccctgagcccgcacctcctcatacagccgcctcaggaagtcgatctcctggatcagggcctccacattggcctccaggtctgatttgcggaggtaggcgcagtccacatcctggaaaggtggggagtgttggagctcaaggaccctggtgatccagcctctagattcctctctcttcccacccattccatgaagcctggggaaaggagtccccagtgtctcattcccatgccctctccttcccttctggcccttcccggggtgacctggcatcctctgccattctgaggacaaaccctgtttgtcttgggcacggctcaccagcctttcactgctccttaccctcttatctctcctttctcccctctcctgctccaggaagcctgcccagactgaccccccagctctcacaccctgaccctttcctgtcccccagcagtgctccaaaagcccaagggctactcctggttcttctccatccccccttagaacctgggattgtgtctctgcctcaaggtcagactccccaaaatgctagacagactgcactgtctctcagcagagacattgaatctgctatgtctccagggaactcaaccacaaaccacaacctctggaacagagcaggacacacagaggacagtgcagccatctcctcacccagggcaggtgttggtggatattcccaggtcattgccctttgtcaaggccctggatgctcaatacaaaggcctgcatctgggcagtcctagcctgctgtggaaaggtcattgcaccccacactgaggttgagaccccctgtgtgtccccagaaagagcttgtcattctgagatcccacagatctgtgcttctcaatcctgtgtcacttgccttcttcagagccacaaactcgttctcagctgttgctctcagagaaacctcctcctcatacctgagacagagcagagggaagagaggggaggtcagggcagggcaggtctctgcagagccaccatcacatcacacttcatcacagcgataggggcagtactagaaacacctccacacagccccggcctggcagcctagcttagtcctgtctggttggatgtgggatgtgtctgggattctctatccactttgaactggggatggagagtgctcatctgggacctcccagtcctgttcccaaaggggctctgaggtcccccaggaggcaaataggactcagcccccagccccatcctgggagtggacagcgtggactctcagggcctgtagccctagcctcccctcactggtatcaatcccagctcaggtatggggcctcctggacccgcagaccctcaggacttagaacctaaggcagtgcgacacccagagcccaagacctgtcactcatgagagaccctgggctcacatctgacaggtgctacaagtataggggctgagggtcaggagagaaggcctggaccctgcagaggcttcctccccacccagcgcaggggagagctgctgggtgatgtggttcagggagagaaggctgaagtgggacagagacaggtcatgggagtcasagccctcctcttacacaggtgtctgggcaaagattccacaaaggaaaagaccccgccaccctcggtcaatctagtggtcatggcc

SEQ ID NO: 728160 - DNA, 606 bp, Homo sapiens
ttgtgtatattttactttaattatttttcagcctacttagccccttttaccaaatataaaatgggtggtcatcaagcaacaacattatttctcaaaccatgataaaaactatttcaaagttttatttgatcagtctctaaatccttaggttattatatatattttatatataatatgtatttatatataatatatatattttatatataatttatatattatataaaaattataaaaatgtatatattatatataaaaattatatatataatttatatattatataaaatatatatratatttttatacaagcaatttataaatgttatttatatacacagcagaaacagttttattagtatattacatcctaaggcaacaattttaaagggagtaacactcatttatatatgaatcttgaatttataaaaattcagttcatttcagtcacagtacataaatttacctgtcactgtcaccttaagtcttcaataaacgtgaactttgaggtctactactgctcgaactgttaaatgcccattttgaaaaattctactcaaagacccattctgaatcagtccagagtgattgtaggttacagtttca

SEQ ID NO: 728161 - DNA, 972 bp, Homo sapiens
tggtttgactgccattttctttttttgtagattctttaaaagagaagtcttttctgtctctccctctgtcacacacacacacgtgaaactactaaatgtgtgtatatatgtgtgaatccactaattctacttataggatataaagaaaatgtcatatatatatgtgtgtgtatatatatgtgtgtgtgtgttttgtcatttgtttatggcacacatatacacgtgtgtgtgtctgttgagtgtgtgtcttgtgtgtgtctctgattaggaagttcttaattttaagaaagtctaatatgtcacatttttacctttataagcatcactttttgttttcttttaaaacatcttctcttagcttttttttgaactttattttttaatgtcacatttcaatgtatgattgaaataatttctatataattatctacttaatccagaaatatttattgaaaatacaatccttttttattagaactgcagtattatcactttaatattgttgtctatatagatggaaaactatggattctgtgttctacttatctatttttctctattaatttttcatcagatactatttcattatttgtttagtctttgtcctagaattcaaaatgcattcttgaattactatgttcagttatttctgaacatagtatttctccaaatactgctaaaacattaaaatcctttaattctatttatgcattttttgcttttttaattatacttaccatacactttaattctaaacataaacttcatcagtcattcctattctttctttttatagtccaaatttattgattttcacccatgtgtttgtattttctcktatacttcacatgttgaagcaatgtagtggcttcctctgtaatcaataacctgcctatagaacttgatttagttagtatttgttttagtggaggcttgttggtgataaatcctttcaattttggtattttcatt

SEQ ID NO: 728162 - DNA, 629 bp, Homo sapiens
agaggctgtgcttggcatctagtgagatgcaaagaggcatgcggatcttactgtaactatcattccaaggtgtgcctagactctgccactggtgcaaaatctctctggatcaaggtgcagaggtgaagccctatgatgtaggaggttaggatgatggtaaaactgatttcttcattcagtggaatgctgggtgtttaagattgtcctgttatttaatgcaaatttgaaaatcacagatgcaggaatgtcagcttaatttgagattgtatagaggaragaaaaacatgcacagatgtcaaccatgtcagatgctgtactaggcactgtggggaacccagaaatgaataaggtgcagtcctcctggagtttacagtctagagatgagcatgggaaggtcacgaaactgggcatacgtcaggaggcaaaatggaatggaggtttcaaattaggtagaagtcagagggttgatgaaataaatgctcagagatgaggaagcacacatcatgtcttgaaaatttcaagtgactcaatttagcaaaacagtagagttaactccccatatctgtaggttccacacctgtagatttaaccaaccatgggtataaaatattttttaaaaattccatctg

SEQ ID NO: 728163 - DNA, 627 bp, Homo sapiens
tgtgttcaaacattcttttcatcaccattatagcaatttcaatgtttgccaagtgggtttctgtatttagcccagactcctttgtttgcagtgtaccctcactaaaaatatgctttatcttttgtcaatctgaagacacttgaatcattttctagctcaagtctgtcatttttttccctgaccatctaagttaaatactgttctttcacacttctaaattctcagtagtactttctcactgtccctccaattatatcctgtaatgcactgcaattattttccaggcatatgtcttatcactccaaggcaactctcygtgagctttttgaaattaatgaggaaacttcataccatgtcctacctcctagagtacttagcacaatgcctgatatatccgagttatggtgggtaatgaaaaagagggcaattgagatgacttgtgcagctctttagctcatcagttactcatctactcctattcctgatattggaatcagggctctcataaaacctaccacatatacaaatttacatttatcttacttaggtccattgaaatcatagtttattcccctaattctagaaagcttttagaatatatgccttgcattcttttcttcagatacc

SEQ ID NO: 728164 - DNA, 630 bp, Homo sapiens
ggatcttaagtgttcccatcccaaaaataatacctatgtgatgtaattcatttgtcaattaggtagattaaaacattccacaatatatacatgcttcaaaacatcatactgtacagaataagtatacacaattttatccatcaattttaaaaaataacactaataattaactacttaatcaaatgtatatattgaaaattcactacattttaatctttggcttccccaggaacacttgatgaacttaacataatctctgactgcagaaagccttctcttctgtgtagttccaggggagggagagagaggtgtacagtccagaatagtataggtgaatatagctgtgggctcactgtctactcctccygtctgtttaacacctcttttctttgctcactaatctgttcaagtttctttgacacacagcatgctcctttcttcttcaggattttcggacaccatatttctttcaccttaaaactcttacttctccaaccctatccactctctggataccaatatagacatatcgtactcaggaaatcctcacttagacctctgtagcctaggtaaaatcttcatggtgcaccctttgtgaggaacttctttcttttctactatttatgacaa

SEQ ID NO: 728165 - DNA, 653 bp, Homo sapiens
aggatgatattctcacatatttaaagatgttttgctttccctaatattaaaaaacattaaacaaaaaaatgaatactttcagatacagaaaaatacaaaccagagaagccatgactccaggagcatggcactaccccaggaacagagtcagcatccaaaaccttcagaggccagcacaaccctacctgaaagccatctcaagactcctcagatgccaccaacaaccccatccagcagttccttcaccaaggtacaatatcctgggtcccatgactcttatctcccaaatataaattacaaggatcattagattgttgaaagagtttctcttctaatccctaactgtgtacaatctctagataaaattaaatcacccatgtatttattgaatgcatacagtgagatactaccacatgatagtctttgctatctaaaagatatttatttgtgcaacgattgctgaccacaagagggctagtatcttgtgttgctccacctatgggaggggtaatggccagagaagtagagatgaagacaaagagtgtgttatgacccacaktccaatttctttcacaactttcccctttgcttattggtattatttctgaatttattttcagcattccaagttgaaataaatattcgaagtatat

SEQ ID NO: 728166 - DNA, 636 bp, Homo sapiens
agggagtatttaaaccagccctagccagaggagaatcaccatcccaacagtcagaacttgagttactgcaagcctcagcaaagcgggctaaaatgctatggggcgttaaataatgtttatttaagtttaataaacttaaataacaatttaagttccaattaagtaacaattttaagtttaataaataacaatttaagttaataataaacattatttaaggttccaaagcctaggctctaaacagtctaggccacagggattacaactcctaggcatgtcctagtcctgaactggactcagagccagtggacctggagaacaggcaacctattgagacaccagccaggccagctaagggagtgcttgcaccgtccctcctccaaccccaggctgcacagcttacagttcccaaggagacccctttcttctgcttgaggagagggaagagtggggaggactttgtcttccatcttggataccagctcagtcacagtaggataggcaccagtcacagtcagagtcataaggcccccttgccatgccccagctcctgaacatcatttctggacacccccygagccagaagggaacctgctgccatgaaggtaaggacccagtcttagaaagacccttcac

SEQ ID NO: 728167 - DNA, 616 bp, Homo sapiens
tttcctgaaaatggaaccaaaatggaggggcctrgggtgtactagtcagtctatataatttactatcataataaactgggttctttttgttttttcttctatgatgaaaaataatgtaggaacaaaagtccacataattccatccatcacatttgatatgtccttgtattaatcaggatagaaaaactatgttgttctaatggtaaatcacccaatctcagtagcttattctataaaagtgtatttcttgctcacataaaatctgatatgctttggatcttgctcttccattttatagctatgccaaatggaaaatatgtcttccaagatcactgcaacaacagaaaagaaggctagacagcatacaggagctcttacatggcccctgtcacttctgctcatagcccattggctagaattagtcacatggcccaggccagctacaagggaaactgagaaatatgtaaaagaacaagtgattatttagagaatgatgtctctgacccacgaattatttctaccctccttcctgctggcaccctgcttttccctttcccgcttttcattcttttctttctttcctttctttctttctttctttctttctttctttctt

SEQ ID NO: 728168 - DNA, 616 bp, Homo sapiens
tttcctgaaaatggaaccaaaatggaggggcctagggtgtactagtcagtctatataatttactatcataataaactgggttctttttgttttttcttctatgatgaaaaataatgtaggaacaaaagtccacataattccatccatcacatttgatatgtccttgtattaatcaggatagaaaaactatgttgttctaatggtaaatcacccaatctcagtagcttattctataaaagtgtatttcttgctcacataaaatctgatatgctttggrtcttgctcttccattttatagctatgccaaatggaaaatatgtcttccaagatcactgcaacaacagaaaagaaggctagacagcatacaggagctcttacatggcccctgtcacttctgctcatagcccattggctagaattagtcacatggcccaggccagctacaagggaaactgagaaatatgtaaaagaacaagtgattatttagagaatgatgtctctgacccacgaattatttctaccctccttcctgctggcaccctgcttttccctttcccgcttttcattcttttctttctttcctttctttctttctttctttctttctttctttctt

SEQ ID NO: 728169 - DNA, 616 bp, Homo sapiens
tttcctgaaaatggaaccaaaatggaggggcctagggtgtactagtcagtctatataatttactatcataataaactgggttctttttgttttttcttctatgatgaaaaataatgtaggaacaaaagtccacataattccatccatcacatttgatatgtccttgtattaatcaggatagaaaaactatgttgttctaatggtaaatcacccaatctcagtagcttattctataaaagtgtatttcttgctcacataaaatctgatatgctttggatcwtgctcttccattttatagctatgccaaatggaaaatatgtcttccaagatcactgcaacaacagaaaagaaggctagacagcatacaggagctcttacatggcccctgtcacttctgctcatagcccattggctagaattagtcacatggcccaggccagctacaagggaaactgagaaatatgtaaaagaacaagtgattatttagagaatgatgtctctgacccacgaattatttctaccctccttcctgctggcaccctgcttttccctttcccgcttttcattcttttctttctttcctttctttctttctttctttctttctttctttctt

SEQ ID NO: 728170 - DNA, 666 bp, Homo sapiens
ttaagacattaagtttcttatggtagcccaaggaaacaaatacactcactatagctaactctccaaactggtacatttcttttcatcgtgtcagtgccaatactgataattatgtttcctggtttttaaaattcatgtttaccagacctagtttaggcacctctccaggcaatcagggtccgctggtccttggtgacttgctctgtttcctggctggaactgctgaacaatggcttctgccattcccacaatcaaaattgtagctaccaataagaatgtactaattctaccacctttctgggctcaagtgccaggctttagggccaccttcatcatgctagctctggcagaagctgcagcagtttccatgtccaagtccaacctgactagacctawagaggccccagcttccccaaaagctccacaggggctggctaacatcaactggagttgcagggcagtaaatgctccgtgaggcaaactttaagggaatacaggagtcataaggagacagaccatgaattgttctgtcttcctcccatcttagaaactgttcagagatgcagaggctctacagtggctttcctgagttatcctatttaaccaagaaaccattgctactttcttggaaagctttagccagctcatcatacacaaggttattat

SEQ ID NO: 728171 - DNA, 946 bp, Homo sapiens
tttcagaagagcatttgctccccaccccacacctccacccaggctttagacagccttcaggaagccctcaagagggcgagcagcagagatcatctaatggacttcaaataaacaccaacttcctgacagctggcctctgagcaaatttattattgaattatactcctgcattttcagaacaagctgagctgacagggtaccccatcagtttaaaaaaaaaaaaaagggaaagaaagacaatgataaattacctgatggaagatagaagaaggcaaagatcctgcttcctccaaaatgtcagccattatatattattcatgttggttttttaaaaatccctccccgcgttgaaatgaatgtttatgatgataaagcaactaggtgattcaattcaggatgcaggcaacgacttctcacatcatcctgatgagcagctaacaactcctcctctgccacttgatcatccctttattgatttcaaaaatgaattacgatctctgtttgcttkgtagcttgagcttgttcctagttgtccatcacagaaagcattagcagaggatgctgtggtgcagcgggaacagcttgggttagagggagagagcctggattcaagtccttgggaaagtgagaacatgggaccttgggctggtgagactcaacttcctcccctctgatgtggggtcactaattccaccctgccaggttgtttggaagattaaatgagataaaatacccagaagcccgatgtctggctcatagcatgcgttcagtactaacacctaacatttaccaaggatattctatttggaatgttttataggtagtaacacctttaaatctctggcagaccctatgatatagggactttatcacccttgttttaagcaatgaaaactgagctactgagaatttaagtaatctgggccatggtcatagggcttgtaat

SEQ ID NO: 728172 - DNA, 972 bp, Homo sapiens
taacctgtatataataaataacttaaagtttaaaatcaaatttataatttttgataaaaagaaaaagtctgaatattctctacaagtagagaatatgtttaaaatgttgatgttctcagctgggcacagtggcttacatctgtattcccagcacttttagtggctgtggcagaggatcccttgaggccaggagttcaagaccagcctgagcaacatagtgagaaccacccccaccccgcgccatccctatttaaaaatattataaataaataaaacgttgatgatcttaaatagtccacttaacctctaaccaacacttaccctatttttctgcgattgtttacacctaaacttctcaaaagttgcctatattcatggtttccattccaattaattaatcaactgaaagactcctcttgccataagggtcaaggaattttccaaggttgaggacaagggtcaagattacagtaggctggtacagtgagttggaatcactttttctgaaagtttactcacaataaagtggactggagaaaagaacggaagatgaacagctttgtcagatttctcttctgctggattttctgaatttctcatgtttgctctggatagtttttattttgtgcttgagtgaatctgctgtttccttcctcatatgcgtattttagttcagagtttgtttttctttttttaagtgctcttatcctaacagatgtttttaatatatcatgtcttggttttgtttccaagaggtgatatgctgcagtttatcactgaggtcctgagatggtccatactctaagctttgtgtctactgtggggggcaaagggaaaacttcccccttgctctctgaagagtcattgaaaatcaactgacaaaaggtagattgrtagggaaaaaaatccatacacacttattaatgtgggaggcatggggaggaaatctccctagtggggtacacagaagct

SEQ ID NO: 728173 - DNA, 1203 bp, Homo sapiens
atgtggttaaatgtaatagtgaagtcagtatgaataacagattacagaggaatagactagatccataggaatgtatattatttagtatctgycttttttaacaaactcatccattgtcctctgtaacatacaactcatgtgaataatttttcttcctgtctgaagttctcatccctttttatagttttattttctgagggaaaaaaatattgttctttattaagtttttataacattttctcttgccttaggatgcaaattgatttctttgctgagagcacacccttaacagcttcttcctttggtaaagcatctgctaagcatctgcttttaaaatgatgataatttctggtagagaagaactgcaggctcatttcaacccattaaacagtccacagtttcataatttaacttcaagaaaaatggaagtttctcttcttaggcatctctttctgccaccttcagagaactctacaggaagtatccatgggccctcaaaaaatggcatgtctgtgcataaaaatagcagcatggagcaggcatcagcgtcagaaggagagttgatgacaccttctgtgctccagagctcccaggaggcaccacacacaattaatgccctgtgacacagctgctgacctctttccactcattccttccattctctcatttgttcacattcttattcttattgtatcaacctcgatagttaatagatatgcactctttctgtttttacttcctttcataaaagctttatcgaatgactgttcaaggcctggcattgggccaagtactaaggttttcttcttagaattagtgtggttttcccactggacattttttcctttgactttcacagtaaggtctcctagagtactaaactgcagatcaagtagggagctactttcattagctgctgtcttggcatcaagaaactgttattaattcgtatattcctaactgtgctctcacgttatatagatacagaaactgagacctagaaaagaggagagtgatccaaggtcatacaactacttcatggcagtacccaggataggtctttctctctttatggaacaaatatggctaccaatatccatcagcttattgaaatgtggcaaattgaatcatcttttctcgctctcattttgtaataatggattgacccaggtgtcaagttaacccagcctcaaggatcagtct

SEQ ID NO: 728174 - DNA, 566 bp, Homo sapiens
caaaaggttgtgtaaaacctgtgatcttttcttctatagcatttcatgagaattaaaggtcttaaggttaagcaggacattgaggaatcctctaggaagccctctgaaataatacaaatacatcatcactccagatagattttaaacatcccattttatgaggaagaattccgtaatcaccttatgagaagagaactcaataatatagatttttactgcagggacatttaattccccaaaagtaaagggcatttatttaaaacaccaggttccccaagatactagagtaacatttaaaatggtaccaaaacattgatgatcccactgggaatttttagcctgactacttttgcacacagcctacatacagagctttgtctcgcttccgcatccctttgtgatttgtaatcatkgctgtcatctcctccagatgggaagctcctgtggcgcaaggaccatgtttttgttcatcatcatctctctcccacagtgcttttacattgcaggtcctcaaggagtaattactgaacacataatacatagtacagatcaggaatagtgaattc

SEQ ID NO: 728175 - DNA, 922 bp, Homo sapiens
ctttttgcagcacaactttctgagaagtaaaccatgcagacctcagtgatgtctccttgtcattaggagaatggagttgatctgtaggggatggagttttcagcttgaaaactactttcagtgttgggtttttttgtttgtttgtttttgtctttgtttttggctctgctcaatagtatagagcgtcataaccaaactggctaggttcaaatccaggctgcttataagctatgcaacttcagggaatttttgttgcttccctgcacttccatttctccaaccataaaatgagattataaatgtatacgtcttatagagtttttgtgtggtgtaaataagttatatgtaagatacttgagagaataacaaatgcatgtatatgtaaatatatgtaatgtgttgaatgaaagctgtgattatcgttgtgttaactgtgttctactgagtaaaatgatatcatagcattttaaatagaagagttaagaaattttctttagtgttcaaggagtgttcctctaactttactgatacaggagatcttcactcctgcatagtccttctaaggcactctggagctaaaacacatattaaggtagaacatgtattcagatttaagaagtgtcggctgggcgcagtggctcactcctgtaatctcagcactttgggaggccaaggcaggcagatcatgaggtcaggagattgagaccatcctggctaacatggtgaaacctcatctctactaaaaaaaaaaaaatacaaawttttagccagatgtggtggcacgcgcctgtagtcccagctactcaggaggctgaggcaggataatcacttgaaaccaggaggcagaaatggcagtgagccgaggtcgaaccattgcactccagcctgagtaacgaagggagcgagactctgtctttaaaaa

SEQ ID NO: 728176 - DNA, 922 bp, Homo sapiens
ctttttgcagcacaactttctgagaagtaaaccatgcagacctcagtgatgtctccttgtcattaggagaatggagttgatctgtaggggatggagttttcagcttgaaaactactttcagtgttgggtttttttgtttgtttgtttttgtctttgtttttggctctgctcaatagtatagagcgtcataaccaaactggctaggttcaaatccaggctgcttataagctatgcaacttcagggaatttttgttgcttccctgcacttccatttctccaaccataaaatgagattataaatgtatacgtcttatagagtttttgtgtggtgtaaataagttatatgtaagatacttgagagaataacaaatgcatgtatatgtaaatatatgtaatgtgttgaatgaaagctgtgattatcgttgtgttaactgtgttctactgagtaaaatgatatcatagcattttaaatagaagagttaagaaattttctttagtgttcaaggagtgttcctctaactttactgatacaggagatcttcactcctgcatagtccttctaaggcactctggagctaaaacacatattaaggtagaacatgtattcagatttaagaagtgtcggctgggcgcagtggctcactcctgtaatctcagcactttgggaggccaaggcaggcagatcatgaggtcaggagattgagaccatcctggctaacatggtgaaacctcatctctactaaaaaaaaaaaaatacaaattwttagccagatgtggtggcacgcgcctgtagtcccagctactcaggaggctgaggcaggataatcacttgaaaccaggaggcagaaatggcagtgagccgaggtcgaaccattgcactccagcctgagtaacgaagggagcgagactctgtctttaaaaa

SEQ ID NO: 728177 - DNA, 922 bp, Homo sapiens
ctttttgcagcacaactttctgagaagtaaaccatgcagacctcagtgatgtctccttgtcattaggagaatggagttgatctgtaggggatggagttttcagcttgaaaactactttcagtgttgggtttttttgtttgtttgtttttgtctttgtttttggctctgctcaatagtatagagcgtcataaccaaactggctaggttcaaatccaggctgcttataagctatgcaacttcagggaatttttgttgcttccctgcacttccatttctccaaccataaaatgagattataaatgtatacgtcttatagagtttttgtgtggtgtaaataagttatatgtaagatacttgagagaataacaaatgcatgtatatgtaaatatatgtaatgtgttgaatgaaagctgtgattatcgttgtgttaactgtgttctactgagtaaaatgatatcatagcattttaaatagaagagttaagaaattttctttagtgttcaaggagtgttcctctaactttactgatacaggagatcttcactcctgcatagtccttctaaggcactctggagctaaaacacatattaaggtagaacatgtattcagatttaagaagtgtcggctgggcgcagtggctcactcctgtaatctcagcactttgggaggccaaggcaggcagatcatgaggtcaggagattgagaccatcctggctaacatggtgaaacctcatctctactaaaaaaaaaaaaatacaaatttttagccagatgtggtggcacgcgcctgtagtcccagctactcaggaggctgaggcaggataatcacttgaaaccaggaggcagaaatkgcagtgagccgaggtcgaaccattgcactccagcctgagtaacgaagggagcgagactctgtctttaaaaa

SEQ ID NO: 728178 - DNA, 627 bp, Homo sapiens
ttttgatcccaccataatttttcatcttccatttccttgtttcatttcatttttctatttgaaagttcctgcatccactaaactgcttgcactattttacctatcttaagtcctttgagaacaaggtgggctattgcttgattttaattcaaacaaattgataaatgaactaaaggcatattaatctaaatagaaggttctattttgggyattatgagttaaactatctgatttgacattcttcttttcatatgaataatagctatcctttgacctcagaaagaaacttggatgacttaggtgtctctaaattttcaagtctctagttgctttgaaagctcaactacaccagtgttgcagaaaaaagagaaaacatgtgacccaagatagtctacttcaaaatctttttgacccttatctttcctttgtgccgttccatggatgtttctacattagaaaatctattttccatttttaataggatggaatattataagcaagaaataagcctagtggagatataaatctttcctattttatgaatgcttaacatatctgctgtttccttttgctcaggggagttttctctcagaagctaattttttaatctgatcctaatccaattta

SEQ ID NO: 728179 - DNA, 627 bp, Homo sapiens
ttttgatcccaccataatttttcatcttccatttccttgtttcatttcatttttctatttgaaagttcctgcatccactaaactgcttgcactattttacctatcttaagtcctttgagaacaaggtgggctattgcttgattttaattcaaacaaattgataaatgaactaaaggcatattaatctaaatagaaggttctattttgggtattatgagttaaactatctgatttgacattcttcttttcatatgaataatagctatcctttgacctcagaaagaaacttggatgacttaggtgtctctaaattttcaagtctctagttgctttgaaagctcaactacaccagygttgcagaaaaaagagaaaacatgtgacccaagatagtctacttcaaaatctttttgacccttatctttcctttgtgccgttccatggatgtttctacattagaaaatctattttccatttttaataggatggaatattataagcaagaaataagcctagtggagatataaatctttcctattttatgaatgcttaacatatctgctgtttccttttgctcaggggagttttctctcagaagctaattttttaatctgatcctaatccaattta

SEQ ID NO: 728180 - DNA, 627 bp, Homo sapiens
ttttgatcccaccataatttttcatcttccatttccttgtttcatttcatttttctatttgaaagttcctgcatccactaaactgcttgcactattttacctatcttaagtcctttgagaacaaggtgggctattgcttgattttaattcaaacaaattgataaatgaactaaaggcatattaatctaaatagaaggttctattttgggtattatgagttaaactatctgatttgacattcttcttttcatatgaataatagctatcctttgacctcagaaagaaacttggatgacttaggtgtctctaaattttcaagtctctagttgctttgaaagctcaactacaccagtrttgcagaaaaaagagaaaacatgtgacccaagatagtctacttcaaaatctttttgacccttatctttcctttgtgccgttccatggatgtttctacattagaaaatctattttccatttttaataggatggaatattataagcaagaaataagcctagtggagatataaatctttcctattttatgaatgcttaacatatctgctgtttccttttgctcaggggagttttctctcagaagctaattttttaatctgatcctaatccaattta

SEQ ID NO: 728181 - DNA, 627 bp, Homo sapiens
ttttgatcccaccataatttttcatcttccatttccttgtttcatttcatttttctatttgaaagttcctgcatccactaaactgcttgcactattttacctatcttaagtcctttgagaacaaggtgggctattgcttgattttaattcaaacaaattgataaatgaactaaaggcatattaatctaaatagaaggttctattttgggtattatgagttaaactatctgatttgacattcttcttttcatatgaataatagctatcctttgacctcagaaagaaacttggatgacttaggtgtctctaaattttcaagtctctagttgctttgaaagctcaactacaccagtgttgcagaaaaaagagaaaacatgtgacccaagatagtctacttcaaaatytttttgacccttatctttcctttgtgccgttccatggatgtttctacattagaaaatctattttccatttttaataggatggaatattataagcaagaaataagcctagtggagatataaatctttcctattttatgaatgcttaacatatctgctgtttccttttgctcaggggagttttctctcagaagctaattttttaatctgatcctaatccaattta

SEQ ID NO: 728182 - DNA, 627 bp, Homo sapiens
ttttgatcccaccataatttttcatcttccatttccttgtttcatttcatttttctatttgaaagttcctgcatccactaaactgcttgcactattttacctatcttaagtcctttgagaacaaggtgggctattgcttgattttaattcaaacaaattgataaatgaactaaaggcatattaatctaaatagaaggttctattttgggtattatgagttaaactatctgatttgacattcttcttttcatatgaataatagctatcctttgacctcagaaagaaacttggatgacttaggtgtctctaaattttcaagtctctagttgctttgaaagctcaactacaccagtgttgcagaaaaaagagaaaacatgtgacccaagatagtctacttcaaaatctttttgacccttatctttcctttgtgccgttccatggatgtttctacattagaaaatctattttccatttttaataggatggaatattataagcaagaaataagcctagtggagatataaatctttyctattttatgaatgcttaacatatctgctgtttccttttgctcaggggagttttctctcagaagctaattttttaatctgatcctaatccaattta

SEQ ID NO: 728183 - DNA, 669 bp, Homo sapiens
aagtatatcatcaccatttagctcaggtgacagttttgttaattgtgatgccactgcatgccatgcattactggcacccattttccattggcaaaggctcagctctacattcaaattcaaagatattcccaaacaaatctgcaagtctggtcttgcattatctgttttttggtaccaatttctatagctgtgaggggagatagaaatcacaccagcaattttaatgaaaatgatttactacaaagaattgttaactagttataacgttaaccagatgactaaygttaaaagttaattttaaggcaacaattaccagaagaagctatcctgattggactgggcaacaaaggccaaaggttgcactttgtaaagcctggaagagggaccacttggagctgaaactcagaactctgaggaggctctattgcatgactggtgcttggagaagagtgatttcaagaggggctctgtgggcctgaaaccgtgacctctgaggatggaagtccagatatctggtatggacatttttgaaaaggatcactaaggtgatttctgtgagtgttggaaataccacaaactggtctcagtggctcctatgagaaacaactgctgctgcgcaggtgaagaagcattgatggggtgatgaccacaagaacagaaagcagaaag

SEQ ID NO: 728184 - DNA, 1819 bp, Homo sapiens
aggtatattaaaaaacagggtctcactctgttgcacaggctgaagtgcagtgcctgctttaacggctcactgcagcctcgaccttcctgggctaaggtgattctcctacattagcctcccaagtagctgggactatgggcacacaccactatgcctggctaatttttgtattttttgtagagacgaggtctccctatgttgcccaggctggtctcaaactcctgggctcaagtgaattatctgcctcagtctcccaaagtgctgagattacaggaattagccaccatgcctgaccctaatatgcttataaattgagggaggtgattgtgttcaggaagggtactcagggggacattagggtctctaggataattgtgtcattctaatcttgatttggtagtggttattaaagattcattctataatcattcaactatacatttttatgctatgatctcagcgtatatttttattgtaaataaagattatgttttatcctcccccaaaataaatgacagctttggagtaatttatatgtaaattaaatgtatgcattactgtagtaaaaaagtagttaaaatctcatcagggacaaaattgaaagaaaaaatatttggttctgattgagtataataaatactgtaagataggtctattcattgttctgcaaagtcacacagaagtgaccaactatatcttactctccctgaggcaggaatctaagtatcaaatagctttctctttctcacattccctatataccragtgcttctctgaccctttaatgtaacaaggtagaagagcaactagtatctaaatattattagttttagaataaatattgcaacttcttgatttccaagacaaaagccttgggccagttataaatcaggaaatattaagatggacacatggtcatacaaacttaggttttgtccttttttttcctgttccatacctaaccaggaatagattccatgagctggaaatagaaaagcaattggataagaggcaagtgctagttggtctgtctgtattccaaagatagcctgcgaatcttagtaaaaagagtacttgtgcctccctggtcatgtctggaactctggcagtcagaagcttttccaatgtctcttgtgtcacactaatgtgaaagcaatagagcagagatggctgcaagggctgataaagacagtgtgaaggtttgctctgttctggatccacctgcagtcccaaagcaacacaaaatagcagccaattcttcccgtgcctatggaagggagcacagaagttagcagaaagaggaaacccgcaggccagaaagagaacctgaaataaaatatggaactttaaaagaaataacaaaggttggcccattctgtgcctctgtatctttatctttgtgcattgcctgcttaaagggaacacacttgaaacaaaataagggcaaataaaaatctcaaaagatcctagcataaaacagaaatagataagattggaatagacattatccttcaacatttgtgttcgcctctccagaacttactatacaatgctgggagaaaagggggaagatcgggcttggggagagagagtgacaaaatttaaaatgtaaattaagaaaatagaattttagtgaatctacttggaagttaatgtatgacattttctatatcaggtgcaatggaggcttggaattaacaattaaactgacatttaaaacaaagagttatactgcatacacttgagcttggggccattgaatttttaacctgcaacatgtccacaatttccatctcacttttcaggattttgcagtgga

SEQ ID NO: 728185 - DNA, 1819 bp, Homo sapiens
aggtatattaaaaaacagggtctcactctgttgcacaggctgaagtgcagtgcctgctttaacggctcactgcagcctcgaccttcctgggctaaggtgattctcctacattagcctcccaagtagctgggactatgggcacacaccactatgcctggctaatttttgtattttttgtagagacgaggtctccctatgttgcccaggctggtctcaaactcctgggctcaagtgaattatctgcctcagtctcccaaagtgctgagattacaggaattagccaccatgcctgaccctaatatgcttataaattgagggaggtgattgtgttcaggaagggtactcagggggacattagggtctctaggataattgtgtcattctaatcttgatttggtagtggttattaaagattcattctataatcattcaactatacatttttatgctatgatctcagcgtatatttttattgtaaataaagattatgttttatcctcccccaaaataaatgacagctttggagtaatttatatgtaaattaaatgtatgcattactgtagtaaaaaagtagttaaaatctcatcagggacaaaattgaaagaaaaaatatttggttctgattgagtataataaatactgtaagataggtctattcattgttctgcaaagtcacacagaagtgaccaactatatcttactctccctgaggcaggaatctaagtatcaaatagctttctctttctcacattccctatataccaagtgcttctctgaccctttaatgtaacaaggtagaagagcamctagtatctaaatattattagttttagaataaatattgcaacttcttgatttccaagacaaaagccttgggccagttataaatcaggaaatattaagatggacacatggtcatacaaacttaggttttgtccttttttttcctgttccatacctaaccaggaatagattccatgagctggaaatagaaaagcaattggataagaggcaagtgctagttggtctgtctgtattccaaagatagcctgcgaatcttagtaaaaagagtacttgtgcctccctggtcatgtctggaactctggcagtcagaagcttttccaatgtctcttgtgtcacactaatgtgaaagcaatagagcagagatggctgcaagggctgataaagacagtgtgaaggtttgctctgttctggatccacctgcagtcccaaagcaacacaaaatagcagccaattcttcccgtgcctatggaagggagcacagaagttagcagaaagaggaaacccgcaggccagaaagagaacctgaaataaaatatggaactttaaaagaaataacaaaggttggcccattctgtgcctctgtatctttatctttgtgcattgcctgcttaaagggaacacacttgaaacaaaataagggcaaataaaaatctcaaaagatcctagcataaaacagaaatagataagattggaatagacattatccttcaacatttgtgttcgcctctccagaacttactatacaatgctgggagaaaagggggaagatcgggcttggggagagagagtgacaaaatttaaaatgtaaattaagaaaatagaattttagtgaatctacttggaagttaatgtatgacattttctatatcaggtgcaatggaggcttggaattaacaattaaactgacatttaaaacaaagagttatactgcatacacttgagcttggggccattgaatttttaacctgcaacatgtccacaatttccatctcacttttcaggattttgcagtgga

SEQ ID NO: 728186 - DNA, 1819 bp, Homo sapiens
aggtatattaaaaaacagggtctcactctgttgcacaggctgaagtgcagtgcctgctttaacggctcactgcagcctcgaccttcctgggctaaggtgattctcctacattagcctcccaagtagctgggactatgggcacacaccactatgcctggctaatttttgtattttttgtagagacgaggtctccctatgttgcccaggctggtctcaaactcctgggctcaagtgaattatctgcctcagtctcccaaagtgctgagattacaggaattagccaccatgcctgaccctaatatgcttataaattgagggaggtgattgtgttcaggaagggtactcagggggacattagggtctctaggataattgtgtcattctaatcttgatttggtagtggttattaaagattcattctataatcattcaactatacatttttatgctatgatctcagcgtatatttttattgtaaataaagattatgttttatcctcccccaaaataaatgacagctttggagtaatttatatgtaaattaaatgtatgcattactgtagtaaaaaagtagttaaaatctcatcagggacaaaattgaaagaaaaaatatttggttctgattgagtataataaatactgtaagataggtctattcattgttctgcaaagtcacacagaagtgaccaactatatcttactctccctgaggcaggaatctaagtatcaaatagctttctctttctcacattccctatataccaagtgcttctctgaccctttaatgtaacaaggtagaagagcaactagtatctaaatattattagttttagaataaatattgcaacttcttgatttccaagacaaaagccttgggccagttataaatcaggaaatattaagatggacacatggtcatacaaacttaggttttgtccttttttttcctgytccatacctaaccaggaatagattccatgagctggaaatagaaaagcaattggataagaggcaagtgctagttggtctgtctgtattccaaagatagcctgcgaatcttagtaaaaagagtacttgtgcctccctggtcatgtctggaactctggcagtcagaagcttttccaatgtctcttgtgtcacactaatgtgaaagcaatagagcagagatggctgcaagggctgataaagacagtgtgaaggtttgctctgttctggatccacctgcagtcccaaagcaacacaaaatagcagccaattcttcccgtgcctatggaagggagcacagaagttagcagaaagaggaaacccgcaggccagaaagagaacctgaaataaaatatggaactttaaaagaaataacaaaggttggcccattctgtgcctctgtatctttatctttgtgcattgcctgcttaaagggaacacacttgaaacaaaataagggcaaataaaaatctcaaaagatcctagcataaaacagaaatagataagattggaatagacattatccttcaacatttgtgttcgcctctccagaacttactatacaatgctgggagaaaagggggaagatcgggcttggggagagagagtgacaaaatttaaaatgtaaattaagaaaatagaattttagtgaatctacttggaagttaatgtatgacattttctatatcaggtgcaatggaggcttggaattaacaattaaactgacatttaaaacaaagagttatactgcatacacttgagcttggggccattgaatttttaacctgcaacatgtccacaatttccatctcacttttcaggattttgcagtgga

SEQ ID NO: 728187 - DNA, 1819 bp, Homo sapiens
aggtatattaaaaaacagggtctcactctgttgcacaggctgaagtgcagtgcctgctttaacggctcactgcagcctcgaccttcctgggctaaggtgattctcctacattagcctcccaagtagctgggactatgggcacacaccactatgcctggctaatttttgtattttttgtagagacgaggtctccctatgttgcccaggctggtctcaaactcctgggctcaagtgaattatctgcctcagtctcccaaagtgctgagattacaggaattagccaccatgcctgaccctaatatgcttataaattgagggaggtgattgtgttcaggaagggtactcagggggacattagggtctctaggataattgtgtcattctaatcttgatttggtagtggttattaaagattcattctataatcattcaactatacatttttatgctatgatctcagcgtatatttttattgtaaataaagattatgttttatcctcccccaaaataaatgacagctttggagtaatttatatgtaaattaaatgtatgcattactgtagtaaaaaagtagttaaaatctcatcagggacaaaattgaaagaaaaaatatttggttctgattgagtataataaatactgtaagataggtctattcattgttctgcaaagtcacacagaagtgaccaactatatcttactctccctgaggcaggaatctaagtatcaaatagctttctctttctcacattccctatataccaagtgcttctctgaccctttaatgtaacaaggtagaagagcaactagtatctaaatattattagttttagaataaatattgcaacttcttgatttccaagacaaaagccttgggccagttataaatcaggaaatattaagatggacacatggtcatacaaacttaggttttgtccttttttttcctgttccatacctaaccaggaatagattccatgagctggaaatagaaaagcaattggataagaggcaagtgctagttggtctgtctgtattccaaagatagcctgcgaatcttagtaaaaagagtacttgtgcctccctggtcatgtctggaactctggcagtcagaagcttttccaatgtctcttgtgtcacactaatgtgaaagcaatagagcagagatggctgcaagggctgataaagacagtgtgaaggtttgctctgttctggatccacctgcagtcccaaagcaacacaaaatagcagccaattcttcccgtgcctatggaagggagcacagaagttagcagaaagaggaaacccgcaggccagaaagagaacctgaaataaaatatggaactttaaaagaaataacaaaggttggcccattctgtgcctctgtatctttatctttgtgcattgcctgcttaaagggaacacacttgaaacaaaataagggcaaataaaaatctcaaaagatcctagcataaaacagaaatagataagattggaatagacatyatccttcaacatttgtgttcgcctctccagaacttactatacaatgctgggagaaaagggggaagatcgggcttggggagagagagtgacaaaatttaaaatgtaaattaagaaaatagaattttagtgaatctacttggaagttaatgtatgacattttctatatcaggtgcaatggaggcttggaattaacaattaaactgacatttaaaacaaagagttatactgcatacacttgagcttggggccattgaatttttaacctgcaacatgtccacaatttccatctcacttttcaggattttgcagtgga

SEQ ID NO: 728188 - DNA, 1819 bp, Homo sapiens
aggtatattaaaaaacagggtctcactctgttgcacaggctgaagtgcagtgcctgctttaacggctcactgcagcctcgaccttcctgggctaaggtgattctcctacattagcctcccaagtagctgggactatgggcacacaccactatgcctggctaatttttgtattttttgtagagacgaggtctccctatgttgcccaggctggtctcaaactcctgggctcaagtgaattatctgcctcagtctcccaaagtgctgagattacaggaattagccaccatgcctgaccctaatatgcttataaattgagggaggtgattgtgttcaggaagggtactcagggggacattagggtctctaggataattgtgtcattctaatcttgatttggtagtggttattaaagattcattctataatcattcaactatacatttttatgctatgatctcagcgtatatttttattgtaaataaagattatgttttatcctcccccaaaataaatgacagctttggagtaatttatatgtaaattaaatgtatgcattactgtagtaaaaaagtagttaaaatctcatcagggacaaaattgaaagaaaaaatatttggttctgattgagtataataaatactgtaagataggtctattcattgttctgcaaagtcacacagaagtgaccaactatatcttactctccctgaggcaggaatctaagtatcaaatagctttctctttctcacattccctatataccaagtgcttctctgaccctttaatgtaacaaggtagaagagcaactagtatctaaatattattagttttagaataaatattgcaacttcttgatttccaagacaaaagccttgggccagttataaatcaggaaatattaagatggacacatggtcatacaaacttaggttttgtccttttttttcctgttccatacctaaccaggaatagattccatgagctggaaatagaaaagcaattggataagaggcaagtgctagttggtctgtctgtattccaaagatagcctgcgaatcttagtaaaaagagtacttgtgcctccctggtcatgtctggaactctggcagtcagaagcttttccaatgtctcttgtgtcacactaatgtgaaagcaatagagcagagatggctgcaagggctgataaagacagtgtgaaggtttgctctgttctggatccacctgcagtcccaaagcaacacaaaatagcagccaattcttcccgtgcctatggaagggagcacagaagttagcagaaagaggaaacccgcaggccagaaagagaacctgaaataaaatatggaactttaaaagaaataacaaaggttggcccattctgtgcctctgtatctttatctttgtgcattgcctgcttaaagggaacacacttgaaacaaaataagggcaaataaaaatctcaaaagatcctagcataaaacagaaatagataagattggaatagacattatccttcaacatttgtgttcgcctctccagaacttactatacaatgctgggagaaaagggggaagatcgggcttggggagagagagtgacaaaatttaaaatgtaaattaagaaaatagaattttagtgaatctacttggaagttaatrtatgacattttctatatcaggtgcaatggaggcttggaattaacaattaaactgacatttaaaacaaagagttatactgcatacacttgagcttggggccattgaatttttaacctgcaacatgtccacaatttccatctcacttttcaggattttgcagtgga

SEQ ID NO: 728189 - DNA, 1001 bp, Homo sapiens
aaatttgagactgtactgctttgagcactgcaataaagtttaggttatagtgctgaagcctatcagtaaaaattatagccggtccaccttcctgtagcaagtcagggacaatataaactatgaaacaacacagtaaagcctcaatgtacatagctttgataagccacaaatgcatgtagagggcctgatgatgtgggtagaataaaatggtgacaatagaaatatgttcaggcttcctaaaattaactcatctatattctaggacaatactgtgtatgtgaagaagtttagtatttactgtctgagagtcagttatttattgaggttgggataaagtgagaatatttgtcccctaaaggaataaagggtatcataaaaccatctctcaccccatgcaatacctaatttgtccctggtagtcaatgaaaacatagctgagtctactgcattttagttaattcccttagtaaattcaaggtcattgcttgggttatgggaaatatttatttttttactgacaatgtggcacagaataagttcttcactagatgctgcttgaactctttagcaaaagcttcactttggcatcaggactcgggtgctgagtctcattaagatagtcaagaattgttctggcarttcaggataacagtgagattcgaggcatcatgaggatggaccctgctgtgcaaacagcaagcaggaccaattcagctcttccaaaaagcctatagtaaaattgaaagtgcaagataagagcattctagcctttcagagtagaagttcaaatagggttggaagtcaaagaaagtcaaagaaaaaagctcattataaaaatctataccccttaggtgatgcttttgtatacattcatcagctgcatacaatatttaattaaatgtgttctctcacctctagctatttttatactaaattaaaactgcagtaggagagtaaaacctgtggaattaatttaggacccttattcagggaactatgtg

SEQ ID NO: 728190 - DNA, 1167 bp, Homo sapiens
tctacaaagaaaccacatgcttaggaatggagggagttgggcagtgtgttttctttatttgttttgtttcatttcagcagctcctcatacagagaaaagaaagttttgttcatctcacatctccagattatctagtgtagccatcagaaaataataagttcttgtgaaaacttcaataaattacatgaagacaagatggtttttggcagcaggaaaaacttatataatacctctgaccagtttcaggctgagaaatagggrtactgggattttgaaggtcaaactgctttggccaagggatactgccttgagtatcttaagtaattgaatacacatatttgagtcacagtaatccctattctgctgccctgttgagagacgatgtgaaaatggcccagttgtcttaaagatggtgaaaagtcctagaggcacaatgctggcccatggaagccactccatatgggtttggtggatggattcataaatgaatgaatgaatcattcaccttcaaccagcaaaagatgcctgcttttcaaatagttcagtgtgggattcacacctcagaatcttatccttaaaagaactttggtttaaacacttctttttgtaattgttgtaatcttcagcattacatctgaggcaaggaatttaccaaattttccaccaggaagcattaaaatatgagggagccaggggaagggggtggggagtggttactgagaaggggtcagttctctgtgatgctaggacatttgtttctgactttgggaaaaaattgaacatagctaacatatccccatattccgactgcatccaatctgaaaaggaacattttaaagttgccaagcatacagagggcttttgctaggaaagctctcattacaaatactttctgagtcttccaaacagtttgcacgcaaatacctgagactgcgtaacttacaatgaacagaaatatattggctcgcagttctggaggctgaaaaatccaatatcacagtgccagcatctggtgagagacttcttcccatgtcattacagggcagaaggcaataggatgacagagagggcttgaggggactgaacttgcccttttataaagggaccaatcccacccatgagatggagccctcatagcctaatcacctcttaaaggtcccacctcta

SEQ ID NO: 728191 - DNA, 626 bp, Homo sapiens
ccaatctggaattttttgttgtttttttaatgaacaaagctaataaactactacagatctctcacttggcctgtctcaggtcctagcacaggaatatttgtcaccagttagttgagcttattctgatttggctaaggttccagcagtgtctccaggaatctctggaaataagtcagtcctccctccagacaacaatggctccaagcatccctggaaataaacataggattgcagtagaccagctaagattaatcttgtatttatgtatataacagcgcttcctcaaaccagaagaagacaattaagaattaaacagttaaaacaaagacagaaacagtatatttggctccatttccactcttcatccctaccttcccccscattcaaatatttccctttcagcctttatcgggactcagaatgtgtctgaaatcttcttgaactccagcttcaattgagactgattcctgctctttctcctggagccagagttagttgtgagaatcaccaatacccaactcatggctgactactcttatgtctgttgctggagttagtgagttctctctccagcctcaataactgtgctgctcccaggtgcaaacgggatgtaactgtttctgtcc

SEQ ID NO: 728192 - DNA, 668 bp, Homo sapiens
ataaatatgaaagattctagtttgagatcagcctgggcaacatggtaaggcctctgtctctataaaagagagagagagagaagaagagaagagaagaggagacagaaagaaaaggaaaaggagggaagagagggagggagggaggaagggaggaaggaaggaaggaaagaaaaaggaaggaaggaaaaaaggaagaaaggaaaaaggaaggaaaaaaggaaggaargagagggagaagggaaaggagggagggaggaaagaaggaaagagagagaaagaaagatctgtatttcaaagacctttgtaaacttaaggcattgttattataaatactaaaaaataaccaccaactcattgaccactacatgccaatgaagagtgcaaacttgaacaagacacattcccagccttgaacattttataatccaatggagtagtgcctcaggcacaaccgatttttctgtctgggttctcctctggcttatcagaaatcagtttatttcaggctgggaaagtttaggcaggaaaatcataaggtttggcttcaataccttttcctgaaatgagtcacttgatcatctacaattccctgatccatgaaagcggcacctgcacagagctatttcctcatgtgccaggtgaacaagaaatagaacacagacagatac

SEQ ID NO: 728193 - DNA, 668 bp, Homo sapiens
ataaatatgaaagattctagtttgagatcagcctgggcaacatggtaaggcctctgtctctataaaagagagagagagagaagaagagaagagaagaggagacagaaagaaaaggaaaaggagggaagagagggagggagggaggaagggaggaaggaaggaaggaaagaaaaaggaaggaaggaaaaaaggaagaaaggaaaaaggaaggaaaaaaggaaggaaagagagggagaagggaaaggagggagggaggaaagaaggaaagagagagaaagaaagatctgtatttcaaagacctttgtaaacttaaggcattgttattataaatactaaaaaataaccaccaactcattgaccactacatgccaatgaagagtgcaaacttgaacaagacacattcccagmcttgaacattttataatccaatggagtagtgcctcaggcacaaccgatttttctgtctgggttctcctctggcttatcagaaatcagtttatttcaggctgggaaagtttaggcaggaaaatcataaggtttggcttcaataccttttcctgaaatgagtcacttgatcatctacaattccctgatccatgaaagcggcacctgcacagagctatttcctcatgtgccaggtgaacaagaaatagaacacagacagatac

SEQ ID NO: 728194 - DNA, 654 bp, Homo sapiens
taatatttatatctgaaagttaacagactctaatctgagcttgattcattatgacagacagtgggtggtataaataccaggaaagatgctatattcatgcaaactgacaaattcttagttttgcctccaagctcagatgtctctcaagctgcctggcacatctctgtactggtggtttaagccatatgtgtccctctccagtaagttcaggaaagagctgccctatcattcatgaataaagataagtactcagttataattttcttccaccaatgcaatttaattgtccaccctaaataaagtagccatttgttttcctacaaaactattgacccatttcatgaattatatatgwattcttcaggcacaaggccatgtagtttagttttcgtaatgcgatgttatatttccttaacacaaataaatcatggaaaggaacagagggaaaatcttcatttaaaagccattaaaaggaaacatccaatccttttgaatagttaatatggcattgggtttttctcttgctgaactcgagtcctatgtgtcttcaaagtcaccatgtcttcaggctaaatttgtaatttttgaagttaccattccatagcagcaccatcaggacaagtaagtaggtgctttcctggaaatacatatgaa

SEQ ID NO: 728195 - DNA, 654 bp, Homo sapiens
taatatttatatctgaaagttaacagactctaatctgagcttgattcattatgacagacagtgggtggtataaataccaggaaagatgctatattcatgcaaactgacaaattcttagttttgcctccaagctcagatgtctctcaagctgcctggcacatctctgtactggtggtttaagccatatgtgtccctctccagtaagttcaggaaagagctgccctatcattcatgaataaagataagtactcagttataattttcttccaccaatgcaatttaattgtccaccctaaataaagtagccatttgttttcctacaaaactattgacccatttcatgaattatatatgaattcttcaggcacaaggccatgtagtttagttttcgtaatgcgatgttatatttccttaacacaaataaatcatggaaaggaacagagggmaaatcttcatttaaaagccattaaaaggaaacatccaatccttttgaatagttaatatggcattgggtttttctcttgctgaactcgagtcctatgtgtcttcaaagtcaccatgtcttcaggctaaatttgtaatttttgaagttaccattccatagcagcaccatcaggacaagtaagtaggtgctttcctggaaatacatatgaa

SEQ ID NO: 728196 - DNA, 1447 bp, Homo sapiens
tgatttgttgaaaataaggtcaatttttcctacagaattttccaactttatgatttttgatgactgctttctcrtagcatcatttcattcgttcctgtatcctatatttttcgtcaattgaaatttgatctaaagatgtgattagtttcagattagacaatttgggcaagaatagttaatagcaattctatatagttgttttgcatcattggagtcaggtaaaatgtggctgttctacattgtttatagtgatgagtgggctcaaattatagcttttacttacttttatttttgtaactttactttttatacattttcaagtttcagacaagttttgagaataaaacaagtaacacacatacatactctttacccagaatcatcaactgattacattctgcctctttttgtcttatccttctctctttctttacacatacatacatacacacacacatgtgcacacacttagatatttaaaactttgatctcagtcatttgagggtaagttggctctaagtgctttatccctaagtacattactgtgtacttattaacaaggacattctctttcatattctacagtaattacaatcaatctaactttaaagtaatattattagtatttattccagagactaatttcaatttttgtcaattatctctgtatcctttgcctgtatatattttctagtccagaatccagtcaagtattatgcattgtaattggttgtgaagctttttattctttttagtctagaatggtttttctgctttcctttatgctttatgatgttggtatctttaaaaatcctagccaattaatttgcaggatatccattaagttgggtttgtctaatgttttctaatgaatgtataaattcagaaagtcagattcactcttaaaaatgcagattggtttaacaatcaactaaaacccagattagaaaatgcttagctcacttcatttcttcttttctactccatgaaagataatgctaacaagcaaaggctctcttttctactcaactaaatttgaattcagaatacttcctaaaacagcacctcctaaagccaaaataactcaaaaagaaatacctatttgacactttttttctcagactctttctgctactcaacatgtatggttacttttctctgttttgcctatttcaccgtattctacagccactgaatgcaagatgtctatcccataagaaagtagtagtgaaataagcattgcttaatggcataatagggagacagtatgtttttgggatataaagaagcactggcgcctaattttactggagattctatcccacttagggcattgtcattgtagggaaatgatttatttgtttttaatctcaatgttttcatctgtgaaagaaatggtattatcttttaaggttaatatgaagaatagagatattgaacatatacg

SEQ ID NO: 728197 - DNA, 607 bp, Homo sapiens
gtaatcattattctgacatctatcacctttttcaaaggtgacgtcaatggaatmataaagtgtgtactctttagtgtgtgatttatttcactcagcataatgtcagtatagattcaaacatgttttgtgaacgtaagtagtgtatttttaagaaactttatatagtgttttattttatgaatatattcaactgttgatagatattttatttttctccaaggttttaattagctgttatgaataaagctgctatgagcattctcgcatatgtcttttgattcctataagccttcatttctaattggtatatacctatgagtgaggttactgggcccatagagtagactatgtttagctctcctaagcactctcccacacttattcaaagtgactgtaataacttataaccccactagagtgagagagaaagagagagagagagagagagagagagagacagagattaggtaccgatacataagatgtaatatatataatactccatttaaaagattttcaatttacatatatccttaccaacttggtatttttaatgtttttacttctgtcattcttattgctgtgtagtagtgctcattgtggtttt

SEQ ID NO: 728198 - DNA, 607 bp, Homo sapiens
gtaatcattattctgacatctatcacctttttcaaaggtgacgtcaatggaatcataaagtgtgtactctttagtgtgtgatttatttcactcagcataatgtcagtatagattcaaacatgttttgtgaacgtaagtagtgtatttttaagaaactttatatagtgttttattttatgaatatattcaactgttgatagatattttatttttctccaaggttttaattagctgttatgaataaagctgctatgagcattctcgcatatgtcttttgattcctataagccttcatttctaattggtatatacctatgagtgaggttactgggcccatagagtagactatgtttagctytcctaagcactctcccacacttattcaaagtgactgtaataacttataaccccactagagtgagagagaaagagagagagagagagagagagagagagacagagattaggtaccgatacataagatgtaatatatataatactccatttaaaagattttcaatttacatatatccttaccaacttggtatttttaatgtttttacttctgtcattcttattgctgtgtagtagtgctcattgtggtttt

SEQ ID NO: 728199 - DNA, 607 bp, Homo sapiens
gtaatcattattctgacatctatcacctttttcaaaggtgacgtcaatggaatcataaagtgtgtactctttagtgtgtgatttatttcactcagcataatgtcagtatagattcaaacatgttttgtgaacgtaagtagtgtatttttaagaaactttatatagtgttttattttatgaatatattcaactgttgatagatattttatttttctccaaggttttaattagctgttatgaataaagctgctatgagcattctcgcatatgtcttttgattcctataagccttcatttctaattggtatatacctatgagtgaggttactgggcccatagagtagactatgtttagctctcctaagcactstcccacacttattcaaagtgactgtaataacttataaccccactagagtgagagagaaagagagagagagagagagagagagagagacagagattaggtaccgatacataagatgtaatatatataatactccatttaaaagattttcaatttacatatatccttaccaacttggtatttttaatgtttttacttctgtcattcttattgctgtgtagtagtgctcattgtggtttt

SEQ ID NO: 728200 - DNA, 607 bp, Homo sapiens
gtaatcattattctgacatctatcacctttttcaaaggtgacgtcaatggaatcataaagtgtgtactctttagtgtgtgatttatttcactcagcataatgtcagtatagattcaaacatgttttgtgaacgtaagtagtgtatttttaagaaactttatatagtgttttattttatgaatatattcaactgttgatagatattttatttttctccaaggttttaattagctgttatgaataaagctgctatgagcattctcgcatatgtcttttgattcctataagccttcatttctaattggtatatacctatgagtgaggttactgggcccatagagtagactatgtttagctctcctaagcactctcmcacacttattcaaagtgactgtaataacttataaccccactagagtgagagagaaagagagagagagagagagagagagagagacagagattaggtaccgatacataagatgtaatatatataatactccatttaaaagattttcaatttacatatatccttaccaacttggtatttttaatgtttttacttctgtcattcttattgctgtgtagtagtgctcattgtggtttt

SEQ ID NO: 728201 - DNA, 607 bp, Homo sapiens
gtaatcattattctgacatctatcacctttttcaaaggtgacgtcaatggaatcataaagtgtgtactctttagtgtgtgatttatttcactcagcataatgtcagtatagattcaaacatgttttgtgaacgtaagtagtgtatttttaagaaactttatatagtgttttattttatgaatatattcaactgttgatagatattttatttttctccaaggttttaattagctgttatgaataaagctgctatgagcattctcgcatatgtcttttgattcctataagccttcatttctaattggtatatacctatgagtgaggttactgggcccatagagtagactatgtttagctctcctaagcactctccmacacttattcaaagtgactgtaataacttataaccccactagagtgagagagaaagagagagagagagagagagagagagagacagagattaggtaccgatacataagatgtaatatatataatactccatttaaaagattttcaatttacatatatccttaccaacttggtatttttaatgtttttacttctgtcattcttattgctgtgtagtagtgctcattgtggtttt

SEQ ID NO: 728202 - DNA, 607 bp, Homo sapiens
gtaatcattattctgacatctatcacctttttcaaaggtgacgtcaatggaatcataaagtgtgtactctttagtgtgtgatttatttcactcagcataatgtcagtatagattcaaacatgttttgtgaacgtaagtagtgtatttttaagaaactttatatagtgttttattttatgaatatattcaactgttgatagatattttatttttctccaaggttttaattagctgttatgaataaagctgctatgagcattctcgcatatgtcttttgattcctataagccttcatttctaattggtatatacctatgagtgaggttactgggcccatagagtagactatgtttagctctcctaagcactctcccacasttattcaaagtgactgtaataacttataaccccactagagtgagagagaaagagagagagagagagagagagagagagacagagattaggtaccgatacataagatgtaatatatataatactccatttaaaagattttcaatttacatatatccttaccaacttggtatttttaatgtttttacttctgtcattcttattgctgtgtagtagtgctcattgtggtttt

SEQ ID NO: 728203 - DNA, 1443 bp, Homo sapiens
tactagttaattccaaccagaaaaatgtttgaaataaagtagaaccctattgtcatcataaagacagtttggaaatcatgttcacttaagcttcttggaagcagaaacaggtaggaggaggtagttttattttacagaaggaaaaaaaaaaacaacagcctaaaaatatgtcttctctgtattctaatgctatttttttcatgtgtttgtagtgatgccagtatataaacagacctacggcactgccattcataggaaaatatagcacatccaaatatgtatagtacataatacttgactatgacagtgataataattgatgatgctgtkggtttatgtatttactatactgtacagtttaaattttatttttatctttatggatttaaggggtacaagtgcatttttgttacacggatatattgcatagtggtgatgtttgggcttttagtgtgcccatcacctaaatagtgtacattgtacccaataggtaatttctcatcccttacccccttccacccccaagcttttgtagtcttcagtgtctattattccactctgtatgtttatgtgtatacattgtttaactcccacttacaagtgacaacatgcagtattagactttctgtttctgagttatttcacttaggataatggcctccagtttcatctatgttgctaaaaaagacatgatttttttcttttttgtggctgagtagtatttcaggatatattatatatttttatatatatatatagcaacaatggcaaagctatatattattatataatattttatattataagctatatatatatacaatgtaagattgcatatgcaaacaaaaagtatcaccctggcttaatgtggggttggatattgagagggttggccaaagtataattatctgggtcactcaggagttcaggcaaagatagtactagagttattagaaggaggaggagaacaattaaacctagaatatctttggttgtatggtaggggtggaaagtgattttgtcagagtctgatgaaacccctgaagtgtcgttagaccctgtttcatgtgagaataaaaagtgaacagttgctagagcagtaatgatgaagggtaagatgaaatggaaggagaaaagtcacgtgagggtgcctttgtcaactgagaatctgcctcagattcattgtacgaggtcagttccaatatatgggatggctgaggataggtttataattactgtagcacctcagaatgatatttggcctcaccggagcacataggctatgaatgctgttactatagttgtgaggaggaggctaatgtcaatatttacggtttctagttatataattgactcatagtataagcctcagacaacgtgtaagaagaagcacatgaaaaatattgaagcactgttagcatgaaaatagtgtactgttcagcc

SEQ ID NO: 728204 - DNA, 901 bp, Homo sapiens
ctctgtctttggttttgggtgattgcaaaaattaacggtaatggaaagtgcgaaagaccaggtatattgaggggagttgttactgtgttktcttgactttgattttgaccttaagtaacttacttcacatatctggacctcaatgattcatctaggaataagtgctaagcatgaattaacatggataagggaatgatactgtatgtaagtgcaataaaattatccctttggctttcagagtagggatagctcccaggagtgggttgaatccaatgaccttattgtctaatctggagacataattgtgtgaccacaatgaatactgtctactatccactggctctatgcatcaaagttaattttgagaggaaaaaatacatagaccaaccaaaacagattcttttcagatttcaaaatatccttcttaaatgttttggaggaaggatgggttttgatttataaaacatttctgaagttagttttattgttctgatgtatttttattatgtaatcattgatttcttctagactcaagaagaatttctatattttgacctaagatgtttgtttctgaattagataatttgtctttattagttataaagcatatgcacatactatgaaacatctaccttaaaacccacatgcaaaaatctgtgttgatcatctaaattatttttaatttgccaatttgaattatttagataccttgcccctccagatgtgtaattgtgagttaattactttctgtttaatttagactgaaatgaagaaactgtatgatactgtttgtgtttttctatttggtgttcactatttgacatcagaaagtctgatttgacaaatgtgttttttcagataagtagttctaatcaaagtggtatgatttaattttttaaag

SEQ ID NO: 728205 - DNA, 901 bp, Homo sapiens
ctctgtctttggttttgggtgattgcaaaaattaacggtaatggaaagtgcgaaagaccaggtatattgaggggagttgttactgtgttttcttgactttgattttgaccttaagtaacttacttcacatatctggacctcaatgattcatctaggaataagtgctaagcatgaattaacatggataagggaatgatactgtatgtaagtgcaataaaattatccctttggctttcagagtagggatagctcccaggagtgggttgaatccaatgaccttatygtctaatctggagacataattgtgtgaccacaatgaatactgtctactatccactggctctatgcatcaaagttaattttgagaggaaaaaatacatagaccaaccaaaacagattcttttcagatttcaaaatatccttcttaaatgttttggaggaaggatgggttttgatttataaaacatttctgaagttagttttattgttctgatgtatttttattatgtaatcattgatttcttctagactcaagaagaatttctatattttgacctaagatgtttgtttctgaattagataatttgtctttattagttataaagcatatgcacatactatgaaacatctaccttaaaacccacatgcaaaaatctgtgttgatcatctaaattatttttaatttgccaatttgaattatttagataccttgcccctccagatgtgtaattgtgagttaattactttctgtttaatttagactgaaatgaagaaactgtatgatactgtttgtgtttttctatttggtgttcactatttgacatcagaaagtctgatttgacaaatgtgttttttcagataagtagttctaatcaaagtggtatgatttaattttttaaag

SEQ ID NO: 728206 - DNA, 901 bp, Homo sapiens
ctctgtctttggttttgggtgattgcaaaaattaacggtaatggaaagtgcgaaagaccaggtatattgaggggagttgttactgtgttttcttgactttgattttgaccttaagtaacttacttcacatatctggacctcaatgattcatctaggaataagtgctaagcatgaattaacatggataagggaatgatactgtatgtaagtgcaataaaattatccctttggctttcagagtagggatagctcccaggagtgggttgaatccaatgaccttattgtctaatctggagacataattgtgtgaccacaatgaatactgtctactatccactggctctatgcatcaaagttaattttgagaggaaaaaatacatagaccaaccaaaacagattcttttcagatttcaaratatccttcttaaatgttttggaggaaggatgggttttgatttataaaacatttctgaagttagttttattgttctgatgtatttttattatgtaatcattgatttcttctagactcaagaagaatttctatattttgacctaagatgtttgtttctgaattagataatttgtctttattagttataaagcatatgcacatactatgaaacatctaccttaaaacccacatgcaaaaatctgtgttgatcatctaaattatttttaatttgccaatttgaattatttagataccttgcccctccagatgtgtaattgtgagttaattactttctgtttaatttagactgaaatgaagaaactgtatgatactgtttgtgtttttctatttggtgttcactatttgacatcagaaagtctgatttgacaaatgtgttttttcagataagtagttctaatcaaagtggtatgatttaattttttaaag

SEQ ID NO: 728207 - DNA, 901 bp, Homo sapiens
ctctgtctttggttttgggtgattgcaaaaattaacggtaatggaaagtgcgaaagaccaggtatattgaggggagttgttactgtgttttcttgactttgattttgaccttaagtaacttacttcacatatctggacctcaatgattcatctaggaataagtgctaagcatgaattaacatggataagggaatgatactgtatgtaagtgcaataaaattatccctttggctttcagagtagggatagctcccaggagtgggttgaatccaatgaccttattgtctaatctggagacataattgtgtgaccacaatgaatactgtctactatccactggctctatgcatcaaagttaattttgagaggaaaaaatacatagaccaaccaaaacagattcttttcagatttcaaaatatccttcttaaatgtttyggaggaaggatgggttttgatttataaaacatttctgaagttagttttattgttctgatgtatttttattatgtaatcattgatttcttctagactcaagaagaatttctatattttgacctaagatgtttgtttctgaattagataatttgtctttattagttataaagcatatgcacatactatgaaacatctaccttaaaacccacatgcaaaaatctgtgttgatcatctaaattatttttaatttgccaatttgaattatttagataccttgcccctccagatgtgtaattgtgagttaattactttctgtttaatttagactgaaatgaagaaactgtatgatactgtttgtgtttttctatttggtgttcactatttgacatcagaaagtctgatttgacaaatgtgttttttcagataagtagttctaatcaaagtggtatgatttaattttttaaag

SEQ ID NO: 728208 - DNA, 901 bp, Homo sapiens
ctctgtctttggttttgggtgattgcaaaaattaacggtaatggaaagtgcgaaagaccaggtatattgaggggagttgttactgtgttttcttgactttgattttgaccttaagtaacttacttcacatatctggacctcaatgattcatctaggaataagtgctaagcatgaattaacatggataagggaatgatactgtatgtaagtgcaataaaattatccctttggctttcagagtagggatagctcccaggagtgggttgaatccaatgaccttattgtctaatctggagacataattgtgtgaccacaatgaatactgtctactatccactggctctatgcatcaaagttaattttgagaggaaaaaatacatagaccaaccaaaacagattcttttcagatttcaaaatatccttcttaaatgttttggaggaaggatgggttttgatttataaaacatttctgaagttagttttattgttctgatgtatttttattatgtaatcattgatttcttctagactcaagaagaatttctatattttgacctaagatgtttgtttctgaattagataatttgtctttattagttataaagcatatgcacatactatgaaacatctaccttaaaacccacatrcaaaaatctgtgttgatcatctaaattatttttaatttgccaatttgaattatttagataccttgcccctccagatgtgtaattgtgagttaattactttctgtttaatttagactgaaatgaagaaactgtatgatactgtttgtgtttttctatttggtgttcactatttgacatcagaaagtctgatttgacaaatgtgttttttcagataagtagttctaatcaaagtggtatgatttaattttttaaag

SEQ ID NO: 728209 - DNA, 763 bp, Homo sapiens
  misc_feature 400, 401, 402, 403, 404, 405, 406, 407, 408, 409, 410, 411,412, 413, 414, 415, 416, 417, 418, 419, 420, 421, 422, 423,424, 425, 426, 427, 428, 429, 430, 431, 432, 433, 434, 435,436, 437, 438, 439, 440, 441, 442, 443, 444, 445, 446: n = A,T,C or G
  misc_feature 447, 448, 449, 450, 451, 452, 453, 454, 455, 456, 457, 458,459, 460, 461, 462, 463, 464, 465, 466, 467, 468, 469, 470,471, 472, 473, 474, 475, 476, 477, 478, 479, 480, 481, 482,483, 484, 485, 486, 487, 488, 489, 490, 491, 492, 493: n = A,T,C or G
  misc_feature 494, 495, 496, 497, 498, 499: n = A,T,C or G
tttattgtgtttataaattatataagtattttaattcttaccccaatttaatctacaagtgcaacacatttgcactaaaactctaagattttttatgaaattaaacaacagaattttaaatttatgaaaagaaaatgtttaagaactaccaaataattctkaaaaagaagaaaaaagtagaaaggagttgtttaaggaaaattagatttttttttaacatatttaggatctttcagggatccttcaaggagagtaattaaaatgttcttcccaaaacagtctttgatgctacaaacagagcacataggcagaataagtgaactctttttctgacccaggagaagttaaatttccatgtttacttatagaactcagtcagattagccagtagccaataatnnnnnnnnnnnnnnnnnnnnnnnnnnnnnnnnnnnnnnnnnnnnnnnnnnnnnnnnnnnnnnnnnnnnnnnnnnnnnnnnnnnnnnnnnnnnnnnnnnnngtcttatccctcttcttattttacatactctcttggcttgatctcatccactattctctctctaatcttctaattattatgagttcctgttctacaaatgttgatgcctcctgggttctgtcttacattttcacatgtttgctggacactgccatgaggaagttcccaaagcaaacccattttatttcccctcaaattttttcctccttcaagaatcctgtcctgaattcaatggcactttatttgcccagttacctaaatcag

SEQ ID NO: 728210 - DNA, 2342 bp, Homo sapiens
gaacttggcaaaaaatattaaaatttgtctggaaaataaaaatatgcccgaatagccaagaaaattctaacacagaagaatattagggagagctttgccagttatttaaactgcagtatttattgctgatatactgctgcaggaatggacagatgatcaataaaaccaaatagtgagaacagaagcagatccaaatacaaatgagattggattatataataaagtggggaaaagaaacacattattcagacaacaggctagtcatttggaaaatgaataaagttggtccctaccttgaacttccagatggaataaagatttaaatttgtaagaaattatgaagtactacaaagttaggccaggtgtggtagctcatgcctgtaatcctagcactttggaaggctgaggagggcaggtcacttgaggccaggagttcgagaccagcctgacaaacatggtgaaaccctgtctctactaaaaatacaaaaaattagccaggcgaggtggttggtgcctataatcccagctactcgggaggctgagacaggagaattgcttgaacccaggaggcggaggttgcgtgagccaagattgtgcctctgaactccagcctgcatgacagagccagaccctgtctcaaaacaaagaaacaaaaaagtaatacaaactttcagatgaatttttaaatataatttttaagtgaaggaggacttgaggcctgacacttggctgttcaggcatcagattccctacctttgagggaggaattccccactgtgagtgattgtggcgtgacagagcgcactgtctcctggagctggaggagacccattctaccccagcccacacatacggccttgtggaaactccctgtggcttgctgattaaagaagaaaatgttcaagactagtttccagatgactcttccctggtctaaggacactagcacaattaggactattgttgcaactttcacccgcttaggggcggccttgaaagacaattgagaaggaaaatcttcccaggggcagaactctaagcagtacatctcatgatccaccttcctggaaggagaaatgaccttaggatttagaatccaaagggacaaaaaaaaaatgtttcagtcaagggacatattaaagagctcactgaataggaaagtgaaactcttactttgccacttttkggcaaacagaaaagaacgtctgggtatagactgggtgattaattctgagtataaaagaaaaagagttatttcagcataataggagaagagaggtgaccccagatacatttcctcagtctccccagccaggatgctagtaacaagacataggcaggactgctgaggactcagattccttggaaatgaaagtttgggtcactccaagaagtaaagaactctactagcttaacaccaagttgagagcaaagaatcatttttgtcatttcaaagacagcacaaatgcattttggcttatgaaacccaggaagcagactgactaattttgacttgtcactatcgccccattttaagcacaaggcctgttcacatttcagagaatatatgtcttcttgttcactgataactctgcagaggaagtctataacatctgctgtttttttatcctgttctctcttcagcctccttcatctctgcctcctaggccttggaatgaactctccaactctttctctttcgtagtccctcaattcaccaggtgtttcccacctctgtgcacttgcgccatgagctcttcctccaccctctccctccatggctgcttactgactgccaattgagattcaccctgacagtcccctctgaagcctcaccagtgtaggcccaacagaactgaccacttcccccttacttctgtcagagtacctataatactttattggcattataggtttgcatgtttgtccctgcttagcagacttcttacttatttacctatttacttttgaaacaaggccttgctctgtcacccaggctggagtgttgtagcatgatcattgctcactgaagcctcaaacttctgggcacaagggattctcctgcctcagcctgcttggcagctggtactgtcagaggcatttgaaccgtagcaactccatctagaataggagctaggtaaaatgaggctgagacctactgggctgcattcccagacagttaaggcattctaagtcatagaatgagacaagaggtcggcacaagatacaggtcgtaaagatctttctgataaaacaggttgcagtaaagaagccaactcttaggcagggcacagtggctcatgcctataatcccagcactttaagaggctgaggcaggtgga

SEQ ID NO: 728211 - DNA, 2342 bp, Homo sapiens
gaacttggcaaaaaatattaaaatttgtctggaaaataaaaatatgcccgaatagccaagaaaattctaacacagaagaatattagggagagctttgccagttatttaaactgcagtatttattgctgatatactgctgcaggaatggacagatgatcaataaaaccaaatagtgagaacagaagcagatccaaatacaaatgagattggattatataataaagtggggaaaagaaacacattattcagacaacaggctagtcatttggaaaatgaataaagttggtccctaccttgaacttccagatggaataaagatttaaatttgtaagaaattatgaagtactacaaagttaggccaggtgtggtagctcatgcctgtaatcctagcactttggaaggctgaggagggcaggtcacttgaggccaggagttcgagaccagcctgacaaacatggtgaaaccctgtctctactaaaaatacaaaaaattagccaggcgaggtggttggtgcctataatcccagctactcgggaggctgagacaggagaattgcttgaacccaggaggcggaggttgcgtgagccaagattgtgcctctgaactccagcctgcatgacagagccagaccctgtctcaaaacaaagaaacaaaaaagtaatacaaactttcagatgaatttttaaatataatttttaagtgaaggaggacttgaggcctgacacttggctgttcaggcatcagattccctacctttgagggaggaattccccactgtgagtgattgtggcgtgacagagcgcactgtctcctggagctggaggagacccattctaccccagcccacacatacggccttgtggaaactccctgtggcttgctgattaaagaagaaaatgttcaagactagtttccagatgactcttccctggtctaaggacactagcacaattaggactattgttgcaactttcacccgcttaggggcggccttgaaagacaattgagaaggaaaatcttcccaggggcagaactctaagcagtacatctcatgatccaccttcctggaaggagaaatgaccttaggatttagaatccaaagggacaaaaaaaaaatgtttcagtcaagggacatattaaagagctcactgaataggaaagtgaaactcttactttgccacttttgggcaaacagaaaagaacgtctgggtatagactgggtgattaattctgagtataaaagaaaaagagttatttcagcataataggagaagagaggtgaccccagatacatttcctcagtctccccagccaggatgctagtaacaagacataggcaggactgctgaggactcagattccttggaaatgaaagtttgggtcactccaagaagtaaagaactctactagcttaacaccaagttgagagcaaagaatcatttttgtcatttcaaagacagcacaaatgcattttggcttatgaaacccaggaagcagactgactaattttgacttgtcactatcgccccattttaagcacaaggcctgttcacatttcagagaatatatgtcttcttgttcactgataactctgcagaggaagtctataacatctgctgtttttttatcctgttctctcttcagcctccttcatctctgcctcctaggccttggaatgaactctccaactctttctctttcgtagtccctcaattcaccaggtgtttcccacctctgtgcacttgcgccatgagctcttcctccaccctctccctccatggctgcttactgactgccaattgagattcaccctgacagtcccctctgaagcctcaccagtgtaggcccaacagaactgaccacttcccccttacttctgtcagagtacctataatactttattggcattataggtttgcatgtttgtccctgcttagcagacttcttacttatttacctatttacttttgaaacaaggccttgctctgtcacccaggctggagtgttgtagcatgatcattgctcactgaagcctcaaacttctgggcacaagggattctcctgcctcagcctgcttggcagctggtactgtcagaggcatttgaaccrtagcaactccatctagaataggagctaggtaaaatgaggctgagacctactgggctgcattcccagacagttaaggcattctaagtcatagaatgagacaagaggtcggcacaagatacaggtcgtaaagatctttctgataaaacaggttgcagtaaagaagccaactcttaggcagggcacagtggctcatgcctataatcccagcactttaagaggctgaggcaggtgga

SEQ ID NO: 728212 - DNA, 1603 bp, Homo sapiens
  misc_feature 1503, 1504, 1505, 1506, 1507, 1508, 1509, 1510, 1511, 1512,1513, 1514, 1515, 1516, 1517, 1518, 1519, 1520, 1521, 1522,1523, 1524, 1525, 1526, 1527, 1528, 1529, 1530, 1531, 1532,1533, 1534, 1535, 1536, 1537, 1538, 1539, 1540, 1541: n = A,T,C or G
  misc_feature 1542, 1543, 1544, 1545, 1546, 1547, 1548, 1549, 1550, 1551,1552, 1553, 1554, 1555, 1556, 1557, 1558, 1559, 1560, 1561,1562, 1563, 1564, 1565, 1566, 1567, 1568, 1569, 1570, 1571,1572, 1573, 1574, 1575, 1576, 1577, 1578, 1579, 1580: n = A,T,C or G
  misc_feature 1581, 1582, 1583, 1584, 1585, 1586, 1587, 1588, 1589, 1590,1591, 1592, 1593, 1594, 1595, 1596, 1597, 1598, 1599, 1600,1601, 1602: n = A,T,C or G
ttgacattataagccgagcgtggtggctcaggcctataatttggggagcattttgggaggccgaggtggatggatcacctgaggtcaggagttccagaccagactaccaacatggcgaaaccctgtctctattaaaaatacgaaaattagctgggtgtggtggcaggcacctgtaatcccagctacttgggaggctgaggcaggagaattggttgaatccaggaggcggaggttgcagtgaaccaagatcacgctaccacactcaagcctgggcaacggggagactccatctcaaaaaaaaaaaaaaaaaaaaagagatttgacagtacattcatttaatctggcaattttaatttgaacaaatacctattaacaacaaattaaatcctattgcacatgaattatttgttgcaccaccaccagattttctaattctagcagaggccacgatgaaataggccagacatgctgccattaaagtttgctgggatgattgtaataaatctactgaaagtattcaagttctaactttcaaagtgatgtagagaaacataaaagatttcactgtatcatctaaaaatataactgttttgtctgatcattaaattctgatttgcatttactctttgtatatattctagaagaaatccttctaaaacatttaattaatcatacccagttccaaagaaaccgtgagtcaaaagggaaagacaagaagaattagacacagagtaaacatgtagagaacatgttttgctgaattcaaatgcttttgcacaagtatggtgagtgtcctttattcccagcacgggatgaaaaacaggacaggaagctaagagaggtcttgaatttgggttaacttaattatttggtttaagattaattttggaatgagatacaaaaaaaaaattttaagtttaaattacctaattttaatttgattacctattttacctgttttaaactgtctattttatattattcatgcctctgtatcttccttatttggataaaaattcaacttcctggccgggtrcagtggctaacacctataatcccagcatcttgggaggccgaggcagatggatcatctaagttcgggagtttgagacaagtctgaccaacatggagaaatcccatctctgctaaaaatacaaaattagccaggcatggtggtgcatgcctgttaatcccagctactcgggagggtgaggcaaaagaatagcttgaactcaggaggcggaggttgcggtgagccaagattgcgccattgcattccagcctgggcaacaagagtgaaacttcatctcaaaaaaaaaaaaaaattcaacttcctataaaaaactaagctctgaaataagccggagattctaaatctttcaacacaaatctgagagactaaaccaagtccagccaaacctaatctgttgctgtccctctctgcctcaaactaaatagtttcaccaaagccaaaggctataagccaaatttatgaacatgacnnnnnnnnnnnnnnnnnnnnnnnnnnnnnnnnnnnnnnnnnnnnnnnnnnnnnnnnnnnnnnnnnnnnnnnnnnnnnnnnnnnnnnnnnnnnnnnnnnnnt

SEQ ID NO: 728213 - DNA, 3071 bp, Homo sapiens
ggaaaaactgctgaaaatgtcactgtctgagggatgctcttaggctggactttgaaaagcgaagacacagctctgtggagtactgctggacaggcatccagcctcctcttccattccgcacttgtgtggccagactatagactcctagccccatgccagagaaataccctgggtgcagagctggaacacaaatcctaaaaagtagccaacagttataatttgtgcttatctctcatgactactcacagtcccttcttaagggctctgttgacaagtaaaaatagaaccaatgataaagctttggtctattggtccattttaccttttcaatacaaagttatgcttgtactcaagaggatcttgggtcattgtatctatttaactgtattttcattttacttttattattattcattcatttaaattgacaaatgttcagggcagccaaatctattttataaaacggtaggaataataatagagcacattaactttcagtgtccattttatagtctataggaaaagcactgggttcaaactttaatgtcctctgtctttttttttatagtaagtggcatattatgatttatgattatagtctaaaatatgccaggtgattctgcaaaggaagatcacagactaagaatrcctaaaataaaagtcacatttagtaaccatttatttccagttacaaggaaatggaagataaatcatttgaaatcactctgcttaaaatctgttacaggaggaagtctaacaggagctgtatttaatccagctttggcactttcgctacatttcatgtgttttgatgaagcattccctcagttttttatagtatactggctggctccttctttaggtaagcgtatttttatttaatatgtctgaaagattagggtattttaaaatatgatatgtgtatatcattgtaacatgtcaatttccaaagccacagcaggcacaaaacagaaaatgaaaaaggtagctaacatgcctgaaataatactttgtgtagtatcctttaaaactgttaaaggtagtcagtttcagatatgctatcactttaagaaaccttagatctgagcaccaaaaaagcaacgagtgcttacttcccttcaaaaataatcttttttttttttgctaaagaaatttgttttttcacatttgtgagctccagataaagtatcatttagttcatttgactcattttgcagaacagcatctcatgaaacaatgaatacctgtattaagtatagtttaaaaattatccacattacattcctgttatttttattgtttttgttttgttttttttcgagacagggtctctctttgtcacccaggcttgagggcagcggcatgatcatagccatagctcactgtgcttgaactcctgggcacaagcaatcctcctgccttagcctcctgagtagctgggatgacaggcatgtgccaccacacccggctaatttttgtatattttgtagagatgaggtctcgctatgttgctcaggctacattccagttacttctatttagatcagatatataaactctttataaagatgggtcaaataacacacaaaattatacaatatacaaaaaattattatgcatttcttttgcattacgtatataaagttatcagcatttattgattttgtttagtcatctgttttaagcctgattataactcataactgtaagtgaatatgaagatgcttggccctccattaattcactcttctttttatccagttagcatattgttccttgttagtcattttctttaaaacacacacacacatacacagaaggtaacacagaagggaagtgccataacaggtttgaatagtcaatcacactttactcttcctgtttaccttccattcctctatctcacattaatgttattgttatgctcaatatcatattgttatgctcaatattgttatgctcaataatatctataggcctaaacatgaagaatatcagagaaaaactggttttaaatgctagtaatataacttttggtcagttctacagagtgctagtattttccgataacttctttaaagaaaaattttctctgtttttaggccgggcgcagtggctcacgcctgtaatcccagtactttgggaggccgaggcaggcagatcatgaggtcaggggattgagaccatcctggctaacatggtgaaaccccgtctctactaaaaatacaaaaaattagctggtcgtggtggcgggcacctgtagtcccagctacttgggaggctgaggcaagagaatggtgggaacctaggaggcggagcttgcagtgagctgagatcgcaccactgcactccagcttgggcgacagagcgagactccatctcaaaaaatccgtttttaaattttaaagttaaaaaggtcactaatgtaaagaagttaagaagttaacaaacaaggtcactagttgggcaggcctacaggtagtttttatatgaaaaaattcccccagtatgtctggagactaacatatattaacatgatttatttgttagcgtgctccaactactattgtaacagtaggctaaggcaaaggtccccaaaccccaggctgcagaccagtatagtccgtggcctgttagtaaccaggccgcacagcaggaggtgagtggcaatcaagcttacaaagctccgtctcctgtcagatcagcggtggcattagattctcataggaacgtgaaccttactgtgaactcagcatgtgagcaatctaggttacacactccttatgagaatctaactaatgcctgatgatccaaggtggaacagttccatcccaaaaccatgcccccagtccatggaaaaactgtcttccaggaaaccggtccctggtgctaaaaaggttgaggatctctgtgttaaggaattatttcatccattacttgaaagaacattaaaaagtagccaggtaggctgggtgcggtggctcatgcctgtaatcccagcactttgggaggccgaggtgcgtggatcacctcaagtcaggagtttgagaccagcctggccaactctacta

SEQ ID NO: 728214 - DNA, 349 bp, Homo sapiens
agcactggtgatctgacattgcctgagagtaaaacgtaaamcaggaggcacaaaagtgctaagtgcaaaggcagagataacactccttggaatactattccagggtaaaaatagtactagctatgctgagcagaatcttcaccttaactcgagaaccttagcatgggtgtcatttcagtgtggtatgtggagccagagtgtaaggtccatgcaggcatcctcctgtcccaggaacatgctgaatgctgtgggtcgccctgcacctgggggagccctgaggttcagtcagaagatggtgcatttcccagtaggaaaggtctgtgctgcttcattatggggtcagatgttg

SEQ ID NO: 728215 - DNA, 598 bp, Homo sapiens
taagaagggatggacagaccaagtagacacaagacacaggaaacaccaaatatttatgaggcactgaatattcacaaaaatttaaaccagccatcccgttgtgacacccattctggcaatctgcatcctctgcctgagatatgcagataaaacccatagctgcccaacagggtaatcggcaagctacagctgtagccaaggattcttgcccttgccttcctacaatagagcaagagtgtttgggctccaggcccagtcaatttgctgagtcctcttgctcatccacaactcaggtccttgtaaccatcggtggggaaggctgatgcartagaaagattcggcatatgagcgttacataacacagaactcacatagggtacttcttccaccctgtgctaagggtgttaaccttcctcatctcttttccattgcttcttactaaacattttaattgagttgataaaccaagtgattcaggatcgtaattttgtctgtgagccattctgttctgtgacctctgggatagcttgttatgtaatatgttagaaggttatcattgcaccaaggtaattcctcatgtgacagtccttttgaccca

SEQ ID NO: 728216 - DNA, 598 bp, Homo sapiens
taagaagggatggacagaccaagtagacacaagacacaggaaacaccaaatatttatgaggcactgaatattcacaaaaatttaaaccagccatcccgttgtgacacccattctggcaatctgcatcctctgcctgagatatgcagataaaacccatagctgcccaacagggtaatcggcaagctacagctgtagccaaggattcttgcccttgccttcctacaatagagcaagagtgtttgggctccaggcccagtcaatttgctgagtcctcttgctcatccacaactcaggtccttgtaaccatcggtggggaaggctgatgcaatagaaagattsggcatatgagcgttacataacacagaactcacatagggtacttcttccaccctgtgctaagggtgttaaccttcctcatctcttttccattgcttcttactaaacattttaattgagttgataaaccaagtgattcaggatcgtaattttgtctgtgagccattctgttctgtgacctctgggatagcttgttatgtaatatgttagaaggttatcattgcaccaaggtaattcctcatgtgacagtccttttgaccca

SEQ ID NO: 728217 - DNA, 661 bp, Homo sapiens
ttacattgaaagacacaaataagttgaaagtaaaataattcaaatagcaaaagtaagaggctatatcaataacagacaaaatagattttaagacaagaaatgctattagagacaaagatattttgtcgcgataaaagggtcaatatatcaggaaaatataacattataaatgtattcatatctaacaaaaatgcatcaaaatacaggaaggaaaaactgacttaatttaaagaacagagaatggaagctggctgcgaaagggtccagcagaaggaaacatggctgccaaagtgttagagtccaytggcaagtttggcctggccttagctgttacaggaggcacggtaggctctgccttatattatgtggatgctgagcacagagctaaatctttggcagattccatggagtacaggacattgcagtatggaaaggaactcattttctcatcctatgggtacagaaaccaattatcgttgactgctactcttgatcacataacacaccagtcatcactggtagtgaagatttacagaatgtcaagatcacagagtgcattgtcttccagcctgtcactagccagcttcctcacatcttcaccagcattggaaaggactatgatgagcgtgtgctgctgtacatcactaagagatcctcatgt

SEQ ID NO: 728218 - DNA, 641 bp, Homo sapiens
aagggtttaagtggagtgaaaagtctcagaacacaacacccagacataaggcagaaatggaggaggtggaatttccacttcaatctctgtgtctttaagcatatctcatcttttaaaattccttactctcattaaaaagacaaaatttaaagatcttaattcatcattctagaatcaggcagctytcagaaccagaacaagttcaaaggactccaacctgccacgtgatcagacagcactgacgaacagaaaatacaaatgaggtacagaaatggaagtgaggtatagagacagcctgattggttactgcttggggtttgccttatttgaacttggtctgaacaattgaccgcctgtgattgaatgaagctctcagctgctatgattggctgagactcagctatatgttacaaaagtatattcctaaattaggcttccagttagtttatgtatgaagttaggctgcagtttgttatgtgaagactcctgtatggagacatcctcaggtcaaatttagtttaatttaacactcaaaagaaaccacatgttttccagaccagagttgactgatattgttttccaactctcattctgtatgtttataacaattttatatcgggatacaacagtgtgcctataat

SEQ ID NO: 728219 - DNA, 641 bp, Homo sapiens
aagggtttaagtggagtgaaaagtctcagaacacaacacccagacataaggcagaaatggaggaggtggaatttccacttcaatctctgtgtctttaagcatatctcatcttttaaaattccttactctcattaaaaagacaaaatttaaagatcttaattcatcattctagaatcaggcagctctcagaaccagaacaagttcaaaggactccaacctgccacgtgatcagacagcactgacgaacagaaaatacaaatgaggtacagaaatggaagtgaggtatagagacagcctgattggttactgcttggggtttgccttatttgaacttggtctgaacaattgaccgcctgtgattgaatgaagctctcagctgctatgattggctgagactcagctatatgttacaaaagtatattcctaaattaggcttccagttagtttatgtatgaagttaggctgcagtttgttatgtgaagactcctgtatggagacatcctcaggtcaaatttagtttaatttaacactcaaaagaaaccacatgttttccagaccagagttgactgatattgttttccaactctcattctgtatgtttataacaattttatatcgggatacaacagtgtgcmtataat

SEQ ID NO: 728220 - DNA, 1410 bp, Homo sapiens
aaagaaagaaagaaaaaaggccagatgaacatttttcatttagaagatgaagtagccacttcccaaacccacatagctgagccaaactttttattttaaattcaaattggctcaattatcatggacttttcatttgagttacacacagcattttgtcctccatggccgaactgtctgttttactcttggtggtattcacattcagaaaattgtgcagacctgtcactgatttgtgcttcttccactccagatgtggatgtcagcactgcccatcccctttccaacagggccattccataggcttccaggtctggcagccaaaagcactaacttttttttttttccaccttctgtcacctgagcactcttacaagtcctgggacaccattggcacagtactctacatttaatcgacatcttattccgaaaaaactcttaatccccagggttatctaaatcctaaaatcatattcaaaataaatggaatatgaaaagcttcatatgtaaaagtctttcttcatttctattggagttctgcacatcaaagttgatttgaagttagatgaggccaggttcaaattctggccctgcctattgctattgaactgcttggacaagtcagttcatattccaaaggctcaaactccttatctgaaaaaagggaatggtcataattgttctcagggtgagaattacatgacataacaggcaagtaatgcctctgaatcttacttttctcacctgcacagtggagataatctcaactcctcaaggttgttgtgagatggtatatataaaagcacctcacacaaaatagcagttcaacaaatgtccatgttcttgattccttaggccccacccattccttaccaacacattaccctatgaaaccagcatcatttgtcctttccctcagcaaagtgagtgactattttcaaatgcaagagagtagctatacttgggggttgtagaaacttacaaaaagacaatgaaatacaggagagagagtgctaaaactggagccggagactgacactggagtccagtcctgcctttattatctgactgcctatggaaaagtcacttaaccttcaggacctcgatgttcccatccataaatggggaataataacataatcctatttgatagggctattgtgaaaatcaataagataatggaaattgaagtttttgtaaaccatggagctgaaattcatggcttagaagttctatagcctgattcacaaaattgatccttacaaataaatatccatccagtcactgattttttccaacagaaagatattgacacccacaatgtgctcagcgctatgctagtactggggatacagagataagaagccatgatttctaccctttgggtggaaagacaaayatgcaaacaagcca

SEQ ID NO: 728221 - DNA, 2017 bp, Homo sapiens
tttcaagaattggtttttctgagcagtttataaattgtgtcattatttagaaaggtctaataatgtggtaagctttgcacaagcatcaagccacttcaaattagcttaacaattaaatgaccaaatcataaagatgttagagctactgtcacagaaaatcaaagctgggcagtagttaaattggtagaaacagattttattcagggactgttgcagtagaggaaaagagacctcactataaaaataagctcaatttcagatacaatatgaacaaatggggatttacagccaaggagcagggtggagatcagtggacagaaaattactaggaggaaacatcaagagtaagggggcattcttgatcaattgaacttactgaaagtgggccagagtgatcagatatcaatggtgagggattctctttaaactatatcccagaaaatgtacaatcattatgtatcaatagaataaattaacaaaaaaggtaagttaacagaattcctactaaaactgagaagtacaggcctgagaaggacagacactgaaacccaaggtcaaagcccagttgagaagagagcttagaggagcctgactaaagtttggtcaaggagagaatctttgtcactacttaatattcattgagcttataaaatggtaagcaccaggcccacccagacattttcagaaactgtggcaacagtagaacaaaatcttgcatatcttctgagagcggtttctcccataccacccattctgagccaggcaacctttattcacaaaatacccttccctctcccccaccactatccctacttccattccaaaggaacacattacattttggtttctcagaggaagctaacgctggaaaaccaagttagaatataaactttttagaattctcaaatttctacaccaggaaattccagcacagcgacagcagtccccagcccccagtttatgcatttcgttttctagccccagctccttcttacctcatgagagccctgagtgcatgcctacaatactacaacttgtacacctaaactccacctactttttcttcaaatagttgccctttggtcacttttgagcctagggttattcataaagctggcactgtcaacccttagaggtatgaastgtggagaaaggttcacatatctactggagtgaactgcggccctctggtcaaggaattcctgattatgtctgttggggtgaatgagagtaaagcctctctgggatcttgtagactttccatgaagtgatcacttaaatgctaactatatttatttagttttaaggcacagtaaaaataaaataaataggtattctctttctgttactatataacagaaataaataaaataaatagatattcatttttggttactgtaacaggatactacagactgggtaatttataaagaaaagaagtttcttaggctcatggttctggaggctggcaagtccaagagcatggtaccagcatctgacaaaggccatcccttggtgaaagggcagggcagaagcaggatcaagtacacaatacagagagagatactataggccagacttgctttataaccaccttctctctaaataactaaccactgtcatgataatattaatccatttatgaggactctgcccgaatgacccaatcacctgttattaggcctgacctcccaacactgttgcattgggaattaaatttccaacacatgaacttttgggggacacattcaaacaataagactgtgactggtagagttcttggcttttagtttctcatattaggttttgtggtggtagttgtggctttcatcccagattaatagagcaatctttcctttgtcttaatgataccacatttatttacattagatgactgttattttctttcttttttattttccaagatggagtcttgctctgttgcccaggctggagtgcagtggcatgatctcagctcactggaatctccacctcctgggttcaagcgattctcctg

SEQ ID NO: 728222 - DNA, 595 bp, Homo sapiens
tgcattcagttttctattacttgctagtatacccatcttaaaagacactcttgcttttccatcattggctgttaatgaataatggtctgttctgttttagattcctaaggctgggacaacctccctctgatactaatgtcccacagtggcattacagtgtgttgggaagaagataagaaaaatttcataaaggcaagagatagtagtggtcacactgaagaatggataaacattctctaggtaggtcaggacaatgagcaagtattcctacaaactaaaaaatgaacatctattgtcaaccgaggctctcgatacagctaaattgggctttctgttactcaacctctaaattaaaagctgtttttcaaattaaattgatttagcaccacataattttttttcatttttatgaacaaaaaagtgtttacagataagtgctgtttcatggaccagtgctagtgaagcattgtctgggtaagagacaattgcatctgccatatccatgacagcaagaactactataytttggttgaggatggaaaagaagttatctgaggcagaaatttcaggatttgatgatagcaaacaggtatta

SEQ ID NO: 728223 - DNA, 1819 bp, Homo sapiens
tttttaatggagtcatcgttggtcttttcaaaagaataaacccagagaaataagcaagtagtttagaaaagtctttatttagtttttcttccctctcagtaactaatttttcttgaatatttgaatgtgatattttctaaatgttagaacttcagagcctactagagaaaactggaactaaacattttcaagggtattctttttcctacattttagtccacctgccattcatcttgactgttaacacaaatagcaactgtgtcaaattggcgaatatactcctgaggttgcgttgcaataattaaattgtgagggtgactaaaagatagaaggaagaaatacagtgtcagcctatttctgggattttttttttttttctattagcagcctttattkgcctgcgtgctcttttcaaactgttattttatgtatttcagctggaaaatccaacaatttttttctaggaatcacgaaaattgtatagtatttgtaagggtctctaagggcatttgaaattaaacagttgatcttggggactaaggagaaaattcaaacgtaatttcaacttaatttagcatttaggcaatgtggtatgatagatctcaggcttttaactggctttgatttaaacctagttctgctacttatacattatacatcctcaagcaagtaactaacgaccctctaagactcagtgtactcatctgtaaatggcgtttaatttctcttagctttaatatatatttgagagattaaatttatttcaaagataaaaattttctaggtaacaaacctgggatatctttttgaaaacccataaactagggagtagaaacagtagaaataaaaaggattcagaaaggatattttgatgcctaattagaaagacaatatgggtatttcttttctaattaaaataattataattttaaaaacaccttacagaaggtagataaaacagtaatggaagacatcaatcagctatatatttactagagatactctgtccaaagtagtttctattattttttgccttgcttcatcgacaagttttgctttctgaagtttgtgagagaaatacagaaatgtgtctggtttactggttagtgaaatggaaatgagggcaatatttgggggaaagtgtagtccttaatagccaagaaaatgaaaactagctcagatatttattgtaaatgcttattgtaaaataactttttcaggagaaattttttaatgcagataccctaatcccattgccagagaatcaatggggatggatagtccaataatctgaatgaaaggtttcccacgtcaatcttatgttagctagaatttggagcagatgtcctggacaacagagtaacaagtattataaggttcatagaaaactataaacctgtaaggggaagatagatctagagaaattggagattctcaaattggattctgatgaggaagaaaagtgggagatctataaagaaacatctgaggcactcacgttttttaaagacttgtagataaggtggaaggacagatatgttaaccaagaacatagtgacacaattttgaggacgtcaaaagtctacatgaactaaaagtccagtgcttgggacaaatagagtaatgttaaagatcacaataaccaaacagcatcctcagctccttttttttccccctttctgtttcctgtaactgacaacaatctttttaattaggataaagcaggttgttagttaaatattgctgcataacaaacaacctcaaaatctcagtggcatacggcaataagcatctgtttctctcttatatgttggcaggt

SEQ ID NO: 728224 - DNA, 601 bp, Homo sapiens
tatcctcagtttggagtaggaaatgaaggataattttttccatttcacctctattgcaaatttattttttcaagccacacaaaaaattgtctaagataaaatgagaattattcagatcaattctgcaatgatacagggaagatgtgaaaggagggctcaatgcagagttgtgaagttgaaaaccactatttctgttctaaagacacagtaagcagagatccatctctcttcaggcatcctgcttctctgcaggttacttctgctttaaggaaagtacatttttagaacaaagcttttgtttgtctagttagygaggtattctatctttcgaatacacaatgtgaaccacagcctaaatttcttaaaaactagagaagtaaaaatacagcaatggacattaagatccaattcatggatgatatagcccttgtctcaaagtggctgtatcagaaatggacacacaccaattagcacatgaagttcaacattcactactgctagctcttttctttgcttctgctcttcacatttatctctacttacccacagaggttttcctgcagtcatcaggggatgaataataattaaattatcttataag

SEQ ID NO: 728225 - DNA, 542 bp, Homo sapiens
tatccagttgtcttkgtttctgccagcttttctgttcctggctttgaccattggtttgtctggctgttctaattatagtctctgtgaaatctatactatattcttgagaggtaaaggttaacttgtccaagactgatttcttgcaggttggacacagaaagaagctggcctcctgcaaacctccatggaaaccttttatgacctagggcttgaagcaaattaaccttagccaagagcaaggcttggacccagccctggtcacaccaggagtgggcctcccaattagtcaccaacacggttgtgtaaaaccttgctgctgggatgcgggaacggcggctcacgcctataattccagcactttgggaggccaaggtgggcagattgtctgaggtcaggagtttgagactaatctcgccaagatggtgaaatcctgtgcctactaaagatacaaaaattagccaggcgtgatggcgggtgctcgtaatcccagctatttctgaggctgaggcaggagaattgcttcaacccacaaggtagaggtt

SEQ ID NO: 728226 - DNA, 1123 bp, Homo sapiens
atacatatatgtatgtatatattcaggaattttagcagttgctcaattcatacttctccagttcctaggcttaattatattaaaataataaaaccttcctcaagaaattactcagagaaattctatacccaacctgatgaaaaatctaatttaaaaattcaataacagggttattatggttacaaagaactggtggtaagcatttaaagcaattaaataaaacaagaatatacatttgatattaatattgtcacaaaaaataatacagatgacaacactgaaatatgcatctaatataaataatatgttagtaatactcattctacctaaaatcacctattactagtaataaaaattaggatgttggcaggggaatattgacaaaaacagaacatgttaactttgtcaatttttctagagaaaagaatcaacattcttcaaattattctgactataactcataataaaaaaccctttttaattttgtattactatccagcacaaacatcttttttatcaaacatcttattttgtattcatacacacacacacacacacacacacacatatatgtgtgtatatatatatacacacacatacttgattgttaggtaaaatgagtttttaatgtgcaccacagctaaaaagggcttgagacacactgttctaagttggttttatgacctactattgtattgtagcccaccattttaaaaattagttaatttgtctttrcgttttcttaatcttgacaaatagattagcttaaatattattttacgaacacatcttcaaagtatagttttaataaggatgtgtagaatccacagtccaaaaacacacttcagtaaaagaaatgaatcaacaagaaagcacacaaaaaacagaataaacaaaaatgtaaaaataaaataaaacgcctggacgcggtggctcacgcctgtaatcccagcactttgggaggccgaggcgggcgggtcacgaggtcaggagatcaagaccatcctggctaacatggtgaaaccccgtctctactaaaaatacaaaaaattagccgggcgtgggggcgggcacctatagtcccagctacttgggaggctgaggcaggagaatggcgtgaacc

SEQ ID NO: 728227 - DNA, 1123 bp, Homo sapiens
atacatatatgtatgtatatattcaggaattttagcagttgctcaattcatacttctccagttcctaggcttaattatattaaaataataaaaccttcctcaagaaattactcagagaaattctatacccaacctgatgaaaaatctaatttaaaaattcaataacagggttattatggttacaaagaactggtggtaagcatttaaagcaattaaataaaacaagaatatacatttgatattaatattgtcacaaaaaataatacagatgacaacactgaaatatgcatctaatataaataatatgttagtaatactcattctacctaaaatcacctattactagtaataaaaattaggatgttggcaggggaatattgacaaaaacagaacatgttaactttgtcaatttttctagagaaaagaatcaacattcttcaaattattctgactataactcataataaaaaaccctttttaattttgtattactatccagcacaaacatcttttttatcaaacatcttattttgtattcatacacacacacacacacacacacacacatatatgtgtgtatatatatatacacacacatacttgattgttaggtaaaatgagtttttaatgtgcaccacagctaaaaagggcttgagacacactgttctaagttggttttatgacctactattgtattgtagcccaccattttaaaaattagttaatttgtctttgcgttttcttaatcttgacaaatagattagcttaaatattattttacgaacacatcttcaaagtatagttttaataaggatgtgtagaatccacagtccaaaaacacacttcagtaaaagaaatgaatcwacaagaaagcacacaaaaaacagaataaacaaaaatgtaaaaataaaataaaacgcctggacgcggtggctcacgcctgtaatcccagcactttgggaggccgaggcgggcgggtcacgaggtcaggagatcaagaccatcctggctaacatggtgaaaccccgtctctactaaaaatacaaaaaattagccgggcgtgggggcgggcacctatagtcccagctacttgggaggctgaggcaggagaatggcgtgaacc

SEQ ID NO: 728228 - DNA, 1123 bp, Homo sapiens
atacatatatgtatgtatatattcaggaattttagcagttgctcaattcatacttctccagttcctaggcttaattatattaaaataataaaaccttcctcaagaaattactcagagaaattctatacccaacctgatgaaaaatctaatttaaaaattcaataacagggttattatggttacaaagaactggtggtaagcatttaaagcaattaaataaaacaagaatatacatttgatattaatattgtcacaaaaaataatacagatgacaacactgaaatatgcatctaatataaataatatgttagtaatactcattctacctaaaatcacctattactagtaataaaaattaggatgttggcaggggaatattgacaaaaacagaacatgttaactttgtcaatttttctagagaaaagaatcaacattcttcaaattattctgactataactcataataaaaaaccctttttaattttgtattactatccagcacaaacatcttttttatcaaacatcttattttgtattcatacacacacacacacacacacacacacatatatgtgtgtatatatatatacacacacatacttgattgttaggtaaaatgagtttttaatgtgcaccacagctaaaaagggcttgagacacactgttctaagttggttttatgacctactattgtattgtagcccaccattttaaaaattagttaatttgtctttgcgttttcttaatcttgacaaatagattagcttaaatattattttacgaacacatcttcaaagtatagttttaataaggatgtgtagaatccacagtccaaaaacacacttcagtaaaagaaatgaatcaacaagaaagcacacaaaaaacagaataaacaaaaatgtaaaaataaaataaaacgcctggacgckgtggctcacgcctgtaatcccagcactttgggaggccgaggcgggcgggtcacgaggtcaggagatcaagaccatcctggctaacatggtgaaaccccgtctctactaaaaatacaaaaaattagccgggcgtgggggcgggcacctatagtcccagctacttgggaggctgaggcaggagaatggcgtgaacc

SEQ ID NO: 728229 - DNA, 1123 bp, Homo sapiens
atacatatatgtatgtatatattcaggaattttagcagttgctcaattcatacttctccagttcctaggcttaattatattaaaataataaaaccttcctcaagaaattactcagagaaattctatacccaacctgatgaaaaatctaatttaaaaattcaataacagggttattatggttacaaagaactggtggtaagcatttaaagcaattaaataaaacaagaatatacatttgatattaatattgtcacaaaaaataatacagatgacaacactgaaatatgcatctaatataaataatatgttagtaatactcattctacctaaaatcacctattactagtaataaaaattaggatgttggcaggggaatattgacaaaaacagaacatgttaactttgtcaatttttctagagaaaagaatcaacattcttcaaattattctgactataactcataataaaaaaccctttttaattttgtattactatccagcacaaacatcttttttatcaaacatcttattttgtattcatacacacacacacacacacacacacacatatatgtgtgtatatatatatacacacacatacttgattgttaggtaaaatgagtttttaatgtgcaccacagctaaaaagggcttgagacacactgttctaagttggttttatgacctactattgtattgtagcccaccattttaaaaattagttaatttgtctttgcgttttcttaatcttgacaaatagattagcttaaatattattttacgaacacatcttcaaagtatagttttaataaggatgtgtagaatccacagtccaaaaacacacttcagtaaaagaaatgaatcaacaagaaagcacacaaaaaacagaataaacaaaaatgtaaaaataaaataaaacgcctggacgcggtggctcacgcctgtaatcccmgcactttgggaggccgaggcgggcgggtcacgaggtcaggagatcaagaccatcctggctaacatggtgaaaccccgtctctactaaaaatacaaaaaattagccgggcgtgggggcgggcacctatagtcccagctacttgggaggctgaggcaggagaatggcgtgaacc

SEQ ID NO: 728230 - DNA, 632 bp, Homo sapiens
cgttatcctaacttgactctagctgcaacaatgcagagtcgtccgattgggtctcatcttcagcctggaaagagtctgctctatccagccctggtgatggtggaggagagacggccgggaatgaactacaatgcagagctcaaagttcagtccagttcacagtcatttattaagtttttactaggtactagcctggtgctaaacascaagggtacaaaggcaatgagaaagagtggctaattaaaaataaaatgttaaatttaaaaaagcaaccaaaaagaaagaagaaaggaaaggaaacgctgaccaccctatgagagaagccctgtgataaacacctgtaccaaatgctacagaagtgcagaggatggtgtaaccgcccaaggggttcaccttgcccgctgcctagacaaaaccaattcatcaagacaggggaattgaaatagagaaagagtaattcacgcagagccagctgtgtgggagactggagttttattagtactcaaatcaatctccccaagcattcagggagcagagtttttaaggataacttggtgggtggggggaagccagtgagccaggaatgctgattggtcagggatgaaatcatatagagttggagctgtcttctt

SEQ ID NO: 728231 - DNA, 632 bp, Homo sapiens
cgttatcctaacttgactctagctgcaacaatgcagagtcgtccgattgggtctcatcttcagcctggaaagagtctgctctatccagccctggtgatggtggaggagagacggccgggaatgaactacaatgcagagctcaaagttcagtccagttcacagtcatttattaagtttttactaggtactagcctggtgctaaacaccaagggtacaaaggcaatgagaaagagtggctaattaaaaataaaatgttaaatttaaaaaagcaaccaaaaagaaagaaraaaggaaaggaaacgctgaccaccctatgagagaagccctgtgataaacacctgtaccaaatgctacagaagtgcagaggatggtgtaaccgcccaaggggttcaccttgcccgctgcctagacaaaaccaattcatcaagacaggggaattgaaatagagaaagagtaattcacgcagagccagctgtgtgggagactggagttttattagtactcaaatcaatctccccaagcattcagggagcagagtttttaaggataacttggtgggtggggggaagccagtgagccaggaatgctgattggtcagggatgaaatcatatagagttggagctgtcttctt

SEQ ID NO: 728232 - DNA, 603 bp, Homo sapiens
cctcatgtgtttattcattcatccatccatcttttcatttgttatttactayagtccaggaattctcttgaccaaaaaagatatagtaagtcagtcttgatcttgaagcagctcatgtaaatagaaagaaaattcatataccaaacaagttttctgatgacacaggaagtagacaggccataatggggagagaaatatcagtttcagaggaaaaagtgatatctggctagtggtaaaagaccagtggtgtttactaggtgtgggctgttgggcaacataaggaaatggacattgtagacatggatagtaacccagctaagaaagatgccatgagaaaaaaaataactgggtagcgatgctcaggtgcagtggggcagagtgaaggatgagggtagaaagaaaactctggcctaatctgaaagagtctttgatgtcatgtcaaggactttgaatgaaaaggaattacagaagcggttttgggtttgttgtacttttcttttttgcttgcattttagataggcataatggtagtctgaaggatgaattgagtttcatgtcaaacaggaaactaaagcaagcttttcagctatttggatgtggacc

SEQ ID NO: 728233 - DNA, 1229 bp, Homo sapiens
aacagcagtgacctgctgtgtttctgctctgtgatattatctgagagacctgatggttggttccctgagaaaggaactcaggtaagacaaaggaaactttctcaagttttaagactgagaggatcaatttctatgcttattcaaagaaacaacatcagctttacgggacattgggccggtttcacaagtccagaatggggttgtttgcttgcaaatttcactccaatcttgcttgaggctaagccctgagtacagcataacctactcccatcaatacttactccactgtagatattgtctaagatgaaaagaaagaccagctgtaaggaatacagttttcaggttaggttagacttcaggagaaaccctaaacccagcatttactagatgtataaactcaggcaagttatttttcttctataagtctctttgcaagtaaaatggagctcgtgatcaatattccatagaatttctatatatgataataaatacactatagcggaagtccctagcatgttaagtgttttataataggtagcttagaaaacagtagcccatgtaagttttttttaaaaagccaaactcatttcttatttcattctttcataatgtggctgaatagtatattatttataaacattttagatatcttaatggagacagaaactgctgagccatcaatcattctgaccctctggcttacagcaggcaatttattttagttctcaaacattctgtgtttaattactagattaaattgcctgaatttaaattattaatctgggttactgaagtaaagtctgaaaaaagcagtacttttgcagacaggttgtttgaggattaaatgaaataacacatgcaaaggatttagcattgtattgtgcacaaaataaatgctctacaaatattagctgatatcattactatttttgctattctatgcttctgcatctttcccctgaaagtcataaaatatctagatgtctttggttgcaattaattggtattataatcatataatgaaagaatattagtgatggaagagatcttcaaatttatattctagtttatagatgaaaaagtgagttccagacaatgtcattatatttcaacaatatcactcagcyagtcacggtccacacggcgatgctatccagaactgctgagattcagaggccattcaagaatgcattcacactgtgatatctaaacacacatttaaagatatt

SEQ ID NO: 728234 - DNA, 589 bp, Homo sapiens
ggacataggcatacaatatcccaatataagcccatctgtatttcctaccaccttaacaagaatatctttacttgataggtacatttgagaagcacttaaaattctgactgtttgctattaaaaattgaaactgtaaacttttgaaatgaattattaattgcagctaatgacttmatagtattttaaaatgttctcttcatctgtttgctggttgaatatactggccaatattgattttgaaattaatccatctgccttattacatgctctattgcctgagttgaaattgagaatttatttaaaatattgtcttccttaaattacttcaattgttgttagtcttccctaatatttgtgaaactgaatgattatatagagagatagatgcatatatagtaacacgataattttcctgtctgacagggacattggaaaggttaatttgtgtctgtggtgatttttgtccctcttgatgaaaagacactatacaaatacagaaaacagaataaataaataatttcattaaaataaaaaaggttattttatcagtggctgtagctggatttaaaaaattgattcataagggaga

SEQ ID NO: 728235 - DNA, 1304 bp, Homo sapiens
caactaattggatgatctcatttacttaatgtcaactaactgtagatattaatcacttcacaaaataactgcacaacacccccttacattagcgtttgagtagctaggtgccacagcttagcctagttgaaaaatgataatcacagagcctacattaaattggtgataactggaagggaataaaagggatcaattatgaacaaacaaataactagataaaacaggcaaaggtaacaaagcrctaagaataatgtgaaaggtttactttggtaactgcgaaagtggtgtacatgtaaaaaaacaataagtagcttatttggagaagacgttaactaattcagttttagatgctaatgaatgtgagttaaataatcaaattattggaggtattttgcccaatcaatatatcttaattgaactgctgaagggatggacatacaacctccactgcccagctctggacacagctgattgggctggtagtgtatatctgaccaaatctgaagagttaatttagccaatcaggttcttatcacacttaaataaccacacacacaagctagtcaaatggtcaggggtcctacaactatagaaacttggagtcctggaagtggcagccttgaaagtgcaactgtatgttgtatagtccagcccagagagaagagaatcttaacttagatgagataggctagataactctagccttaaaggtggagaacataattttaatccctatccttcttcatatagcttggctgtgtccccactcaaatctcaccttgaattgtaataatccccacatgtcaagggtggggccaggtggaaataattgaatcatgagggcagtttcccccatactgttctcaaggtagtgaataagtatcacaagatctgataattttacaggtgggagttccccagcacaagttctcttttgcctgctaccacataagatgtgcctttgccttctgccatgattgtgaggccttctcagccatgctgaactgtgaatccactaaacctctttcctttataaattactcagtctccagtatgtctttattagcagcatgagaatgaactaatactgtaaattggtaccgaatactggggcactgctctaaagatacccgaaaatgtggaagcgacttcagaactaggtgacaggccgaggttggaacagtttggaaggctcagaagaatacagggagatgtgggaaagtttagaacttcctagaggctttttgaatggctttgacaaaatgcagctcattacagatagagataaggaacttgttcagaac

SEQ ID NO: 728236 - DNA, 1304 bp, Homo sapiens
caactaattggatgatctcatttacttaatgtcaactaactgtagatattaatcacttcacaaaataactgcacaacacccccttacattagcgtttgagtagctaggtgccacagcttagcctagttgaaaaatgataatcacagagcctacattaaattggtgataactggaagggaataaaagggatcaattatgaacaaacaaataactagataaaacaggcaaaggtaacaaagcgctaagaataatgtgaaaggtttactttggtaactgcgaaagtggtgtacatgtaaaaaaacaataagtagcttatttggagaagacgttaactaattcagttttagatgctaatgaatgtgagttaaataatcaaattattggaggtattttgcccaatcaatatatcttaattgaactgctgaagggatggacatacaacctccactgcccagctctggacacagctgattgggctggtagtgtatatctgaccaaatctgaagagttaatttagccaatcaggttcttatcacacttaaataaccacacacacaagctagtcaaatggtcaggggtcctacaactatagaaacttggagtcctggaagtggcagccttgaaagtgcaactgtatgttgtatagtccagcccagagagaagagaatcttaacttagatgagataggctagataactctagccttaaaggtggagaacataattttaatccctatccttcttcatatagcttggctgtgtccccactcaaatctcaccttgaattgtaataatccccacatgtcaagggtggggccaggtggaaataattgaatcatgagggcagtttcccccatactgttctcaaggtagtgaataagtatcacaagatctgataattttacaggtgggagttccccagcacaagttctcttttgcctgctaccacataagatgtgcctttgccttctgccatgaytgtgaggccttctcagccatgctgaactgtgaatccactaaacctctttcctttataaattactcagtctccagtatgtctttattagcagcatgagaatgaactaatactgtaaattggtaccgaatactggggcactgctctaaagatacccgaaaatgtggaagcgacttcagaactaggtgacaggccgaggttggaacagtttggaaggctcagaagaatacagggagatgtgggaaagtttagaacttcctagaggctttttgaatggctttgacaaaatgcagctcattacagatagagataaggaacttgttcagaac

SEQ ID NO: 728237 - DNA, 601 bp, Homo sapiens
tttcatttagtcataattcagatacagaaacacagtcaaattttgtatattgacmtcataagttgtgacattgctaaatttgtttattcattcttgtgacttttctgtatgttaggattttcctcataaacaatcatgtcatctgtgattaaaacagtttacttcctcctctttgatttgtatgctttacttgtcttattgcattgactaggtcttttatttcaacatagaataaaagtggtatgagtagacatcttataatgtttttattgtaaagggatagtattctatttttcactgttgattatgaagtcagctataggtttttatacatgcctttgattaggttgagagttcccttcaatttctagtttgatgatagtctccttgccatttaattatggaaaggtgtgagtcttgccaaatttatttttgcatcttttgggatgattacacatatatatataattacacttggtaagatccttattctttgtgtgtattgccggattctattttcaaaaatgtgttaaagacattgcattcaattaatgaagcattttggtctctaattttttttccttgtaaagcctggattttg

SEQ ID NO: 728238 - DNA, 601 bp, Homo sapiens
tttcatttagtcataattcagatacagaaacacagtcaaattttgtatattgacatcatawgttgtgacattgctaaatttgtttattcattcttgtgacttttctgtatgttaggattttcctcataaacaatcatgtcatctgtgattaaaacagtttacttcctcctctttgatttgtatgctttacttgtcttattgcattgactaggtcttttatttcaacatagaataaaagtggtatgagtagacatcttataatgtttttattgtaaagggatagtattctatttttcactgttgattatgaagtcagctataggtttttatacatgcctttgattaggttgagagttcccttcaatttctagtttgatgatagtctccttgccatttaattatggaaaggtgtgagtcttgccaaatttatttttgcatcttttgggatgattacacatatatatataattacacttggtaagatccttattctttgtgtgtattgccggattctattttcaaaaatgtgttaaagacattgcattcaattaatgaagcattttggtctctaattttttttccttgtaaagcctggattttg

SEQ ID NO: 728239 - DNA, 598 bp, Homo sapiens
gaaacaggaatgcctgttcccatttagggccgtaggtttccaggcttgaggctttgctggggaactgccctcttctacccagtatctcccttgccttctgttcgtatcagcaacatcagtaggatatggaattatgttcccagacgacttctgaaaatacatgatmtccatcagggcataagacttcacaagaagtacataatagaaatcatccctagcattgagaagaaagaaatgaagtcagctccatccactgcaggccctgaagccatgggacaacaaggaggtaaatgcaacagctcatgttccttcagagtagcaggttttagcggggaagagcatagccagtgatcaaagaaactcattagaaaagatgacaagaaaccttcctgtttaatactgctgtaccttttccacttattactgagatttcctcttctgaaaaaaaatcatagtgattcggacattgtccggcgtgagtaaagcttaagacagctctgcttcaaattcttctttcatccacccccatttatttctgattgacatgacacttccagcctgaagaagctgacaatcattggataagaggtagcacaag

SEQ ID NO: 728240 - DNA, 598 bp, Homo sapiens
gaaacaggaatgcctgttcccatttagggccgtaggtttccaggcttgaggctttgctggggaactgccctcttctacccagtatctcccttgccttctgttcgtatcagcaacatcagtaggatatggaattatgttcccagacgacttctgaaaatacatgatctccatcagggcataagacttcacaagaagtacataatagaaatcatccctagcattgagaagaaagaaatgaagtcagctccatccactgcaggccctgaagccatgggacaacaaggaggtaaatgcaacagctcatgttccttcagagtagcaggttttagcggggaagagcatagccagkgatcaaagaaactcattagaaaagatgacaagaaaccttcctgtttaatactgctgtaccttttccacttattactgagatttcctcttctgaaaaaaaatcatagtgattcggacattgtccggcgtgagtaaagcttaagacagctctgcttcaaattcttctttcatccacccccatttatttctgattgacatgacacttccagcctgaagaagctgacaatcattggataagaggtagcacaag

SEQ ID NO: 728241 - DNA, 654 bp, Homo sapiens
ttagtttatgggaatcttaagtccatcctgagtgcacagagataaattctaaaaataaagctaacttctatttttttttttttcccccgtggggtaagtgctgagcatattttcagagacttgagactaaagtgcagcatcgggcattattctcagtctcacagcgccaccttttggcccatgttctcccttgttttctgaaggtgaaatccaggcagctggttcctggggtgatttttacaatcctactttcttggctatggcttgacataatttccctggagagttcagtcttagggtatgatactataccttggatctgcaaagcattaaaagggaggatattgtcagatatatgatctagccatggacacaggccagatgcwttcgtaactgaaagagaaggccctcttgtctggtccactcctaacttgtttgattttgctgctatctatcagcaccttccttactaatgcaggatggctcagttaatttctttctttggtcttccagttatgctgttgagagcttgctcatggccatatataagaggtgacaacaatggcttttcagaaacaataccaagagagcaatagaaacactttatttacccacagtgtaaaatgggctgcaactaattatttacagatgggg

SEQ ID NO: 728242 - DNA, 654 bp, Homo sapiens
ttagtttatgggaatcttaagtccatcctgagtgcacagagataaattctaaaaataaagctaacttctatttttttttttttcccccgtggggtaagtgctgagcatattttcagagacttgagactaaagtgcagcatcgggcattattctcagtctcacagcgccaccttttggcccatgttctcccttgttttctgaaggtgaaatccaggcagctggttcctggggtgatttttacaatcctactttcttggctatggcttgacataatttccctggagagttcagtcttagggtatgatactataccttggatctgcaaagcattaaaagggaggatattgtcagatatatgatctagccatggacacaggccagatgcattcgtaactgaaagagaaggccctcttgtctggtccactcctaacttgtttgattttgctgctatctatcagcaccttccttactaatgcaggatggctcagttaatttctttctttggtcttccagttatgctgttgagagcttgctyatggccatatataagaggtgacaacaatggcttttcagaaacaataccaagagagcaatagaaacactttatttacccacagtgtaaaatgggctgcaactaattatttacagatgggg

SEQ ID NO: 728243 - DNA, 1988 bp, Homo sapiens
ggctccatcagcaggtggaatggaagacacctcccaccctgaccccttgggcaaccaaggcattatactccttcactgcctgctctgtctggaggacccgcacatcaatgccatgtttcttgaggtactccacagttgatgaaggcacctgggaaggtggaaaagagatgagtaagtagggggaaaggccccccaggggttcctttactgccatgaggcaggtgtactctacagaattagacagtgacaatcgtcacttcacgatcactcagtgtatcaccagtccaaaatttggcagtgagccccaatgagtcaaaaaggcctctttgtcagaggtatcataatacccatgcataaagctcaagtgaaatggaaatgaaagaacatgggatttgcagttagccttggatttacatccttactagcactgtaaccttgggtaagtaaattaaattctctgagtctttgttttcatgtctgtaaattagggacattaacacctagggttggtatgacaactaactgagctaagggtatgtgaaacatctaccttggtgtgcaaactccataaatgttaaatgtttgagttagtctaaactgagtctaaatttcttctttgccgcatgctagctaagaaatgttaggctagctctttaaagtctcccagccccaatttcttcccttgtaaaataggtataatagtacttacatcacagggttggtgtgaggatgaaattgactcatgtatgtacactgcagctcaaatgtcttctcacaaaggcctttcttgcccaccccctactagcccagcataagtcaccattttcctcactgcgtttattattatctgaagttgtctagttttttattatccatgaggggcatgaaccttgtttgtcttgtttatcgcaccgtcaccagtttctagaatagtgccttacccatagaaaatgcttaataaatatctgtaaatgaatttatataaaagatgttcttaatagtgacagctattattagatattttctcaactctggcttgtcctgaatattttttaaaaatagattttaattagactctgcctcagaaagaactcaagtgaaatattttttaatatgccctatattttctatatatttgagatttataaaagtaccctatcagataggaattattgtaatggggaaaacaaactagtttaaaattttaaaatataaataggctgggcatggtggctcaagcctttaatcccagcacttcaggaggccaaaatgggaggattgcttgagccctactgatgaaggtgccctatatatataaagccctagatgtaaggggcaccttcatcagtaaggaacaggactgtaagacatctataaaggaaagaatgaggtaggcctctatatggatgactatccataatacagtaatgtaagtgggggaaaaagttatagaatacatatagcactgacctatttatgtaaaatggttataagtatataaacgtatatctatatgtgtaagtgtgtatatatttgcagatgcattcagagaagactggagaaatatacatcaaatgtgaagattgggaagggaatctcccacctttttacttctacatttctgcattgaatttttaaatcttttacaatgagcatatattatttctgtaagaaaattaaaaaataagccaggcatggtggctcacacccgtaatcccaacactttgggaggctgaggcaggtggatcacgaggtcaggagatcaagaccatcctggctaacacggtgaaaccccgtctctactaaaaatacaaaaaaattagccaggcgtggtggtgggcgcctgtagtcccagctactcgggaggctgagacaggagaatggcatgaacccgggaggcagaggttacagtgagccaagatggcgccactgcactcagcctgggcgacagawcaagactccgtctcaaaaaaaaaaaaaaaaaaaaa

SEQ ID NO: 728244 - DNA, 1474 bp, Homo sapiens
acaccgcaaagggtgaattttatggcatatgaactatatttcaaagaaaaacaaatgcctagtaacaggctggtataacccsccatctcccaacaactgctgctaaattttcaaagcaccattaagcagactcaattcgtagcaaggataatggaacaatgcaagctcatctagcgaacaaaaagaattaagctagtatcaggtggtcaatttacaaactgtagtgggagtcatacattcccaaggatggaacagttatatctccttgcagagtgaactcttctccgataccaaggacttggaagaccaaataaattatacgtaggattaccaaatatgctggtatgaccaagacagttatagtttaaacttctatctctgtggaattatggatagtgccactcttcaatctttaataagtccttcagtttagatgataaattacatagtcaacctagttataaggaatctagaggttgtgaaaagctgtgagagcatattctatgcagaccacataggtcctatcatgactccctatgtaacttgggtctctgcgactgggaagctcccagggaaaaaaccccagttaagacttctgcagagcattcacattttgtttcaaacttatacaacactaatgctaaagctcaactctcagaattgtattattcagtattatccaaataactgattaatttacacactgaagggaaagaacaaggaatggacctatacacacttgtagtttacaagtataagaagctaacaaagaataagattaaaataacttgtgccaggccgggcatggtggctcacgcctgtaatcccagcactttgggaggctgaggcaggtggctcacgaggccaggagtttcagaccagcctgaacaacatggtgaaaccccatctctactaaaaatacaaaaacttagctgagcgtggtggcacacgcctgtaatcccagctactcaggaggcaggagaattgcttgaacccgggaggcagaggttgcagtgagctgagattgtgccactgcactccggcctggacaacacagcaagactccgtctgaaaaaaaaaaaaaaaaaaaaacaaacaacttgtgcccacattaactaggtgttaaaagccaaaaggtgaaagtcactattctcttttcacatatcaaattgaccctaaggtaatattgctgcattagaactgagctggtgggagggatgttaagaaattagggagaaattgttaatctacagaaagaccatcatataaggttctgtgtgtagccaaacatacacatttgatgttctgatgtttgctattttagtggaactatagctataaaatgtattcaatcagtagaattaaaacatatcccagtccacaaaaaactaagagagaaattatacaggaatgatcaagaatctgcacagttctcataatctcattactagagagaaaaggagaaagggaagca

SEQ ID NO: 728245 - DNA, 1474 bp, Homo sapiens
acaccgcaaagggtgaattttatggcatatgaactatatttcaaagaaaaacaaatgcctagtaacaggctggtataacccgccatctcccaacaactgctgctaaattttcaaagcaccattaagcagactcaattcgtagcaaggataatggaacaatgcaagctcatctagcgaacaaaaagaattaagctagtatcaggtggtcaatttacaaactgtagtgggagtcatacattcccaaggatggaacagttatatctccttgcagagtgaactcttctccgataccaaggacttggaagaccaaataaattatacgtaggattaccaaatatgctggtatgaccaagacagttatagtttaaacttctatctctgtggaattatggatagtgccactcttcaatctttaataagtccttcagtttagatgataaattacatagtcaacctagttataaggaatctagaggttgtgaaaagctgtgagagcatattctatgcagaccacataggtcctatcatgactccctatgtaacttgggtctctgcgactgggaagctcccagggaaaaaaccccagttaagacttctgcagagcattcacattttgtttcaaacttatacaacactaatgctaaagctcaactctcagaattgtattattcagtattatccaaataactgattaatttacacactgaagggaaagaacaaggaatggacctatacacacttgtagtttacaagtataagaagctaacaaagaataagattaaaataacttgtgccaggccgggcatggtggctcacgcctgtaatcccagcactttgggaggctgaggcaggtggctcacgaggccaggagtttcagaccagcctgaacaacatggtgaaaccccatctctactaaaaatacaaaaacttagctgagcgtggtggcacacgcctgtaatcccagctactcaggaggcaggagaattgcttgaacccgggaggcagaggttgcagtgagctgagattgtgccactgcactccggcctggacaacacagcaagactccgtctgaaaaaaaaaaaaaaaaaaaaacaaacaacttgtgcccacattaactaggtgttaaaagccaaaaggtgaaagtcactattctcttttcacatatcaaattgaccctaaggtaatattgctgcattagaactgagctggtgggagggatgttaagaaattagggagaaattgttaatctacagaaagaccatcatataaggttctgtgtgtagccaaacatacacatttgatgttctgatgtttgctattttagtggaactatagctataaaatgtattcaatcagtagaattaaaacatatcccagtccacaaaaaactaagagagaaattatacaggaatgatcaagaatctgcacagttctcataatctcattactasagagaaaaggagaaagggaagca

SEQ ID NO: 728246 - DNA, 651 bp, Homo sapiens
gggtaagaattacttgtcactttgaattacaatacaagtaatttgtctcagatgtcacaattggtattttggatgttttctctggttagacttgtaggctacttatgttctattttttttccaaatgtaattgccagcttatgagatactacaaattagtgtgatacatacttttcaatttattcacagtaacaactcttatgccataaacacaaaataatggggttgcatttagtggtcacatttttcttttgacagtggactctcttttttccatgccttctctctttaaattttgcaggtatcgtagctcaaaatacaccttctgttagttgcattagttactacttgaaccatattttagaaackaattttctctgtttgaactaatctgtttagaaatgggtttaaaagtcctgcagtgaaagtcctgcgttcaggcttctgtgtatcgtttgttatagttaatgacatcccttgcattccttatactgctttaggtgttagtggcttcatcagttgtagcaggggaatcccagaaacctgaactcaaggcttggcaggtaggaaaacattccttgagaaatacactttcagtttatattttaatgtttattccccttgttaacaaagattacaaatgatcctcag

SEQ ID NO: 728247 - DNA, 1019 bp, Homo sapiens
caatatgataagtgttcacaaaaagtaggtcaatgccagtgtatcacttactttagtcactagcagcaaactatgtaatttttacttagttctgtggcttagtaacgttaagccggaggatatatgtgggatcattttaacaagggattagttttaaaagcatttgacttgttgttatttagttccttctgtgttatatttgcatcatcaccactcagcacatgatttattgtccttttaaactatcttaccaaagattttttaacaacttgtaattttctgcaattcacctagatttgaaaatgtgatattaaataacttagtggtaacttttagcttaagtcttattttcttttagcacccatcattagctgtatatgccattaaatgtttgcttttcttctttgtcttccagtaattatttaattagggaaagtggtaactaaccatgctgaattctctttcttaaatttctgtttttaaaagcttgcaatctgagggaaaatcaggtggyaaagccttgtaatgagctgcaagatcttagtgagagtgaatgtttgagacacaaatgctgtttttcatcatcggggaccacgagcttcaaatgttttgctccatttagagatggtaagttattcctctttcatttatttctattttttaatattaaataaacagatcgcagtggcataagttcatatttggatttcctagcttaatacttaaatgggactcccagtcctagagcggtgctccttagaaggtcctgaggtggtcatgactctggtcaggagcagtttttgcttagcctttggatggtgactttggtaatacaaaaattagtctcacattttcttttgctttagtcactctctgtgttttgtccaaaagtttccaggctctatggaaccctcaatggctgagagaagataccggttgggcatgccttagcttacttctctttgcccagcttttcctcctaggtagaattcttcccatttgtcttgtcttcatctcag

SEQ ID NO: 728248 - DNA, 661 bp, Homo sapiens
aaacatcgatttttagattttgttatattccttctttgagagttcttccccagtgacattacttactttttctctgtaggtggccaggaacagaatggtacacagcaaagcatagttgtggatatgcgtgaatttcgaagtgagcttccatctctgatccatcgtcggggcattgacattgaacccgtgactttagaggttggagattacatcctcactccagaaatgtgcgtggagcgcaagagtatcagtgatttaatcggctctttaaataacggccgcctctacagccagtgcatctccatgtcccgctactacaagcgtcccgtgcttctgattgagtttgaccctagcaagcctttctctctcacttcccgaggtgccttgtttcaggagatctccagcaatgacattagttccaaactcactcttcttacacttcacttccccagactacggattctctggtgcccctctcctcatgcaacggcggagttgtttgaggagctgaaacaaagcaagccacagcctgatgcggcgacagcactggccattacagcagattcygaaacccttcccgagtcagagaagtataatcctggtccccaagacttcttgttaaaaatgccaggggtgaatgccaaaaactgccgctccttga

SEQ ID NO: 728249 - DNA, 587 bp, Homo sapiens
actgcagcctccaatcttacggacaaaccgtattcaactgcagcctccaatcttacggacaaaccgtatttatttaactgcagcctccaatcttacggacaaaccgtatttatttaactgcagcctccaatcttayggacaaaccgtatttatttaactgcagcctccaatcttacggacaagccgtatttatttaactgcagcctccaatcttacagacaaaccgtattcaagtgcagcctccaatcttatggacaaaccatgtttaactgcagcctccaatcttacagacaaaccgtattcaagtgcagcctccaatcttatggacaaaccgtattcaactgcagcctccagtcttacggacaaaccgtatttaactgcagtctggtgtctaaggttcaggcttcacatttcattatcaaggggttctgggccgggcgcgggggctcacgcgtgcaatcccagcactttgggaggccgaggcaggtggatcacttgaggtcagagtttgagaccagcctggccaacatggtgaaaccccgttgccactaaaagtacaaaaattagctggatgtggtggtacatgc

SEQ ID NO: 728250 - DNA, 602 bp, Homo sapiens
taatattttgcaaggacgatgttccagccatattgatcttcgtgttttcttttcacatcccttcttactgttccctagaatgcttgtttctacctttaaatttgcttttctctctaccagagggctctaccctatctccagtttctcaccatgtcccaatctactccctctcagaatttttgtacacttccctttatatatatttgtgctctaattttatattcacagatatgccttttgtaactcccccatcttaaagaaagcacacacgtaygcacacatgcacacacacaaaattgaactctttctgggagatctgcttaactttcttcataactctgtcacttgctgaaactgtagtatgtgttttcatgtttattatcttttccattagaatgaacatattttgggtacttggtctttctcgatcaccaatatacctcggtacgtagaaaaattgattcatatattgaaaatgtaatattcagtagaacgaataaatacataaataaatttaaaaatgatacttttattgtattacctgagacaaatgatctccaagtttgtccttgcttttcatagccaaaacattctctcttaca

SEQ ID NO: 728251 - DNA, 602 bp, Homo sapiens
taatattttgcaaggacgatgttccagccatattgatcttcgtgttttcttttcacatcccttcttactgttccctagaatgcttgtttctacctttaaatttgcttttctctctaccagagggctctaccctatctccagtttctcaccatgtcccaatctactccctctcagaatttttgtacacttccctttatatatatttgtgctctaattttatattcacagatatgccttttgtaactcccccatcttaaagaaagcacacacgtacgcacacatgcacacacacaaaattgaactctttctgggagatctgcttaactttcttcataacwctgtcacttgctgaaactgtagtatgtgttttcatgtttattatcttttccattagaatgaacatattttgggtacttggtctttctcgatcaccaatatacctcggtacgtagaaaaattgattcatatattgaaaatgtaatattcagtagaacgaataaatacataaataaatttaaaaatgatacttttattgtattacctgagacaaatgatctccaagtttgtccttgcttttcatagccaaaacattctctcttaca

SEQ ID NO: 728252 - DNA, 626 bp, Homo sapiens
tgcagaaattctgatttgatttttctggtgcgagacctgagaataggaatttttttaaagcttccctagtgattctagtgtgccacctaggttgccttaaggtaaacctcatattatgcagaacctagcaatcacctatcctgattttatagacgaagatcataagacccaagagggcaaattgatttattcaagattgaatatacaaatgatagaagattcacataagatgcagtatacagagtggcttgtggattcttgccaatgcaggcagcagaatttyctttagggttcacccagttcaggcacctctttgcagcagcacttgactaaggttcttctgattggatcattatatgggcaaaaagaaaaagcttaattgaaaagagctgaacccacattgtggaatggaagatatacagtttacacgttataaatgattaatattcatgaaagcatactgccctttcctcttcccttcccatagatgacatcattgcattggtgtagttaggttggtggtttcttgttgttgatcttggttctgacacagttcatcacttattatcctggcttattatctacttctacattcattgttcactcactcactaattaattcaaca

SEQ ID NO: 728253 - DNA, 1053 bp, Homo sapiens
aactccaaggagcctctaaatgtatcagactaagttcttcaagtgaattagttatcatctgagagtaatatagacttttaaaaatgcattaattgtattaaccctttcaggcccatagacttaagtgtttctttctccaaataaaaatagtaatctctgtccattttctttagagaataatgaagtaattttcattgaatatgtagtcaacataattacttcaattcaatcgtgaaggattttaaaaattatttatgtctactaacttaaagacatgcatagatttcaagaacttaaaaatgcatattgcctctttgccctatgcctcataaaacaaaattatgataacgttgtgtgttacagaaaaacgcactgattgtaatgaagggtgcttcaaaggccatgaacttggaaagcaacttatttacagagacccccagcaatagcagctaaaagattgactgactccctttattttcagttatccttcagacacttttgacstcttcctgtgcctttctagtcatgtgcaatcttgtggatatctcttccttcctcttgttattttctatttcctctgtttctatttgtttctaaaaataatcatgtttgaatataggattagcttccttcccatctccccattaccaatctctcactataccactatgttattaatcttcctgagaaatatatcaggttcattacattagttaccagctcaaaacgtatcagtggctttctagtcctcacaggctcaagttaatctgcatattctgactttcatattctgggttcatgcaaacttttcaactttccctcttatacctacttaggaggaccctcaggttccatcatgctcatgtttcaagccagaagttctcctgcctcttcctctatgtagactccacatagactatgatatcctgcttctcttttaatcctccatcttcagctcacagccacactcctctgtgaacagttaaatgattctcccacctcttacctcctatagcacttatttttcatgcagcatttttgagacttaattaa

SEQ ID NO: 728254 - DNA, 658 bp, Homo sapiens
tctcttaatttgagcaactagatggctgtatttatctccttatattaaaaaaactattataattatctttcccacatatcaaactccactggtttttttcccatttttctttcatacttcagaaagacgagaatccaggacttgaatcgtatcttcccactttctgaggactactctggatcaggcttcggctccggctccggctctggatcaggatctgggagtggcttcctaacggaaatggaacaggattaccaactagtagacgaaagtgatgctttccatgacaaccttaggtctcttgacaggaatctgccctcagacagccaggacttgggtcaacatggattagaagaggattttatgttataaaagaggattttcccaccttgacaccaggcaatgtagttagcatattttatgtaccatggttatatgattaatcttgggacaaagaattttatagaaatttttaaacatctgaaaaagaagcttaagttttatcatccttttttttctcatgaattcttaaaggattatgctttaatgctgttatctatyttattgttcttgaaaatacctgcattttttggtatcatgttcaaccaacatcattatgaaattaattagattcccatggccataaaatggctttaaa

SEQ ID NO: 728255 - DNA, 1910 bp, Homo sapiens
gaattcccaaagcagagtagacaataactatgtgaagggcttagacccaaatatgtgcccacttgcaagcattccagctctatgaagaggatacagtgctaggagataggattaccctgcacattgcaaaccctccacttttccaagaccatagaaaatgtcctttgttgagcaccaactgagtgttattttcttggtccctgtggtttttgctgggccttaaatcattgtgtgatcaaagctgcaggcaacaagctaacttttggaggaggaaccagggtgctagttaaaccaagtgagtactggggcttgacccacaattgagccttgtcatcaatttgcaattcaatgtgccgtattggcccaaattaatgtctcaaacttgtctttaaaatgtttcatgttgctcttatgcataaacatgcacttatgtacaaattcagcatggataaaggatattgtcatcttgacattttctagaatctattttcttaagagaaggcacatagtaaaaggtacttttcttatttcttcacatttcttaactgattttcccaagaggcagaggaacttggacgtggcgtttctgtctattcagagtagttgatttgaatatggtcacaatagcagagcaaggacttacaatttctaaggttcaaaatattgctctctgtaccagcctgcagcctctgatgaaccattattctgatttatttcctctggccctcatttttcccaattaatgtaactgaaatattggtaaccattatcttccggttcacagaaagtgtgtgaggattaaaaagtcgctgctctgaaaaggaattgagctggagggttttcttttgggggattattgttttgttgatggtattgtctctttcattgagggagagaataagaaaggaggcatacttgaaaggcaaggtaatatgatcaatacatgaacgtgtgcaaaataaatcattaaggcattcaactagaagccaaaaaacagtatggaccccggctcagccactcactcactaggcagccatgagaagatcaccaagctctcccagcctcagttaacctaaaatgtggagattattattccagccttgactacttccaaaggatgctatgaaattcagatgagataatatatgtgaaatctccttgaaaragatgggtggtcaaatgattcatgatttttttttttttttttttttttgagacggagtctcgctctgtgcccaggctggagtgcagtggcgggatctcggctcactgcacagccgcctcccgggttcacgccattctcctgcctcagcctcccaagtagctgggaccacaggcgccgcactacgcccggctaattttttgtatttttagtagagacgaggtttcaccgttttagccgggatggtctcgatctcctgacctcgtgatccgcccgcctcggcctcccaaagtgctgggattacaggcgtgcaccgcgcccggcctcatgatttttaatagttagattttatgcaaaatttcatttgagggtaaacttaaaggtgaacaagtttaatggactttggccatggcagagaaatggttaggtttggatataaggtggacctctctaattataagaaaaaaaaggaacatgagaattggtgaacaagaccttccctggagatcttcagaaacctgaggtcactcaggagagaaatgtgtgaagttgagagcttacagtaaatggtctctgaagtttcccaccattccaaagagtgcgtgagcttaaaatttttcgtgagtttagctaaatatgtgcttagtgttagattaggtttcaaccaagcaaaagaaccctgggagaagtactctgcttggaaatgaagcatcctttggtttttgtggtacaatagatcactgtgggt

SEQ ID NO: 728256 - DNA, 1080 bp, Homo sapiens
ttttttttttttttttttggtccgagtagcttttaaagggccagtagctcggttgccctccggaaggaatggggaaatcagagagcggtgatactgggttaagagtggaaggattgtttggaacggaactccggtccctgcgggcatctgggtgggattcccatcaggcctgggatgcacggctctagatttagtgacccagaccaagaacgttcgtctacacagacggggtcctttcattcgaggctgggctgaggcggatgcagatacggcccctttgggaagacacgttccacttttgattcataggagagagtatcagccaagcctccgaactgcacacaaacgtcttagaagtgcgccttctttttgtgttatagtggtctcccagccacagccaacgctccaagtccccagctgtgacacacctactgaattactaccgtgggtgggaggccgccgtgggcctttccattacgagcctgcttgccgagccctgggcttgtgcacagacaaactgcagagctggtggaggccactgccaggccgagataagaaagagatggggagctgctaatctccccctgtccagcctgttggtgagggctgggatctttgctcttgcagtcattccagagccctggactaggagtaggaagatctgaattgtggccccaactctctttcggttattagctctgtgaccctaggcaagtcacctcatcccttgatgccacccgttgcttctgtaacatggtcccaaaggtgcctgtcttgtccacctgataggatttttgagacgacaacaatatgcaaaagcaatagcttcaacatagaagtgctcagtgttttattttttaatgaaacggtttgacttggatatgctgtgcacattcaatgaacttaaggaattgtttgaacctagtagttctgggaccttagagtcctttctgtgggctccctgtggcccagawttttggtggccacgtttaatatcaagcctagcctaatttgcaaagggtctcccagggttaatttattggagtgatcacatggagtagaccagagtctgagggcaga

SEQ ID NO: 728257 - DNA, 593 bp, Homo sapiens
ctcttgttgcccaggctggagtgcaatggtgggatctcggctcactgcaacctctgcctcccgggttcaagcgattctcctgcctcagcctcctgagtagctgggattacaggcatgcgccactatgcccgactaattttgtacttttagtagagayggggtttctccatgttggtcaggctggtctagaactcctgacctcaggtgatcgacctgcctcagcctcccaaagtgctgggattacaggtgtgagccaccgcacctggccttctgtctgtatttttaaaaaaaagatattcatgacaaccaaggggagaggtaaggtcacagtgatgtgctctgggtcaaagattgttgagcctggaccattggagaggggaggaaaagatggaggtgtggggtcaaggggagaggctgcagaggacaggacagtgtgtggccaaggctgctgtttgttccttcatcaccctggccaggctgaggtccaggcagtgttctctgacggagctgtctctttgcacacgaggagcctgaaatatggaaaagtaagtcgggctcttgatgttcctgtttgctgactgagactacaaggc

SEQ ID NO: 728258 - DNA, 747 bp, Homo sapiens
gcctggctgtaaagcacttttttttttttttttttttttgagacagagtctcactcgttgcccaggctggagtgcagtggcgtaatctcggctcactgtaagctccgccacctgggttcacrccattctcctgcctcagcctcccgagtagctgggactacaggcgcccgccaccgcgcccgccaccacgcccggctaactttttgtatttttagtagagatggggtttcaccatgttagccaggatggtctcgatctcctgactttgtgatccgcccgcctcggcctcccaaagtgctggggttacaggtgtgagccactacgcctggcctgtaaagcactttcatatacttttttgtgaggtctatggtataggcaggatacgcattattcctttctttcagtaggaaaacttgtgctttgggtagtcgtgtttttagggttacattgctgattagttttagagctgtggttgaaatcaagtgtctcttgacagcttgagtgtttttcaattggaaacattactttttgaggatagactaatgcattttgaaaacatttgcatcattgaaatgagtggggtctagctttagaatttaatcaaatttttaattttttcacaatttcgtggtatgatttttaatactctattgaatattcttttttttttttttgagatggagtctcgctctgtcacccaggctggagtgcagtggcgcgatctcggctcactgccagctctgtctc

SEQ ID NO: 728259 - DNA, 747 bp, Homo sapiens
gcctggctgtaaagcacttttttttttttttttttttttgagacagagtctcactcgttgcccaggctggagtgcagtggcgtaatctcggctcactgtaagctccgccacctgggttcacgccattctcctgcctcagcctcccgagtagctgggactacaggcgcccgccaccgcgccygccaccacgcccggctaactttttgtatttttagtagagatggggtttcaccatgttagccaggatggtctcgatctcctgactttgtgatccgcccgcctcggcctcccaaagtgctggggttacaggtgtgagccactacgcctggcctgtaaagcactttcatatacttttttgtgaggtctatggtataggcaggatacgcattattcctttctttcagtaggaaaacttgtgctttgggtagtcgtgtttttagggttacattgctgattagttttagagctgtggttgaaatcaagtgtctcttgacagcttgagtgtttttcaattggaaacattactttttgaggatagactaatgcattttgaaaacatttgcatcattgaaatgagtggggtctagctttagaatttaatcaaatttttaattttttcacaatttcgtggtatgatttttaatactctattgaatattcttttttttttttttgagatggagtctcgctctgtcacccaggctggagtgcagtggcgcgatctcggctcactgccagctctgtctc

SEQ ID NO: 728260 - DNA, 613 bp, Homo sapiens
atgctgcaggagaaacattaggtaactatttaatggagttttaattttctgttattatttttaataattaattgtgattttgactatttggaagctacaggtatattttgtcctccttttggggtggtgttattgccctgccctgttttaatcagtggttcttagagaaagtgaactcaggagtgacttaaaatgaaggaagacggactttggctaaaattacaattaaataatcaaatcattttcaaatataaagggagcatgcagatgatctggcccaatcctttcattctgcagatgagaaaactgagrctcataggaatgaaaagacttgcccaaagccatacagcttgtttctgttgtttggtgcattaggccaaaagacctaggcctaatagatggaaaagatggcaggatgtcttggccttgctctgacagttgcttctctgatctcagatatttcccaccctttgtaatctgtgttccacacaggaagtagttcttgttttttaaatatcgaaggtgtataaacgtaaagtttttatagatgagccacccagggccaatatctgtttaagtaaagacctaaatgctttgcagagacagtaaagtg

SEQ ID NO: 728261 - DNA, 832 bp, Homo sapiens
gacagggggaatccaaggcccagtctgcactcrcttcttccagggcagccccacccatctttggtctctgcccagcacctcccgagacgggcagctctagctatgctgtgggctcaccggttgtccctggtatttcggggcagagacaggtctctgtgtttccccctacttcctataacaaaaacctgttttggaagtggaaggcccccagggcacactgtctacaaacaaccagggcagcacagcggctccctccacaaggcgccagaggctgacagactccagcaggaagatccccgacacagagaagaaaagggaacctcaggggtaggaaaggcagagataaaatgctgaggtctccatcctctgagcagagaactcaggaaacagttacaggtgagtcgccatccttcctctgctcccctcagcctcccggagccccagctcctctgtcaccccttaaacgtcagtgcgccaggcgctccaccccccgccatgcacattccttcatcccatgcccaagctgccaaccataagccaatgagccccaaacccaacccgaccagctctctctccttagctctggggctgcattcatagctgtccacagagtacattcaaatgtccccaaacactttacttccatactttacccaacatcttccccaacgctggctcatctcctgtattccttctcagcaaatgacactttaaaaaaaaaaaaaaaaaaaaggccgggtgcggtggctcacacctgtaatcccagcactttgggaggccgaggcgggcagatcatgaggtcaggagatcgagaccatcctggctaacacgg

SEQ ID NO: 728262 - DNA, 802 bp, Homo sapiens
agctgcagatctggtagttgtcctaatacaggcaatatttaaaatcatagaaataaatgacacttcagggtaaatgcatcagaagatgacctaggccccatcctgaggaactcaacacttagagactggatagaaaagaaaaatcaggcaatgaaatagggaaaaaaaatcctaccaccatgtttcaaaaagaaaggagtggccagtccaacaaatgctgacttatgtcccttggatttggtagaatggagatcactgctgatcaagacaagaaacatttaagtgtcgtggacgccagactgagctgggctgaggagtaaaaatgaagcgcaaatatggagcagacagcttaacacaggtctagacagggctgtcaaacatggaagaaacactaatcgctaacaggatagagcatggcaatagcttgaaattggtttgaaaatccaagataaaaaattcctctgacatcgtgatccagacctctcaaacacacaagcatgctcgcaataactgcaataaaagcaataatgctttctagtctattccactacgttagagaaacggctggtcaccacccactcaatcattcacggctcgctgacgggtagaaacctgcaatgacaggtccacgctaatccaacaagggatgatttggggaggcagagatggagtttgaaaagaagcagggagcccgaggacctgcgcggccagagcgccagatagccataggcgtggagrcggtggggcgcccacagccccgggcccggagcccccgccccgcagccccacccgccggcccacc

SEQ ID NO: 728263 - DNA, 638 bp, Homo sapiens
ataatacatggtagatgtgtagtacagcacttgggaagtagcaggatctaagtcattttttttctgtttgtagaatgaaagatgttgctctatgttctgggattgctggcctttcaggagcagagasgtatgatagaaaataatgccttcaatataaaattttaatgacttacatacagagtaatccatcaaccagattccaaaacatactttgaggggcaagtatctgttaaaggcttaattttatttgttcccagatagttcgaattgcctttgacagtcctttttctatcataaaaaccatctctttcttttacaagtctcagctgcttatatccaacaaaataaaagcatctcattaaacctcagccctctttgatgactcaacaaatattcattcattgaacctattaaatgtaaacatattacttttaaaaaacatatcttcaaggtcattccttggtccatccaagtgagtatcattaaatccatacccaagccatctaacacttgatatcataggagtgcataattcagtcagaaaggtggcctgcaaaagcagaaccagatttccatactcaaaaagaggagttctggcccggtgtggtggctcacgcctgtaatcccagcattttggg

SEQ ID NO: 728264 - DNA, 605 bp, Homo sapiens
ccatgttgtcatgtcagcaatactttattctcattgccatatactattccatttttatcagtataccatgatatatttacccattctgctatttgtacatactggaattgttcccaggtttttgtaatacaagcaaagctgctatgaacatgcttggatttactttctttggtgaatatgtattactgttatgtacatgtctagaggtaaaattgatgatttatgggatatgcatatgtttaattttagcagatattgaaaaacagatttttaaagcggctgtagcaatttacattaccaccagcartgtgtgagttccatttgctctccgtccttgacagcacatgttgtcacttaggtgggtatgcagggggatccttttttggcatgtttacttatttttttacacagtgcaaactggtgtggtgtaccgttttatggcttttgcctaatgccatcactaaagttaccaaacaattccatcacctcagaaattgctttgtaccgcctcttggcattcatccccttctccattctcaaccctggcagccactgatctaatttccattcccatagttttccagattatcaaagaaacagaatga

SEQ ID NO: 728265 - DNA, 614 bp, Homo sapiens
cctgagccaaaaccttttggactttgggaaactgtagttccttctcggggagctaattgtaatgaagctgtgtggtgccagagccagattctcaggcatgagagaaaagcctggaatagaaaactgctcagcagttccttttgaatagtggataaagcagagaggagtttccatctggggcaggaatggaaagcattctgtgctcctgttccagtgaggtggaacacagcacaagagctaggtgatggatacgcatcacctgcaagtgttttctgagagataagggtgaatatccctggaagtgaggcccagaagccactggacaggtactcttctgcctggctgggagccaaagctgactctattaaaatgacattctaattaggtcatctcaagtgccatttggctaattttagcaacggctagattttgggtggcaatgaaatgaaaaaaaartagtggtttggatggaaaagcagcgggcagagaaggaaggagttggtccttgactcaaattctaggagctgtgagctgcatctggcttgggaaaactccccaacaaccaaagtttgaagtatgtcctctaagaggaaatatttactgaattttataga

SEQ ID NO: 728266 - DNA, 1736 bp, Homo sapiens
tctcctgacagtaaatatgcaaaactcttctatatttgaagagttttgtttcaccaagccaaaaatccctcaaatatgaatccttcaaattctcttttaaaaagtaaaattaaagcagtaaaataatcctaacaaaaggataatagtcaaagttgtgagagaaaagggtttggagactttcagctacaatcaaatccatgagatgtgaataaactggaaaagaatcatagacataataaggctaagacatagctaatgttttctatattgagtgtggttaagtgttttagtgaaatcaattattccattacaaaattgtataaattcggtagtactattattttcaccattttatagatgtagaaactgagacaccaagaaattctgtgaattgcccaaggtcacagagctagtcattgatggagtagaaatgacccccaggcagcctgactccacagttcacatgctaaccccttggtgacacaacttcttaacattgtggttcatcgccaatattcataagtgaaataaatactaaatttcagttacaggataatgaaaagaaatatttaagtccttaagccccctgaattaactctaggttaagaagccctggtgttgatagactttagaaggcaggtaacatgtcaatcttatgaactattaagtagctagtacaaaccctcaaacatacatgcacaatagaaaagacagatttgtgctgcattccatcgggtcgaatgccatgatccatgacttggctcccacaaagccccagtaacccctgcctcttttggtatccaaagtcatcccacagtccttgggaacaaggtcagacattagacagatacccaaaatatccttgaaaagtaaaaataacgtattatcagaaaacatttaacctgaaaagggccagaaatttggaagatgaaagttcagcggtagaaaatgacttgccaacacagtgtgaaccacgtggtttgccagatgttaattgcaattggcacttctgaggctggtgtgagatgtgttgtccttcatatccaaagagctgtttctgacctactttcttcctgaccgccccatttggaaaaaggaggaaaaaactttgaatttgattctaagtgttttactgagttattttaattattttgaaggataatgtgctttcataaaacttgaaatagcagttttccttagagctcacactttatgtcaagtgagcaattatggcctagattgaacacatttggacctgactcatttttctattaatatagtaataatccctcatgaatattcataattccttcattcgtactgtatttgcacatctccttcagatgaaacatcttaaaacttccattttatcatgggaaaaataggcatagcaaatttcaaacaagtaacgtacatttttaccaaaatagggttagttttcttcattgatatttaattctcaaatgaaactcaagytgattcagacctagtccttgaaggctaacacatgaaattctttcttcccactcccacatcataaggtctctctgtcccctagtaaaagcattgtttattcaattcttaactgtttaaatgttctaaacttccattcatttgttcaacaaatatttactgagagcctcccatatgataggtgatgaactagacctggcaatgcaatgataaataagaagtgtcctgatccctgagggtctcatagtgaggaagacagataa

SEQ ID NO: 728267 - DNA, 1736 bp, Homo sapiens
tctcctgacagtaaatatgcaaaactcttctatatttgaagagttttgtttcaccaagccaaaaatccctcaaatatgaatccttcaaattctcttttaaaaagtaaaattaaagcagtaaaataatcctaacaaaaggataatagtcaaagttgtgagagaaaagggtttggagactttcagctacaatcaaatccatgagatgtgaataaactggaaaagaatcatagacataataaggctaagacatagctaatgttttctatattgagtgtggttaagtgttttagtgaaatcaattattccattacaaaattgtataaattcggtagtactattattttcaccattttatagatgtagaaactgagacaccaagaaattctgtgaattgcccaaggtcacagagctagtcattgatggagtagaaatgacccccaggcagcctgactccacagttcacatgctaaccccttggtgacacaacttcttaacattgtggttcatcgccaatattcataagtgaaataaatactaaatttcagttacaggataatgaaaagaaatatttaagtccttaagccccctgaattaactctaggttaagaagccctggtgttgatagactttagaaggcaggtaacatgtcaatcttatgaactattaagtagctagtacaaaccctcaaacatacatgcacaatagaaaagacagatttgtgctgcattccatcgggtcgaatgccatgatccatgacttggctcccacaaagccccagtaacccctgcctcttttggtatccaaagtcatcccacagtccttgggaacaaggtcagacattagacagatacccaaaatatccttgaaaagtaaaaataacgtattatcagaaaacatttaacctgaaaagggccagaaatttggaagatgaaagttcagcggtagaaaatgacttgccaacacagtgtgaaccacgtggtttgccagatgttaattgcaattggcacttctgaggctggtgtgagatgtgttgtccttcatatccaaagagctgtttctgacctactttcttcctgaccgccccatttggaaaaaggaggaaaaaactttgaatttgattctaagtgttttactgagttattttaattattttgaaggataatgtgctttcataaaacttgaaatagcagttttccttagagctcacactttatgtcaagtgagcaattatggcctagattgaacacatttggacctgactcatttttctattaatatagtaataatccctcatgaatattcataattccttcattcgtactgtatttgcacatctccttcagatgaaacatcttaaaacttccattttatcatgggaaaaataggcatagcaaatttcaaacaagtaacgtacatttttaccaaaatagggttagttttcttcattgatatttaattctcaaatgaaactcaagctgattcagacctagtccttgaaggctaacacatgaaattctttcttcccactcccacatcataaggtctctctgtcccctagtaaaagcattgtttattcaattcttarctgtttaaatgttctaaacttccattcatttgttcaacaaatatttactgagagcctcccatatgataggtgatgaactagacctggcaatgcaatgataaataagaagtgtcctgatccctgagggtctcatagtgaggaagacagataa

SEQ ID NO: 728268 - DNA, 916 bp, Homo sapiens
ttgtcaaaatatacagagcagagactattataaacacaaaagaaaaagttttgaaaaaacacctcttctaaatttggaaaaatctagctaaaaattgatattaaagattttatttaatactacagttataaaacttgattgaatatatatatacacatacagacacatatgtgattattcattattttatgtggatatatgtcttagtcattttctgttactataactggatacttcctgcttaggaataaatgacttagagtggggaccagcagaagtcacaactgggtccaaaagcactcactagcacctcatcctctccagtcactcccatctcagggaggtggccagacggaaagagcgtcctgccttgattccaaactaggggagtagaggaataagggattctgtcttttccttttttgtccactgtgcctgtataaatagtccttttcctttttaagtgcctgatgatagatgctcattgaggttgatccacataggccagttagatatgagggagaaaagccattgactccaccctaattctttaggtcaactcaaatatctttaggaatacatgtagatactcagcataagtatggaagattccaaatgtgtacagggtcaagggaacagctgctggggagagtaaaatgcatcactgagacaggaagaggyaaggaaatacaataagtacatggagtttataggaaatgcactgattcaattcaataaacactgccaggcactggaaaataagatttgaaacatgtcttcaaggaactcatggtttggtagaggctctcctacaatgttcattaaaggtttttccctcagtgatggaaaaagtgtcgaaatctagagtgctccaatgaaaaaatatatgtgaaattatttaaaaggttataaagca

SEQ ID NO: 728269 - DNA, 3766 bp, Homo sapiens
gaacaactccagacgtgcagccttaagagctgtaacactcaccgtgaaggtctgcagcttcactcctgagccagcgagaccacgaaccccaccagaaggaagaagctttgaacacatccgaacatcagaaggaacaaactccagacacgccacctttaagaactgtaacactcaccaggagggtccgcagcttcattcttgaagtcagtgagaccaagaacccaccaattctggacacacttatacacttggcactgggaggtctgtatggagcaagtgaagaaatcagcagagtgaagatagagggagaaaaacatgatgggggaaaggcaaagttactgccatgttggtttcaattctgccactcatgagtgagacccatgacctcctctctctaggactctgttattcttatctgtagagtggaggaatagaagggccttttaaagtattaacatttcctgacctatctgtaaaacactttcattcaaactgatggaaatcttgactactttgccaagaggacataataatcatcaagctgaatgcaccaaacaacattgcctgaaactatctaagcaaaaactgagaaagtgacacaggacagacaagcctcctataagagtaagaactcttcagcacatgcttagagtgtcaaagacaatgctgtgttcacaccattcctcttcctggacatgcagaaagactacatttcccagccttacttgcagttagtttggaaccatgtgactgcatttccaccaataggaatgtaagaaatccttcgggccaaggttatcaaaggcaagtgtgagctatgttccctctcttcttatccatatggctaccagtgaaaaactctgagatggcagaattaaaagacggaaacctccagaatctctgaatcactgttggacaagggcccctaaggagaacccctgccctgcaccagactatgctatgggtgccaacccactgagagttcagggtttattcgtctcagcagcagtctattgttacactgactaacattctaaggtttgagagatccagcatattgttaattgaagctagatttcaattacactgagaaacttatctatttaaaaataaaaactctcccaaaaaaaaaacaaataatccatattccttttaacaacatgtggcaaatttgcaaaaaaaaaaaaaaaaaaaaactggccacatattaggccataaagaagtctcaacaaaatccactatacgattgacattgtccagaccacattttcctgaccataatgcaacaaaattagaagtcaacagcaagaagatagctaaacacaagcatacattaggaaaattgaaaatatcctttcatgagttaaatgaaaaatcacaatagaaattactaaacatttacaattgaacgaaaacacaacttcatatatatatatatacatatatatatatatatatatgagtgtcattgcccccagtgagtcttccaactttgttcttcttttacaaagttatttgggaaattctgggtctcctgcaattcctcatacagttttacactgtttgtcaatttctgtggctgggatgaacttatcgtagttctcatagaccagggtttgcatgtcgctgtctagagcccggatctgcggcaccatgtccgtctcactgtctatcagctgggccagagggcactctctaggcagcttgtctaggtaaagttccgggtcgaagtgcgccccgttcagatcagtggagtccagggggtcgggccccgcggggagtcccaccgcctcccctttcgagaggccattgtaaagctttagcatcctgtgcgccttccgccgacgctccgtgagcctccacatcgggcccttctggggagtcccaaggtccacaccccgggctaggcccagtgacagctgccgccgccatagctccaactgcagcccacgggcgtaactttttatatttttaagttggatacatggagctacttggcttttgctttcatctcatcgttgaggaaagaggtggctgcttatggtwaccctgtttttaatgcaaactgtaatggatgagaacctccctgttgcagagagcaaaacactgaaataaattgtgctgtaacacagccctgtgttgggggattgggagtgatcatgcaaatgcttgcaaatttgcacagtgacagagacaatggtctgggcagctgttgactatatgaaaaggcaattgaccaaaagtcagttactgagctatctcaatactttcattttattttagcttttggcaacagggtgcgattaaaggagagaaagaaaacacagtgataagtgtaagataatgtacacacatgtgtaaaagaaaatgacaagacaggatgactatttgtctcttggttagctccttgggctctatgtctccttcctcagagaacctcgttttcctttgtccagatttgttagggtggataatccaggcccctgctcccccatgatagaagccaaagacatccctggagccgcatcccactgcaccctttcctggcactgcccacatggacacaactcagcccattagacttcctctcagaactctagtcttgagcaaagggattaaagggtgaagtgactgaaggtatgcccttccaaagtggtacgtgagctaatggctaaagtttgcaaagcccatccaagcacattttttcgtaatttttatttatttatatttttaagacagagtcttgctctgttgcccaggctggagtgcagtggcgtgatctcggttcactgcaacctctgtctcccggcttcaaaggagtctcctgcctcagcctccccagtagctgggattacaggcatacgccaccatgcctggctaattttttttttttttttttttgtatttttagtagagacagggtttcatcatgttggccaggctggtctcgaactcctgaccttgtgattcgcctgcctcagcctcccaaagggctgggattacaggcgtgagccaccgcgcccagcttccaaaagttttaagcagagctcagaggtcttaaccacaggcacatcggaggagcatttttgaaacactttccagcttcctcaataggaatggaagccaaactccgaattgatgactcctttcaggaagtcgagagctgtaacgaaagccaggaacaggggcaagggagagatgcgtcccgaatgatcctttgccaactctttctggaatcctcgatgtgatctcagctgccctttctatacatgacacagtgattgtggcacccactggtctagctgtggtctacaaggaacccccaaagggaagggcacagtgagcaggggcatcggcctgagtgacgaggatttgagagggcaggttggatgcaggaagaggactggccaaatgccatgtgtctggacttagactgcctggttcaaattggacttcaccctctttgacttcgtgatctggtacaagctacatgaaaacccattgcgccttttctagtctgtaaaatcatcatgaaatgtgcactaataatgtggagactatgcagatgaaatgaaacaagctgcatagagaacagagctcagagcctgtcctttaggaagccctcagtaagggttcatgatgccatggtgtctgtcgtcatcctctttatcctcatcatcaccttcataatctctttgttgttcttagggaatagtttagagggactcattccctgctatcatgggtgagatgtctatgaaaagga

SEQ ID NO: 728270 - DNA, 3766 bp, Homo sapiens
gaacaactccagacgtgcagccttaagagctgtaacactcaccgtgaaggtctgcagcttcactcctgagccagcgagaccacgaaccccaccagaaggaagaagctttgaacacatccgaacatcagaaggaacaaactccagacacgccacctttaagaactgtaacactcaccaggagggtccgcagcttcattcttgaagtcagtgagaccaagaacccaccaattctggacacacttatacacttggcactgggaggtctgtatggagcaagtgaagaaatcagcagagtgaagatagagggagaaaaacatgatgggggaaaggcaaagttactgccatgttggtttcaattctgccactcatgagtgagacccatgacctcctctctctaggactctgttattcttatctgtagagtggaggaatagaagggccttttaaagtattaacatttcctgacctatctgtaaaacactttcattcaaactgatggaaatcttgactactttgccaagaggacataataatcatcaagctgaatgcaccaaacaacattgcctgaaactatctaagcaaaaactgagaaagtgacacaggacagacaagcctcctataagagtaagaactcttcagcacatgcttagagtgtcaaagacaatgctgtgttcacaccattcctcttcctggacatgcagaaagactacatttcccagccttacttgcagttagtttggaaccatgtgactgcatttccaccaataggaatgtaagaaatccttcgggccaaggttatcaaaggcaagtgtgagctatgttccctctcttcttatccatatggctaccagtgaaaaactctgagatggcagaattaaaagacggaaacctccagaatctctgaatcactgttggacaagggcccctaaggagaacccctgccctgcaccagactatgctatgggtgccaacccactgagagttcagggtttattcgtctcagcagcagtctattgttacactgactaacattctaaggtttgagagatccagcatattgttaattgaagctagatttcaattacactgagaaacttatctatttaaaaataaaaactctcccaaaaaaaaaacaaataatccatattccttttaacaacatgtggcaaatttgcaaaaaaaaaaaaaaaaaaaaactggccacatattaggccataaagaagtctcaacaaaatccactatacgattgacattgtccagaccacattttcctgaccataatgcaacaaaattagaagtcaacagcaagaagatagctaaacacaagcatacattaggaaaattgaaaatatcctttcatgagttaaatgaaaaatcacaatagaaattactaaacatttacaattgaacgaaaacacaacttcatatatatatatatacatatatatatatatatatatgagtgtcattgcccccagtgagtcttccaactttgttcttcttttacaaagttatttgggaaattctgggtctcctgcaattcctcatacagttttacactgtttgtcaatttctgtggctgggatgaacttatcgtagttctcatagaccagggtttgcatgtcgctgtctagagcccggatctgcggcaccatgtccgtctcactgtctatcagctgggccagagggcactctctaggcagcttgtctaggtaaagttccgggtcgaagtgcgccccgttcagatcagtggagtccagggggtcgggccccgcggggagtcccaccgcctcccctttcgagaggccattgtaaagctttagcatcctgtgcgccttccgccgacgctccgtgagcctccacatcgggcccttctggggagtcccaaggtccacaccccgggctaggcccagtgacagctgccgccgccatagctccaactgcagcccacgggcgtaactttttatatttttaagttggatacatggagctacttggcttttgctttcatctcatcgttgaggaaagaggtggctgcttatggttmccctgtttttaatgcaaactgtaatggatgagaacctccctgttgcagagagcaaaacactgaaataaattgtgctgtaacacagccctgtgttgggggattgggagtgatcatgcaaatgcttgcaaatttgcacagtgacagagacaatggtctgggcagctgttgactatatgaaaaggcaattgaccaaaagtcagttactgagctatctcaatactttcattttattttagcttttggcaacagggtgcgattaaaggagagaaagaaaacacagtgataagtgtaagataatgtacacacatgtgtaaaagaaaatgacaagacaggatgactatttgtctcttggttagctccttgggctctatgtctccttcctcagagaacctcgttttcctttgtccagatttgttagggtggataatccaggcccctgctcccccatgatagaagccaaagacatccctggagccgcatcccactgcaccctttcctggcactgcccacatggacacaactcagcccattagacttcctctcagaactctagtcttgagcaaagggattaaagggtgaagtgactgaaggtatgcccttccaaagtggtacgtgagctaatggctaaagtttgcaaagcccatccaagcacattttttcgtaatttttatttatttatatttttaagacagagtcttgctctgttgcccaggctggagtgcagtggcgtgatctcggttcactgcaacctctgtctcccggcttcaaaggagtctcctgcctcagcctccccagtagctgggattacaggcatacgccaccatgcctggctaattttttttttttttttttttgtatttttagtagagacagggtttcatcatgttggccaggctggtctcgaactcctgaccttgtgattcgcctgcctcagcctcccaaagggctgggattacaggcgtgagccaccgcgcccagcttccaaaagttttaagcagagctcagaggtcttaaccacaggcacatcggaggagcatttttgaaacactttccagcttcctcaataggaatggaagccaaactccgaattgatgactcctttcaggaagtcgagagctgtaacgaaagccaggaacaggggcaagggagagatgcgtcccgaatgatcctttgccaactctttctggaatcctcgatgtgatctcagctgccctttctatacatgacacagtgattgtggcacccactggtctagctgtggtctacaaggaacccccaaagggaagggcacagtgagcaggggcatcggcctgagtgacgaggatttgagagggcaggttggatgcaggaagaggactggccaaatgccatgtgtctggacttagactgcctggttcaaattggacttcaccctctttgacttcgtgatctggtacaagctacatgaaaacccattgcgccttttctagtctgtaaaatcatcatgaaatgtgcactaataatgtggagactatgcagatgaaatgaaacaagctgcatagagaacagagctcagagcctgtcctttaggaagccctcagtaagggttcatgatgccatggtgtctgtcgtcatcctctttatcctcatcatcaccttcataatctctttgttgttcttagggaatagtttagagggactcattccctgctatcatgggtgagatgtctatgaaaagga

SEQ ID NO: 728271 - DNA, 3766 bp, Homo sapiens
gaacaactccagacgtgcagccttaagagctgtaacactcaccgtgaaggtctgcagcttcactcctgagccagcgagaccacgaaccccaccagaaggaagaagctttgaacacatccgaacatcagaaggaacaaactccagacacgccacctttaagaactgtaacactcaccaggagggtccgcagcttcattcttgaagtcagtgagaccaagaacccaccaattctggacacacttatacacttggcactgggaggtctgtatggagcaagtgaagaaatcagcagagtgaagatagagggagaaaaacatgatgggggaaaggcaaagttactgccatgttggtttcaattctgccactcatgagtgagacccatgacctcctctctctaggactctgttattcttatctgtagagtggaggaatagaagggccttttaaagtattaacatttcctgacctatctgtaaaacactttcattcaaactgatggaaatcttgactactttgccaagaggacataataatcatcaagctgaatgcaccaaacaacattgcctgaaactatctaagcaaaaactgagaaagtgacacaggacagacaagcctcctataagagtaagaactcttcagcacatgcttagagtgtcaaagacaatgctgtgttcacaccattcctcttcctggacatgcagaaagactacatttcccagccttacttgcagttagtttggaaccatgtgactgcatttccaccaataggaatgtaagaaatccttcgggccaaggttatcaaaggcaagtgtgagctatgttccctctcttcttatccatatggctaccagtgaaaaactctgagatggcagaattaaaagacggaaacctccagaatctctgaatcactgttggacaagggcccctaaggagaacccctgccctgcaccagactatgctatgggtgccaacccactgagagttcagggtttattcgtctcagcagcagtctattgttacactgactaacattctaaggtttgagagatccagcatattgttaattgaagctagatttcaattacactgagaaacttatctatttaaaaataaaaactctcccaaaaaaaaaacaaataatccatattccttttaacaacatgtggcaaatttgcaaaaaaaaaaaaaaaaaaaaactggccacatattaggccataaagaagtctcaacaaaatccactatacgattgacattgtccagaccacattttcctgaccataatgcaacaaaattagaagtcaacagcaagaagatagctaaacacaagcatacattaggaaaattgaaaatatcctttcatgagttaaatgaaaaatcacaatagaaattactaaacatttacaattgaacgaaaacacaacttcatatatatatatatacatatatatatatatatatatgagtgtcattgcccccagtgagtcttccaactttgttcttcttttacaaagttatttgggaaattctgggtctcctgcaattcctcatacagttttacactgtttgtcaatttctgtggctgggatgaacttatcgtagttctcatagaccagggtttgcatgtcgctgtctagagcccggatctgcggcaccatgtccgtctcactgtctatcagctgggccagagggcactctctaggcagcttgtctaggtaaagttccgggtcgaagtgcgccccgttcagatcagtggagtccagggggtcgggccccgcggggagtcccaccgcctcccctttcgagaggccattgtaaagctttagcatcctgtgcgccttccgccgacgctccgtgagcctccacatcgggcccttctggggagtcccaaggtccacaccccgggctaggcccagtgacagctgccgccgccatagctccaactgcagcccacgggcgtaactttttatatttttaagttggatacatggagctacttggcttttgctttcatctcatcgttgaggaaagaggtggctgcttatggttaccctgtttttamtgcaaactgtaatggatgagaacctccctgttgcagagagcaaaacactgaaataaattgtgctgtaacacagccctgtgttgggggattgggagtgatcatgcaaatgcttgcaaatttgcacagtgacagagacaatggtctgggcagctgttgactatatgaaaaggcaattgaccaaaagtcagttactgagctatctcaatactttcattttattttagcttttggcaacagggtgcgattaaaggagagaaagaaaacacagtgataagtgtaagataatgtacacacatgtgtaaaagaaaatgacaagacaggatgactatttgtctcttggttagctccttgggctctatgtctccttcctcagagaacctcgttttcctttgtccagatttgttagggtggataatccaggcccctgctcccccatgatagaagccaaagacatccctggagccgcatcccactgcaccctttcctggcactgcccacatggacacaactcagcccattagacttcctctcagaactctagtcttgagcaaagggattaaagggtgaagtgactgaaggtatgcccttccaaagtggtacgtgagctaatggctaaagtttgcaaagcccatccaagcacattttttcgtaatttttatttatttatatttttaagacagagtcttgctctgttgcccaggctggagtgcagtggcgtgatctcggttcactgcaacctctgtctcccggcttcaaaggagtctcctgcctcagcctccccagtagctgggattacaggcatacgccaccatgcctggctaattttttttttttttttttttgtatttttagtagagacagggtttcatcatgttggccaggctggtctcgaactcctgaccttgtgattcgcctgcctcagcctcccaaagggctgggattacaggcgtgagccaccgcgcccagcttccaaaagttttaagcagagctcagaggtcttaaccacaggcacatcggaggagcatttttgaaacactttccagcttcctcaataggaatggaagccaaactccgaattgatgactcctttcaggaagtcgagagctgtaacgaaagccaggaacaggggcaagggagagatgcgtcccgaatgatcctttgccaactctttctggaatcctcgatgtgatctcagctgccctttctatacatgacacagtgattgtggcacccactggtctagctgtggtctacaaggaacccccaaagggaagggcacagtgagcaggggcatcggcctgagtgacgaggatttgagagggcaggttggatgcaggaagaggactggccaaatgccatgtgtctggacttagactgcctggttcaaattggacttcaccctctttgacttcgtgatctggtacaagctacatgaaaacccattgcgccttttctagtctgtaaaatcatcatgaaatgtgcactaataatgtggagactatgcagatgaaatgaaacaagctgcatagagaacagagctcagagcctgtcctttaggaagccctcagtaagggttcatgatgccatggtgtctgtcgtcatcctctttatcctcatcatcaccttcataatctctttgttgttcttagggaatagtttagagggactcattccctgctatcatgggtgagatgtctatgaaaagga

SEQ ID NO: 728272 - DNA, 3766 bp, Homo sapiens
gaacaactccagacgtgcagccttaagagctgtaacactcaccgtgaaggtctgcagcttcactcctgagccagcgagaccacgaaccccaccagaaggaagaagctttgaacacatccgaacatcagaaggaacaaactccagacacgccacctttaagaactgtaacactcaccaggagggtccgcagcttcattcttgaagtcagtgagaccaagaacccaccaattctggacacacttatacacttggcactgggaggtctgtatggagcaagtgaagaaatcagcagagtgaagatagagggagaaaaacatgatgggggaaaggcaaagttactgccatgttggtttcaattctgccactcatgagtgagacccatgacctcctctctctaggactctgttattcttatctgtagagtggaggaatagaagggccttttaaagtattaacatttcctgacctatctgtaaaacactttcattcaaactgatggaaatcttgactactttgccaagaggacataataatcatcaagctgaatgcaccaaacaacattgcctgaaactatctaagcaaaaactgagaaagtgacacaggacagacaagcctcctataagagtaagaactcttcagcacatgcttagagtgtcaaagacaatgctgtgttcacaccattcctcttcctggacatgcagaaagactacatttcccagccttacttgcagttagtttggaaccatgtgactgcatttccaccaataggaatgtaagaaatccttcgggccaaggttatcaaaggcaagtgtgagctatgttccctctcttcttatccatatggctaccagtgaaaaactctgagatggcagaattaaaagacggaaacctccagaatctctgaatcactgttggacaagggcccctaaggagaacccctgccctgcaccagactatgctatgggtgccaacccactgagagttcagggtttattcgtctcagcagcagtctattgttacactgactaacattctaaggtttgagagatccagcatattgttaattgaagctagatttcaattacactgagaaacttatctatttaaaaataaaaactctcccaaaaaaaaaacaaataatccatattccttttaacaacatgtggcaaatttgcaaaaaaaaaaaaaaaaaaaaactggccacatattaggccataaagaagtctcaacaaaatccactatacgattgacattgtccagaccacattttcctgaccataatgcaacaaaattagaagtcaacagcaagaagatagctaaacacaagcatacattaggaaaattgaaaatatcctttcatgagttaaatgaaaaatcacaatagaaattactaaacatttacaattgaacgaaaacacaacttcatatatatatatatacatatatatatatatatatatgagtgtcattgcccccagtgagtcttccaactttgttcttcttttacaaagttatttgggaaattctgggtctcctgcaattcctcatacagttttacactgtttgtcaatttctgtggctgggatgaacttatcgtagttctcatagaccagggtttgcatgtcgctgtctagagcccggatctgcggcaccatgtccgtctcactgtctatcagctgggccagagggcactctctaggcagcttgtctaggtaaagttccgggtcgaagtgcgccccgttcagatcagtggagtccagggggtcgggccccgcggggagtcccaccgcctcccctttcgagaggccattgtaaagctttagcatcctgtgcgccttccgccgacgctccgtgagcctccacatcgggcccttctggggagtcccaaggtccacaccccgggctaggcccagtgacagctgccgccgccatagctccaactgcagcccacgggcgtaactttttatatttttaagttggatacatggagctacttggcttttgctttcatctcatcgttgaggaaagaggtggctgcttatggttaccctgtttttaatgcaamctgtaatggatgagaacctccctgttgcagagagcaaaacactgaaataaattgtgctgtaacacagccctgtgttgggggattgggagtgatcatgcaaatgcttgcaaatttgcacagtgacagagacaatggtctgggcagctgttgactatatgaaaaggcaattgaccaaaagtcagttactgagctatctcaatactttcattttattttagcttttggcaacagggtgcgattaaaggagagaaagaaaacacagtgataagtgtaagataatgtacacacatgtgtaaaagaaaatgacaagacaggatgactatttgtctcttggttagctccttgggctctatgtctccttcctcagagaacctcgttttcctttgtccagatttgttagggtggataatccaggcccctgctcccccatgatagaagccaaagacatccctggagccgcatcccactgcaccctttcctggcactgcccacatggacacaactcagcccattagacttcctctcagaactctagtcttgagcaaagggattaaagggtgaagtgactgaaggtatgcccttccaaagtggtacgtgagctaatggctaaagtttgcaaagcccatccaagcacattttttcgtaatttttatttatttatatttttaagacagagtcttgctctgttgcccaggctggagtgcagtggcgtgatctcggttcactgcaacctctgtctcccggcttcaaaggagtctcctgcctcagcctccccagtagctgggattacaggcatacgccaccatgcctggctaattttttttttttttttttttgtatttttagtagagacagggtttcatcatgttggccaggctggtctcgaactcctgaccttgtgattcgcctgcctcagcctcccaaagggctgggattacaggcgtgagccaccgcgcccagcttccaaaagttttaagcagagctcagaggtcttaaccacaggcacatcggaggagcatttttgaaacactttccagcttcctcaataggaatggaagccaaactccgaattgatgactcctttcaggaagtcgagagctgtaacgaaagccaggaacaggggcaagggagagatgcgtcccgaatgatcctttgccaactctttctggaatcctcgatgtgatctcagctgccctttctatacatgacacagtgattgtggcacccactggtctagctgtggtctacaaggaacccccaaagggaagggcacagtgagcaggggcatcggcctgagtgacgaggatttgagagggcaggttggatgcaggaagaggactggccaaatgccatgtgtctggacttagactgcctggttcaaattggacttcaccctctttgacttcgtgatctggtacaagctacatgaaaacccattgcgccttttctagtctgtaaaatcatcatgaaatgtgcactaataatgtggagactatgcagatgaaatgaaacaagctgcatagagaacagagctcagagcctgtcctttaggaagccctcagtaagggttcatgatgccatggtgtctgtcgtcatcctctttatcctcatcatcaccttcataatctctttgttgttcttagggaatagtttagagggactcattccctgctatcatgggtgagatgtctatgaaaagga

SEQ ID NO: 728273 - DNA, 3766 bp, Homo sapiens
gaacaactccagacgtgcagccttaagagctgtaacactcaccgtgaaggtctgcagcttcactcctgagccagcgagaccacgaaccccaccagaaggaagaagctttgaacacatccgaacatcagaaggaacaaactccagacacgccacctttaagaactgtaacactcaccaggagggtccgcagcttcattcttgaagtcagtgagaccaagaacccaccaattctggacacacttatacacttggcactgggaggtctgtatggagcaagtgaagaaatcagcagagtgaagatagagggagaaaaacatgatgggggaaaggcaaagttactgccatgttggtttcaattctgccactcatgagtgagacccatgacctcctctctctaggactctgttattcttatctgtagagtggaggaatagaagggccttttaaagtattaacatttcctgacctatctgtaaaacactttcattcaaactgatggaaatcttgactactttgccaagaggacataataatcatcaagctgaatgcaccaaacaacattgcctgaaactatctaagcaaaaactgagaaagtgacacaggacagacaagcctcctataagagtaagaactcttcagcacatgcttagagtgtcaaagacaatgctgtgttcacaccattcctcttcctggacatgcagaaagactacatttcccagccttacttgcagttagtttggaaccatgtgactgcatttccaccaataggaatgtaagaaatccttcgggccaaggttatcaaaggcaagtgtgagctatgttccctctcttcttatccatatggctaccagtgaaaaactctgagatggcagaattaaaagacggaaacctccagaatctctgaatcactgttggacaagggcccctaaggagaacccctgccctgcaccagactatgctatgggtgccaacccactgagagttcagggtttattcgtctcagcagcagtctattgttacactgactaacattctaaggtttgagagatccagcatattgttaattgaagctagatttcaattacactgagaaacttatctatttaaaaataaaaactctcccaaaaaaaaaacaaataatccatattccttttaacaacatgtggcaaatttgcaaaaaaaaaaaaaaaaaaaaactggccacatattaggccataaagaagtctcaacaaaatccactatacgattgacattgtccagaccacattttcctgaccataatgcaacaaaattagaagtcaacagcaagaagatagctaaacacaagcatacattaggaaaattgaaaatatcctttcatgagttaaatgaaaaatcacaatagaaattactaaacatttacaattgaacgaaaacacaacttcatatatatatatatacatatatatatatatatatatgagtgtcattgcccccagtgagtcttccaactttgttcttcttttacaaagttatttgggaaattctgggtctcctgcaattcctcatacagttttacactgtttgtcaatttctgtggctgggatgaacttatcgtagttctcatagaccagggtttgcatgtcgctgtctagagcccggatctgcggcaccatgtccgtctcactgtctatcagctgggccagagggcactctctaggcagcttgtctaggtaaagttccgggtcgaagtgcgccccgttcagatcagtggagtccagggggtcgggccccgcggggagtcccaccgcctcccctttcgagaggccattgtaaagctttagcatcctgtgcgccttccgccgacgctccgtgagcctccacatcgggcccttctggggagtcccaaggtccacaccccgggctaggcccagtgacagctgccgccgccatagctccaactgcagcccacgggcgtaactttttatatttttaagttggatacatggagctacttggcttttgctttcatctcatcgttgaggaaagaggtggctgcttatggttaccctgtttttaatgcaaactgtaatggatgagaacctccctgttgcagagagcaaaacactgaaataaattgtgctgtaacacagccctgtgttgggggattgggagtgatcatgcaaatgcttgcaaatttgcacagtgacagagacaatggtytgggcagctgttgactatatgaaaaggcaattgaccaaaagtcagttactgagctatctcaatactttcattttattttagcttttggcaacagggtgcgattaaaggagagaaagaaaacacagtgataagtgtaagataatgtacacacatgtgtaaaagaaaatgacaagacaggatgactatttgtctcttggttagctccttgggctctatgtctccttcctcagagaacctcgttttcctttgtccagatttgttagggtggataatccaggcccctgctcccccatgatagaagccaaagacatccctggagccgcatcccactgcaccctttcctggcactgcccacatggacacaactcagcccattagacttcctctcagaactctagtcttgagcaaagggattaaagggtgaagtgactgaaggtatgcccttccaaagtggtacgtgagctaatggctaaagtttgcaaagcccatccaagcacattttttcgtaatttttatttatttatatttttaagacagagtcttgctctgttgcccaggctggagtgcagtggcgtgatctcggttcactgcaacctctgtctcccggcttcaaaggagtctcctgcctcagcctccccagtagctgggattacaggcatacgccaccatgcctggctaattttttttttttttttttttgtatttttagtagagacagggtttcatcatgttggccaggctggtctcgaactcctgaccttgtgattcgcctgcctcagcctcccaaagggctgggattacaggcgtgagccaccgcgcccagcttccaaaagttttaagcagagctcagaggtcttaaccacaggcacatcggaggagcatttttgaaacactttccagcttcctcaataggaatggaagccaaactccgaattgatgactcctttcaggaagtcgagagctgtaacgaaagccaggaacaggggcaagggagagatgcgtcccgaatgatcctttgccaactctttctggaatcctcgatgtgatctcagctgccctttctatacatgacacagtgattgtggcacccactggtctagctgtggtctacaaggaacccccaaagggaagggcacagtgagcaggggcatcggcctgagtgacgaggatttgagagggcaggttggatgcaggaagaggactggccaaatgccatgtgtctggacttagactgcctggttcaaattggacttcaccctctttgacttcgtgatctggtacaagctacatgaaaacccattgcgccttttctagtctgtaaaatcatcatgaaatgtgcactaataatgtggagactatgcagatgaaatgaaacaagctgcatagagaacagagctcagagcctgtcctttaggaagccctcagtaagggttcatgatgccatggtgtctgtcgtcatcctctttatcctcatcatcaccttcataatctctttgttgttcttagggaatagtttagagggactcattccctgctatcatgggtgagatgtctatgaaaagga

SEQ ID NO: 728274 - DNA, 601 bp, Homo sapiens
acttggaaccaacccaaatgtccaacaacgatagactgcattaagaaaatgtggcacatatacaccacggaatactatgcagccataaaaaacgatgagttcatgtcctttgtagagacatggatgaaactggaaaccatcattctcagcaaactatcgcaaggacaaaaaaccaaacactgcatgttctcactcataggtgggaattgaacaatgagaacacatggacacaggaaggggaatgtcacactccggcgactgatgyggggtgggtgtaggggggagggatagcattaggagatataccgaatgctaaataacgagttaatgggtgcagcacaccaacatggcacatgtatacatatgtaacaaacctgcacattgtgcacatgtaccctaaaacttacagtataataataataaaaataaataaataaaaataaaaaaccaataccaaaaccaaatggaaaaaccaatcaaccaaccaaataaacaaataaaaaacagcaataaaccaatttaggttgaatagaagataaaaaataattaaagatactggggctttctattttctcgtggattaaattaacttctagggata

SEQ ID NO: 728275 - DNA, 1324 bp, Homo sapiens
tctgtgcagaaacacctctactcatgctgtctccttctgcaccatctagaccaggggtggccaaaatggattccctgggccacactggaagaagaattgtcttgggccacacataaaatacactaacattaatgatagctgatgagctcaaagaaaaaaaaaatcacaaacaaaaatctcacaatgttttaagaaagtatataaatttgcgttgggccatattcaaagttgtcctgggccgcgagttgaataagcttgatctagacattccacccttcttcaccaggtcagttttctcctttagacttaggcctgttttcttggacctccagattggactgagcctcctcctctgctttcccattagcctgccatgatttctagcgtgctgactcaccacagtatactcatgctatcagttgatatgtctttcccttcaactgcatccatccagccccctgattttttcaccttttcccctcatacctctatagggtcttgcatgcagctggccctcagtaaatgtttgctgaactcatctcattttactaagccaaaggaatactgaacagcccccggatctgcaatggatggcaaaaaatgattccctgtgatttttatgacagaacatgctgttcctttaatcgttactatcaatgatttagagctcatttgagttgaaatgtctaaatacttggctatcttggagtacatatacctgtccacaggagtagaattccttttcaaaacagatttattgagatataatttacatactataaacttctaatgcttccagtaatcagaattttatctgaacccgaatttgctcaacacatttgagtgtgagtttgatcaaattattcaaaagctacatgatcccaaggatttctgctttggtcaaaatgaagtactgtgtttgcagctatcaacagcatagctttatatatgctgataccagttgtttttttgtttgtttgtttggttttttggtttttttttttgtgagatggagtctcactctgtcgcccagggcccaggctggagtgcagtggcatgatctcggctcactgcaagctccgcctcgcgggttcacaccattctcctgcctcagcctcctgagtagctgggactacaggcacccaccacyactcctggctaattttgtttttgtatttttagtagagacggggtttcaccatgttagccaggatggtcttgatctcctgacctcgtgatccggccgcctcggcctcccaaagtgctgggattacaggcgtgagccaccacgcccggctgctgataccagtttttaaaatactga

SEQ ID NO: 728276 - DNA, 588 bp, Homo sapiens
caagcaccccctgctgcaagggaacagggcgcagccggaaccggcgacggtggccgcgtggcgccgcggacttccgcagcaagccctcccgggcctcgggcggggccctccccggtcccccgccctggagtggctttctgggccaacagcaccttcagcttcccgaacacctccacagccgccctggacacgctgctgtcgccytcgtcctctgagtagtcgtcgccgccacggccgcagccagcgtcctgccccgccatgtttcgcgctccgagccgcgccccgcccatgccctggcttcactggccggcaagaccgccaatcaacctccagcgttcttcccgcccacccgcctgcgcccacccccttcccgaccgacccttcccattgggcgacatctccgcctgcgcgggccccgggctcccaccccccgccccggcaccacccagaggcaggaccacagtgaagcgggcagggcggacacagggaagggggcggggcggacacagggaagggggcggggcggacaccgggaaggaggcggggcggacaccgggaaaggggcggggcggacaccgggaaggggcg

SEQ ID NO: 728277 - DNA, 638 bp, Homo sapiens
actgtaccaagatctgagaccttccttctacagttwtgtagggttcctgtaggtaacttagcacccactcagaaggtgttgttgagtggctagcattatgtgagtgttaggatgtctgcctcccttggtgctacagctgctacagaattggcagaggtagagccttgccaggcagaagcacacttgaatggctggtgatggcctcagggctggccctatgaccagaatggctgaatcctggcccatcaagtctgcagcaaagagcagcttttccctgaggcatcagcttgccctgtggtgtacccgggtaagctttaaaaaaggcagtaagaggtgtgtatgtgcactcatgggacttctccaagacactataaacatgtagcaaaacatatgcctggcagtctccattggtcccaggggtgagggggaaaatatcatcgaaatcaaaccttacaaaggaagacactggatctgagttaattgctgagaagagggtgggggcaaggctggagtccattttgctaccattttggtagcaaaacagggccttttaaatttaatttttaaatattctcagtttctctggttaaaaaaattgtgcttattgtataaaatttacaacatatcaaaacatatag

SEQ ID NO: 728278 - DNA, 638 bp, Homo sapiens
actgtaccaagatctgagaccttccttctacagttttgtagggttcctgtaggtaacttagcacccactcagaaggtgttgytgagtggctagcattatgtgagtgttaggatgtctgcctcccttggtgctacagctgctacagaattggcagaggtagagccttgccaggcagaagcacacttgaatggctggtgatggcctcagggctggccctatgaccagaatggctgaatcctggcccatcaagtctgcagcaaagagcagcttttccctgaggcatcagcttgccctgtggtgtacccgggtaagctttaaaaaaggcagtaagaggtgtgtatgtgcactcatgggacttctccaagacactataaacatgtagcaaaacatatgcctggcagtctccattggtcccaggggtgagggggaaaatatcatcgaaatcaaaccttacaaaggaagacactggatctgagttaattgctgagaagagggtgggggcaaggctggagtccattttgctaccattttggtagcaaaacagggccttttaaatttaatttttaaatattctcagtttctctggttaaaaaaattgtgcttattgtataaaatttacaacatatcaaaacatatag

SEQ ID NO: 728279 - DNA, 956 bp, Homo sapiens
atgagcatataatatgactcaaaaaatgggaatcatataagccacattgtctgaacctaatgcaataaagctagaaactaataattaaaagatagcaaataaatgagtagaaagagaaccacttataatattctaaaacattttcaggtcaaagaactaagagttaaaattacacgtcactaaaaatgaaccctaataatggtactacataaaaaaactatatatttgttcaaagcaatattcacaagaaaatgcatccatctattaataaaaagtaaaacaaaggagscaaatctggcaattcaagaaataaaaaagaaatgagcaaaataagccaaaacagagaaggggaaagtttaatgataaaagcaggaattaatttaaatgcaaagcaataattagaatgtacaaataaaggcaatatttctaggaaaactgataataaaaaagaaaacacaaatgtgcaatgttaagaacgcgaaaggtgctataaccccacaaaaaaaagcaatttttcaaatcactggttaatgccttgtatacatagatcttgatgaaattggtggtgtttagaaatatataactttttaatttaaacttctctactttctaaaaatttatactattttacaattccaaagtcaatatcaaattgtaaagaaaaaaatcctgaattctgcctcttcttccttcttcacatacgcagcaaataaatgctacacatataccaactactatgtctcgactctcctatgttttcatcattaaagaaaaaaacattgcattcctactatatgccaatcattgcactacacactgggaaatcaaaaatgactatgagaaattccctgctttcaaggagttcatagtctagtgcgagaaacagacagatgtgcacactgattataatactatgtggtacctgtgataatgcataataatgatagatgtcttta

SEQ ID NO: 728280 - DNA, 602 bp, Homo sapiens
ggttctgtagggaactttgaataaataaagagttctttccttgttgaatatatttctagtggggaacacatttttattatcagttcctataaaatagagaaggacttaactgggacagtaaagggtattataaaaacaaacagatgtctgttaaaggaagctttctggagtatgtggtgcctcagttcaaaatctggcaatttaataggagttaatcagactgaagaacaaaagcaagtgggggaaggttctccaatttgaggaacagcatacatatataggcaggaagcaaggcagattatagcaattttaagacataatgtataatttgcaagttattaaataatgtkcataagtaactcttattttatgggagactaaataagaaccttgaaatgaatcgtctgtaaatcataatatggtaaggtgaaggatatggggaacaaaattactaagcatagctacatcctaacagagcagataaggataactgcactaagaacaaataaaaataatcatgcaactgattgatgataagaaaatgttagttcttcagagaccctaatcccttttaagtgtggaaagtatttctaaataagttg

SEQ ID NO: 728281 - DNA, 602 bp, Homo sapiens
ggttctgtagggaactttgaataaataaagagttctttccttgttgaatatatttctagtggggaacacatttttattatcagttcctataaaatagagaaggacttaactgggacagtaaagggtattataaaaacaaacagatgtctgttaaaggaagctttctggagtatgtggtgcctcagttcaaaatctggcaatttaataggagttaatcagactgaagaacaaaagcaagtgggggaaggttctccaatttgaggaacagcatacatatataggcaggaagcaaggcagattatagcaattttaagacataatgtataatttgcaagttattaaataatgtgcataagtaactcttattttatgggagactaaataagaaccttgaaatgaatcgtctgtaaatcataatatggtaaggtgaaggatatggggaacaaaattactaagcatakctacatcctaacagagcagataaggataactgcactaagaacaaataaaaataatcatgcaactgattgatgataagaaaatgttagttcttcagagaccctaatcccttttaagtgtggaaagtatttctaaataagttg

SEQ ID NO: 728282 - DNA, 602 bp, Homo sapiens
ggttctgtagggaactttgaataaataaagagttctttccttgttgaatatatttctagtggggaacacatttttattatcagttcctataaaatagagaaggacttaactgggacagtaaagggtattataaaaacaaacagatgtctgttaaaggaagctttctggagtatgtggtgcctcagttcaaaatctggcaatttaataggagttaatcagactgaagaacaaaagcaagtgggggaaggttctccaatttgaggaacagcatacatatataggcaggaagcaaggcagattatagcaattttaagacataatgtataatttgcaagttattaaataatgtgcataagtaactcttattttatgggagactaaataagaaccttgaaatgaatcgtctgtaaatcataatatggtaaggtgaaggatatggggaacaaaattactaagcatagctacatcctaacagagcagataargataactgcactaagaacaaataaaaataatcatgcaactgattgatgataagaaaatgttagttcttcagagaccctaatcccttttaagtgtggaaagtatttctaaataagttg

SEQ ID NO: 728283 - DNA, 591 bp, Homo sapiens
ctttctctcttcctatttggatgcaatttaatactttctcttgcttgattgctctagcaatctctttggcctgaaagccccctgaggacaaatacatcagtcaactgtttctttgtttgttgtttgttgtttcttttaaattattctcattacttagcacagatcatgtacaccatgagtgtttaataatatcaatagaatatttgggagcaggaggttattttgcttagttttatgctttcactgttgttrtagaacagctgggctagaagacattattaaacataaatacaactggtaaaatatcccagcagaagaaatgctttaaaaatatctccaatcactgcaggagtgcagagaggcaacaactcctccagcttttgcacatcgaataattggtttagttcactccttccacatcacttggagcagcggggagggtggggaaagcttaatgaccaggaaagcctttcataaagtcatcatcaatgttctttataacctaatgtcacttcaatagtccatggttttcaaataaatgtcctacctgcccacagactgaaattttagccaaataaatccataaattta

SEQ ID NO: 728284 - DNA, 952 bp, Homo sapiens
ttttgggagatgagcccacccatcctccatccccctacaggcaaggagggggtgctcccatataatccttattgtatgttgctgtgtttggttttctactatgttgttaagaacttttgagtctgtatttataaaagtatagctttatagtcttagagttttttttgttttgtttcgttttctgagacagagtcttgctctgtcgcccagactggagtgcagtggcacgatctcggctcactgcaacctctgcctcccagttcaagcgattctcctgcctcagctttccgagtagctgggactacaggcgcctgccmccatgtctggctaattttttgtatttttagtagagactgggtttcactgtgttagccaggatggtctcgatctcctgacttcgtgatctgcccgcctcggcctcccaaagtgctgggattacaggcgtaagccaccgtgcccagccttgatgtcttaagtttaattttaggccccatttgctccctcagacaggagcctttgtgtaacacacatgtgcagtgcacatcacacaccagagtccacacaatgggagacttcaatacacaattattcaaagacaaaaacacaaagtacagtagatataaaagacctgaaccaatagtaacgctgatagttctgtaagatgtcaacaggttaaaaaaacgagtttcatgatcaagcaagtttttgagatggttaataaaacaaagttaggtatatttattctcatggaactttccagaggtggttgtaaaccctccaagaaggggtgtgatagacaatgtggcccagaccttgaccagtgttccctgaagcactggacaaaaaaggccttctcaacaaaatgcccaccaagtaagttgttcagcctctctagacctctagagggctggaaactcactacctccctaaagcagcacgaccacaactttta

SEQ ID NO: 728285 - DNA, 952 bp, Homo sapiens
ttttgggagatgagcccacccatcctccatccccctacaggcaaggagggggtgctcccatataatccttattgtatgttgctgtgtttggttttctactatgttgttaagaacttttgagtctgtatttataaaagtatagctttatagtcttagagttttttttgttttgtttcgttttctgagacagagtcttgctctgtcgcccagactggagtgcagtggcacgatctcggctcactgcaacctctgcctcccagttcaagcgattctcctgcctcagctttccgagtagctgggactacaggcgcctgcccccatgtctggctaattttttgtatttttagtagagactgggtttcactgtgttagccaggatggtctcgatctcctgacttcgtgatctgcccgcctyggcctcccaaagtgctgggattacaggcgtaagccaccgtgcccagccttgatgtcttaagtttaattttaggccccatttgctccctcagacaggagcctttgtgtaacacacatgtgcagtgcacatcacacaccagagtccacacaatgggagacttcaatacacaattattcaaagacaaaaacacaaagtacagtagatataaaagacctgaaccaatagtaacgctgatagttctgtaagatgtcaacaggttaaaaaaacgagtttcatgatcaagcaagtttttgagatggttaataaaacaaagttaggtatatttattctcatggaactttccagaggtggttgtaaaccctccaagaaggggtgtgatagacaatgtggcccagaccttgaccagtgttccctgaagcactggacaaaaaaggccttctcaacaaaatgcccaccaagtaagttgttcagcctctctagacctctagagggctggaaactcactacctccctaaagcagcacgaccacaactttta

SEQ ID NO: 728286 - DNA, 952 bp, Homo sapiens
ttttgggagatgagcccacccatcctccatccccctacaggcaaggagggggtgctcccatataatccttattgtatgttgctgtgtttggttttctactatgttgttaagaacttttgagtctgtatttataaaagtatagctttatagtcttagagttttttttgttttgtttcgttttctgagacagagtcttgctctgtcgcccagactggagtgcagtggcacgatctcggctcactgcaacctctgcctcccagttcaagcgattctcctgcctcagctttccgagtagctgggactacaggcgcctgcccccatgtctggctaattttttgtatttttagtagagactgggtttcactgtgttagccaggatggtctcgatctcctgacttcgtgatctgcccgcctcggcctcccaaagtgctgggattacaggcgtaagccaccgtgcccagccttgatgtcttaagtttaattttaggccccatttgctccctcagacaggagcctttgtgtaacacacatgtgcagtgcacatcacacaccrgagtccacacaatgggagacttcaatacacaattattcaaagacaaaaacacaaagtacagtagatataaaagacctgaaccaatagtaacgctgatagttctgtaagatgtcaacaggttaaaaaaacgagtttcatgatcaagcaagtttttgagatggttaataaaacaaagttaggtatatttattctcatggaactttccagaggtggttgtaaaccctccaagaaggggtgtgatagacaatgtggcccagaccttgaccagtgttccctgaagcactggacaaaaaaggccttctcaacaaaatgcccaccaagtaagttgttcagcctctctagacctctagagggctggaaactcactacctccctaaagcagcacgaccacaactttta

SEQ ID NO: 728287 - DNA, 461 bp, Homo sapiens
aggttgcagtgagccgagatcatgccattgcactccaggctgggtgacagagtgagactccgtctcaaaaaaaaaaaaaaaaaaaaaaaaaggaaataaatatagcttcctaggggattctgtttgcagagtgtgtcgagaatatgaagcccagaattcaagactgcattatggactgtgaaggctgaggagggctgtgaggaaagagtgggtaggttaaaggagcagargcaactgtcatgccctttggctcttctataggaaaagaggaaagagtgagccttgggctgtgttttgtgagggaatagtgccctccctttgtgggtaagcaaagttggctcggaagatgaagacagatgagtcaagaacgtcagggtgtcagggggagcacaaaaagaaggcgaaatatgcccttctacactcaaacttgaaggtattcggggcctggtggctggatctga

SEQ ID NO: 728288 - DNA, 461 bp, Homo sapiens
aggttgcagtgagccgagatcatgccattgcactccaggctgggtgacagagtgagactccgtctcaaaaaaaaaaaaaaaaaaaaaaaaaggaaataaatatagcttcctaggggattctgtttgcagagtgtgtcgagaatatgaagcccagaattcaagactgcattatggactgtgaaggctgaggagggctgtgaggaaagagtgggtaggttaaaggagcagaagcaactgtcatgccctttggctcttctataggaaaagaggaaagagtgagccttgggctgtgttttgtgagggaatagtgccctccctttgtgggtaagcaaagttggctcggaagatgaagacagatgagtcaagaacgtcagggtgtcagggggagcacaaaaagaaggcgaaatatgcccttctacactcaaacttgaaggtattcrgggcctggtggctggatctga

SEQ ID NO: 728289 - DNA, 1116 bp, Homo sapiens
gaattcttacaaagtttacaacttacatgtgaaaggagcttaacagaggattttccaaatttgaaaacaatcctaaaaacttacttgacattaccaataatgtgttttgaaactgaaatacttctaagttatgaagaaaacatattatcatcagccaccctggaggaaagattgaattctatttccattacctatagacaacattacaaaataatttcgatctgaagatggaatcagagtattcagtcaaaactacaggaaaatatacttggtagtgtcatattcagaagttaataaaatatgctattttctgaattttgtgatggctgttgttttgtcagcttttataaaattggaatttgattttattttcccattataaatttatatttacagtctgcagtacttttgcatttttaattttacattatagyttttaatagttaacaagttgtaaaaggtttgatccccagaaaaccttgatctaccccatcagttaagtatactaatatatttagaaaatggatgaaatcagcatttgaatatttttaaatatttattaaaagaggacatgggtaaaagagctttgcagttgccacccttcattctcaaattccctggataaggatgaccgcataatctttggatggtcatacgcaagtcttgtgtacttgttacataaatctatttagtggacttttggcagtgtgtactgaggccagtttcttccacctgagctctgactccacctccagcagcccaaaaccaatactgaattttggggtcagctattgtttttgtggacttaggtaactacacacacattgtctttatgatagctttaataatactgccatcagaactaaaattgtcacgtggattaaaaggagtgacggtggtgtccccaggagcctttcaatatgtaagtatttacacatatacatgctaaaaagacccctaggaattttttaacaagggcaaaacagtaactcagcttgttttctcgcagtaaaaccggttgaaaaggcctgatagacttgtctgcagttacaaaacttgtgtgtagttatcacctttatatctcctggaaactaacatagacaaccgaatgggtta

SEQ ID NO: 728290 - DNA, 1116 bp, Homo sapiens
gaattcttacaaagtttacaacttacatgtgaaaggagcttaacagaggattttccaaatttgaaaacaatcctaaaaacttacttgacattaccaataatgtgttttgaaactgaaatacttctaagttatgaagaaaacatattatcatcagccaccctggaggaaagattgaattctatttccattacctatagacaacattacaaaataatttcgatctgaagatggaatcagagtattcagtcaaaactacaggaaaatatacttggtagtgtcatattcagaagttaataaaatatgctattttctgaattttgtgatggctgttgttttgtcagcttttataaaattggaatttgattttattttcccattataaatttatatttacagtctgcagtacttttgcatttttaattttacattatagtttttaatagttaacaagttgtaaaaggtttgatccccagaaaaccttgatctaccccmtcagttaagtatactaatatatttagaaaatggatgaaatcagcatttgaatatttttaaatatttattaaaagaggacatgggtaaaagagctttgcagttgccacccttcattctcaaattccctggataaggatgaccgcataatctttggatggtcatacgcaagtcttgtgtacttgttacataaatctatttagtggacttttggcagtgtgtactgaggccagtttcttccacctgagctctgactccacctccagcagcccaaaaccaatactgaattttggggtcagctattgtttttgtggacttaggtaactacacacacattgtctttatgatagctttaataatactgccatcagaactaaaattgtcacgtggattaaaaggagtgacggtggtgtccccaggagcctttcaatatgtaagtatttacacatatacatgctaaaaagacccctaggaattttttaacaagggcaaaacagtaactcagcttgttttctcgcagtaaaaccggttgaaaaggcctgatagacttgtctgcagttacaaaacttgtgtgtagttatcacctttatatctcctggaaactaacatagacaaccgaatgggtta

SEQ ID NO: 728291 - DNA, 1460 bp, Homo sapiens
aatatttcaaaagtcccgcgcgataaaatcattggctgaagagtgaccagactgattggttcattactagacaatcttattggatgagttgccccaccgcccatcctgtccttttcgtttcagttatctgcagcgacaaattgtctaaaattctagttcatccagtcccaaagaacagagtgtataacaaggtatctaaggatttttaaaatgtaaattccgattcagtaagtttgagtgggacttgaaattctgcattcctgacagtctcgcaagttatcaatgctggtgaacactcactaaaccaccagaaacgttcagactcatgtcgggaaataacgcttatattcagagaatgagattccatgctattttgttactggcgaacagcaagtttccttgccctttgttttctaagtccaagtcacattcccaccctgcctgttctcaaaatgtcttattttggttggccttaagtttcactttgtatactctaaaatgtactttctaaaggaaggtgttattttctcgaaacttaactttttaacaccattaggctaggggggcggtggctcacgcctgtaatcccagcattttgggagggcgagatgggacgatcactagaggccaggagttcaagacaaccctggctaaaatggtgaaaccccgtctcgcataaaaatacaaaaactagctgggcgcggtagcagacgcctgtaatcccaagtacacaggaggctgwggcatgagaaccgcgtgaagcggcggggtggaggttgcagtaagccgatatcgcgccgctgcactccagcctgggtgacagaactagactgtctcaaaacaaaccaatccaaacgaaaagcaaaaaataccctaacagaagcaagttatcatcctttcttgtgtaactatggacggctctgaaaaatgccgtttcaagtgtaagctacgttttctgatttgagtgtttacttgaccttggccttatcgtggctctgttattttggcaacaggacggcctgaatattggacaggacgcctccctgagcaatagtgacgttgcccagctgcttgttgacctcctcgtcgtttcggatggccagctgcaggtggcgggggatgatgctgcgggtcttgtcacgtatggcgctgcccaccagttctaagatctcggcggccaggtattgtaagtacactggcgcaccggctccgaccggctcaaaataattgccctttcgaaaaagatgacggactctgccctattgggaactgcaagcccggtagcgacgaacaagtttttgctttagctccattttccacgtccgcaaatagcgacctatgaaagcagcggaaaactgtgaaagacaagcaagctggaatggcgcctgaacaaatccttttatacaaactgcaaggctgcaataggaagctatcctattggtcaattatgtttggtgctt

SEQ ID NO: 728292 - DNA, 1460 bp, Homo sapiens
aatatttcaaaagtcccgcgcgataaaatcattggctgaagagtgaccagactgattggttcattactagacaatcttattggatgagttgccccaccgcccatcctgtccttttcgtttcagttatctgcagcgacaaattgtctaaaattctagttcatccagtcccaaagaacagagtgtataacaaggtatctaaggatttttaaaatgtaaattccgattcagtaagtttgagtgggacttgaaattctgcattcctgacagtctcgcaagttatcaatgctggtgaacactcactaaaccaccagaaacgttcagactcatgtcgggaaataacgcttatattcagagaatgagattccatgctattttgttactggcgaacagcaagtttccttgccctttgttttctaagtccaagtcacattcccaccctgcctgttctcaaaatgtcttattttggttggccttaagtttcactttgtatactctaaaatgtactttctaaaggaaggtgttattttctcgaaacttaactttttaacaccattaggctaggggggcggtggctcacgcctgtaatcccagcattttgggagggcgagatgggacgatcactagaggccaggagttcaagacaaccctggctaaaatggtgaaaccccgtctcgcataaaaatacaaaaactagctgggcgcggtagcagacgcctgtaatcccaagtacacaggaggctgaggcatgagaaccgcgtgaagcggcggggtggaggttgcagtaagccgatatcgcgccgctgcactccagcctgggtgacagarctagactgtctcaaaacaaaccaatccaaacgaaaagcaaaaaataccctaacagaagcaagttatcatcctttcttgtgtaactatggacggctctgaaaaatgccgtttcaagtgtaagctacgttttctgatttgagtgtttacttgaccttggccttatcgtggctctgttattttggcaacaggacggcctgaatattggacaggacgcctccctgagcaatagtgacgttgcccagctgcttgttgacctcctcgtcgtttcggatggccagctgcaggtggcgggggatgatgctgcgggtcttgtcacgtatggcgctgcccaccagttctaagatctcggcggccaggtattgtaagtacactggcgcaccggctccgaccggctcaaaataattgccctttcgaaaaagatgacggactctgccctattgggaactgcaagcccggtagcgacgaacaagtttttgctttagctccattttccacgtccgcaaatagcgacctatgaaagcagcggaaaactgtgaaagacaagcaagctggaatggcgcctgaacaaatccttttatacaaactgcaaggctgcaataggaagctatcctattggtcaattatgtttggtgctt

SEQ ID NO: 728293 - DNA, 1460 bp, Homo sapiens
aatatttcaaaagtcccgcgcgataaaatcattggctgaagagtgaccagactgattggttcattactagacaatcttattggatgagttgccccaccgcccatcctgtccttttcgtttcagttatctgcagcgacaaattgtctaaaattctagttcatccagtcccaaagaacagagtgtataacaaggtatctaaggatttttaaaatgtaaattccgattcagtaagtttgagtgggacttgaaattctgcattcctgacagtctcgcaagttatcaatgctggtgaacactcactaaaccaccagaaacgttcagactcatgtcgggaaataacgcttatattcagagaatgagattccatgctattttgttactggcgaacagcaagtttccttgccctttgttttctaagtccaagtcacattcccaccctgcctgttctcaaaatgtcttattttggttggccttaagtttcactttgtatactctaaaatgtactttctaaaggaaggtgttattttctcgaaacttaactttttaacaccattaggctaggggggcggtggctcacgcctgtaatcccagcattttgggagggcgagatgggacgatcactagaggccaggagttcaagacaaccctggctaaaatggtgaaaccccgtctcgcataaaaatacaaaaactagctgggcgcggtagcagacgcctgtaatcccaagtacacaggaggctgaggcatgagaaccgcgtgaagcggcggggtggaggttgcagtaagccgatatcgcgccgctgcactccagcctgggtgacagaactagactgtctcaaaacaaaccaatccaaacgaaaagcaaaaaataccctaacagaagcaagttatcatcctttcttgtgtaactatggacggctctgaaaaatgccgtttcaagtgtaagctacgttttctgatttgagtgtttacttgaccttggccttatcgtggctctgttattttggcaacaggacggcctgaatattggacaggacgcctccctgagcaatagtgacgttgcccagctgcttgttgacctcctcgtcgtttcggatggccagctgcaggtggcgggggatgatgctgcgggtcttgtcacgtatggcgctgcccaccagttctaagatctcggcggccaggtaytgtaagtacactggcgcaccggctccgaccggctcaaaataattgccctttcgaaaaagatgacggactctgccctattgggaactgcaagcccggtagcgacgaacaagtttttgctttagctccattttccacgtccgcaaatagcgacctatgaaagcagcggaaaactgtgaaagacaagcaagctggaatggcgcctgaacaaatccttttatacaaactgcaaggctgcaataggaagctatcctattggtcaattatgtttggtgctt

SEQ ID NO: 728294 - DNA, 1353 bp, Homo sapiens
actttccatccttatttctattcttttttcttatcccctttctttatttttctccacagcactcatcacttatctctacattttcattatgtatttaccttattgtgcacctcccactacaagacaagtagcaccgtaaggaaacaggttgtctgctttttcactgctatgctccctgcacctagaacactctctggcacttagcaggttttcagtaaatatatgctgaactaataatgctggatatacatctccctcatgaactctctaaatccttctaatttacattgatcaatcttcttttccatgtgcttttgtatgatttattgctcaaaatctttattttatatgcagaacgtgcactgctatttaatcttcatgtacgtaagtcctcccttctctgagtataatctcttcagggcactatctgagataactttttaacatctccatcatgaatcttgtaccttttcaaagaaaatgagccagtgattactgatgtttacggctattgttgagggtgaagatcattataattttgaaaagggaagttgaatattgtgaagggaaagataacactagagtcagaagacttgggagaaggcaaaaaacaaactaaaaatgagcacttttagtctcctgacagtttctctgaatcaaatccatagttctgtgacagcgttggcttagaagcagattttttttttttttttttttgaaatggagtttcgctcttgcccaggctggagtgcagtggcacgatctcggctcactgcaacctctgtctccagggttcaagcgattctcctgcttcagcctatggagtagctgggattacaggctcccacaaccacgcccagctaattttttgtatttttagtgaagactggggtttcaccatgttggccaggctggttacgaactcctgttytcaagtgatctgcccgccttggcctcccaaagtgttgggattacaggcatcagccaccgtgcccagccaggagcagatttttttacactcatgtttctttttccttctgtcatcctgtttcagtataagcagaccacagatagaagtagtagatacctcagaaattcctggaataattaatccacgttcatctgtactccatctgctcctatctcatggaatataaaaggaaaaacaccaagatttccctaggcaatctgtcttgattttaggttcctcaacaggagagccagacaatggctgtaataatattgtcccggccaaggaaaaacttcccctttgccctcccaaggtttatggaaaattactggcaaaacacagattaactggagaaaaggcatatatatttatttcatcacaat

SEQ ID NO: 728295 - DNA, 981 bp, Homo sapiens
tggctgctaaagcagaaatcagctaagtaaacgaggtctccgagataagtgagctataaacttcaatgctatagttttgacatgtcaagcaacttaacgtgcagcgcgagtccgataaatgagtagctcagctttttagttttaaaaacgagttgtgcgttatttgtacgagagcctaagatgctagctgcctggaactgagtaggtggattaaaatgggtgtcaggtctgttttcccaggcgtatctgacttaacgtcagcaaaagctgtacttttagcttccctggtaacacctgccgtccttaaccgccccctgccggtagcgccagaagcctttacttccatttctagttgagcttggcgtcctgctgagtgacgtcacctcccccttctstggagtaggactggcggttaaagctgctttgctattttcagtcctcaggctggaggctcccctaagcaggctgcctacgcagttcgtaaattcccacttagtagactaagggagtctgttttataaataaggactcaaatttcttctgactccgaggtccgtggcagcagctataagatggaagccccctctgatgtaagattctcagatgacttgcatcttcactgtacctgtcaacccaatagtcttctattcctgccttaaattgtaaattccaaaactgatttaattgtgaaagtttcaaactgtacgacctaggaagtgtcaaagttaggtgaccagatttttagaagtcagccaaatattcagcatctttgatttagtaacaaatatattgatggctacttcagcaaaaaaaatcaactttgttttctggttactttgctaacaagcttctcctgacaggaggatatagtgaataggcagttgaataagtgagttcgggtgagaggtctgagctggagataaaaatgtgtgagtcatcagcagataaataaatgctgagaccagatgagatggctaaaaa

SEQ ID NO: 728296 - DNA, 846 bp, Homo sapiens
gccctgtccccgccagccccagacctctcgtcccgcccccattgcccagtccccaccctcacttccccatttccccactcccgcggtctcttaacgcacctcgtttttcgtccagtggactcagacctgtastcttccaccaggatcggctcctttcccggagctctcgctcttagaggaaattgagagaagcatcagcggagacccatctgtggctctccagagggcgcggcattcagaccccagatccagctgtgagaacggaccccaggctcacaccaggcctgcgggaggcggcccaccagaggcgctagaaaacaagcctcgcggggaggcgcgcagggcgactgcaagctgtagggggcgctggcgccctcacaggccaggggcagggccggcgctgcgggcggggctcctgcggcgtgaggggcggccccaggccagcagctgcgccctggctgggagccggggagcatttgctgctctgctggaccctgagtctggcggcgggcggcctcctctccgctccccgcccgccatcccccaactcccgatctctctgctgcgtctggcctcaggctgagaccccaacgaatcattccccgcatgggaacattttatgatataactgaattcagttttatgtataactgaattacggatatgagaatctcaaatgaggacgaatggtttttacgcacaaaacatgagacacaaatctgtaagaaatataaagtcgtgaccacgtcctttcagaactttaacctgtttgctgaagtacgtcagtaacaatggcagggaaagggtatcttaaatttcaccacagcctcaaagaggccatttcgt

SEQ ID NO: 728297 - DNA, 597 bp, Homo sapiens
cccatgttctttgttctgatagataaaattgccctttatgtgcattgaaaatgattgaatacagatggtcagtttcacctgggtcaacctaggaggcattgttataagaagcggacttgtaagataggtagcttcagtgattattgctatgttctatgaaagaaacttttaacctaaaggattcttctactctgataagtggcctcacttgatattttgtcctggtattcatatgatagctgagatctctgaattctctttttttttttttttttttttttaagatggagtctcactctgctgcctaggctggagtgcagtggcgcgatcttggctcagtgcaacttccgcttcccaggttcaagcgatgctcctgcctcagccttccaattagctgggactacaggtgcgcatgactgtgaccagctaatttttgtatttttttagagacgggtttcaccatgttggtcaggctggtctcaaactcctgaccttgtgaccacccgcctcggmctcccaaagtgctgggattacaggggtgagccaccgtgcccggccttgacatttctgaatttttaacaggtataaatatacaaa

SEQ ID NO: 728298 - DNA, 420 bp, Homo sapiens
ccaccatgcccagctaacttttaaatttttagtagagacggggtttcaccatgtttcatgtttcaccatgttggccaagctggtcttgaactcctgatctcaagtgaccggcccgcctctgcctcccaaagtgctgggattacaggcatgagccaccrtgcctggccaacagctggtttttggaaagagaaaagagacagggtttcctccactcacacatttatcaggtggacactcaacacaccaaaggaccttgaagccccaagatttttatctccaatcacttaatcattcaacaaactctgagcgaccacccaatttgtgcctggccctgtgctaggtcctggggacgcagccatgaataagactggcaaatgtccccaccctcatggagaaggcattctaggagggagacagaca

SEQ ID NO: 728299 - DNA, 1220 bp, Homo sapiens
ttagatgacacatgactgtatttgcctgtttcactgggagtaaactgggaggatcagagagtttaggtagcttgccaaaggtcactcagaggaaaatgggcattaaaatgcaggtttttctaaacccagtagcacctcagggcaccattcatataggctgtgatgagatttgtgccgctggagatgtcccaaaagcttttttcaatataccacgctggactctcccggagctcgcgtgmcttaaaaaaaattaaattaacaaatcaatggcattggtgccagcatggagacttgggtgtgcatgaagtcccagaaaaagaaattccttctcagaaacactgtctttcctacatgtctcctgctctcgttaacaattctgggtaaaggagaagtttctttcttctcttactaagcaatctactcttctctgtaactcctatgtcctcacccttcctgagccttgatagagtgcaaaattctcttcccctgtgatctttatgtcctaaggttgaattattgaaaaaaggtgtgctgtgtgaaaagttatacttaaggctttgccaatgcaaagggccaacagagcccacctggtaggacgataccttttgctagagctatggaactgtggcaaaattgccatcaaacaaattacaccataccatagaaagatgtatcagcactttttgaataaaactactttcttgtagcttagtaacttagctctaaaaatttgttctggaatacaacctgacttgcaaatactatttttaaagtatacatcctttaagagcactaatctgtctttcctaccatttgccaaactaaaacactttccatttttaattaaagcaattttactttttatataatgcggagctgacctctcctatattggaaatttgcaagaacacttttaggaaaaaaaaattaaactatcagttatatagagttccatttccacctgggaagtagaaagctggaaaaagctttactctactcccaacctaacaaaaaaaaggcagataaacttcaaaatcataactttcaaaagtcgaggtcacagagaaacctcaactcctgaactccaaagaaacttcaaagaaaggctcctccaaggaaagacagatttaggcactggatcacatgtgcaaagcacaggaggaagagacattgggcaccatgtaagtggacaagaagaaggtagttaaaacttttaacaa

SEQ ID NO: 728300 - DNA, 1220 bp, Homo sapiens
ttagatgacacatgactgtatttgcctgtttcactgggagtaaactgggaggatcagagagtttaggtagcttgccaaaggtcactcagaggaaaatgggcattaaaatgcaggtttttctaaacccagtagcacctcagggcaccattcatataggctgtgatgagatttgtgccgctggagatgtcccaaaagcttttttcaatataccacgctggactctcccggagctcgcgtgacttaaaaaaaattaaattaacaaatcaatggcattggtgccagcatggagacttgggtgtgcatgaagtcccagaaaaagaaattccttctcagaaacactgtctttcctacatgtctcctgctctcgttaacaattctgggtaaaggagaagtttctttcttctcttactaagcaatctactcttctctgtaactcctatgtcctcacccttcctgagccttgatagagtgcaaaattctcttcccctgtgatctttatgtcctaaggttgaattattgaaaaaaggtgtgctgtgtgaaaagttatacttaaggctttgccaatgcaaagggccaacagagcccacctggtaggacgataccttttgctagagctatggaactgtggcaaaattgccatcaaacaaattacaccataccatagaaagatgtatcagcactttttgaataaaactactttcttgtagcttagtaacttagctctaaaaatttgttctggaatacaacctgacttgcaaatactatttttaaaktatacatcctttaagagcactaatctgtctttcctaccatttgccaaactaaaacactttccatttttaattaaagcaattttactttttatataatgcggagctgacctctcctatattggaaatttgcaagaacacttttaggaaaaaaaaattaaactatcagttatatagagttccatttccacctgggaagtagaaagctggaaaaagctttactctactcccaacctaacaaaaaaaaggcagataaacttcaaaatcataactttcaaaagtcgaggtcacagagaaacctcaactcctgaactccaaagaaacttcaaagaaaggctcctccaaggaaagacagatttaggcactggatcacatgtgcaaagcacaggaggaagagacattgggcaccatgtaagtggacaagaagaaggtagttaaaacttttaacaa

SEQ ID NO: 728301 - DNA, 1220 bp, Homo sapiens
ttagatgacacatgactgtatttgcctgtttcactgggagtaaactgggaggatcagagagtttaggtagcttgccaaaggtcactcagaggaaaatgggcattaaaatgcaggtttttctaaacccagtagcacctcagggcaccattcatataggctgtgatgagatttgtgccgctggagatgtcccaaaagcttttttcaatataccacgctggactctcccggagctcgcgtgacttaaaaaaaattaaattaacaaatcaatggcattggtgccagcatggagacttgggtgtgcatgaagtcccagaaaaagaaattccttctcagaaacactgtctttcctacatgtctcctgctctcgttaacaattctgggtaaaggagaagtttctttcttctcttactaagcaatctactcttctctgtaactcctatgtcctcacccttcctgagccttgatagagtgcaaaattctcttcccctgtgatctttatgtcctaaggttgaattattgaaaaaaggtgtgctgtgtgaaaagttatacttaaggctttgccaatgcaaagggccaacagagcccacctggtaggacgataccttttgctagagctatggaactgtggcaaaattgccatcaaacaaattacaccataccatagaaagatgtatcagcactttttgaataaaactactttcttgtagcttagtaacttagctctaaaaatttgttctggaatacaacctgacttgcaaatactatttttaaagtatacatcctttaagagcactaatctgtctttcctaccatttgccaaactaaawcactttccatttttaattaaagcaattttactttttatataatgcggagctgacctctcctatattggaaatttgcaagaacacttttaggaaaaaaaaattaaactatcagttatatagagttccatttccacctgggaagtagaaagctggaaaaagctttactctactcccaacctaacaaaaaaaaggcagataaacttcaaaatcataactttcaaaagtcgaggtcacagagaaacctcaactcctgaactccaaagaaacttcaaagaaaggctcctccaaggaaagacagatttaggcactggatcacatgtgcaaagcacaggaggaagagacattgggcaccatgtaagtggacaagaagaaggtagttaaaacttttaacaa

SEQ ID NO: 728302 - DNA, 1220 bp, Homo sapiens
ttagatgacacatgactgtatttgcctgtttcactgggagtaaactgggaggatcagagagtttaggtagcttgccaaaggtcactcagaggaaaatgggcattaaaatgcaggtttttctaaacccagtagcacctcagggcaccattcatataggctgtgatgagatttgtgccgctggagatgtcccaaaagcttttttcaatataccacgctggactctcccggagctcgcgtgacttaaaaaaaattaaattaacaaatcaatggcattggtgccagcatggagacttgggtgtgcatgaagtcccagaaaaagaaattccttctcagaaacactgtctttcctacatgtctcctgctctcgttaacaattctgggtaaaggagaagtttctttcttctcttactaagcaatctactcttctctgtaactcctatgtcctcacccttcctgagccttgatagagtgcaaaattctcttcccctgtgatctttatgtcctaaggttgaattattgaaaaaaggtgtgctgtgtgaaaagttatacttaaggctttgccaatgcaaagggccaacagagcccacctggtaggacgataccttttgctagagctatggaactgtggcaaaattgccatcaaacaaattacaccataccatagaaagatgtatcagcactttttgaataaaactactttcttgtagcttagtaacttagctctaaaaatttgttctggaatacaacctgacttgcaaatactatttttaaagtatacatcctttaagagcactaatctgtctttcctaccatttgccaaactaaaacrctttccatttttaattaaagcaattttactttttatataatgcggagctgacctctcctatattggaaatttgcaagaacacttttaggaaaaaaaaattaaactatcagttatatagagttccatttccacctgggaagtagaaagctggaaaaagctttactctactcccaacctaacaaaaaaaaggcagataaacttcaaaatcataactttcaaaagtcgaggtcacagagaaacctcaactcctgaactccaaagaaacttcaaagaaaggctcctccaaggaaagacagatttaggcactggatcacatgtgcaaagcacaggaggaagagacattgggcaccatgtaagtggacaagaagaaggtagttaaaacttttaacaa

SEQ ID NO: 728303 - DNA, 1972 bp, Homo sapiens
gggctgtcacaggcaggacgggctgaggcgscgatgtcaacggcagtgggctgtcacaggcgggcagggctgaggcggcgatgtcaacggcagtggggccgtcacaggcggggcaggggctgaggcggcgatgtcaacagcagtggggccgtcacaggcggggcagggggctgacccgtggggtcagactgaatggggagtgggggccccaggggttggtgggtcctcagggggggcctcctggaaaggacttgaggccaggccttgggaggaggaggcctggatgaggcctggagcagagccagagcccgtgcgaaggcgctgagttcggcaggagacagactgagtgtgggagggacgcagagggcgcagagggtggggccgggcctccactgcggctctgggtgaaccagtcacgcgaggagaatgcacctggcgattccacacatctacagcgagtctcctgagcgcaggcgccggggctgtggagagccgtctccattcagcaggcgccagggctatggggagccgtctccattcagcaggctctggagctatgaagagccgtctccattcagcaggcgccaaaggctatggggagccgtctccattcacgagcgcgcgggctatgggagccgtctccattcagcaggtgccggggctgtggagagtgctaggcggtcgccatctgcacctgctgttttcccaagtcctgttctggacccactaactccagtgactgagctgacttcttcacacgggcatggggccaaagctcctgaccagtgcagggacacggggggtgggacatactcagataggggctgggaaggctgggagcttctgctgagggtggcaccagcagcagctccatgactgtgactgcggccagggcggctccacgacggtgactgcggccagggcggctccacgacggtgactgcggccagggcggctccacgacggtgactggggtcagggcaggagagtgtggaggccagtgaggagggtccacacccatcggtgaggcaggagtcagggtaggctgcagacccggcggagattgcgaggcaggggtcagggtcactggagaaacatggctcaggaaaggcttcagggagaaaaaggtgttggacgagagaggctggtgctcaggggctgcaggggggccgggcctcagcagggagggagggagggactctgggaacagcagagccggcactgaggatgctgccagggaaggcctgacgtgcatggacctggaggatgccactggccaaaagctaggatctcactcacatgtgggatccgaaaaccctgaattcatggaaacagagagtggaaagggggttgcaggaggccggggcaggaagagagatagagaaagcagagacgttggtgaaagggtgcaaagcgttcgttagctggagctgtgggcttcaaggtcagccgcgctgtgtggcggccaccactgccgttaaccacagtacacagggtgctcggtaagtgcagttctgcttccgaggatttatgatgtgggaaaagttttaaattaaaaataagaataataatgtaaaacaatacagtagaacagccgttttcatggccttgccttgcactgggtgctaagtcatcggagatgatttgaagtcctgggggtgcatgtgcaacctctgtacaaactctaggccatttcacatccgggacttgaacatcctcggattttgttatcagagcggcgtcctggaaccaatttccctgaggatgccgagggatgactgtattgtataccaaattgctagaaaatagacttgtaatgttctcaccacaaaaaaacaagttggtgaggtgatggatatgttgattagcttaattgaatctttctgcaacaaatacttacatcagaacatcacgccaaaccccataaaacataaaccccatcaatacacacaattattcaactgaagataaa

SEQ ID NO: 728304 - DNA, 1972 bp, Homo sapiens
gggctgtcacaggcaggacgggctgaggcggcgatgtcaacrgcagtgggctgtcacaggcgggcagggctgaggcggcgatgtcaacggcagtggggccgtcacaggcggggcaggggctgaggcggcgatgtcaacagcagtggggccgtcacaggcggggcagggggctgacccgtggggtcagactgaatggggagtgggggccccaggggttggtgggtcctcagggggggcctcctggaaaggacttgaggccaggccttgggaggaggaggcctggatgaggcctggagcagagccagagcccgtgcgaaggcgctgagttcggcaggagacagactgagtgtgggagggacgcagagggcgcagagggtggggccgggcctccactgcggctctgggtgaaccagtcacgcgaggagaatgcacctggcgattccacacatctacagcgagtctcctgagcgcaggcgccggggctgtggagagccgtctccattcagcaggcgccagggctatggggagccgtctccattcagcaggctctggagctatgaagagccgtctccattcagcaggcgccaaaggctatggggagccgtctccattcacgagcgcgcgggctatgggagccgtctccattcagcaggtgccggggctgtggagagtgctaggcggtcgccatctgcacctgctgttttcccaagtcctgttctggacccactaactccagtgactgagctgacttcttcacacgggcatggggccaaagctcctgaccagtgcagggacacggggggtgggacatactcagataggggctgggaaggctgggagcttctgctgagggtggcaccagcagcagctccatgactgtgactgcggccagggcggctccacgacggtgactgcggccagggcggctccacgacggtgactgcggccagggcggctccacgacggtgactggggtcagggcaggagagtgtggaggccagtgaggagggtccacacccatcggtgaggcaggagtcagggtaggctgcagacccggcggagattgcgaggcaggggtcagggtcactggagaaacatggctcaggaaaggcttcagggagaaaaaggtgttggacgagagaggctggtgctcaggggctgcaggggggccgggcctcagcagggagggagggagggactctgggaacagcagagccggcactgaggatgctgccagggaaggcctgacgtgcatggacctggaggatgccactggccaaaagctaggatctcactcacatgtgggatccgaaaaccctgaattcatggaaacagagagtggaaagggggttgcaggaggccggggcaggaagagagatagagaaagcagagacgttggtgaaagggtgcaaagcgttcgttagctggagctgtgggcttcaaggtcagccgcgctgtgtggcggccaccactgccgttaaccacagtacacagggtgctcggtaagtgcagttctgcttccgaggatttatgatgtgggaaaagttttaaattaaaaataagaataataatgtaaaacaatacagtagaacagccgttttcatggccttgccttgcactgggtgctaagtcatcggagatgatttgaagtcctgggggtgcatgtgcaacctctgtacaaactctaggccatttcacatccgggacttgaacatcctcggattttgttatcagagcggcgtcctggaaccaatttccctgaggatgccgagggatgactgtattgtataccaaattgctagaaaatagacttgtaatgttctcaccacaaaaaaacaagttggtgaggtgatggatatgttgattagcttaattgaatctttctgcaacaaatacttacatcagaacatcacgccaaaccccataaaacataaaccccatcaatacacacaattattcaactgaagataaa

SEQ ID NO: 728305 - DNA, 1972 bp, Homo sapiens
gggctgtcacaggcaggacgggctgaggcggcgatgtcaacggcagtgggcygtcacaggcgggcagggctgaggcggcgatgtcaacggcagtggggccgtcacaggcggggcaggggctgaggcggcgatgtcaacagcagtggggccgtcacaggcggggcagggggctgacccgtggggtcagactgaatggggagtgggggccccaggggttggtgggtcctcagggggggcctcctggaaaggacttgaggccaggccttgggaggaggaggcctggatgaggcctggagcagagccagagcccgtgcgaaggcgctgagttcggcaggagacagactgagtgtgggagggacgcagagggcgcagagggtggggccgggcctccactgcggctctgggtgaaccagtcacgcgaggagaatgcacctggcgattccacacatctacagcgagtctcctgagcgcaggcgccggggctgtggagagccgtctccattcagcaggcgccagggctatggggagccgtctccattcagcaggctctggagctatgaagagccgtctccattcagcaggcgccaaaggctatggggagccgtctccattcacgagcgcgcgggctatgggagccgtctccattcagcaggtgccggggctgtggagagtgctaggcggtcgccatctgcacctgctgttttcccaagtcctgttctggacccactaactccagtgactgagctgacttcttcacacgggcatggggccaaagctcctgaccagtgcagggacacggggggtgggacatactcagataggggctgggaaggctgggagcttctgctgagggtggcaccagcagcagctccatgactgtgactgcggccagggcggctccacgacggtgactgcggccagggcggctccacgacggtgactgcggccagggcggctccacgacggtgactggggtcagggcaggagagtgtggaggccagtgaggagggtccacacccatcggtgaggcaggagtcagggtaggctgcagacccggcggagattgcgaggcaggggtcagggtcactggagaaacatggctcaggaaaggcttcagggagaaaaaggtgttggacgagagaggctggtgctcaggggctgcaggggggccgggcctcagcagggagggagggagggactctgggaacagcagagccggcactgaggatgctgccagggaaggcctgacgtgcatggacctggaggatgccactggccaaaagctaggatctcactcacatgtgggatccgaaaaccctgaattcatggaaacagagagtggaaagggggttgcaggaggccggggcaggaagagagatagagaaagcagagacgttggtgaaagggtgcaaagcgttcgttagctggagctgtgggcttcaaggtcagccgcgctgtgtggcggccaccactgccgttaaccacagtacacagggtgctcggtaagtgcagttctgcttccgaggatttatgatgtgggaaaagttttaaattaaaaataagaataataatgtaaaacaatacagtagaacagccgttttcatggccttgccttgcactgggtgctaagtcatcggagatgatttgaagtcctgggggtgcatgtgcaacctctgtacaaactctaggccatttcacatccgggacttgaacatcctcggattttgttatcagagcggcgtcctggaaccaatttccctgaggatgccgagggatgactgtattgtataccaaattgctagaaaatagacttgtaatgttctcaccacaaaaaaacaagttggtgaggtgatggatatgttgattagcttaattgaatctttctgcaacaaatacttacatcagaacatcacgccaaaccccataaaacataaaccccatcaatacacacaattattcaactgaagataaa

SEQ ID NO: 728306 - DNA, 1972 bp, Homo sapiens
gggctgtcacaggcaggacgggctgaggcggcgatgtcaacggcagtgggctgtcacaggcgggcagggctgaggcggcgatgtcaacggcagtggggccgtcacaggcggggcaggggctgaggcggcgatgtcaacagcagtggggccgtcacaggcggggcagggggctgacccgtggggtcagactgaatggggagtgggggccccaggggttggtgggtcctcagggggggcctcctggaaaggacttgaggccaggccttgggaggaggaggcctggatgaggcctggagcagagccagagcccgtgcgaaggcgctgagttcggcaggagacagactgagtgtgsgagggacgcagagggcgcagagggtggggccgggcctccactgcggctctgggtgaaccagtcacgcgaggagaatgcacctggcgattccacacatctacagcgagtctcctgagcgcaggcgccggggctgtggagagccgtctccattcagcaggcgccagggctatggggagccgtctccattcagcaggctctggagctatgaagagccgtctccattcagcaggcgccaaaggctatggggagccgtctccattcacgagcgcgcgggctatgggagccgtctccattcagcaggtgccggggctgtggagagtgctaggcggtcgccatctgcacctgctgttttcccaagtcctgttctggacccactaactccagtgactgagctgacttcttcacacgggcatggggccaaagctcctgaccagtgcagggacacggggggtgggacatactcagataggggctgggaaggctgggagcttctgctgagggtggcaccagcagcagctccatgactgtgactgcggccagggcggctccacgacggtgactgcggccagggcggctccacgacggtgactgcggccagggcggctccacgacggtgactggggtcagggcaggagagtgtggaggccagtgaggagggtccacacccatcggtgaggcaggagtcagggtaggctgcagacccggcggagattgcgaggcaggggtcagggtcactggagaaacatggctcaggaaaggcttcagggagaaaaaggtgttggacgagagaggctggtgctcaggggctgcaggggggccgggcctcagcagggagggagggagggactctgggaacagcagagccggcactgaggatgctgccagggaaggcctgacgtgcatggacctggaggatgccactggccaaaagctaggatctcactcacatgtgggatccgaaaaccctgaattcatggaaacagagagtggaaagggggttgcaggaggccggggcaggaagagagatagagaaagcagagacgttggtgaaagggtgcaaagcgttcgttagctggagctgtgggcttcaaggtcagccgcgctgtgtggcggccaccactgccgttaaccacagtacacagggtgctcggtaagtgcagttctgcttccgaggatttatgatgtgggaaaagttttaaattaaaaataagaataataatgtaaaacaatacagtagaacagccgttttcatggccttgccttgcactgggtgctaagtcatcggagatgatttgaagtcctgggggtgcatgtgcaacctctgtacaaactctaggccatttcacatccgggacttgaacatcctcggattttgttatcagagcggcgtcctggaaccaatttccctgaggatgccgagggatgactgtattgtataccaaattgctagaaaatagacttgtaatgttctcaccacaaaaaaacaagttggtgaggtgatggatatgttgattagcttaattgaatctttctgcaacaaatacttacatcagaacatcacgccaaaccccataaaacataaaccccatcaatacacacaattattcaactgaagataaa

SEQ ID NO: 728307 - DNA, 1484 bp, Homo sapiens
  misc_feature 408: n = A,T,C or G
agtgacagactgtttcaaaaaaaaaaaaaaaaaaaaaggcttagagtatctttttagacagaactttaacatgtgctttacttttttaccttgtaagaataagaaactagcaagtaaaaacaggaggcaaatcaaaaggttggaaaatcttcatctcaggaatgagggagatactttattgaattgaacaaacaatgcatgtaaactaggagtcacataactaaattgttttcagtggctgggcaggtaagcacattggagctgctgccagtctgttctagctggcaattgctctgtttcccagtattgtgctctgattgccagcccctcagctgttttaaaaagaagctggaaatctgggtttttatatggataactcattcacatacacacgtgtgcacwttggcncgcgcgtgtgtgtgtgtgtgtgtaaacttagaaagggccaagccataactgcaggctaaatttggctctcaaggggccaagttgtgacctctattttaaacaaagtacattattttggcaagagaaactagtttacaaggaaaacatgttgaaataggccctggatttatcttagttgtaatctttcctaatttgatctgagattttaagcatgaaatgagagttaaagaattgactagaaaagtgatcattctactaaggtaattgaagtttcctgttgcatacagatgcatactaagccttcttttgagtgtggggagtcaggatcatgaggtagtgcaactgtattaaacagtgaagtagaatgtttctgttggaagaagctacaataaagttcagagacagcagacagacttgataagcagtccctctaacaattgtgacagagaactactttggcatagtgttactgtacaatactaatcaccgaaaacatcaggaaatgttatcctaaccctaaaaatattcactaaaactacaacatgaaaacttctctggcacggcaagctgcattcccaaatagttccacttgcttctattttcatctggtatgtatactatgtatattataatagatgagatgtcttaagtagcagtgggctagagaactgtatctaactttaaggaatgtgtaagtgacaataagacactttttatttttacttaagaaagatcttatctggttcagtggtaaaaatctgtcccatcctgggctaacatggtgaaaccccatctctactaaaaatacaaaaaattagctgagtgtggtggcaggcacctgtagtcccagctactcaggaggctgaggcaggagaatggtgtgaacctgggaggcagagcttgcagtgagccgagatcgcgccactgcactccagcctggctgcagagtgagactccgtctcaaaaaaaaaaaaaaaaaaaatctgtcccaaggtgaacacctttttaatattctagaaaatcttttgaggtttaaaagcagtctgtccaagtaatttgttcagaacctgtcaaaa

SEQ ID NO: 728308 - DNA, 1484 bp, Homo sapiens
  misc_feature 408: n = A,T,C or G
agtgacagactgtttcaaaaaaaaaaaaaaaaaaaaaggcttagagtatctttttagacagaactttaacatgtgctttacttttttaccttgtaagaataagaaactagcaagtaaaaacaggaggcaaatcaaaaggttggaaaatcttcatctcaggaatgagggagatactttattgaattgaacaaacaatgcatgtaaactaggagtcacataactaaattgttttcagtggctgggcaggtaagcacattggagctgctgccagtctgttctagctggcaattgctctgtttcccagtattgtgctctgattgccagcccctcagctgttttaaaaagaagctggaaatctgggtttttatatggataactcattcacatacacacgtgtgcactttggcncgcgcgtgtgtgtgtgtgtgtgtaaacttagaaagggccaagccataactgcaggctaaatttggctctcaaggggccaagttgtgacctctattttaaacaaagtacattattttggcaagagaaactagtttacaaggaaaacatgttgaaataggccctggatttatcttagttgtaatctttcctaatttgatctgagattttaagcatgaaatgagagttaaagaattgactagaaaagtgatcattctactaaggtaattgaagtttcctgttgcatacagatgcatactaagccttcttttgagtgtggggagtcaggatcatgaggtagtgcaactgtattaaacagtgaagtagaatgtttctgttggaagaagctacaataaagttcagagacagcagacagacttgataagcagtccctctaacaattgtgacagagaactactttggcatagtgttactgtacaatactaatcaccgaaaacatcaggaaatgttatcctaaccctaaaaatattcactaaaactacaacatgaaaacttctctggcacggcaagctgcattcccaaatagttccacttgcttctattttcatctggtatgtatactatgtatattataatagatgagatgtcttaagtagcagtgggctagagaactgtatctaactttaaggaatgtgtaagtgacaataagacactttttatttttacttaagaaagatcttatctggttcagtggtaaaaatctgtcccatcctgggctaacatggtgaaaccccatctctactaaaaatacaaaaaattagctgagtgtggtggcaggcacctgtagtcccagctactcaggaggctgaggcaggagaatggtgtgaacctgggaggcagagcttgcagtgagccgagatcgcgccactgcactccagcctggctgcagagygagactccgtctcaaaaaaaaaaaaaaaaaaaatctgtcccaaggtgaacacctttttaatattctagaaaatcttttgaggtttaaaagcagtctgtccaagtaatttgttcagaacctgtcaaaa

SEQ ID NO: 728309 - DNA, 596 bp, Homo sapiens
cctccacctgaactcaagtctgcctatgtttacctaatcacacctggtggacagtttggacaaacttgcacactcagagacacagacacttctagaaatcattatctccctgccccggggaccccactccagcagaagtctgctaggcactggcctgggccctcctgctgtcctaggaggctgctgacctcctgcctggctcctgtccccaggtccagagtcagagcagactccagggacgctgcaggctaggaagccgccccctccaggccagggtctagtgcaggtgcccaggacaagaaagattgtgaatgcaggaatgactgggccacacccctcccgtgcacgccccctcytgccctgcaccccacagcccagccccccgtgctggatgcccccccacagcagaggtgctgttctgtgatcccctgggaaagacgccctcaacctccaccctgtcccacggcccaaggaagacaagacacaggccctctcctcacagtctccccacctggctcctgctgggaccctcaaggtgtgaacagggaggatggttgtctgggtggcccctaggagcccagatcttcactctacag

SEQ ID NO: 728310 - DNA, 1102 bp, Homo sapiens
tgtgggtgggtaaatagagcacaaacgcacctaagcttattagtctggtacagctgctacggtttttaatattcccttctaagcctttttcttggcatctgtgtgagtgttgttgtgcgactgtctaccgcgttccctgcccgctctctgctgtgtggcttccgtgttgtcttctgccggccacttccccgggctttgtggatccgactatgaaatagtgatgctggtgctgtcttcctcacatgcagtcctggcttgaggatgttctgctagtttttgcagctgttgcctgctctgcttaatacagctcttgctgacccatcaggacttctggggaccgtagccaagcagaggctgcaggacacggccctccagcaccttctgctcctgcagcgggcggggcgggggatggtgtctgatggcgggggcggtgccggcttgcctggccaacttactgatccaagccctggagcagctgaccttgggaggagttggggaggaggggccctgcccacccagcagggctgtctccaggttgaaacgagctcccagctgcagcgctgtctgtgcggtgcctggtgccatgaggggagcggtggcagcagagctccatgctcattggggacccagctgagcaagtccctcctccagcgccagggagaggattttaaaagctgctaccactgtccctccacagccggcaggaccgggatttcttcctctgtgtctcttgacagcagagactgcagcatgacaaagcctcagggtcgtcgtgagctgcccgacccaaatccctcaggctggccaccaccacgcacacggggcttcagggagcgctgggagggccaagtgaactggttttgtttgaaaggtctttctcatgagaggctcgaggagaggacgcagcccaggtcttgggccgggacccccgctaccactgggacccccgagggttttgctgctgatggatgaagaggctcctgtggaactgtggcctctgctctgcacctgagccccgggggtcatagaggttcttggggtggactgcrgtgcggggcggcgaggggaccgcaaggaggcactccttttggctcctggcaac

SEQ ID NO: 728311 - DNA, 447 bp, Homo sapiens
gatcccacctgcatctgaagaaaaacctcccttgtcagctttccgttgaggtctccaacacgtatacggttccaggagcctggaggggcccttttgacttatgagatgtgaatccaaagtttgaggccttgaagttttactgccgtgtgggtggtgagaagaacttggtagggtctcttccaatggggttcaagggcagtctctctctgatgtcgtttccagaagaccaaatctccaggttctagactgtgaaaggtttgattgtcctcagtcaatggtgaaagtacactttgtcacaatgcattaaactcttgcagtattggccgggcgcggtggctcaygcctgtaatcccagcactttgggaggctgaggtgggcggatcacgaggtcaagagatcgagaccatcctggccaacatggtgaaatcccgtctctactaaaaataa

SEQ ID NO: 728312 - DNA, 590 bp, Homo sapiens
tggatttgggaccatgtaaagtcacagccaaatggtacaaggctgagggggccagctgctgggggtctgttgctctgagccccctcggggaagctcagccctgtgaccacactgctcccttcattcccccaccggaggttcacagccacgtaccccagcctggcaggcatcacttctcctatttcatggaagagaaagctscgttcctgggagcactgggcaaaggccctgttgggatgcccagcaccctgtccactcctgccttctgtctccccagtcagagagactgggcaggaactcagaggccagagatgcccacatggcctcccccgccaggcctgtggccaggccagcccagccagcagtgggatgccaaggtctgtgggaggccaggtgtaaaaatctcgggaatgatgattgtttcagtctgtctggaccgcaaagcctgactgcgctcccgcccgctctgttcctcccagtgccacggggcggatgggccagggctgctgattggttgccggactccaccctcccagcggtggtgagatcatgaggctcatccatacgtcctgtcagctccccagatataa

SEQ ID NO: 728313 - DNA, 590 bp, Homo sapiens
tggatttgggaccatgtaaagtcacagccaaatggtacaaggctgagggggccagctgctgggggtctgttgctctgagccccctcggggaagctcagccctgtgaccacactgctcccttcattcccccaccggaggttcacagccacgtaccccagcctggcaggcatcacttctcctatttcatggaagagaaagctgcgttcctgggagcactgggcaaaggccctgttgggatgcccagcaccctgtccactcctgccttctgtctccccagtcagagagactgggcaggaactcagaggccagagatgcccacatggcctcccccgccaggcctgtggccaggccagcccagccagcagtgggatgccaaggtctgtgggaggccaggtgtaaaaatcycgggaatgatgattgtttcagtctgtctggaccgcaaagcctgactgcgctcccgcccgctctgttcctcccagtgccacggggcggatgggccagggctgctgattggttgccggactccaccctcccagcggtggtgagatcatgaggctcatccatacgtcctgtcagctccccagatataa

SEQ ID NO: 728314 - DNA, 801 bp, Homo sapiens
gctttgggataactgacactgaagcctcagtagtttttgttcaccctgatcctgatcctttaaagcagtccctcacccccaattcctgtgacccacacaaccgataagcagtaaggtagactgagaacgtgttatttcctttggtaacaatggtgtctagagaaagcagttcagttcaacaaagatcacaggtcagaataaccatcactatggaatctgttcttcctcctgccctgctccagttgtcttccaatttgcgcccaaattttcaccctgctccttatctttaggcttattaattgacttgggtatgcctgggttggctagcagtgcaacagtaagggctttgctttggattagtctgttcagctgttttctctgtcagctgctctgataagacaacttgatctggctgtcacccaggtcacaccattactcttctcaactggcaacttgctaggtctccccttccaggccttcttaaaccttgtgctttttcctagattgtgcaagaacagatatgaagttaactgatcttaccccagtaacttaccccagactgtagagcagggatgataatggacctgtattgggtgggaagttgggggagggcacatggcagatttggaagaactttytcaggattagggtttgggtaataatgctgtattagggttcctcaaagaaacagaaccaatagaatacatatatatatatacacatatttatttcatccttttccattgaatatatacatacatatatatgtaggtatatggagagagagggtttatatatgta

SEQ ID NO: 728315 - DNA, 651 bp, Homo sapiens
cattaaagctagaaattaatcacaatgtgtaatcaaaacaatgtgagaaaaccacttggaagttaaacaacattctatttaaataaggattggttcactgagaagaartaaaatatataattacgtgctattttgaaaatagcaaaaatgagaacaatatttatcaaaaccattggagaaaggttaccttttatctaaaatcaaatctcttaaaatctttcattgtcaaataaaaaaagtaattagattaagcatttaatttataaacttaaatagccaaaatcaacatcaagtaaaaacgaaatgatatttttcaattatgaataatatttaaagttattaaactctggaagtgatttctagacttttaataatgggaatatgacaaaactagatatccagagagaatttctcagaacaacacataaaatgctgggtaaaatatgggacttgagtttttaaatgaataactagaaagtaatacaaatttcaaaaggccaaaaacaaaattaaagaagcagagagagagagataagtgagccttattatgccatttgccctttgatcttatgtcatcccctcatggactacagagggaattttaaagggttccatgtgtgttggggataagatataatcagaagaaaaaaa

SEQ ID NO: 728316 - DNA, 651 bp, Homo sapiens
cattaaagctagaaattaatcacaatgtgtaatcaaaacaatgtgagaaaaccacttggaagttaaacaacattctatttaaataaggattggttcactgagaagaaataaaatatataattacgtgctattttgaaaatagcaaaaatgagaacaatatttatcaaaaccattggagaaaggttaccttttatctaaaatcaaatctcttaaaatctttcattgtcaaataaaaaaagtaattagattaagcatttaatttataaacttaaatagccaaaatcaacatcaagtaaaaacgaaatgatatttttcaattatgaataatatttaaagttattaaactctggaagtgatttctagacttttaataatgggaatatgacaaaactagatatccagagagaatttctcagaacaacacataaaatgctgggtaaaatatgggacttgagtttttaaatgaataactagaaagtaatacaaatttcaaaaggccaaaaacaaaattaaagaagcagagagagagagataagtgagccttattatgccatttgccctttgawcttatgtcatcccctcatggactacagagggaattttaaagggttccatgtgtgttggggataagatataatcagaagaaaaaaa

SEQ ID NO: 728317 - DNA, 1120 bp, Homo sapiens
ggaactccccacagccatgctgctcgcgcccacacccttgggaagccaggccttccctggcccacactgtgccgtgctccctgcgttttgtctgtggtgctgacccccgggcacgttacaccgtccttgtctctgccccactaggatgagagttccatgaggacagcaactcggctcgttccggccaggtccctggagcatagagcagataagctagctatcacagactccgtcgcctggtcaaaggctgatgaggatgagatgtgagccctgccccttatcctgtatccacttcctgctggtgtggctgtggcttgtgccttttatttaaaagaatttgggttggcctggccgaggggcacagcaggtctcatggtctcggtagactgggccagtcaggcccttgagtttggtctccatggagacgaggcattccggcactcgaaggttacatccacatgggcccaggagtggctgtatctgtgggtgcagccagggttccaggacacacctgtgcaggagaaagcgggtaggaccaacctcagtgaactrcctttcgggagattcctcagaagccaccagccaactcttctggaagccaaggtcttggtgaaaatgggtcttaaccatctggttctgttggcttgaaaataaggtcaaactgccaagactggtggaaaccctgccccgcctagcacccagcgtcagtttgcacactgggctctagcatgcacacggccccccgcggcagaaaggggttctcctgtgagccttctcacgaagcaagtggctcacggcctttcgtgccaagtttgtctgggaaagaggggttctgttgacgtttctggctgtgaggagcacaggctatggtgacctccaactccccaagtcccctcctttcagagagtgctctcaggggccagcccacggccctccctcttcaagaagacagtggctttacttcgttccggctgtgccaggacttgagcagccacagccttggcttacccccccgcccaccggtaggcgcacagcaagggcaccatcctgctgcagggagctcgcagcactgtcctcacgctgccttgacaccacagaacccgtgcgtggagctcagggc

SEQ ID NO: 728318 - DNA, 1050 bp, Homo sapiens
ttgtttggccacgtggttttgcatcctcagcctctttctttgcctttaccttcaacagtttcccagtcctacgtctaaattcctgggaaagggactctaattggctaacttaagtcaggtgcctcccatccccagcaaatctcctgtggccagagacccaggatcacctgacaaatgagagggtgagaaggggcattgaagaaggctcaccagcatttgggcagaccatcatgacgttcattttgacaggaatgaatgagaaaactcttgaatcctcctcaagaaccacggctgctccttacaagcaggtgcagggtatgagcaggatcctcctgctttgtctccctatcaaatggttagtgtttgtaatgctagatgcccttttaagcttcacagacaagaaaggctggctgaacagacgtagaatatgaaaaatgaattttctattctataaacataccaaactccagtgcaaacaagaaaatatggyacaacataaattactattatcttcagtgcatgttatgcttaatagcagcttattgaatctcttggttatgtaaggcagttctgtgatgatgaatttttttttttttttttttttttttagttttctggaggtaattgaatacagaaaagctattacttttacttaaggcaaaaaatagcgtgatgtggaaaatactctgggataaaagtcttttcttatttagccacaagttagcagtgatacagggttcttccatctggggacttgttccctcaaatacaaaatgaggaggttacacctagggatgcatgtctgaggtcctgttcactgctgatatgatctaggtttttttgtgatatcctgtggatagaaatattgtgactatgtatgtatcctagggatgtgggattagtcatggtcctagctggaaataagtggcatactcaaaggactttttgtgaaagtttaacacaaggattggttatggaggtttgggtggagttgagaggacccataaggggtggtgaagcatccagagatgagcagtaatgggaagctat

SEQ ID NO: 728319 - DNA, 626 bp, Homo sapiens
cgggctttgcatgactgatgcagggggcagcatggaaggtgatttctctgagatggactccctggctacctttacgcccccatgccctcgcatcacattattccttcctgtaggctttgcgacacatcaccatttgaaagcctcttctttgtggattcatttgtttacttgctcactctctgttcccctagaatataagctctctaaaggcagagactttctctgtcttcttcactgygtccttgggaaacttgggaacttgtgcctggaacccagtaggagctcaatatatgtgctgaatgaatgaatgaatgaatgaatgaagtgaatgaacaaatgactgttctacttgtctgacttgtattcttctcacctggccccctttacctgcctaactccttcatgtccttcaagttcaggtctgctgatcatctctctctctccctctgctctctctctctctctcacacacacacatacacacgaacacacacacacacacaaacacacacacacagttagttgcccctctcctctatctcccacaataacacccagcatttactgctcactgtatgtaacactttgcattatggttatggtccctcccccaagctctgagctcc

SEQ ID NO: 728320 - DNA, 2342 bp, Homo sapiens
gataaaataaaaccaaagaagttatcaggtgacaacagttaccctgaagtaaacaagtgagtctaaaattcgaaaatcagagtcaattgctgggcatggtggcgcacgcctgtagtcccagctacttgggaggctgaggcgggaggatggcttaagcccaggagttcgaggctgcagtgagctatgatggtgccactgcactccagtttctttaaaaaaaaaaaaaaaaaaatcaaagtcattcatgctaactgcttttgagtggtctccatggcaacttgccaacaggcaagactgaggtgagtttaaggcagctaagcctgagaatgtaaaattcaaagtccagctgtgggtcaccgttatctctagctagtgggttgacaagcagtttttgctttcttgattgttcctttctgtacagactatatgtgttaccgtgagcatgccctgcttttaaaatcacaaacaaagtataatgctattttcattttgaaaccaaacaacacctaattatgtatctaccctgattctctcattcattttctctccctctacacacacacacacacacacacacacacacacacacacacacgtccccactctcatccacttcccactttcacctcccactattccaggcacataggctccacccctacccactccttcctccttcccccaggtcctagatggggtcctagatgggaggggagggagtggggggctttcatctgattccccagtctcttcatatctggctctagtttactgtctcaagcctgatgccaggttgtctcctcagaggagtgacagactttgacatagacaggctttggaatcagaagagctctgtcacttcctatctgtgtggccctggccaagtcacttaacctctctgaacctcagtttcctcttctataaaatgaggataaccagcttggaggattataccatgattaaatgaagtcggcttgcaccgaataaatgcctgtcaccccatactatactgaccatctttggggtcttcgttttactctaaagctgtcagtttttcctctggccaagactgaggccaagatctccctatgtatagctacagactcttaatcaactgggacttttctgcttggataaagtgacaccttttaacattagagctggaaaatctcccaaaagcaaaccattgaagagacagaaaccaaaatatgactcgactctttaaaaagctcctccctagttgtttaaggttctcagcttgcctttgcagggaaatccacaaagatctcataaatatggtcttcactgataaagaagagaacagaccaatgaaaccctgacagtatctattctctgatcttacattttgtccaattattagaggaggagcgggaagaaggaggaagaggaaggaagaagaagaggataaaaataasaaatggtggtatggatcagatgattcttttaaaagagaggaaaaaaaaagaagtagtcaagaatgaggtaggtcaatgctgttatgctttgccggagaagcaagcttggatcgaacatttaagtgactctttcagagactaaaacaagtcagcatcagaaatagggttagaatttggagctcacagttagtctgcaactgatactaattttaaaggtgtcgccgggtgcggtggctcacgcctgtaatcccagcactttgggaggcccaggcgcgtggatcatctcaggtcaggagttcgagaccagcctggccaacatggtgaaaccccgtctctactaaaaatacaaaagttagccgggcatggtggcgggcacctgtattcccatctactcgggaggctgagtcaggagaattgcttgaacccagggggcggaggttgcagtgagccgagatttcgccactgcactccagcctgggtgacagagtaagattccatctcaaacaaacaaaaaaaaggtgtcaatgcaaaaccaggtttcaaggtagctagctcaatctgctaaatttttcatgcctgtgcctttaaattcccaagcagcattgcctgtttctgagtagcacttgttctcaatttttgtttttttccaagaaaatgacttgaggtagaaaagcacatacagtcaaattaccttctgaaggttttatgaaaaattatttttttaaactgtagttaaagataaacacgatttctccaaagctgagctactttatcaagtcagacaaagcataatacagtttccttttaaaaacccaaattagctgctatcatcggtgatgatctggatgtgatacattacagtttgcagaatcaagcagcctactacatacttggaagcatcgttca

SEQ ID NO: 728321 - DNA, 753 bp, Homo sapiens
tccgttttattcctgcaaagtaaaatattcataggttctgggaattaggatatgaatatcgttcagaagcactattcaytgtgacttacttgaacgttctttcatattttatgcggtaagaaaaaccctgaatcatatttaaaaatccttctcccaaaccaagagggagctgagagaccaacgaatgactcggacaagtccatcttggtgagtagatgagtttattaggacttacatatgaggcacccctggatggcaacaggacagctttagagatgcatgccttttcccatccataagctgcttagaaactaattttctggctctttgcctactgtgtgtgtatgtgatgggactgttcttgatagattctcagattctctctgagatgtctagattctcagggacacctcttcttcagctgggcacaatggccttgacttatcacctggccttcagggttcgggcagtgggcatccaccattaagtaacctggtgggagacccatcatactacaatctaccccattccccagctcttaccttctctccacaaatttttcatgagaatcccagagcagggcacaaggggaagaactatacgggtccataatgtatggccatagcttctgtttatagagtacatccacagtatacataacagcataaaaatcagaagctaactataattatgatgcctattagcaaaacataactccaatgagtaggtaaagtatgcagccaatttgagaat

SEQ ID NO: 728322 - DNA, 753 bp, Homo sapiens
tccgttttattcctgcaaagtaaaatattcataggttctgggaattaggatatgaatatcgttcagaagcactattcattgtgacttacttgaacgttctttcatattttatgcggtaagaaaaaccctgaatcatatttaaaaatccttctcccaaaccaagagggagctgagagaccaacgaatgactcggacaagtccatcttggtgagtagatgagtttattaggacttacatatgaggcacccctggatggcaacaggacagctttagagatgcatgccttttcccatccataagctgcttagaaactaattttctggctctttgcctactgtgtgtgtatgtgatgggactgttcttgatagattctcagattctctctgagatgtctagattctcagggacacctcttcttcagctgggcacaatggccttgacttatcacctggccttcagggttcgggcagtgggcatccaccattaagtaacctggtgggagacccatcatactacaatctaccccattccccagctcttaccttctctccacaaatttttcatgagaatcccagagcagggcacaaggggaagaactatacgggtccataatgtatggccatagcttctgtttatagagyacatccacagtatacataacagcataaaaatcagaagctaactataattatgatgcctattagcaaaacataactccaatgagtaggtaaagtatgcagccaatttgagaat

SEQ ID NO: 728323 - DNA, 609 bp, Homo sapiens
tgtcaggattcaaacccagacatacagaagcccaatgcctcccacctttcctcaaagccatgctgctcagagctgacttcctgtggtgtttttgttggctgtgacatggtatttgaagcaggaaaacaaaacaaaacaaaaaagatcttaacttggaggacaggagagagaaactgtagagatcagtaaaataaatgaggaggtttatccagtcatctgtactattaattgaatttagctctctactagctaagtgctacacggctccatggtgattatcaaggtagtcaggatttcaaatggtgctgataactaagtgtaataggattatgcattttttttcttttagagttgaaacaaaaaaaggccctttaagctgaggttttcaggttgtttttttcctgttacaaactagtccagaatgatcccagagacctcaaggagtgttagagcttatttcacttatatagggaaaaagaaagacagagtatttgctaggtagatgcatactcttctagctcttcttgcctcaatctggacttagattcaatggactaaacttagcagaaaagtcacacggagaaggcaatgaacayagcacatgcctaa

SEQ ID NO: 728324 - DNA, 1125 bp, Homo sapiens
ttggggacttcccatttagtgatttcagcaaggggaacctaacacctgcttttgttgttggcagcccttgaggcaactgcttcaagcacaatgcttaaggcagtgttccagtgctggtgtasgctgaccaacttgttttggttttcccaggccgtacccatttttagcactgaaagtcccacatcttgggatctcttcgttcctggcaaaccgggatgattggtgattggtcaccctagtgatagacatacccagaggtgctggtggagatgttagaagacaacaaatacacaaagaaactgctaggtgtgtctcaaagagtctcaacatttcttcaaagcacatatccttggctccattttaaagataggcaggttcaggggaagtataggaatcctggatctgaaaggtgttggttctagagatcactaaagttcagcctctattttttaaatgcttatcaaacatttgcagagatactctgtcaccccatctggtgattattattattattgttattatacttgagcataggcactatggtaagaattttatgttcagtatcttgtgtaatctttttttttttttttttttgagatctgtcggagcgcagtggcaccatctcgcctcactgtaacctctgccttccaggttcaagcacttcttgtgcctcaacctcccgagcagctggaattacaggcatgcaccaccatgcctggctaatttttatagttttagtagagacagggtttcaccatgttgactagttactgactaatttggaaccccactgatcctacaaactgccggaagtttgcctctgccctgggtttcaaatagcggcctcctacttaacctgagaagtgtagaaggttgaaaacttgggctacagcagcccgaagcctgtccatcctcccccagcccccggctgttgttgctcagggcaaaggctctctattcacacattttttcacagcagaacaacctcccaagcaacttccaagcaataagagtctggagacaggcattctctagagatggctctggtctttgcttgctaggtgccattgggaaaattgtctcagtatcccatcagtcaaattgaacaaataacattggttcccc

SEQ ID NO: 728325 - DNA, 644 bp, Homo sapiens
tgcagagagccatgatggcaccactacactccagcatgggtgacagagcaagaccctgactcaaataaataaatgtaacataaacattaaaatctgctcaatacaatatcatgtaactacagagactctttagcataatacagataaaagagtataaaacatattaagtggcaaactatatttcttattctattatgtaatgccataattatacactggcaaaatgatataatggcaaataagctggaataaatttgagtaagttgattaaagtatggatgaatgtttctctatctcaatattctataatgttgctttgattttacttatgtaatacattttaagatttcaccatcaacaatatattgatagctaaattaatgaaatctttgggaacaatattttcaaataaacacagacaacagaaaacaaaaatctggatgaaccgtgacaaataagtatggcctgcccaagtgacatctgcttcctccacatctcccatcccccagatgtcactcaaatccaagttstcatcactcacttcctggacactcaacggcctcctaattggtttctctacttccagtctcttaacaacccccacaacaatccattctctaaaacttggccatagagagttttaa

SEQ ID NO: 728326 - DNA, 618 bp, Homo sapiens
taatagcatataagttaggatgtagttagagtgttctcaagtcattgcattgtctgtgaaaggcaagattaggctgagcgcagtggcttacgcctgtaatcccagcactttgggaggccgaagcacatggatcatgtcaggagyttgagaccagcctggccaacatagtgaaaccctgtctgtactaaaaatacaaaaattagccaggcgtggtggcaggcgcctgtagtcctagctacttgggaggctggggcaggagaatcacttgaacccaggaggcagagcttgtagtgaaccaatattgcaccactgtactccagcctgggtgacacagcaagagtctgtctcaaaaaaaaaaaaaaaaaaaaaaaaaaaggcaagattaacaatttagactttgacaagtcagacagtcatgttatttctatggtaaccatcaaaaggacattaaaaaatgatagaaaggaatattgaatattaaaaaaatttcaagcgaacacaagagaaaagaaaaaggggtggagaaaaaagaaaatacatttaaacccagtttaataagtagttatattgaacatcatcatcaaagaatgtcagactagaaaattagaggatgaatca

SEQ ID NO: 728327 - DNA, 618 bp, Homo sapiens
taatagcatataagttaggatgtagttagagtgttctcaagtcattgcattgtctgtgaaaggcaagattaggctgagcgcagtggcttacgcctgtaatcccagcactttgggaggccgaagcacatggatcatgtcaggagcttgagaccagcctggccaacatagtgaaaccctgtctgtactaaaaatacaaaaattagccaggcgtggtggcaggcgcctgtagtcctagctacttgggaggctggggcaggagaatcacttgaacccaggaggcagagcttgtagtgaaccaakattgcaccactgtactccagcctgggtgacacagcaagagtctgtctcaaaaaaaaaaaaaaaaaaaaaaaaaaaggcaagattaacaatttagactttgacaagtcagacagtcatgttatttctatggtaaccatcaaaaggacattaaaaaatgatagaaaggaatattgaatattaaaaaaatttcaagcgaacacaagagaaaagaaaaaggggtggagaaaaaagaaaatacatttaaacccagtttaataagtagttatattgaacatcatcatcaaagaatgtcagactagaaaattagaggatgaatca

SEQ ID NO: 728328 - DNA, 618 bp, Homo sapiens
taatagcatataagttaggatgtagttagagtgttctcaagtcattgcattgtctgtgaaaggcaagattaggctgagcgcagtggcttacgcctgtaatcccagcactttgggaggccgaagcacatggatcatgtcaggagcttgagaccagcctggccaacatagtgaaaccctgtctgtactaaaaatacaaaaattagccaggcgtggtggcaggcgcctgtagtcctagctacttgggaggctggggcaggagaatcacttgaacccaggaggcagagcttgtagtgaaccaatattgcaccactgtactccagcctgggtgacacagcaagagtctgtctcaaaaaaaaaaaaaaaaaaaaaaaaaaaggcaagattaacaatttagactttgacaagtcagacagtcatgttatttctatggtaaccatcaaaaggacattaaaaaatgatagaaaggaatattgaatattaaaaaaawttcaagcgaacacaagagaaaagaaaaaggggtggagaaaaaagaaaatacatttaaacccagtttaataagtagttatattgaacatcatcatcaaagaatgtcagactagaaaattagaggatgaatca

SEQ ID NO: 728329 - DNA, 1384 bp, Homo sapiens
tataaccaatattttccaaggaaaccattatatatgtcctgcctcatcccagctctattggggaatttcaggtgaaatttgttttttaatrtcaacatagttatgaaatgacaaaagcactagaaagtccccagccaaacatcccttctccctctggaagtattatgggctattctaaggatactgacaccatgggatttcaactgaggtcactgcatttgtgttatctgctgttcttccccaggtccttttgcagcctattaaaatctcattcacaggttttccaaggtataaacaaattcattgttgtcttctatggcatcatcaaacctatgctccacaccacctctacaacttgcatcaaagatgtgaaaagtccctttaggaagcaggtgattttgactcatacaccaagacatattgcatgaagctcatgtatatctgggaaaccaagcatcagataattcacttctgtacaaacagacacctacaacccctcagcaccacgccaaacactttcaggactcaagacatggtcctagctcttaaggaagatgcaatctagttggcagtggggagaggaaggaaatataagtatacaagtaataatataaaaacaaaaatatcagcagaatatagtaagtgctacatacttactctacagagaaagagaaagaattcacttcacattgataaggtgggttcatgtgaagcttcaggaagaagttgacaacattggaagtgatattttcagcataagaattcagagacttggataggaggataaagcagtggagggtcactctaggtgagggtaacagaagaaacagaagcatggactggcaaagagaatgatacaaaaagggagagagatctcctttgagcagagaaggaatgtcaggatgattgagaagagaggatagaaaacatagcacttatcccagccaggaattgtcattttgggaactctggagccagacttcctggattcaaatcctggctctgccacttaactggctgtgtcaccttaggcaagctgtataatttctctgggtctccattctccaaccataaaatggagaaaataatggtacctataccttatacagttatttttgaagatataagaagttaaaccacgggaagtagttggaacagtgtaagcatgcaataaacgttagctattatcattgttctctttaattttcccatcacttaatagagagaacttctctatgtaactcaccatttctgacttctgtttatacttacaactacttgggacacatagcatgagaccagcctatgttcaaagtatatatgaatatatgtgattaaatgagtgaatgagtaatgaatgtatgaatgaattgcactgggatcc

SEQ ID NO: 728330 - DNA, 596 bp, Homo sapiens
ccatccaacaattctccaaggattccttgttccttttatttaataatggcattttgaaagcaagatatgaacaattagttgtgcttattgctattggggtgttgtgactcccaggccctctaagtggaaggaatcaggcaatatttgtatatacacagagagacacacacacaaattctcacactcatatacattcacacatttacatctatatttctgtatctgtatccattgaagccatgacttcacactgatacctaactccaatacaataccaccaggttcattctagttttctccctttctatatttgtaactctcttcaatgacaatgagaaccttggatcccattacctttayttgaccaatccccctatatgtaaacaatctcccatttcctgcactcctcgttccctgcttggaagctccacttgacatcctcccaactgtggattacagtccctgttttccaacccactttgtaaacctgttctggctgagaagtagtgcaacagacttcctccctacccaactcctaccatacaggtaccttcctcacactgttagcagcatggacatgcttcttaacctgctca

SEQ ID NO: 728331 - DNA, 2018 bp, Homo sapiens
cctcaacttactcaactctaaaaagtcggttctggccgggcgcggtggctcacacctgtaattccagcactttgggaggccaaggcaggcggatcacgaggtcaggagatcgagaccatcctggctaacacggtgaaaccccatctctactaaaaatacaaaaaattagccgggtgtggtggtgcatgcctgtaatcccaattacttgggaggctgaggcgggagaatcgcttgaacccgggaggcagaggttgcagtgagccaagatcacgccactgcactccagcctgggtgacagagtgaaactctgtcaaaaaaaaaaaaaaaagtgggtttctatgaacatcaaatgagatacagcatatgaacaaattataagtggtgaagagacagagaaacaggaatagctatagtagactgtagctatggcggtgacttagtacctacctaacactgtcttcacccatgctcaccctaaaggagccagttacttgtgaaaagctctttttgtgtttccccatgcactgactacactgaatccagggtctcccatgtgggtatcatgtccacaaaaacattggtgtttcctggctatgagagacacttgatctttcctttcactggtggttttgttcattctgtttcctctgcttggaaactcacttctgacttcacctcgtctggaccaaacataccctgtctgcatccacaatgatgagcatgcaaaggacccgctgatgtacctctctccccgactagatggtggaccctgggcaccgatggcgttgtgttcacctaggtcctgccatgagcctgacatagagcctggcatgggggaggtccttgatggatgagcagagaagccgccccttccctgcccagccttgcgagccacttacgttttcactgttgacatcagcctcactggggcagccaaacagttcccgcctcagaagattgccgtcatactccaggaaggtcaggtagaggttgcgaaaaaactccacatgcttgttcttcacccggagcttcttgggggagttccagtgaatgacctggcagggagataaggaagtggtcaggtatggcaggggtggggtggggatccctcacacctgtaggaagccatggctcagcactgggctaagcattatttgagggtctgctcattcgctcattcaacattttggcagagtggttaagggtaggggctcgggggccaggtcacctgggatcaaaccctgcctctgctctaggtagtcctttaatctcacacaagtgactgaatctctgtgcctcagtttcctcatctgtgaaatgggaataatctgtgccagttattacattgtcatctctcagccctaagatgtgatgcttaggccacgactctacaaaccctaattctgcttggccacctgctgcctgtaggtgccacccagagggagcatgactgggacatgaagggtctggaaggggagaaaggcgcttgctcctcctgttgcttcctgtccctgtgggcatcaccctagtcccattttttcagcccagcagtggcacctccttcctttagcagcagctacatccattctgcagtttttcccacactcagaacacgcttcgctgtccctacttctcggcccagtgatgctgcctctggaatcggytggtgatgccatcctagaggtctgggtcctggccccaggttttaatcattcctacctcctcctcctatttcttcagctctagggtagtgcttcctgtaccaagtgaacactttatgccttataactatttttaaagattaaattctctgttcaaataattgctgtggtttctgcctccagctaggacgttgaatgatacactgtctcataaagcttttttgaaaaataaacaagttcatgcctataaagcatgtaaataatgcctagcacatggtaagtgctcagtagatgctggttctgactactgagtgcctagagtatagagggctgggaagcagccagagacataggaca

SEQ ID NO: 728332 - DNA, 592 bp, Homo sapiens
tttctccaccactcttctcactgtaaattgtgtgttcagtgaatggatgatcaaagactcaaaagaatgcaaccctttgtctcttatctacctatgacctggaagctccgcctactacttcgacttgtccctcctttctggaccaaaccaatgcacatcttatacatattgactgatgcrtcacgtctctgtaaaatgtatacaagcaagctgtctcctgaccaccctggggcacatgtcttcaggacttcctgaggctgtgtcataggcatgtccttaaccttggcaaaataaactttctaaattgattgagactgctctcagatactttgggttcatatgtcctttaaatgaagtaacatttcctttttggttctcttccctatcccactgcaccccgccccccagcccaaagaatactaggtattaactacacccaaaaggtgctctccaaaggtatacattcatgaccagatcataagcaaggagggcagaagcagagaaactcaaacggcgatgtcagagtgtggataactaacattagcagaacgtgcacacaggaccttttcatgcacgcaacatgcagcttcgg

SEQ ID NO: 728333 - DNA, 1574 bp, Homo sapiens
cagtttcctcatcttcataaagggagtgataacagctctgaggactggtgtaaggatgaaatacagttccgtatataaaccatgtggcacataatcatttgccacgttatcatttctatgtcagaacagcacagagtctgctttagccacaagactttgggtggctcattttttcaggtgtcacatgtgatgggcacatagtagttgatgaagacaaagtctagtgtttccagtgcccagaacagtgtcttgcagaaactaggtacccagtaaagaagttgaactgaactctgcactttgcacataattagatatttgatgaatattaaatcaagtcagattcacttccctgtattgcattctgatccaaccctacctttaagtcattcctggacgggcgtggtggctcacgcctataatcccagcactttgggaggctgaggcgggtggatcacttgagctcaggagttcaagaccagcctggccaacatggtgaaacctcatctctactaaaaatacaaaaattagctggtcatggtggtgcactcctgtaatcccagctactcgggaggctgaggcaggagaatagcttgaacccagaaggcggaggttacagtgagccaagatcacaccactgcactccagcctggacaacagagccagattccatctcaaaaaaaaaaaaaaaagaaaagacaaagaaaaaaaagtaagtaagtcattcccttttgtgggaggaggggcagttgagggagaagtaggaacatgtctcctcttctcccagtagtgattttgattcttcctctcgcttttgatctttcaaaagcaagatgaccaccaggacaaactattattttgaggtcgccaatgaaccattcctgcatacagtaatactcttatgtagtcccctctcacaaagtctgggcttggccatatgtctctttggccacagggacattgacaagccagtgcaaggcttgataaaccattgcacattgaatcttgtcccctgagacggctccttcttgaaacctagtccccattccaaaagaagctcaagtgagccacgaagagaggtcccatgagagagagtgatgatcagccagccccccactgtggttctcatcccagctgaggcactaggcatgggagaggagcaggcrtcttcacagcagatgctatacagaacagaaatgagccgtacctcctgagccctgcctaaattgctcaatcatgagcaaattaaggatcatgtcattttaagcccacaagttttggtggtgttttggaacacagcaaataataaataacccatgggtagagcacggtctgagggtgcaagtcagtgatctcggggtggagtgtgctgcgggcttagagactcatcaggtgaaaagcttcaggatcaactggaaaacagaaccgtctgacctagaacccattatctggggactcttccctggggctccaagcccctatggtctgaggatgcttttggctccttaaacaatgaggagacctcaggctcacattacaggaagtccagaggccggcagcttctggccaagttgatg

SEQ ID NO: 728334 - DNA, 1014 bp, Homo sapiens
cgcctggtaaagaaaattattgaaagggcaagacttgaagcagagatacacattagcagctttgatggtctagggagacatgctgggctccaaagcgcagtcatggtggtagggatggtcagggagaggcgaagcacatgcaccagtgaccttggggagtggccagactccggtgcacaggaaggaggacctggggccaaggccttacatcctaggggcagagggggccactcaccagcttgggcagcctgcactctccacctccttagctatcacaaaaacaaagctgtgcttttttttttaattgtytttttttctagctcctccagggctgggaccacacctttgacacccccctctctatgctgagcattaagaagacaagctcatgatcctggcagtggccaacatgcccctgctgaatgagtgcagaagcagatgtgcaaggaaggacatggagggatgctctggatttcttgactgggaagtgcaccctcaccaggtgtccctggcagcaggctggcggacagtgccagtccagcccacattggctctgagcccgcacctcacaagaccagggaatactttgggagtatggccggccccctccaaggcagcaccaaaggaagtaggaaatgaaaaccccaaatgggcagagctcagggcagcacagctcatggtccccttgctgtttaaaaaggcctgagcagatcctccattgcatgcaacaagacccctgactaacccaggggtttacaggatacccagaaggtaatgtgattactgaataaagtgaaagttacaagagaagtcgaagctagagatgtgtaagccatctgcaggagagctgagtaatgatgtggctgtgtccccacccaaacctcatcttgaattatagttcccatagtccccgcatgtcatgggagggatccagtggaaggtcactgaatcatgggagtggtttctcccatgctgttctcgtgataataagtctcatgagatctgatgatttta

SEQ ID NO: 728335 - DNA, 1014 bp, Homo sapiens
cgcctggtaaagaaaattattgaaagggcaagacttgaagcagagatacacattagcagctttgatggtctagggagacatgctgggctccaaagcgcagtcatggtggtagggatggtcagggagaggcgaagcacatgcaccagtgaccttggggagtggccagactccggtgcacaggaaggaggacctggggccaaggccttacatcctaggggcagagggggccactcaccagcttgggcagcctgcactctccacctccttagctatcacaaaaacaaagctgtgcttttttttttaattgtcttttyttctagctcctccagggctgggaccacacctttgacacccccctctctatgctgagcattaagaagacaagctcatgatcctggcagtggccaacatgcccctgctgaatgagtgcagaagcagatgtgcaaggaaggacatggagggatgctctggatttcttgactgggaagtgcaccctcaccaggtgtccctggcagcaggctggcggacagtgccagtccagcccacattggctctgagcccgcacctcacaagaccagggaatactttgggagtatggccggccccctccaaggcagcaccaaaggaagtaggaaatgaaaaccccaaatgggcagagctcagggcagcacagctcatggtccccttgctgtttaaaaaggcctgagcagatcctccattgcatgcaacaagacccctgactaacccaggggtttacaggatacccagaaggtaatgtgattactgaataaagtgaaagttacaagagaagtcgaagctagagatgtgtaagccatctgcaggagagctgagtaatgatgtggctgtgtccccacccaaacctcatcttgaattatagttcccatagtccccgcatgtcatgggagggatccagtggaaggtcactgaatcatgggagtggtttctcccatgctgttctcgtgataataagtctcatgagatctgatgatttta

SEQ ID NO: 728336 - DNA, 1014 bp, Homo sapiens
cgcctggtaaagaaaattattgaaagggcaagacttgaagcagagatacacattagcagctttgatggtctagggagacatgctgggctccaaagcgcagtcatggtggtagggatggtcagggagaggcgaagcacatgcaccagtgaccttggggagtggccagactccggtgcacaggaaggaggacctggggccaaggccttacatcctaggggcagagggggccactcaccagcttgggcagcctgcactctccacctccttagctatcacaaaaacaaagctgtgcttttttttttaattgtctttttttctagctcctccagggctgggaccacacctttgacacccccctctctatgctgagcattaagaagacaagctcatgatcctggcagtggccaacatgcccctgctgaatgagtgcagaagcagatgtgcaaggaaggacatggagggatgctctggatttcttgactgggaagtgcaccctcaccaggtgtccctggcagcaggctggcggacagtgccagtccagcccacattggctctgagcccgcacctcacaagaccagggaatactttgggagtatggccggccccctccaaggcagcaccaaaggaagtaggaaatgaaaaccccaaatgggcagagctcagggcagcacagctcatggtccccttgctgtttaaaaaggcctgagcagatcctccattgcatgcaacaagacccctgactaacccaggggtttacaggatacccagaaggtaatgtgattactgaataaagtgaaagttacaagagaagtcgaagctagagatgtgtaagccatctgcaggagagctgagtaatgatgtggctgtgtccccayccaaacctcatcttgaattatagttcccatagtccccgcatgtcatgggagggatccagtggaaggtcactgaatcatgggagtggtttctcccatgctgttctcgtgataataagtctcatgagatctgatgatttta

SEQ ID NO: 728337 - DNA, 1014 bp, Homo sapiens
cgcctggtaaagaaaattattgaaagggcaagacttgaagcagagatacacattagcagctttgatggtctagggagacatgctgggctccaaagcgcagtcatggtggtagggatggtcagggagaggcgaagcacatgcaccagtgaccttggggagtggccagactccggtgcacaggaaggaggacctggggccaaggccttacatcctaggggcagagggggccactcaccagcttgggcagcctgcactctccacctccttagctatcacaaaaacaaagctgtgcttttttttttaattgtctttttttctagctcctccagggctgggaccacacctttgacacccccctctctatgctgagcattaagaagacaagctcatgatcctggcagtggccaacatgcccctgctgaatgagtgcagaagcagatgtgcaaggaaggacatggagggatgctctggatttcttgactgggaagtgcaccctcaccaggtgtccctggcagcaggctggcggacagtgccagtccagcccacattggctctgagcccgcacctcacaagaccagggaatactttgggagtatggccggccccctccaaggcagcaccaaaggaagtaggaaatgaaaaccccaaatgggcagagctcagggcagcacagctcatggtccccttgctgtttaaaaaggcctgagcagatcctccattgcatgcaacaagacccctgactaacccaggggtttacaggatacccagaaggtaatgtgattactgaataaagtgaaagttacaagagaagtcgaagctagagatgtgtaagccatctgcaggagagctgagtaatgatgtggctgtgtccccacccaaayctcatcttgaattatagttcccatagtccccgcatgtcatgggagggatccagtggaaggtcactgaatcatgggagtggtttctcccatgctgttctcgtgataataagtctcatgagatctgatgatttta

SEQ ID NO: 728338 - DNA, 1014 bp, Homo sapiens
cgcctggtaaagaaaattattgaaagggcaagacttgaagcagagatacacattagcagctttgatggtctagggagacatgctgggctccaaagcgcagtcatggtggtagggatggtcagggagaggcgaagcacatgcaccagtgaccttggggagtggccagactccggtgcacaggaaggaggacctggggccaaggccttacatcctaggggcagagggggccactcaccagcttgggcagcctgcactctccacctccttagctatcacaaaaacaaagctgtgcttttttttttaattgtctttttttctagctcctccagggctgggaccacacctttgacacccccctctctatgctgagcattaagaagacaagctcatgatcctggcagtggccaacatgcccctgctgaatgagtgcagaagcagatgtgcaaggaaggacatggagggatgctctggatttcttgactgggaagtgcaccctcaccaggtgtccctggcagcaggctggcggacagtgccagtccagcccacattggctctgagcccgcacctcacaagaccagggaatactttgggagtatggccggccccctccaaggcagcaccaaaggaagtaggaaatgaaaaccccaaatgggcagagctcagggcagcacagctcatggtccccttgctgtttaaaaaggcctgagcagatcctccattgcatgcaacaagacccctgactaacccaggggtttacaggatacccagaaggtaatgtgattactgaataaagtgaaagttacaagagaagtcgaagctagagatgtgtaagccatctgcaggagagctgagtaatgatgtggctgtgtccccacccaaacctcatcttgaattatagttcccatagtccccgcatgtcatgggagggatccagtggaaggtcactgaatcatgggagtggtttcycccatgctgttctcgtgataataagtctcatgagatctgatgatttta

SEQ ID NO: 728339 - DNA, 443 bp, Homo sapiens
ccctcccacgccatacaccccctcccacgccatacatccctcccacrcctcccatgccatacacccctcccacgccatacaccccctcccacgccatacaccccttcccatgcctcccacgccatatacccctcccacgcctcccacaccatacacccctcccacgccatacacccctcctatgccatacaacccctcccaccccatacaccccctcccacgccatacacccctccatgccgtacaccccctcccaagccatacaactgaacaccaggctctgggggccgccatccagtcccagtggggtcacctggaggctgtgtcaccaggagcaaggagtttaacgtcaccgtgcctcagtttcctcatgtctgtaatagcgagcgtgaactcagtgagagactaaggcctccagggcaggtctgtgtctttcttggaca

SEQ ID NO: 728340 - DNA, 598 bp, Homo sapiens
aaatttaaaataaagaaacaggtgaatgcaaaaccgttcatcaggtcctgaggaagaaacgctgtgtgtttgtcacagctcccctgctgggacacagggagactgcatttcccagctctccttccctccaactgggggccacgtggctgagtttttggctcctggagcgtaggtggaaatgcttcccattctaaccctgagaacgcctgttccacctccagcctcagctctggtgactgtccttcggagraacatatttaagatggcagcatgggggcccaggagcagcctgaatccccgagtcaccacctgtctgcagagctctgagggcagcccccagcccacaccagggtgtgagactcctgggaggtaacatctctgccactgagattcctgctgtccttttactttcccccagcaacacagaatatcctgccctgattaatcgtacccctgcctcaccatccacaggaagcacttccaggtacgttatgtcctggagtgaaaaaggagaacttgtaagaatgtagtaaaaaatacagttatgctaacactgtgaaaccccatttttattaaaaaatacaacaaaattagctag

SEQ ID NO: 728341 - DNA, 598 bp, Homo sapiens
aaatttaaaataaagaaacaggtgaatgcaaaaccgttcatcaggtcctgaggaagaaacgctgtgtgtttgtcacagctcccctgctgggacacagggagactgcatttcccagctctccttccctccaactgggggccacgtggctgagtttttggctcctggagcgtaggtggaaatgcttcccattctaaccctgagaacgcctgttccacctccagcctcagctctggtgactgtccttcggaggaacatatttaagatggcagcatgggggcccaggagcagcctgaatccccgagtcaycacctgtctgcagagctctgagggcagcccccagcccacaccagggtgtgagactcctgggaggtaacatctctgccactgagattcctgctgtccttttactttcccccagcaacacagaatatcctgccctgattaatcgtacccctgcctcaccatccacaggaagcacttccaggtacgttatgtcctggagtgaaaaaggagaacttgtaagaatgtagtaaaaaatacagttatgctaacactgtgaaaccccatttttattaaaaaatacaacaaaattagctag

SEQ ID NO: 728342 - DNA, 598 bp, Homo sapiens
aaatttaaaataaagaaacaggtgaatgcaaaaccgttcatcaggtcctgaggaagaaacgctgtgtgtttgtcacagctcccctgctgggacacagggagactgcatttcccagctctccttccctccaactgggggccacgtggctgagtttttggctcctggagcgtaggtggaaatgcttcccattctaaccctgagaacgcctgttccacctccagcctcagctctggtgactgtccttcggaggaacatatttaagatggcagcatgggggcccaggagcagcctgaatccccgagtcaccacctgtctgcagagctctgagggcagcccccagcccacaccagggtgtgagactcctgggaggtaacatctctgccactgagattcctgctgtccttttactttcccccagcaacacagaatatcctgccctgattaatcrtacccctgcctcaccatccacaggaagcacttccaggtacgttatgtcctggagtgaaaaaggagaacttgtaagaatgtagtaaaaaatacagttatgctaacactgtgaaaccccatttttattaaaaaatacaacaaaattagctag

SEQ ID NO: 728343 - DNA, 660 bp, Homo sapiens
ctcactgtgggttttaattctcatttccttggtttctattccccctgaaaaggaatgggaatcccatgtatctgtttgattagatacattataattcccaccttayggatgaagaaaacaatcccaaaagctaagcaatttgccaaggattgcaggcaagataatataataacaagataataatgaccatttaaagagtgcctcctaaatgcaagacactctatgagacattttgtaattactgtatcatttgaccttcataatcattcctagtaattgacaaagtcaagatttgaaatcaagtctctcttatttcaaaccttatgctcttctcccaatatcatattgactctctagaggttacccttcctaagtaggagaattagactcccgtaacctaaggattttttttctattttaggtaaggatcaagccaccactctggggctcattcataaataaatggattctgcattctgcagaatacaaaagtttattccacactcagagtgtggccaattctgtgctaagcactttatgtgcattgtctcaactgaatgaccaataaatgggtatggccattcccctggttttacagaggaggacactgagactcaaagagactaaattctttgtccaaggcttcccagatggtatagt

SEQ ID NO: 728344 - DNA, 1696 bp, Homo sapiens
cagaactaacaaatgcaaaggtaggaggtagcagatgcgatctatggtaattttcctccaacattagagctcttcacagtgatagtatattatgagactcacacagggtgccacataaaatgtatgtttgttagatacctttcaaattaaattcagtcacaggaaaatatgatgtggtgggttcaatttccacactctgacccctgctccaaaaaatccattgactttcctttattcagttttgctcataaaaacaaacttctagagtacatttcaactgcaattcaattgataaatatttgctctatgtacaatatctggattcataatcacagcctacagtagcagttctcaatcgtttcttttaaataatagagacagggtctcactctgtctctcaggctggagtgccatggtgtaatcacagctcactgcagcctcgacctcctgggctcaagtgatcctcccacctcagcttcctgaggagctgggactacaggcgtgcaccaccaggccagctaattgtatttttatttttctgtagagatggggtctggctattttttccgggctggtctcgaactcctggcctcaagggatcctcccacttcagcttcccaaagcaatggtattacaggcatgagccaccacgcccggctgtggttcttaatcttaatcttggctctacattaaaactactgggggatttttcaaaactctcagtacccaccccaatcctctactaattcacacagaagttcttgagggtgggacccaggcatcagtttttttaaagctttcctggtatgcagccaaagttgagaaacactattggaaagtcatccagagccgtgttctccagatccaggaggctgtcgctttccattagctccttctcaaccttggtccttgacccaggggtccctaccagcygccctcccggcctccacaggcctttggggcgtgtatccttgtcctctttgccctccacagagcatggtctggcagatagacgggggtggcacaagggtgacatctagtggtttaaaaaatgaagttagcgtcttaatggtcccattctctgaaaaatggcaagagaacgacaccggcggaacctggtctgtgtgccgcctgggattggctcagccatggtctcctgtcctctgcaactgacgatgctctaggagccctacagggctgaacctcattcttggaggcctcagagggaggtcctccttgaactcagtcttagccttcatgctgttttgcctaccccgccaccaggcccgctgctatggtggctgttccctgcccttaagtcaccggcagacgtggcctgatggcacctagcctcaagcctgacccaccatgccatgcaagcttccacccctgttgccatagagaagcactgggcgctcacacgcacacgggctcacctggcctggttccttgggctgcaggtgaatggtggacctctcttccctctctggctctcccctgttcccaggctgcccctatgctctgggcctcacaccacggatgcctctgcggctcccccaaaatgtgggtgagtcattgccccggggccttgcattcattggctctggctgccgtaacaaggtacaggcagacctcgttttcccgcactttgctttattgaactttgaagatagttgtgttatttataaatcgaagg

SEQ ID NO: 728345 - DNA, 1230 bp, Homo sapiens
cttggaggggaaaagaccaattctacctctaagtagaatcctgtattggtgtggcaacattcacatggcatattatccaacagtcacaatactttgggcactagcaatgcttgtgggcactagcaatgctttgggcactagcaaaacagggccactgaaaccatttttgaagacagtttaaaatgtaatgctttctttattcattaaagtaatcattatgaagagattccttcttttttggacttccttaatcatattttatgatttagtwtggtttttattatgtgttatattaaggtatagagagagtagagtaatctttagagattatcagaggctaggcatggaattatgctgattgcctgcagataagaatggtaggagagcaacagattcctcattttgctttaactatcttgtagaatttcagactgggaaggacctttggaaatcatcaaattcactctccacataatatagatagaagcaaggcccagagagaggagtttattatggccacacagctattaatggaagatctgagactcgaaatgggaggacaagggaccttgcttccatgcacacccttctcctcatctttgtttttctccccatgacaaagttcacaagcataccttctgtgcatattgcaggaatgtttactgtatttcgagctagaagtggaaaaaaaacaatgtactgaggttgtttctcagatggggaagggtttctgttgtttattgtttttttttttgttttgtttaaagtaagtttacaaaaagcaaagaagtaacctggttttagattctcctcatgagtagcagaatggcttcctgtcatattaagtcctgctccaggaaatagagctgtgctaacaaaaacagagcctcaagtgatgaattcacagataaaagagtgtggctgttatgagctgctgttactgtaaataaaacttttgctttcccccattctattccatctccctatttgccctcttatttgtgatacatcttaaacagtcatgcagtcatcttgcttatgtatgtgttacttagaatggagggtggaagggactctcacaaatggaaaggcaggaaataattatcatgtggtgacgatcaaggatgtatcccaaaatctgtaatggaagttttcaggtgtatttatttaatttaattttcacaactgtcctaagatgtaagaactattatcaccctatgatctagatga

SEQ ID NO: 728346 - DNA, 620 bp, Homo sapiens
atcgttcaccatagccaaatggtggaggcaacccaggtgtccattgacagatgaacggataagcaaaatggtacgtgtacccacagggartattattccgccttaaaagaggaaggaaattctgacccatgctgtaacaaggatgaaccttaaggacattctgctaagtgaaataagcccgtcacaaaaggacacatgctgtatgattccgttcatgtgaggttcttacggtggtcaaatttataaagataaggagcagagtgttggttgtcaagggctgggggagggagaatgagcagttcatgtttactgggtacaaagtgtcagttttgcaagagaagagttctgtggatgatggtggttgtgcaacaatgtgaatgtaattccacgaaactgttcacctaaaaatggttaaaaaggcaattttaggttatgaatatcttacagttaaaatctttaattaaagtcctttcaaagcccaacctttgcagaaaaaaaattatagcacctgagccctttttggtttgcagaacattttcacacacatagtcatacatgcttcaacgacggccctgtgataaaaacatttattaatttggcttcccagaggagaaaactaa

SEQ ID NO: 728347 - DNA, 1431 bp, Homo sapiens
gctcaggttcccgcaggcaccagacacggctcccctcgacctggtgacctcaggtctaaagggcagcagccagtgctgtagtgtgacccaggctcacccgtgagctgagaaggcctcggtgttccggtcagacaggccggcccctgaccgccagcccttgcccgccagcccctgcccatcacctcctgctcgtcaccccctcaccttccaagtcagtgatcattgcctcatgcttgttcttgagcttggcgaggctcttagatttctcctcctcttctgtgaggttggtggtgaactcagctattctgtcttccagcagtttcttttcctggggagaggggagtaggctggcatttagtgttggttgagcacagaacacttgctagcctcaaagcatgactcgcccggaaatctggggctgaatggagagggctttagacgcttgatcaagttcattaggattttcctagatcaaaggataattttgaaaggtcacgagctcccctgaaacagcgaggtacgcttccttagaaccaaaaaatgtgggtgcccaagcccttccccttcccctgtgggcttgggtgagaaaggattccaggtgacagctagtgtcagcagggacagatggctccactccttcaagaggctgccacacggcgctcacctgygccaccaggccaccttctccgtgcccctctctcacctgccaggtgggccacggcccctccccctcttcagccccgcggtgccccgggctgctctccttgctttctgttctgtgtggcccctgcaacacccctgcccagcggccacagctcggcacaagcacctgagtcccctcatcccagtcccgggtgggcgtcctgccacctcagcctccccagcctttggggctcccatgttctgaggaggcccgaaaggtggggaggctgccttctcctgccttctcctctaactggttccccggctgctatctgctccctgggcagacaccgacagggacccaactcattctcaagaggaatagctgccgcccagggacagtggaggaagagtaccccgtatctcaacacagagccaccaaggtgtccccaaccccacagtgaccaacacttgcaatgctgcacagatggccacctttacacaggctcgggtctcacggctggcaaagaagagctttccagaggggaaaggacaaacccttccccagggcccctttgcttatgaggaaatccctcaactaaggcccatgggacctccagggagcacttgcagttaagcagaagccctcatgctgcaggcagaagagacaggaagcagcagcagcggggagccaggccctgcaagggtgaccacactctcccatccacggcgcccctggagcagcggcaggcgacagccacgggcctcaccttggccagcttgcagttc

SEQ ID NO: 728348 - DNA, 574 bp, Homo sapiens
ttctaagaacatcatgaatgggagatgacaagaaattatatgacctgtacttagtgtagatatttattaattacatttctgtgacctctagttagtgtagaaatgtattaattacatttagatgtgcttttccactagtgcctgctccttaaatattctccttagtagaagcacttttcctcctgagtttcgtatacttgmagcattctgaacccatgtttgcagtaagccattttagtcatgactgaaggctgagttaagtgatgtagtcatgaacttagcacactgcccagatgtgaaagtggtacaccatcaccatcttggtctgtggtactccgtttccctaatgcttcttggaggcctgctttatttccttttcttaatggtagacctgagacccctaacaattgcatttataggaatagaattgagattggcctagttccttttccagcagaataaaaatggtctcccctgaggaaatctgatcatttttcccttataaacagtaggactgggcagcatagagagatcccggtctctataaaaaaaattttttttttttttttttttt

SEQ ID NO: 728349 - DNA, 574 bp, Homo sapiens
ttctaagaacatcatgaatgggagatgacaagaaattatatgacctgtacttagtgtagatatttattaattacatttctgtgacctctagttagtgtagaaatgtattaattacatttagatgtgcttttccactagtgcctgctccttaaatattctccttagtagaagcacttttcctcctgagtttcgtatacttgaagcattctgaacccatgtttgcagtaagccattttagtcatgactgaaggctgagttaagtgatgtagtcatgaacttagcacactgcccagatgtgaaagtggtacaccatcaccatcttggtctgtggtactccgtttccctaatgcttcttggaggcctgctttatttccttttcttaatggtagacctgagacccctaacaattgcatttataggaatagaattgagattggcctagttccttttccagcagaataaaaatggtctcccctgaggaaatctgatcatttttcccttataaacagtaggactgggcagcatagagagatcccggtctctataaaamaaattttttttttttttttttttt

SEQ ID NO: 728350 - DNA, 915 bp, Homo sapiens
tctgaataatccaaccactggaccatggcatactgatgctgagaaagtcagcgtgttccctaacctcagtaccactgaacaggaacatagacggatatggggtactcaggaagtgcttcatgaccatgtaaagaaatgggtatggacaaatccatggattcagtgaataatatggagctgaattaggtgtacagcaaagccctcattttasagggtattgaaagccaatatctacagagactggatcactcgcccaatatggccaggaagagaatggcagagccagtgctgggctggccaagggaagtctcacaggactcccaacatctgagacagctaaattataaaggaaatgcacttttaaagataatcaaatcagggacacttcattgaagattcagctcaggcagaaggattctttttaaccccaaactccatggtcagcaaataaacaccccatgtatttgcatcctccattcccagctcttctacagacaccatacagcccagacaactgtgttctgccctacagcctgacaacagcctgccttcccatgatgttctctctacagcctgacaacagcctgccttcccatgatgttctctctacagcctgacagcagcctcccttcccatgatgctctgctttacagcctgacagcagcctcccttcccgtgatgctctgcccgacagccaacaagtctatcctcccatgatgttctgctctacaatctgacaacagccctctctctcatgatgctctgctttacagtctgacaacagtcttccttcccatgacgttctgccctacaggctaacaagagccttccttccaatgatgctctgcccaacagccaacaacagccttactttcttatgctgctctgcccaacagccaccaacagtctgcttcc

SEQ ID NO: 728351 - DNA, 915 bp, Homo sapiens
tctgaataatccaaccactggaccatggcatactgatgctgagaaagtcagcgtgttccctaacctcagtaccactgaacaggaacatagacggatatggggtactcaggaagtgcttcatgaccatgtaaagaaatgggtatggacaaatccatggattcagtgaataatatggagctgaattaggtgtacagcaaagccctcattttacagggtattgaaagccaatatctacagagaytggatcactcgcccaatatggccaggaagagaatggcagagccagtgctgggctggccaagggaagtctcacaggactcccaacatctgagacagctaaattataaaggaaatgcacttttaaagataatcaaatcagggacacttcattgaagattcagctcaggcagaaggattctttttaaccccaaactccatggtcagcaaataaacaccccatgtatttgcatcctccattcccagctcttctacagacaccatacagcccagacaactgtgttctgccctacagcctgacaacagcctgccttcccatgatgttctctctacagcctgacaacagcctgccttcccatgatgttctctctacagcctgacagcagcctcccttcccatgatgctctgctttacagcctgacagcagcctcccttcccgtgatgctctgcccgacagccaacaagtctatcctcccatgatgttctgctctacaatctgacaacagccctctctctcatgatgctctgctttacagtctgacaacagtcttccttcccatgacgttctgccctacaggctaacaagagccttccttccaatgatgctctgcccaacagccaacaacagccttactttcttatgctgctctgcccaacagccaccaacagtctgcttcc

SEQ ID NO: 728352 - DNA, 1128 bp, Homo sapiens
tgagaaaatgatgtactaaaagcaagacactaaatcaattttaaacaccaaacacaatttatgcctgactttaaaactcatccacaaaacattaatctacacaaaggccagaagctgaatgaagcataatttgtgaaactgatacctttcatcacaacctctaactgaaaaggtcattagatatattatatctaagtgarcagcttatccctgcttcattactgataattaagacaagtaatattttcttgacagtaatgtgtccgttaacagatatagtctagtttgcataaaataagcattaattaccatagtactatccgagatttaaaaaaaaattaagtacttgtgtaacatgccttcatcatttttccccttaatttccaggctcagaaaacataatgtacacattaagaaattcatctttagtcatgtttaaattcataaggtacataacaaaataggtattctgaaaaagcaaccaatgaaagtgaaggtacctgtgactgggtatcatttaaattatctgtactaacttgccttgctctgagctatattaaatgccaaaagcagctattctttaatgttaaggcttttgaagtcttaatgtaggaaatttggggaagtataaaattgtttctaaactgactgaaaattaagaagtagtgcaaagagcaaaaaaagtacctttaaaaggccttgaataagaaaagacatgatttgcctttgctttctgcggcaaaaaaaaaaaaaaaaaaaggaaaaaaaacccacatgaaactaagtactcagtacaggaaaccttaactattactagtaatgactagttactaccagataagaattttattgtttttggccagaggcaagattttcagggccaacattttctttaaataaataagaaagatcaaaataaaatgaaggtaggaagctaacggaattatgcttttttatcaactcagactttgtaaactaattcagtgtaagaggataaaggttaaattgggataactgtgtcttgtgtatgaagttctaattttacttttccacaaagctatagaagaaactcacattttagtagaaataatccatcacaatattgcagatataaaatatatatttttt

SEQ ID NO: 728353 - DNA, 1128 bp, Homo sapiens
tgagaaaatgatgtactaaaagcaagacactaaatcaattttaaacaccaaacacaatttatgcctgactttaaaactcatccacaaaacattaatctacacaaaggccagaagctgaatgaagcataatttgtgaaactgatacctttcatcacaacctctaactgaaaaggtcattagatatattatatctaagtgaacagcttatccctgcttcattactgataattaagacaagtaatattttcttgacagtaatgtgtccgttaacagatatagtctagtttgcataaaataagcattaattaccatagtactatccgagatttaaaaaaaaattaagtacttgtgtaacatgccttcatcatttttccccttaatttccaggctcagaaaacataatgtacacattaagaaattcatctttagtcatgtttaaattcataaggtacataacaaaataggtattctgaaaaagcaaccaatgaaagtgaaggtacctgtgactgggtatcatttaaattatctgtactaacttgccttgctctgagctatattaaatgccaaaagcagctattctttaatgttaaggcttttgaagtcttaatgtaggaaatttggggaagtataaaattgtttytaaactgactgaaaattaagaagtagtgcaaagagcaaaaaaagtacctttaaaaggccttgaataagaaaagacatgatttgcctttgctttctgcggcaaaaaaaaaaaaaaaaaaaggaaaaaaaacccacatgaaactaagtactcagtacaggaaaccttaactattactagtaatgactagttactaccagataagaattttattgtttttggccagaggcaagattttcagggccaacattttctttaaataaataagaaagatcaaaataaaatgaaggtaggaagctaacggaattatgcttttttatcaactcagactttgtaaactaattcagtgtaagaggataaaggttaaattgggataactgtgtcttgtgtatgaagttctaattttacttttccacaaagctatagaagaaactcacattttagtagaaataatccatcacaatattgcagatataaaatatatatttttt

SEQ ID NO: 728354 - DNA, 1665 bp, Homo sapiens
gattttccattattctctacttcagaaagcagtcataattttgttgtctttatttttggctggaggttggcctctggttttatagaatattccactggagccagtctcttgtgttacataaagcataaattaaggtatggctaaattcacaatgtgagaattgtgtgcacatgtgtatatatgtatagacctatatacctattaatcatttttatcaagaaggcccattgctcacagtgygtaccatatattggtcattatgttgctggcaagcaaaaagaaatcacccacttaacaggagagaaacacattaactcttcaaactagtagggggtgcttttactaaattacctcctccagttgctttaatggtaccctagtctccacacactaatgcatgtctgagcagtaagtagttttctgtcaccttactaggagaactaggatatttcttttttaatatgaagagcttggggagagggtgtggaagttcgtttttttctttatatttgtaaaatatttatttatggaatcactatgggaacgtatataaatgtatagtagatataaattgctagttctatttataaaaatccagtatctcttttaagtcaatggtattagtaagaaaaaaattatgatcaatgtttttccaacttttacattccagtgcatccaattttatatttttttactaattcttaatggaaagaggttcttattgaaaggtacccttggaatctagtgatatttttaatataccagtagatgatatatattttagttttatatatgaataattataattcaaaatggcctttccagttagctttcttttcacacctctcctaaggcccatttgaattttatgtagtttaagaaataaaactgatttcctagatgaatgaaagttgtctttttataattttagcccaatgctaaaatcaaactgttcgcaagtggactgtttttaaataaccctacccagatttggaattttcagagcaaatactatttggcatttatatagcacaccctttcaagactggacttttatttattgattatacgtcatgaagtgaacagtgttacacttataattttatagctacactgtagagtaattcaatttttcttcccccaaccccaccccagctccccatctctgaagtgcatggtgattatggtgttgcaggtgggctctgggttgactagaagagctcttccccccaacaaaataaaactctctccccaaccctttctccatccctctttcttgctccctctctccttatcccctctctcaggatattgagtttccaagtatttagccaaaaatattttgggaagaaaagtgaacacacagaacagggacaaatgtggcatatctcagcatagtctcccagggtcctcaacttccctcaaatggaggatactgtacagagaagccattgacatggttttcacctagtagatttcagttcgatggaagaagctaaattcctacttgtcactgctttcatatactcaattttgctgaccctctggaggaacctgagttaataccgagatgaaatgcacagacaataacatatagattaatatacagatgaaaatctgtgtgattctgatactaaattttgactgagcacagttattacaaat

SEQ ID NO: 728355 - DNA, 627 bp, Homo sapiens
tttttaaaatgaagtttgagcgtgatgttgtgtagaaatgtcagagctactgacttgtcagcctcattatgctgtgccccagtgactgcttcccaaacattaattacattgcacagagaccatgtctattgtttttagttttttttcccttaaactgtgaactctaaattgatttataaatcaaatgcagctgattagtgtttataatgttttcttaaatgcactttgaggtacaggttacatattatataaaacactgaccccactgccaaaagataacccacacctagttgattttctgtgacaagtagtttgtaaatgattaccgctcatgctacatttgtcagcttatgtgtattccgatgtcaggatamcctaaagatataaatgactacttatcgctcaacatagtggatattacccatgtgttagtcatacttgcctgggaataagtgctttaaggtgacactgcatcaaagaaagttatagtgggcctagagggtgattcaaagatctgtgtctttgtatttttaaataaatttagcaagattgaaggatcaggtgctctgcttaatcaaagagtatgctttgcatcacttccaaggagtaagaatttagtgaactata

SEQ ID NO: 728356 - DNA, 2311 bp, Homo sapiens
gaagaggatggtacagacattcagtcactagggaggagagaggttaaaggtgaggatgataaagacacccaggaacttgggaggaaaaatcagggtcagttaggaaatgaatttagtggaaagattcacataccamaggggaagaatcaggaacatattagaggcgaagatggtgcacatacccagatatctgagtcagggaactggggcaaattaacaagtcaaattgatggagaaatgcattcagcagaatggaagaaagatcagcagattggaggtgagaatggggcagaaattcagatacaagggaagagaaacctgagagaagttggaggtgaggacggtgtaaagacctgggcacctgggaaagaaacccagagtcagtttagaagtgatcttggtagaaagatccttttatcagagtggaagagccagaagcagatgggaagtgagaatggaacagaaattcaggctccagtggagagaaaccagagagaacctggaggtgaggacggtgtaaagactcagagacctaagagagagaacgaggaccagttagatagtgaaattggagggagccattcaccagggaggaggaactgggagctgattggaaaggatgttgcagaaaatcaggcatcagagaagagaaaccagagagaggttggaaacgaggacggtagaatgatctggaggcttaggggaaaaaactggaggcttagagcgaagaaacagactgttaaaaagtaaagataatggaaagacccgtttatcagagtggaagaaccaggaacagggtggaggtgggaatgatgaagaaattcaaatacaggggaagagaaacctgagagggaccacagctgatgatggtacagagacccaggctcctgcaggagatgaccagggacagttaagagttgaaattgctgaagagatccaggtacaagggcaaggaaataagaatgacggtggagttgaggatgttgcagaactccaggatataggaagccagagaaagtgcacagatgaggatgttggagagcctcgagcaccaaggggaggaaacaaggatctggtcagaggagaggatgctgtgagggacagtctccaagtcgactgttctgggagtgagaggcccacaggcaggaagcacagcctaccatggcctccagccttcactggctatggatgtgggacccgggaacaggaacaggcagtggctgtgaatggtttcatctctgccccctgtcctgagatgaatcctgtcccccactggggtgaagtcttcctgctggtgggtggggagggagagcatctggccagccagggcacaacccctgccagggatcatagagtggggatcagtccagcctcccagcaggcccaacctgaatcctggagaagacgacaaagggacaaaggggtggatccagagaaggcccccagcctgactcggcagtcccaaaaccctccgtctctgacagctcccttgggcatgccctctgcctgctcctgtctcccgtgtggcccagccccggaagctgccatcattctagcgggtcctcccaccgccctcactgtcctgcccaaggggacaggcctcaagaagagcaaacgactgctcctggagtccctcatgcggaggaggattgcacacctgaagtggggtcttccccggcggatcctggagtcctatttcctgtttaacttcttaggatcttgctcattgacccttgctggggcgaggctctctggactgaacacaggccaggagctccaagcccagcaggaaaggtattgtgaggcccaaggctccccaccaggccttaagtccccagagaggttccagagggttcagcgcccagacagaaaaagctcgaaacttcctatacaagccagagctctggagaggaacagaccgcacatgtcagagcccattaagcatttccatccagcctgaaaaggccaggagagtcaggccaccagggggcgccagagaaccacaggagatccaggaagcgcttgctaggaccaagctcccagctcccaggacccccaggccggcagcggagtccaggagctggtgtggcccacaaagggtcggagagcctcccagtgagaacagtaggggcaggaaaatgatcaggtcaagggtctcccagctggcagagagggctcccagcagagtgaggacttcattctctagggcagaccacgcccactggaggaaggaatgtacatcctgggaggcctctaagctccccagactcaaatgccagcagctcacatactggagaagaggaagcctgga

SEQ ID NO: 728357 - DNA, 629 bp, Homo sapiens
tttaaaaaatccttcagaaatataattgttctctggtcttytttgatagtagttgggtagtagatagtgcaaggttaaaatctctgagcctcactctgtcttgagtattcttccctcaggtatttgcatggtttatcatcattctttttcaggtttccactcaaatgtcaccttgtcatagagtcctttccagtctttgcaagctaaaacagttctcttccttactttttttttttttttcagacggagtctcacttctgtccaggctggagtgcagtggcgccatctcggcttactgtaacctccgcctcctggattcaagtcattctcctgcctcagcctcccgagtagctgagattacaggcatgcaccaccatggccggataatttttgtattttttctttttttggtggagacagggtttcaccatgttggccaggctggtctcgaactcctgtctcaagtgatccacctgccttggccttccaaagtgttgggattacaggcatgagccaccacacctggccatctctattgattctttttttctttctttttttttttttttgagatggggtctcactctgttgcttgggctggggtgcagtggtgggatcgtggctcactg

SEQ ID NO: 728358 - DNA, 629 bp, Homo sapiens
tttaaaaaatccttcagaaatataattgttctctggtcttttttgatagtagttgggtagtagatagtgcaaggttaaaatctctgagcctcactctgtcttgagtattcttccctcaggtatttgcatggtttatcatcattctttttcaggtttccactcaaatgtcaccttgtcatagagtcctttccagtctttgcaagctaaaacagttctcttccttactttttttttttttttcagacggagtctcacttctgtccaggctggagtgcagtggcgccatctcggcttactgtaacctccgcctcctgkattcaagtcattctcctgcctcagcctcccgagtagctgagattacaggcatgcaccaccatggccggataatttttgtattttttctttttttggtggagacagggtttcaccatgttggccaggctggtctcgaactcctgtctcaagtgatccacctgccttggccttccaaagtgttgggattacaggcatgagccaccacacctggccatctctattgattctttttttctttctttttttttttttttgagatggggtctcactctgttgcttgggctggggtgcagtggtgggatcgtggctcactg

SEQ ID NO: 728359 - DNA, 629 bp, Homo sapiens
tttaaaaaatccttcagaaatataattgttctctggtcttttttgatagtagttgggtagtagatagtgcaaggttaaaatctctgagcctcactctgtcttgagtattcttccctcaggtatttgcatggtttatcatcattctttttcaggtttccactcaaatgtcaccttgtcatagagtcctttccagtctttgcaagctaaaacagttctcttccttactttttttttttttttcagacggagtctcacttctgtccaggctggagtgcagtggcgccatctcggcttactgtaacctccgcctcctggattcaagtcattctcctgcctcagcctcccgagtagctgagattacaggcatgcaccaccatggccggataatttttgtattttttctttttttggtggagacagggtttcaccatgttggccaggctggtctcgaactcctgtctcaagtgatccacctgccttggccttccaaagtgttgggattacaggcatgagccaccacacctggccatctctattgattctttttttctttytttttttttttttttgagatggggtctcactctgttgcttgggctggggtgcagtggtgggatcgtggctcactg

SEQ ID NO: 728360 - DNA, 2020 bp, Homo sapiens
gtgattctcctgcctcagcctccctaatagctgagattacaggcgcctgccaccatgctggctaatttttgtattattagtggagacagggtttcaccatgatggccagactggtctcgaactcctgacctcaagtgatccaccccccttggcctcccaaaatgttgggattacaggcgtgagccactgtgctcgacaaaatagaagtttttaaataggaaaaacactgctaaataatccccatatcactttttgctcagcagttttagacaatgatttagttaaaaaataaaatcagcttcacatatctagtttataaaaaataaatgtcatctttatgtaacgaaacattatttttaaacatagattttagagaatagtaagcacaaatccttataatggaaaaatcaataaatcacatcactgatggaaaattaatgaagccattaaagtcacacatgagtttttattaaagtcatatacttacatttttaaagcaaatatattgagtagttcttctgaaaaattgcttgcaaaatgtaatttcaaatgaccttgacactaaacagccaaaaaatatgctatttctccaattcctgattagaagcataaatggcttcatgcacagaatcaataaaaatttgtgggaattaattgcattccacaaaataaaattataaaatgttttatggcataagtcaattttctaatccccccgcccagtttcctgttcaaggtacaaaagttaccagaagcagactttctttattaataagataaaaatttgtgtggctttgttatcaagatagttttgttttaaaaagagctcccttagggttcgctgaaaataattgcatatatatattaaatatattaaatatatatattaaatatatatataaaatatattatatatatttaaatatatatataaaatatatatatttaaatatatatataaaatatatataatatataatataataatataatataaaaataataattatatatataatatatcatatattatataaatatatatataatatatactatatattatataaatatatattatatactatatattatatactatatattatatataatatatagtatatattatatataatatatataaaatatttatatataaatatatatatattatacatatatatatttttttgagatggagtctcattctgttgcccaggctggagtgcagtggcgtgatcttggctcactgcaacctccgcctcccaggttcaagcaattctcctgcctcagcctctggagtagctgggatcataggcacatgccacctgactcagctaatttttgtatttttagtagagatggggtttggccaggctggtctcaaactcctaacctcaggtgatctgcccaccttggcctcccaaagtgctaggattacaggcatgagccactgtgcccagccttcttcttccacgtatttttagcatagttttatttgtgtgaactatggtactccatgtccattgtaaagtcttgattttcctgtgaagagggactgaaagatgagtgggggaaatgatgcctaytaccagaaagcgtacttgtgaggacatctaatcctggactgaccaatgcctggactaagttgagaaaccgacttctgccttaggggccccaatccatctctgacgttgtcaccttttttgctgtcaccactggttaggattccccctcacttctgtcttacttctctgcttaggattttctcacactgtcactttcagaaacaagtacactaagcacaataaggaaataaaagtatcattttattatttacaaaattcctcctggtgtcatcttgggaacaatgcaatgcaagtcatgcaggcagacaaatgaactggggctttgcttatgacccattctaagttgactgtagttttttttttttcccaaatgccagtttctagcataaacaatgtgatatcagtgtgtgtgtttgtttaaatctaca

SEQ ID NO: 728361 - DNA, 456 bp, Homo sapiens
tcccaccaggcagcctgcaggggctcagtccccttgcagcctggtccaccacaggggctcagtcaccttgcagcctggtctaccagaccaggcacacacggaatcgggtggcgagggccccttgacactttccccaaatccccgcctgaaccgtggccatcagcttctggtggccctccctgcagctctgtgccayggggctccaaccttggccaccggcctcagcctagcaatggtgaggagtgagtgagcgcaccgttccccacagcaagccccgttccgcatctgtagccctttccgggagcccgcctgactgctcaagaccagacatcagcctcggcttcgggggacgcaccaggcacaagcgggcagttgccccgtggctctcccagtgcgggaagaaactgtcagcaccgtcttgtaaggttccacaggtgatgcttcatttccgatacc

SEQ ID NO: 728362 - DNA, 456 bp, Homo sapiens
tcccaccaggcagcctgcaggggctcagtccccttgcagcctggtccaccacaggggctcagtcaccttgcagcctggtctaccagaccaggcacacacggaatcgggtggcgagggccccttgacactttccccaaatccccgcctgaaccgtggccatcagcttctggtggccctccctgcagctctgtgccatggggctccaaccttggccaccggcctcagcctagcaatggtgaggagtgagygagcgcaccgttccccacagcaagccccgttccgcatctgtagccctttccgggagcccgcctgactgctcaagaccagacatcagcctcggcttcgggggacgcaccaggcacaagcgggcagttgccccgtggctctcccagtgcgggaagaaactgtcagcaccgtcttgtaaggttccacaggtgatgcttcatttccgatacc

SEQ ID NO: 728363 - DNA, 586 bp, Homo sapiens
tctcccaaaaaaaaaaaaaaaaaaaaaaaaaaaaaaaggaaggagatccacacataacactgtgctataaactccttgaagagggtgaccttctcatagacatcatgctctgcatgtagttggagattgttatgttttaagaaaatgagtaacagttttctataggtgaattttaatctatagraaaagaagtgtgtcttgtgaaaagtatgtaatagagttaagggcaccaaactgtgcactgtcttttgggagccaactgttcagttgtgagagttcaaaggtggataaaagctagtctatataccaggggagaagtggataaggtatatacaactgagatttggaaataaccagttataacagtaaagtagccatgcctctagatttactcttttgtttacctattctttatttcagagacctaatgttaagtatcaaaagcaaaatatttgttgtaaaaaagatttgaaaaatggaagatgactaactcttgggaacatgcaaaaggaactttatactttcaatgctcattctaataactagttcttcttgatgactggaatacaaagaatactaaaaaatc

SEQ ID NO: 728364 - DNA, 672 bp, Homo sapiens
ttcttgaagtcagtgagatcaagaacccaccaattccttggcacattaggatcacaggtgttgagccacggttcctggatgcgtggagatttctaatrgttgtacctgttgtatttatgctacatactacaacatatatgtatactataatgtttataatgcctgaaccccacccataaaaatgaacatgccataacctggtcattgtgagaaccataagtgtacccaaatacatcgtagtaggtagcaatgccctggctaaagactactgcgtgttagtacaggtaaagaattagcacagataaattttattcagtgcccaaataaagtattttaaggctcaagtggggccaggcacggtagctaacacctgtaatcccagcactttaggaggccgaggcgggtggatcacggggccaggagatcatgactatcctggctaacacggtgaaaccccatctctactaaaaataaaaaaattaactgggtgtagtggtgggcgcctgtagtcccagtcccagctgcttgggagactgaggcagggaggggaaggttgcaatgagctgaaatctcgccattgcactccagcctgggcaacagtgagactccatctcaaaaaaaaaaaaaaaaaaaaactcaagtgttgtactccatagtttccctttaatgaaa

SEQ ID NO: 728365 - DNA, 654 bp, Homo sapiens
gagctatttattcaggatcttttatctgcccctaaaccacatggttgcatccttctaaggctcttatcctgtctaccaatctgtgtcctttaagtgtagtatggagtatattacttataaaattcctgacaattttggtattaaacttaccattttctttctgggggtatatgygcatgcacatgtgcatgagtgtctgcatgtgacattgtgagtgtgtgtgtgtgtgtgtgtgtgtgtagttgtctctcctgctttactagattgacagttctgttgaaagcaaccctgccttactgcagcaactagctaagctaaaagccaaatttgaactacacatatgagagaacgatggctctcatattcttggccttgtgatttttaaaaaggtacagaatatcaagaattaagttttatttagaactttctgtgtgcctggcacagttctaagatctttcagatattgttccatttaaacttcacacagggatcatacaattctattaacccctttatccagatgaggaaatttaagctttaagagctaattagtgtagagttggaatatatcctgggctgtctaactcaggccctggactgcttccacccactgggctttcctctcactcctccagcagacggtgggggtttgga

SEQ ID NO: 728366 - DNA, 1246 bp, Homo sapiens
atggagtctctctccgtgttgccaaggctggagtacagtgacacaatcttggctcacggcaacttccacctcccaggttcaagcgattctcctgcctcagcttcccaagtagctaggattacaggcacacgccaccacacacagctaatttttttatatttttagtagagacagcgtttcactatgttggccaggctggtctcaaactcctgacctcaagtgatccgcaagcctcagcctcccaaagtactgggattacaggtgtgagccactgcacccggccctcaggtatttctttacagcagtgccggcacagcctaatacaatgttaaaaagggaaaaattgttgtgacctgggaagacgagaaaagttttatgagaggctgatctggagggagtggtcacctgcaaggaaagcggagggatccgcttattcaaggagtttagcccagaaagggaagagaaatggttccagagctcacaaaagcattgaaatcttcttcaggcccaacatctctaggtccttcaattatttctcccttgcagtttgtgatgccattcccacccactgtgttattctttctcatagcatcctgtctcttccatcatagaagttgtcacaattagtaaccacatattgatttgattaataactgaatgcaactccttattctgattatttcatactgcataacaaactgccccaacaggtagggctcactgggatgatttttctgtaacacctggcattaactggcaactcagaatgtatccatttggtagttgggctgctcttcactgaaaatcctcatgcttttctcagggaatggctggaaggatggcctcaatgagctcactccccccttatggagtcccrtagtagagtaggtggacatcactatggactgagttgtgtccactctgcccaccacatacacacagctcccaactcatgttttggaattttaacccccaatgtgactatatttgaagataattttttttttttgatagagttttgctctgctgcccaggctggagtgcagtgcctcaatcttggctcactgcaacctctgcctcctgagttcaagtgattctcctgtctcagcctcctgagtagctgggattacaggtgtgcaccaccatgcccagctgatttttgtatttttagtagagacaggcttttgccatattggccaggctggtcttgaactcccagccccaagtgatacacctgcctcggcct

SEQ ID NO: 728367 - DNA, 1932 bp, Homo sapiens
ttattcttttgttgtttctgttctgatagtaagactgaaatactttttacatcattctagttcctctttgattttctgaacatccttgatttctagagatagaacattttaaacaaagaccttttaaaattatagtattttattgaatttatttttctatatcagtgccaggagacagtatccttgtgttttttttctggtcttagcatctatgtaaactttcctttacctatgacatttactatgggtttctgacacatagcctttttgaagttaaaaaagttctctagttttctgataatcaaaaaaaatcataaataggggctaagcatggtcgggtactttttctgtgatggttgatattattatgagtacattaatgaggttcattgtagattttctgatccacttgaatctattcttgcatttttgagaaaagtctgcctgaacatgatgtattattgtagcatctttgatttagttatgctaatattatttctagaatattttaggggaaggggatctattttcataagttaaaaaggcctttaatttctttacagtggtctgtctttcctggttttggaacaaagtcatactagccttgtaaaatgagttggaaatctttccttatttttctgttgttttggaacaacttgtatacaaaatacatgttctgtttcttgaaaattgggtggaactcgcttgagagctatttgcgtctttgtgtttgttagtgagtcttggtcattttagtatctttaaaaatttttgttcttttaatattttttcttattttcttcccaggcacagtttattttggaattcagataagaactgacacttataagcattccaaatgttaataaacattttttcttcaaggcaattaccttttcttaagctcaatcttagcactatcctttgcaaaaacaaaaattttaaaaaagtctaaatagattaaaatagaagtcaattctacccttctcatagaaattattctgaaagaattagaagattcaatgatataaattagattaagaggaggtagacttaaatttagtacctaaaatataattatatttcactaaataagaccgttattcttctaaagaggtcctctaagctggcttttattctgctgtagtttcatctcactaagagggaggacagtaaatcaactggtcttaccaaaaagtttccactttttagtagtgagctctctagcttcagataacttagaagtttatcttttcccccttggtaaccactttttctccaccgttcttgtagttgttgtaatagagccctggtttcttttcccccaagaaatgtccccttttctggtgtcatgcccactgaacaggaactgtaggaagggaccacagctgcctttcctttaggggatggtgctctccttggctcttcagtagttcacgtatgtgagaagtcacggcaagttccctaaagtccctgagaaagtcttggtagggtttcagtggctctgaactatctattgctttaattcagtcttttttatttttaactataaacaagccaaggtttttctcttcttttgaaatcgtcaacctccaatccaattttgtgacatcattctgtactttgaataatgaggccaaaagagtcattggctttggtgaaaaaccttcgacatttttactgactttgttaaattcttctaaacttgcattggctgttatacctacatarggagccacatgaagatcatagataaggtgaatcaaatgatttacatgtttactgacaagagcttttttagttccacccaaatgctttctcctaatagcccagccaggccttttgcaggctctgcagttgcttctcaggaccgtggtcaccaggtttgtctacagttctcccacaaaacctgacatatcttaaaattcaaaa

SEQ ID NO: 728368 - DNA, 601 bp, Homo sapiens
cataggctctcttggctattcaataaaaagtgatggccaaagtggcccgggggaaagaacttaaaacaaaaaaaaagtccaggttttcttggacctctttagtttgtggaatttcagaccaattttatattcacatrtgcttgtattggaaaattgagtggggtgtccttagctttttattgtaactgtttacaataattgcatcagatccagataatttttctagtgagaactggtccagcttcaagtgagggtcatgactagcgatttctgagagagggtcaagaactgaaggctgagcaaagcagccgcgcgggaaccggctgctcaggagcccacccctcactcacactgaggcttctttccttccccttcccctggggcttctttccttggggcttcttttcacttggggcttctttccttccccttcccctgcctgcccgtagagaggattccccggcatccactcttagtcctctcctcactgtcccagctgtccctgagtgacctcatgcactctcagggccttcctcctcacatgctggtgacttcacatctccatccccagctccgggccgggcaccctactgaacactgg

SEQ ID NO: 728369 - DNA, 601 bp, Homo sapiens
cataggctctcttggctattcaataaaaagtgatggccaaagtggcccgggggaaagaacttaaaacaaaaaaaaagtccaggttttcttggacctctttagtttgtggaatttcagaccaattttatattcacatgtgcttgtattggaaaattgagtggggtgtccttagctttttattgtaactgtttacaataattgcatcagatccagataatttttctagtgagaactgstccagcttcaagtgagggtcatgactagcgatttctgagagagggtcaagaactgaaggctgagcaaagcagccgcgcgggaaccggctgctcaggagcccacccctcactcacactgaggcttctttccttccccttcccctggggcttctttccttggggcttcttttcacttggggcttctttccttccccttcccctgcctgcccgtagagaggattccccggcatccactcttagtcctctcctcactgtcccagctgtccctgagtgacctcatgcactctcagggccttcctcctcacatgctggtgacttcacatctccatccccagctccgggccgggcaccctactgaacactgg

SEQ ID NO: 728370 - DNA, 1182 bp, Homo sapiens
ttagggagaagggccataatccagcttgggcaatgccacatactgctctctgggcctccctgagtgcggagtcctcatgatggaggcttcatggacaaagatgccagggaagacatcctggtaaaattacttgctaactgagttattttctgacagggtcacacctagccatctaggacacctggatgcacggcactcagcagagctaagcagtctgcaagtccttcacatgccttcttttgtcagaaatgagactgggtatccctggrgcaggcactgcatcctttcatcttactttgctctgcactcaacgcactaacacatgtgaatgagtgcttcacagatgcttctgaacacacagaagaaccactctttccctccccacatctatacactggaatgggcaggtgaccacactcaaccaaggaaaaaagtccaaatctaacagggtggaaattgttatttctaaggaaatattactacctcactttttaaaaaattttatttatttatttttttgtagagataggatctcactatgttgcccaggctggtctcaaactcctggcttcaagcaaccctcccaccttggcttcccaaagtgctggaattacaggcatgagctactgtgcttaactccacttgtaatttttaaaaatgtattaaaattataagatactattttgcacctattgaatcaatagcagtaacaataaaaagataaaatccaataccaaagaggtagactgagtagaaactggtgcaatcacatactactgatgcaattacagaccaaacccatccttatggaatgtaatttggcagtatgtctgaagagccatttaaaaaatgtatgaaccacctgttccagtaaattccttccctgggaatttattctgagaaaaataactttaaagatgaataaaaggattttaaacaaaaatatgggttcactacattacatataatgctaaaagccggaaacaacccaaatgcctaacaatagaatggttaagtaaattataatgcattgttagatacactgttccaataatatgagatatataaagattatgtgtcaacatgaagaaagtacaaaaaaaaattgaaaaaagtagaatacaaaagtgcatgtgtttgggtcagcattttgttaaaaatgtgcctgaaataaacagaagg

SEQ ID NO: 728371 - DNA, 792 bp, Homo sapiens
tagtgtttaagctctagtgtagttacttatatagttgattttaaatctaccattttgctatttattttcttttatgccagtctctcctttattttctcctttcctgcctatttctggctcatttaaagtgctttttattattctatctcttccattagctttttagttaaacctgattgtgttattcttttagaattacagtatttatgtttggcttattatagtctgtgattaatgcttttgccaccatccgaacaatgcaaaaagtttaaaacaattcagctgtatctgcctctctagcctttgtgctaaagttgttgtctattttcagtataaaaatgctacagtatccttgttgaatagtcatgttctcatatttacccatagattttccatttttgctctgttctttttttaagaatcattatgtgctatcatcttagttcatttttcttctttttttttawaatttcttgttttcagcactttgactgtggtatgcctaggtatgattttcattttatttaatttgcttggagtttactgactggttgatgtctttcatcagttttgaaacatttttggctgttatctcttcacatattctacactattttctctttctgacattccaattataaatctattagattgcttgtatcccatctgcctttaagtgtattttctgttctttccactttttctctgtgtgcttcattttggatatttctgttgatccatcttcagatttcttttgctgtctgttcttcccgttaacttttcaattagtta

SEQ ID NO: 728372 - DNA, 792 bp, Homo sapiens
tagtgtttaagctctagtgtagttacttatatagttgattttaaatctaccattttgctatttattttcttttatgccagtctctcctttattttctcctttcctgcctatttctggctcatttaaagtgctttttattattctatctcttccattagctttttagttaaacctgattgtgttattcttttagaattacagtatttatgtttggcttattatagtctgtgattaatgcttttgccaccatccgaacaatgcaaaaagtttaaaacaattcagctgtatctgcctctctagcctttgtgctaaagttgttgtctattttcagtataaaaatgctacagtatccttgttgaatagtcatgttctcatatttacccatagattttccatttttgctctgttctttttttaagaatcattatgtgctatcatcttagttcatttttcttctttttttttaaaatttcttgttttcagcactttgactgtggtatrcctaggtatgattttcattttatttaatttgcttggagtttactgactggttgatgtctttcatcagttttgaaacatttttggctgttatctcttcacatattctacactattttctctttctgacattccaattataaatctattagattgcttgtatcccatctgcctttaagtgtattttctgttctttccactttttctctgtgtgcttcattttggatatttctgttgatccatcttcagatttcttttgctgtctgttcttcccgttaacttttcaattagtta

SEQ ID NO: 728373 - DNA, 598 bp, Homo sapiens
cccagcactttgggaggctaaggtgggtagattgcttgagtccaggaattcaagatcagccagggtaacatggcaaaatcccatttccacaaaaaaatacaaaaactattcaggcrtgggggcgggtgcctatagtcccagctactcgggaggccgagatggaaggatcacctgagcctgggagacagatgttgcagtgagccaagattgcgctccagcctggcaatagagtgagaccctgccttaaattaaaaaaaaaaaaaaaaaaaaaaaaaaaaagaaccaggaacaattcctttgaaaaatcccaccccaatctccaacctcattaatctcacagcttctggtctttcagttctgttctgagattcccccagatctggcagtcagtcaccatcaggagaaaggcgctctgtcctaggtcacctgatcagtaatggaaactcagtctcctcctctcagtgcagaagagtgagcagcagcagaccagacccttgaggccaaccatggacctgatgggatgaggacagacgagaggccacagcccagaggggctcctgggtggctgcagagccatgccagtgccagacaaggatgg

SEQ ID NO: 728374 - DNA, 878 bp, Homo sapiens
gggagattggggctgcagtgaaccagggcaacagagtgaggccctgtctcaaaaaaaaaaaaaaaagagggagaacacacacatgcacacgcatacacacacacgcacgcgcacacacacatacatgcacacacacacacacacgcatgcgcacacacgcaaatacatgctcacrcacacacacacacatgcagacattgtcccttgagggcaaatgctactgttacacctccagagagaccaggtgccttgtccgaggctctccagctctggggctagaacaaggaaggtatcctgacctcattctcttgaagttttcattctgaaacaggtaagatactcagcaggccctgaaactgttctgattgaaagcacaaggccacctcgaactcaggacctcaggtctcaagcccagaaccttcgtatactggctcccatcgtgctcctatctctcttgcttgtgagaactgctctttatggggacactataactcggtgatttggaatcagccaagtctgggttgtttgtgtcttgattttgccacttactgaatggtggaactttgggcaagttctcgcacttctccaagacttggtctccttaacggtagaatgggacaataacccctttctcacaggaaaacacaccaagcccccagcccagtgcatggctcactacagtcctcagtgactgggccacttagtagtgcaaaccctggatttcgggtgcccacctcacctcatagatgttgaattggctctgcccacgggccagctcccggtaactggtggtgaactccccaatgaagtcatggctgcaagggaagacggctgctgagaccaaggccaggctgtgccctgcctctgcccagccccag

SEQ ID NO: 728375 - DNA, 878 bp, Homo sapiens
gggagattggggctgcagtgaaccagggcaacagagtgaggccctgtctcaaaaaaaaaaaaaaaagagggagaacacacacatgcacacgcatacacacacacgcacgcgcacacacacatacatgcacacacacacacacacgcatgcgcacacacgcaaatacatgctcacacacacacacacacatgcagacattgtcccttgagggcaaatgctactgttacacctccagagagaccaggtgccttgtccgaggctctccagctctggggctagaacaaggaaggtatcctgacctcattctcttgaagttttcattctgaaacaggtaagatactcagcaggccctgaaactgttctgattgaaagcacaaggccacctcgaactcaggacctcaggtctcaagcccagaaccttcgtatactggctcccatcgtgctcctatctctcttgcttgtgrgaactgctctttatggggacactataactcggtgatttggaatcagccaagtctgggttgtttgtgtcttgattttgccacttactgaatggtggaactttgggcaagttctcgcacttctccaagacttggtctccttaacggtagaatgggacaataacccctttctcacaggaaaacacaccaagcccccagcccagtgcatggctcactacagtcctcagtgactgggccacttagtagtgcaaaccctggatttcgggtgcccacctcacctcatagatgttgaattggctctgcccacgggccagctcccggtaactggtggtgaactccccaatgaagtcatggctgcaagggaagacggctgctgagaccaaggccaggctgtgccctgcctctgcccagccccag

SEQ ID NO: 728376 - DNA, 584 bp, Homo sapiens
gggatcctatgtaagcaaactgaaacccaactcagtgtaacaatcacattttaggaaaacgaaaattaagtgtaatcaattcgaaactaatctctaactggggacttttcatttgaatgatccaaataaggctaccgctccacgttagccaatcaaactattttctttgccttgcttctgtattcatctgacaaaagtcttcacctcatgtttcttgggtggaactcctgagccacttatcatctgggattgctggattcaagagtttatttgctaaaataaactctttaacattttcatgtacctcagtttatctgtgaataatagactattagtgattcctctttaacactgaaacgtgtgtatcagacctatgatagttaactatgttcctttccttacttaaatttgtccactagcctagtcagattattaacctggattctccttcaacaataagtccagaacatctatgcctatccttctttgttgcaagggtaaaaatgtatataattggctaagcaaataaagaatgagctaatgttaaagtggcatgtccagtttaacagaaaccmgggccaggc

SEQ ID NO: 728377 - DNA, 738 bp, Homo sapiens
tactcatttatactataaataattagatggtaaatactgaatcaaaattcagttaataaaagttttaaatattttggccatttcttccttcattttaaagaataatacaaattatcagcttcccaaaaccaattttaaagtatttattcacaagatttccccccattattttataatttgattcatttatagtttaatctattatttatyctgatttttttaccttttatccatattttagtcatatttagctcaaaaacatattctggcaagaaatcttttatacatgtaaattctctgatatatttcatgaagtagaaacatgggaagttttaaaaatatgcctcaaatgtggtttgaaatgtcacaggccttctcttaatccaccccaccccccaaaaaaagttacaaaaatgttcctgggatttggttcactcatttttctcacagaaaagtaaccacagtccacatctcattagctgtcagggtgatgtgcagctggaagggaatcagcacgcaggacccagggctgggtttccttcagtgtaactctataaggaatctcctataggattccatatggagagagtcgttcccaaaccatgaaatctacaatccatcccttttgtaaatccaaaggtgatgtcttaaagacttgcaagcattttcattgcactgaatattttaatcaggtaacaataaattagaataagtatttaattaagtcctttatgtcat

SEQ ID NO: 728378 - DNA, 1010 bp, Homo sapiens
actcctgggctcaagcgattctctcacctctacctcccacagtgctgggttacaggtgagagccaccccatctggccagaagtggatcttgagggtgctagatgatgcaaatataaggttgaaaggagagagttttggccaggcgtggtggcttatgcttataatcccagcacctcgagaggccgaggcagtaggatmccttgagctcaggagttcaagaccagcttgggcaacatagcaacaccttgtctctacaaaaaattttaaaaaccaaaattagttgggcgttgtggcttgtgcctatagtaccagctactcaggaggctgaggtaggaggatcacttgaaccggggagtcagaagttgcagtgagctgaaatctcaccactgcaccccagcctgggtgacagagtgagcccctgtctcaaataaaatgagtaggccaggtgtggtggctcacgcctgtaatcccagtattttgggaggctgaggctggtggatcactggaggccaggagtttaagaccagcctgggcaacatagtgagactccatctctgctaaaattagccgggcatggtggcacatgcttgtaatcccagctactctggaggctgaagccagagaatcacttgaaccaggaggcagaggtttcagtgagctgagatcataccactgcactccagcctgggcgacagagcaagactctgtctcaaatgaaaaaatacatacataaattaattaattaaaaaagaaaggagacagtttattgacaggggagaactctcctgcaacacaggatgtagctggagccagtcctaacatgcttctgggatagctccatgaaatggtttacaataataaggtggggatgctgggatggccattgcagagttttgggattttttgtgcatagtaaaatacacataaaatttgcctcttcactttatatattgtggtaggatatacgtaacataaaatttaccattttaaccacttttaagtgtccaatt

SEQ ID NO: 728379 - DNA, 1010 bp, Homo sapiens
actcctgggctcaagcgattctctcacctctacctcccacagtgctgggttacaggtgagagccaccccatctggccagaagtggatcttgagggtgctagatgatgcaaatataaggttgaaaggagagagttttggccaggcgtggtggcttatgcttataatcccagcacctcgagaggccgaggcagtaggataccttgagctcaggagttcaagaccagcttgggcaacatagcaacaccttgtctctacaaaaaattttaaaaaccaaaattagttgggcgttgtggcttgtgcctatagtaccagctactcaggaggctgaggtaggaggatcacttgaaccggggagtcagaagttgcagtgagctgaaatctcaccactgcaccccagcctgggtgacagagtgagcccctgtctcaaataaaatgagtaggccaggtgtggtggctcacgcctgtaatcccagtattttgggaggctgaggctggtggatcactggaggccaggagtttaagaccagcctgggcaacatagtgagactccatctctgctaaaattagccgggcatggtggcacatgcttgtaatcccagctactctggaggctgaagccagagaatcacttgaaccaggaggcagaggtttcagtgagctgagatcataccactgcactccagcctgggcgacagagcaagactctgtctcaaatgaaaaaatacatacataaattaattaattaaaaaagaaaggagayagtttattgacaggggagaactctcctgcaacacaggatgtagctggagccagtcctaacatgcttctgggatagctccatgaaatggtttacaataataaggtggggatgctgggatggccattgcagagttttgggattttttgtgcatagtaaaatacacataaaatttgcctcttcactttatatattgtggtaggatatacgtaacataaaatttaccattttaaccacttttaagtgtccaatt

SEQ ID NO: 728380 - DNA, 1010 bp, Homo sapiens
actcctgggctcaagcgattctctcacctctacctcccacagtgctgggttacaggtgagagccaccccatctggccagaagtggatcttgagggtgctagatgatgcaaatataaggttgaaaggagagagttttggccaggcgtggtggcttatgcttataatcccagcacctcgagaggccgaggcagtaggataccttgagctcaggagttcaagaccagcttgggcaacatagcaacaccttgtctctacaaaaaattttaaaaaccaaaattagttgggcgttgtggcttgtgcctatagtaccagctactcaggaggctgaggtaggaggatcacttgaaccggggagtcagaagttgcagtgagctgaaatctcaccactgcaccccagcctgggtgacagagtgagcccctgtctcaaataaaatgagtaggccaggtgtggtggctcacgcctgtaatcccagtattttgggaggctgaggctggtggatcactggaggccaggagtttaagaccagcctgggcaacatagtgagactccatctctgctaaaattagccgggcatggtggcacatgcttgtaatcccagctactctggaggctgaagccagagaatcacttgaaccaggaggcagaggtttcagtgagctgagatcataccactgcactccagcctgggcgacagagcaagactctgtctcaaatgaaaaaatacatacataaattaattaattaaaaaagaaaggagacagtttattgacaggggagaactctcctgcaacacaggatgtagctggagccagtcctaacatgcttctgggrtagctccatgaaatggtttacaataataaggtggggatgctgggatggccattgcagagttttgggattttttgtgcatagtaaaatacacataaaatttgcctcttcactttatatattgtggtaggatatacgtaacataaaatttaccattttaaccacttttaagtgtccaatt

SEQ ID NO: 728381 - DNA, 2046 bp, Homo sapiens
tttgtttttttctttgtgacttgcctgttcatatcttttgatgagtttcacagagagtggattgtstttcatcttttaattacaggaactctttataggttttacatattagcccttcacaaatatttcttccctgtctgtcactcgtgtttaattctattaatagtatctttaattacagttaactttgtcagccttttcctttatgttatctggttttgcttcatgctgggagaggctttctttactgtaagattataaaaatattctacatttttctagtatttaatgcatttaaacatttttgttacttattagaaatatgttgttagtatgatgtgaatttggaattaaactttctttttttctgaaggaatgaccattttccccagtcttaaaaaaaatcagtctttccccacattttagcttatgctaaattaccatatgtatctcgagttgtttttgtacatcctaatatattttactgctttttcactattcttatttcaggaatagattgctttgattatatcggtgtactctcctccttcattctttcctctattttctgaactgcttttgcacaattttcatttcttttatcactaatggtgctgaatatttttcatatttatacttggattgttcttgtgttaattctttgatggtgtgctttgccaatgtaaatgtattgactttgagatgcagccttgaaatttctcagaggagacaccaggcaggcactgaaggtgtgggatgaggtcgtgcctggaaagatttaaatgtgtgaatcactctcacagttgacaccaggagtagttgagttctcagaagaaggatgtcaggagagaaatgaatgaagggccaaggtttaggagatgaggatagcagacaagaggaagaagaaactcctcaccaagccagaatcaacaagatccacaggttaggaaggaaattataaagatcgaaacgctgggccacataggaggttcttgctgaaaaaataagatcttcagcgtctctctttagggagagatgacaaaaatggcacaggcacaatatcaataccataggggtgaggatttgtagacagctctgctgacacttggtcaggggttcagaccctaacacccaagttttattagtcacatttgcagagggatgtgttttgtgctattttctatgctagtgatacagtctgattaattaattcacatattattccaaccagtggccctgatgactcaggacaccaatttcaagcctgcggtcagcaagaatggcaatctgtgagaatgagctcaacaaatgctaattgggccatccaaattctgaaccgttgaccttagtccttaatcaacaaaagagactgaccgtattcaaagaaacagcaaatttgcctttgtattatgtgaaagaaaagtatagctgttttgttatctaagttagaaataggtcccaaaactgtgagttttaaacaccagcacatagacaacttgaaatattgtttaaagtatttgaaataaatatggtttatatagacagttacttcaacaaggcatgctgtgcagcttcaatcctgctgttcagtgatgcttcaatacccttttgttgactattcaggaaattcactataggctcttttgctttcttcatactcactcagcttgcttactttcagcagttgacttaatcttttattatacaagaaaatataaatcattagttttaagtttcctgtcatttgcctcaaccccagtcagcctctcacctcaaaatatatttgcctatacctttgtctctgctgctgaatctgtcggtagctcttcccacctctttctttctcctcttaggaagatataatccttttgcactttgaactaagacttattgacatgtacttcttttaacttacacccaagttaaaaagtcaaacaatgttgaaaggttaattcaaaaataatcaatcctttggttttaaccctttcaactctttcagctattttttcattcatttgacatttcaccttcacattttaaaataga

SEQ ID NO: 728382 - DNA, 2046 bp, Homo sapiens
tttgtttttttctttgtgacttgcctgttcatatcttttgatgagtttcacagagagtggattgtctttcatcttttaatyacaggaactctttataggttttacatattagcccttcacaaatatttcttccctgtctgtcactcgtgtttaattctattaatagtatctttaattacagttaactttgtcagccttttcctttatgttatctggttttgcttcatgctgggagaggctttctttactgtaagattataaaaatattctacatttttctagtatttaatgcatttaaacatttttgttacttattagaaatatgttgttagtatgatgtgaatttggaattaaactttctttttttctgaaggaatgaccattttccccagtcttaaaaaaaatcagtctttccccacattttagcttatgctaaattaccatatgtatctcgagttgtttttgtacatcctaatatattttactgctttttcactattcttatttcaggaatagattgctttgattatatcggtgtactctcctccttcattctttcctctattttctgaactgcttttgcacaattttcatttcttttatcactaatggtgctgaatatttttcatatttatacttggattgttcttgtgttaattctttgatggtgtgctttgccaatgtaaatgtattgactttgagatgcagccttgaaatttctcagaggagacaccaggcaggcactgaaggtgtgggatgaggtcgtgcctggaaagatttaaatgtgtgaatcactctcacagttgacaccaggagtagttgagttctcagaagaaggatgtcaggagagaaatgaatgaagggccaaggtttaggagatgaggatagcagacaagaggaagaagaaactcctcaccaagccagaatcaacaagatccacaggttaggaaggaaattataaagatcgaaacgctgggccacataggaggttcttgctgaaaaaataagatcttcagcgtctctctttagggagagatgacaaaaatggcacaggcacaatatcaataccataggggtgaggatttgtagacagctctgctgacacttggtcaggggttcagaccctaacacccaagttttattagtcacatttgcagagggatgtgttttgtgctattttctatgctagtgatacagtctgattaattaattcacatattattccaaccagtggccctgatgactcaggacaccaatttcaagcctgcggtcagcaagaatggcaatctgtgagaatgagctcaacaaatgctaattgggccatccaaattctgaaccgttgaccttagtccttaatcaacaaaagagactgaccgtattcaaagaaacagcaaatttgcctttgtattatgtgaaagaaaagtatagctgttttgttatctaagttagaaataggtcccaaaactgtgagttttaaacaccagcacatagacaacttgaaatattgtttaaagtatttgaaataaatatggtttatatagacagttacttcaacaaggcatgctgtgcagcttcaatcctgctgttcagtgatgcttcaatacccttttgttgactattcaggaaattcactataggctcttttgctttcttcatactcactcagcttgcttactttcagcagttgacttaatcttttattatacaagaaaatataaatcattagttttaagtttcctgtcatttgcctcaaccccagtcagcctctcacctcaaaatatatttgcctatacctttgtctctgctgctgaatctgtcggtagctcttcccacctctttctttctcctcttaggaagatataatccttttgcactttgaactaagacttattgacatgtacttcttttaacttacacccaagttaaaaagtcaaacaatgttgaaaggttaattcaaaaataatcaatcctttggttttaaccctttcaactctttcagctattttttcattcatttgacatttcaccttcacattttaaaataga

SEQ ID NO: 728383 - DNA, 1224 bp, Homo sapiens
tgtgcccgtgttcttgacccatagaaactgtgagataatacatgtgtgttgctttaagctgctgcatttgtgaaaccttgttacacagcaatagataatgaatacactgggttcgaatcctgcctttgccactaaactggtgtgtgaccttgggccaagcacttctcttggatctttatcttcctcatctgtaaaatgggaacaacacctacctttcaggattgagatgaggaccagcacatgctgttccctctccatgaacaactcctcctgccctttctttaccctgcatatcagttagaatttaacttagctgcgggaacagaaacggaattacagtgacttcactagagaagagtttactttttttttttttggcaggccagggtaggtacagctgctcatgaatagccctgaagacccaggctccttgtcacttcctcctccaccattcttatgtgactcattcgtgcccacagctcctctgggatcctttaccgcttttgtgcacacaggctcctggtatgtttttcctcctgacagctggtatctggggctttcctgaggctgccagagcctgctatggctccgcacagggagaacctgaagtacctgagaatgtatgtgctccatctatagaaacatttcttgtttctagaactgccctgtgggacttcactggatttcacatcctcactggcttcttctcttcctggtgaacttctgtactcctatagccatttttcctggaaacatttccaaagcatcactgtcatatgattcttcatctcaagatttattctgggggaacccaactaagacaatcctcaaggacaccagatggctgttctagtgkcagcagccatgttccaggaaggacacagggtaaatggatgacagacaaaaggccaagtctatctccttagttaggaaaactatagcttgccatgtagccccgcctagtagatttttcttacttctgattggccagtcttgggtcacgtgatcattgtttggtgcaagggagcctggagaggaaacatatttttaaaattttaatttacctttaaaattgaaatatactgttcctatggtaaagtgcacaacagctgaatgatttttttgtaaataaatgtatgtatccattgtaactaccacccaggacaaaatatggaatgtcactggcactccaagagcctgggggtggggtggggcaaatatttc

SEQ ID NO: 728384 - DNA, 943 bp, Homo sapiens
ggcaacatagggagaccatgtctcttcaaaaaaatcacaaaaaaagtcagccaggtgtggtggtgcatgcctgtagtcgcagctacttgggaggctgaggtgagaggatcacttgagcccaggaggccaaggctgcagtgagccatgattgtggctctacattccagcctgggtgacaaagtgagaccctgtctcaaggaaacaagaaagaggagacatagagatcagtatggatggaaggatgtgagttctggcaactgaggaagggctacagtggactagaacaagcagaaggaaaaattaggaggaaaatcagaaggagattgagagcctattaatttgtcaaaaagtcattagcttaggttatttcagcccaaattgtaatttttgtacaaattcttctagaacagatgataaaagtttcctctaaatttaacttttggtttttcacatagattttacttcatgaacactgaattgtaaccacttttattcacacatgaatatgaaatagtatatttatgttattccatgtggycctgcagacccttttcaccctgaaccccaaaccccagggatgcagtctcttggtttgtggtaaaacagccagcacccccctcgtgttctcttcaagacagcacacaaattctgaggcagagtccgccctcactagacttttgtgtatctgcccatggactctggaacacttgtttctaaagagcatcaactgaggctggctgtggtggttcctgcccgtcatcccagcactttgggaggccaaggcaggaggctcccttgagtccaggagttcgagaccagcctgggcaacattgcaagacccctgtctctacaattaaaaaaaaaaatcagctgagcactgtagcatgtgcctgtagtcctagctacttcagcggctgacgtgggaggatcccttgaacccagg

SEQ ID NO: 728385 - DNA, 1273 bp, Homo sapiens
aaaaaccaactacaaacttttcctggcctcatacctcctcccagaccttcccgttctgcctcccagcttccttctttccttattcacgccctgggcagcccatgtggctacctggaaactcctgtttcgggggcggggtaggggggcggtgcttgggagactgctttctcaggcctcaagctccattaacaaatatttgcaatgggcctactggagttggaaagagaagacagagcctggctatggatgcctgggtgtctgggagccacttgacaagtaacacagcacaacacaacagaacttctgtgtgccacctacagaatggsggcaagacattctagaacagtggggacaacttccttaagaactacaatttgctccttcattttggccattctggtggctcagcggagttttgggaaaactctcccacactaaggagaagagctaaggagctaaggagaagagtgccttcccccagggcctttagtcagctctctgcagcgcagcatgtccatatttgtctccctcttaactactgtgcaattgtctaagagatgttttggattcaaggaaactgttgacccaggagccttgctgtagacttggtgagctgctccagacccttctgctgtccgtaaggacagctgtgaagtgtcagggtggagttcctcattgcaagcttctgtgactaagtttcgtcagtgcctttcctcagaacactgtgcagagaccttttagacactccatattatcatacacaggccagagctggaggggggacacgggtcatgaggatggtcagggatgaaaaggtgatgatgacaaggtcatcaaggaagatgttcacgttaggcaccgtttgccaaaaacaggcaaataagggcagtccctgcctggtctcagctctggactgtcaaagccttctgggccagccaggtttaagtcagctccttcaacggctggaggtctgtgagtttaaacaacagcatgttatgcagaacaaggaactgtgtcgtggttggcccaacaggaccattctagtaggagccattgttcactgacccgtatatgttgagacgcgtgtctgtctgttgtcccaaccaaatgattctttattgtactgtatttgtctccaagagtgtgaagcccaactggaagactcatgtttattttgcagtactgtcaggaatggctgttttcttttttttctttttttttcttttttaaaattatactttaagttctgggatacatgtgcagaatgtgcagg

SEQ ID NO: 728386 - DNA, 930 bp, Homo sapiens
ggactgacccctctgaccaccactacccataaccagtactgtctctgcgtctgagtcctggcctggtttacctgctgggtgacccytggcaagttactttgcctctctgggccttagttcccgcacgtgtaaaatgaggttgggctcaatgacctggccagctctgacatcctgtcattttcttgccaaggtctcagcctatcagttgtgacacaagtctcatcagtttcagttttcttgtccatagaatgaccacagatcggccagatgcggtggctcacgcctgtaatcccagcactttgggaggccgaggctggcggatcacctgaggtcaggatttcgagaccagcctgaccaacatggagaaatcccgtctctactgaaagtacaaaattagctgggcgtggtggcacatgcctgtcatcccagctacttgggaggccgaggcaggagaatcgcttgaacccaggaggcggaggttgcagtgagccgagattgcgccattgcactccagcctgggcaacaagagggaaactccgtctcccaaaaaaaaaaaaaaaaaaaaaaaaaagaatgacggcagatcccataaggataaggatcatgtccatctctgtcaccacatccccaatcctggcacctagtaagggctcagtaaatgttccttgcatgagctcagctagctcaggggctattataaggatccaatttacagatggcagacagcagacactcccttctttctgcatttcacccactgaattgacaagtgcagtgcccccaggggcttcctcctgggcgagtcaagaggggcatttggtcctcttgtcctgcattctcaggcatgggtagatgggagatgcccccctctgcagccccaggcagtgggcctgaggctgtcctcacagagtgagccacacatcatggggg

SEQ ID NO: 728387 - DNA, 598 bp, Homo sapiens
ggattgcagggtcctgcatgggaacctgaaccctgccccccaaccagccttggccacctgtgccactgcctcccgcccagatgaaccaaggggcctcctccctgggtccccacgtctaccctcagcccccacagtctattactctccacgcagcggccagcgaggcccatttacaactgcctggctacaggctccccgcatccccaggatggaatccccgccttgaccttacatggagggcctgtccccatctgctcccatcacagccccacaacctggccccatggctcgcctctttgggcttcttggccctcccaccatccccttggacaccagctccagtggggcaggggctgcgcctgcctgggaaagtacaggtgtccagcaggtgccaaagtccatacacttccacaagtggggaaactgaggcacggggktgaggtaacttacctaaggtcaaacagaggtcgctggcggggtgcaggttcaaacccaggcatttgacttgaggtcctgtgtgaccaggctgggcctaggctggagaagagagactggaacctgagctggtgtcagggcttgtggcggtgggacctgctga

SEQ ID NO: 728388 - DNA, 1873 bp, Homo sapiens
ctggtcttgaactcctgggctcaaagtgatcctcctgccttggcctctcaaagtgcggggattacaggtgtgagccaccacacctggcccaccttcttattgccccccccccttttttttttttgactcctgtctactttcctgctgccgcttgctccaaggctcccactggacattctgcccaaatacctgtccttacccaggtgttctgtgtaggagaatgagatggtcacttggtgagcaaggagtccatatgtggggggcttgaatggaaggatcttaatgcttcctgtcctgaagtgatgttgtcctggcccacccatctcattttttactttaaaatgtaccagaaggtaggatgacttacatctaactcactttaagccccgggaaaagtggagaccaactaagtcttgctgtctggagacctctctgacccatctctgttgggcagtattttgtcttcacgccgtctcgtagtcccttcctaaaagtaaaaatagggagtccctggaacctcttacttacccatttgcggtctattgctgaggagggtttaattgatggccactctaggcaacccacatctacatgtttggggaatcttaagtcgcctctgcgtaccgctctacagaatgctgaggtgtcaggaataaaaggggcttaaaggggatgcatagatgaaagggaagttttgtggctatttgaaggccttactaggaccagaagaaaggaggaatgcagtccaggcagggaagtgcgtgagccagagggccaaggaggaatggggcttgtgtgaggaaatggggagttctcaaggaggaatcctagggtccctgtggcaaagcctaaggtggcctttcttctgaactcaggacagcattccagtcttgaccactcgtttgacttccagatccgtatcttgttcaaatacagtggattatcttctttttacttaaagtttttatttaaattcgagataattatatattcaaatgcagttgtaagaaataatctcttttatccttttatgcagtttcccccattggtaacatcttgctgtattctctctctctctctttttttttttttttttttttttttttttttttgagacggagttttgctcttttgcccaggctggagtgcggtggcatatcagctcactgcacccttacctttgcctcccaggctcaggcaatccgcctgcctcagccttgtgagtagctgggactacaggcgtgcaccaccacttccagctaatatttatattttattgtagagttggggtttcaccacgtcacccaggctggtctcaaactttgggacttgagcaggccacccgccttgtcctcccaaagtgctgggattataggcatgagccaccacacccaacctgtattatatttttaaaaattgaatgcctctagtttaaaaaggtatatagttgtgttacagccaatagcatttccttctctgactcagtagtaatactaggtttttttttttgaaacggagttttgctctgttgcccaggctggagtgcaatggcgcaatctcgactcaccgcaaactctgcctcctgygttcaagcaattctcctgcctcagcctgctgagtagctgggattataggcgtgtgccaccacacctggctaatttttgtatttttagtggagacggggtttcaccttattggtcaggctggacttgaactcttgacctcgtgatccgcctgccttgacctcccaaagtgctgggattacaggcgtgagccactgtgcccggccagttttttgttttgtttcaaggaatctctgttcacatataaaaaattgcgtaaaagccccccttttcttacgtacatgatatca

SEQ ID NO: 728389 - DNA, 1873 bp, Homo sapiens
ctggtcttgaactcctgggctcaaagtgatcctcctgccttggcctctcaaagtgcggggattacaggtgtgagccaccacacctggcccaccttcttattgccccccccccttttttttttttgactcctgtctactttcctgctgccgcttgctccaaggctcccactggacattctgcccaaatacctgtccttacccaggtgttctgtgtaggagaatgagatggtcacttggtgagcaaggagtccatatgtggggggcttgaatggaaggatcttaatgcttcctgtcctgaagtgatgttgtcctggcccacccatctcattttttactttaaaatgtaccagaaggtaggatgacttacatctaactcactttaagccccgggaaaagtggagaccaactaagtcttgctgtctggagacctctctgacccatctctgttgggcagtattttgtcttcacgccgtctcgtagtcccttcctaaaagtaaaaatagggagtccctggaacctcttacttacccatttgcggtctattgctgaggagggtttaattgatggccactctaggcaacccacatctacatgtttggggaatcttaagtcgcctctgcgtaccgctctacagaatgctgaggtgtcaggaataaaaggggcttaaaggggatgcatagatgaaagggaagttttgtggctatttgaaggccttactaggaccagaagaaaggaggaatgcagtccaggcagggaagtgcgtgagccagagggccaaggaggaatggggcttgtgtgaggaaatggggagttctcaaggaggaatcctagggtccctgtggcaaagcctaaggtggcctttcttctgaactcaggacagcattccagtcttgaccactcgtttgacttccagatccgtatcttgttcaaatacagtggattatcttctttttacttaaagtttttatttaaattcgagataattatatattcaaatgcagttgtaagaaataatctcttttatccttttatgcagtttcccccattggtaacatcttgctgtattctctctctctctctttttttttttttttttttttttttttttttttgagacggagttttgctcttttgcccaggctggagtgcggtggcatatcagctcactgcacccttacctttgcctcccaggctcaggcaatccgcctgcctcagccttgtgagtagctgggactacaggcgtgcaccaccacttccagctaatatttatattttattgtagagttggggtttcaccacgtcacccaggctggtctcaaactttgggacttgagcaggccacccgccttgtcctcccaaagtgctgggattataggcatgagccaccacacccaacctgtattatatttttaaaaattgaatgcctctagtttaaaaaggtatatagttgtgttacagccaatagcatttccttctctgactcagtagtaatactaggtttttttttttgaaacggagttttgctctgttgcccaggctggagtgcaatggcgcaatctcgactcaccgcaaactctgcctcctgtgttcaagcaattctcctgcctcagcctgctgagtagctgggattataggcgtgtgccaccacacctggctaatttttgtatttttagtggagacggggtttcaccttattggtcaggctggacttgaactcttgacctcgtgatccgcctgccttgacctcccaaagtgctgggattacaggcgtgagccactgtgcccggccagttttttgttttgtttyaaggaatctctgttcacatataaaaaattgcgtaaaagccccccttttcttacgtacatgatatca

SEQ ID NO: 728390 - DNA, 985 bp, Homo sapiens
taaaaagagcataggctcaggaatcagcattaaacttgaattttagctctgaatctcactggttatgtgatcttccttaatttatttaaatgatagcatttataagaactgaatacgataataatgcctccatcatttgttatttgagaactgcaatagacaataatgtaagtgaacttctagttaaaagcggaagaattaatgtactccatttacctcttctatctcctcactgttattgcagtgaaatgtgaaaaagcatagaaatccacaaggaaaaagaggacaggagaggggacatcagtggatgagcagttttaagaaaattctggaaacctaaaaatggtcagaggagaggtaccacatgtgatgagataaagaaagtcaaattgcaaagacatgtgagtaagaatggattttatttgccccacagatttcaagagagattctgatgttggagtagtcaagtgtggacagtgtggaagtaaaatgtggggctgaaaaggggtgtttatcaaaagtctgtacacaaaaccatcaaacctttgaacatggagagctatgtgtctgccctctaccccttaggcaggagataggaagaggatttcatttcagaatttgaatgcctccgcctccaaaagcacagcacctccagtcaactttctcaacaccttacttttaaatattggctatggaggttcactggttaggtaagcaatgcttccaacatgaaagagagcagtgaattaaaaaaaatgactctagaagaaacagagataatacaggagtcagaaaagcttcccccttctccaaaatcaaaatcatatcctgagatgtttgagaaatgattacttctataaataagaagtgaatgttataagaaaaaaaattcaaagaacagtaagtagctcaaaatgaaaaattatgactgccaaaattataaacaaatwtgagaatttttttgagggagttgttctgttttgtt

SEQ ID NO: 728391 - DNA, 637 bp, Homo sapiens
attctaggtgcgagtaggaaccagccagggaagaggaagaagcaagcctacctgagtccatggtgccagcagccaggtcactgagagactttccwtggagctctccagtcactgacctgactggaagggttcgttttttttcttaacccttgaggaggagaaagcaaattgtgggactgaatgtgagccacctgtggacagagggaggttggaggggctggatctctgcaatccctttgcgtgtcagcaaatgccaagaccaacctagcccggtgttttttaatctcctgggccccagccagctggtatttagagaaattctacttgctccagctccctctgccctcactctcacaccaaggcagggtccttttgtcctgtaggggtatgaagagaagataatcagaggaagggatggacatctgataatcacagaaactacagagtctatacaccgaaatagagatgggaaggaacgttctgacaatgacctgggcctggcaacatgtgtgataactaattgataatagccagtgtgtactgggtgtctgtgatctgcagggctcctcatatgtgcctcattcgatgatcacacacaggccaggagatgggtgcaaccgtggctcccattttgaaa

SEQ ID NO: 728392 - DNA, 637 bp, Homo sapiens
attctaggtgcgagtaggaaccagccagggaagaggaagaagcaagcctacctgagtccatggtgccagcagccaggtcactgagagactttccatggagctctccagtcactgacctgactggaagggttcgttttttttcttaacccttgaggaggagaaagcaaattgtgggactgaatgtgagccacctgtggacagagggaggttggaggggctggatctctgcaatccctttgcgtgtcagcaaatgccaagaccaacctagcccggtgttttttaatctcctgggccccagccagctggtatttagagaaattctacttgctccagctccctctgccctcactctcacaccaaggcagggtccttttgtcctgtaggggtatgaagagaagataatcagaggaagggatggacatctgataatcacagaaactacagagtctatacaccgaaatagagatgggaaggaacgttctgacaatgacctgggcctggcaacatgtgtgataactaattgataatagccagtgtgtactgggtgtctgtgatctgcagggctcctcatatgtgcctcattcgatgatcacacacaggccaggagatgggtgcaacygtggctcccattttgaaa

SEQ ID NO: 728393 - DNA, 2538 bp, Homo sapiens
ggcttgggctgcctgggccttcttaggctatagcaagtggaaaataaacatcaaagcggagggaacacagtctcaggcctggggtggaaactgctaagaggctaggacttcctggccatgtggcttgggagagtcacttccctcatcttagccacagtctcttcagctgcaaaatcagggtggatccactgacctcagaggctgctgtgaaaatatgagaagcagctgacaaaccagagatggatctcaggctggggtcaccggcctctctgtgcattggataatttccctctcttcagaaaaacgtgctgatgaagttctgctgaagaggttggggcttcatttgtaccctcgattcagggtctgtgatggagaaagctaattcagagctacttcctgcggggaggcaggctgaacaggacatgaagccattccgaaatccctgcaacgaccctttgtcttcatcaggtgctcagtgaaattctcccctgagacctgtgaccagaatcctgtcagttattaggatttcagtgacagcatccccaccttggctgatttttttgtgtgtttttagtagagatggggtttcaccatgttagccaggctggtctcgaactcctgacctaaggtgatctgcccgcctcagcctcccaaagtgctgggattacaggtgtgagccaccgcacccggccagcttcagcattttatgttcagcaaaggtgttcgaaattatggagcataaactctgctaaagcattttccctgcagtatctaagctcaaagagatgaagcagcttgcccaaggttgcatggccagggcaggaatcctggatcagaccaggccaaggctgaagaaaacagctcaaagcaggcaagtcagaagtgagcagaagacagcaatgacctgcacgatggcttaagaagaaaaagcagggtgacttgggacacagaaagcagcctggaacccacaaagcagaaagtagcttcctggttacccagagctagggaccccactgtggaaggagctagagggcccagcccagggaactaggcctgcccaacaccctcatcaccctgctggaccctggcaagggaggtatcctggcatcctcgcagtgaggatgataggtgagggcttctaacttggagtactacactccaaggttcaaatctcacttctgctgccacttgccagctggtgatctggacaaaaggtatcacttctctgagcttctactttcttctccaaaaaaggaataataatacccttttctcaaggaagctattcagaaggccaaggaactcctgtggggtrctgagaaagcatacctaaaacactaacattaggagaacgggacacaacagcgtttgggttctggcttgaatctgctccgtgacactgggcaagtcccccgcccactttgggactcagccttctctctcctatcacctggagaatcgtcttcctaatagacaaggaagatgctcatctctctatgatgcttgctgggatgcagctttttctagtaccagatttccaacctgctggctgaacagaaaggtgaaaaccagccaggggagtttgcccaggcacccaatcatggaggctgggggcatggaggggacttttggagggcggtctcaggaggggccaggactccaggggaagttccttctaggtgcacttacctcccttgggcactctcatctctgggctccagcccttgtgcctgtgtgccaaggctgtctgctggcagagccctggagaggcaaaggagatattgcatcagggatgggcactgtggagaggggccaagccttcaaagaggcagagtgagggtttaggctcccaagagcactggacagtgacatttgggagaaggactctggaatgcaggggaggctgcttcagctcaagataccacagctggagtctcaacttatctactcctacagggaatgaactggctcacttcttaggcagagaggtgtgagctgaagtctgagctaaggcgccgctgccttagggagcccctggtttatgccaaccaggcctctcccctcctcttggcctagggaccttggactccaggaaaagtaaatataacaataagcaacaacaaccaccactacacaccactattgccacctgagatggctgggtatggttgatcaggttgtggactgcacaattccaaatggtaccacaggcccagcctacaaggaatatgctgcttcctggaattgaacacaacatcctactgtcaccacctaacactgaccaaatgctgaccacgcaaatacctgtgtcatttaaaccccaataaaaggaaagtgtgatgatcccaattttacagatgagaaagcatgacaccaagaggaagagcaacttacccaaggaatggatggaaagagtttcaccatccagatctgtaagaccttcctaacacttaatctcccatggttacaggaacgaggctgtgtccacgatgagtcctggcatgtagccagaaccaggccaaagtggaatcaagggga

SEQ ID NO: 728394 - DNA, 656 bp, Homo sapiens
tctccttggaaaacctttcctgacctcctctacaaagctaactcctactggcatcatttgcaccccttcctccaggaagtcttccctgactgcctcctgtccctgtaccagtatcccccaaggtgcttagcatccygtgtggcttctggtgttgcttccctgccaaccccatggaatgtgcagggctggaccccatcctagtccccacatcctctcagaacccagcatggtccccaaacttccagcacagggtgcacaggtatttgttgagtaaacagaaggatggattgagaaagaaatgaaggcaccagaacactctgggacagaaggaaatctaaactaaaccctctctgtgctctgggaaaaagttctaggcagaagctcctgtccaataagaatcagtcaacttgactcaaattggcctcacctactcattggtccacaaactctgggccaatggcccagcctctattcagttttctcgcctgtaaagtggagacagtagtattgcctatgatagaattgagctaagaaaaataaacgtaaagagctaagtacccagaaagcacccaagtcttaactgcaatcattactatttttatcagcatctaacactcaccaaatcaaagttttataacttgtagggactcaaaaga

SEQ ID NO: 728395 - DNA, 1217 bp, Homo sapiens
aattgcaacaagataaaaagtattacaatcaaagaatataaaaaattcaaactttgttcatgaggattttaacagtatccgtcggtatttgggaaataataagcataacaaaaatgtagattaatttttaatttccattaaaaagcatgttttcattgcattgaagacttaatataggacctggaaaaaatgagcttttatctggatagttatatttgaagtcaatactatcgccccaaagacttttaaacaaacacatgtcttctaaaggctttagtactgttttataatgtttgcacttttcttgttctccaggcagtgtttagtagttaggttttgtttcctttcaataattgaagcctagtgagggagacatgcctgtaactgagttctataacagaggcacacacaaattgccaggtaagcagagaggtaggagtcataattcaacttgtrtgtctaaaaaatgaagtgaccagtgtcaaagattagcaagttatttgacccgattttattattagaaaggaatatagtaacttattcacagcagaggtagaggtcagaaagtttcacagctcttttaagtgttcattgtaacaaccttttcacaccactataattaggtgcttttgtgtacattgtcttttgctagacactacaaggagatatccatttggtgcttccaaatggaagaccaaagggtcttccttttggtgcttggcattttaaatgatgaaaatcaatgcacactcatggggttaggtaatagttgaacatattaatagatgaaaatgtacatatagttaatgtccatttacttttatctaaggaggatgaagtgggatagtaattagcagtcagtaggtgtggcatgtttttctctgtggaactgttaggcaaataatctaattcattcactctttttgtaagaattatccaatcagaaagttcaagataaaactaactgcctggaggagaaatgaaaattaaattgagactttcttgataaatgacagccttgattttacctgaatgcatggtcatagcaaagacctaaatagctacatgacttataatgagattgtatcattcctaataaccccacttagaatattacatttatttctggctaccatatgatacagtttggatgtttgtcccctccaaatctcatgtcaaaatgtgattctcaacactggaggggggtcctggtggga

SEQ ID NO: 728396 - DNA, 1217 bp, Homo sapiens
aattgcaacaagataaaaagtattacaatcaaagaatataaaaaattcaaactttgttcatgaggattttaacagtatccgtcggtatttgggaaataataagcataacaaaaatgtagattaatttttaatttccattaaaaagcatgttttcattgcattgaagacttaatataggacctggaaaaaatgagcttttatctggatagttatatttgaagtcaatactatcgccccaaagacttttaaacaaacacatgtcttctaaaggctttagtactgttttataatgtttgcacttttcttgttctccaggcagtgtttagtagttaggttttgtttcctttcaataattgaagcctagtgagggagacatgcctgtaactgagttctataacagaggcacacacaaattgccaggtaagcagagaggtaggagtcataattcaacttgtatgtctaaaaaatgaagtgaccagtgtcaaagattagcaagttatttgacccgattttattattagaaaggaatatagtaacttattcacagcagaggtagaggtcagaaagtttcacagctcttttaagtgttcattgtaacaaccttttcacaccactataattaggtgcttttgtgtacattgtcttttgctagacactacaaggagatatccatttggtgcttccaaatggaagaccaaagggtcttccttttggtgcttggcattttaaatgatgaaaatcaatgcacactcatggggttaggtaatagttgaacatattaatagatgaaaatgtacatatagttaatgtccatttacttttatctaaggaggatgaagtgggatagtaattagcagtcagtaggtgtggcatgtttttctctgtggaactgttaggcaaataatctaattcattcactctttttgtaagaattatccaatcagaaagtycaagataaaactaactgcctggaggagaaatgaaaattaaattgagactttcttgataaatgacagccttgattttacctgaatgcatggtcatagcaaagacctaaatagctacatgacttataatgagattgtatcattcctaataaccccacttagaatattacatttatttctggctaccatatgatacagtttggatgtttgtcccctccaaatctcatgtcaaaatgtgattctcaacactggaggggggtcctggtggga

SEQ ID NO: 728397 - DNA, 656 bp, Homo sapiens
tctccccagcaaccccagatatattttcattttttttagaacgctctctacagactttgagcagagaaacagttgcttttcaaaagcaaacaaaacaaaacaaaacagatgatattttcatttttgttcaacaaaaagattatgaactaaccacatatacttgtagtgggcattataggaagattcccatttctgtattactaagaagtacattaagggttaaaagaaccacattatagtcctcacaggtttttttgcatgtcatttyagatttcactgttctttattaaaggattggagaacactgggagttactgcactgctggaaagaattattattttgttaacaaggctaattatgtgttttttaaaatggatctcttttgtatgtgtttaatttcttttgtgtggatgtatgtatgactgtgtgtgtgtgtatgtgtgtgtgtgtgtgtgtgtgtgtgtgtgtgaatgtgcatgtgtaacccttgtgaggaagatgtaagataattcagtatgctccagaaaaatgtatatagtgatctgtcggagatcaatggctccatgtttaggaaataagcacaacattgatattggcttactttcatcatcctgttggccaaataaaagatgagaaaaaattagaaagggatttt

SEQ ID NO: 728398 - DNA, 635 bp, Homo sapiens
aagcccatgtttgcttagggaacagcctgaaattccaccccagctgctgggcctttcacttttgaaacataagcccagagagcgaaaggggggaacgttgtgcccagattctctttctgagcgtgaacttgatgttcctgaccaggaaccagccactcgtaccgaaggccttcctgacccctcagttctcccctgagcctttgctgtgtcctgggcaccaagaggtggagataggctgtcaccgtgcacgtttcctaagcctgcagaggaactgttcacagaatccagcctggaatcagccgtttgtggcaaacagtcagtagctatttctcaacktgtggttgtgaagctgcaggctccatattcgctcttcacagagcatccaagcaggtgtctcagtgccagctcacaccgttcacactgctcacaccagctctggagagctgcttgtacacatctctccacaagtccactttcagtgttgccacgtggtaccggaaatttgccatagaaattggccgatggtacgaccagagagccacctgttagatagttaccccacatccccaccctcaacaccaccttagacaaatcctactgtcagaacatgtggaacggagaagggaccttggcgg

SEQ ID NO: 728399 - DNA, 3035 bp, Homo sapiens
tattttataacaaactgttatacacaagtacagtgtttggctgagttctgtgagtattttaatcaaattctcaaacttgagaaaggggttatgggagtcctcacttcttagtagctcagaagtacgtatgggtacctgtggtttctgactggcatctgcagtaagagcagtgttgtgggactaagctctggactctagggcctgtgctgactttggtggtgtgagatttaaaatgttaaacaactagttggtgttggagaattgctttgtattcctcaaactctacagatgtagtgttagaagaaagacatcggccaggcatggtggctcatgcctgtaatcccaacactttgggaggctgaggtgggcagaccatgaggtcaggagtttgagaccagcctgaccaacacggtgaaaccccatctctactaaaaatacaaaaattagctgggcatgttggcaggcgcctgtagtcccagctactcaggaggctgaggcaggagaatcacttgaacccaggaggcagaggttgcagtgagctgagatagtgccactgcactccagcctaagtgacagagtgagactccatctcaaaaaagaagaagaagaagaaggagaagaacaaagaagaagaagaagaagaagaagaacaagaacaagaagaacaagaacaagaagaacaagaacaagaagaagaagaagaaagaagagaagaagaagaaagaagaaggaagaggaagaggaagaagaacaagaggaagaagaagaagaagaagacgacgacgacgacgacaggggcctgagctagagaaagactgggtgtctggagaagaaaggctctcttctcctgtatataggctgtcacactgcacattctcctgtgatttcagttcttttccccaggtaagaggggactaaaaacttcagaacagacccccttagcctacagctaccatcacatacttttcactcacttataaacatactcctaggaggtattaatgtggccatgcccctcccaggagtaagtaccacccttaggaatcccatcacagtgccttctcttctagtttcttgccaaaaacctacacaagtgcctataggtctcctagtataattctaccctcagacactgaatctgcaacagcaacctgttctctccaccacctgttaataatctcaactgcctgcacggacacaggaataattctgagtatagccccttctagaccattatctttaacacaaaccagtctgtccacctaccttttactgtcctccactcatggatttttggtggctcctttctgttttctacatttttccccacagtttctcttttacgtgtacacagtgtgtccaggaccacccattagatacctaaatccagtgtgtactgaaattcagatgtctggaagttcaagatcatgtccttaatccagctgttgcttttctttaaaaagcatttagcctacaygtacatttttgtttgcttttttgaaatacacacatatatataaattattttaacagctaaataaaacttacctttttttcttttttttgactcaggattctctttatctaggacctgagaaccaccactttgtttttgcttttgatttggcaaagtttttttttttccattttcagtcttttaaagtagacacagatttgtttagaatgataaagctcactttaagatcacacaaaagttgagcacaaaggataggattcaattcagcaatacagagtaatgaagagtaaaagatactaagtttctccaacagaaaactaatcatccaaggcgattatatcaaaggtgataatatctggagcctaaagtatttaacactgcaaaagctagaactgttagtgtataaactgagcaatggaatttttagctgtgctttggtttctacttattacttcagaaaaattagcatagttttgtttagtctttagtagacaacatgcatccatgtaaattaaacagtattttctacaattgtgtgaatataaggccacaatatttattttgaataaacttcttaaatagtaattttaatattaatgttattaatttgtttgaaatataaagtattataactttaagtttatataactttattataagtattaatttgtttgaattaagtttatataactttaatataagcattaatttgtttgaaatataaagtattataaaatattgtaattaagcttacagataatttttaaaatatatacattatgactaatataccaaaattatttatatgtacacatttatatttaatacccaaagaaaatttactaccacattgctacagtagatattaacctgacatgtttattaattgatcctataggtataattataggtcagcataattttacagtctattcttttattttactaaattaggaatgccactattcccggacaaataaatgcaggtgatgtggccacccaagaatcatagtagctcttcagttagctatcttgcaatctctgatataattctactatgtgaatagagtgaattccaattcttcatcaaaagtgctggtggaggttgtcaggtgtgttccagtatagattcccaatccaacggccggcagatgggagagcagcagagatggaaattctgctcagaataagccctctttctcataatacttgtatttctcatgctgagagtagctgtgcacttttggtgtttagagaagaacttctttggaagaatattttctggtcaatttgaccaatgttacatgtaatctgaatttgtctttaagattctttcaacctcttttcttctctcaatacggttttactcagactgagagctgtctttctcttcaatgctttgggaattcagtgctttgtgtctaagccctattaatatcacatggtgtctgtgagtgaggggggctgtcaccgtgagaactcctggagctgctctatctagatccatgctatgtatccagcaatattctttttgtgtcagtattataaatagaaactg

SEQ ID NO: 728400 - DNA, 1168 bp, Homo sapiens
tagcagagctctttctttctttctctttctttctttttctttctttctttctttttmtttttctttcttctttcttttctttcttcttcttttttttttttactttagtccatgatgtgaattagttcactagatgagaacaagtaaaaaataatcaaactttggaagtgaccttcagaaggtatacttgaagaagtgccaagaagctttctgttttaatgatgatgtctcagtgattcacagcacgatatcataagcattacttctggagaaggcatatcatcttctttactattgtaaaatggatagagtgtaagagtgtgaagcaagatagagcaaataagaaaacatagtatagatcctctattaatgacaacagaatatatagaagccatatgagttcatacaattgtatttctatatatctatgtatttatagaaaccatagatttccagtgtatactttaataagttttgtagttccaaaggagttatcctgatagcagtacattcacaggaaattttattatttgcagattagtgaaagtagttacatcttttcaacaaatatatcatatatcacctactatgctcaagtaactgagctaagcattgtggagtgtacaaattctctaagaaaaagcctttatgcgacgagggtctaataggggtgatgcatttcattctaacacaaggtataagtgctttaaaagaaatgtttcaggagttctcagagtgagaaatcagttctagcttgggagaagtccaagagcacaatggaagaagtggacttggaataaaacctttaaaataaagattgtaattggcagacatatcaggagatgacattctaagctgaaataatagtatgtacagagaaacaggaaaggtagataatatttcaggaacagctatagccctgtttatgtgtagggtataagggtgagaaagggctggaaaagtgtattgagacaatagtttttaaaccaatttacacatcaaaatcttctggggtacttttaataatattaaaattctgggtcccatttccagagttttcgattcaggatgtctggaatggggaccccggaaatgtttttttgttgcaaatgctctcccaggtgatctgaggcccagtgttttgaatccactgagttagggacagaat

SEQ ID NO: 728401 - DNA, 1168 bp, Homo sapiens
tagcagagctctttctttctttctctttctttctttttctttctttctttctttttatttttctttcttctttcttttctttcttcttcttttttttttttactttagtccatgatgtgaattagttcactagatgagaacaagtaaaaaataatcaaactttggaagtgaccttcagaaggtatacttgaagaagtgccaagaagctttctgttttaatgatgatgtctcagtgattcacagcacgatatcataagcattacttctggagaaggcatatcatcttctttactattgtaaaatggatagagtgtaagagtgtgaagcaagatagagcaaataagaaaacatagtatagatcctctattaatgacaacagaatatatagaagccatatgagttcatamaattgtatttctatatatctatgtatttatagaaaccatagatttccagtgtatactttaataagttttgtagttccaaaggagttatcctgatagcagtacattcacaggaaattttattatttgcagattagtgaaagtagttacatcttttcaacaaatatatcatatatcacctactatgctcaagtaactgagctaagcattgtggagtgtacaaattctctaagaaaaagcctttatgcgacgagggtctaataggggtgatgcatttcattctaacacaaggtataagtgctttaaaagaaatgtttcaggagttctcagagtgagaaatcagttctagcttgggagaagtccaagagcacaatggaagaagtggacttggaataaaacctttaaaataaagattgtaattggcagacatatcaggagatgacattctaagctgaaataatagtatgtacagagaaacaggaaaggtagataatatttcaggaacagctatagccctgtttatgtgtagggtataagggtgagaaagggctggaaaagtgtattgagacaatagtttttaaaccaatttacacatcaaaatcttctggggtacttttaataatattaaaattctgggtcccatttccagagttttcgattcaggatgtctggaatggggaccccggaaatgtttttttgttgcaaatgctctcccaggtgatctgaggcccagtgttttgaatccactgagttagggacagaat

SEQ ID NO: 728402 - DNA, 1168 bp, Homo sapiens
tagcagagctctttctttctttctctttctttctttttctttctttctttctttttatttttctttcttctttcttttctttcttcttcttttttttttttactttagtccatgatgtgaattagttcactagatgagaacaagtaaaaaataatcaaactttggaagtgaccttcagaaggtatacttgaagaagtgccaagaagctttctgttttaatgatgatgtctcagtgattcacagcacgatatcataagcattacttctggagaaggcatatcatcttctttactattgtaaaatggatagagtgtaagagtgtgaagcaagatagagcaaataagaaaacatagtatagatcctctattaatgacaacagaatatatagaagccatatgagttcatacaattgtatttctatatatctatgtatttatagaaaccatagatttccagtgtatactttaataagttttgtagttccaaaggagttatcctgatagcagtacattcacaggmaattttattatttgcagattagtgaaagtagttacatcttttcaacaaatatatcatatatcacctactatgctcaagtaactgagctaagcattgtggagtgtacaaattctctaagaaaaagcctttatgcgacgagggtctaataggggtgatgcatttcattctaacacaaggtataagtgctttaaaagaaatgtttcaggagttctcagagtgagaaatcagttctagcttgggagaagtccaagagcacaatggaagaagtggacttggaataaaacctttaaaataaagattgtaattggcagacatatcaggagatgacattctaagctgaaataatagtatgtacagagaaacaggaaaggtagataatatttcaggaacagctatagccctgtttatgtgtagggtataagggtgagaaagggctggaaaagtgtattgagacaatagtttttaaaccaatttacacatcaaaatcttctggggtacttttaataatattaaaattctgggtcccatttccagagttttcgattcaggatgtctggaatggggaccccggaaatgtttttttgttgcaaatgctctcccaggtgatctgaggcccagtgttttgaatccactgagttagggacagaat

SEQ ID NO: 728403 - DNA, 2976 bp, Homo sapiens
tcaatctgatatatggtcaagtattttattgaaatatatgttgaacaagtatttggatttataaatatatgatggtattaattttggaaaaatttattcaaagtaaaaataaaagttatatattttggttcattccatattgttatcttctggcttgttacctgattatttcaattatttgaatatattttcatattaactatttttgataaatcacatctgaggaacagaatcaaattgctaatcatcagtgcaataaagtctaatctttagctttgtctttgcatatttaactttgacaggcaatatttatctggtcattggtgcaatttcatagacctaattatggcgcaattccataccctgactggggagttgctttaggctggtgtatgattgttttctgcattatttggattccaattatggctatcataaaaataattcaggctaaaggaaacatctttcaagtgagtgcattaaaattgtttatactttacacaaagtagttatgatcaaaatggagattaatttactcacatggtagtaatatgagattgtatgaaatacaattaattactccttcctcttggctacttctatacctgacacagtcatctgttactagtgcacaacatgstattttattatttatatatttgctgtgtttctctatgctagactataagctccttgtggggaaagtcgggtcttatttgttgctgtacctctggccttgctacggtgcttagcatatgacagctatgatatctatacctatgttgagttgtctctgaagatgtcacaaagcaaatgacctgtttgctttatatccatagtcactgcttttaaacctcatctggctataatatacatcctaatagtgtttttatactggaataagcctggtaaatatcttgaacccaatctagagcctgagtcatccctcttccatggaggtgtaggggtatgaagttcattatgacatctcagtaggacaatgacaaagtaggcttagcagccttagatttaaataaattcctaagtccatacaacaatggatccaaatcagtggtttgatcctggaactcccatttcctttgttcttgaaacacatcccaggtatacactggtttagatcctcagctcgtcctcatcctaaggccaggatggaaatgtctgattcagtgaaggtacagagtagtcactctgttactctaatgggttcacacaccttgttttgaaatcatttacttgctcagctattttggtttagtagttaatatacttctattaacaactagctacatttgattatacctttttcttggtaaactgtgcattattaagaatttagatgaacactttttagttttctatgatgcttattttttgttagtagagaaaaaataatttaaaggaaagtacagttcaatatttgcttgtttacagattgtagcacttaaattctaagacaatgattttttgttcttgcatttcagcgccttataagttgctgcagaccagcttctaactggggtccatacctggaacaacatcgtggggaaagatataaagacatggtagatcctaaaaaagaggctgaccatgaaatacctactgttagtggcagcagaaaaccggaatgagatctcattgaaaaaaatatatgattgtataatgtgattttttttagaatagggggaaccttatttatttgtgtgttaactgaataggaaaatgtacatactatgttcatgatagtgtgatttttttcacatttaagcaggaatgcaatataaaaatgtgaatctcttaattctcagccatgtgcttattatatttctttttagattgtctatctgtataacacacacacacacacctaagagtctctatttcacaattatatttttgtaaatagtatatgcatttttaatacattggaggctttattttgaactaatttcttagagaatagttatattttctattacacaagtttaaaaatattattaacttgtattttcttaatatacaatctatcttttccacaaatatgagtgggaaataaatcagcacatttgaaagaaagtgttaaaactgaaggcctcacttaattagaaacgtgataaatatatggacaaatggactatacatactataagaggactgtagtttaatactttttacccaaatatgtttaaaaacttcgtgcatttgttacagctcatgttttctatatgaacttagtcattaatgttctttataaaaagtgaaataagatggaaaaataaggatcctacagccagtaagtgataaatctagaaaattgagttttgagtacctcttttcccatatacaatcttccttccttaggtaatttggaagaaaactatgacccatttaatttctattgtgtttcacaaaattaagtgttgttcattatactctctgaaatataggtttaatttcaaatagaatatggacttaaatgttaatgagaaaatggctttaatcaattctagcattttattactgtaatacagggctgatagagtgattttgtcttatatgagtaagttactacttacaggtgataacttgcatactattggaagataaacttgtcaaacttgtcaagaatgagaaaagccaaattagaaaatcctatgtcctagtttccttaccaaggataattaaatatatcactaagagctttatatattgattatatattgttgacaactggtttaagcatcatagcctatgatgataaacactgcctatatatgtaaatagcttttcatcaattcttaaatttcttaacctaggcttcagggagcatatgaaaccaaaattatatggaacattttctgtgtgtacatgtacatgcatttttctagggagagagtccgtaggtttatcagaatatcaaggaaaactgtgacccaaagaagtttaagaatcacatac

SEQ ID NO: 728404 - DNA, 1796 bp, Homo sapiens
tcaaactgaaagactatatagccgtttagctcttcttgcacagaatccacacatttaacgtgggtaggacattcatatatattctgaaaaatgaagtttttaatttcttaaaattttatcaatggaaaatgtatgttcccaatacttttgttgttgttgttgttgagatgatgtctcggtgtgttgctcaggctaaagtgcagcggcatgatttcagctccctgcaacctctgcctcccaggctcaagtgatcctcccacctcagcctcccaagtagctgagactataagtgtacaatgccacaccagggtaatttttatattttttgtagagaaggcatttcgccaggctggttaaactggactcatgaaatccacccgcttcagcctcccaaagtgctgggattacaggcatgaaccgttgtacccagccacccaattagttttaatggtttgtttaaatggcatttcccaatctagtaattatttttgaaaatctgaagactctaaacatatttttaactcaattaacattcagtgaattgaaccaagttacagtttgatggtcagaactttttatgtagattctatagttgtttgcctgcaaggaaatattaaatacaacatgttttaagatagtttctcaactctctctctctctctctctmtatatatatatatatatatacatatatatatatatatgtatatatatatatatatgtatatatatatatatatatatgtatatatatatatatatatatgtatatatatatgatgagtataggccttaacttaattcaatgttttataatttctactcttaatcttctttctctctacccactttgctaggtatagtcaattaaaaactgaactcattgccatcctctggcatcttcaaagcaattggtgtcaacatgttttccatttgggtgtctaattgtacaacttcaaaatactgtcagaatttgccttttaatattgacagccttggaatagtaacaatcttcccaattttgcccacattcccttgagggtggaattacttataaaaaaagtcaagatgaatttctagatattctacatttttatgtgactttaaatgcaaggctttagctacctgatgcttcttcctgactctgtgctcagccaattttattcctcagattctgtccttcccccatatttcaactagactaaacatcaaaatctgtttccttatttctttcgtaaagataatcctacctctatccatctgcctcttgtatcatatgggaaatataataatttattggctcatttataacacaaatctatacgacctatgtgttgtgcctcttggaaagattccatacgatattgtttatatttggcatttttcaaccaggtcacattttcctcagtggaaactagaagggcttggtcttactatgaaaacaacagagagaaacagatttttaggcagtagactgtcaaacacagcaacaagaaaatccaactgagcataatgatgagaagcagtagttctattgtttaataatctatatctgccatgagtagggttattgtgactagaaattagatgatgtagattatggcagaaaggaaaacaaaaaataaacttcacttgaacttcaccctagtccttctcttgaggcaatcttgtaagaaatatttatgggttcatacctcattactactaatctaactggcacacagctttgtccgttatcatgtcatgagcatgaagacaagcagtaactggggcaacaagtggggggcacaggcaga

SEQ ID NO: 728405 - DNA, 1796 bp, Homo sapiens
tcaaactgaaagactatatagccgtttagctcttcttgcacagaatccacacatttaacgtgggtaggacattcatatatattctgaaaaatgaagtttttaatttcttaaaattttatcaatggaaaatgtatgttcccaatacttttgttgttgttgttgttgagatgatgtctcggtgtgttgctcaggctaaagtgcagcggcatgatttcagctccctgcaacctctgcctcccaggctcaagtgatcctcccacctcagcctcccaagtagctgagactataagtgtacaatgccacaccagggtaatttttatattttttgtagagaaggcatttcgccaggctggttaaactggactcatgaaatccacccgcttcagcctcccaaagtgctgggattacaggcatgaaccgttgtacccagccacccaattagttttaatggtttgtttaaatggcatttcccaatctagtaattatttttgaaaatctgaagactctaaacatatttttaactcaattaacattcagtgaattgaaccaagttacagtttgatggtcagaactttttatgtagattctatagttgtttgcctgcaaggaaatattaaatacaacatgttttaagatagtttctcaactctctctctctctctctctctatatatatatatatatatacatatatatatatatatgtatatatatatatatatgtrtatatatatatatatatatgtatatatatatatatatatatgtatatatatatgatgagtataggccttaacttaattcaatgttttataatttctactcttaatcttctttctctctacccactttgctaggtatagtcaattaaaaactgaactcattgccatcctctggcatcttcaaagcaattggtgtcaacatgttttccatttgggtgtctaattgtacaacttcaaaatactgtcagaatttgccttttaatattgacagccttggaatagtaacaatcttcccaattttgcccacattcccttgagggtggaattacttataaaaaaagtcaagatgaatttctagatattctacatttttatgtgactttaaatgcaaggctttagctacctgatgcttcttcctgactctgtgctcagccaattttattcctcagattctgtccttcccccatatttcaactagactaaacatcaaaatctgtttccttatttctttcgtaaagataatcctacctctatccatctgcctcttgtatcatatgggaaatataataatttattggctcatttataacacaaatctatacgacctatgtgttgtgcctcttggaaagattccatacgatattgtttatatttggcatttttcaaccaggtcacattttcctcagtggaaactagaagggcttggtcttactatgaaaacaacagagagaaacagatttttaggcagtagactgtcaaacacagcaacaagaaaatccaactgagcataatgatgagaagcagtagttctattgtttaataatctatatctgccatgagtagggttattgtgactagaaattagatgatgtagattatggcagaaaggaaaacaaaaaataaacttcacttgaacttcaccctagtccttctcttgaggcaatcttgtaagaaatatttatgggttcatacctcattactactaatctaactggcacacagctttgtccgttatcatgtcatgagcatgaagacaagcagtaactggggcaacaagtggggggcacaggcaga

SEQ ID NO: 728406 - DNA, 1835 bp, Homo sapiens
tgacaccttgattttacagatataaagtttaatcatatttgtttcacctgtattggtacaacacagtatcaggccataatgaatgtatatggtattacttgctcagccctacccacttactttgaaaactatgtctctccttccacagtatttcgtccttatggagttcctatttagtcccatctgaatgattataatcgattacttgatggtagggcacactttcaagttgggtctggtgccttctagatctttgggcttgagatcacaagcagccaaaaactgtaaggcataaatcttagaagatgtccatagtctcatttttctatgaggaaatagtctgcaataggagaaagaaaaagacaacatctaaagacaacaaagaaaaaagatggagatagaatcctcagcatattaggtccctggctgcaatggttcctggggtctgctgcattcctgcccttcttgtgggttggttgctctgggagagaagcaggatccttcaagttcacttccattttttcttgaagtattaaggtatgaattgaatttctgtcacttggaaccaaaaggattctaactatttcctggtacatagcaggaactttgtaaatgtttgctgaatgatgaatgagtggtttttcagtgtccaaatgcagagtatcataagtctagaagatgttggaaaaaccatttggtttattcctcacttccaggatggatccacaggcacaccagccaacaaaaaagtgttcttatctttaaaaccttcctggaggaagattttataacctcctttgattacttaacataggaaatgagaggaacatagacaatcatgacttcttgaatctttccttcttcttcctttaaaactctcctgtcttcctttcccagtattgatgattttcctttctctctctctctctctctctctgagacagggtctcactctgtcatccaggctggagttcagtggtgcaatcctcccacctcagcctcctgagtagctggtgccacaggcaggtacctccatgcccagctaatttttaatttttttttagagatgggggtctccctatgttgtccaggctggtcttgacctcctgggctcaagtgatcttcccacttcagtgcccccttaagtgctgggattatgggcatgagccacaacacctggccccacttctcatttttaaaatgttattttaaatcttttaactctttcatctctttcaacgtttcatatgatctaaaatctatttctatttttctacctctttttggttaatatcatcacatatatcattgtcytctaatggtaagcctcatcaatttccagagagttgaagaagcttattataaagggatatatcatgtggattcttccatccagcaaacatttactgagaactttgtatatagcagacacaatggtaagggctgtaatactgaaacattacaggtagctcctcagagaaaatgaatcacttaaaacctaatctaggccaggcgcagtggctcttgcctgtaatcttagcacttggggaggctgaggcgggcggattgcctcagctcaggagttcgagaccaacctgagcaacacagtgaaaccccatctctactaaaatacaaaacaaaacaaacaaaacaaaacaaaacaaacaaaatcagccgggcgtggcggcgtgtgcctgtagtcccagctactcaggaggctgaggcaggagaattgcttgaatctgggaggcggaggttgcagtgagctgagattgcgctggatgcacctggatgacagagcaagactccatctcagaaaaaaaaacaaaaaaaaa

SEQ ID NO: 728407 - DNA, 1835 bp, Homo sapiens
tgacaccttgattttacagatataaagtttaatcatatttgtttcacctgtattggtacaacacagtatcaggccataatgaatgtatatggtattacttgctcagccctacccacttactttgaaaactatgtctctccttccacagtatttcgtccttatggagttcctatttagtcccatctgaatgattataatcgattacttgatggtagggcacactttcaagttgggtctggtgccttctagatctttgggcttgagatcacaagcagccaaaaactgtaaggcataaatcttagaagatgtccatagtctcatttttctatgaggaaatagtctgcaataggagaaagaaaaagacaacatctaaagacaacaaagaaaaaagatggagatagaatcctcagcatattaggtccctggctgcaatggttcctggggtctgctgcattcctgcccttcttgtgggttggttgctctgggagagaagcaggatccttcaagttcacttccattttttcttgaagtattaaggtatgaattgaatttctgtcacttggaaccaaaaggattctaactatttcctggtacatagcaggaactttgtaaatgtttgctgaatgatgaatgagtggtttttcagtgtccaaatgcagagtatcataagtctagaagatgttggaaaaaccatttggtttattcctcacttccaggatggatccacaggcacaccagccaacaaaaaagtgttcttatctttaaaaccttcctggaggaagattttataacctcctttgattacttaacataggaaatgagaggaacatagacaatcatgacttcttgaatctttccttcttcttcctttaaaactctcctgtcttcctttcccagtattgatgattttcctttctctctctctctctctctctctgagacagggtctcactctgtcatccaggctggagttcagtggtgcaatcctcccacctcagcctcctgagtagctggtgccacaggcaggtacctccatgcccagctaatttttaatttttttttagagatgggggtctccctatgttgtccaggctggtcttgacctcctgggctcaagtgatcttcccacttcagtgcccccttaagtgctgggattatgggcatgagccacaacacctggccccacttctcatttttaaaatgttattttaaatcttttaactctttcatctctttcaacgtttcatatgatctaaaatctatttctatttttctacctctttttggttaatatcatcacatatatcattgtcttctaatggtaagcctcatcaatttccagagagttgaagaagcttattataaagggatatatcatgtggattcttccatccagcaaacmtttactgagaactttgtatatagcagacacaatggtaagggctgtaatactgaaacattacaggtagctcctcagagaaaatgaatcacttaaaacctaatctaggccaggcgcagtggctcttgcctgtaatcttagcacttggggaggctgaggcgggcggattgcctcagctcaggagttcgagaccaacctgagcaacacagtgaaaccccatctctactaaaatacaaaacaaaacaaacaaaacaaaacaaaacaaacaaaatcagccgggcgtggcggcgtgtgcctgtagtcccagctactcaggaggctgaggcaggagaattgcttgaatctgggaggcggaggttgcagtgagctgagattgcgctggatgcacctggatgacagagcaagactccatctcagaaaaaaaaacaaaaaaaaa

SEQ ID NO: 728408 - DNA, 1835 bp, Homo sapiens
tgacaccttgattttacagatataaagtttaatcatatttgtttcacctgtattggtacaacacagtatcaggccataatgaatgtatatggtattacttgctcagccctacccacttactttgaaaactatgtctctccttccacagtatttcgtccttatggagttcctatttagtcccatctgaatgattataatcgattacttgatggtagggcacactttcaagttgggtctggtgccttctagatctttgggcttgagatcacaagcagccaaaaactgtaaggcataaatcttagaagatgtccatagtctcatttttctatgaggaaatagtctgcaataggagaaagaaaaagacaacatctaaagacaacaaagaaaaaagatggagatagaatcctcagcatattaggtccctggctgcaatggttcctggggtctgctgcattcctgcccttcttgtgggttggttgctctgggagagaagcaggatccttcaagttcacttccattttttcttgaagtattaaggtatgaattgaatttctgtcacttggaaccaaaaggattctaactatttcctggtacatagcaggaactttgtaaatgtttgctgaatgatgaatgagtggtttttcagtgtccaaatgcagagtatcataagtctagaagatgttggaaaaaccatttggtttattcctcacttccaggatggatccacaggcacaccagccaacaaaaaagtgttcttatctttaaaaccttcctggaggaagattttataacctcctttgattacttaacataggaaatgagaggaacatagacaatcatgacttcttgaatctttccttcttcttcctttaaaactctcctgtcttcctttcccagtattgatgattttcctttctctctctctctctctctctctgagacagggtctcactctgtcatccaggctggagttcagtggtgcaatcctcccacctcagcctcctgagtagctggtgccacaggcaggtacctccatgcccagctaatttttaatttttttttagagatgggggtctccctatgttgtccaggctggtcttgacctcctgggctcaagtgatcttcccacttcagtgcccccttaagtgctgggattatgggcatgagccacaacacctggccccacttctcatttttaaaatgttattttaaatcttttaactctttcatctctttcaacgtttcatatgatctaaaatctatttctatttttctacctctttttggttaatatcatcacatatatcattgtcttctaatggtaagcctcatcaatttccagagagttgaagaagcttattataaagggatatatcatgtggattcttccatccagcaaacatttactgagaactttgtatatagcagacacaatggtaagggctgtaatactgaaacattacaggtagctcctcagagaaaatgaatcacttaaaacctaatctaggccaggcrcagtggctcttgcctgtaatcttagcacttggggaggctgaggcgggcggattgcctcagctcaggagttcgagaccaacctgagcaacacagtgaaaccccatctctactaaaatacaaaacaaaacaaacaaaacaaaacaaaacaaacaaaatcagccgggcgtggcggcgtgtgcctgtagtcccagctactcaggaggctgaggcaggagaattgcttgaatctgggaggcggaggttgcagtgagctgagattgcgctggatgcacctggatgacagagcaagactccatctcagaaaaaaaaacaaaaaaaaa

SEQ ID NO: 728409 - DNA, 590 bp, Homo sapiens
aaagtttttaagtagacaatctgagcaaagggaggtaaatgatgctaaaaagtatcatcagactttgaaaacctgctgttgacttttctctgatatctctgtcgagtgactagattaaccagattagtgagtaaaaacrtcctgacatccctttccctagaaggctagagacacaaggatacatcatgtagactggaaattcacataatctggggactcctgggagtctctgaagcccttccagagtgtctgtgagttacaattgttcgcataataatactaagatgttattttcctttcttatccttcttctcaagaagcctcaagtagcctctggaaaacttcctaagtgtagtggagttttccagaggctacatgacgtgtgataatgtcatcactctgacagctgattggaagtgtttaaaaggtttctccattttaatttctaatataataaatagttctttagtgttttcaatgtttcagagtgtaaaatttcctaagaccaaaagtttaagaaccattgatatagatcaaccttttctgtcatcatactactgaacaacatgatattattattttttatttta

SEQ ID NO: 728410 - DNA, 590 bp, Homo sapiens
aaagtttttaagtagacaatctgagcaaagggaggtaaatgatgctaaaaagtatcatcagactttgaaaacctgctgttgacttttctctgatatctctgtcgagtgactagattaaccagattagtgagtaaaaacgtcctgacatccctttccctagaaggctagagacacaaggatacatcatgtagactggaaattcacataatctggggactcctgggagtctctgaagcccttccagagtgtctgtgagttacaattgttcgcataataatactaagatgttattttcctttcttatccttcttctcaagaagcctcaagtagcctctggaaaacttcctaagtgtagtggagttttccagaggctacatgacgtgtgataatgtcatcactctgacagctgattggaagtgtttaaaaggtttctccattttaatttctaatataataaatagttctttagtgttttcaatgtttcagagtgtaaaatttcctaagaccaaaagtttaagraccattgatatagatcaaccttttctgtcatcatactactgaacaacatgatattattattttttatttta

SEQ ID NO: 728411 - DNA, 590 bp, Homo sapiens
aaagtttttaagtagacaatctgagcaaagggaggtaaatgatgctaaaaagtatcatcagactttgaaaacctgctgttgacttttctctgatatctctgtcgagtgactagattaaccagattagtgagtaaaaacgtcctgacatccctttccctagaaggctagagacacaaggatacatcatgtagactggaaattcacataatctggggactcctgggagtctctgaagcccttccagagtgtctgtgagttacaattgttcgcataataatactaagatgttattttcctttcttatccttcttctcaagaagcctcaagtagcctctggaaaacttcctaagtgtagtggagttttccagaggctacatgacgtgtgataatgtcatcactctgacagctgattggaagtgtttaaaaggtttctccattttaatttctaatataataaatagttctttagtgttttcaatgtttcagagtgtaaaatttcctaagaccaaaagtttaagaaccattgatatagatcaaccttttctgtcatcatactacygaacaacatgatattattattttttatttta

SEQ ID NO: 728412 - DNA, 1350 bp, Homo sapiens
tacaaactccagtcacatggggccacttgaatttcccccagatgctctgggatctccctcccatactagactgcagactcctagtagcagttggtggctgggttgtggccctgtctgtatcttttccacttagtgcagtgcctggcgcttaacaagtgctcagcgtctgtttgttgaatgaataggcaatgtatcatatactcttctctcgattttaatcagaccctccctcctccttccttgtcactgatgcacttctgctgttcaattatcaaattatggaccttatatcatatgttaacatgggtttggagatagtcagtgaacatgtccagagttgtttaaccatgaaccttatatatatgttcatgcccttatacattctttagcctctaatcaagctcattccctatctatttcatgaaagcacaccttcattttaggacttattttgaacacataaaaagagatgatcgtaagacatcctaactataaaaacctgcagtatccatttccctcctgaaaaaacatatctggctctgtttcttctaaaagtaaaattagaccttgcagagatggtacaatttaaacggcaccacccaattaatttttctggccaattttatttttgaaacaataattaaacatggtcttctgtaacatctattctttcttttccccaaggagagattttgtattattttccttttgtctttgctcagcactttggagtgtgtgagttttcattaactattctgaatgcaggcaaaggcaatgtggtaggaacaaacacaaatcaaggccgcataaattaataatctttttagaaccattgtcctgtatgcctttagaaattaattttaataccagcaaacaagttcaaaaattcctccttctttagctactgtaagaaactcaaacttcctttggcaattttatgaatgataaaagctcacttttgcctatatttttatggcaagtatcatacggatttatgcaaggggaacaaagaaatgagtggagagagaccagccacctgtgttaatcagtasagtacaggaaagtgtgttataaattatgacaggtagatctttccctttctctttttgtctctttctgactaactgggtgtgtgaatttatcttcctgaattgtaagggatttctccataaaatatcagttaataagtacctcaggtaggttcattcatgggtagagtgtctcctaaagatctagtagccatagaatagagcacagtgtagtttcatggttaacagcagagattggtgttagactgaagctgactttaaccccagcctcaccggtagtaagctctgtcattttatttta

SEQ ID NO: 728413 - DNA, 638 bp, Homo sapiens
agtagagacggggtttcaccatgttgaccaggctggtctcgaactcctgacctcagatgatctgcccacctcatcctcccaaagtgccgagattacaggcatgagccactgcacccggctccatgtccttttttattaccatttggtcttttgaaaagctgagatagtagggaattaatatttttggaagtaatttgttagctaaattttctccattccattatccctctttatcagaaaacagtcattgaatgtcagattaaggaattcctcccactcctggttagagcctctccctttatagaatcctgtttttcttttgtatgtttcctcctcaaaacatgaggatttgaagaaatatgttaacattagttgtcatggccgacttgtacacagttgaatgtttccaaaggaaaccactttttatgagtagctatatttataagactttgtttacttgtttttcaagcaggcttcttaatatttagttttgaaaagaattttttcgaagaatattgtgttttgtctattcttactgttctctcttacyttcccattttaagagaaatggttgtttgctttgcatattttttgctaatattttaatatgaatgtcaagtaaccttttttattgggcc

SEQ ID NO: 728414 - DNA, 798 bp, Homo sapiens
gactggataaagaaaatgtggcacatatacatgatggaayactatgtagcagcaccttatttaatcttcatgtcactgtaaagtaggtactgttattaaccccttatatagctgggaaaactgaggcacagagagggtaagtaacttactcagggacacacagctggtaaaaagcagagttaaactctgacttcaggccctgtgtgtgtagaacttaacgtatattgtgccccatctcaagacactgctcttttgccccacctggcatgctgtggatcagtgtagaagtgatccacattggtatatgagtctattgtcagactacccctgaggcaacccagccctgacctgctttttgtttgtgttgacgttgctcatccagtccagcagatcaccctttcccatacattctacaaggtcatctcctccaagaaggcttcagtcctgccgcaccatcctttgaatcctcacaacagttggtaccagggaaagggataatgaggcagtctagtaggctggccaaaagcatggactatggggtcagatcccttcggttgggatcttacttctgccagtaaatccatgcgctaagcttcagttaggcaagccatttcagcctcagctttcacatctgtaaaatggatataaccacccctgcctcacagaactgttgtgaagaggaagggaggtgctccaagggagctctgtttactgcttcacaacagtcagtgctgaatacatgttggctgttgttctctcttgtcttgtagtgatctcgtactgagagttttgtacatt

SEQ ID NO: 728415 - DNA, 798 bp, Homo sapiens
gactggataaagaaaatgtggcacatatacatgatggaatactatgtagcrgcaccttatttaatcttcatgtcactgtaaagtaggtactgttattaaccccttatatagctgggaaaactgaggcacagagagggtaagtaacttactcagggacacacagctggtaaaaagcagagttaaactctgacttcaggccctgtgtgtgtagaacttaacgtatattgtgccccatctcaagacactgctcttttgccccacctggcatgctgtggatcagtgtagaagtgatccacattggtatatgagtctattgtcagactacccctgaggcaacccagccctgacctgctttttgtttgtgttgacgttgctcatccagtccagcagatcaccctttcccatacattctacaaggtcatctcctccaagaaggcttcagtcctgccgcaccatcctttgaatcctcacaacagttggtaccagggaaagggataatgaggcagtctagtaggctggccaaaagcatggactatggggtcagatcccttcggttgggatcttacttctgccagtaaatccatgcgctaagcttcagttaggcaagccatttcagcctcagctttcacatctgtaaaatggatataaccacccctgcctcacagaactgttgtgaagaggaagggaggtgctccaagggagctctgtttactgcttcacaacagtcagtgctgaatacatgttggctgttgttctctcttgtcttgtagtgatctcgtactgagagttttgtacatt

SEQ ID NO: 728416 - DNA, 631 bp, Homo sapiens
cacttttggaggctgaagccagtggattgtttgagcccaggaatttgagaccagcctggacaacaggtgaaaccctgtttctaggaaaagcaaaaattagccaggcatagtggtacatacctgtggtcccagatactcaggaggctgatgtgaaaggaccacctgagcctgggaagttgaggctgcagtgagctgagactgctccactgaactctagcctgggcggcagagtgagaccctgtctctaaatacataaataaaataagtaaagcacttttcagtatctttctggaattcttatctatttgttaacatatgtatggtctttttctgctgctgagaggtgaagccagctggacttcctggctcgagtrgggacttggagaacttttctgtctagttagaggtttgtaaatgcaccaatcagcgctttgtgtctagccaaaggattgtaaatgcaccaatcagcaactctgtaaaatggaccaatcagcactctgtaaaatggaccaatcagcactctgtaaaattgaccaatcagcaggatgtgggaggggacaaataaggaaataaaagctgaccaccccagccagcgggggcgacgtggtggggtccatttgtaggttgtgga

SEQ ID NO: 728417 - DNA, 605 bp, Homo sapiens
tcatttctctgtagagataaaacacatacatgccaacatttttaaaaactggtatcttgttttgtatctagctcacctttttttacttacttaaaaatatactgaagatctgctgggcatggtggctcacacctgtaatcccagcactttgggagaccaaggcaggcggatcatttgatgtcaggagtttgagaccagtctggccaacatggtgaaaccctgtgactactaaaaatacaaaaattagctgggttttgtggtgtgtgcctgtaatcccagctactcagtaggctgaggcaggagaattgcttgaacccaggaggcagaggttatagtgagccaacatggcaccactgtactccagcctgggtgacagagcaagactctgtctcaaaaaaawatatatatatatatataattttatataaatttatatttataaatatatatttatatttattatttgtttatttatatttatttattatttatatttatttataaaataaacaaaatatatttttataaatataaataaacaaatatataaatataaatatatataaatatataaaatatttagaaaattatatttataatattta

SEQ ID NO: 728418 - DNA, 605 bp, Homo sapiens
tcatttctctgtagagataaaacacatacatgccaacatttttaaaaactggtatcttgttttgtatctagctcacctttttttacttacttaaaaatatactgaagatctgctgggcatggtggctcacacctgtaatcccagcactttgggagaccaaggcaggcggatcatttgatgtcaggagtttgagaccagtctggccaacatggtgaaaccctgtgactactaaaaatacaaaaattagctgggttttgtggtgtgtgcctgtaatcccagctactcagtaggctgaggcaggagaattgcttgaacccaggaggcagaggttatagtgagccaacatggcaccactgtactccagcctgggtgacagagcaagactctgtctcaaaaaaatawatatatatatatataattttatataaatttatatttataaatatatatttatatttattatttgtttatttatatttatttattatttatatttatttataaaataaacaaaatatatttttataaatataaataaacaaatatataaatataaatatatataaatatataaaatatttagaaaattatatttataatattta

SEQ ID NO: 728419 - DNA, 926 bp, Homo sapiens
tggttctacaggtactggccatgtgaccttaggcaagtcacttaaccactctgtgcctcagtttccacacctgtaaagtggccatggttcctatttcatagtttgttatgaagattaaacgagatggtcccacataagtcctagggcagtacctccaccaccttagcattggtgacattgatggaagcaatgacacagatggtgaagtccttctccccacaatcactctgaatttggatggcttttacatggctccatgccatttagcaccaaatactttgtgtggttttcgttctttagcgaatctccccaaacgagttcctgagcttttgcagggcgggctcacctgtggtctgcccatctggtgagggggtggcctggggaagggccatgggctgggaaggctgggcarcaggggcctggcattatacgggtaactcagacatgctccacccagccaggttcatgcagcagcatgggacagtcgatggcgggtgagtccatctttggggcccagccaacctgagcacaacagagatgggagcctgggcctgtgcatcagcttcctcggaaaggcttctctcagaggggctctgtgtgggaggtgtcctggattgggagaagcaaaatttacctttggggtggaggagggagtggcgggtgatgtaggtagttcttacatcagcgtgatttcctgggacctctgcttgcttgagagaagctcattaaacatgacgtgacccctgctaagtttggccacagaggtgaccccgtaacagcacttacacacactatcatgttgacttgcctgtacccatcgctcgactgtgagctctttaactgcacgcttcaaagtggtcctgttccctttctggtatacagtagatgctcagtaagtgtttgtagagtaaacacagaaggcagta

SEQ ID NO: 728420 - DNA, 660 bp, Homo sapiens
tgggttacagggatgtctctggacacaaacttgcaggcagatgctgcaggaagaactagtactgaccaggcggggcaaccttacagccttacccatagacacagtctgtgagcatcagggaggccttaccttcaaacatatctcctggttatcagcagtgccagaaagtgtgcctttaatgccacatgctttatataaagcactagcaggtctttaaaatcaaatacccttggcaagtatcttgcacggagttactatacctctgggggtatctgggtttctgtcccttttcatcagtgattcccacaatgggaaaaccaaagtcatgtggaaggggggaaagggggagacaaggaagggagccctaagtgtaaaggtgagtgtgcgactgtgcacacaygagaggttcaccacagttacccacaggcaacatagctggatgtctgtgtttcttgtgacgtagttgctaagggtaaactgctgttttagtgtctgtgagaactgtatggaagagtaggtgggtaagcctgtgtgactgggaagggagggagcatgaggggacatggttttgagtgtttttcaagtgcttgtctgtatattttaaagtagacagactggataaccaagataattgttaacttaaaagcattaatttgcttt

SEQ ID NO: 728421 - DNA, 573 bp, Homo sapiens
ggataaatgccatgaacctactcaatattctcagcctctagttctataatcctcccaataatgaggaatgatgggagaggacagaaatgttgaaaagacgaaaaagaaaaagaaaataggaggtgatcagagttttgaggagcaaaaggcctaaacatcctcttgctctgttgtcactttcattgcccaaaggcatatggcagggatggggtagtagctgcattagataaagaagcttgaagtgtgtccgtttctactactgctgtcctttccatcttccaccagcttctccaccagaacaggaatgtcaaaggagaaaagacagcatctagaacaatgctcaatcgaagctaagcctctaaagtcaatcctacaggtaaatggccctttaaatgttaatattcagtgaccaatccctgaacacgtgggcaccaactaactttcccccccatcatcttcttgctgtacagaaagaaggtacgagattatggtctaaaaagaatatgtcagtaacatttgctttagatgaacccatgaaagaaggtgaatgttctaggagaatkagagctcaga

SEQ ID NO: 728422 - DNA, 950 bp, Homo sapiens
acaggcatgcgccaccatgcctggctaacttttttgtattttagtagagacggggtttctccgtgttagtcaggctggtctcgaacttcagacctcaggtgatctgcctgcctcagcctcccaaagtgcagggattacaggcgtgagccaccgcgcccggccattttaatttttttttttttttaatagagacagagtctcactatgttgcccaggctggttttgaactcctgagctcaagcaaccctctcagctcagccttccaaagtattgggattactggcgtgagccaccatgcctggcctacagggctgtggctggcagaggcacacatgcattgttagagaagccagagacacacacacagcagatgcggcggacagggactggctgggaagcggggtggggagcagagatggcttctagagaagacatcagatggtgcctgtctgaggagggagcgctgggttgacacctggaggggacaaggggccaggtggaccttgtgaagaaaccaaaggaagctcgacttgctggagccgagcaagtgaaggagaagggggcccagaggaggctgtgggcagaggacagcgggcagcaattggacctcttagccccatggccttggggaggggtctgcgctttattctragacaaggggcagctctgaagggggtagaattgcagaggggtgggctgcccaagtcagcccatccacccagcctgcgtgttgggaacggcagcagcaacttctgtgggccgtggtctggggagctgtcatgcgggctgtgggaggccaactgtcacttaggggggaattagaagtcccccagtgggccgggcacagtggctcacgcctgtaatcccagcactttggaggccaaagaaggcagattgcttgaggccaggagttcgagaccaacctggccaacatggcgaaactctttctc

SEQ ID NO: 728423 - DNA, 950 bp, Homo sapiens
acaggcatgcgccaccatgcctggctaacttttttgtattttagtagagacggggtttctccgtgttagtcaggctggtctcgaacttcagacctcaggtgatctgcctgcctcagcctcccaaagtgcagggattacaggcgtgagccaccgcgcccggccattttaatttttttttttttttaatagagacagagtctcactatgttgcccaggctggttttgaactcctgagctcaagcaaccctctcagctcagccttccaaagtattgggattactggcgtgagccaccatgcctggcctacagggctgtggctggcagaggcacacatgcattgttagagaagccagagacacacacacagcagatgcggcggacagggactggctgggaagcggggtggggagcagagatggcttctagagaagacatcagatggtgcctgtctgaggagggagcgctgggttgacacctggaggggacaaggggccaggtggaccttgtgaagaaaccaaaggaagctcgacttgctggagccgagcaagtgaaggagaagggggcccagaggaggctgtgggcagaggacagcgggcagcaattggacctcttagccccatggccttggggaggggtctgcgctttattctaagacaaggggcagctctgaagggggtagaattgcagaggggtgggctgcccaagtcagcccatccacccagcctgcgtgtygggaacggcagcagcaacttctgtgggccgtggtctggggagctgtcatgcgggctgtgggaggccaactgtcacttaggggggaattagaagtcccccagtgggccgggcacagtggctcacgcctgtaatcccagcactttggaggccaaagaaggcagattgcttgaggccaggagttcgagaccaacctggccaacatggcgaaactctttctc

SEQ ID NO: 728424 - DNA, 950 bp, Homo sapiens
acaggcatgcgccaccatgcctggctaacttttttgtattttagtagagacggggtttctccgtgttagtcaggctggtctcgaacttcagacctcaggtgatctgcctgcctcagcctcccaaagtgcagggattacaggcgtgagccaccgcgcccggccattttaatttttttttttttttaatagagacagagtctcactatgttgcccaggctggttttgaactcctgagctcaagcaaccctctcagctcagccttccaaagtattgggattactggcgtgagccaccatgcctggcctacagggctgtggctggcagaggcacacatgcattgttagagaagccagagacacacacacagcagatgcggcggacagggactggctgggaagcggggtggggagcagagatggcttctagagaagacatcagatggtgcctgtctgaggagggagcgctgggttgacacctggaggggacaaggggccaggtggaccttgtgaagaaaccaaaggaagctcgacttgctggagccgagcaagtgaaggagaagggggcccagaggaggctgtgggcagaggacagcgggcagcaattggacctcttagccccatggccttggggaggggtctgcgctttattctaagacaaggggcagctctgaagggggtagaattgcagaggggtgggctgcccaagtcagcccatccacccagcctgcgtgttgggaacggcagcagcracttctgtgggccgtggtctggggagctgtcatgcgggctgtgggaggccaactgtcacttaggggggaattagaagtcccccagtgggccgggcacagtggctcacgcctgtaatcccagcactttggaggccaaagaaggcagattgcttgaggccaggagttcgagaccaacctggccaacatggcgaaactctttctc

SEQ ID NO: 728425 - DNA, 678 bp, Homo sapiens
atggattcctttttcttttttttctttctctttctttcttattaatagacttatgtggttatctgcatgagaaatgaagtgcttatgttaacattttctgaattgggaggggatggttrctgttcccctccatgggcctttgtctctaagagatgagcacttccttagtaccgctcccgctgatgtttccctgggggcccaggatggatacagccttaggttccgtgtcctgttgctgttactgatggccgcaactaatgacggatggccacctctcccgccctagtctgtttcattcctttggcttcagggaggggaagagttgccttcttcgcaactccttgtacgtaggaacaagaagccaaagtagtgggcccaggagggaggagagccaggcttctggagacgggaaccaggccttctgaacccacgggggctccacagctgttgcttctgaatgctcaggcatctgatctgccgttgttatctgataggttcatttgcccgatgtgccgcgagccagtatactgagacatctggaaccgcagcagagaaagagtttaaatcatagggcagccacatgagaagttggggggaaacctcaaatctgcctcctgaggagtttgggttcagggattttaaggggtttggagtgggccaagctgtggggatcattga

SEQ ID NO: 728426 - DNA, 1058 bp, Homo sapiens
ctgactcgggttcaagtcctctctgtgccactcattggtcgccttgccttgggcaagttacccctctcacttttaatattgccatctgtgaaatgaggctaatgttcacacagtataaaaataaaccccttaagagcaagggccacctctggagaggtgtctaatacatagttggtgctcattttctgttgaatggcctaatcatagctcacaagcttgtgctgaggaaggactcaatatacagagaacaggggagaatgagggttagtccaaaagtgggtagcaggtttcctcatctatgggaaatttgtcttttgtttgacaaaatgtcatttttgctgtggaaaggtaacccttagggcttagagtgaaacaaagttaactaaattgccctacatataaaaggggraaaaatgagatttcaccagcagctcaagaaagaagacataggccaggtacggtggctcatgcctgtaatcccaacaatttgggaggctgaggcgggtgaatcgcttgagtccaagaattttggaccagcctgggcaacatggtgaaaccccatctctaccaaaaatacaaacaaacaaacaaaaccccaaaaattagtagggcgtgttggcatgtgcctgtagtcccagctacttctggaggctgaggtgggaggatcgcttgagcccaggaggtggaggttgcagtgagctgggatcacaccactgcacttcaaccagagtgacggagtgagaccctgggggaggtggggggaagacagagagagagagagagagagagagagagagaggatatagaagcctggaaatggaaaggagagaagttgccagcatgttgggggacagaaagggtccaacaggggtggggcatggggcctaggagaaggaacaattattaggcctttcccagtggtgggaatggttatggaaatctgaagaacaagaaagtctgatgtccaatttaaagttgatttctatgctgagctgcatggtttaaatgactaaagaaatgacaggcagccttaaaaggaaacctttgctaccctctcc

SEQ ID NO: 728427 - DNA, 928 bp, Homo sapiens
ttggtctttaatgacttgcattctttgtgtagtgtaaagaatggaactagttttgttttctgctttttaaataagataaccaatttttttagtgccccttattgtgttgttcatcctttctccatttacctgcaagcacytctgaattcacacaattccctataaggatggagtatttctggctctattctgtttcatgtgtctaacctatgtcaaaaccacactgtcctattaaccatcagtttaaaagaagtcttgatagctaatacagcaagtctctcctacctttatcttatcgggttttctcaatattgtcgtagctcttcttggttctttatgctccaggtagcttttggagacaacttgcgattgacacaactctttaacctaactagattaacttactttcaaattaaataagatgttttaggtagaagtgctttgtaaccaatggagtgctatgtcgatttaagctgtcagtatttgcatcatgaaaatgtgatttatttggatttaagagcattttgtgtattgtatgtatctgctagtatataacttgcttgcaagtagagaaatatggcttgatttctatcattttctctatctaatgtcatgtggcttgtggcctgtgggtgcccaagaaatattatctgaatggaatcatcagtcaggttctaagataggccacgtggttagttgttttttctttttcttctttttttaacacttctaattcttccttcatctgtcaccatctttttgagctgagtataagagattttgtttgtttgtttaagaaatattggatatgcagagtattttaataaattgctccctgcctacaggcaaaagcaagatgaatttcaatagggataatataataagaatgactgagtttaaaatttaatttcctactgattttgataag

SEQ ID NO: 728428 - DNA, 928 bp, Homo sapiens
ttggtctttaatgacttgcattctttgtgtagtgtaaagaatggaactagttttgttttctgctttttaaataagataaccaatttttttagtgccccttattgtgttgttcatcctttctccatttacctgcaagcacttctgaattcacacaattccctataaggatggagtatttctggctctattctgtttcatgtgtctaacctatgtcaaaaccacactgtcctattaaccatcagtttaaaagaagtcttgatagctaatacagcaagtctctcctacctttatcttaycgggttttctcaatattgtcgtagctcttcttggttctttatgctccaggtagcttttggagacaacttgcgattgacacaactctttaacctaactagattaacttactttcaaattaaataagatgttttaggtagaagtgctttgtaaccaatggagtgctatgtcgatttaagctgtcagtatttgcatcatgaaaatgtgatttatttggatttaagagcattttgtgtattgtatgtatctgctagtatataacttgcttgcaagtagagaaatatggcttgatttctatcattttctctatctaatgtcatgtggcttgtggcctgtgggtgcccaagaaatattatctgaatggaatcatcagtcaggttctaagataggccacgtggttagttgttttttctttttcttctttttttaacacttctaattcttccttcatctgtcaccatctttttgagctgagtataagagattttgtttgtttgtttaagaaatattggatatgcagagtattttaataaattgctccctgcctacaggcaaaagcaagatgaatttcaatagggataatataataagaatgactgagtttaaaatttaatttcctactgattttgataag

SEQ ID NO: 728429 - DNA, 1358 bp, Homo sapiens
cgaggtaggtactgtgatcacgccattttacagaggcccaggagactaagcagctctcctagagatgcaaagtgagtaagtggtgctgcttggagtgtgcctctcagatggtggattttgctttgaaatctatttgcctcaagctgcgtgtcctgtatcctgtaggaagtctaattccttctctaaggactctgaaaatatccagggcttatagtttcgggtgactgtgttcctccctccccagatctctaaacatgagccagcaatgcctccctctccgcctgctttgaagattgaatgacataatgtttgcaaaatgctttgcacagtgcctgacatatgcgtgctcagtacgccctcacttttatgaccttggcttctggtggccrctctctcctccctcatgctgtttggtatgaaagccagttgcttctctgtgattgctccagagcctccctctcaaaaatctctgtgtaaaccaggcttgtccaacccgcagcccatcgtcttcttcttcttccaattcttcttcttccagtgtggcccaggaaagccaaaagattggacactcctggtgtaaacagacttttccaaggctttggggcagggtacatgtcaactgtgactacaacttgaaagcaagagtcaagcagcctagttcctaataccccttcagccgtcttgcctgctagaaactgtcacaggtaagcactgacccaggactccccccacagagtcaagcagatgagagagtcgagggtgactcccagagtgggctcagcaatggggagggggtggcagtaggggcacagagcagcagtcaacgatgaaccatgctcaacagattttcttctttataggagggagggaacccattggcggggaacgagcaggcctgggaagggggacaagctgaagaatggtggaggggaggaaggagcaagaccaagtgttcagggtatcggggacaaagcagggaccttgagctgggcacagggtctcatcctccaaggatggagggaaggtcttgaaatgggtggagatgacaacacatttgcaggtcagggctcctgcccgctggccttccagggtctcctgaatgaggtgtgtagggctccagggggagtgtgtgtgcacaagtgcacccaggaaacacacctccaacatggaggaaggtcgtttatatgattgttcttgctactggaaacagccctgagttttttgttttaatggtggataagttgaacgcttttctctgatcaatacttgcaaaaagcttgctttatttagtaggggtgtggattaccaatgcacatatgagtgaatgggattagtctcagggaaaaaaaaaaacacca

SEQ ID NO: 728430 - DNA, 652 bp, Homo sapiens
ttattttagagcttaaatatcaaaatatcatctagagaaataagtgggtaaaagtggctaatttttaaaaatcaaagtgatggaaagaaaattaatctttcagatagacactatattacaaagtaacattaagtaaaatggtaygattttactgaaagaaaaggaaagatagctctcaaacaaaatagatagaaatatattacaaacttatggagaagggaaggaatttgttgtaaataccttaaggataattagttctttagggagaaacaatcaagaacctcctctctttcatctaccattagttgagttaatatttaataagagcttctagtagtgcctgacacaaatatgctttatataggtatttattaaataaagaaaacaaataagataccaagataaatctaaaaactttaaagtaaaataattaaccctatagaaataaatactggtgacttgagaatttctctacaaaaaaaggtaaaaattgatttatttagtacatttgttccatgccggaaacaaaatagaaagcaaacaaacatctgggtaaaatatttcttagcaaacatggtagacaaatatataaaaaactcttaaaaaacaataagaaaattagtaagagttcttgttaagtaaagaacacaga

SEQ ID NO: 728431 - DNA, 652 bp, Homo sapiens
ttattttagagcttaaatatcaaaatatcatctagagaaataagtgggtaaaagtggctaatttttaaaaatcaaagtgatggaaagaaaattaatctttcagatagacactatattacaaagtaacattaagtaaaatggtacgattttactgaaagaaaaggaaagatagctctcaaacaaaatagatagaaatatattacaaacttatggagaagggaaggaatttgttgtaaataccttaaggataattagttctttagggagaaacaatcaagaacctcctctctttcatctaccattagttgagttaatatttaataagagcttctagtagtgcctgacacaaatatgctttatataggtatttattaaataaagaaaacaaataagataccaagataaatctaaaaactttaaagtaaaataattaaccctatagaaataaatactggtgacttgagaatttctstacaaaaaaaggtaaaaattgatttatttagtacatttgttccatgccggaaacaaaatagaaagcaaacaaacatctgggtaaaatatttcttagcaaacatggtagacaaatatataaaaaactcttaaaaaacaataagaaaattagtaagagttcttgttaagtaaagaacacaga

SEQ ID NO: 728432 - DNA, 607 bp, Homo sapiens
gtattttgttatagtatcccaaacagactaagacatgataaagtcagcataaaccaggttattctagtaagacacagacactttgttttctaggcagattgcacagaagataaagaataaccatttacaatcttttatcaaaagcaaaccaataatccaagaaaaaaattcatctaacagaaagaaaacaaaattctrgttttctaaagctctttttttttttttttttttaaagacagagcctcactctgttgcccaggctggagtgcagtgctgtgatctcagctcactgcaacctccaccttccagtttcaagtgattctcatgcctcagcctcccgagtagctgggactataggcgcacaccactgcgcctggctaatttttgtagttttagtagagacagggtttcaccatgttggccaggctggtcgtcaaacgcctgatgtcaggtgatccacctgccttagcctctcagagtgctgggattacaggcatgagcccctgtgcccagcctctaaagctgtttttgaaaattttatatgtatacccattaaactttacctaactttggccatgacaaagaaaattccttttctgagaagctc

SEQ ID NO: 728433 - DNA, 608 bp, Homo sapiens
aaccaagagcgaccaggaggccgccatcttgaactccgtacgaggagaggaagaggaaaactttattggaacccagaagagagacggtggcaaagtcaaaccccgccgtgcacgctgaaggctccacccgagagaaccaagggatcagttagggaacgtgacctccagtagccacatgggcgggctgcactcccgtsccctcccgtccttccggacgctgccagccgggactacgactcccagcatgcagtggggtggggcggggtggaacggaacaggcagctccagtctgggcagtgggagggagggcgattctccgcccggcgctggcggccggccgaggaacccgaagttttcaaggaattgggaagtgattatgacgggtaggcaggtaaccactcttgagccttttaagttagctcacatgaccgagattccgaaacctgaataaaatggaggtgacccaatgggccctcgggttttaacggaagagtggtgtcacttcgtcacacctccctaaatggtaggcccattttttattttatctccagcgtccaactcatctttgacgagtacctgaaatgtgcgcctaccgctttcccttttcg

SEQ ID NO: 728434 - DNA, 653 bp, Homo sapiens
gtattgtgggggttataatatattttcaggtaaaatatataacaaaacaataacacaaaggatgaaggaattagaggatgatgttgtaaggttctcacattttctattaattcagggtaatctgtgatgagttaaaaatacacattgccagccaggcacagtggctcacacctgtaatcccagcactttgggaggccgaggctggcgatcacgaagtcaggagttcgagaccagccaggccaacatagtgaaaccctgtctctatttaaaaatacaaaaaattagctgggcatggtggcrggcacctgtaatcccagctactcgggagtctgaggcagaagaatctcttgaacccaggaggtggaggttacagggagccaagatcgcgccattgcactccagcctgggcaacagtgcaagactctgtctcaaaaaaaaaaaaatacacattgccttttccctccacgatttctctctactcccgtgagttacttgactctgggggctctgtttgtctgcctgcaagctacacatttcccaggaccacaccgctggcctctgccacgagcagactccttctgatggccctactgcacaggcgggaacatccttcccccatcttcagaaagtttgaagagtggagaagaggggaa

SEQ ID NO: 728435 - DNA, 653 bp, Homo sapiens
gtattgtgggggttataatatattttcaggtaaaatatataacaaaacaataacacaaaggatgaaggaattagaggatgatgttgtaaggttctcacattttctattaattcagggtaatctgtgatgagttaaaaatacacattgccagccaggcacagtggctcacacctgtaatcccagcactttgggaggccgaggctggcgatcacgaagtcaggagttcgagaccagccaggccaacatagtgaaaccctgtctctatttaaaaatacaaaaaattagctgggcatggtggcgggcacctgtaatcccagctactcgggagtctgaggcagaagaatctcttgaacccaggaggtggaggttacagggagccaagatcgcgccattgcactccagcctgggcaacagtgcaagactctgtctcaaaaaaaaaaaaatacacattgccttttccctccacgatttctcyctactcccgtgagttacttgactctgggggctctgtttgtctgcctgcaagctacacatttcccaggaccacaccgctggcctctgccacgagcagactccttctgatggccctactgcacaggcgggaacatccttcccccatcttcagaaagtttgaagagtggagaagaggggaa

SEQ ID NO: 728436 - DNA, 959 bp, Homo sapiens
atatgatatatgcaaatgtatctgaaatatacacactgaaatatatgtttcaatgtgtatacatacacacactgaaaaagtaatagtcatagaggtaaaacatttcagacatatatatctgcaaatgactttaaaaaattaattctgataattctagtgaagatagctgacactaggcaaaaaaaaaaaaaaaatcaaaacaaaacagacaaacaaaaaaacaaacctaaatctcagaagtgttacaataaaatttttccattaatatgaagtgcaactggtgattggggtgggtgtggggatgctgtattccacacaatcatttaaggacacaaactgatggaatctctggtatctttaacacttagctttaaggtcactctggtcattaacatccagcaggagattggggaaaagcatggaagaacatgcagggacattataggcagatgtagaaatggtatacattacttcagtccacatcccagtgaacagaattcatttcgctgtaaggcagaaggggaaatgtggcctagagctgtggtccaggagagaatgaaaattattttgtcatcaactgtccagactctgccccaacctaccattttagtattctccctagactaaaacaacctcattttctttctatgaattatcctccaaagtcccatgtagttaagtgcarctggattgaggcccaaagttacctgacaaatgtgcggctctcttccccacacctgcaggtatttctttgtgatattgcactatagaaattatttttaaaaaatagtctggctgcccctcatgctaatatcagagtttgatcaatatctaagatatcatgccaatatcagaaggggaacaggcccctcttgtaggctctacagcttttacctgtatcctgttcatgagaattttgaacatgtttgtggtgcaaagacttttttgaggctttaaca

SEQ ID NO: 728437 - DNA, 621 bp, Homo sapiens
gaaaaatgtaacttctcaagtatatctaattctacatgacaatcaagtggatgaaatcaacacatctctcatcttgccctgtgcagcccagcccagcctcccaagtgtgggtgataggatakagggctttgttagggaaaggctgactcctgcagacctgctctgacaagggaacagagagagagagagagttctgttcctcttctcctcccctccctctgctcccagggaagttaatttcccccttgggtgggcatttaccctatactgattctctgaacacagcactagacatgaataaagaccacgtgggcacaaaagggaagaaacttaacttcataccggtgtctccctctccactcctgagatagccagatgggctctccttcaaaattcgggaagcaggaacttcagttagctcggacttcagttcctggaaggccaaagtgtccaaattccacgtagaaactgcattaaaagaaagagacaaaattttactgtaagaaaaaatggcccaaggattgactatgttgaggatgacatttaaataggctgccggccaggcgtggtggctcatgcctgtaatcccagcactttgggaggccgaggcaggcggatcac

SEQ ID NO: 728438 - DNA, 621 bp, Homo sapiens
gaaaaatgtaacttctcaagtatatctaattctacatgacaatcaagtggatgaaatcaacacatctctcatcttgccctgtgcagcccagcccagcctcccaagtgtgggtgataggatagagggctttgttagggaaaggctgactcctgcagacctgctctgacaagggaacagagagagagagagagttctgttcctcttctcctcccctccctctgctcccagggaagttaatttcccccttgggtgggcatttaccctatactgattctctgaacacagcactagacatgaataaagaccaygtgggcacaaaagggaagaaacttaacttcataccggtgtctccctctccactcctgagatagccagatgggctctccttcaaaattcgggaagcaggaacttcagttagctcggacttcagttcctggaaggccaaagtgtccaaattccacgtagaaactgcattaaaagaaagagacaaaattttactgtaagaaaaaatggcccaaggattgactatgttgaggatgacatttaaataggctgccggccaggcgtggtggctcatgcctgtaatcccagcactttgggaggccgaggcaggcggatcac

SEQ ID NO: 728439 - DNA, 621 bp, Homo sapiens
gaaaaatgtaacttctcaagtatatctaattctacatgacaatcaagtggatgaaatcaacacatctctcatcttgccctgtgcagcccagcccagcctcccaagtgtgggtgataggatagagggctttgttagggaaaggctgactcctgcagacctgctctgacaagggaacagagagagagagagagttctgttcctcttctcctcccctccctctgctcccagggaagttaatttcccccttgggtgggcatttaccctatactgattctctgaacacagcactagacatgaataaagaccacgtgggcacaaaagggaagaaacttaacttcataccggtgtctccctctccactcctgagatagccagatgggctctccttcaaaattcgggaagcaggaacttcagttagctcggacttcagttcctggaaggccaaagtgtccaaattccacgtagaaactgcattaaaagaaagagacaaaattttactgtaaraaaaaatggcccaaggattgactatgttgaggatgacatttaaataggctgccggccaggcgtggtggctcatgcctgtaatcccagcactttgggaggccgaggcaggcggatcac

SEQ ID NO: 728440 - DNA, 1721 bp, Homo sapiens
tggaatggagtccattaaattctttcctataaataataaatttcctataaattatgcagtcttgggtatgtctttattagcggcatgagaacagactaatacatgccctgaaygtgtggagattatggggataagtcaatatgagattttgagtggggacacagccaaaccatataacatggtgaataaaagatttccagagctttcaaggaagacctgagtaaatgtagaggcatgctatatcagtggatggtaagacacatcactaaaaacataatttttttccaaattaatttctatatttaatgtcattcaaacaaaatatctacgagtgttgttcaaaaaccttaacagattctaaaataaatttggaagagtaaattttcccaaaaaactaaaactaattggtttttcacaaaaacaaaagggtaataggcatctattaccacgtataaagttttaaacaagggattttaattaaaatgatgaaatgatgtgaacctggattcgttataacacatggatcaatagaacataatataaagccaagaatgtatgcatacatttgtttcatatatattgatcttgaaatttttcatgaaagaggaaagatttcagtaggaaaatattgtccagacaatgggctattagatacattccccataggtcctttgtgtttctgccatcctctttgttccaatagttatttcagagtatttctatagtcaacacacttggaagactccttctagagcaagaggcaggcatacttacttcccttataaaagatttgggttcccttaactcagggttcctttcttataaggcaatccgtggcatgtgagcaggtgtcaccttatcctcttaatgttgcctggtaggaattgaaactctgggaatcagggcaaaaaaaatgttgattgcaacaattagtaaactgtcattatcgacccaggaatctcacatcttttaccaatatccatataatggggtgaggtaaacattttagcttacctgtagggtaaaatattagactcttcacagttcttggcattggctatctttatgaaaaatataaaattgggtcccaacctcacactacacataaaataacttcaagtacttggagagctaaatgtaaaataaaaatttaaaaattatcagaagaaaatataaaagaatgtttcctgactcctgtttaaaaaacaatttcttaaactatagacaaaaattaattttgtaaacaagaaagttctgctggaaaggctcaacaaatttgacaacatgtacttattaaacagtgacaacaaaacctcttctgcaaaagatgacattcacaagattagcaggcagacaacagagggagaaaaaatatatgcaggtacaaaatatataataaatatacatttattatttgtagtatattctaatacagttctaactagacctttaataataacaatgaattaacacagaattaacaatgaattaacacatttgtagcagctcaatagaacaagtgatgaagtgtatgagcaatcactttataggaaaggaaatataaatctcatagaactacattcaatctcattgataggaaaatgcaaattgaagtaaaagacaaggcacagtatttatcagttttggaaaaaatataaatatctgtcattcagtggggaaatattattcttgtaaattagtaatgtgtattgtctttgggg

SEQ ID NO: 728441 - DNA, 1354 bp, Homo sapiens
tttcttcacagtaacaggaccaaatactcgcaacaaatatgatccatcatacacacctagcatctttaattgttagggtttcagaggtgctttatttttgatgcaaaagactccaaataatacacaaaataaactgtagacatcatatataatatttatcggagacactagaggcaagaaatctactagaagttgatagtttgggtttaatgtttcattcatttttatattaatgaaagtgaggattaatatcagcttttagtcaacttctgagcaaacatctgagaaactaaaatatcacattgtcgtggaatattctcaaaagaggaatgattctgaaattttatattcactgcatctgtcatctgaagcattatatctgttgtaaaaagcacagtgagtttgttgaagtgcagttattgtgtttattctctttacaaagtaattggaatgagatttcctctggtgactttgcttgggatgttaatgacacattgtttgtcttttgtgtagaaataaatgataaaccataaatgatttgtatgcttagttatacttcttggtacaaagaatcttaaatgaacatgcaatcaaagttccttttgtatctactgtagataagatcaattactatatttggatattttctaatgcagaaatttcctaattctttctaatttttgtagttgtgtcattacttggtattaatatagagcagcagcaactatttccaaattaactgtaagcatctttaagtgcttgttcagattgtctcataagaatcttttttgttgttgctgttttgagaaaaaaaaaataagtgatgagtctttatctgttgtcccagggcagaaattctcaaatcttwgtcaaagtaagtgtgccaaataatcaactggttcacttattgtaggccagtaacaaaacctgccttgttatttgaaacactctagttaattctgattcaagtaattttaaattacattttgagaagtatttctgttataaaaaccttagaaaagcaacaacaaagccagaaaattctctccagggttccaaatgagaacaaagggaggcattttatttagattactttatttcaattgtacaatgtttcttattccaaggatttatgccatttgcctgaaaaataaaaacaattacttgaatcaccttaatagtttggtatttctttgtgtataataatgctgcaaaacaaccacagaacttcagtggcaccccacaatacttacttaattcaccagtatgtgaagctgatttgggcaaataagcactatgctcacatgcatttgccattagctgtaggtgaatgacattcttggttatgctgatc

SEQ ID NO: 728442 - DNA, 3370 bp, Homo sapiens
gtagaaacactgagaaataatatagttgaagtccagtctcaaagggcctagttgaacttcaaggactgagtcctcctgctccgtagcataatactgagctgcacactgagaaatatgctacagtagtagtcaaaaacaggaagaaaatctgtgtgtgcagtgccggtgtcacagactgaatgacactaagaaaaactaccatagcacagacattacaatagccataaagtaatagtagctaagtgatggaggaatttgaaaactgaggatcacagaagtaatgataacaacataattcaaacccagttcaacttctgacaaaattaactcaaatacttcacaataatggttttcaagaggaatggcatgtccatttccatgtataaatataatttaccaattctctacagctctacaaaataatgtctgtcattctgacagcagagaataggtaaattatatttatacatggaagtggacatgccatttccattttgtgttatgtgtatgtcacacaaaacagagaaagagaaaaccttatcagttagtagtaaatcaacagaataagactcagatgatcctcatgatggaaccatcagaaaagatctttaaaatatttatgactaatatgttaaaaatatctagtggaaaaggtagacaatatgcatgaacagatggaacattttagtagggaaaaactataaataggagtcaaatggaaatgataaggaaaaattatttagcagtattattagctgactagacatagcacataaaagtgaacttgaagatcaataaaaattacccaaagtgaaacacaatgagaaaaaacaatggtcagaaaaaagtagaacaggatattacaaagctatggaatattatcaaattatctatcacacatatattagagtcccaaaaggagaagaataaaagaataaagcagtgttttgtgggcagtttagagcattaaaatattgtatattggaaaaaaaaatttcaactcaataatctaagatttcacctttgaaactagaagagttttactcatggctgatcctaagtgtgtatccagattatagaggctggttcaaaatgtttatttccttttctcatcagttaaattttcagctcctatacagttagtcttaggaggaacttagattactgttttctttatcttcctgccctcttccttttccaggctgttaagtgttctaattagaaaaattctcatttggagagcattcctgagaaaacaatgggtatcttcagggtagataaatctttaaacttattagtgtgagtcagatttttctgacccttcagagtacaatatccacagacaaaatattttatctgcttctattatttttatattacttccatgcactaatttgaacttcattgatttttattgcatagcaaatctctttatattattaatgcacrtttaactatattttcctctcaaatataaattgtttggcatatcaattctctttctgaacaagaaaatgatctttccatatcttatcaagtaaatatctgttccattcttcaaagatatcttacatttttaaagtatttctgcaaaatagttttattactaattttgaattgcataaatctatacagttttccccatcattgtgcatatttcaagccaatacttttctatgaacatacaataaaactatatgtcctcacctgcttgcatttaaatgtgatcatgatgtttattccctgaaggtatagcactaatgtgttcttattcttccgtactttggttggaagcaaagaatttccatatagggaaatcacatgatggaaagagccagagccctgcaacctctgttggaagagtcaactagaagtgtttcttggactgcatgagtttttgctctaagcaaggaaaaaaaatatgtgtttgcttgagtcactaagattcgtttgttttgtttgcttgagtcactaaaatttgctagttaccattaatttcaacaactttactgttaaatatttcatattttgtattattagacaataggcaatgatttgtcattaattagattgttattagcagtttttaaactgtagtaatgttttccatatactataaagttacttaatttaagaaagatttggctgggcacggtggctcacgcctgtaatcccagcactttgggaggctgcaacgggcagatcacgaggtcaagagatcaagaccatctggccaacatggtgaaaccccgtctctactaaaaatacaaaaatgagctgggcctcgtggcacacgcctatagtcccagctactcaggaggctgaggcaggagaatcgcttgaacctaggaggcagaggtcgcagtgagccgagatcgtgccactgcactccagcctggcaacagagtgagactctgtctcaaaaaaaaaaaaaaaaaaagttttatttggtgaatgaaggaacatgcaaagaagtaaaaatccaaacattggattctatttcctactcttcactcaaaaaaatcactagataagcaagtaaaaaatctcaacttgagtcttgattttgacacaattacattcttgatccttagataaaatatgcaatgtaaaacatgtttgaattaaattttctgactggcttctgttctctcatctcttgctatactgtcaaccattttaagcactccacttgagggtatgattctgaaaatactgatttttaagataataacccatataatattataataaatattttaaaagatatatctgatgtgacttgtgaagttactaagatacactcttcttttcaaaataaagatgtggtcatcaactttaataaattttaattagaaatttagcctcagatgtcatatcttagttgccagatatttctaaacatgtttttgttcttatctctcaaatatttctctcaaacatacgcaaattttagagttggttaatcactgcctagtgtgttgctatacatgctgtctttgcttacctgaattatttcactacagaagagaatcagttgaaaaagtcactttgcctgaagaaatacaatttgtagggcagtgggagttcaagattgatgctactaaaagagcaggcaagcaaaacattgaagaatacttcttgtcaaatgttccttgaaaataaactctatagcctacatgggaatgtagttaaacaaagagacgctaagggtaatttagcagactctttgaaggaatgaaaagtaggcaccatacttgctttgtcaattgtgtggaagaacatttaacttgagcccctgctgaaataaaactatttaattacacttgagaaaaagaaagagaaaaaagtttttcctttgaagtttcag

SEQ ID NO: 728443 - DNA, 643 bp, Homo sapiens
gaattgttagtttgctccaatgtagatctcaaatagataaatgccttgcctagtatcaaaactggtaaaaatgctggagttcaaacatagatctgaagggtctaacatgcccaggctctttttgtgttatttatcttctatatagcttaaagatgaacagaattaatatatgcttcataatgtttgataaagtgatttatttatttatttatttatttttatttttatttttttctgagacggagtctctctctgttgccaggctggagtgcagtggcgtgatctaggctcactgcaacttccacctaatgagttcaartgattctcctgcctcagcctccttagtagctgggactacaggtgcgtgccaccatgcctagctaattttgtattgcaccatgttggccaggatggtctccatctcttctcctcatgatccacccacctcggcctcccaaagtgctgggattacaggagtgaaccaccatgcccggccgataaggtgattttcttatggaaaataacaaacgatttccatagggaaaaagatgatgatgatgtaccaaaaatatgtttcaattttcccaacaaaatgtagtcattaaaattcactaatttataaaacaaaatcatacaacccttt

SEQ ID NO: 728444 - DNA, 599 bp, Homo sapiens
tgtgattaactgaagtgtaattttaattagtatagatagtaaaagaaaaatgaatttgacaagaaaaaattagttcaattataaacttcagcaaatactactggtacaaatatggactattaattaacttttgtgtacattactttcctcatctataaactgagcctaataatatctaccctttatgatgcttgcaagttaaactgtttttattcgcaataaagctattagaaacaaaataatatgaatatttttaattctttagtcatggacccacacggaaattctatgagctaacatgttagacatctagcactcaacctacatgcattacaaaaatattatttaaatattacctaaaagtattatcacgattaattaataagtataagcaaaaactctgaagctcaggcaatgaaaatattttattaatcctttaagtaaagtagagtttaaataygggaatttttatttaaattgttatttaattttaacacaaaaagctatattcattggctacacagataaaatatttttaaatatagataaattcaaattttaaaatacattttaaacataggatatctagcaacttttga

SEQ ID NO: 728445 - DNA, 326 bp, Homo sapiens
atgaaataattttagaaaaagtggcaaaaccgttcatagaggagtgaacaatcaaacagtaaaactgagcaattatcgatagtgtggtatatgtgagaggaatttgttaggaagggactctttaaatagaagacgaataatgtttaaackatctcctagaactaaaattctaaattattttaacaaaaccagggagtgtagggaaatgaagagagtaaaagtgtatgaaagctctcgggttcagggacagtaacagattttgttccactcgtgatatagatagatgtgcgctggataggctgaaatatgctagttagaaatgttgg

SEQ ID NO: 728446 - DNA, 326 bp, Homo sapiens
atgaaataattttagaaaaagtggcaaaaccgttcatagaggagtgaacaatcaaacagtaaaactgagcaattatcgatagtgtggtatatgtgagaggaatttgttaggaagggactctttaaatagaagacgaataatgtttaaactatctcctagaactaaaattctaaattattttaacaaaaccagggagtgtagggaaatgaagagagtaaaagtgtatgaaagctctcgggttcagggacagtaacagattttgttccactcrtgatatagatagatgtgcgctggataggctgaaatatgctagttagaaatgttgg

SEQ ID NO: 728447 - DNA, 1474 bp, Homo sapiens
atagtgttttagctaaatctcagaattactttcaaaatctagatctgattttgggcagagggcaggttaattaattaaaggacagacgagctgtgccagtgtctcttgctctcagggcagcagctcgtgcagttggattttggcagtggagactctcacagtggtggttaggttggagagaggtgggagctcatagactctcatgtcctaaaggaaagcccacctggttccaccattccctcttcccttctttatgcagttgtcaggactcataacctgatttttactgccacagaaacaaggtttctctcttggatgggggaaatatacccagctaccaatactttttggtccaggctctcacctacagataatggccatagcttcaagccgtaggtgggcagaatgggctggagtagggctgccaggagattctttaactctaatgtcttaggaaaatttccccaaatacatgctctatttcaatcccagtggagtaatacactttatgataggagatatgatcacttttgtctcagtgaaaggcccagctggaaatactttgcacagggcctgtagtgagggtgagagaacagagtgagagtgagggtagaggactttccccaactctggctgcttcctgttttctccatttggatggaaaggatctcacgctttcttagtcagtgtatccacttagctctaggtgctcagtgaagcacagggttatttgaaacagaacaatctcaatttaccagccttgccttactctgcttcagtgtgggaatacatgactatgtaggctgcatcactcatctgctgcaaaaatcaataaactcgggtgtctttatatatggcaaccaaatatgctaattcttctgcagatacacattcacactcttagtaatgataaaatagccaagttataacttaattactttataccatacaacactgagactcagtttattatcctaagatgggtatgtgtatggtgattctcaatgaactccactagactttggctttatcagtgtaattttttgttttctctgtgggcctattagttgcaatcctactgatagtactagttcaatttagcaagattcttttgtgtcagataacagccaagctagttgagctactgaagaaaaagacagcaatgtgttataaggatataggggtatcttttttttttttttttgagacagttttgctcttgttgcccaggctggagtgcagtggcgcgatgtcagctcactgcaaactctgccttccaggttcaagcgattctcctgcctcagcctcccgagtagctgggattacaggcatgcgccaccakgcccagccaatttttgtatttttagtagagacggggtttcaccatgttggccaggctggtctcgatctcctgacctctttttccacctgccttggcctcccaaagtgctgggattacaggcgtgagccaccg

SEQ ID NO: 728448 - DNA, 1212 bp, Homo sapiens
ttaaaaggaatctttcagtgacttttaaattggaacatcaacaggaaaaatacatccawtgttttaaagtaaatgttttcctagggttgagaagatgagggtccttcagttgctctttagatatgaaagttctcagtttatttaccatcctgcctgtctcatttgactgcctgattagatcaacagatctaagtataaagaacaaaaacaaaaccaaccaaactacaatgatttgtacctcatggtattttgcatcattaatttgagctttctttaacgtatcttcaagatgcacagggccaccgctgaatccaaaatcatagaacacatgtaggtaaccattgcgcatttccagtctgaaaaacatactctgaggagagaaaggaattgtaagataggaacatctgttatgcgagtagagtcagatttagctgaatttgagaaataagactgtattctttattactggaactatttgaagactaagaaagtctcatgaaattcttatgaaataaaagtgacagtgtctgggagtggtggctcacacctgtaatcccagcactctgggaggccgaggcaggtggatcacttgaggccaggagtttgagaccagcctggccaacatggcaaaaccttatctctactaaaaatacaaaaactagccaggcgtggtggtaggcacctgtaatcccagctactcagggggctgaggcaagagaatcgcttgaacccgggaggtggaagttacagtgagccgagatcgtgacactgcactccagcctgggctacagaacgagactctgtctcaaaaaaaaaaaaaaaaagtgacaactacttccatatcagcagctatttctcttattaatacataaaagttaatatttatacacagtgtaaaaattcttctgttttcattctactttctgaactaatggatgaagttttaagtctacattattgccttttaagaaaatcttgaaaatagagtatagtataccatgtttattcaactgccttgtctttaggaaacttttaaaaattataacaggccaacagatgtgtctgcatttattttaggtgaaaattagtaaaattaaaaaataatttcaaggtatactgaaaagaattcttccatattatcagcaaatatggatttaaaaaaagaaggccattgctgtattgttttgaaacactggatttatgtaaataaat

SEQ ID NO: 728449 - DNA, 1212 bp, Homo sapiens
ttaaaaggaatctttcagtgacttttaaattggaacatcaacaggaaaaatacatccaatgttttaaagyaaatgttttcctagggttgagaagatgagggtccttcagttgctctttagatatgaaagttctcagtttatttaccatcctgcctgtctcatttgactgcctgattagatcaacagatctaagtataaagaacaaaaacaaaaccaaccaaactacaatgatttgtacctcatggtattttgcatcattaatttgagctttctttaacgtatcttcaagatgcacagggccaccgctgaatccaaaatcatagaacacatgtaggtaaccattgcgcatttccagtctgaaaaacatactctgaggagagaaaggaattgtaagataggaacatctgttatgcgagtagagtcagatttagctgaatttgagaaataagactgtattctttattactggaactatttgaagactaagaaagtctcatgaaattcttatgaaataaaagtgacagtgtctgggagtggtggctcacacctgtaatcccagcactctgggaggccgaggcaggtggatcacttgaggccaggagtttgagaccagcctggccaacatggcaaaaccttatctctactaaaaatacaaaaactagccaggcgtggtggtaggcacctgtaatcccagctactcagggggctgaggcaagagaatcgcttgaacccgggaggtggaagttacagtgagccgagatcgtgacactgcactccagcctgggctacagaacgagactctgtctcaaaaaaaaaaaaaaaaagtgacaactacttccatatcagcagctatttctcttattaatacataaaagttaatatttatacacagtgtaaaaattcttctgttttcattctactttctgaactaatggatgaagttttaagtctacattattgccttttaagaaaatcttgaaaatagagtatagtataccatgtttattcaactgccttgtctttaggaaacttttaaaaattataacaggccaacagatgtgtctgcatttattttaggtgaaaattagtaaaattaaaaaataatttcaaggtatactgaaaagaattcttccatattatcagcaaatatggatttaaaaaaagaaggccattgctgtattgttttgaaacactggatttatgtaaataaat

SEQ ID NO: 728450 - DNA, 1212 bp, Homo sapiens
ttaaaaggaatctttcagtgacttttaaattggaacatcaacaggaaaaatacatccaatgttttaaagtaaatgttttcctagggttgagaagatgagggtccttcagttgctctttagatatgaaagttctcagtttatttaccatcctgcctgtctcatttgactgcctgattagatcaacagatctaagtataaagaacaaaaacaaaaccaaccaaactacaatgatttgtacctcatggtattttgcatcattaatttgagctttctttaacgtatcttcaagatgcacasggccaccgctgaatccaaaatcatagaacacatgtaggtaaccattgcgcatttccagtctgaaaaacatactctgaggagagaaaggaattgtaagataggaacatctgttatgcgagtagagtcagatttagctgaatttgagaaataagactgtattctttattactggaactatttgaagactaagaaagtctcatgaaattcttatgaaataaaagtgacagtgtctgggagtggtggctcacacctgtaatcccagcactctgggaggccgaggcaggtggatcacttgaggccaggagtttgagaccagcctggccaacatggcaaaaccttatctctactaaaaatacaaaaactagccaggcgtggtggtaggcacctgtaatcccagctactcagggggctgaggcaagagaatcgcttgaacccgggaggtggaagttacagtgagccgagatcgtgacactgcactccagcctgggctacagaacgagactctgtctcaaaaaaaaaaaaaaaaagtgacaactacttccatatcagcagctatttctcttattaatacataaaagttaatatttatacacagtgtaaaaattcttctgttttcattctactttctgaactaatggatgaagttttaagtctacattattgccttttaagaaaatcttgaaaatagagtatagtataccatgtttattcaactgccttgtctttaggaaacttttaaaaattataacaggccaacagatgtgtctgcatttattttaggtgaaaattagtaaaattaaaaaataatttcaaggtatactgaaaagaattcttccatattatcagcaaatatggatttaaaaaaagaaggccattgctgtattgttttgaaacactggatttatgtaaataaat

SEQ ID NO: 728451 - DNA, 1212 bp, Homo sapiens
ttaaaaggaatctttcagtgacttttaaattggaacatcaacaggaaaaatacatccaatgttttaaagtaaatgttttcctagggttgagaagatgagggtccttcagttgctctttagatatgaaagttctcagtttatttaccatcctgcctgtctcatttgactgcctgattagatcaacagatctaagtataaagaacaaaaacaaaaccaaccaaactacaatgatttgtacctcatggtattttgcatcattaatttgagctttctttaacgtatcttcaagatgcacagggccacygctgaatccaaaatcatagaacacatgtaggtaaccattgcgcatttccagtctgaaaaacatactctgaggagagaaaggaattgtaagataggaacatctgttatgcgagtagagtcagatttagctgaatttgagaaataagactgtattctttattactggaactatttgaagactaagaaagtctcatgaaattcttatgaaataaaagtgacagtgtctgggagtggtggctcacacctgtaatcccagcactctgggaggccgaggcaggtggatcacttgaggccaggagtttgagaccagcctggccaacatggcaaaaccttatctctactaaaaatacaaaaactagccaggcgtggtggtaggcacctgtaatcccagctactcagggggctgaggcaagagaatcgcttgaacccgggaggtggaagttacagtgagccgagatcgtgacactgcactccagcctgggctacagaacgagactctgtctcaaaaaaaaaaaaaaaaagtgacaactacttccatatcagcagctatttctcttattaatacataaaagttaatatttatacacagtgtaaaaattcttctgttttcattctactttctgaactaatggatgaagttttaagtctacattattgccttttaagaaaatcttgaaaatagagtatagtataccatgtttattcaactgccttgtctttaggaaacttttaaaaattataacaggccaacagatgtgtctgcatttattttaggtgaaaattagtaaaattaaaaaataatttcaaggtatactgaaaagaattcttccatattatcagcaaatatggatttaaaaaaagaaggccattgctgtattgttttgaaacactggatttatgtaaataaat

SEQ ID NO: 728452 - DNA, 1212 bp, Homo sapiens
ttaaaaggaatctttcagtgacttttaaattggaacatcaacaggaaaaatacatccaatgttttaaagtaaatgttttcctagggttgagaagatgagggtccttcagttgctctttagatatgaaagttctcagtttatttaccatcctgcctgtctcatttgactgcctgattagatcaacagatctaagtataaagaacaaaaacaaaaccaaccaaactacaatgatttgtacctcatggtattttgcatcattaatttgagctttctttaacgtatcttcaagatgcacagggccaccgctgaatccaaaatcatagaacacatgtaggtaaccattgcgcatttccagtctgaaaaacatactctgaggagagaaagraattgtaagataggaacatctgttatgcgagtagagtcagatttagctgaatttgagaaataagactgtattctttattactggaactatttgaagactaagaaagtctcatgaaattcttatgaaataaaagtgacagtgtctgggagtggtggctcacacctgtaatcccagcactctgggaggccgaggcaggtggatcacttgaggccaggagtttgagaccagcctggccaacatggcaaaaccttatctctactaaaaatacaaaaactagccaggcgtggtggtaggcacctgtaatcccagctactcagggggctgaggcaagagaatcgcttgaacccgggaggtggaagttacagtgagccgagatcgtgacactgcactccagcctgggctacagaacgagactctgtctcaaaaaaaaaaaaaaaaagtgacaactacttccatatcagcagctatttctcttattaatacataaaagttaatatttatacacagtgtaaaaattcttctgttttcattctactttctgaactaatggatgaagttttaagtctacattattgccttttaagaaaatcttgaaaatagagtatagtataccatgtttattcaactgccttgtctttaggaaacttttaaaaattataacaggccaacagatgtgtctgcatttattttaggtgaaaattagtaaaattaaaaaataatttcaaggtatactgaaaagaattcttccatattatcagcaaatatggatttaaaaaaagaaggccattgctgtattgttttgaaacactggatttatgtaaataaat

SEQ ID NO: 728453 - DNA, 1468 bp, Homo sapiens
tattttttatttttttgagacgaagtttcacgctgttgcccaggctgtagtgcagtggcgcgatctcagctcactgcagcctctacttcccaggttccagcgattctcctgcctcagcctcgcaggtagctgagattacaggcgcgcaccacatgcctggctaacttttgtatttttcgtagagacggggtttcaccatgttggccaggctggtctcaaactcctgacctcaggtgatccgccccctggcctcccaaagtgctaggattacaggcgtgagccagggcacctggccgaaagggactcttttaatgctaagtttaagtaaacattagtaggtttaaatgacttgtcagaaaataaattatcaaggtcaataagtacttaaaacacggtttaaatttttaaaaaccattaaagaatttcaaaagatgtaattagagcctttatttaattcagagcatatttaatacagcatgtagtgcaactattctaatcacctttttgaatactaacgtggcaactagcacaatattcatactttggtaatattgccactttccttatttatcatgtgaaactgccagctcattaaagtgctaccttcacacaattaatttactggcttacagattagagttatcaaggaaggccatcccttctctgaattattcctattttgttgtcctaacagatttcaataatactatcattatattgtggctattgagtcatataatgtctatgaaattattagcatattatcttgtgctattaatacattttagaaacgtgttttagaatataaaaaatcttaacaatttattttcttcccttaccactcacaagataattacaaatgttaaacatagttaaaggtagtatcttaagataaaaaatcattagtggattgaaaacctgtggaataattggcactgactgaagtttttcttttgctcctttggaaaaaaaaagtcagaatttttcatatttctttcattaattaactcaatatttgctcctttttattttggactaatctgtaatgtcaaagacagtattagttaaaatttcaggttaacaaaacttaaattataactgaataarctcagtgaaatgatttttcgtaaaaaccataaaaattttgcttgtcttctgtctaggtaacatacaaaattccatatatagtacacatatagctttattttaatattctaacaatgagaattcaattattgaaagtttaaaacaaaaaattttgagtcttggtttagtaaagcaagtcaaatgtcatgagacacatgtcttctcatcaaagacaaaatagaatgttaaaatgtttttgtaagagaaagaagattaaaaaattaaatttaaatatgttattcaaataatgtaaaaaatttaaataaaattgtgtgtatatttatttcactgttattcctgagtatcatttgatcattatttt

SEQ ID NO: 728454 - DNA, 627 bp, Homo sapiens
agcttctggccatgctgcagagtgtgggaaaataggcaaagcccatggaaaccctgagcagaggagaagcagtggagtcaatgctaagaggtgcctggagctcacacggaaagtactagaaattaggaagctgaacagaggaaactctggccatgtgagggggttctcttttaagtattcagcttagtactgttcactgaatgtaattaagaaaactagtgggaaatatgaatagaatcattgaaagaactagaggtagtaatgcccaaaggtatacagggacaacaatatttattcataaaaaatagaaaaatgcaaaaagaacacaaaatagattaataacattaacgaatgtttgagtctgtcaaaatatcaatttttaaagcaaaatagcagtcatttatcataagattrcagatttatgattttaaaatgatattgctgcttatatatatatatatgcagcaaaatgtactcaaaaacctagtttaaatcaaggattaaacattcttttcaagatctcttgtttttaataatctattttaaatatctatttcatcagggtggccctagtttatgtgattcctggatatataaccatttaagaatagcctttttggtaggata

SEQ ID NO: 728455 - DNA, 212 bp, Homo sapiens
aagagactgagactcagggagctaaaataagttgccccaaatcatatagcttgtgagtagcagagttctgtttatggcctagatcttcttgacatcaaagtctaagttctttccattgtctatagattatctaatttaaaactggaagttagtctctaatttcagcctcctcctctcacttaatcktcataaaaactgtcattgaataacaa

SEQ ID NO: 728456 - DNA, 645 bp, Homo sapiens
accattacctcccactcactccctaatcccagcaacaatgccagataaatggaaagaggaatccaatagacttgctctaatctgaatctgtcttgggtaaatctcttcacatcattgggcttcatgttcctaatctataatatagaaattgttataatcagatctacccacctcacagagatggtggaatgatacttaaagcagcaatcgtttattgagagtttattatgtgtgtcaggctgaattataaatgtttcacacctatcaactcatttaagactcaccaccctataaagtcytgatgagattactgaggcacaaaaagatcaaataacttagccaaggttacaggcctaactctgaacccaggcagtctggccatctggccactagacctaaactcttaactccagactatattaatggaatctaatgagataaaatagtgcttagaaagctgtaaaaccatgctatattcccttcacttatttgtttaaaagcaaactgtttcctttatactttgcactgtctctgaatgagaggtatgaggggtaaataacagtatagtaaaatctcataaattttatattggtaaattcgaattagcatctacattaaattataattccccagtgacaagataat

SEQ ID NO: 728457 - DNA, 645 bp, Homo sapiens
accattacctcccactcactccctaatcccagcaacaatgccagataaatggaaagaggaatccaatagacttgctctaatctgaatctgtcttgggtaaatctcttcacatcattgggcttcatgttcctaatctataatatagaaattgttataatcagatctacccacctcacagagatggtggaatgatacttaaagcagcaatcgtttattgagagtttattatgtgtgtcaggctgaattataaatgtttcacacctatcaactcatttaagactcaccaccctataaagtcttgatgagattactgaggcacaaaaagatcaaataacttagccaaggttacaggcctaactctgaacccaggcagtctggccatctggccactagacctaaactcttaactccagactatattaatggaatctaatgagataaaatagtgcttagaaagctgtaaarccatgctatattcccttcacttatttgtttaaaagcaaactgtttcctttatactttgcactgtctctgaatgagaggtatgaggggtaaataacagtatagtaaaatctcataaattttatattggtaaattcgaattagcatctacattaaattataattccccagtgacaagataat

SEQ ID NO: 728458 - DNA, 1662 bp, Homo sapiens
tgttgtgctcctcagccttggtctcaatgaggtccttaaagttcatgggcacagagctagcggccacgccaatgcccctctgagccatgttctcagcctcccgcctctcctgcatggcctcgtactggaagtccttcctccgctccgtgtgggtgagataggcaatgttctcccgtgctcctggctgcatgtaggcacctaagatacaggaggacagggcggtgaggagaggtgtttccaggtgtatggaagttgacactgtggcttggcccaggtcttgggtgtgccagagtgcttgtgactcactgaagggcagctctgcctcaaagatacaactttggaggaagtttagacgactggccagtatcacataaaaactgttcagaaggttcctggctagtatctagtaaccagattattaatattcaacattttaaaatgaagtatctgcaagggatttcttccttcagagctggaaacattaacagagagtcctcagccactcttctgttcccaccttgctctgtagagtttccatttcccaccaccaaagaggcagcttttagtaccttgaaaacatagggcccayactggctttatttttaacctacccacacagggcccccatcctgaaagaagttcacatatatttagggagctgaaatgagtgtttaaaggataataccaagaccataaatgctaagtgctaattgaggggtatattcagggaacagttttggaaacatgaggccaagggtagctaaggaagagtttttagaaaaaacttgataattacagaagcagagaagtatatttgccttattacttaatctctgttttcacagaataggctatttttctttttttttttttgagaccgagtctcgctcttgtcacctaggctggagtgcagtgcttgcaatctcggctcactacaacctctgcctcccaggtttaagcgattcttctgcctcagcctcctaagtagctggcattacaggcatgtgccaccgcgcccggctaatttttgcatttttagtagagacggggtttcaccatgttggtcaggctggtctcgaactcctgacctcgtgatctacccgcctcggcctcccaaagtgctaggattacaggcgtgagccaccgtgcctggcctaggctattaaataacaagaattaaagactcaggaaatagaaattccagttctaactgccaccctttaactatgtgaccttgaacaggctctcagcctcgctgggcttatctgtaaaacacagactagacgatcccatttcaatgctgcgaatcggcttatgagcaacactggagcacaggactggttgaaataggctcccaaatgtagaaacataaatatactctcacttacttatgatctaggcagaatgacttacctagaacttgggaacagatatagtacacgaacagtgaactgcctgtttttgacaacacagacaccacctattgaaggctatacacaagcatgaactcactctcccttttagcctataaagtagatcttactgtttaacaggtaaaatggggctgattaaggctgagcaatcaccaagtgtcagaccgcgtgccaaactccacactgtaagatgcgtcacctaagcagcatgctcaggcatgaatgagcc

SEQ ID NO: 728459 - DNA, 658 bp, Homo sapiens
ccacatagcttgctgtttctactagaattcaacttttttttttttcagttgaagttttctgggttgccgcaagcttttggctaatttccagagttctgtgaaagttgattttgatagtatgtggcaggtttttcaatgcttttatgaagggagcaaactttcagtagttcgtactggactattttactggatcttgatttagacaaactatagagatttttgagacaactggcaaaaactgaacatagattggttattagattattttaaaattatgtttttttagataggaaaattgtattaaggtcatatatatatatatatatatacacatatatgtgtgtgtgtatgtatatatatatatatatatatatatatatatwtttttttttttttttttttttttttttttttttgagatggagtctggctctgtcacccaggctggagtatggtggtgccatctcggctcactgcaacctccgcctcccaggatcacgctgttctcctgcctcagcctcccgagtggctgggactacaggcgcccaccaccatgcccggctaattttttgtatttttaatagagatggggtttcaccgtgttagccaggatggtctcaatctcctgaccttgtgatccgcctacctcagcctccca

SEQ ID NO: 728460 - DNA, 2713 bp, Homo sapiens
caacttcttagagtcacacaccttctagtgttagagttcagattcaaattcaaatctctttaaagtcagatcataccgtgcacccttccgtttcctgacaatctaacaatccagtgagagacacacttatatttctacttcgtaaaggtccagagaggttaagtaaataaaccagagtcacacagctagcaagtggcaaagctgggattctaattcaattccaaaacttgacttccaacctctccacctccatcgacccatatatatccactgaccaatctattcattcatcagacttttactgcatgtcttaagctatgcactgtgttcagagcggaatgagattccattcttttcttttcttttcttttcttttcttttcttttcttttcttttcttttctttctttctttctttctttctttctttctttctttctttctttctttctttctttttctttctttctttctttctttcatctttccatcttttttttttgttgacagattccagattctccctctgttgcccaggctggctggagtggagtggcatgatcttggctcactgcaatctctgcctcccaagttcaagcaattctcctgcctcagcctcccgagtagctgggattacaggtgtccaccaccatacctggctaatttttatatttttaatagagacggggtttcatcctgttggccaggctggtcttgaactcctgacctcaggtagtttgctcgcctcggcctcccaaagtgctgagattataggtgtgagccactatgcctggccaagatgccattcttatgtcctcatgttatttacagtctgatgaaagaaacggacctgtatacagattatcgtgcagtggaggggaacaggagctttaagagaggaaagtatagtgctcatcggtgggcatgtgggagggagaggtctgctcaactgggggagcctggaaaggcagcatccttttaagctgggttttgaaggatgcataagatcccaaggggatggtgcatcttgggaaggtatgctcatatctttttaacccagctgcctctcctttgctggagcttcctccttccagggcatgatttggaaggacagagttttactgttattgaggacacagagttctctaaagtgcatagcccaggggatggaatggagcaggggatgtatgtatgtgtggaaaaaatccaccttggtttgaattcttgtctggccatttctgaaatacatgaccttatggggacccttccctatgtggtcatctctacaggagatttcatatccctacccaactggtgtcaggttggccaggtgactttcagccaatgggatgaaagtgagtggaggtggtatgtgccactttttggcagacactrtaagaacccttgtgtggtcaccttttcccttccctctttgtgacactatggtaatttttactatttcctaagtgttgtgcttcaccttccctttttaccttggccttgagaccatcaggtttccataagggagttgctccctttgccttcatcctggaatgaagtgaggaggggcagagcaaaaacagagctacaagggtttgtcagattgcagaggaatgaatgattgctatctaagccaccgagacctttgaaggcacctgttagcatcacatagtgtagcctaagatgaccaaaacagcaaggtgtgttgcctttctgtgtgttagtttgctcaactgtagaagtgcattgatagttgtagttaccttatggaggtctggtgaagattaggtggaattcctaagtaaaagtgcagtttctagcctatagtgtgtctacacttcgcaaatgtctaagactcttcttccagttccttgtctctgctgtacttacttctaccccagggcctgtgcacatccatgctgttctctttgccgggggtattctgtctttccctcgttcccttctttactcaaaatcccatatgcagacctagctcctccaggaggtcagctaaggatgggcttggagctcaggaaagtcaggtcatgaaagggatgaaaaaggttgcacttcaacaaccagaatcaggaaatctagaaaacagttcctttaacatcaacatgcacacatattttgggttttatggttttgcattgttttaatttcagtttacataggagattgcagagggggctccctcatcttttctaagcttaaggcttctgaagatctttacctgttcctgtccacagatagcagggctgggagaaagggatggggagagtccctcctgccactgacccaggatggataaaagtacccctttcatagaaggaagaaaatgggaacaaaggtgctgctgatcatctgaggttgcctgcatggcagtgaagaacatggacctttgggtgaggctacctggatttaattgttggttctgccatttaccagctatatgagcttgggtgtgtcattctttaccactgagcctcactttttacattcataaaatgggaataattataccagcttgctgggtcatggtgaggacaactaaggcgagtgcccatagtgaagcctatataaagatggctgattgttcggtcattccttatttattgaatgtctgctatgtgccaagttccatgagaggcactggagatgcagagatgaccaggacagactagatccttgctctcaagattatgtatttg

SEQ ID NO: 728461 - DNA, 2713 bp, Homo sapiens
caacttcttagagtcacacaccttctagtgttagagttcagattcaaattcaaatctctttaaagtcagatcataccgtgcacccttccgtttcctgacaatctaacaatccagtgagagacacacttatatttctacttcgtaaaggtccagagaggttaagtaaataaaccagagtcacacagctagcaagtggcaaagctgggattctaattcaattccaaaacttgacttccaacctctccacctccatcgacccatatatatccactgaccaatctattcattcatcagacttttactgcatgtcttaagctatgcactgtgttcagagcggaatgagattccattcttttcttttcttttcttttcttttcttttcttttcttttcttttcttttctttctttctttctttctttctttctttctttctttctttctttctttctttctttttctttctttctttctttctttcatctttccatcttttttttttgttgacagattccagattctccctctgttgcccaggctggctggagtggagtggcatgatcttggctcactgcaatctctgcctcccaagttcaagcaattctcctgcctcagcctcccgagtagctgggattacaggtgtccaccaccatacctggctaatttttatatttttaatagagacggggtttcatcctgttggccaggctggtcttgaactcctgacctcaggtagtttgctcgcctcggcctcccaaagtgctgagattataggtgtgagccactatgcctggccaagatgccattcttatgtcctcatgttatttacagtctgatgaaagaaacggacctgtatacagattatcgtgcagtggaggggaacaggagctttaagagaggaaagtatagtgctcatcggtgggcatgtgggagggagaggtctgctcaactgggggagcctggaaaggcagcatccttttaagctgggttttgaaggatgcataagatcccaaggggatggtgcatcttgggaaggtatgctcatatctttttaacccagctgcctctcctttgctggagcttcctccttccagggcatgatttggaaggacagagttttactgttattgaggacacagagttctctaaagtgcatagcccaggggatggaatggagcaggggatgtatgtatgtgtggaaaaaatccaccttggtttgaattcttgtctggccatttctgaaatacatgaccttatggggacccttccctatgtggtcatctctacaggagatttcatatccctacccaactggtgtcaggttggccaggtgactttcagccaatgggatgaaagtgagtggaggtggtatgtgccactttttggcagacactgtaagaacccttgtgtggtcaccttttcccttccctctttgtgacactatggtaatttttactatttcctaagtgttgtgcttcaccttccctttttaccttggccttgagaccatcaggtttccataagggagttgctccctttgccttcatcctggaatgaagtgaggaggggcagagcaaaaacagagctacaagggtttgtcagattgcagaggaatgaatgattgctatctaagccaccgagacctttgaaggcacctgttagcatcacatagtgtagcctaagatgaccaaaacagcaaggtgtgttgcctttctgtgtgttagtttgctcaactgtagaagtgcattgatagttgtagttaccttatggaggtctggtgaagattaggtggaattcctaagtaaaagtgcagtttctagcctatagtgtgtctacacttcgcaaatgtctaagactcttcttccagttccttgtctctgctgtacttacttctaccccagggcctgtgcacatccatgctgttctctttgccgggggtattctgtctttccctcgttcccttctttactcaaaatcccatatgcagacctagctcctccaggaggtcagctaaggatgggcttggagctcaggaaagtcaggtcatgaaagggatgaaaaaggttgcacttcaacaaccagaatcaggaaatctagaaaacagttcctttaacatcaacatgcacacatattttgggttttatggttttgcattgttttaatttcagtttacataggrgattgcagagggggctccctcatcttttctaagcttaaggcttctgaagatctttacctgttcctgtccacagatagcagggctgggagaaagggatggggagagtccctcctgccactgacccaggatggataaaagtacccctttcatagaaggaagaaaatgggaacaaaggtgctgctgatcatctgaggttgcctgcatggcagtgaagaacatggacctttgggtgaggctacctggatttaattgttggttctgccatttaccagctatatgagcttgggtgtgtcattctttaccactgagcctcactttttacattcataaaatgggaataattataccagcttgctgggtcatggtgaggacaactaaggcgagtgcccatagtgaagcctatataaagatggctgattgttcggtcattccttatttattgaatgtctgctatgtgccaagttccatgagaggcactggagatgcagagatgaccaggacagactagatccttgctctcaagattatgtatttg

SEQ ID NO: 728462 - DNA, 2713 bp, Homo sapiens
caacttcttagagtcacacaccttctagtgttagagttcagattcaaattcaaatctctttaaagtcagatcataccgtgcacccttccgtttcctgacaatctaacaatccagtgagagacacacttatatttctacttcgtaaaggtccagagaggttaagtaaataaaccagagtcacacagctagcaagtggcaaagctgggattctaattcaattccaaaacttgacttccaacctctccacctccatcgacccatatatatccactgaccaatctattcattcatcagacttttactgcatgtcttaagctatgcactgtgttcagagcggaatgagattccattcttttcttttcttttcttttcttttcttttcttttcttttcttttcttttctttctttctttctttctttctttctttctttctttctttctttctttctttctttttctttctttctttctttctttcatctttccatcttttttttttgttgacagattccagattctccctctgttgcccaggctggctggagtggagtggcatgatcttggctcactgcaatctctgcctcccaagttcaagcaattctcctgcctcagcctcccgagtagctgggattacaggtgtccaccaccatacctggctaatttttatatttttaatagagacggggtttcatcctgttggccaggctggtcttgaactcctgacctcaggtagtttgctcgcctcggcctcccaaagtgctgagattataggtgtgagccactatgcctggccaagatgccattcttatgtcctcatgttatttacagtctgatgaaagaaacggacctgtatacagattatcgtgcagtggaggggaacaggagctttaagagaggaaagtatagtgctcatcggtgggcatgtgggagggagaggtctgctcaactgggggagcctggaaaggcagcatccttttaagctgggttttgaaggatgcataagatcccaaggggatggtgcatcttgggaaggtatgctcatatctttttaacccagctgcctctcctttgctggagcttcctccttccagggcatgatttggaaggacagagttttactgttattgaggacacagagttctctaaagtgcatagcccaggggatggaatggagcaggggatgtatgtatgtgtggaaaaaatccaccttggtttgaattcttgtctggccatttctgaaatacatgaccttatggggacccttccctatgtggtcatctctacaggagatttcatatccctacccaactggtgtcaggttggccaggtgactttcagccaatgggatgaaagtgagtggaggtggtatgtgccactttttggcagacactgtaagaacccttgtgtggtcaccttttcccttccctctttgtgacactatggtaatttttactatttcctaagtgttgtgcttcaccttccctttttaccttggccttgagaccatcaggtttccataagggagttgctccctttgccttcatcctggaatgaagtgaggaggggcagagcaaaaacagagctacaagggtttgtcagattgcagaggaatgaatgattgctatctaagccaccgagacctttgaaggcacctgttagcatcacatagtgtagcctaagatgaccaaaacagcaaggtgtgttgcctttctgtgtgttagtttgctcaactgtagaagtgcattgatagttgtagttaccttatggaggtctggtgaagattaggtggaattcctaagtaaaagtgcagtttctagcctatagtgtgtctacacttcgcaaatgtctaagactcttcttccagttccttgtctctgctgtacttacttctaccccagggcctgtgcacatccatgctgttctctttgccgggggtattctgtctttccctcgttcccttctttactcaaaatcccatatgcagacctagctcctccaggaggtcagctaaggatgggcttggagctcaggaaagtcaggtcatgaaagggatgaaaaaggttgcacttcaacaaccagaatcaggaaatctagaaaacagttcctttaacatcaacatgcacacatattttgggttttatggttttgcattgttttaatttcagtttacataggagattgcagagggggctccctcatcttttctaagcttaaggcttctgaagatctttacctgttcctgtccacagatagcagggctkggagaaagggatggggagagtccctcctgccactgacccaggatggataaaagtacccctttcatagaaggaagaaaatgggaacaaaggtgctgctgatcatctgaggttgcctgcatggcagtgaagaacatggacctttgggtgaggctacctggatttaattgttggttctgccatttaccagctatatgagcttgggtgtgtcattctttaccactgagcctcactttttacattcataaaatgggaataattataccagcttgctgggtcatggtgaggacaactaaggcgagtgcccatagtgaagcctatataaagatggctgattgttcggtcattccttatttattgaatgtctgctatgtgccaagttccatgagaggcactggagatgcagagatgaccaggacagactagatccttgctctcaagattatgtatttg

SEQ ID NO: 728463 - DNA, 919 bp, Homo sapiens
ccaccacagggctgctggcgccgcagcgccggccgcctagccaagtctctgggaaggggactagccggccttgaggggcggggccggccagaggggcggggccagcccgcgcctcgcctagcccgcctggctcagcaccccgagagctggccgactgccctccaggtgatttttatgcccactaaagtctgagcagcattggcctaggacacagctgtttaaaaaattctcctgctgagatagacaagaaaaataaatttggatgatttctggactttagattccttaacctttaactcacattggtaagttatttgattttgaactttaattggcaagagtaatcaatttttggattttaatttctcctcattaattttaataataagaggggatttcttgccaggtgcagtggctcatgcctgtaatcccagcatttgggaaggctgaggtagacgggaccwgagcccaggagttggagaccagcctgggcaacatcacgacatcccatctctacaaaagattaaaattagccaggcgtggtggtatgtgcctgcaactccagctactcaggaagctgaggtgtttgggaggatcacttgagcctgggaaggcgaggctgcagtgatccgcgatcgcaccacgggactccaacctgggtgacacagcaagactgtctcagaaagaaggaaggggtggatttctattccaatttggagctgttctaacttgtagcattttatataggaatgtcttcatattgtcatttagtctcatcacaaacctctgatagaccatacggttgcatataattaagataggaaataaaataatagggggcgattttcagtcttggggatagtcatggaaataatttaatgaatgttctgttctgacccattttagaaccttagcattc

SEQ ID NO: 728464 - DNA, 1823 bp, Homo sapiens
attgtctctagggtggaggtggtctgggtagaaacagcttaccatgtagttatcacaaaagatgagataagcagatgcaatttctaagaagtaatataaggctttgtcattttctcccaaagccagaaaatggtgggccagaggcaagatgacaatctctaggatttcttcacactggcaagattccagagggataatgtcttcgtcagatgtcttcatttttgttaaaacgtggtcaaagaaattcaagatcttttctcttatttcttcaggactgtccatatgcagaaataaataatagtaacttayacagtatcacttttgatattaaaatatctttaggccagacgcggtggctcacgcctgtaattccagcagtttgggaggccgaagctggtggatcatctgagatcaggagttcaagaccagcctggccaacctggtgaaaccccatctctactaaaaatataaaaattaggccgggtgcggtggctcatgcctgtaatcccagcactttgggaggccaaggcaagtggatcacgaggtcaggagatcaagaccatcctggctaacacggtgaaatcccgtctctactaaaaatacaaaaaattagccgggtgtggtggcaggcgcctgtagtcccagttattcaggaggctgaggcaggagaatcacttgaacccagaaggcggaggttgcagtgagctgagattgtggcattgcactccagcctgggtgacagagcgagactccatcttgaaaaaataaataaataaaataaaatatctttaaaaacaaaagagcaggataataaaacctagtgtggatactactgactaaactcaccatgcataccccccaaagtttcccacttgcatctaagaggtcaaaagtactggccagacaaatgattctaatagtgttctgaatttaatgacaattatttatgctctacttcctaaacaatgatatatgcctctacctgcgattttcaggaaaaaatgcagatgtctcaggaatctctgagttggacaagataagcttttcttcagctagaaaataaacaaatgagttgtatgggtcattgaaatgttctctgcagtggagatatctgctgtctacccaagactcttgttcccttttcggagttgttgctgcccagccagaaaccacattgcctagtccccattgtatcttaggtgaagccacgtgatgagttctcacaatagaattagatcagaagtaatatatgtcacctctaggctaagatggttatgtgtcttctctgccttctctttccacaagaaagcaagtaattctaagaacctgaaggatagcaaacccacaagttgggaggagcctgggtcccttgctaactgcatgcaaagccattggtcaacacttgcattggattatttcataagggggaaataatcactctcttgtgttaatccacagaaatgctggggtttgtgatagctaataacattatcctaactcatttattctgcaataaaaactatgaattaaacctgaagaaagtgacatcaatttccagtggagaaatatagataattaaatgaaataccccaaaaggttaactgaagggcagagaatcttaaattaaaaacctcagtctaagcagacttgaacaggttagaaaattccataatgatcttaaaacagaaaacaaatgaggcttgtctagtccagccatttctcccttcaggcagaagaaagaatcccagagaggggaatgaacttgtctcaggtcatacatctgttagtggtggaggcaggactagaacttaggttttctggct

SEQ ID NO: 728465 - DNA, 1823 bp, Homo sapiens
attgtctctagggtggaggtggtctgggtagaaacagcttaccatgtagttatcacaaaagatgagataagcagatgcaatttctaagaagtaatataaggctttgtcattttctcccaaagccagaaaatggtgggccagaggcaagatgacaatctctaggatttcttcacactggcaagattccagagggataatgtcttcgtcagatgtcttcatttttgttaaaacgtggtcaaagaaattcaagatcttttctcttatttcttcaggactgtccatatgcagaaataaataatagtaacttatacagtatcacttttgatattaaaatatctttaggccagacgcggtggctcacgcctgtaattccagcagtttgggaggccgaagctggtggatcatctgagatcaggagttcaagaccagcctggccaacctggtgaaaccccatctctactaaaaatataaaaattaggccgggtgcggtggctcatgcctgtaatcccagcactttgggaggccaaggcaagtggatcacgaggtcaggagatcaagaccatcctggctaacacggtgaaatcccgtctctactaaaaatacaaaaaattagccgggtgtggtggcaggcgcctgtagtcccagttattcaggaggctgaggcaggagaatcacttgaacccagaaggcggaggttgcagtgagctgagattgtggcattgcactccagcctgggtgacagagcgagactccatcttgaaaaaataaataaataaaataaaatatcttyaaaaacaaaagagcaggataataaaacctagtgtggatactactgactaaactcaccatgcataccccccaaagtttcccacttgcatctaagaggtcaaaagtactggccagacaaatgattctaatagtgttctgaatttaatgacaattatttatgctctacttcctaaacaatgatatatgcctctacctgcgattttcaggaaaaaatgcagatgtctcaggaatctctgagttggacaagataagcttttcttcagctagaaaataaacaaatgagttgtatgggtcattgaaatgttctctgcagtggagatatctgctgtctacccaagactcttgttcccttttcggagttgttgctgcccagccagaaaccacattgcctagtccccattgtatcttaggtgaagccacgtgatgagttctcacaatagaattagatcagaagtaatatatgtcacctctaggctaagatggttatgtgtcttctctgccttctctttccacaagaaagcaagtaattctaagaacctgaaggatagcaaacccacaagttgggaggagcctgggtcccttgctaactgcatgcaaagccattggtcaacacttgcattggattatttcataagggggaaataatcactctcttgtgttaatccacagaaatgctggggtttgtgatagctaataacattatcctaactcatttattctgcaataaaaactatgaattaaacctgaagaaagtgacatcaatttccagtggagaaatatagataattaaatgaaataccccaaaaggttaactgaagggcagagaatcttaaattaaaaacctcagtctaagcagacttgaacaggttagaaaattccataatgatcttaaaacagaaaacaaatgaggcttgtctagtccagccatttctcccttcaggcagaagaaagaatcccagagaggggaatgaacttgtctcaggtcatacatctgttagtggtggaggcaggactagaacttaggttttctggct

SEQ ID NO: 728466 - DNA, 466 bp, Homo sapiens
gggatcctgtcggcatcctatgtcacgcttagacaacgatgctcgcctagaaactcaggttagaggctcggcccacaaggttatatgccctggggtatatctggaccaatggaatctctttgcaagatgtttgtcmgtgtgtgatctgaactaatccaccttgtgccctctgctggggatgggaaagctctacttctcatcatttcccagctcattgctttgctgtacagcagccttggggcagccccgaatggctggtccagaggtttccaccttccagtggtggattctaatgttctttatgtgtttctctctgttcttctctgcctgctttggatcggctgttactaagctgctgccgagtggcaactctgcttatctcacggtgttgaggtgagactcactgcttttggtattactgattcaaggctacttagagattgtcttttcttgtacagttcagcca

SEQ ID NO: 728467 - DNA, 669 bp, Homo sapiens
gtactaagataaattcttctgccttgggatcctgttgatcggtgaccttacccccaaccctgtgctctctgaaacatgtgctgtgtccactcagggttaaatggattaagggcggtgcaagatgtgctttgttaaacagatgcttgaaaggcagcatgctcgttaagaatcatcaccactccctaatctcaagtacccagggacacaaacactgcggaaggccgcagggtcctctgcctaggaaaaccagasacctttgttcacttgtttatctgccaaccttccctccactattgtcctatgaccctgccaaatccccctctgcgagaaacacccaagaatgatcaataaaaaaaataaaaattaaaataaaaaaaaatatatatatataataaggaaacagcaattctagaagggaaaatataattactgaaaaaaaattcattagagatgttcaatagcagacttgaacaggtagaagaaagaatcagcaaactcgaagccaagtcatcttaaatcatagactttgaggaatagaaatgaaaaaaggaacaaaaaatagtgaacagagcctaagggacttgtgggacactgccatgctgactaatatatgcagagtttagcaggcagaagaaccagcaaattgaagataggccaattacgattatg

SEQ ID NO: 728468 - DNA, 670 bp, Homo sapiens
gtactaagataaattcttctgccttgggatcctgttgatcggtgaccttacccccaaccctgtgctctctgaaacatgtgctgtgtccactcagggttaaatggattaagggcggtgcaagatgtgctttgttaaacagatgcttgaaaggcagcatgctcgttaagaatcatcaccactccctaatctcaagtacccagggacacaaacactgcggaaggccgcagggtcctctgcctaggaaaaccagasacctttgttcacttgtttatctgccaaccttccctccactattgtcctatgaccctgccaaatccccctctgcgagaaacacccaagaatgatcaataaaaaaaataaaaattaaaataaaaaaaaatatatatatataataaggaaacagcaattctagaagggaaaatataattactgaaaaaaaattcattagagatgttcaatagcagacttgaacaggtagaagaaagaatcagcaaactcgaagccaagtcatcttaaatcatagactttgaggaatagaaatgaaaaaaggaacaaaaaatagtgaacagagcctaagggacttgtgggacactgccatgctgactaatatatgcagagtttagcaggcagaagaaccagcaaattgaagataggccaattacgattatgc

SEQ ID NO: 728469 - DNA, 580 bp, Homo sapiens
gaccgatagtcatataataggaatctcaccacacctgagagagtgggatagattccctcattttcatagtttgggcatctgagtccctgagagcctgaatgcctgacatggattctccaagaatgttgaccttgagactctaaagggccccgggtctcctgtgaagccccctgtgcatgcaccacacccgcagaggctccacaacggcgggaagagcacccagggtcagagcccaggcgagttcacactcggggaccatccacatccagggcgtgcagrggaggggccgaggtgagagcccaacccctgcctaggctgtggtgactggtggctgcacgggggtcccagcgctcctggagctatcattctttatctcctgaagaccccggacctgcatataccaaaactctgcatttctggtggagcagtcttctcttttgagatgtaaacactacttctcgaatcttaaagccagccattgccactcctaagggataagcctctaactccactgaaattagcctcagaatttcagctgagcatttggagccacaggcaggaagtcggtgggatttgtacc

SEQ ID NO: 728470 - DNA, 580 bp, Homo sapiens
gaccgatagtcatataataggaatctcaccacacctgagagagtgggatagattccctcattttcatagtttgggcatctgagtccctgagagcctgaatgcctgacatggattctccaagaatgttgaccttgagactctaaagggccccgggtctcctgtgaagccccctgtgcatgcaccacacccgcagaggctccacaacggcgggaagagcacccagggtcagagcccaggcgagttcacactcggggaccatccacatccagggcgtgcagaggaggggccgaggtgagagcccaacccctgcctaggctgtggtgactggtggctgcacgggggtcccagcgctcctggagctatcattctttatctcctgaagaccccggacctgcatataccaaaactctgcatttctggtggagcrgtcttctcttttgagatgtaaacactacttctcgaatcttaaagccagccattgccactcctaagggataagcctctaactccactgaaattagcctcagaatttcagctgagcatttggagccacaggcaggaagtcggtgggatttgtacc

SEQ ID NO: 728471 - DNA, 608 bp, Homo sapiens
gacaggcatcccaacaaaggacagagactcatcagagacgcggggacgctcactgatgaaggacctgggggtgtggctggggaatgtctccttcgtgatgaattcttctcagtttccctgtgtccctcggttggaggccgctgctccracttctcatttcccgctcctgcttcatctcttggaatagtgtttggcacattatagtatctgcttctactatcgtcttcccaactggaacacgagccccgcggggctggggacaaggtcttaccttgcatcccaataaatgagcatttcatttaaattgtgtttaaaatcgtggcttgctggatgatggctgaaccgtgtcagctggtgtcggtggtagatacattgtggtaaaagctttttccttcctcccgaccccacctccaatccttgcagtttactgttacacaccctagacttgacttgggaagtaaacagcgccagcttaaggaagcacgtggcctattgataaaggattgggctgaatgtttagagccaaatgcacccttcggttaaagtgctgaaggattcaatgcgcaccttcgggtgcttagcacagagctgctgagaaggaataaagt

SEQ ID NO: 728472 - DNA, 625 bp, Homo sapiens
aagattcttctttcggtggaagacaatggatttcgccttcactttcctgtccttaatatccactttgttgccactcaacacagtgggggtgttttcacacactcataccagatctctatgccagttaggcacattcttgtaagtaactctcgatgttacatcaaacactatgatggtactctgggcttggatataatagccatctctcagtccactgaatttctccaggccggctgtgtcccatacattgaacttaacaggtcctctgttggtatggaacactaggggatgaacctcaacacccaaggtggctacatacttcttctcaaattcaccagtcaaatgatgtttcacgaaagkcgtttttccagtaccaccatcaccaaccaatacaagtttgaactggacctggggctgtccctgcgcagccattgcggtgttccttccagaagcgtctccatgcccgtctgactcaggaaggaaggattattattgctgttgtttagagacagggtctcgctctgtcacccaggctggagtgcagtggcaccataatagctcactgcagcctagaactcctgggctcaagggattctctcacctcagccttcccagtagctggaac

SEQ ID NO: 728473 - DNA, 630 bp, Homo sapiens
gattcctagtaagtatggaggagaggtggcacctgggattacctttggaagcccacatgtagctgatcccaccgcttgctcctcctcctgcctggaagtctatgccaacgtgactagatgcacagtagaatggaactggtgcttgattctcagactggcaccatcatctaccctcaagagtttttttcattcccttcctccctgtttccccaccccaackgccaaacccattgctccattcttcccatataactctaccaggtacccacctcttgggttctagtcatgtccgaagaagtcttttattaatttatttcttgtagagatagggtcttgcattgttgtccaggctggtcttgaactcccggcctcacctcagcctaccatagtgctaatattataggtgtgagccactgctcccagtctgtgtctgacaatgtcttgagtgactaaaaggcattttctttcactttgtagtcttgggcttccttcagtctgcctctctcctcttttcctgtgaccccaggcaggctttgtcattcccttcctcctctggggtgccctctgggcttcagagcagccctggtgagaatctgcagggcaacctgcacactagctggctgggcttct

SEQ ID NO: 728474 - DNA, 631 bp, Homo sapiens
gggatgcagttgaagtagtgttagatataaaaagagttcctctttaagggttaacttgctcagcatcctggctctttgttccctgctttcaaggccagacttccttacgctctgtatcccctgccctggtaaacaaatttcccgccagtccttatctatggagaccacatcccacatctgctacccactctatagattaaccctcctgttgcaacagctcctcccgccaagactgcactctctgttggtataaccacattcctgcacttttcaagttagccagccaggttcagcttagattgtgcagtccagctccagccaatggagacaagacacagttacagggacaagctgcattaagagattataaaaaacccctgctctcctttgttcaggtgtgcactygccatcgttccatcataagtagcaccctttctgcagaagtcaattgccttgctgagagatcctttgtctcagtgctgatctttctttacaacactgagcatttgttcccaacaagcagtactgaagaaaaaactgatatccttaaatgcctatattaagaaagaaggtaggtctcaaattagtaaattagtttctcctgtaagaagcaaagaagaacaaattaaac

SEQ ID NO: 728475 - DNA, 559 bp, Homo sapiens
ccttcaagaaagataagttataaactcatttctagaaggctaagttcaaaatttagtggcataagcaagcaaacatttcaaagaaatactggctatactttgccatcctgtggaaagactggacaactgcaatggggtagcctcaatttttgccctgaaaggaatccttagaactcatcatactcagatatgcttattttaaaatgaaatgaaaaacaagtaactcaaactttgtgacatcctccactaatatttttcaatatatatttctgccacttgtyatttcaaaatatgatttctacttctatatatattctattgcaattacattatatataatattcatggtgcttcatacacataaacacacttgatccttacaatcctgtacagttgtcagagaagaactcattattctgtttttttttttactaataaataaataaggcctaaaaatattccataaaaccccaaaggtgagagttgtgagctcctgggcataccaacttcttgaccttccaaattgttctctctcctctcctttaaaaatatgggggaa

SEQ ID NO: 728476 - DNA, 494 bp, Homo sapiens
cagcagggtcagtgtggtataaggaagcctttctctcacccaccatatgtatgaattaacacagacttccagtttcattgaaaatggtttaacaaaggctgggtgtggtgacacatgactgtaatcccaggactttgggaggccgagggaggtggattgcttgggatgagaagtttgagaccagcctaggtaacatggtgaaaccccaactctacaaaaaatacaaaaaattagctgagtctggtggtgcatgcctgtagtcccagctactggagaggctgaggtggsatgatggcttgagcaaagaaggcagaggttggagtaagctgaaattgttgcaccattgcactccagcttgggcaacagatcgagatgaaagacagacagacaggaaagaaagacagaaagacaaagacagaaagaaaagaaagaaagaaaatgagagaaaatggtttaacagaacactcattttttattccattggaatttccttc

SEQ ID NO: 728477 - DNA, 612 bp, Homo sapiens
cttcatagataatgattctatacctagaaaactccatggtctcttcctgagggcttctagatctgaaaaagaacttcagcagagtttcaggatacaaaataagtttacaaaaatcagtagcatttctatacaccaataacatctaaaccgagaaccaagtgaagaatgcagtttcattcacagtagcctcaagaagaataaaatacctaggaatacagctagccaaagaggtaaacaatctctgcaatgagaattttacaagacactgcccaaagaaatcagattacaccaatgggaaaacattccatgctcctggataggaagaattaatattgttgttaaaactgccatactagtcaaagcaatttacagattcagtgtcaaactaccaatgacatttttcacagagttaggaaaaaaaattcaaaaattcatatggaaccaagaaggagcccaaatagccaaagcaatcctragcaaaaagaacaaagctggaggcatcacactacctgtcttcaaattatgaggttacagtaactaagacagcatggcactggtacaaaaacagacacatagactaatggagcagattagagaactcagaaataaagc

SEQ ID NO: 728478 - DNA, 479 bp, Homo sapiens
agtggcactgtgtcggctcactgcaatctccgcctccctggttcaatggattctcctgcttcagcatcacgagcacctgggattacaggcacctgccgccacgcccggctaatgtttttgtatttttagtagagatggggttttgctatgttggtcagggtggtcttgaactcctgacctcaggtggtccacccgtctcggcctcccaaaatgctgggattacaggcatgagccactgtgcccggmcctgaaaacagaattttttaaccagagacctgcttcatatcttttttaaatctgagttgagccaagattagctgaaatttggtttctggcagtaatgcttgcaagggcaatgttattcccagacccaggataaaaacctctggagtgttttggctacccatgatgctccctggtgtttcagatgtgtatggagcagtaaaatacagggcgagtaccttacgctctgtatttga

SEQ ID NO: 728479 - DNA, 618 bp, Homo sapiens
cataaaatttttaaaaaacaaacaaaaccttggtaatttataatccttctagcttctttttctttctttcttcttattttttgagacggagtctcactctgtcacccatggtggagtgcagtgatgtgatcatggctcactgcagccttgacctcccaggctcaagcgattctcccatctcagcctcccaagtagctgggaccacaggcgagcacgaccacacccagctaattaaaattttttttttttttttttttgtggagatgaggtattgctatgttgtctaggctggtctcaaactcctgggctcaggcagtcctcccaccacagcttctcaaagtgctgggacgacaggcatgagccactgcaccragcctagcttctctttcttcatacacgttaatagttattttgtaataataattatatatatatatatttgtttgtttgtttgttttgtttttttttttgagacagaatctcactctgttgcccaggctggagttcagagttcagtggtgtgatctcagctcactacagcctctgcttcttgcagtgaggcgattccagggattctcctgcctcagcctcctgactagcttggattacagccacgtg

SEQ ID NO: 728480 - DNA, 619 bp, Homo sapiens
aacaaatatttatggagcaatttacattaattggccccttgagacacaaagaagagccttcaaggcatcatcaggaatattctagatacaataaaatgacatgtatataataaggtatattttaatgaaatcataatggaatataaaacaattggccagcaatgatcaaaatggcctaacttctcttccacttttaatttcaggttaaagtaatttatattttttggcataaggaacaaattagggtttttagtcttgttttggtgcttattgccgataagtcattttgtgtcaggtttgtgtttgttttggtctcatctctactaagctgatagctgttaaaactcctaggaaatgaaagaagaaagctacaagttaattattaaaactttaccaggtttcraagagcagaaagaggcttgttaaaggctggagaatcttgtagtatatattgtcttaatttttctttgcttttaggaaaagaaacttggaggacaatatttacttaaagttgttaaggtcaatctacatcatttgggagccaatatccatcattaggaaaaatgggttgaatgtaatctaatgaaaattcttcatatttgccagagaaaagctactt

SEQ ID NO: 728481 - DNA, 524 bp, Homo sapiens
ctaaacaatggcggccatgaaggaattggtcaataaattggagctatactattattagctaaagtgggggtcttaagtgaaatagttaaaatgtaaatctggtcatgtgacttttagaatcaggtctaaattccttaccacagcctgcaagacctcatgtgatctgattcttggccaccatgcttcactccactccaccaaagcaaactcacatcttaggctyaggctcttgctgtttcccctgcctggaattcccctctcctcaatttacacatgactttctatttcattttattcatatttatgtaaaacattacctcctcagaaagatatttcctagccatgcagctaaaataataaccaccatcacattgtcccctaagtctggtttctatttgatgcaaagcactcaccaatctatagaattatacactgtctgtctctcccaagagaatgcgagccccttgagggtaaggaccttgtgatgttccacagttgtatcctcagcatctaaaaatatgcct

SEQ ID NO: 728482 - DNA, 479 bp, Homo sapiens
taagtctggtgtgatatacagttcagatgagctctcagaaaatttccagtctgtgatcacagtagtatcactttagcaatcattaagaacaattaatctatactcattggagaataaattaaaatacaaaagaatgtagtagatataaasaagtcattgcttttcatatgataaaatacagtttataattagcatctttgttatttttcctttgattttgtttcatgtgtaaattgggttataaattggatcttgagttataaattagatcttatcaggtttttctagcccacatgacacgtagtataaagtagatatgggggcaatagagcaatctcctttctttacatcagtgagaaaatagaaatctgttgtcttttgtttagacatatgactgattttatgtgaagactgggatcaaatatgaccttcagtttcattcagacacaattatgataatagtgtagaatactgctaca

SEQ ID NO: 728483 - DNA, 642 bp, Homo sapiens
ctgatgggaaggacaagagaaccctggaggctttattgccattgttgcttaaatcatactgctaccattcccctgaaatgtctgtatgacggtacgttatgaattcggtgtttatgttccccaggacatttctgcaatactatttttgaatagcaataatttttgagtttttaccaacttgacttcaaaataccatcacgaatcattcacgtcttagccttacttacgtttttagtattttccatgaaaagctagctcatgttgcctttagctaaatgataatgatcacaaaaattattttgrtcagaaaactgattcccatggggtaagggcctcctggtccatccagactcacactggttaggttagccaattctgtattaggttaacaattaacttgcctactctgaaaatcagtcacattcctctgatcagcctccactgtttggataaaatatatcaaaaaaaaatctagaaatattggttccaagacaatgcaccaagattgctccttgttcttaataaagaaatcttctgagctcacgagagacaaggtcttctaatcagtattccctcttctttctgccaggcttatctcatgtcaaaaggagatattttgaaaggatcattcaatatatagac

SEQ ID NO: 728484 - DNA, 626 bp, Homo sapiens
cagtaaggtactagcctaagataaaccagcaccatggagccctgagatcaccatggctaagtggaaggtggttttgaggtacttttggctaagtaccaggtaggactcagaaatctgagcagcagcagaactgggtcaaagcctaagaacctctctaaaatatccacttgctgatctgctatcattaactacactctcctgagaatgaaatctgaaaaggaaagtagctgaatccaaaggtcttttgtgaagtctaattggaatagaggttttgaatataaattcctaaaagacacargaaggtatgatgggggatagcgggggagcagggataacattccaactggtttacataataaaaaccaaagagactggtaattagtatgcacatttatttgacattctttgataacctttcctctgcttcacttttgcgaagggctattcagcattttcccagacttacaatttggcccagatgctagaaataagcagctaatagagacctggtgtacagaagagagtaataggaaatgcacacaagtagataaatttgtggtctgcagcctgagcctcagcactaagaggtcagtgggttattctcaaggacactcaagaactccccc

SEQ ID NO: 728485 - DNA, 566 bp, Homo sapiens
cagagctaagtcctcgatattcatcatcctgatccaaagctctcccacctccaaataacctcccagacgcactagtgaaggccctggggagacgggaggagttatttttaaaaagaaaaggaaaaagagaaccaggagcattgagggcaatgtcatcatcaaagacgttctctggggctccagcaagccatgctggcctcgttgtacaggcatcacatggtgacttcaggctcttaaatatcctgtcttctctcatggaagcttatcacagagagagcacgggcgagcaattacctcctcctaatttccatcacatcttggcaccttccatgcagctggrgttatctttgtgatgcacgctttttatgaataatgagagtcatcgggaagcaagtgctcaccaggggacagacgcaaacaagtttccatcccttctccctttcacacacggatggcaaccccagttcccttgctgggtctttcctggtgggttttgcagtcacacagcctgcgccatagcatgtgtgcctgcagaccccgcacccgccggagagagcccagcagag

SEQ ID NO: 728486 - DNA, 608 bp, Homo sapiens
ataagaaaagtgatggtaactttatggtggaagggagaggtaagtgttgaagtgggcaaattttggagacaaggatcagatgcacagagacaggaagaatagtgcagtcatcacttccaagactggtgagggctgctgcatcgctttgtgtggggtataacattaatgtgatgagaacaatctcatagaatcagtggaacttctgtgtggtattaacattatgtccttattttccagttgcatatgagataatttgatttacagaaataagcttttagcaaaaaccatgtatactttttttcttattgcatgtatatttctcttattttcccagttagatctaaatgagggaattgcctctgttcagtgtctggcactggrtatgtggtaataaacatacagtagcaacaaaatgttgaattaattaaaacaaatgattttacattttgaacaatacatttcagtctgcaagtaggtgctttgtctataaaattaaatgtatatcagaatgcttgtattagctagttctatgaaataaccatagcttattctttttttcatttcatgttttgaagaagaaagaagattggatatagatgagaaacctc

SEQ ID NO: 728487 - DNA, 526 bp, Homo sapiens
ccatcattcaggctggtagcatccccacctgaggggtaagagaccgaatcatggagcgtttgcacgagtggtggactcaggatgggaccccaagccttttgcttctaaatccacagcttgtttccatgagaattcacttactgaacttgcactgatgtgtttgttcactgcatgtgtgttgtctactaggtgctgggcacagttgtgaactgaagagaatcaaaacccttccttcgtggaatttgcactccaacaagagaaacagataaggagcaggaaataggaacacagcgtagggtgtgaacagtgacagtaaagctggcggaggtgccagggagagytgcaatttgaaatgaagtggccagggtaggcctcaccagaagccgcagctgagcaggggcgctgagcagagatgtgcttccaggaggacccttctaggcagagggaggtgagaatggagagatagggcctggggaactgcctgttattctgaaacagagagtaagccattgtgggtatccccttg

SEQ ID NO: 728488 - DNA, 580 bp, Homo sapiens
agatgagagctcccagctgtaccttcaagccccaccagagcagggaggatacagaacccaacagtcccagggaagtttcacattctgtttaggcagagagaagattcacagggcttcccacgttgagtgagctgaaaaggaaggaaagcaggaagggagggagggcggctagaagagagaaaggcaggcagacaggcacaggagtatytagacatagtacagctgagaagaaaaaaaaagagagagagaaattgcatgcaaaatacaaaggttaaacctactgttgcagcatattgcaagaaatttaaaaaagcttccaataataaataatgtgaaagttagctaaaaataaagagagtaagaagtcgctgagaaaagaattcaaaaatgaaatgagacaactggaataaaatgcaaagaaaaattgaagagatacagaaacaaattgaggctactaattcttcattagataaataatacctatatcagaaaccacaaggagccggataaacacagctaaatcctgattaggtacatgcagaaagggcttattgataatcacagataatgcaatgaaaga

SEQ ID NO: 728489 - DNA, 666 bp, Homo sapiens
  misc_feature 210: n = A,T,C or G
caacaagccaagtctgcatctgcagattaaagggacatttttctcctgttctaggaacaaccggctcacaaccattcctcaccgagacacgcccgagtggggtcactgagtctccagggtgagaaaatgtcatgtgagtgtccaggctggggaaaagcctcctaygaggcagaggtgtcccctgcccagctacgctcacaccaggcattncaggtcaggtaccggctcctcctgagggaaaagacacccaagagtgacggcggacccttgaacagctcgtggggtagcagtgtcgacgccccatgcaataaaaaaaaaatcagcttaacttttgactcctcaaaaacgtaactcctcatagcctactgttgagcaaaagccttgttgataacatacacagttgattaatacctattttatacgtgatttatatcatatactgtgttcttataataaagtgagctagaggaaagaaaacgttattaagaaaatagtgagaaagagaaaagacatttactattcatgaattggggatggatcgtcatgagctcttcatccgcgtcgtcttcacgctggggaggctgtggaggaggaggaagaggagggtggcagagggggaagaaaatccacatataagtggatccgcacagctcaaaaccctgttgt

SEQ ID NO: 728490 - DNA, 555 bp, Homo sapiens
ccatccctcatggctttgcgtttccctacgcttttctgaagccaaacaccaatggcgtctcctcatgggatggtgataaaggcaagaatctcaaaatgggacccgtagccgcagcctctgctgaacaagtcccaccccggcgcttctgtctctacctggcctcacctcccccsgccccgagcgggcgtctcggacgaagacggaccctgccactgtagagtggcaatgtgtgtgccgtgccacacctcctttctcaaaactggcacaagccaggggaggctggaaagatggcagagccgttttaacctgactcgaagagactccaggttgtttagattattttaataattggattttataagacttgtgctctggggcttttttagtgaagaacaataatttttaaatgaaccttgaaaacttctataataggtggaaagaaaagagtcagctctccaagtacgttccttttcctgcctcatcctgtacaacctaatcctgctgctgtgcttcctcctcgagtccttccaagaacacatgacaagatgtttatcc

SEQ ID NO: 728491 - DNA, 555 bp, Homo sapiens
ccatccctcatggctttgcgtttccctacgcttttctgaagccaaacaccaatggcgtctcctcatgggatggtgataaaggcaagaatctcaaaatgggacccgtagccgcagcctctgctgaacaagtcccaccccggcgcttctgtctctacctggcctcacctcccccggccccgagcgggcgtctcrgacgaagacggaccctgccactgtagagtggcaatgtgtgtgccgtgccacacctcctttctcaaaactggcacaagccaggggaggctggaaagatggcagagccgttttaacctgactcgaagagactccaggttgtttagattattttaataattggattttataagacttgtgctctggggcttttttagtgaagaacaataatttttaaatgaaccttgaaaacttctataataggtggaaagaaaagagtcagctctccaagtacgttccttttcctgcctcatcctgtacaacctaatcctgctgctgtgcttcctcctcgagtccttccaagaacacatgacaagatgtttatcc

SEQ ID NO: 728492 - DNA, 635 bp, Homo sapiens
ctgaaaagctggttcaggctgtgatgggaagagggggtgggacaggcttcatcatgcccacctcccttttggaattcaaggaaagctgaccagcataaacatcagtacagacctgaagtttgataagaaacactgaccatctcttctctctgaagcctgctaccgggagggaggtttcatccgcatgataaaatcttaagttgtcccaactttctggaccgaaccaaggtatttcttaaatgtatgtgattgaagtctcacatctccctacaatgtgtataaccaagctgtgctccaaccaccttgggcacaygtcacaggccatgatcactcatatttggctcagaataaatctcttcaaatgttttacagagttcgactcttttcaccgacaaatgggcaatgtgttgtgtttgcatgaggagcccctggttgagagcaagttccctgccggttctgccctcaggttcttggtggccagagacactccccagggcgggcagccagtctggtgctggccagggctgtactgcttagcaaggccacagaagggacggagctgccctgcctgccaagcctgggaagcctgctcaggttgtttactgctggcctttcaggaagtgctttgggaacaa

SEQ ID NO: 728493 - DNA, 635 bp, Homo sapiens
ctgaaaagctggttcaggctgtgatgggaagagggggtgggacaggcttcatcatgcccacctcccttttggaattcaaggaaagctgaccagcataaacatcagtacagacctgaagtttgataagaaacactgaccatctcttctctctgaagcctgctaccgggagggaggtttcatccgcatgataaaatcttaagttgtcccaactttctggaccgaaccaaggtatttcttaaatgtatgtgattgaagtctcacatctccctacaatgtgtataaccaagctgtgctccaaccaccttgggcacatgtcacaggccatgatcactcatatttggctcagaataaatctcttcaaatrttttacagagttcgactcttttcaccgacaaatgggcaatgtgttgtgtttgcatgaggagcccctggttgagagcaagttccctgccggttctgccctcaggttcttggtggccagagacactccccagggcgggcagccagtctggtgctggccagggctgtactgcttagcaaggccacagaagggacggagctgccctgcctgccaagcctgggaagcctgctcaggttgtttactgctggcctttcaggaagtgctttgggaacaa

SEQ ID NO: 728494 - DNA, 485 bp, Homo sapiens
atcattaggcaatttcatcagagtgcaccgacacacacctgggcggagcagcctgctacacacctgggctgcgtggtggagcctgttgctccagggctgcagacctgtgccctatgtgactgtggggaatactgtgggcaactgaaatacaatggtaagtattcstgtatctaaacataagaaagggacaatagaaaatacagtatcaaagattaaaaatgctgcacctgtttagggcacttagcatgaatggggcttgtagaacgggaagttgctctgggtgagtcagtgagtgtgtggagcgtgaatctgaaggcccaggtcgtgaccataactactgcaggctttataaacactgtacacttaggatatattaaatttatgcaaaatagttttcttttcgaaatagtagattaaccttagattactgtaacttttttatgttataaacttaaatttttttaactttttgactcttttataac

SEQ ID NO: 728495 - DNA, 485 bp, Homo sapiens
atcattaggcaatttcatcagagtgcaccgacacacacctgggcggagcagcctgctacacacctgggctgcgtggtggagcctgttgctccagggctgcagacctgtgccctatgtgactgtggggaatactgtgggcaactgaaatacaatggtaagtattcgtgtatctaaacataagaaagggacaatagaaaatacagtatcaaagattaaaaatgctgcacctgtttagggcacttagcatgaatggggcttgtagaacgggaagttgctctgggtgagtcagtgwgtgtgtggagcgtgaatctgaaggcccaggtcgtgaccataactactgcaggctttataaacactgtacacttaggatatattaaatttatgcaaaatagttttcttttcgaaatagtagattaaccttagattactgtaacttttttatgttataaacttaaatttttttaactttttgactcttttataac

SEQ ID NO: 728496 - DNA, 529 bp, Homo sapiens
aactaaaggttgtcagttaccttttcagggaaatacacgtccccatttgttttctagaatgaaaagaacagcttcaaggtgtttagaggctcctgtcaacgcccctcatgcttggaaatgaatgcaagctgcagattcgggttgccttctccacttgctgcaaatgcacctttaattgcttgtacacatcacrttttcccggggagctgatgagtcacctgcctttccactcataggctcacgcccacctcaatccatccttctttatgtccctacaggtaaagaaaattgcctgcattagctgccctgacagccacccactactcccgagggtgaacatccagaagagagaaggtgaacctctcagagtcggtctggaccgtaacaatgggaacggttatgctctttcaaaaggctctttctcttttatgcccacagataaaagttagggacttcttgctgaatcccaggaggtagtaaaaaaaccacgaatctccatccaaggatccctgcacctagtcggtgcctc

SEQ ID NO: 728497 - DNA, 667 bp, Homo sapiens
acccatgctgatggttgacgaaccttactaggagccacaaagcccttttccactcttggtacttctctgatctgtcctctagaacatcttctacaactttcctgattacacgaatgaatctaccttttcatttttgtgattcagttttgtatgagtcaggattctccagagaagcagagccaacaggagatatatagatacagagatagagagagagagtgggaggaatcggggctcatgtgattcggggaactggcaagtctggagtccacagggcaggtcagctgcctggagatggagatgacagttgatatttcagtctggagtccgaaggccaactggagacagaattccttcwccctctggaaacttcagtcccagtgaagcctcttcaggccctcagtgggccagaggagggaaaatacccttttctgtctacacacctgctctccatgtccacagcagcgctctatgacaggagaatgtttgtgcagtcacttgggacttgcctccctcctgtgtctagtccatggtgcagaaaggtttgcctgcactttggtcttctaccagccactgacttaagaacttttgaaattattctaattggcatttttaacatttcatctttgaatgtttaaaaatattcattgtaatgtaattgtcaagt

SEQ ID NO: 728498 - DNA, 576 bp, Homo sapiens
cagggatccatcgggagggtgaccagaggagtagggggtgaaactccacaggaaaaaggacatctctagctgaactttgcaacaatttgaaaggggtgaggagccttctggccagaacttgggggagggtgcgaatccagtgtgcagactccataggcaggggaggaaccaatcccttttctttcacagctagaaggctggtagcccagggcaagttttcaagcccatcatgccctctgcctggaaatagactcggsgctgttggggtgaaggacatggtgggaatgagaccggcccttcagtttacatgggagctgggtaaggcctgtgactgccagctttcccccactttcctgatgacctgtatgactcagcaaaggcagccattatcctgctaggtacacaactccaatgacctgaggatctcactcccattccccacagcagctgcagcaagacctgcccaaggagagtctgagctcacacacacctagccccacccccacctgatggtccttccctatcctctctggtagcagaagacaaaaggcatataatcttgggattatattggcc

SEQ ID NO: 728499 - DNA, 604 bp, Homo sapiens
tctttcttggtcatacccttggcacatcgtcagtaaataaatgctgaatgggtgaagactctcctgcctactaagtccatgtagcttccgggccagtctgtaaggaaatggtcctggtagcgggggaggtcctggtgcctgactgaccttgagccccaactccatttcaaaccaaggtcctggggttttggggagcccgtgtcttggactagcaaggcasttggtgactcatattcaggcttggtttagcccaggaccaagctccgctgagagaactgctcacagattgcgaaggctttgtgtgtcctttctaattagaaaattgcctttggaattgaaatatgtttcacagatgaatttactgaactccttgccgaggtgcgattctctcatgcttgttgtgagacaatcacactctgaggcggcatatggagatatcaacatctctgcaaattatgaaatcatcagcggtcaaaaatagtcccaacttcttgattgcctgaaaatagctgggctgaccactgggcatatctgaggtgtggacctatccatggggatggagcaggagcttcatcttgcttcagtctccacctatagattagtt

SEQ ID NO: 728500 - DNA, 632 bp, Homo sapiens
cctacacattattttatctttatttctatttaataaacattttgggtatgtacagatatgaatcttaggtagtcattatgctcaggtttttcagtcattgagggaacacatgattgcagtggactccagatgtcgtcagccagagttcaggattcacacgggaacgcgagctttatggcagctgggtaatttggaatctcatctttataacttggatgcctggtctggcatggtagagtggacctgatgagtaggctgatttgaaatctgatctgaggtactttagtgatcttattggaaacaaaagaataacttagaatacgtggagggatgaatacttttttttttctacctcttttatactaaaatactatgaatctcagttgggcatgagaggtagtgaattgaagagggtttgtgtccgagctctctggtcaaagcttggatttacttattctgtgctataaattaaaaggaaatacaytctcttaattggtggtgaagagacttgctgaaagttgcccaatttgtaattaaactttggatctaatattctttttttcattttctatactttgatattagatagctgcttgtatgactatacatgatgaaataattggatacatgtt

SEQ ID NO: 728501 - DNA, 442 bp, Homo sapiens
tatgaagcatctaccactgcctttgacttaaccctttttatgtctgagcttcaatcatgaggttttcaaaaattatttctagaaagcaagttgggtttcttcaatagacagtggagtgttttgctccagagtactgaaatattctgttgtgatgttggaaactttcaccaattaaggacaaaaaccttctcataggtgtgtatatatatatatatatacacacctatgagtgatayacacacacacacacacacacacacacacacacacagagagagagtttgtgtcttttacaggaatcattttaggagttcatgtagacttattttattgaggctgttgagcaaaaattttttttctacttctccttgtgaattttatttgggtattatttgaatagtctcagaagtagcagatctttattttttaggataatttattt

SEQ ID NO: 728502 - DNA, 613 bp, Homo sapiens
ctgcatttttaacaatttccacaggtgattctgatactcacccaaggatgagaaccactgatctattttttacgaactattttatgttatagatacttaaatggaacctcccattttcttcttagaatcccccttttctttgttgattgtccacattctttcttcttcttcttcttytttttttttttttttttttttttttgagacagagtcttgctctgtcacccaggctggactgcagtggcatgatctgggtcactgcaacctccacctcccaggttcatgcaattctcacgcctcagccaccggagcagctgagactacaggcgtgcaccaccacaccctgctactttttttatttttggaagagatggtgttttgccatgttggccaggctggtctagagctcctgacctcaagtaattcacctgcctcagcctcccaaagtgctgggattacaggcatgagccagtgcgcctggccaaggttgaccatattcttgatgagccacctgtgtacaatctgaattcttttcttgtttaactcattggtctgtgcatctgacagtaaagttgagttatttcacttctgtgaaagccaggctgcagttatc

SEQ ID NO: 728503 - DNA, 613 bp, Homo sapiens
ctgcatttttaacaatttccacaggtgattctgatactcacccaaggatgagaaccactgatctattttttacgaactattttatgttatagatacttaaatggaacctcccattttcttcttagaatcccccttttctttgttgattgtccacattctttcttcttcttcttcttctttttttttttttttttttttttttgagacagagtcttgctctgtcacccaggctggactgcagtggcatgatctgggtcactgcaacctccacctcccaggttcatgcaattctcacgcctcagccaccggagcagctgagactacaggcgtgcaccaccacaccctgctactttttttatttttggaaragatggtgttttgccatgttggccaggctggtctagagctcctgacctcaagtaattcacctgcctcagcctcccaaagtgctgggattacaggcatgagccagtgcgcctggccaaggttgaccatattcttgatgagccacctgtgtacaatctgaattcttttcttgtttaactcattggtctgtgcatctgacagtaaagttgagttatttcacttctgtgaaagccaggctgcagttatc

SEQ ID NO: 728504 - DNA, 613 bp, Homo sapiens
ctgcatttttaacaatttccacaggtgattctgatactcacccaaggatgagaaccactgatctattttttacgaactattttatgttatagatacttaaatggaacctcccattttcttcttagaatcccccttttctttgttgattgtccacattctttcttcttcttcttcttctttttttttttttttttttttttttgagacagagtcttgctctgtcacccaggctggactgcagtggcatgatctgggtcactgcaacctccacctcccaggttcatgcaattctcacgcctcagccaccggagcagctgagactacaggcgtgcaccaccacaccctgctactttttttatttttggaagaratggtgttttgccatgttggccaggctggtctagagctcctgacctcaagtaattcacctgcctcagcctcccaaagtgctgggattacaggcatgagccagtgcgcctggccaaggttgaccatattcttgatgagccacctgtgtacaatctgaattcttttcttgtttaactcattggtctgtgcatctgacagtaaagttgagttatttcacttctgtgaaagccaggctgcagttatc

SEQ ID NO: 728505 - DNA, 600 bp, Homo sapiens
ttttaaattccaactgacaagatgttaggacactcaaaggaagcattgaccacacataaaattgtttaaatatgctcagcacttttcagactatttcacattaattcctagtgaaataatgtagaaagatgactttargggtaaaggtaatttaggccttttttgtttctttttttttggtgttgacttactctgactttgagtaactcaagtcatatatttccagtttcctctgtgttactcctcatttgacatcttaagaaagtttttggttttgtttttgtaaattgccttatttggaggaaatgcatgttctaagaaatttgaacacaagtgtatccttgggatgctatttctcttcctttctctagtgccattttttacatcacacagatttggaaacaaaatgacgtatttctttgcatgttgtgtgatgagtggaagaaaggaaaaaattagcaactctctgcatatacaaagagacatttcaggatctccgaggggatatgaactcccaggtactagtagactaagcctctttacaaccttacaaaatcctgtacagatgacctgtgtgtaaaatgcactgcctgttgcttt

SEQ ID NO: 728506 - DNA, 547 bp, Homo sapiens
attcatcaccagtacattacagagaagatttccctaaacatctctaatgtgtccactcatgccagttaaaagaaatcctgtctgtacccatttccgtttttcttgaacaaaaacacttctctacatcttgtagaagcttaatttgctagaattacataaatagaaattaycaaactcaaaaagcctttagcattttcagtccagaacacaaagataaggaaataattcaaaagttatctcaagagaaatcaagttcgcatgcacgcatatgttcactgcagcactattcacaatagcaaagacatggaatcagcctaaatgcccatcagtggcagattggatgaagaaaatgtggtacatatacaccgtggaatactatggagctgtactgcctggcctggaaatctggctgtgacaggcactagctgagtgaaacttacctctgtcttacctcgactgcaagatggggataataataataatatctatttcatatggcagtggtgaggattaagccaattagtgtaaaatacacaaaaatactaaa

SEQ ID NO: 728507 - DNA, 539 bp, Homo sapiens
ctcgtccagcactgaacctcagcatcatgtgctgtgtgcagggtcagagggccaacgtactggcccctgggaaagcgtttcctctggtgggagttggtagaaggtgtcctgtcttcttggctgcatctgtccgcagtggagtttacatcatgctgagctgggatgtggaaggaaggaagagcatcttagatcaaatatgatgactggccttactgagttttctagattttcctgaataaatgtttcttcactcrctgtgtgctgttagagtctttccaaacctgtaatttcccaaaataattttcactggtctcatgagggcatggattcattgagcccctcatgctgtcaaagagaaatagaactgtttttttttttcacttcatagcgaacatccatgggttatcaaataatgggctggcttttcttccaacactttacagacaccatcaattttcttcttgcttataaggttttaaccagaagaatgctgtcatggtcttttctgttcttttggaaggaatgccccctctactcac

SEQ ID NO: 728508 - DNA, 612 bp, Homo sapiens
ttgtacttagaagaattaacttttatctccacatgttttttttttaatcatagagaaactactagtggtagttccactgtccaagttactgaatatcttattcctagaatgagacactgcacaatgtgttctgacacgacagaacgtagctgtagttaagggacaggagatgtgatcacgggaacacgagtctgcgatccagcagttcttgctccttcacatttgcccagaaacaaagaccccagcagaacaatggaagcattgacttaggtctccacagtctgatgtgagataaacagcaggtagtttatgcctctgttttatagcaggaaatttaatctctaaagaagggccattttggagataatactattctccaggatgcttamatgcccccaaacagagagcactgcagagccccgtggccaggagctacaacacctgggtctggaaaccactggacagaaatatgagattctcttaccacatgtatgatggaaccttgaagaatgtttccttccttctccataatcacagcctgcgatgaactggaggtcccagtacataaaaaaacatgtgtctgcattggatacagaattagtcccataaaat

SEQ ID NO: 728509 - DNA, 612 bp, Homo sapiens
ttgtacttagaagaattaacttttatctccacatgttttttttttaatcatagagaaactactagtggtagttccactgtccaagttactgaatatcttattcctagaatgagacactgcacaatgtgttctgacacgacagaacgtagctgtagttaagggacaggagatgtgatcacgggaacacgagtctgcgatccagcagttcttgctccttcacatttgcccagaaacaaagaccccagcagaacaatggaagcattgacttaggtctccacagtctgatgtgagataaacagcaggtagtttatgcctctgttttatagcaggaaatttaatctctaaagaagggccattttggagataatactattctccaggatgcttaaatgcccccaaacagagagcactgcagagccccgtggccaggagctacaacacctgggtctgkaaaccactggacagaaatatgagattctcttaccacatgtatgatggaaccttgaagaatgtttccttccttctccataatcacagcctgcgatgaactggaggtcccagtacataaaaaaacatgtgtctgcattggatacagaattagtcccataaaat

SEQ ID NO: 728510 - DNA, 606 bp, Homo sapiens
gctctgtagctcacctgagaacagctttctcattggaatgtcttgtgtttaaggaataagagtccatgtttcaggttcgggagcccaggtgcacctactggatgcagcccaggattggagacactttccagaagacaacatcacctgagacatgaccagtcccactgtttcactttcacaatttcaacttcctcagaagaaaattaaaattgctgagacttgttcataagtgttgtgccatgtccttactctgttttcttgcctgttcatttatgtcataccaggtgtctgttatatgtaataagatcaaaattctgcctccagtaacacatcaatggagacctttgattgtacttttggtttatgcactgacacatagattatgatgttcatcacattcatttttatgtcaaaggaaatctgcataatctgaatgccaatacyttttggaatctgctaagtaactgaaattgaaaaaaaaatacccactcaagaacctggatagacagccatgtccagaatggcagttgacacttgtttaactggaagagaatctacagaagccacaagttgttgagggcacttacatgataagcactatagttg

SEQ ID NO: 728511 - DNA, 606 bp, Homo sapiens
gctctgtagctcacctgagaacagctttctcattggaatgtcttgtgtttaaggaataagagtccatgtttcaggttcgggagcccaggtgcacctactggatgcagcccaggattggagacactttccagaagacaacatcacctgagacatgaccagtcccactgtttcactttcacaatttcaacttcctcagaagaaaattaaaattgctgagacttgttcataagtgttgtgccatgtccttactctgttttcttgcctgttcatttatgtcataccaggtgtctgttatatgtaataagatcaaaattctgcctccagtaacacatcaatggagacctttgattgtacttttggtttatgcactgacacatagattatgatgttcatcacattcatttttatgtcaaaggaaatctgcataatctgaatgccaatactttttggaatctrctaagtaactgaaattgaaaaaaaaatacccactcaagaacctggatagacagccatgtccagaatggcagttgacacttgtttaactggaagagaatctacagaagccacaagttgttgagggcacttacatgataagcactatagttg

SEQ ID NO: 728512 - DNA, 555 bp, Homo sapiens
atgcatttaggttaacactttgtctcaaaaaatatgagttttcagaaattctttatgccatgtgtccatcattgaatatcataaaaatagtttcattggccgggcgtgttggctcacgcctgtaatcccagcactttgggaggccgaggtgggcggatcacgaggtcaggagatcgagaccatcctgrctaacacaatgaaaccccatctctactaaaaatacaaaaattagccgggagtggtggtgggcacctgtagtcccaactactcgggaggctgaggcaggagaatggcgcgaacccgggaggcagagcttgctatgagcagagatcgcgccactgcactccagcctgggtgacagagcaaggctccctctcaaaaaaaaaaaatagtttcattgggattaaaaagtgtgtgtttcacctaatccacacaccttctccccaccttcctgggaaacctcaaatgtttactggatctatatttttatctttggcaaaacagcctggctgttctcttagcctcttttgcaaagcatcaagattcaccttcact

SEQ ID NO: 728513 - DNA, 564 bp, Homo sapiens
tcttagggaaactgcagtattctaaggtgacaatatgcaaacatgatgaatgtacacttgctacatctccaattgtgtactgttttccttacttctgtttgaagaagggagtcgtatactcaggtctagtatcagtgtagggggtgctccctatttgcaagatactagaaaaaaatggtaagttagaggcccattrttataaaaatctactagctccgtgtcagtgtgtgtgtgtgtgtctgtgtgaatgtgtgtgttattgaaacagaagacatggagtgggcattgatccacaagcatagatacctacaggcactcttagatgtaatatttaactgcaggagtctaaataaaataaaggattcgccaaaagtcttgaaaattttggtgctgactatgtgtccactgattcaatgcatcctgagttccagggaagggaatccccaattctttcatagagttgactgggtctcctaaggtcaatgttttcaaacgatggtgtcagtaacatatggtgtcactgaaagagcattttaaactagggcatggccacttcctatagcc

SEQ ID NO: 728514 - DNA, 564 bp, Homo sapiens
tcttagggaaactgcagtattctaaggtgacaatatgcaaacatgatgaatgtacacttgctacatctccaattgtgtactgttttccttacttctgtttgaagaagggagtcgtatactcaggtctagtatcagtgtagggggtgctccctatttgcaagatactagaaaaaaatggtaagttagaggcccattgttataaaaatctactagctccgtgtcagtgtgtgtgtgtgtgtstgtgtgaatgtgtgtgttattgaaacagaagacatggagtgggcattgatccacaagcatagatacctacaggcactcttagatgtaatatttaactgcaggagtctaaataaaataaaggattcgccaaaagtcttgaaaattttggtgctgactatgtgtccactgattcaatgcatcctgagttccagggaagggaatccccaattctttcatagagttgactgggtctcctaaggtcaatgttttcaaacgatggtgtcagtaacatatggtgtcactgaaagagcattttaaactagggcatggccacttcctatagcc

SEQ ID NO: 728515 - DNA, 564 bp, Homo sapiens
tcttagggaaactgcagtattctaaggtgacaatatgcaaacatgatgaatgtacacttgctacatctccaattgtgtactgttttccttacttctgtttgaagaagggagtcgtatactcaggtctagtatcagtgtagggggtgctccctatttgcaagatactagaaaaaaatggtaagttagaggcccattgttataaaaatctactagctccgtgtcagtgtgtgtgtgtgtgtctgtgtgaatgtgtgtgttattgaaacagaagacatggagtgggcattgatccacaagcatagatacctacaggcactcttagatgtaatatttaactgcaggagtctaaataaaataaaggattcgccaaaastcttgaaaattttggtgctgactatgtgtccactgattcaatgcatcctgagttccagggaagggaatccccaattctttcatagagttgactgggtctcctaaggtcaatgttttcaaacgatggtgtcagtaacatatggtgtcactgaaagagcattttaaactagggcatggccacttcctatagcc

SEQ ID NO: 728516 - DNA, 688 bp, Homo sapiens
atgggacagctttcctcaagcactggatcccgatcatgtaaagtttctctaccctgagaatgagactgccctttctctctttaaaatgcaaagtgggctctccagatgaggagcccaatgctgtatatggaagccatagtgctatgtgtttatgttgataccgacggtcattgcttagcatgcatcttatccaggtcctgctgctgtgtgtttctgttgatgctgctggacattgcttcgcatgcaccttacctaggtcatggcctgtgctgtgataaagagaagtccttttgcttctgyaccccaggtacaactcctgtgagcaatctggcaaatattttagaaactgtgtagtttgtattgccttgtcttttcatttgaatcttttagatgataaggaaatgagagtggttcacaagataatggggcagacacaggggatagttaagggcctcctccaagcaatgtggatatcataaaatgaatgttaaaaaatgaaagaactaaacaagaaggtgctggggttgacacaaaggacttaaaacagaactaccaggagttgggtgcagcaatggcaatcccttcagttccatcagcaattcagagacctaaacaaatattccctatttatgttgaattggcagactgtagaaatgtagaagacaaaatgaccagaaaaaatgtgtga

SEQ ID NO: 728517 - DNA, 609 bp, Homo sapiens
tctgccacatctggatcccatgtttctcactcatgggtaagccattgtatgaagccacaaagaggggaaagaaggagcccctcctctgggaggccacccaggaaaaggccttttaataaatcaaaggagacttgactgaagctccagctttaggsttgccagatctaactaagcttttctttttatatgcccatgagtgaaaaggaatggtcataggggtcctaactcaagtcatagggtcatggcaccacccggtggcatatttatccaggcaattagatactgtggcacttgcatggacccttgtttaaggcattagctgctactgcttcactggcacaggaagctaataaactgactttgggacggcaactgataatccaggtaccatactcggttataactttaatggacaaaagggggcaccaatggttataaaatccgagaatgatttgatatcaagagctcttatgtgaaaatccctgcataactttagagactgtaaataccctaaacctggctaccttgcccccttcattgctgtgtggacgtagcagatgaagtgttctcaagccagagagatttgacagatcggcccctcggggaccc

SEQ ID NO: 728518 - DNA, 563 bp, Homo sapiens
taaacaggctattaatatccagaatataccagaaaaataaatgtctcaaccacaaaaatataaataatcttattttataacagacaattaacccaaataagcagacgtttctcaaagaaacacatacaagatgccagaaaatatttgagaaaaaatgstcaccatcggtaataatcaggaaagcacaaatttaaagtacaatgaaatattatctcaccccagacagaatagccatattcaaatacataaaaatagtgctaatgtggatgaagataaaatgggacatgtatacactgttgatgagaatgtacactcatacagccactatggagagacgtatagaagttagtaaaaccacaaatgcaacaatcatatgatacagaaattttacgactgaacatttgtcccaaggacaggaaattaatatattgaagaggaaaatcaatattttgatgagatttcttcactcccatgtttattgcagccctgttcacagtagccaagtaattgaatcaaccgaagtgttcaatataaggtgagtagagaaagatgatgtggaatat

SEQ ID NO: 728519 - DNA, 563 bp, Homo sapiens
taaacaggctattaatatccagaatataccagaaaaataaatgtctcaaccacaaaaatataaataatcttattttataacagacaattaacccaaataagcagacgtttctcaaagaaacacatacaagatgccagaaaatatttgagaaaaaatggtcaccatcgstaataatcaggaaagcacaaatttaaagtacaatgaaatattatctcaccccagacagaatagccatattcaaatacataaaaatagtgctaatgtggatgaagataaaatgggacatgtatacactgttgatgagaatgtacactcatacagccactatggagagacgtatagaagttagtaaaaccacaaatgcaacaatcatatgatacagaaattttacgactgaacatttgtcccaaggacaggaaattaatatattgaagaggaaaatcaatattttgatgagatttcttcactcccatgtttattgcagccctgttcacagtagccaagtaattgaatcaaccgaagtgttcaatataaggtgagtagagaaagatgatgtggaatat

SEQ ID NO: 728520 - DNA, 563 bp, Homo sapiens
taaacaggctattaatatccagaatataccagaaaaataaatgtctcaaccacaaaaatataaataatcttattttataacagacaattaacccaaataagcagacgtttctcaaagaaacacatacaagatgccagaaaatatttgagaaaaaatggtcaccatcggtaataatcaggaaagcacaaatttaaastacaatgaaatattatctcaccccagacagaatagccatattcaaatacataaaaatagtgctaatgtggatgaagataaaatgggacatgtatacactgttgatgagaatgtacactcatacagccactatggagagacgtatagaagttagtaaaaccacaaatgcaacaatcatatgatacagaaattttacgactgaacatttgtcccaaggacaggaaattaatatattgaagaggaaaatcaatattttgatgagatttcttcactcccatgtttattgcagccctgttcacagtagccaagtaattgaatcaaccgaagtgttcaatataaggtgagtagagaaagatgatgtggaatat

SEQ ID NO: 728521 - DNA, 453 bp, Homo sapiens
ccagtttgttttctctatgaaacacgtgtttattaacttattattatcagatgtcacccttatctttctgatttctgggatttaattctagcaggtatcgtttagtatattttattaattcatattatattgttcacattttcagtatgattttattatttgcattgtttattgaatttgaaactttcttacataattttttwaattttttattttcatgagatgtaatttcaatataagtaataatgcatagatctgcaatgtaccattacaggatttctggcaaatgtaaacacacttgtccccaacagccaaggttggatgtagaggaggcccattcccccagcacaagcgaccttctctgtgcttccagtcagctcccacatttaacacaatgttttgatttctgccactgtagattcactgttcatgttttgattttcatataaatgg

SEQ ID NO: 728522 - DNA, 634 bp, Homo sapiens
aattttatgaactgtcatgactgtagtttttggcaaggacattatcatgtcaacctgtaaataaacagacaacaataaaacatatcaaatccatggggagtctgacctatgtccctctgtcttataagcacaaggctttgccacatccaaaatattattcaggctccagggtataaaatgcttttggactgtggaaggtaacagctctcccctcaggcaggggtaaggtatctggggaatgcagagttgtgttcataaggaagatgtcattatcgtgtcttctcctgtgcctggtagcaggtcctgaaggtgarcgtctcagatgtcagacatgggtctatcgggttaggataggtacatgtgactgacagggactgattctccatgtaatcacatgccctgtcccaggagcagctgcaggagtcagccctggacctgaatagcacacacttaccctctgcctcacctacactgttactggccactccgtcacaaccagtccttactagtggacctggatctgccggctctcagggaggggctgcaatggataaaatccattgctagtggtggtgggagtccatttgtcttgtggaaaatggcagcatttccttattttataaggcataataat

SEQ ID NO: 728523 - DNA, 618 bp, Homo sapiens
taagtttaaacacttttttttttgagatgaagtctcgtgcttgtgccccaggctggagtgcaatggcatgatctcagctcactgcaacatccgcctcatgaattcaagcgattttcctgcctcagcctcccaagtagctgggattccagacaactgccaccacgcccggctaatttttgtatttttagtagagacaggctttcaccatgttggccaggctagtctcgaactcctgacctcaggagaccctcccaccttgggctcccaaagtgctgggattacaggcatgagccactgtgcctagccaaaaaagacttcattattataggaggaaaaattctcatctgcaagtgtcactgatggamgcagaaaaaatgcccaggaagtcaggtgaggctgtagacactgtcaacccaggatgcaaatctcaccacaagtgcaggagaaagggcagggggttgatggatcatcctaactaacgtatggtttaagctgagcccagcaagaccctcagtgcctccctaaccacagttgcccttcagggataacccatgtgctcaacagcagccacaccttagtatctccactgtgcagtcattgtctaggacaagctcccag

SEQ ID NO: 728524 - DNA, 622 bp, Homo sapiens
agagttaacattttatgcctttaatttattgtgtatgtgtgatgaaatcacctaatatctacttgtctggcaaaagatatgtttataatgcaacattcattagtatagtcacattgctgtaggtttgatctccagaactatttcaacctgtgtattagtccattctcaccctaatgtaaggaactacctgagactgggaaatttatgragaaaagtggtttagttgactcacagttctgcaggcttaacagcaagtattactaggaggtatcaggaaacttacagtcatcacagaaagtgaaggggaagcaaggaccgcttcacatgctggcaggagagagagaaagagcaaggggagatgcaccacccttttaaaccttgagatcttgtgagaactctgtcacaagaacagcaaaagggaagaccgcccgcatgatccaatcactccccatcagacacctgctacaacacttggggattaaaatttgacatgagatgtgggtgaaaacacagagccaaaccatatcattccacccatggtctatcagaaatctcatgtccttctcacattgcaaaatatcattatgccttctcaacagtcttccaggcttaactcatttca

SEQ ID NO: 728525 - DNA, 579 bp, Homo sapiens
atagattgtgccaggactcacaggtaagggaggtagaaactatgtactcatgaccatggggtctgtgctgatctgagcttctcttgtcatcactctcaatattcaacttccccgtggatcaggctcagctgtggctgctccacgtggggctgtyctcagtctgttgcctctgtgtgtgcagaagtcctctgtgaagttaactagtggagtcagacaggaaaatactacagaccaagaattctcagactgttctgcaaagcccctggattcactgaaaaaagaacaagtttggtccagcaggattcatggcaagtgttggtgagggagataacagtaattcaagtggaagttctcaatgggactcgccttcagtacaaagaagattaacagtcctcagagacactgttcagaagattctcttttaagataataaaactgagagcccaagacaagtctgtgtattactgtgagggacacagtgtggggacatctatgtgagcacagacacaaaagtccctgcagggagacaggaggggactgcatgttagttgctgctcagaaccaccagggggcattcag

SEQ ID NO: 728526 - DNA, 579 bp, Homo sapiens
atagattgtgccaggactcacaggtaagggaggtagaaactatgtactcatgaccatggggtctgtgctgatctgagcttctcttgtcatcactctcaatattcaacttccccgtggatcaggctcagctgtggctgctccacgtggggctgttctcagtctgttgcctctgtgtgtgcagaagtcctctgtgaagttaactagtggagtcagacaggaaaatactacagaccaagaattctcagactgttctgcaaagcccctggattcactgaaaaaagaacaagtttggtccagcaggattcatggcaagkgttggtgagggagataacagtaattcaagtggaagttctcaatgggactcgccttcagtacaaagaagattaacagtcctcagagacactgttcagaagattctcttttaagataataaaactgagagcccaagacaagtctgtgtattactgtgagggacacagtgtggggacatctatgtgagcacagacacaaaagtccctgcagggagacaggaggggactgcatgttagttgctgctcagaaccaccagggggcattcag

SEQ ID NO: 728527 - DNA, 579 bp, Homo sapiens
atagattgtgccaggactcacaggtaagggaggtagaaactatgtactcatgaccatggggtctgtgctgatctgagcttctcttgtcatcactctcaatattcaacttccccgtggatcaggctcagctgtggctgctccacgtggggctgttctcagtctgttgcctctgtgtgtgcagaagtcctctgtgaagttaactagtggagtcagacaggaaaatactacagaccaagaattctcagactgttctgcaaagcccctggattcactgaaaaaagaacaagtttggtccagcaggattcatggcaagtgttggtgagggagataacagtaattcaagtggaagttctcaatgggactcgccttcagtacaaagaagattaacagtcctcagagacactgttcagaagattctcttttaagataataaaacygagagcccaagacaagtctgtgtattactgtgagggacacagtgtggggacatctatgtgagcacagacacaaaagtccctgcagggagacaggaggggactgcatgttagttgctgctcagaaccaccagggggcattcag

SEQ ID NO: 728528 - DNA, 622 bp, Homo sapiens
ccccgtgtgcagctttgcagagtcagatctttcctcatgtgaggcgacctccactgcccgtgattgctgctcaggtctaattgtggattcgggattatgacaccctttgggctatcacaggtcaatcttattctgaaaatcaccgtaattatagayagaggtaataatccagtacccattcttctgtccgcagtttgtctttcttatttggttgaaagtttgaagaaaaaatgtgaccatatattcatctaattctaacctctgaatctgctatttgctctcggggacctacaaattgcaaaacagtgagttcttcattttcatcaaaatgtgcaaatttgtgaatttcaacatgttgttcagaacctgtgcatgccgacaactgtgattctcggtgcactcctggcctggtgaagccctcacagatcctccccctggcctgtggcatctctgcttctccattacaaccagtgcttcctgctggagctggatccgtcaccccccggggaagggactggagcgaatcaggtgcacaggtcatgagggagtgcacaatccaacccactcctcaagagtccagtcaccatctccagatccacatccaaaaaacagtttctcctac

SEQ ID NO: 728529 - DNA, 576 bp, Homo sapiens
ggattggaggaatcaatattgccaaaatggtcatactgcccaaagtaatttgcagattcgatgttatttccatcaaattattaccatcattcttcacagaattaaaaaacccatacatattctaaaatatatatggaaccaagaaagaccctgaatagccaaagcaatcctaaacaaaaagatcaatgccagaggcatcatgctaccagatttaacattacaaagtaagaaaaacagcttggtactggtgcaagagcagacacacagaaaaaaaaaagaacaaaacagaaaacagaaatagagctacacacctaaaccatttgayatttgataaggttgacaagaatcaagccatagattaaaaaaaaaaaactccgtattcagtaaatagtgctgggagacctggattcgggcagatatgcagaatgcaacagtgaaggaggctgggcagtttctaccttgatttcagatgtgcagagagccctatgtgcccaggaaaaagcttgctgcaggagtggagccaccacagagagcctctactagggcagtgccaaagatgtggaaagatggggttgg

SEQ ID NO: 728530 - DNA, 585 bp, Homo sapiens
attgtctctgccactccttttacataaatgtattaaaaagtagttttaagaccacagcaaaattggacagaaggtgcagagagttctcatgtgcccctgcttcaccatgcacaggctttcccactgtcaccatcctgccccagagtcatcaataagttacaatggatgaacttacatgggcggattggttctttcctcttctggtggtctcttggcataccaagcccaaattatcttgaagcaccataggttctactgtaatgcctaaccttgttttttactctagtttgctactttaaattttccctttttttgtctccttaattgccagccatgtttcccatatgaatagactctccctggctgggaaagctgggcaaactccatttgaccttttgatttataagacattaagggctccttacccaacccycttcttcaaggaattaacctgtgtaagcagatcctcagcatttcaaaggagcccaattaactgataaggtactggaacaaacaatgtatgaagttcccaggatttttctcaaagagataacaacataaagccttgagttcatgcccagcata

SEQ ID NO: 728531 - DNA, 575 bp, Homo sapiens
gacatcgtgatttttaagaccaacatcttgtaaatgccatcatagttctcagcttcttttattatgggacctttgctggtttcctagctgagaaagtgaaaataacaacctgcatggacttcccaagtctccacctgtatcctgtttgctttagatctctaggagaagaaagtcagataactgggcctggtgtcagtgtaggaggcacttcctaaaagccacatattaggagaagggaaaatgtgtgttattggaatagtggatatggagtgggctttcatytgaatgtatctgcacctgctagtattctcagatgcaacattcaactgcaagagcccagtgaagaaacatggcactcgcaaatctcttgtaagtttttgtcttcattttggttccactaatgaagtgaatctggagcttcagggaaggggctccctcctgtgtcattgaatccttgctctgggtctccctgcagagttcaataggtttagtaaggctaatcaattgtttcaagagatggtgtcagcagcatatggtgtcactgaaggagtattctacactagcacacagccatt

SEQ ID NO: 728532 - DNA, 502 bp, Homo sapiens
tccattcacaagagacctttcttttatcaggttcatgtgcaaccaagtttccctgctgacaagcatttaagccagatgattcgcaacttcctttgactgagaaagatttccctcaaacttcagctcagtgcaggcacacaccatctctgaatgggcatttaccatcagacaatgcccacacctgtccccacrtggacctttccctcagacaaacaaacacatcctcaggttgactcttccctcagacaagcacccctgtcttcatgtgaactcttccctcagataagcacacatgtccccacattgactttttcctcagacaagcacatatagctgacaacgaacagttatgtggcaaaatgagctcaggatagtggtaattatggactccagctctgatagtttgtagaaattgtcatttttaaaattctgactgaagactttcctttattgtagaagacagtcctttacagctctaattgcacagcctacagacaggagt

SEQ ID NO: 728533 - DNA, 612 bp, Homo sapiens
tcaaaataaactatagtgcatcagttaatagattttaaccttgtccacttgcttttcaatttatattattttctacaatttggactgaattttaaagcgtatctttgcacgagtctccaaaataatgttttcagttatttccctttttaaatatttttcctggcttgaaatcagcagaagttaaactgtgctttcttacagctagacaatgtaaattctaaaagaaaacaaaatcaatgatatggtttggctccgtgtccctacccaaatctcaccttgtattgtaataattcacacattgcaagggtggaatgaggtggagataattgaatcataggggctgttttcttcatgcttttctcctgttagtgagtgagttctcacaagatttgataattttatgaggggcttccctcttcacttaacacttctctctcctgcagtcatgtgaaatagcatgtgtttgctaccccttkcatcatgattgtaagttttttgtggcctccccagccatgcagaactgtgagtcaattaaacctatttttctttaaaaattacccagcctcgtgtatgtccttatagcaacctgaaaatggactgatacaagcaact

SEQ ID NO: 728534 - DNA, 539 bp, Homo sapiens
gcaagctgggttagctaaggagcggggccgttggcagaggctggggatccaggctgaactttggaggaggcatgtgccagcatgggctcctgactatgtcctcctgggacaaacccaaacccactctttgaatatgggagggactttgctggccccggccctgaccgcagcacttggaaactgaggagtggtcgcctcctccgtgtcacagctgcccgttcaccatcatagaagcaactctgtcacctccatgggcccctctgtggctgctgcctgggtccaagctgagcccagctgcccaggcccagaaggaaagcccaggccaggtgcccagcacagaggcagtcacataccccggggagagccacagcaagcagccaatrttgcccaggagaggagtagctgacaaggtagaacgtgagctgccatcggctcgagaggctttgctggtcctcctggggctctggacatgaccaggaggagcgagggaagaagtcgcatggtggtcccatcctgggtggggcctgatggcagctggc

SEQ ID NO: 728535 - DNA, 647 bp, Homo sapiens
actatggctttggcctttatttatattataaagagatgattctgattagaacctcaaagttttagccttaaagcactatttttattagtgggaaaaaattttgttctagaactgcctttttttttcatgcccagaataaaaaaacgattagattgcttaacatacttcagtgttttacttaattgtacagaagacatgatcttgttttatgatttgttcgccttaaaaagcttcaagcaacatatytgagtattactgtggagtggaaaactagttagacaaattttttatctctttcatatctgtaataattgcaaatagtcatacattattaagtttcctttaccatatgttgaccagcctcttttgtcaaggcagcatatcttgagatgtgaggatataatgctttttcccagaatatcgaagaatttgccagatgcttacaggcatacgttttgccgtgcttcattttcttgtgcttcacagatactgcattttttacaagttcaagatttgtggcaacagtgaattgagcaaatcagttggcaccatttttccaacattatacgcgtacttaatgtttctgtgtcatgttttgataattcttgcagtatttcagactttttcgttattattttatctgttat

SEQ ID NO: 728536 - DNA, 647 bp, Homo sapiens
actatggctttggcctttatttatattataaagagatgattctgattagaacctcaaagttttagccttaaagcactatttttattagtgggaaaaaattttgttctagaactgcctttttttttcatgcccagaataaaaaaacgattagattgcttaacatacttcagtgttttacttaattgtacagaagacatgatcttgttttatgatttgttcgccttaaaaagcttcaagcaacatatctgagtattactgtggagtggaaaactagttagacaaattttttatctctttcatatctgtaataattgcaaatagtcatacattattaagtttcctttaccatatgttkaccagcctcttttgtcaaggcagcatatcttgagatgtgaggatataatgctttttcccagaatatcgaagaatttgccagatgcttacaggcatacgttttgccgtgcttcattttcttgtgcttcacagatactgcattttttacaagttcaagatttgtggcaacagtgaattgagcaaatcagttggcaccatttttccaacattatacgcgtacttaatgtttctgtgtcatgttttgataattcttgcagtatttcagactttttcgttattattttatctgttat

SEQ ID NO: 728537 - DNA, 647 bp, Homo sapiens
actatggctttggcctttatttatattataaagagatgattctgattagaacctcaaagttttagccttaaagcactatttttattagtgggaaaaaattttgttctagaactgcctttttttttcatgcccagaataaaaaaacgattagattgcttaacatacttcagtgttttacttaattgtacagaagacatgatcttgttttatgatttgttcgccttaaaaagcttcaagcaacatatctgagtattactgtggagtggaaaactagttagacaaattttttatctctttcatatctgtaataattgcaaatagtcatacattattaagtttcctttaccatatgttgwccagcctcttttgtcaaggcagcatatcttgagatgtgaggatataatgctttttcccagaatatcgaagaatttgccagatgcttacaggcatacgttttgccgtgcttcattttcttgtgcttcacagatactgcattttttacaagttcaagatttgtggcaacagtgaattgagcaaatcagttggcaccatttttccaacattatacgcgtacttaatgtttctgtgtcatgttttgataattcttgcagtatttcagactttttcgttattattttatctgttat

SEQ ID NO: 728538 - DNA, 620 bp, Homo sapiens
aagttttagacaccagaaccactttgcaaaagacttaaaatatttccttaatgcttgctttagggcatgtacttcaaatatggatgtcaaacattgaaccaaaagtagttttttactttttagtttataaataaaagtaaaaatggggttattttggagattatttaagtactactgctaaactattttactattwtttatattcataaaaccaagaggttttgagctaaaacatttccttctctatctctcccatatacacacccgagtgcacacccaactcttcacatacacgaacattcaagtgtcgctttattaaagtcatatgttgaactctctcctctcaccatacacatcagcattaatttatgtaagtaagaagatggtgaacgaatatagaaataagatagcattaaagcaatagtcttgtcattcaaagtgtgcttcaagatctaggaacatcgagcatcactgggatgttgtagaaaggcaaaatcccagatcatcctctaataagaatccccatgtgattcatatgtacattaaatgttagaaacactgttccagactagtggctctcaaagtgtggtcaacattacctaggaaactaggtgaaacta

SEQ ID NO: 728539 - DNA, 692 bp, Homo sapiens
tcatagctcactgcagcctcacactcctgggctcaagcagtcctctcaccttggccttctggatgtcattcttttttactttcctttcacttacaatcctcagacacagatcttgctgttcctcacatggaccaagcatgttccttatgtagtgccttgtccttgctaattccctttccttaccattcttcctccagatctcagtgagctgtgtcttctctttatttatattctgttcgggcgtaactgcagaatagagggaatctttgataaccctttgtaaaatagtaactttctccgcctcttcctgttacactgattttttttttctttttttttcttttttgagacagtctcattctrtcaccccgtctggagtgcagtgacgcagtctcggctcactgcaacctctgtctcccaggttaaagcaattctattgcctcagcctccccagtagctggaattacatgtacaccacaatgcccggctaatttttgtatttttaggagagatggggtatcaccatattggccaggctggtctcgaacttcctgacctcaagtgatccacctgcctcagcttcccaaagtgctgggattacaggcatgagccactatgcccagcctgatttttttgattgttatagctcttattatcacctgacttatttcattcatatatgtatatattgt

SEQ ID NO: 728540 - DNA, 588 bp, Homo sapiens
taaaatttatttttgagacaggatctcactcagccacgtaggctggagtgcagtgatgagatcatggctcactacacccttgacctcctgagctcgagcgatcctcccacctcagcccaagtagctgggaccacaggtgggctccaccacacctggctaatttttttttaattttttatagagacgaggtctcgccatgttgcccaggctggtctcaaactctggggctccagcaagcctccctccttaacctcccaaaatgctgggattacaggtgtgagctaccacacccagcctggattttaaaaagtgttcagtcaagtaatatggatagtctcatcaatatccccaatgctttaaagtggccagagatttccccttacaaagaaatatgaactagtggaagtctgttcttgacaactcgagacattttctttgggttstaagtttaatggggcacaatgagaacaagttgatgatggaaacgcatgtgtgcaggagaagagcctaagggcagtgtgtgactggcaacctctttactctccaaatgcaaatgaagcaatccagccctcctgacttcagtccagc

SEQ ID NO: 728541 - DNA, 605 bp, Homo sapiens
tctaacagtcacgtggaaggtaggcaggcacaaagctactcgtggggagaaagtgaaattttctaggtgacctccaaaagatggcaagttgattggcagaggaggaagatgtccctgttgcttctttcctatcagtgcctgctgaccttcagggcagatatgaagaggtgtcccagtggggcacamcctcaacaagtggagagatgcaagtaactccatgcacctttccaccttcctcttcaccacttcctccccaacacccaggatgcctaagaggtaaaagctccacctctgctgataataataggctggccttgaaagggactattccaggctcttctacggactgttttaatggatggagctggaagccattatcctcagtaaactaactcaggaatagaaaaccaagcaccacatgttctcacttaaaagtgggagctgaacaatgagaacacatggccacacgtaggggaataacacacattggggcctgttggtgggggtgggggagtggagggagagcataaggaaaaatagctaatgcctgctaggcttaacagttagatgatgggttgacaggtgcagcaaaccatcatggcaca

SEQ ID NO: 728542 - DNA, 605 bp, Homo sapiens
tctaacagtcacgtggaaggtaggcaggcacaaagctactcgtggggagaaagtgaaattttctaggtgacctccaaaagatggcaagttgattggcagaggaggaagatgtccctgttgcttctttcctatcagtgcctgctgaccttcagggcagatatgaagaggtgtcccagtggggcacaacctcaacaagtggagagatgcaagtaactccatrcacctttccaccttcctcttcaccacttcctccccaacacccaggatgcctaagaggtaaaagctccacctctgctgataataataggctggccttgaaagggactattccaggctcttctacggactgttttaatggatggagctggaagccattatcctcagtaaactaactcaggaatagaaaaccaagcaccacatgttctcacttaaaagtgggagctgaacaatgagaacacatggccacacgtaggggaataacacacattggggcctgttggtgggggtgggggagtggagggagagcataaggaaaaatagctaatgcctgctaggcttaacagttagatgatgggttgacaggtgcagcaaaccatcatggcaca

SEQ ID NO: 728543 - DNA, 553 bp, Homo sapiens
ggaaattcaaaacagccccaccttgcttcaacaaagggtacgaagaagaggtgggaaggcagtcacattagaaggaagggtttaaacacaatgagccagagagaagggcacaaattgacagagaacagtaaaagccagagattttctggtatgtttcagtgaaaatcttccagcaaaggagctatttttttttttcagtttgaaacttttatctgtgtgtcrtgctctgagaatttaaaaggaagggaccctttacttataatctagtagaatgtgaatgtgatctagctgtggtatcggtttcatcactgatctccaggactgattcgctcatctggcatccgtgagtagtaactccacacacttctctcccgctgtgtgctttgctccgaagaagactggatggttctgagatgaggggacgagtagggcactgatctcactctaggaaaacatcacattccattatcctggacacaaatcataatacttggtgacatgaagttcagagaatccgtgaaaatcaccaaggcctgagtatccacacaaagga

SEQ ID NO: 728544 - DNA, 592 bp, Homo sapiens
tccttaatcattacgtgctaagcagagtaactttaaaatatataatgcaaacatgttaggacttaaggagaaaatgtccaatcacaatcataacaggaatattttcacatacctctgtcagaatcaattgagcaaagagaccaaaataataagaaattcaatttagataaatgcgaaatttcacacctaaataatagagaatacacatttttccagactcaaaatacttattaaaaatagaatactgtgttttatgatgacatacgtcttcaaaacattccccaaatatgaattctataggccatgtgcactgaatgcaatataagggactagaaactaacaaatactgatcaaaaacaaaaacatcagtatcctacctgtctgtaatttttaaaacaattaggccctttatgccttttggtagattcaggaaagatttttcttataaaataatttwaagttgggggaaattatacacataaggatactatatcaagaattattcatatggcaaaaaaaagtctaaataatctaaaagccctttttaaaaaatttgagacaaggtttcattttgttgcccaagctagagtgc

SEQ ID NO: 728545 - DNA, 645 bp, Homo sapiens
aagaaacacttctgtagaagcgaacagtaagctataaatccgaagagcccaagatgacggctggaacaagatagcaatggcaagaacatatttttcaaatccaaatgttcttcctaccacattaagtttttttttttttttccaggagaatcagcagatccataccctgaatagtcactgatgctagtctagttgtatcaaccttggaaaaaataaattattatcaaaaagcaatggaggtgcaggcatggtagttcactcctgtaatccgagcacttgaggccgaggcaggtagattacttgaggccacgagttcaagaccagcctggccaacrtggcaaaaccccacctctactaaaaatacaaaaattagcagggtgtggtggtgggcacctgtagtccagctacttgggaggctaaggcatgagaatcgcttgaacccaggaggcagaggttgcagtgagctgagattgcaccaggaggcagaggttgcagtgagctgagattgcaccactgcacttccagcctgggcgacggagaaaaagtgcctcaaaaaaaaaaaaaaaaaaaaaaaccaaaaccccaagaaacaaaaaagcaatggagaccaaaccttaaaagcatcaagagggagaaaactgcgct

SEQ ID NO: 728546 - DNA, 661 bp, Homo sapiens
gtagccacgtcctggttacagtggatcctgggcaagacccagtgctgtgctggcttcaagtctgacccagtgtagtcccagtggtggtggccacaggggtacttgtgtcaccccactcccagctccagatagttcagcaaagagagaatacatttgtttgggagaaaataaaggaagagaaaaagactatctctctgataatccaaataattcttcaggatcttatataaaaccatcaaggcagtacctccatgagtctgcaaaacatggggtttctgcaggccaccaccgacgttcgcttaaagcccgagggctcttgaatacctggaaggttccaataaatatgacaacaaacaagcccacactgcaaagactacaataaatacctaactcttcaatgcccaggtaccaacaaacatccacaagcatcaagaccatccaggaaaacatgactttaccaaatgaacyaaggcaccaggaaacaatcctggagaaacagaggtatgtgacccttcagacagacaattcaaaattgcagtgttgaggaaactcaaagaaattcaagttaacacagggaaggaactcaaaattctaccggatgattttaacaaatagattcaaataattaaaaagcatcaagcagaaattctggagttgaaaa

SEQ ID NO: 728547 - DNA, 611 bp, Homo sapiens
gtgtgggagcaaaccatctgcacatctaaggaaagcaagttccaggcacaggaaacatctcgtgcaaaggtgttgaaaaaggagtgtgcctgggtatccagggagtagtggtcaagcagtgagatccaagaacagggagtggggtagttgtgggaaatgagatttgagagggagaaggggcagatraggtatagaatttccctctgggtgtgaggagacccacgaaagaagtccaagctccaaattatatttaacagtatctctggcaaaaataaactggtgggggagcggcaaaaatgaaaaggggaccaggaaagagttgatagtatttcagaacagggtggtaggaatggaggtgcgataacctggatatattttaaaagtagagtgctgaggatttactattggaatagatatggaaggagagaaaaagaggagtgaagggtaactccaaagttattggctccagcactggaagggtgaaatgccaagattggaaagagtacaagaggagaaaattgggtgtgagacgagagggaatcagctcagtttgggacatagtgaaattgaggtacctattagatatacaaattattttaataagatccagg

SEQ ID NO: 728548 - DNA, 565 bp, Homo sapiens
caggaaacatctcgtgcaaaggtgttgaaaaaggagtgtgcctgggtatccagggagtagtggtcaagcagtgagatccaagaacagggagtggggtagttgtgggaaatgagatttgagagggagaaggggcagatgaggtatagaatttccctctgggtgtgaggagacccacgaaagaagtccaagctccaaattatatttaacagtatctctggcaaaaataaactggtgggggagcggcaaaaatgaaaaggggaccaggaaagagttgatagtatttcagaacagggtggtaggaatggaggtgcgataacctggatatattttaaaagtagagtgctgaggatttactattggmatagatatggaaggagagaaaaagaggagtgaagggtaactccaaagttattggctccagcactggaagggtgaaatgccaagattggaaagagtacaagaggagaaaattgggtgtgagacgagagggaatcagctcagtttgggacatagtgaaattgaggtacctattagatatacaaattattttaataagatccaggta

SEQ ID NO: 728549 - DNA, 618 bp, Homo sapiens
tgtactccagcctgggagacagaatgagactgtctcaaaaaaaaaaaaaaaaaaaaaaacacaaagattgctcccagggtttctttttcataagaatacctcagagatgaggttcgcagctctcttcacatcatattagtgggtaggtgatattcacatgacttaccacttggttaagatggtatcttctaaktttcttctctgtaaagttagtgtttttcctttccattctctgtgttttggcattgagtcccaaagttcatcccacgctcaagagtaaggaaattaaactctacctcctggagcgggaagtatctacatatattgcttggctttcctctgtaagaaagagatggcccttctcattcattcattcattcattcattcatttataccagtatggactcatcagtacttattttattctttgtgttataatccaatgctatcattatttatttggttgctcaaattgttccaggtttgtcaatagggagccctttcaggttggctttttggtccttttaatatggctctttcttttcctctttctcctcttcctcttcctcctcttcttcttccttctagtccttctagtcctcctcctcttaatactt

SEQ ID NO: 728550 - DNA, 618 bp, Homo sapiens
tgtactccagcctgggagacagaatgagactgtctcaaaaaaaaaaaaaaaaaaaaaaacacaaagattgctcccagggtttctttttcataagaatacctcagagatgaggttcgcagctctcttcacatcatattagtgggtaggtgatattcacatgacttaccacttggttaagatggtatcttctaagtttyttctctgtaaagttagtgtttttcctttccattctctgtgttttggcattgagtcccaaagttcatcccacgctcaagagtaaggaaattaaactctacctcctggagcgggaagtatctacatatattgcttggctttcctctgtaagaaagagatggcccttctcattcattcattcattcattcattcatttataccagtatggactcatcagtacttattttattctttgtgttataatccaatgctatcattatttatttggttgctcaaattgttccaggtttgtcaatagggagccctttcaggttggctttttggtccttttaatatggctctttcttttcctctttctcctcttcctcttcctcctcttcttcttccttctagtccttctagtcctcctcctcttaatactt

SEQ ID NO: 728551 - DNA, 507 bp, Homo sapiens
aatggtactggaagaattgggcattcacagaaagaaaactataacctaaacttcacaccttatacaacatgtaactcagtataagtcatggagttaaaagtaagatataaaactataaaacggggccgggcgcagtggctcacacctgtaatctcaccactttgggaagccgaggcgggcggatcatgaggtcaagagttcgagaccaccctggccracatgatgaaaccaagtctctactaagaatacaaaaattagctgggcatggtggcatgtgcctgtaatcccagctactcgggaggctgaggtagaagaattgcttgaacccaggaggcagacgttgcagtgagctgagatcatgccccattgcgctccagcctgggcgacaggacaacactctgtctcaggaaaaaaaaaaaaaaaaaaaacaactataaaacttctagaaaaaataggagacaatctgagaactaggactacacaaagatttttaggcttgacaataaa

SEQ ID NO: 728552 - DNA, 664 bp, Homo sapiens
caccatatacaaaaattaactcaacatagatcaaagacctaaacagtgtaaatctctgtgaccttggattaggtaatttcttagatatggcacctaaagtatgagcaaccacaggaaaatagataaattgtacttcattagtattaaaaacctgtatttcaaagataacaatgagaaagacaccttacagaatgaaagaaaatatttgcaagtcacatatcgaattatttagtaccccaaatccataaagaacatttacagctcaacattaaaaagacagataacccaatttaaaaaacaaacaggagctagaagctgtcatcctcagcaaacaaatgcaggaacagaaaaccaaacattgcatgttttcacttgtaagtggaagctgaacsatgagaacacgtggacacatcatggggaacaacacacactggggcctgtcagaggggttgcgaggggagggagaacatcagaaataaaagctaatggatgctggacttcatacctagatgacgagatgatctgtacaacaaaccactctgacacgtttattaatgtaacaaacctgcacattttgcacatgtaacctgggacttaacacaaacgttgaagataataaaataaaaaatgaacaaagaatcttaacagatatttctccaaagaa

SEQ ID NO: 728553 - DNA, 653 bp, Homo sapiens
aaatccataaagaacatttacagctcaacattaaaaagacagataacccaatttaaaaaacaaacaggagctagaagctgtcatcctcagcaaacaaatgcaggaacagaaaaccaaacattgcatgttttcacttgtaagtggaagctgaaccatgagaacacgtggacacatcatggggaacaacacacactggggcctgtcagaggggttgcgaggggagggagaacatcagaaataaaagctaatggatgctggacttcatacctagatgacgagatgatctgtacaacaaaccactctgacacgtttattaatgtaacaaacctgcacattttgcacatgtaacctgggacttaacacaaacgttgaagataataaaataaaaaatgaacaaagaatcttaacagatatttctccaaagaagacatatgaatagctaataagcacataaaaagatgctcaacataattagctaccaggtrcatacaactcaaactaccacaagataccgcttcacacccattaggatagctataatcaagagataacaacaagtgttggtgaggatatggagatactggaaccctcatacatcactgttaggtatataaaatgctgcagcctctttggaaaactgttagcctctcaac

SEQ ID NO: 728554 - DNA, 600 bp, Homo sapiens
atacacataaaagatatactttaaagcattttaagcgtataattcagtggcgttaagtacattcactgttgtgtaaccatcaccactatcaatttccaaaactttctcaacccctgaaacaaaaactctctaactattaagcaaaaacccttattttcccctaccctcagttcctcataacttttattttacttttcatttctaagaattctatatacctcatgtaagtggaatcatacattatctgtcctttttttgtctggcttatttcacttgtcttcartgtcttcaaggttcacccatattgtagcatgtatcagaacttcattccttttcaaggctgaataatattccattgcatgtacatatcatattctgtttatctgttcatttgttgatggactcttggattgttcccaccatttggctattgtgaataatgcagctatgaacatgggcataccagtatctgtttgtgtccctgtttttaattctttggggtatatactcaggagtggaaatgctgagtcatatgataattctacatttaactttttgagaaactaccaaagggttttccacagcagcagtaccagttta

SEQ ID NO: 728555 - DNA, 624 bp, Homo sapiens
gtgttaaaccaaagaggaatcaattaaaaaaaaaatacagtgtgtcccaaaacacgcatttgagttgggagcagtgattgatccaacatttatagagaaccctgcagagtccctgacattgtgggaagaatagaagtagaatgagcccagaaaacccgtgtttttattttagatttctttaaatacgtgagaatacaatggcatataatgcaatattttcccttctcaaaaatatatctagaaagaaagagatggggaaatgcacagcagccgttggtggaggttgaccctggaagctaattctagaataacttaaaaatgtaagttgttcaggtttcccttttatagctgttctgagtagcacagaaactcaattttgcttggtagaaggtccttgccttgcttcttagattccacagtcatttcttaggctagctttactatcatttgattcagccaaaratgatgtcttatagaaatgttcaataaaggcctcattcctaagcagattctacttgttcaagtttatgagttacaactacctgaagtctcagaatcatagcagtaatgagcataaaggcagtggagaccctgtgataagttttactgaaatgagaaagataa

SEQ ID NO: 728556 - DNA, 654 bp, Homo sapiens
gttttttggtttttttttttttttttttttttttttttgtctataaaccttcttccaccacatggctctgctggaatctctctaaatctgctgtgattctgggggcttcctgattcttgaattgttcctcgttcaattaaactcctttaaatttaatttggctaaagtttttcttttaaaagcaagaaaccagtagtccttcctccttttcccccactaccagagggtaattttacttgtcatcrtttgagctcaatgaatttaatgttctgatgtggcttcagagaagccctggagggtgctaaacggtaacattttcacatgagtacaacagtacctcccctcccttacccacggtttagctttctgtgttttcagttatccacagtaaatcatagttatttttgttaatatcaggtattttgagagagtcaccatattcgtgtaactttcattagagtatattgttataattattctattttatcattagttattgttgttatctcttactgtgtctagtttataaattaaactttatcacagtacgtatgcatagaaaaaaaattgtacatatagggtttggtactatccgtgatttcaggcatccactgaggctcttggaacatatacccccccgcggataaaagggga

SEQ ID NO: 728557 - DNA, 544 bp, Homo sapiens
atggtcccagctactctgaaggctgagggcaggaggactgcctgagcccaggatttcgaggttacagtgagccatgatcacgctactgcactccagcctgggtgacagagcaagaccctgtctcttaaaaaaatagtgaaaacaarcagacaagcaagcaaaaaaaaaaacggtgtgaaagagactgaagtgcagcaagatgctccaagtttgggggttggggaacatgaagataaagagccaacggtttggtcagctcaagagtttggcttctactctgagagcaatgggagtctgctgaaggagttatgatggagactgatgcttcgaattggctaaaggtggaagatgtcctagtgaggagagactagacgcacgaaactgctagggcagatgggaactcctggcagtggcagcacgaggcaaaggagaggacaagccagacacgcttaaaaggccactgctgtgtcctctgccctgagcagcagagaggctggcacacaatatgtgcccaatacaggtctgttgaattaaacattatttt

SEQ ID NO: 728558 - DNA, 544 bp, Homo sapiens
atggtcccagctactctgaaggctgagggcaggaggactgcctgagcccaggatttcgaggttacagtgagccatgatcacgctactgcactccagcctgggtgacagagcaagaccctgtctcttaaaaaaatagtgaaaacaagcagacaagcaarcaaaaaaaaaaacggtgtgaaagagactgaagtgcagcaagatgctccaagtttgggggttggggaacatgaagataaagagccaacggtttggtcagctcaagagtttggcttctactctgagagcaatgggagtctgctgaaggagttatgatggagactgatgcttcgaattggctaaaggtggaagatgtcctagtgaggagagactagacgcacgaaactgctagggcagatgggaactcctggcagtggcagcacgaggcaaaggagaggacaagccagacacgcttaaaaggccactgctgtgtcctctgccctgagcagcagagaggctggcacacaatatgtgcccaatacaggtctgttgaattaaacattatttt

SEQ ID NO: 728559 - DNA, 544 bp, Homo sapiens
atggtcccagctactctgaaggctgagggcaggaggactgcctgagcccaggatttcgaggttacagtgagccatgatcacgctactgcactccagcctgggtgacagagcaagaccctgtctcttaaaaaaatagtgaaaacaagcagacaagcaagcaaaaaaaaaaacggtgtgaaagagactgaagtgcagcaagatgctccaagtttgggggttggggaacatgaagataaagagccaacggtttggtcagctcaagagtttggcttctactctgagagcaatgggagtctgctraaggagttatgatggagactgatgcttcgaattggctaaaggtggaagatgtcctagtgaggagagactagacgcacgaaactgctagggcagatgggaactcctggcagtggcagcacgaggcaaaggagaggacaagccagacacgcttaaaaggccactgctgtgtcctctgccctgagcagcagagaggctggcacacaatatgtgcccaatacaggtctgttgaattaaacattatttt

SEQ ID NO: 728560 - DNA, 596 bp, Homo sapiens
acctaggagtcagcaataatctgcctctttccctctctccccagtagcaactccgacaggcactgccttcaaaatacatttcaaaagcaagcattcctcaccttcactattatcccaggtccaagccaccactgtctctctctgggactactaactggtcaaatcatgagcctctgcctccttacaatatattctcaaaacagcaaccagagtcatccttctgaattgtactcagttcctgccattcctcagtccaagccttctaatggcctcytatcacatctaatacaaaaaagggacccagtgacctaagacaataattagcaacagactaacctttatgcaaaaggtgacgtgaggcatcatcgaaggtaagggagtgctcactgccatgacaaatcagatgacacagcttacacttcatagtcaatcctgaggggctgtggaagaatctaggaaactcaatgacatttcacccctaaatcaacaggtgtgcaaacagaattatcctcttatctaatcagatctccataagtaccctgaaggcttcaaggaataagagtgtgcctgtttttgaccacggattatttacttgc

SEQ ID NO: 728561 - DNA, 596 bp, Homo sapiens
acctaggagtcagcaataatctgcctctttccctctctccccagtagcaactccgacaggcactgccttcaaaatacatttcaaaagcaagcattcctcaccttcactattatcccaggtccaagccaccactgtctctctctgggactactaactggtcaaatcatgagcctctgcctccttacaatatattctcaaaacagcaaccagagtcatccttctgaattgtactcagttcctgccattcctcagtccaagccttctaatggcctcctaycacatctaatacaaaaaagggacccagtgacctaagacaataattagcaacagactaacctttatgcaaaaggtgacgtgaggcatcatcgaaggtaagggagtgctcactgccatgacaaatcagatgacacagcttacacttcatagtcaatcctgaggggctgtggaagaatctaggaaactcaatgacatttcacccctaaatcaacaggtgtgcaaacagaattatcctcttatctaatcagatctccataagtaccctgaaggcttcaaggaataagagtgtgcctgtttttgaccacggattatttacttgc

SEQ ID NO: 728562 - DNA, 563 bp, Homo sapiens
gcctcataaaatgactaacttcaatatttactttcatttctaaaattttttaaatcaaccactaagactttaacctccccctacacacgccaagaagaaatgctggctctcccctgcactggccacacctgtctttagacagcacccctttsctgctcgacggcctcctgcccccatcatgtgatcaacctctggcatcaggaaggcagtggtggctctgtgccatgaggtccctctttgtaggctgtggctatttttgggctggcagcccctctgattcctgacttggccctagataatcatgaggccgcctttagagagaaacccttcagaagccaggcaggtccctgtgggattagcaacactccactgctaacacagcaagtctcaggtcctaagtgctataaaggccctccaaggacagcgccctctaacctgatggccctcggttggccagacccaagcctgggctcccatttcaaatgggcaagtccgtggttttatggggctaacaaatcaaagctgacacagatatactactcatacatggattttagccagga

SEQ ID NO: 728563 - DNA, 586 bp, Homo sapiens
agcatctttggcattgtctgtagggatgtttttcagtttcttctctttttttcctgacagtaattttgtatgagatttaatcttggtatttttttgctcatttaaaaaaatatgaaataattttcttaaactttcaggaggaggtaggatttgggaaagcatttccaatttcacaacctgatcgctctctttttttgttgtatttgtgtggtggttaaaactatcggggcttacttttttttttttttttttttgtttgacagatctcgctctgtcgcccaggctggaatgcagtggcgtgatctcggctcactgcaagctctgcctcccaggttcacgccattctgcctcagcctcctgagtagctgggactacaggtgcccaccaccacgcccggctaattttttgcgcccactaccacgcccgsctaattttttgtatttttagtggaaacggggtttcacctgtgttagccaggatggtctcgatctcctgaccttgtgatccgcccgcctcagcctcccaaagtgctgggattacaggcgtgagccaccacgcccggcaatcgcggcttattttctgagat

SEQ ID NO: 728564 - DNA, 505 bp, Homo sapiens
aagtcctttagtgtttgtcaaaactactgtaaagatactacctgagactaggtaatttataaaggaaagaggtttaattgactcacagttctgcatggctgctgaggcctcaggaaacttacagtcactgtggaaggggaagcasgcatgtcttacatggcggcaggcaagagagaagtaagtgcaaccaggggaaatgccatcatatctcatgagagctcactcactctcatgagaacagctttgaggaaaccacctccatgacccgatcacctcccaccaggttcttcccttaacacctggggatgacaattcaagatgagatttaggtggggacacaaaagcctaaccacatcaatattcatcatggattcaaagatttcttgattaaaattacgagatattaagattaattatgatgattataaaaataataccaaaccttgattatgtaccatgcacgattttagtcattttacactttacatgtattaattgtttaaat

SEQ ID NO: 728565 - DNA, 505 bp, Homo sapiens
aagtcctttagtgtttgtcaaaactactgtaaagatactacctgagactaggtaatttataaaggaaagaggtttaattgactcacagttctgcatggctgctgaggcctcaggaaacttacagtcactgtggaaggggaagcacgcatgtcttacatggcggcaggcaagagagaagtaagtgcaaccaggggaaatgccatcatatctcatgagagctcactcactctcatgagaacagctttgaggaaaccacctccatgasccgatcacctcccaccaggttcttcccttaacacctggggatgacaattcaagatgagatttaggtggggacacaaaagcctaaccacatcaatattcatcatggattcaaagatttcttgattaaaattacgagatattaagattaattatgatgattataaaaataataccaaaccttgattatgtaccatgcacgattttagtcattttacactttacatgtattaattgtttaaat

SEQ ID NO: 728566 - DNA, 641 bp, Homo sapiens
tagtatcttttcttcacaataagagaataatattttaataatgacacacaataattgctaaacaggcttgatgggacagtaagcgtagttccacaaagatgccaagcagcctgcgtggcctggggcattatataaaaatgagctagccattcaagtagaatgtacctctgcaaggctgcaatattacttacattaaagggcccatcatcaaggggacaagggctatttccccaagtctaacgtggattggaaaaataaggaatactcatctgaaaccatattgtgtttgtgtttgggcatcactaaacactctgccgaactttggctgggcatggtggcttacgcctgtaatctcagcactttgggaggacgaagtgggaggatygccagaggccaggagttcaagaccagcctggccaacatgataaaactccatcgctactaaaaatacaaaaattagccaggtgtggtggtgcacacctgtaatcccagctactcgggaggctgaagcatgagaatcacttgaacctgggaggcggaggttgcagtgagctgagattgtctcactgtagttaagcctgggtgacagagcgacactccacctcaaacaacaacaacactatcaaaacactatcaaattt

SEQ ID NO: 728567 - DNA, 592 bp, Homo sapiens
gccaggctgagtatgtcatttgctcatatctacaaaaaaaaaatctctggatgtccctgagacacttaagaaaaaaaaccaagtcttcagtagtgaactcactacataaagggaaggaaataccacactcccagatgaaatatgtttatttgcccaatgtcgtaacgtagtcccatccccttttacgaaaccataatttgctatgctgtaaccctaatattaccaattccccaaatttaagtccctctgaagttctgacagtgagctagattcatgcagatttgcccaagtccctgcgaagaggttgctgaattatgcctttaaataaataccagcgcattttctatgtgcttaacatttattktgagaaataatatttcttaccaatttttcatccaccacctgcataacttttccacttggcacgaatgtatttatcatattcttcagagaattcactataacctttagctgaaaaataaataaaatgcttactaaaagacataatgaaatgctgtcaagattaccttttggcttacccatatgtagctaaaagagagtgctatttgacaatttatatatatatttttta

SEQ ID NO: 728568 - DNA, 676 bp, Homo sapiens
tgtttagcctcatgaaagacacacagaaacacaaggaaggcactgtttctgcctgcctctaatgatttgcagtgtagaaagattaaatcttaagcaactttacaagatatacaaagaataatagaggagatgtcataaggcaacaataactaatggcccaaattacagactaggcagagccggggcatagtaagaagtcagaggagggagtatgctatgcagtaggggtcaggtaagatttaaagaaaagtactgaggcatgaaagacaaggtgtgtagataagcaaggaaggagaattgggggagctagagggaactcattgaaaccccaaaaatcattgaggaccaccagttgcaaggttctggaccaagcctgggtrggcttgatgagtggacttgattctgacatcagggtggtgttgagttaggaaaattagtgctagagttggatttcacacttagatgaagggaaaatgaattttgtcaagggggatgctatttgactagggtctgaggggttgagaaatggtttttgcagtccaaaagtacagatggagcaaatgcaagcaggtatgaagcctatagtggatttgggaaggagaaacaaagactcaaaaatgtactgagcacctgctctgcaccagcattttgttgaggatttttgaatctatgttca

SEQ ID NO: 728569 - DNA, 588 bp, Homo sapiens
accagcattttgttgaggatttttgaatctatgttcattaggaatgtttgcctgaaatttccttttcttgtagtgtccttatttggctttgatactagaataatgctggcctcataaaatgagtttgagttctattgcacaatatggtgacaatttatattaagatatgatatagtacaaaatatctaaaacagaggcttttgaatgttctcaccataaagaaatawtaagtgcatgaggtaatggtaacactaaatacccttatttggtcattatacaacatatatatattaaaacatcaagttatacctcataaatatatgtaattataatgtatcagtttttaaaaatgaggtggctgggaatagtggatttatttctggattctttgttctgctccattagtctgtgtgtctgttcttatgccaataccatgctgctttggttgctatagctttatagtataatttgagacagctaatgtgatgcttctagttatattcttcgatagtgatggattgctttagctattcagggtcttttgtagttctatacacattttagaattttttttctatttctgtgaag

SEQ ID NO: 728570 - DNA, 619 bp, Homo sapiens
gctagatattttagatctttatttttcaccctttctacttttcttacgtatgcttaaaattcatataaatgcatataaattattcctttaagtattgcttcggctatgtccccaaaatttgatatgttacattttgttatactttcaaaatattttctatttttatcatggtttcttctttgatccttggcttagttataagtgtcctyctaaatttacaaatatttagaaagtttaagtcctctttttgttattggtttctagtttaattgcgttgtagtcaaagcacacagtacgtatgatttcaaccctttggaactggttaacacttgcgttacacgtttgggaacatttgtattttaatgtttttgggtgaagttttctacatatgttcatgagagtcaagtttgttagccatgttttaaaaaaaatctattcatactgattttttgtgctttgattttattagctagtagaagataggcattgaaatttcccattatgattataggtttgtctacttcttcccgtagttctttttcatttatcttgatgttttactgtatgattgtacatctagaattttataattccaaatgaattaatgtcattatgaagt

SEQ ID NO: 728571 - DNA, 620 bp, Homo sapiens
gcaccttgggaggctgaggtgggtggatcacctgaggtcaggacttcaagaccagcctggccaacatggcgaaatccccgttactactaacaatgcaaaaattagctgggtggcatgtgcctgtaatcctaggtactcggaaggctgaggtaggagaattgcctgaagccgggaggtggaagttgcagtgagacgagatagtgtgactgcactccagcctgggagacagagcaagactccatctcagaaaaaaaaaaaaaacaaaaaactctctggaaagtgcttttaaaagactgtttgggtcaraaaattctctaatttttctggttatttgatagaaacttaagcctctttgaatgtcctccccattcattaagagaaattaattacagagctactgaacacaacattctaaaaaaaacacaaaaatataaagagaacattaaggtctcaatgaaagcgccatacccttaaaaaatggcataacttgtacagctccttaaaatatttgagcccgaaagaattaggagaccctcaatgaaataatgtatgcttctaatagtgaattttaaaagtccagaaagcccttgtgtgcttgtcttattgaaatactcagaaag

SEQ ID NO: 728572 - DNA, 633 bp, Homo sapiens
actatggcacatgtttacctatgtaacctcattctgcatgtgtatcctggaacttaaagtaaaattaaaaaaagagaaaacataaatggctaattaacaaataaaattgtgtttcacctctaaaaataaaaataaaacataaaaagtcttcaccaaacagttggcatcttttgctcttcttccttctaccagaggagaacacagtaagaaggctgcaccagaggctgtggtcttgatcttggacttaacctccaaaactgagaaaataaatatctgttctttataaatcacccaatctcaggtactgttatagcagcacaaatggactaagacagtgactcccaaatttatgtcactagctcagacctgtcccctgaatttagattcttatatgtagttgcttctcagcctcatctactttggatacctaataggyatcttaatatgtcatgtctaaaaaggaacttatgttttctccgtcccaatatacactgtccctttcccaaatcttccccatctcagtaaatggcaatcccatctttctagtttgcttaggccaaagaatcttacagtcaatttgatttttctctttcttaccacaaactcaatgcaccagcaaatcctattagcttt

SEQ ID NO: 728573 - DNA, 581 bp, Homo sapiens
aagtcatcctaataggttcaaggtgatatctcattgtgattttattttattatattatttttaatttttttttgagatgcagtcttgccgtgtcacccaggctggggtgcagtggcacaatctcagctcactgcaacctctgcctcttgggttcaagcgattctcgtgcctcagcctcctgagtagctgggattacargcacccaccaccacgcctggctaattttttttgtatttttagcagagatgggttttcaccatttttgccaggctggtctccaactcctgaacccaggtgatccacctgcctcgacctcccaaaatgctaagattacaggcatgagccaccgcacctggctcattatgatattaatttgtatttcttgattagtgatgttaggcaccttttcacacacctgttggccatttgtatgacttctttaaatgtctagtcagtacctttggccatttttaatctgattattattattattttttgcagttgggttgcagaagtttcttacatattttagatattaaccctttatccaagataaggtttgtgaaaaagttctcccattg

SEQ ID NO: 728574 - DNA, 581 bp, Homo sapiens
aagtcatcctaataggttcaaggtgatatctcattgtgattttattttattatattatttttaatttttttttgagatgcagtcttgccgtgtcacccaggctggggtgcagtggcacaatctcagctcactgcaacctctgcctcttgggttcaagcgattctcgtgcctcagcctcctgagtagctgggattacaggcacccaccaccacgcctggctaattttttttgtatttttagcagagatgggttttcaccatttttgccaggctggtctccaactcctgaacccaggtgatccacctgcctcgacctcccaaaatgctaagattacaggcrtgagccaccgcacctggctcattatgatattaatttgtatttcttgattagtgatgttaggcaccttttcacacacctgttggccatttgtatgacttctttaaatgtctagtcagtacctttggccatttttaatctgattattattattattttttgcagttgggttgcagaagtttcttacatattttagatattaaccctttatccaagataaggtttgtgaaaaagttctcccattg

SEQ ID NO: 728575 - DNA, 618 bp, Homo sapiens
aagaatcttggaaactacacaaacacatggaaattaaacatctcctgaatgatgaataaatcaatgaagaaattaagaagaaaattgaaaatttatttatataaataaaagtggaaacactacataccaaaatctatgggctatagcaaaaacaatactaagagaggagtttatggcaataaactcctacactgaaaagtagaaagactttaaataaacaactwaacaatgcacccaaagtagctagaaatgcaagctaaaaccaaaccgaaaattagtagaaagaaagacataataaagatcagagcagaaataactgaaattgagacaacaaaatttaaaaatcaagaaaactgaaaagttggctttttaaaaaaataaacaaaatggacaaaccttgaactagactaagaaaaaaaagagagaggactcagataagtaaaatcagaaacaaataaggagatgtaataactgagaccacagaaatacaaagattcattagagattatcatgcttcttttccatctgctggctgagcctggggtttttatgggcacaggattgggggcagggctggccaaggatggttgtggaaaaggtaacatttgagcaggaaac

SEQ ID NO: 728576 - DNA, 618 bp, Homo sapiens
aagaatcttggaaactacacaaacacatggaaattaaacatctcctgaatgatgaataaatcaatgaagaaattaagaagaaaattgaaaatttatttatataaataaaagtggaaacactacataccaaaatctatgggctatagcaaaaacaatactaagagaggagtttatggcaataaactcctacactgaaaagtagaaagactttaaataaacaacttaacaatgcacccaaagtagctagaaatgcaagctaaaaccaaaccgaaaattagtagaaagaaagacataataaagatcagagcagaaataactgaaattgagacaacaaaatttaaaaatcaagaaaactgaaaagttggctttttaaaaaaataaacaaaatggacaaaccttgarctagactaagaaaaaaaagagagaggactcagataagtaaaatcagaaacaaataaggagatgtaataactgagaccacagaaatacaaagattcattagagattatcatgcttcttttccatctgctggctgagcctggggtttttatgggcacaggattgggggcagggctggccaaggatggttgtggaaaaggtaacatttgagcaggaaac

SEQ ID NO: 728577 - DNA, 638 bp, Homo sapiens
tttgtaaacagccacacttcaccactatttagataaaatgtgactaagtcaaccttagtttccagacaaccctggatagtttttactttatcttgtatttggactggcgttgggacctctttagctgagaattcccctcccctctgtgagccattagctgagaagcaccattgtcagaaattctgaggatgacctgtcacccccacagccttgccctttctgacttttcagccacccgcccaccatccccatctggttgaggccttggtcagtgtgggagaacaggaggaatctacttagctgagtcatgacccaggtctagcttatggtataaaaccaattaaagcccctttatctgtggcctgatccatcacatgggggtattgagggaggtgaaattccagcctcatttctcttggcagcttctgtgaaggggtagggttccyggtggtcatggaaaaataaagcacacagaaaagggggctgattgctttcacttcattcctgctgcctcccccagaaatgttctctggccaaaccaaatcccagggctcccagaagacccaatgtacccaaagccaagagcaactcctacctcgctgccgctacttactgtccccaaagggcctatctagagg

SEQ ID NO: 728578 - DNA, 559 bp, Homo sapiens
tatgttaagtgaaataaaccaggcacagaaagacaaacatcgcatgttctcccttatttgtgggatccaaacaacaaaacaattgaactcatgctcatagagaggagaaggatggttaccagaggctgggaaaggtaktgggaaggtggaaagggaggtggggatcggtattgtataaaaaaatactggaaagagtgaataagacctactatttgatagtacaatggatgattatagtcaataataacctaattgtatattttcaaataacataaagagtgtaattggattgtttgtaactcaaaggataaatgcttgaggggacagatacaccattctccatgatgtgtttatttcacatttcatgactgtattaaaacattttatgtaccccataaatatatatacctactacatacccacaaaaattaaacattaaaaaaagatatgtacatttttaagacacaatgctatgcacttaatagtccacagtatagtgtaaaagtaacttttatatttactgggagagcaaaaaaaattgtgtgacttgctttattgg

SEQ ID NO: 728579 - DNA, 559 bp, Homo sapiens
tatgttaagtgaaataaaccaggcacagaaagacaaacatcgcatgttctcccttatttgtgggatccaaacaacaaaacaattgaactcatgctcatagagaggagaaggatggttaccagaggctgggaaaggtattgggaaggtggaaagggaggtggggatcggtawtgtataaaaaaatactggaaagagtgaataagacctactatttgatagtacaatggatgattatagtcaataataacctaattgtatattttcaaataacataaagagtgtaattggattgtttgtaactcaaaggataaatgcttgaggggacagatacaccattctccatgatgtgtttatttcacatttcatgactgtattaaaacattttatgtaccccataaatatatatacctactacatacccacaaaaattaaacattaaaaaaagatatgtacatttttaagacacaatgctatgcacttaatagtccacagtatagtgtaaaagtaacttttatatttactgggagagcaaaaaaaattgtgtgacttgctttattgg

SEQ ID NO: 728580 - DNA, 508 bp, Homo sapiens
ttctcttcagtgaagtgagtgatatggtttggctttgtgtcctcacccaaatctcatctctaattgtaatctccatgtgttgagggagggacctgtaatcctcatgtgttgagggagggaggtgattggatcatgggggcagtttcccccawgctgttcttatgatagtgagtgagttctcgtgagatctggtggttttataagtgtttgacatttcctcctacacacattatctctttcacctgccaccatgtaagatgtgcctgcttctccgtctgtcatggttgtaagtttcctgagacctccccatgtggaactgtgactcaattaaacctctttcctttataaattacccagtctctagtagtacctttatagcggtgtgagaacgaactaatacagtgagggaaatgctattagttgctgtaaggaaaaaatgagataatttatgaaaagcacttagtgctaagcacagagtaaatgctcaataatggtagttcttgggtac

SEQ ID NO: 728581 - DNA, 510 bp, Homo sapiens
tatagggctagaatgccatacactctgcctctgtaacaaggaatggccccatttcttaagggaaaaagaacgaaagtatacattattactctgaaaactctctagctattaggaattgtagctacttactttccaagcccaactgtgactccaaccaatagtgcaccaacattaaccaatgtcagattgaaaacataagaattcagattaaagaaatgaagtaattayaaaatgctttcacggttcctggtatattatatgctctttattcacagttgctaaattatcacagtggttctttgctccctgatatcttgctcaaaacctgagtcttaactcagttatatcaatgtgaaagaatgagatctggttgggaacagaactagaattcagagggcgaagctgataaaatatgcaatgccacatttctaggactttgtgtcctgaacactgaccaccgtaacctgcacagaagggatgagaaatagcagtgaaggggaacatatgatt

SEQ ID NO: 728582 - DNA, 592 bp, Homo sapiens
caaactcaggattccagtgaccctatttccaatcacaattagccacacctagatctccaaaaggataaaacatgttttaaaactatcaatttagaccaatttaagaagcacccatttcttgatccatctccccaactaaagtcatctctgtcaattcaatgagctcagaatccttcaactktatgccttttccaagctaagaagaaactcccctatgatatttttagtactctatatcttagtatggtttagtttatgataatcccatgaaacttcttggatgttagggaagagaaagccacaaatactaaatatttaaggagaaataccaaaatcaaactttacagcttttgcctaggagttactcaacatgtgtgagagccatattcatattatttcttatttacttatcaaatttttctcctatcaaaagtgaaaataactatcctaggcctaagtattgaggtaaaatggttacaaatttctgggaccctacagctaggaaggcagtctgtcttcagtaatttaacacagaaataaagcagaataacatgcttgcatcaatagacatacatgcaacattttcagggag

SEQ ID NO: 728583 - DNA, 615 bp, Homo sapiens
tagctacaattcctaatagctagagagttttcagagtaataatgtatactttcgttctttttcccttaagaaatggggccattccttgttacagaggcagagtgtatggcattctagccctataggatggttgataaaaaatgtttttttgaacatatatgtatttgtgtgcaccctaacaatttgaaataatttttgtaratttaggcttttcaaacatgtagcatatgcatttttggaattaatactgtctaccctggttgtgcctccaccagttcattcattcatacatttattaactaaatacatatttagcagtgttgttgagcacacttctgagtattatgaatattatgtgaacaaaacaaagttgtttcatgaagtttatatcctagtgaaagaaacgagcaataacgacaagaaaactcacttatataaggtcagatggtgataattcttatctgggaaaataaagcagagaagaagaaagggagaaacagacacatacatcagagaaagcttttcttgaggtggtgatgtttgagcagaaacctgaatgaagtgagagtagccggccatgtttctctatgggagaagagagttctaggctgagga

SEQ ID NO: 728584 - DNA, 628 bp, Homo sapiens
agactttaagaaacttttggggatgttataaatatctatcttgattgtggtcataatttcataattgtatacatatgtcaaaacttataaaatattacattttaaatatatgcagcaattatacctcaataaaattgttaaaatatatcaatatatttaactaaatacaaacatcaataaataaatatgatagatgtccaagactccaaaatataaataacaaaacacatttgagagaaattaacttgaatctaaataaagtggaaaggtatactaggttcataaattggaagacttaatagtgttcagatgtgaatttctcccttaggtaatctatagattcaatacraaccataaaatgtctgtgtgtgtgtgtgtgtgtgtgtatacacacacacatagatatatatggggggtataaattgacaagctatttttaaaatgtctgtgataatgttaagatgtagaacaaccacaaacagtttgaatatcaaagttgccgtacctgatttcataatttactggaaagctgcagtaattatgacaatgtggtagtgacacaaagggagataatggacactttgaatagaaaagtctagaaacagactttcttatagggtcattggaa

SEQ ID NO: 728585 - DNA, 628 bp, Homo sapiens
agactttaagaaacttttggggatgttataaatatctatcttgattgtggtcataatttcataattgtatacatatgtcaaaacttataaaatattacattttaaatatatgcagcaattatacctcaataaaattgttaaaatatatcaatatatttaactaaatacaaacatcaataaataaatatgatagatgtccaagactccaaaatataaataacaaaacacatttgagagaaattaacttgaatctaaataaagtggaaaggtatactaggttcataaattggaagacttaatagtgttcagatgtgaatttctcccttaggtaatctatagattcaatacaaaccataaaatgtctgtgtgtgtgtgtgtgtgtgtgtatacacacacacatagatatatatggggggtataaattgacaagctatttttaaaatgtctgtgataatgttaagatgtagaacaaccacaaacagtttgaatatsaaagttgccgtacctgatttcataatttactggaaagctgcagtaattatgacaatgtggtagtgacacaaagggagataatggacactttgaatagaaaagtctagaaacagactttcttatagggtcattggaa

SEQ ID NO: 728586 - DNA, 624 bp, Homo sapiens
ataaatgccttattcacagaaaacaaatcattaatcaattggacttaaatttggattaataattttaatgttattaaaattaagcattttgtttgttaaaagacagtattaaatgagtgataagatcaactacatgctagtataatatatttacaaacatccaaccatagacttatgaacagactttataagagacttctacgaatcaatacaaaggtaatacaacaacggaaaaaaaaatacttcatgaaagaacaaaatatacatatgaaaagtacacaaattcactatcagagaaatgcaaataaaaccacaataagatacctctacacaaccaagacgttgkcaaaaagaaaagatcagaacttaccaaagttggtgtgggacagggtttcttaactttagtactcttgaaatttttggttacataattattgtgcggagctgtcctgtgcattataggatgtttagtagcatctttgacctctactcactagatgcaacagcagcccctgccccctccccctgcccaagtaatgacaacaaaaaatgcttccagatattgccaaattcccctggaagcagcaagattttcctcacttcctctgactgagaaccatatgc

SEQ ID NO: 728587 - DNA, 649 bp, Homo sapiens
atatgccccttttcagtatatgtgtcttacacctttaacttttctgcttatgtatttcactctttcgaatgctgttgtaaatggaatttcaaggaatatatctggccctacccaggaaagaaaggggagagaaacatttttggttttaataagtcttccaagccttgactgagatttacctctgcatgtgcgcgcaggatctgatgatattttccatcttgtaaggcttttcaggggcaactctactggtagcaggaagatgctcatggtttagatgayacatggttcttagtgcattgtatcagaggatgcaatgtaaatatatacacaatgtcaatatttataattggttatgtaattttgattatttaactaaggttgtgactgatggaattttctactacaaacttactagagtcatgtaatatatgggtagattttttaacattgtgcaaatatctcattacctttctctcacctagtttagtattctttgatggctcttgcctggagcaatttttgctgtggtgtttctaatagtgatttttttatttccctcattgtttctgcatttttaattggaactattttgtaaggaattgtgtatattttacgtctatctgaaatctgaaaaactggttgtaattta

SEQ ID NO: 728588 - DNA, 602 bp, Homo sapiens
cctaaatcctactcatttttgtcccccaacaccttgcttagtgcctagtgcatagtagacttcaataaatctatatatatatttttctttgaggcagggtctgactctgttgtccaggtggtgtgcagtggctcgattactgctccctgtagcatcaaccttccaggctcaagccatcctcccccgtcagtctcctgagtatctgggactacaggtgtgtgccaccatgccccactaatttttgtaattttttttttttttttttttttttgagacagagtctcgctctgtagcccaggctggagtgcartggcgtgatctcagctcactgcaagctctgcctccggggttcacgccattctcctgcctcagcctcccgagtagctgggactacaggtgcccgccaccacgcccggctaattttttgtatgtttagtagagatggggtttcaccatgttagccaaaatggtctccatctcctgacctcgtgatccacccacctcggcctcccaaagcactgggattacaggcgtgaaccactgcacccggccataacttttttttttttttttaaatagagacaggatttcgtttggccaga

SEQ ID NO: 728589 - DNA, 602 bp, Homo sapiens
cctaaatcctactcatttttgtcccccaacaccttgcttagtgcctagtgcatagtagacttcaataaatctatatatatatttttctttgaggcagggtctgactctgttgtccaggtggtgtgcagtggctcgattactgctccctgtagcatcaaccttccaggctcaagccatcctcccccgtcagtctcctgagtatctgggactacaggtgtgtgccaccatgccccactaatttttgtaattttttttttttttttttttttttgagacagagtctcgctctgtagcccaggctggagtgcagtggygtgatctcagctcactgcaagctctgcctccggggttcacgccattctcctgcctcagcctcccgagtagctgggactacaggtgcccgccaccacgcccggctaattttttgtatgtttagtagagatggggtttcaccatgttagccaaaatggtctccatctcctgacctcgtgatccacccacctcggcctcccaaagcactgggattacaggcgtgaaccactgcacccggccataacttttttttttttttttaaatagagacaggatttcgtttggccaga

SEQ ID NO: 728590 - DNA, 602 bp, Homo sapiens
cctaaatcctactcatttttgtcccccaacaccttgcttagtgcctagtgcatagtagacttcaataaatctatatatatatttttctttgaggcagggtctgactctgttgtccaggtggtgtgcagtggctcgattactgctccctgtagcatcaaccttccaggctcaagccatcctcccccgtcagtctcctgagtatctgggactacaggtgtgtgccaccatgccccactaatttttgtaattttttttttttttttttttttttgagacagagtctcgctctgtagcccaggctggagtgcagtggcgtgatctcagctcactgcaagctctgcctccrgggttcacgccattctcctgcctcagcctcccgagtagctgggactacaggtgcccgccaccacgcccggctaattttttgtatgtttagtagagatggggtttcaccatgttagccaaaatggtctccatctcctgacctcgtgatccacccacctcggcctcccaaagcactgggattacaggcgtgaaccactgcacccggccataacttttttttttttttttaaatagagacaggatttcgtttggccaga

SEQ ID NO: 728591 - DNA, 608 bp, Homo sapiens
ccagaatttgaatggaatttgagttcagtaatttttcaactgcattttgtctatattcttaactatataattttacttttttagcattttttattccataaaatttttgtcaatctgagaaacttatagaaaatagtaccacagttaggtggctgagaggcaaataaaaatgataatcaattaaaaatagaagtttaagctagtaacttaagctgtatrcagataattggcacattaacacagcagtttcttgaagagtctcacttcttcattctctggaaggtctgggctcagtgtaaaattttagaacagttaccatctctaaacggccatatatatacaacaaatacctaacatttgagtgaaataagaattctgacaaacagcccagttcaagatttgatattgtttggctctgtgttctcacccaaatctcatgttgaattgtaatccccaatattggaggtggagcctagtgaaaggtgattggatcatggtggtggtttctaatggtttagcaccatccccctagtgctgtctcatgatatctggttgtttcaaagtgtgtaacacctcccccttcactttttttcctcctgccatgtaag

SEQ ID NO: 728592 - DNA, 480 bp, Homo sapiens
aagatatccagcacacctatattttgaatgctgtgagttacaactgaatcaatttagctcagcatatagcatgttcaacattatttaatacaacttttacttgcatatttgcagagtcagaggactcaaagaattcccagacagcccatgtcaatgtggtatagttcaaattactgaagtctgccaactacgttttctattatttaatctcagacaataggtctgatttctcttccatgtcataacttgaaatatgtgcaaatagctccagcaggctctytggaacagcagacactctgatcttcagctaaaaacctcaagttctttcaagatcaggtaggatattgaaccagtactttaaagattcacccatatctcagatctgtaattcagtggaagtgcaaaccacttttcccaaaagatttataactataagtttcattgatgttgcattaagaattaacataaagagaaaaaaga

SEQ ID NO: 728593 - DNA, 600 bp, Homo sapiens
ggatcttagtactcatttgtgttgtcaagtttctgggtgttctcattttattcctaatacagtatgccattaaaatgcatgtctacatttattggcaatgaatgtgacccacatgaatattaaagggaaataaattcccagtggagagcaaggctggttatattctttcttttgtttcccccrctttcttcttttatttcagggatagccaagtgctcagagtagacattttgtttcattaatccctttcttttttgaatattgacacagctgagactcagcgagagaatggtgtttgcacccaacccagaatggaccaaagtgctagatttcctttgcaaagaaactcgtctttgcagtaaatgtttgtctcttttttttgttgctgattgcacttgtgagattatcaggctctgggtgtgaatgcagcttaatggcctcaacctttgtgtctttgctgactgagcactgctcttggctgttcaaggcataggtggagggaggaataattccccagctaattcagagatccctttgttttccctgtaattagtgtagaacccacttcttggccacacatttgtagaccatgctactggt

SEQ ID NO: 728594 - DNA, 600 bp, Homo sapiens
ggatcttagtactcatttgtgttgtcaagtttctgggtgttctcattttattcctaatacagtatgccattaaaatgcatgtctacatttattggcaatgaatgtgacccacatgaatattaaagggaaataaattcccagtggagagcaaggctggttatattctttcttttgtttcccccgctttcttcttttatttcagggatagccaagtgctcagagtagacattttgtttcattaatccctttcttttttgaatattgacacagctgagactcagcgagagaatggtgtttgcacccaacccagaatggaccaaagtgctagatttcctttgcaaagaaactcgtctttgcagtaaatgtttgtctcttttttttgttgctgattgcacttgtgagatyatcaggctctgggtgtgaatgcagcttaatggcctcaacctttgtgtctttgctgactgagcactgctcttggctgttcaaggcataggtggagggaggaataattccccagctaattcagagatccctttgttttccctgtaattagtgtagaacccacttcttggccacacatttgtagaccatgctactggt

SEQ ID NO: 728595 - DNA, 611 bp, Homo sapiens
aaagatggccacaatggaaattggagactactaaagtgaggagagacaggaggcaagagctggaaaactacccactgggtactattcattcataccccaaacctcagcatcacacaatataccgaggtaaaaaacctgcacatgtacatgtacccccctgaatctaaagtaaaatttgtaaaaaaaaaaaaaaaaaaggaatttgtaatcaatttcagtcataaaagtaaatccaacatactaaatttttaaaaagtgtcagtttyttcaaagcaagcaaatagaatatttaagttactttggaggaaatgtgtaataaaaccacatcagtacaacttcagtaggaagatagtgacatctatctgtgttctggtctctctctaggtgtaattagctcatatatttcagatgagaactaacctgatctcagttttctcagtaggcttttttttttttttttttgcaaagttgagattatatctattcgccttttttttttttttttttgcaaatttgaggttatatctgttctacctatcttaaagatatctatgagaaccgtgtggcataaatgcactcaaagtatgtataaattgtatggaagcaagatg

SEQ ID NO: 728596 - DNA, 611 bp, Homo sapiens
aaagatggccacaatggaaattggagactactaaagtgaggagagacaggaggcaagagctggaaaactacccactgggtactattcattcataccccaaacctcagcatcacacaatataccgaggtaaaaaacctgcacatgtacatgtacccccctgaatctaaagtaaaatttgtaaaaaaaaaaaaaaaaaaggaatttgtaatcaatttcagtcataaaagtaaatccaacatactaaatttttaaaaagtgtcagttttttcaaagcaagcaaatagaatatttaagttactytggaggaaatgtgtaataaaaccacatcagtacaacttcagtaggaagatagtgacatctatctgtgttctggtctctctctaggtgtaattagctcatatatttcagatgagaactaacctgatctcagttttctcagtaggcttttttttttttttttttgcaaagttgagattatatctattcgccttttttttttttttttttgcaaatttgaggttatatctgttctacctatcttaaagatatctatgagaaccgtgtggcataaatgcactcaaagtatgtataaattgtatggaagcaagatg

SEQ ID NO: 728597 - DNA, 611 bp, Homo sapiens
aaagatggccacaatggaaattggagactactaaagtgaggagagacaggaggcaagagctggaaaactacccactgggtactattcattcataccccaaacctcagcatcacacaatataccgaggtaaaaaacctgcacatgtacatgtacccccctgaatctaaagtaaaatttgtaaaaaaaaaaaaaaaaaaggaatttgtaatcaatttcagtcataaaagtaaatccaacatactaaatttttaaaaagtgtcagttttttcaaagcaagcaaatagaatatttaagttactttggaggaaatgtgtaataaaaccacatcagtacaacttcagtaggaagatagtgacatctatctgtgttctggtctctctctaggtgtaattagctcatatatytcagatgagaactaacctgatctcagttttctcagtaggcttttttttttttttttttgcaaagttgagattatatctattcgccttttttttttttttttttgcaaatttgaggttatatctgttctacctatcttaaagatatctatgagaaccgtgtggcataaatgcactcaaagtatgtataaattgtatggaagcaagatg

SEQ ID NO: 728598 - DNA, 617 bp, Homo sapiens
aaaataaaaaattcctgtgtttggctcaggagcttccttctctcctggcagtatgcatcagactaaatgtcacaagaatatttcagcatatgtgggtaaatatttacactcattttaagcagatattccaaattccttgttgtttttcagcagaggcctaaacctggtggtaaaagtcatgaatagaactttttcattctcactaagtgagaaggggattttcaagcattctttcctccagggtgctctatttttctcctcccattctttttgggttgaactattggaagggagaactggccctctgccatggatctctttaccatgccactttgaattattgctccgtggtccctgggagccactagaagattyagctgcaagctcaggaaaaaaattatatatatatatgcaaaatatatacatatatatatgcaaaatacagtgttttggccttggattacaaaatgtggacaatgactaagcttctgactctatgagtaatgagaaataatggctggagcaaattaaagattgtacttgttctaatgtggagagcagaaaggcgtatgtatcaatgggagaacattgctgggatgacaggttgatactacaca

SEQ ID NO: 728599 - DNA, 648 bp, Homo sapiens
acaaaagcgctaccatctcaagtaaatattggattaaaaacgtgctgactattcaaaccttaaaattctccacattttatccctaggttaagccagatcagcagagagtggtatccattggccatattctttgaggtccctaaagaattgtctttatggaattatgatttagcactaatctttcagtgttcatccagactaatgctatatacaacaaagaaatatttgcaaaatatcttttgcactctggacatcttccaatgtattcctcagtatcctttgtgacaagttcatctcagaagtggaatccagggtaacatgtgtatctatctatactttcttctgctagatgccaaaagatagatacccattakgtttctctccttgcctagggttacaggaagctcaatgctaattttggcactcaattgttacaaccttactcaaccaagatttttaaaaatatgcttttatctttcctttactaacttccttgcttcttttctagctcttaatatgtggcttttctcacctactgattaaaggatttgtggcaaaaagacaataaagaatgtggtagtagaagcagcattcattttgtttttgttttttcccttttgttgtttttcattttatttcaaaatgatt

SEQ ID NO: 728600 - DNA, 662 bp, Homo sapiens
ccctgactttgtgccctgacttcccagattcctgaactgtgagcaataaacttatgatgtttttacgtttcccagtctatggtattttgttatagcaacccaaatggactaaggcagaaatcttaaattgattttcaattactcactatattacaactcaaagataatattctttcatgttttgttgaaagtcattccagaatttttgaaatacatgcatttttttcttgtaagaatgtaattatatcattgttgagatttattgttaaatttgaattggtaatagctctttgtkatttgtgttttaagcatgttgatgttaggtcttttcattagcaataaagttaaaattgatataatcataaatatcacgccttttccttatgatttctaccatcgatgtcatatataaaaatgttttggaatttcaagatgtaaaaatattaatctctattttcttgtggtttcattcattccaatgtttttttttccctttttttctgcctccgtcccttccttcctccttttttcttactttttcagtcaaatcttaaatccaagtgaaattttattatactctgaaattaggcaaggatctacctttgtttcattttttctaatagtttatcaaattcagttttatataattgggggaatttact

SEQ ID NO: 728601 - DNA, 584 bp, Homo sapiens
tcaaaacatgatagcttgtgactcttgctcatagaaacccatatgtctgagagacatgtttttccaaatatgggtacaactttttttcttctgttactgatgagcctcactgttcatcccaaaagaccaaaggctgtgggtggcctttctttaactcaggtttctaggaaaaggagccaggaggggtgtttgcatccccacctatgataaatgaaacctgcaattgagaatcaacttttaatcatttaaaatgtattaaagacttactatgtctaggtatttgtagagatgagaataaaatggcatagtctctgacctaatggaggtacaagcacataaacatataattgcatacytctgtgagaaggactgtgataaagggaggcaaaaattataatgaaacgtccaagatgagagtctaaacaggcctgatagcttctctgagaaatgaggaagaaagagcaagtgggagctcccttgagaaatatctaaaccaaataaggcctgtgggaggcacactgaacatttacttactgtttccaagtaaaacctatcaaataaatactattacttttattcccatt

SEQ ID NO: 728602 - DNA, 612 bp, Homo sapiens
caacacctactcacttcacttcctggaaccagccttttacagggtcacgcactatctactagctatcggggaagtttactaattaccagctcagtgcgtgaacagggtcataacatttttgaaggagccatctctgaagttatttcctgtgcttattttcgcatgttaaagatttcttagaaaagtgaatgttggctgcaagttttcagaatttcttccaacttgcatcaactccaaagggattttgcaagttcctccagccatgcaggttctcagatttggaaatctagcattatcaagcaaccactcctcaaattctactatgagccagatattacatgccaggaagtgttcatgaaagggacatgaactagaattctgccctcaagtcatttgtattccagtaaacatgacttcccactgccttcaggctaaagcccagactctaagcaaggscccggaggcctttggcaagctgcttctgctccactttcatacttcctcctcctctgatcaaataacagctcttcttccttggacatttcttttttttattttttaaattagtttttaaaatttctgtgggtatatagtaggtgtatatatttacag

SEQ ID NO: 728603 - DNA, 612 bp, Homo sapiens
gtatatacatgtaatttatataccacacaattcacccattgaggtgtaaaattaagtgctgtttgacgtattcatagagttgttcagttagcatctcaatcaattttagaacatttccatcactctgaaaagaaatgctgtgtctattaatagtcactgcttatttcttcctaacgcccttgccctagacaatcastaatttactgtctctgcagattggcctattctggatgtttcatataaattaaataatacagtatgtggtcttttgggatgggcttcttcatttagcataatgttttcaaggttcatacacgttatcgtatatatcactactttattcttttttatgactgcataatattccattgtgtggatataccacattttatttattcatttattagttgatagacatatgggtgtttctacttttatggctactatgaacaatagtgctttgaataaccttgttttattttcatttttcttccatatataatcaggaagaaaattgtagggtcatacagaaactttaacttcttcaggagcttctagactatattccaaagtcagtgaaatatttttgtattccttccagcaatgaatgta

SEQ ID NO: 728604 - DNA, 654 bp, Homo sapiens
aacttatgcatgacagtgaccagacagtctgagaaaggtgttgagataatttggcaggttgaagcctgatgggttgggtaaggctgctatccggagaaccacttctatacttagagcctgttgaacttcaagacctagcttaccatcctgaactgtgttcagaagtgatacagaatgactcaagtgctgatgagratcagggaagaactgaatgggaaggattcttagtaggcacataatccaggagtcttaacaggattatcaatggaatcaggaaggaaattaccaagtctgtaaaataagatgtgaaattgtgtataaacacggggtaatattcagagtcatttaataatgtataggaaattgggtaatgtttagagtcatttaatactgtgcagttcatagaaaaccaacaaatcagaaaggactttgattctatagaacagaaaggacagtggtcccagagaacagctatactagggcttatctgttgcccataagaccaggaaccaggtcagtttccatttccaatgttctaacaggttctcaaagagaaaaataaaagatctgtctaaagcaacacaggaatttagtggcagaagtgagaccagagcctggactcttgagtcccactagagctcttcaatcagtgta

SEQ ID NO: 728605 - DNA, 595 bp, Homo sapiens
gatttctttgacgttttaatggaggtaactccccttcattaggccccattcccctgaaagccggcaagggcaaggttgttgtaatggccaggacttagaagtcctcgaagtgccccaaagttgctcactgattgaagcctgcctctgggactcaccctcaccccctccacgccatcccatgtcctatcttttaaagcccattgcctgtcactcggggctgggacgagaccttcctaacgcataccccgccagcgttccccagacgcggctgcgaaacggggcgcttttctcatatgggactttatgagcccgtaatgaatttgagttctccctcctcaacctccctctctctccccttcgctgttccacagcaaagcctatagtgaaatcggacactttgcgaggattgcaaaccttasaaatgctccagcatccattttcccccctctaaatgaatctgtggaaatgcctttaataaaactggggagcggaggtgggggcggcgctggaacagaggaggaaagttttgccttttctgtctgggagattccctttctgcacaaacaatcttgccatgtcctgggacgtcttaaag

SEQ ID NO: 728606 - DNA, 595 bp, Homo sapiens
cctgccccttccctaagctggattctcaaagccatgtatatagctgtccagcacctgcccaaatgtatttaatgtttgtttgataagaagaaaccagtatatgctgcaggattcccagtagcaagtttattttaagattggaagagccctgtactcctctgttctggggcccagctgcaggctccctgaccaggtggacacctytgggaagtggtgtttttggaaattaagccaaaacagtgcattgccctgtccctagggcagttgaataaaactgttggagggagaaatgcaagcgttctccctcagaaccaggtcttaggtcacaccctggaaaagagagattaggatcaaaggtccttagatctaaagacacctgagagattgtgttccaagctcccttagcctcagactcaactcccatttatcaaccacctgcaggattttatatccatacaatgtctcatttatgcttgaaaagaagttctcatattgatcagaagcatggccttgaagtcaggactgcctgggttcaaatcccagatgtatccctagctttgtgattttgaaataattatttaccctctgtcagctt

SEQ ID NO: 728607 - DNA, 640 bp, Homo sapiens
actctgtctcttaatttttttttaaggtgtctagttgggcaacttgaggtccttcatcttaccatccggtctgtctctctcatgaggctcccttaaacaaattagagccaatcactacattgagtcctggttattttcctcagtagtgcaaggaagagctctctgggagtctagatgtgatctcagcagagaaaaattcagaagtcgctgcaggctgagatcagtggggatgaggcatcatctccctagggaaagaggagaaraaaccctccttccttctccccgctcctcacccaaccctccccttcctgagtgagacagaacagagtgcggagaagctcagtggtatggaatgactgcatgtagagaaggggaggaggagagataagagggctccaaggctgccttccagctctgttgttcatggttctagacagtttcctcccaggtcctcagtctgcagggtggatgctatttatgctcacctattctttgctggtcggggggtggggttaggatttctgtcagtccaagtaggttttaccaatggcagtaataccacaaggattctaatttattctactgtcccctgcatccaatagggagaacagcaaagaatacagattccaaaatgaaacaa

SEQ ID NO: 728608 - DNA, 610 bp, Homo sapiens
taaatttattcatttgtttgtttctacatttattcactcgtgcatttaataggagtgcctactgcatgtcaatctttgtactgggagtgtaactctgaatcttataatctggtaggagagctgaataatagtacacacaaaattataattacaaactgaagagtattatttcaagaggttataatagagtatacatcccccttaaattaagagagagtctgtagaagatgagtaaagagataagaaggagccagactattataaaaagataaaaaataacagatgttggtaagggtgtggagaaaagggaacccttatacacttytgatgaaaatgtaaattagtacaacctctatggaaaagagcatggagatttttcaaagaactacaaatagaactactgtttgatccagcaatcccactcctgggtatctacccaaaagaagataaatcattagaaagatacctgcacccatatgtttatcacagcactgttcacaattgcaaagatatggaatcaacctaagcatccatcaatggatgatgggataaagaaaacgacgtatatgtacacaatggaatgttactcagccattaaaaggagtggaat

SEQ ID NO: 728609 - DNA, 584 bp, Homo sapiens
atgttggtaaggctggtctcgaactcctaatctcaagtgatccacccacttccgcaactcaaagtgctgggattacaggcctgagctactgtgcccggtcccatctacatttctttaccctttgcttctttttagaagatttcttcaactttaaattttttatttaataatgtgttcttttaccatggagaaaatatcgtctcttatgtttatgaaaatattaattgcagtggattttattrtttggctctttgcattctctaaatttcctcttcttcttcttcttcttttttttttttttttttttttgacagggtctctctgttgtggtccagggcaatggcttaatcacagctcaatgaagcctcgacctcccggactcaagtgatcctcccatctcagcctcctgagcagctgagactacaggtgcacgccaccgcgcccggctaatttttgtactttttgtagacacagaatctcgccattttgctcaggctgttcttgaactcttgggctcaagcgatccgcccagcttggcttgcgaaggcactgagattacaggcgtgagccaccgcgcctggctt

SEQ ID NO: 728610 - DNA, 526 bp, Homo sapiens
tatgaggataattcccatgggtgtcaggagcctggtgggtttcactgctgtgactgaagtagttcacagaaggtgagtgtcaccatgtttagtggtttcatcttctgtggtccctgggtctgcagtgacggagtcctcggtggtccctgggtctgcagtgatggagtgtttggtggtccctgggtctgcagtgacagagtcctcagtggtccctgggtctacagtgatggagtgtttggtggtccctgggtctgcagtgacggagtcctcwgtggtccttgggtctgcagtgatggagtccttggtggtccctgggtctgcagtgacaaagttctcagtgagtggtccctgggtctgcagtgacagaatccttggtggtccctgggtctgcagacacatagtccttggtggtcgctgggtctgcagtgacagagccctcggtggtccctgggtccacagtcacattgtcctcagtggtccctgggtctgcagtgacagagtcctcggtggtccctgggtctgcagt

SEQ ID NO: 728611 - DNA, 653 bp, Homo sapiens
attgcctgttcttaacagccaaagtgatcttgttaaaaaggaaaaaatcaagatcacagccaaaatgatctttttcttttttctttgatggagtctcgttctgttatccaggctggagtgcagtagtgcgatctcagctcactgcaacctctgcctcccaggttcaagcgattcttctatctcagcctcccaagtagctggggctacaggtgcccgccaccacacccggctaatttttgtatttttagtagagatggggtttcaccatatggccaggctggtctcgaactcctgaccttgtgatccacctgcctgggcctcccaaaatgctgggattacaggaatgagataccacacctggcgctatttttttttttttttttttttaagaaggagtcttgctctgtcgcccaggcaggagtgcagtggtacaatttcagcrgctcactgcaacctccgcctcccggttctagtgattctcctgcctcagactcccaaacagctgggattacaggcacctgccatcacacccagctaattttggtattttcagtagagacctcaggtgatccacctacctcggcctcccaaagtgctgggattacaggtgtgagtcgccacccctggcctgatcttattttttacttaaaata

SEQ ID NO: 728612 - DNA, 633 bp, Homo sapiens
gttgccatgtgagggactgaagttaaacccagagaaggactgctccagtttcctgagtgagcccaaaaaaagtaaaagggcgaggaggttggaaacgcagagacgaaatgacctctggacagtaaaacccaccatttgcgccagtttgggatgattatgggttccttcctcttcctcccttcaggccggctggggactgggtaggcggatgggaccaggcgtctctaggcttttcctgcctcctcgctccggtagggagagggcggtgttgcaggaggcgtggggagtcgcccgccagcccacgctgctgcccgkcgcgtggctgcgcagcgggagggcgggcccaggtgtcggggcgggagtgagccaacgcccggagcacggattccaggggcgctcagtcagccctggccaggctcccccatccagttcccccagtcgcccgcgaggcgccgccgattacataaacagccttcaccttcctgcggaggggacaacaaagggctggggacacacaggccgagacccgaaagtaacgcccctccggacttttattcagaatcagccgggactgcccaaatccctatttacagttctcacagccctcgtcatggtcatggacttcgcgccttt

SEQ ID NO: 728613 - DNA, 525 bp, Homo sapiens
actcacaaactggggaatggagggatcaggctgacaatacctgaatcttccatcaaatctaccatcactaatagtgggatgagatcatatacctctaaatgtgataccataggtacacagcactgcttttgaagtattctccttaaaaaattgaacccagccgggagyggtggcttacgcctgcaatcccagcactttgggaggccgaaacgggcgagtcacctgaggtcaggagtttgagaccagcctggtccaacattgtgaaaccccgtttctactaaaaatacaaaaattagcctggcatagcggcgggcacctgtaatcttagctactcaggagactgaggcaggagaatcacttgaacccaggaggcagaggttgcagtgacccgagatcgtgccactgcactccagcctggatgacagcgagactccatctcaaaaacaaacaaacaaaaaccccaaatctgataaagccttttaagtaaataaaaataaaagctaaggaatgattatcacagaaatg

SEQ ID NO: 728614 - DNA, 525 bp, Homo sapiens
actcacaaactggggaatggagggatcaggctgacaatacctgaatcttccatcaaatctaccatcactaatagtgggatgagatcatatacctctaaatgtgataccataggtacacagcactgcttttgaagtattctccttaaaaaattgaacccagccgggagcggtggcttacgcctgcaatcccagcactttgggaggccgaaacrggcgagtcacctgaggtcaggagtttgagaccagcctggtccaacattgtgaaaccccgtttctactaaaaatacaaaaattagcctggcatagcggcgggcacctgtaatcttagctactcaggagactgaggcaggagaatcacttgaacccaggaggcagaggttgcagtgacccgagatcgtgccactgcactccagcctggatgacagcgagactccatctcaaaaacaaacaaacaaaaaccccaaatctgataaagccttttaagtaaataaaaataaaagctaaggaatgattatcacagaaatg

SEQ ID NO: 728615 - DNA, 583 bp, Homo sapiens
ggccccctgaaatctcactcagtgctgttgctccatctactgccctaatggggctcttttcccacctcctgctggtttcccgagggaacttctgaccctggagtccatgagggctcctttcctttttgaccacgaccttggcccyagctctgcactctctggaataagggcccgatgcagcattttcttgcccagtgtggcaagacctcagaaaaaccagtcaattacgcctaagatcattttgctgtccttaaaccccccaggttccttcttgcacaaatccactctgctgcccaccttccctggcattttaaacagacctaccccaccccaactcagagttaagcatacatggcaatgctgaaaataaacaaaatccactgaggcttcccaggccatttaaagcctggagtaccagcgcatatcatctcatggggtccagagtggagtccaggcttctctgaaaccagggctgagcatatttccatagccaaggaggtgggactccctggagctatctgtggtcttagggaaggatccagacatacacggctttggggtacaagctgtgatcactgatcaa

SEQ ID NO: 728616 - DNA, 633 bp, Homo sapiens; identical to SEQ ID NO: 728612

SEQ ID NO: 728617 - DNA, 525 bp, Homo sapiens; identical to SEQ ID NO: 728613

SEQ ID NO: 728618 - DNA, 525 bp, Homo sapiens; identical to SEQ ID NO: 728614

SEQ ID NO: 728619 - DNA, 583 bp, Homo sapiens; identical to SEQ ID NO: 728615

SEQ ID NO: 728620 - DNA, 506 bp, Homo sapiens
aagctttcttttttttttttttagctgtcttattttgctttccattcatatttgctattccatcactggttgttcctttctactcttttcttgtttcatttattttgatcagtgatgtgtatttccatttctgtgaaagtttaattcagttgtatgtgtggtaaaatgtaacaccaaatcctttgcaagaaggaattaccttgcacatcagattgaacattgtatacttgaaaatccagagagatgccagtgagctaaggatcaaatgamctattattaaccaaggccattttcatcacatcctggtcctctctgtcacatggctgcttacatttctctgtggttttctttcaatgtaagtagttcttgttaaggatccttgcaatgaactttggtattcttttcctttcatttttataaataccaggtatattttaatttgaaaactctgtttaacaaattacaatcatgtaactaaaaagatgcccaacactggtgtaaaacac

SEQ ID NO: 728621 - DNA, 526 bp, Homo sapiens
tttctgaggctctggtggaaggtgtttcctttggactgtcttgtggagcatggtactggtgggccttcaccatgcccacttccctcagccttgttattccatcctgtgcaagttccagggcaactaagtcacgtctaccttgttgagagttaggcatcattttttctagtctatatggattcaccccagcggtgggtttggccccccscttatcaaagtcctggggtgtttgataaacccatgccttgagaaagtgcctccaagccaaaggatttttattcttccagattgaaattctggttccttgatcaaacaccctcaaattccaatcccagaagtgctcctcagcctcctatggggacgtgccagctagttcctgcaaagctcttcagtgggattcctgctgtatcatgggggtgagacttctgtagcatcttccagcataggaagtgggaaccattactagagaagggtgagcctcctatgcatgcccagaggatcctggagggcacccatcggataaccc

SEQ ID NO: 728622 - DNA, 620 bp, Homo sapiens
gcagatgcacttctacagactattccttggggccacacgtaggttcttgaatcccgaatggaaaggggagattgataactggtgtgtttatgttcttacaagtcttctgccttttaaaatccagtcccaggacatcaaagctctgcagaaagaactcgagcaatttgccaagctcctgaagcagaagaggatcaccctgggatatacacaggccgatgtggggctcaccctgggggttctatttggtgggttcccctctgcagattctgaccgcatctcccctctaaggagtatccctgaacctagtggggaggggcaggggcagactctaccctcacccatgaagaggagtagggagagggagaagatgcttgggctttgagctccctctgggaagaggtggtaagcttggatctcagggtcacaagggccctgcgtgctccctcaytttgcttctcttttgactggcctcccccagggaaggtattcagccaaacgaccatctgccgctttgaggctctgcagcttagcttcaagaacatgtgtaagctgcggcccttgctgcagaagtgggtggaggaagctgacaacaatgaaaatcttcaggaggtaagggtggg

SEQ ID NO: 728623 - DNA, 536 bp, Homo sapiens
ttgctctgtcacccaggcggagtgtggtggggtggtctcggctcactacaacctctgcctcctgggttcaagcgattctcctgcctcagcctcccaagtagctgggactgcaggcctgcatcaccatatccagctatatatatatatatatatatatttttttttttttttttcttttttkgtattttttgtagagatgaggtttcaccatgtggccctggctggtctcaaactcctgagctcaagtgatctgcctgccatgacctcctgaagtgctaggtctataggcatgagccaccatacccggcctcatgttaaatttttaatgtttgtagcacattagtattagaaatgtgttggcacacttgaaaggatttttaaataacagctttattttattttcttttacttttgagatggagtctctctctgtcattcaggctggagtgcagtggtgtgatcatggcccactgcagcctcagactcccaggctcaagtgatcctccccgcctcaggctctatactaggtgggacta

SEQ ID NO: 728624 - DNA, 573 bp, Homo sapiens
gtctttatttattacagcctctcttctccgcacacagggagaacacccgctaagccccatagggctggaccctacacctggttaatttaaaaaaaattttttttgtagagattgggtcttcttatgttgcccagactagtcttggactcttatagactcatagtggtaccaccttggtggtcttggataagatcctggggaattctctgattaccaggcagagactctttttctctttccttactttctcctgagcaaatggagtctctctgtctctgggcggagctgtctggagctgggggtgggatgacacaagcacccctgtggctaccagcactgggactgtcctggatcagacttgaagacatcacagcactgaktcttccccagggcccatggtaaccactacccagctattgcctgtgttgttcaaggtcctagggctctgcaatcagcagatggcaaagccagccaggcctgtgttcctcctttcatggcagtcattttaccccaccctgggtgggtgcagagatgccatcagagatccagggcctggagtcggaaaccttagga

SEQ ID NO: 728625 - DNA, 652 bp, Homo sapiens
gaaaagagaaaattaaatgactcccttaataatcaagtctaggttggaagttgatttgaactatgtacttacacagctaaaagcaaatttcaggtagtatatacatgcagaagtataagtttgtatgtacctgtgtagaaagaacgcaatgcaagggaaaatcatttggggcatgttatatttgagatgggtagttctattttaagcacaatttcagtaacatcctcaagtatattattcatcaaatagaagtaaaccctctccattatttatataaaatagatttgagtcytaagtgagcaggcatatctgcccttagatatagtgttctcatttctctgtctttaaacaaaacctccagggatcctgcttaatctcagtgcatggtgtgatcatcactgtaactgtacctcaccagtcaggtttgaatttctggagtcatatagtaactctgctaccagtatggacccaattcctttccctatcctctctgcctacctaaatcctgcatatctgttaagtcctatataaaaactacctctaaaatttttccttattatccccatctctcatatattctttgaattcctatggaatttgagggagtatcatgtatttcattttatgagtctgccaagactgatcaccagag

SEQ ID NO: 728626 - DNA, 652 bp, Homo sapiens
gaaaagagaaaattaaatgactcccttaataatcaagtctaggttggaagttgatttgaactatgtacttacacagctaaaagcaaatttcaggtagtatatacatgcagaagtataagtttgtatgtacctgtgtagaaagaacgcaatgcaagggaaaatcatttggggcatgttatatttgagatgggtagttctattttaagcacaatttcagtaacatcctcaagtatattattcatcaaatagaagtaaaccctctccattatttatataaaatagatttgagtcctaagtgagcaggcatatctgcccttagatatagtgttctcatttctctgtctttaaacaaaacctccagggatcctgcttaatctcagtgcatggtgtgatcatcactgtaactgtacctcaccagtcaggtttgaatttctggagtcatatagtaactctgctaccagtatggacccaattcctttccctatcctctctgcctacytaaatcctgcatatctgttaagtcctatataaaaactacctctaaaatttttccttattatccccatctctcatatattctttgaattcctatggaatttgagggagtatcatgtatttcattttatgagtctgccaagactgatcaccagag

SEQ ID NO: 728627 - DNA, 397 bp, Homo sapiens
tcccagcagtcttggtaaaaggagggagcctgctgagccaggagggagaaaagaagattgaccagcttgctagaaaaatacttagcttttctttttctttttttgtggaggggggacggagaggaacaaggatggggaggtaggaatgaggtatagaaaagagatagcatcttctttggcacaagamtagtggcttaccgcttaccttagagttttgttttttttttttcaaacccatcaaaatctacttatttatgaatccaaggggtggcagcatcactctgttctagcattctttgtggagatggtctggtgcctagctgggagtgagcagcagcccatcccctgttcactttctctagcccatcattacctgtgaactgcagtggggcagtca

SEQ ID NO: 728628 - DNA, 632 bp, Homo sapiens
ctattaaaagtgttgttcttgaaatttaaggccttaatagggctggaatttttgtttatgatatgatgaatctaattttaatttatttttccatttactgacctatcatgccactcccctctcagatatcaaaactttaaatttgcatggatatatttctgggctttctattagctawttctatgttggcatattctcattaattcatataactttataataaagtttgataatttgcagggcacatcattcttattattcttcagaattttcttaggtatttatgccctttgtccttcaatatacattttagaatcttcttgccaaaaataattttataaaaaataccttttggattttgactagagttgtgttgaatctacagatcaatatggagaactgacaacttttattcatgaccatgagatagctctacatttacttttctttcttcatatatttctgtatgttttatcattattttacacataggtcttgtgcatatttttaaaccattttttaaaatgtaatatatacacaacacaaaatttaacatcttaaccattgttaagtgcacagttcagtggcattaagtaattcacatcattgtgcaaccctcactaccatccatc

SEQ ID NO: 728629 - DNA, 530 bp, Homo sapiens
actttttgagtcaggattgagataaagttttttgattctgtaagtactttaaggcttggctgagtgcaaacagatccaacgtttgagcagaccaattattaggcagttctcctaactctgcttccacaagagtctccttatcaattactgaatacccattgtggtttttttctcaatcacctgggagaaaccatctattgtcctgtcctgaagggaattcctcctaggtcttgtcagatctttgtacggtaattaagatttaaatcccctgttaggaaatctgctgggttaagggaattatcagtggttggtgttaaattacctttttctaacagaatagccccatactttaagatttttgagttagtaagctayctttttgcttttttgacttagaataattctgaactggtgaggtgtgctcacaatgaggtttcctctaaaagttacttttctactttcttctgttagcaaagcagttgctgctacagattgaatgcatttgggccatccgtgggttactgggttaa

SEQ ID NO: 728630 - DNA, 495 bp, Homo sapiens
gagctctgctgtgattcattccaataaaggtacaatgttggtcttgagatggctgggtcaaagttgcccatgtgtggagaatgcagaggccctggcctggaggaagatgggttagacagactccttagtgtctttgtctaatcgttcagggacagtgaggagctctctggatgggggcaggggagtggggagggcaatgtctatgagggccagaggtgaagtgagggcaagrctgtgcctgcacaccaaccatacccactagcccatgcatccgccagcatggcgagtttccacctgaagcacaggctgaggacagatttcaaagctccattttatgcactagtcagggcagggatggaatgtaaaggaacattgagaacttctctcatttgtcccattgcatagggctttctcaccatctttctgctgatgctgcaaataaacatggtcttgggaattacccaaatcggtccacatccctggggatgctttcct

SEQ ID NO: 728631 - DNA, 545 bp, Homo sapiens
cagtctcctcatatgtctagtggatccaggactcctggcccaaagaccctggggatggcccagaagctcagagaagctaaagtgttccatacaaatgccacatacttttctttttttcttttttgagacagagtctccctctgtcacccaggctggagtgcagtggcacgatctcagctcactgcaacctctgcctcctgggttcatgccattttcctgcctcagcctcccaagtagctgggactacaggcgctcaccaccgcgcccggctaattttttgtattttcagtagagacagggtttcactgtgttagccaggatggtctcgatctcctgaccttgtgatccacccatctcggcctcccaaagtgctgggataacaggcatgagccatcgcacccggscaaatgccacatacttttcttgttgcacctgacagggcccaattcccctcaccagcatgttctgtcgtcacaagcttcccactgccttctcaactttctaggcccccaaggctttggagtggagctaccattgtccttcct

SEQ ID NO: 728632 - DNA, 587 bp, Homo sapiens
tctgtagaggccgcgttctttcttaccacagtgagcaataaacagctttgtgttatcaacagcttgtgttgatgttatttggggaaccagcattcaacagagaaattcaataagtattgcggaatggtgagtggatgtgcagatggatgggtaaagatggatggatggatggatgggttggtgggtggatgggtggatatgtggaagggtgggagggagggagggaggatagatrgttggatggttggatggttggatggttggatggatggatggatggatgtgggtggatggatatgtgagtagatggattagttactggattcctaccaatgctgataaagcaggcttcgggtctggggtgaggcaaggctggggtaggccccatccggtctcatgagcacaagaagtctgtttggtgagagagagcagcattccctctgcaaggaagccccttgaaattataagaaattaattctcaaatagcaaatcaagatgatttcagttgaaatttgcaactgaaaagccccatttgaaaacagctctagagatggctgcccgtcccaacttgatatgatgcgtgtaga

SEQ ID NO: 728633 - DNA, 601 bp, Homo sapiens
ggaagtagcacagccctgatcagcttcccagcggtagagtccagggaatggaaaaggccagcaggttcaacacggctcccagaaaccaacgtgtacatctgaggaagtgtccagtgcctactctcctagaggaaaaacccaacagagaaataagggccgggctcagatcatgcctttaatcccagcactttgggagtccaaggcaggcagatcacgaggtcaggagtttgagaccagcctgaccaacatgatgaaaccccatctctactaaaaatacaaaaaaaaaaaaaaaaattagccaggtgtggtggcacgtgcctgtaatcccagctactcaggaggctgaggcaagagaattgcttgaacctgggaggcggaggttgcagtgagctgagattgctctactgcactccagcctaggcaacagagcragactctatctcaaaaaaagaaaagaaagaaaagaaaagaaagaaagaaataaggacattgtctgagaaggggaggtacccagtcctgataatagggagatattccctggcatagagtcgggggcttcctgaggaagcaaggagctgagatctgaaggaaccaggatccc

SEQ ID NO: 728634 - DNA, 559 bp, Homo sapiens
cctcagctgaagttcgctcgatttggctgactttttaccattccttttacatcctacttctcctgtttacctttcggcccaacccatccctttatcagccaaagctgtgccaacgctctcctcctccctcctacccctctaagggttcttcctcgcagccagaggaagcacactyatccctggtttccaggttgaagaaattcagctgcacttccattcctggtcctgagcatggtgagggacaggacaagtcgggaatacttgtcagctcccttctagggcagagaatcagtgatgttattatgagaaaacagaggggtaggagcagacttgaaggatgcaggatggtgagctgagggagggcaggcggagtgtgagccactaggagacaaccagggtgatgacgaagaagaggatggcagtgacagccactaatctttgttgagaactgaccaagggactctccaaagtgctttctattgctctgtttcgatccacaaaacaactggctgcggttgtgttttctctcctattttacaggtgaagacactaaggctca

SEQ ID NO: 728635 - DNA, 614 bp, Homo sapiens
aggaggatacatgtgtcttctcagctatacacagaaatctgtgaactttccaaagctactacttgaatttgctttttgctcatgagtctatggcatggagttggtttgctttgctttgcggtgtagctctttctttaagagctgagaatggatgttctttttttgccaaaaccatcctcggaagtgcctgctccactttttttttttttttcttcaattatttatttatttatttattttagatggcatcttgctctgtcgcccaggctggaatgcagtggcgtggtctcggctcactgcaacctccacctcctgggttcaagtgattctcctgcctcagcctcccaagtagctgggattacaggcgcacrctaccacactcagctaatttttgtatttttggtagagatgaggtttcaccatgttggccaggctggtctcgaactcctgacctcgtgatccacccacctcagcctcccatagtgctgggattacaggcctgagccaccacacccagcctcgacatttattataggttcgagggatacatgtttaagtttgtcacaaaggtatatcgtgtgatgctgaggtttggagcacaaatgaatccgtct

SEQ ID NO: 728636 - DNA, 643 bp, Homo sapiens
tcactcttagattatcttgcaaagcttgtctttttggctttcttgtatctgtattctctcaaaaaaaaaatctttcctacagttgcaaagtaaaccatctgaatataccatagttgtctataactcaatggttcttaattgtcattctcgttacacctaaacccccactcttagttttagtctctccataacttagattcaaattctcttcaacactgttttccttacctcctggcaggaattgtcagttatacttttattatgctggctcttgtttctgtagctttatcctggtcccaaagtggaaaaaaattatcttcttctttctattcattaatttcaaggtggaatatgtctacactttctctaatacctatatcagagtctttcctctggcagggaggaccacaatctttcttcaggattctgtccattttcatcacttcccttaaatycttctgaagtcacattatggctcctttcccatggccactcttacatctctgcaacccatctttcccgtgatgacagcctaatcttttaaaatataaattgtattatattgcttcactcttcaaaaattttacttatggctatagtatagagttcaaactcttcattgtttccaaaagtctttcctttg

SEQ ID NO: 728637 - DNA, 643 bp, Homo sapiens
tcactcttagattatcttgcaaagcttgtctttttggctttcttgtatctgtattctctcaaaaaaaaaatctttcctacagttgcaaagtaaaccatctgaatataccatagttgtctataactcaatggttcttaattgtcattctcgttacacctaaacccccactcttagttttagtctctccataacttagattcaaattctcttcaacactgttttccttacctcctggcaggaattgtcagttatacttttattatgctggctcttgtttctgtagctttatcctggtcccaaagtggaaaaaaattatcttcttctttctattcattaatttcaaggtggaatatgtctacactttctctaatacctatatcagagtctttcctctggcagggaggaccacaatctttcttcaggattctgtccattttcatcacttcccttaaatcyttctgaagtcacattatggctcctttcccatggccactcttacatctctgcaacccatctttcccgtgatgacagcctaatcttttaaaatataaattgtattatattgcttcactcttcaaaaattttacttatggctatagtatagagttcaaactcttcattgtttccaaaagtctttcctttg

SEQ ID NO: 728638 - DNA, 453 bp, Homo sapiens
ttttattctttttatgctactataaatgagattgttttcttaatttcctttcatgatagtttattgtgtatagaaacaccattgatatgtgtgtgttgatttttgtgttctacatctttactgaatttattaattctaatcatttttcttgttgagtattaagggttttctgtgtacatcatcatgtagattttataratcatatcgattttgtagattattgctgcagacagataattttaccttttactttagattttgatgccttttatttctttttcttatctacttgctctgtctagggcttctaacactgtgttgaatagaagtagcaagagtggacattcacgccttgtcctggatcttagagaaaagattgattatgatgttagctgtgggattttcatatatgccctttattatgggatttttttttggatatgacaccaaaag

SEQ ID NO: 728639 - DNA, 516 bp, Homo sapiens
ggaaagactttcccacataggaaaataaccctggcaaaagctgtgggggctctttgtctcctggtaagaaaatgttcctggcctaaggcccattcttatgtggccaagtcgtggagttgaaagaccacatgcataagaccacctttccttacagcccatcccgactcttgtctggccactgaaacagcagataaaacatatcaaatcacccaccttgatttgraggtgtagttgggtcccatggagcccctgaacaacttgtgcagatgcagtttgctcaaacagcctcttttattttgaaagagcactttaccagagtcaataggggaactaaaagcaggagaatggttctcatcagaaatcccaagtgcttggattaaggtaaacaaagaggtaaaaaatgagtctgggtggactgtggatacatagctgacaaggacctcactgagtgtggatattcagcttggtttctaccctccctgaattaatgatatacacatagcaagtggtgttggc

SEQ ID NO: 728640 - DNA, 532 bp, Homo sapiens
attcctctagctttgttctttttgcttaggattgtcttggctatatgggctctttttcagttccatatgaaagatcaagtagttttttctaattctgtgaagaaagtcactggtagcttgatggggatagcattgaatctataaattactttgggcagtatggccatattcaccatattgattcttcctattcatgaacatggaatactttttcatttgtttgtgtcctctcttatttccttgagcagtggtttgtagttctccttgaagaggtccttcacatcccttgtaagttgtattcctagatattttattctctttgcagcaattgtgaatgggagcttatttatgatttgactctctgtttgtctattattggtgtatagraatgcttgtgatttttgcacactgattttgtatcctgagactgctgaagtttcccatcagtttaaggagattttgggctgagacaattgggttttctaaatatacaatcatgtcacctgtaaacagagacattccctctcttcct

SEQ ID NO: 728641 - DNA, 532 bp, Homo sapiens
ctcatccactgcacagtgctagaggctgtgcttggcatctagtgagatgcaaagaggcatgcggatcttactgtaactatcattccaaggtgtgcctagactctgccactggtgcaaaatctctctggatcaaggtgcagaggtgaagccctatgatgtaggaggttaggatgatggtaaaactgatttcttcattcagtggaatgctgggtgtttaagattgtcctgttatttaatgcaaatttgaaaatcacagatgcaggaatgtcagcttaatttgagattgtatagaggagagaaraacatgcacagatgtcaaccatgtcagatgctgtactaggcactgtggggaacccagaaatgaataaggtgcagtcctcctggagtttacagtctagagatgagcatgggaaggtcacgaaactgggcatacgtcaggaggcaaaatggaatggaggtttcaaattaggtagaagtcagagggttgatgaaataaatgctcagagatgaggaagcacacatcatgtcttga

SEQ ID NO: 728642 - DNA, 615 bp, Homo sapiens
gcttgccctcagctgaagggatcctgaggacagtagaaataatgaagacatcagtcaggatgatgagcagaagggtacccagcaaaccagacactgagatcagtgttataatgaattctgtgtggttactgtctatacaagacagcctaataactgccagcatatggcagaagaagtgtttgacaaggttgggtctgcagaaagagtccctgaatatcagtgcagtctctgtaagagagataaagaagcctgcagtgcaagcagaggccacaagttgtccacatacaatgttggtcataagcagtggatatcttagagggttacaratggccaggaagcggtcatatcccatcaaagtgagaatgatacagtttgtgccaccaagtcccaagaagaagcacatctgtaagctacaacctgtgactgaaatgcttctgtccttggccagtagatcttccagcatcttggggacgatggtcagtgtatagcaggtctcagagaaggagagtgcactaaggaagagatacataggggtgtggagggacctgtccactcaagttagacccatgatggtcagattacctgcaagggtgagaaggtagagacaaaagaaga

SEQ ID NO: 728643 - DNA, 640 bp, Homo sapiens
atctatctatctatctatctatctatctatctatcactttggaatgtgctggagactacttttaaccaaataattttattcaaccaaattggatgaattcaaccaaagcagtctaagtaaatgaagtttgaattcaacttggctccagataaataataacaacaaatatactataaataataatcatagctaagtattcctaagyatgagtttttgtttttaatatatcactctttattaaagcattctctaaaacatcaataacaaaagatagtaattagttgcaaatgatattaacagataacacttattttgcacaagctctgtgttttgcacattctctgcacttgcatggagtaagtcatttaatattcatattagcatttgaagtcctacttttaaaatatattacttttataccaatagatgataaaactaagatgcagacaagttaattatcaacttgttcaaagtcacaaagcaatatgtggcatcactgaaatacaaaccttaacctcttctgcagatctgattcttttaactactgtggttcgtaattcatagttgttattaatgcttatgtaatgtaataagcatttacttaaaatgtttatatacaaataataaattaatgttcata

SEQ ID NO: 728644 - DNA, 629 bp, Homo sapiens
ttcaaatgttaataacagctttatttgtaatagcccaaaactggaaattaaacgacgtccctcaatagatgaatggtaaaacaaactgtagtatatccatatcatggcatatttctcagcattaaagtgaatgaactattgatattgatttagatgagtctcaagtgtattacgttgagggaaaaaattgtaaaaggtcacatactttatgactctatttatatacaattctgaaaatagcaattataaagaatgagaacaaattagtgtttgtcaggggtcattaatggtgagggtaggtggtgaatgtggctataaagaagtagcacaggagagatggaatacatcttgattttggtgaaggttaaataaacctacacrtgccataaaataacataaaaatatacacatattccaacatcaatttcctggttttgttattgtcttataattatgaaaaatgtaatgattgaagtaaactaaattaagattttaaaaaaagaatcattttccaagaagaccttgtcaagcttttgtatctgcaattcacatcaagaagacaacatattttaaaactgagatattatttaatacagtaggatgcacagatcatgagtgtagagtgagtg

SEQ ID NO: 728645 - DNA, 524 bp, Homo sapiens
cattgccattgaactgaccctaaaagaaatgctcaaggaagtcctaaacctggaagcaaaagaacataatggaaacacatgaaggtataaaactcactggtaaagtaatcacacataagataaagagaaaagactcaaatgataccactacagaaatccaccaaatcacaaaggtagtcaatataggaaaaagaaagcaayaaagaatatagaaaacaaacagaaaacaactaatgatatgacagcctcacaattactaataaccttgaatgtaaatggattgaattttctatttaaaaatatagaatgaatgaatggattaaaaaaaacatgatcaaactatatgctgcttagaaaaaaactggccttaaggaaaaacttaagaatttttttaaaaatcatgaaacaaatgaaaatggaagcacaacacaccaaaaccagtgggatacagcaaaagtagtgctaagaaggaattttatagcaataaatgcctacatcaaaaaaaaaatagaaagataacttaa

SEQ ID NO: 728646 - DNA, 641 bp, Homo sapiens
ttattatatcacctaatgataacaatcccttgtatttgaaagcctcttcacttttattatctttttcaattcttgcagtaatcctgcagagattccgggaattttttgttttcattatggagataaagaagtcaccttagaaaaggtaattaatctgcctatgtgrtataactaaaagcagacatcttcaataaaacctagacctctggaatcctggactgttatatatttcattacttctgttggttactgttccttttaagtggtttctagggtttgaagatacatcttattacagagtctcaaagaaatcatgtctttcctcttacttttattctcaagtgaatctagcacatattttggccaacatacacatacacacacaggcctccacactgttgattaaatcaaggtctatttccctacccttttagtagtcaggaagttagacgagcaaaactaaggtctatcttcttaaaaggcaaattttaactatgcattaactttaaagcatatatggtgtataaattaagcatctcataaagaatgtcattactcttgtttgctcaacaggaacccttagctctaggaaagagaggtctcttcttttgtaaatttatttattcaagcaactaagtttt

SEQ ID NO: 728647 - DNA, 595 bp, Homo sapiens
acaatcaccgagctgaataaacaaggaaaactccatcaagttatagcataatcaagttgtttaataccagtgataaagagaaaagctttaaaacaggtagagggggaaaaaaagacatattacatacagaggagcaaagatcatgatgacagcagacttcttatcagaagcttgcaaagtcagaagacaagrcagcacatctttaaaatactggaagaaagaagttgtcaaccaagaattttatatgtagtgaaaatatatttcaaaaaggaaggtagaatgaagacctttagatgaacaaaagtctagagaatttatggatagaagacctgcaatataaggaatgttagatgaagttcttcaagcagaagaaaaataatacaaatgaaaatattaacctaaagaaaggaatgaagaatactggaaatgggaactatgagggtgaatttttttctcatttaataatctcattcaaaaccagttgactaccaaagcaaagataatgatgttgaattatagggtatataacatgtaaaaatttaaaatatgtgacaccaatagcacaagggtgaaaacaaatggaagtatcaattta

SEQ ID NO: 728648 - DNA, 359 bp, Homo sapiens
gcagggaacatagggctcaagagcaagggctctgaataagacagatctgatttgaatcctggatttaagaagcactagttggctgatattggggaaacagtttcattggtcctctaaaataatggaagtctccacttcattgggwtggtttaaacattcagacaatgtatacatattaattatctcacaacctggcacatcataataaactgatctgtggtagatagttttatttttaggaaggtaaagcattggagggacttttaggcaaaggaaatgatacatgaaaattccaaaagtgtgacatagcgtaatgagttctgtacaactgaaattcagtagatgcagaagactgtggg

SEQ ID NO: 728649 - DNA, 650 bp, Homo sapiens
ttgacaaaattcaacatcctttcatggtaaaacttatagacaaattagataaagaagtaatgtacctcaacacaataaaggccaattatcacaagtacatagctaacatcacactcaatgataaaaagttgaaagtgtttcctctaaaattaggaacaagacaaggatgcccattcttaccacttctattcagcatagtgacagaagtcctagccagagcaatcaggcaagagagagaagtaaaggcatctgaataagagaagaagaaatcaaattatctctctttgctgatgatatgattctatacttagaaaattctagagactaygtcaaaatgctactaaaactgataaaatattttagtaagctttcagggtacaaaattaacatacaaaaattaatagcatttctatacaccaataatacccaggctgagagtcaaatcaagaacacaatcccatttacaatagccacaaagaaaaggaaatatctgggaatacagctaaccagggaggtgaaaaatctctacaagaactacaaagcactgctgaaagaaatcagagatgacagaaataaatgaaaaaatatttcatgctcatggattggaagaatcaatattgttaaaatgactatactgcccaaagcaattt

SEQ ID NO: 728650 - DNA, 472 bp, Homo sapiens
ctttataataaattatctacataaaataagtagttcaatttctctaactaaaagtatcaaaatctaaraacattgatgggacaagtctcagaattgttccatcatttcggtctccctacagcatagtacagtatgaggatcaccactagcaaagtttttaagtgagccaagccaatgccattttttattgttacctttcaaaatactttttttattgttatctttcaaaatacttccactttcttagcctttcacaatattataacatccttcagttcagtctttagatggttgtaatgatttaccattccatttgcacaaaacaaacagctattcctacatttcttgaaaaaaaagtcaaggtctagattactgtggaagaaattctagtgatgtgacacctgtagggatttgtagagaaagatttgggaactcctttgttaaccacaaaattacagaagaattttctcct

SEQ ID NO: 728651 - DNA, 653 bp, Homo sapiens
gctctataccatccaataccagagctttaaacactataaatgtgttgaagacatctaaatccatatctcaggcgatatttttctctgctactccagactcatatatttcactgcctactcacatctcctcttgggagtcgaagagccatctcaaactgaactcctggggtctctacccctagtcttccccatcacaaatgatggcaattgcaatctttcaactgacaagctaaactcctgcagtcatccttgtttctatctttctctcatatatccaggaactgactatgtttgaccacctcggtccaagtcacttttatctctcccctcttactgtaattgactcctaacagatctccctacttgcatttgttcacttgtagcctcatctcaacacaccagagtgatcctgttaaattctaaattaggttctgygtttccatcgatcaaatgtgttcagtgacatatcatttaaaacctttgctgtagctctttccttgttctagaatctctttcaccatttggatagctctttcatttatttcatctttgctcaaatttcaccagctcaactacctgggccaccctatataactgcagtgtgcctccatccttacatccatattctgtactgctattgcctttctctactt

SEQ ID NO: 728652 - DNA, 609 bp, Homo sapiens
tactcagccatcaaaaggaacaaaataatgttatttgcagcaagttggatggagcttgagaccattattctagtaacttgggaatggaaaactaaatatcatatgttctcacttgtaagtgggaactaagctatgtggatgcaaaggcataagaatgacacaatggactttggggactcaggggggaaaaggtgaggaggatgagaaataaaagcctacatattgggtatggtgcacactgctcaggtgacaggtgcaccaaaatctcagaaatcaccagtaaagaaattatcaatgtaacagaaaaccacctgtactccaaatactattgatttttttttatctcatgttgaactgtaatgagtttggatgttgtcctctctaaatctcatgttggatgtgaggcctgggagaggtgtttgagtcatgttcggtcatgggggtgaattcctcatggcttggtgckattctccatagtgtgtttttgtgagatcttgttgcttaaaagtgtgtggcatctcctccccttcttgctctcgctctaccacgtgacatgttggctcctcttttgcctcctgtcatgattgaaagcttcctgaaggctcacca

SEQ ID NO: 728653 - DNA, 634 bp, Homo sapiens
ccctttttttttttttttttttttttttgagacagagtcttgctcttttgcccaggcgggagtgcagtggcgctatctcggcttactgcaagctccgcctcccgggttcacgccattctcctgcctcagcctccagagtagctgggactacaggcgcccgccaccgcccccggctaaattttttgtatttttagtagagacggggtttcaccgtgttagccaggttggtctcgatttcctgacctcgtgatccgcccgcctcggcctcccaaagtgctgggattacaggcgtgagccaccgtgcccggcccttagcccactttttgatgggattatttgtatgtgcaatgcttgttccctggtgccataaataaatagcatttgaatatcaatttaattttttcagcaaggccatttttatactttttgtagaaagggtacwctcgccagcggttttgccacaagagtatacggaacaaaggagacaggctcatttataatctgacgcggccaccctcctgctgcgttcggtttccattggctgggacgggacctcaccttctgtatttgtcccgactggctagcacttagaactttttaaaagaggcaaaggcataggagaacaaaggaagga

SEQ ID NO: 728654 - DNA, 573 bp, Homo sapiens
gatgtgaggtcctattttattcatcatgccatttgctgcctaaataccttacttttttattactgtgttattgttttataagtcctatgagatttatgctttaaatgttttatgttctattttggtgtatttcgaggattcatttcaagatttagagctctttttagcagttcttgtaatgctggcttggtagtggctaactctctcagcatttgtttgtctgaaagagacttgatctttcatttatgaagcttagttcactggatacacattctyggctgataattgttttgtttaaggaggctaaagatagtactccaaacctttctagcttgtaggatttctgttgagaaatctgcttttaatctgataggttcctttataaattacctgatactttgcttcacagctcttaaaattcttttctccgtcttgactttagagagcctggtgactatgtgcctaggcgatgatctttctccagggtgttccctgggtgttctttgagcttctcgtatttggatgtctagatctctaggaaagccagggaagttttcctcaattaatccctca

SEQ ID NO: 728655 - DNA, 618 bp, Homo sapiens
tcttcatttccagaagttgtgatttttttttatgctctctatttttttggagatttttccatccatatcctgtaacattttttaaatttctttaagttggtattcatccttctctggtgcctccttgggtagtttaataatccaccttctgaattcttttctggcaattcagagatttcttcttgggttggatccactgctggtaaggtagtgtgatcttttggggctgttaaagaaccttgttttgacatattaccaggattgtttttcttcttccttctcatttgggtacactatatcagaggaaacatctgggactcaagggctgctgttaggatwttttttgtcccacagggtgctcccttgatgtggtgctctcccccttctccaaaggatggggcttcctgagagctgaactacagtgattgtcaacacccagcagagctactgtgctccaggctccaggctggtactgggtagtgtctgcaaagagtcctgtgatgtggttcgtcttcaggtctcatccatggatatcagtacctgctcctgtggaggtggcagggcagtgaagtgaactccatgagggtccttggttttaattttgtttattgggataat

SEQ ID NO: 728656 - DNA, 603 bp, Homo sapiens
tttcttttctactatttatgacaattgaagttaataaatattttatttccctccttactccgagttccaatgttagtctactttctcagtctgtggaccactatattctaggggctatttcggtgtctgcctcataggaagctcccaataaatatacttactcaattaaaaaaaatgaaaactaagtcctragttatgactcagtccaactaaggaaaggaccaaatgaagatcatctgacataggcaagaagttgatacctattatgagaccagctttaatatatgcatgcatctgggactaacaactaattgaaattccaatgaaatttattccaaaaataagtgttctatatttatttgataggtaaagaaaggggatagactagcataggccacaagcaatgaaagcacaacaccagccacaatttaaagatgctctattcctctttttcttatattatattttgtcttaatgcataactctttcagaaagagtaggaaatgcaaagaactagtcaatcaaactgaaaataattaaatttaaattatctgaaactccagcatccatattatgcccctctcagatttatttttaggtaaa

SEQ ID NO: 728657 - DNA, 606 bp, Homo sapiens
cagtatggggatgaccacatagtctcttatttgaacagcccatttgcaaaatgggcaaaagatctgaataatcactttattcaaatgtcaaatacacatgatcagatgctcaacattaccagcaattaatgacttccagagcatcaacctatatggtacaagatattagccaagaacaagagaggatgtttaacagygaaaaataatttattgtgacttttacaggagcttgaatgccctcattggaagagtcaacattaataaaatctgaattattaccattaatatggccatgtcatttttatcggcaggtgctagagaaatgctacttatacatgtagcatttacaattaatatatgtagcattaaacaattatcaggaacattctgtctattaaaatgtaatcttccttcaaccctattatccacttacatttatatattaaaacacattatatatgacaaatttaatactcagctatttctttgaagttttgctttcattatataaatgtaaaatttgcatttcagtccctaatatcttattgcttaaaaatgttttatagtatttgttatagggtaaaatttatacacaaagaaaattca

SEQ ID NO: 728658 - DNA, 578 bp, Homo sapiens
cataagacaacaagccctttcgctaaagcgccttaaatattgcctaacagtttatatctgtatagatctgtggcttatattatcacttacatggtttcatctcgacttcatagaaatcatgtaaacatagaaaccatgttatccatgttgcgtgcctgcgtgcgtgcgcgcgcacacacacacggagtaaaagatgtcgtataagttttgctgttagagttgaacttaaaaatctctaaattgttacatttggaggctctcattttgggggatcctagtgtgagatgctcctttgttggtcaattttaattatacagacataaataaaggatatattaattatagagaaaaagatmagaaatgtaaacaaaatgcagataagatggagacattcaatgatttgtccaataatataaaaacagtttttgtgtgcgggtagtttgttgtcattagtggaaggaaatagagagaaggataaataatatttgaatttgaaagagcggatgtatgaatacaagactcccttgaagaagaaaggatcgtctgggaccacagcaggccggggacagggagaagaa

SEQ ID NO: 728659 - DNA, 610 bp, Homo sapiens
tggtacttggcaattattttgtgacacttaatcttcatattagttctagaaggttgattgttttctcctctttactcaccctataatatgtgacaaacacggaatagaaaggcaaagtcactttcttaatgacccttagatggtaaattagagagcttgatttagaacccaggctgctcttctcgtttggggtgtgtacgttaggagagggttgtgggratgtggtggaagctgtgaggaatggaatggggaagtctactactgttgcaggaattttcctttgttcagctaaacatgggaatccttatcatggggccatgaaaagttaggctcgcagacaatttgaagtgtgaggagggcagcgtttattgggtgaaaaggaaaagagggaaacggtccttctgcaaagccagactccctgcttgtgggcttcccacctggcagtttgaatttcaggttccacccaggaagaggaggggctgggctcttccccactggaaatggcgcaaacttctgtggcttcaccccagtgcacactcctcccagtgtgcaggctggagtttctctggggaccccttcccacctggctgtctcattgccccctctaaag

SEQ ID NO: 728660 - DNA, 450 bp, Homo sapiens
gtctcagcctcccaaatagctgggattacagtcgcctgccaccacctgtggctaatttttatatttttagtagagacggggtttcgctatgttggccaggctggtctcgaactcctgacttcaggtgatctgcccgcctcggcctcccaaagtgctgggattacaggggtgagccaccgtgcctggcccccagtgtacattttttaccacccaccccctgacccagagcgagggcagaggttgcctagtgtgtacctgtcgtrcctgccatacctgcctgcggattccgatagaagcacagagcccacatgggttattacggctctgaggtcctgagtttgtaaaaatgtgaaaaactcagcagcctggaagggatctcatggaggccagggctttgtgcttgtgccctgcaagagctgctgcacctgcttcacctgatttgtgtgtcca

SEQ ID NO: 728661 - DNA, 450 bp, Homo sapiens
gtctcagcctcccaaatagctgggattacagtcgcctgccaccacctgtggctaatttttatatttttagtagagacggggtttcgctatgttggccaggctggtctcgaactcctgacttcaggtgatctgcccgcctcggcctcccaaagtgctgggattacaggggtgagccaccgtgcctggcccccagtgtacattttttaccacccaccccctgacccagagcgagggcagaggttgcctagtgtgtacctgtcgtgcctgccatacctgcctgcggattcygatagaagcacagagcccacatgggttattacggctctgaggtcctgagtttgtaaaaatgtgaaaaactcagcagcctggaagggatctcatggaggccagggctttgtgcttgtgccctgcaagagctgctgcacctgcttcacctgatttgtgtgtcca

SEQ ID NO: 728662 - DNA, 593 bp, Homo sapiens
aaattaaactggaatatttgaaaggagttgggaaaaactacttcaatgttgcttctccctcgacatcaattttctggatctatctggagtaaatctatcagattatggagtttcctattgatatgaaaggtcgagtgtgtaagcaagtagaggaggaaaataaaacattaggtgagaagggcgattccccgaagaggacaaagaacaaaggcccctttgaggcgggagtttatttttactttttgaaaaatatttttatttttaycagcttcagattcagagtgctctccttcaccctcacctttggattgcttttcctctaaacacaagcagctcattagaaacctgagcatgaagcattctggagccccaggattgtctctgaggtgacatccactctgctatcagcatcagggttgttggccaccaaacatttctctgaattctgggagcctgggtgccaggacttgtaaggctgagtcttggtgtttgttgagacctggagcagcctcttgatgtcatgtcaggcttcagagtctgtgccaaggcagatgcacgggggtggacactggcacacttggccatgagggcag

SEQ ID NO: 728663 - DNA, 598 bp, Homo sapiens
tgtttggggattgtgttctttctaggatccttttttagggatatgactttaactagctggctgcataggataaacgttacttatgttacttacaaaaactgcttgatgtattctcagtccttccattccaccacacacttttgtctcaggaataagtcagtcagattaacrgacccctacctatctagaattatttttcttgacctgtgaatcttgtatgtattgtcagtaacattacagattcctgttgatatgaggctcattaggagggaaggctccctggcctttataataggaagtgtttatttttcttccctttcaagcaattggcttgctttttatcttacagacgtactgaacggtatgactgatcaatacttcttgtcagtactgcataccaaagaagcttggaatcaagtttaacactaacttttacgtattatttacaactttatgagatgactgttttgtatttgtccattccaaatcatgttagtgttgccttgatcaccattacatgaaggagggactttatgtgataaaatatacataggtgtgccagaagaagggaacttaaagtggcttaaaatctccatct

SEQ ID NO: 728664 - DNA, 493 bp, Homo sapiens
actatagtcaccaaggtgcacaatagacctcttgaacttattcctcctaattgaaattttgtgtcctttgaccaatatctcctcaatccctccatcccctaacaaccaaatttttgtggaaccaaattagagtgccattgtctctcattaataggagatggtaagataagtttttaaattgccattcagtatgacctaattttaacccagaatgttattrctatttgtaatagttacatgttcaaaaaactcagcaaaactaaaataataagagaccttgtatttggatgatggtagcagagaccactggttgtctgcaaaatccattcttttattcttgcagagtaatgacagtatagtcagttacctgatgaatagaagtgatgtgtgccacttctagaagggggcttcttggagaatatgaattcctcctctgcactcttttctattggctaaatgcagatgataggaagaccatggggaagccacagaa

SEQ ID NO: 728665 - DNA, 643 bp, Homo sapiens
actatattgcccaggctggtcttgagctcctggcttcaagggatcctccccactcagcctcccaaagtgccaggattacaggtatgcgccacgacgcccagctctgtattttgggtttataaagataccagttgatagaaatttctagttgccagaatcttacagaatgtaagctaccatttacattcccattttcaataatttaaagatgtcaccaatcttgaagaaaaactgctgatgaaaaccagcctcttgcagagtcttcatctaaatgatcaattaccgctttcttcttaaatttattagtctcaaaagaagagagtatctcttctatttacatctttatttttcactgtaccatcatatgcttaaagaccatgtatgattctccaaatgtcaaattcaggagacacttttaaaacataaaaagcaaaataatatttattktaaaaattcttctggaaagagaagaaacatagtttttcaaaggaacgttttattcattataactgcttagacctactctcctatggaattttagtattgatggtttaaaaaatataagcaaagcatacatcctaggatacatcataggaggagtttatgcacagcattcagatattttaattcatcttatagtttt

SEQ ID NO: 728666 - DNA, 539 bp, Homo sapiens
taaatggaatcatacgatatgtaatcttttgtggttggcttctgttaaagaaaaccagagccagacaataggttcaagctgcgaacagcgattttatccaggaactatgacaacggggaaaaagagacctcagtgtagaatggtgcttaattccgaatataagacaagtggagccggttgaaggtgaaggggtggaggaaaattactagaggagacatcaagggtagggggaattcttgctaaacctacctaatgggattcttgcagaaggcaggctaaggtgatgatcagacgtcatgtgtgggatgatggaagatgaggaatttggtcagatattgaggataatcaggttttgagggtgagagattytgctaaattgacttaacaggattcttgctaaatctgggctatgcagtcctgagcacaaggtccaagggtgaggcctagttgagaaaagagcttagaggaagctgactaaagttggttcaggagaggctctttgttacttctttcacttagcatactatttcaagttccat

SEQ ID NO: 728667 - DNA, 505 bp, Homo sapiens
taggctcttggagggggtattccatgaataccttgaaatcatatacaaagttttatgtctgtaaacgtgtatttttctagcagaagggatctgaatcattcttcacattcttaaagaatgccataactacccaaaagttaacatctaaggagcttacagtgttataaattagtrataggttgaattaatctcagtgactactgccaactgttttaggaactaaataaacttactcttttaagaaattagtattctgatgaaaagtactaatgaatcatagatttaattatgaatctgacaacatattgacttaaaaattcaactcttggacagctctaaatacatttcagatcaaaatgagcttaagtttcaaatgtattagaacaagttatttaagcattaatttccagtgtactactcatattcaatttacctcaaaaatgtgttaaacacctactaaactcaagtattaaacaccgcatttctaggcatttatgttaaaata

SEQ ID NO: 728668 - DNA, 581 bp, Homo sapiens
cacagtttccacggcaatacagtagggaaggagtggtctttttagtaagtggtgctgattgattttgggtatgtatatgaaaaaattagtcttcatgccttatcacaccattaacaaaaaatcagtttgagatgtctcatcaaaacagtaaagcttctagaacatagaaggaatatctttatgtcgtttgtagacaatttcttaaataagactcatgaaagataaaccataaaaccacgatttagatccaaatatgggacatttccagtgccccagcacccttcccagtcgacagcccagtttttaaaaaggtaggagggggcaaaacttgaatagacatttaataaaaagaaatactcacgtggccgataactatataatctcaaggtccattaatcmtcagggaagtgcaaattaaagccacaataaggtaccactacaatttcaagagaagggcacttactaaaaggactgacagtaccaagtgctggatcagtagcaatggaattcgcagtatcggtggtgggaatgtaaatcgtttcaatcactctggaaatgtatttggcagtatctacactaga

SEQ ID NO: 728669 - DNA, 581 bp, Homo sapiens
cacagtttccacggcaatacagtagggaaggagtggtctttttagtaagtggtgctgattgattttgggtatgtatatgaaaaaattagtcttcatgccttatcacaccattaacaaaaaatcagtttgagatgtctcatcaaaacagtaaagcttctagaacatagaaggaatatctttatgtcgtttgtagacaatttcttaaataagactcatgaaagataaaccataaaaccacgatttagatccaaatatgggacatttccagtgccccagcacccttcccagtcgacagcccagtttttaaaaaggtaggagggggcaaaacttgaatagacatttaataaaaagaaatactcacgtggccgataactatataatctcaaggtccattaatcatcagggaartgcaaattaaagccacaataaggtaccactacaatttcaagagaagggcacttactaaaaggactgacagtaccaagtgctggatcagtagcaatggaattcgcagtatcggtggtgggaatgtaaatcgtttcaatcactctggaaatgtatttggcagtatctacactaga

SEQ ID NO: 728670 - DNA, 633 bp, Homo sapiens
ctggtaattctaatgcacagtgagtattggcacccactgtaccaaacaacctcaccccagggttgggaagagtttggaatggagcacctatggtgtttgtttctgtgagtggggcgagttgcagacgctggtctcctcatyggtgtgccatggacttcaacaggggtcctggctacagaaaatactatcactctccataactctggggaatagggacatttaaatgaagaggttatggtcagcctgggcaaagaattacacctataaatggtggtggcttctgccctgacacccatgatctctactcatccacctacccatacctgactgtgtctctgctgaaatatggaggacagattcaccctgcctaagtcatgtttggaaccctcttcctccttccttgtccatgtccactcatctcatttcattccctaattcaccatcaaacagcaatcagtctcctcaagtcttactgtaatctataaaatctatattggtgatcatcagttttttgacttgaaggatcatatgttctgtagatttttttttcagaatgctctggacaattaattttctttaggccagatcacactgcctcctccatgagaattggcagcttcacctatcaaccac

SEQ ID NO: 728671 - DNA, 642 bp, Homo sapiens
aaactctcacagatataaggaggcatgagtaccacgtggaatgtgggattctggaacagaaagaggacacgagcgcacaactagtgaaacacgaataaaaaaccgaaatgggcggccaggcatgatggctcatgcctgtaatcccagcactttgggaggctgaggcaggcagatcacttgaggtcaggtgtttgagaccagcctggccaatatggtgaaaccccgtctctactaaaaatacaaaaattggctgggcacagtggcgcatgcctgtaatcccagctacttgggaggctgaggcaggagaatcacttgaaccagggagtcggaggttgcagtgagctgagatcgtgccactgcactccagcctggcaacaaagggaggctccgtctraaaaaaaaaaaaaaaaaaaaaagaacttttacatgaagaaaacttaaaatattacagagacataaaagaaaacctgaatcaatgggaaagcatctactcctgttctttacatataaagatccaatattgttattgacatcataacaaggccattctccataaataaacatttgatgtgatccaaatgatacgatcaatttttttttaaggacaaactagttctaaagttcaaatagaatgaaatggga

SEQ ID NO: 728672 - DNA, 484 bp, Homo sapiens
ctttgtagcccaaactggagtgcagtggcgcaatctcggctcactgcaagctccgcctcccgcattcacaacattctcctccctcagcctcccgagtagctgggactgcaggtgccggctaccacacccagctaatttttttgtgtgtgtgtatttttagtagagacggggtttcactgtgttagccaggatggtcttgatctcytgacttagtgatccacccgcctcagcctcccaaagtgctggaattacaggcatgagccacagcgcctggcgactaacagctttttaaaacagctgctcttgtttaatcctcacagcaaccctgagagctacaggtctcgtcctcgccattttacaggtgggaaaactgaggctctcagcagttaaggccctcacctgagctcccttagccgtaagtggcagagggtgtctgacgctaaagcccatgcgctcgctccacgcctaccttgtcctgcctccc

SEQ ID NO: 728673 - DNA, 560 bp, Homo sapiens
tagctgctgttggttgaaatgaaagttggccctggactaacaggttttttttttttttgagcctgagtctcgctttgtagcccaaactggagtgcagtggcgcaatctcggctcactgcaagctccgcctcccgcattcacaacattctcctccctcagcctcccgagtagctgggactgcaggtgccggctaccacacccagctaatttttttgtgtgtgtgtatttttagtagagacggggtttcactgtgttagccaggatggtcttgatctcctgacttagtgatccacccgcctcagcctcccaaagtgctggaattacaggcatgagccacagcgcctggygactaacagctttttaaaacagctgctcttgtttaatcctcacagcaaccctgagagctacaggtctcgtcctcgccattttacaggtgggaaaactgaggctctcagcagttaaggccctcacctgagctcccttagccgtaagtggcagagggtgtctgacgctaaagcccatgcgctcgctccacgcctaccttgtcctgcctccctgga

SEQ ID NO: 728674 - DNA, 597 bp, Homo sapiens
caagacaagtgtggccagacagtggtccctctagggttggcatagccccaaagagtggagaagggcttggggttgggtgcagcctgagtgatgggtggggtgcagtggggctgctgaatgagagggccggtgcagcagccaggtggacatgagtgctgccccagcccttgctgcatgctscacgcactggtcctcagtggacccacagggggcgagagctgcttatgtcctgggggagccatccaaccagggctctgatggtcctgagatacacgtattagtttaacagtttccaagtcactttgatcttctgtggaaacctgcttgtacatcagggtctgtcctcgggctgtgacccgctgtgaacagcttcccttccagtgcggtacagatagccaagagtggcctgtatgtgctgagaacagtgacaggacgaagggaaatggagggaaatccagggagactgtggtctctgaatcgtttgtctgtcctgtgccctggtcttctccctcatggtcagagtggcctttccttaagtgaggtccacagggtcacctggagtctccttgaggctagagaggctgcctggggtggggt

SEQ ID NO: 728675 - DNA, 594 bp, Homo sapiens
ttcctctgctcggtcgcgaccgtcgtggtttgcaacgtcccggcccaggcggcaattccttcccttcgttgttttccactgtctttgctctagagtctaaccgagtgggggcttttctggcatgggcaaagggagttttgcagagggtcatgtctaggatccttgggccggctcgtccctgcgctgtggctccccgtggccctcccccagccccggtcactgccccccgcagtcatctctttcctgtgctgagccactcggaggttgctgtgtggcagccgcccccacccgaacctagctggtgaagcgccttcctaattgccccccgcagcagagacccccatcgaggagttcacgcccacgccagccttcccggcgctgcagtatctcgagtckgtggacgtggagggtgtggcctggagggccgggctgcgcacgggagacttcctcatcgaggtgaggtcgttctggccggtgctgcccagtgggatgctgagccctgagccctgtggtggacgtgcctggggcgtccccacccagctgcctgtctatcccaggtgaacggggtgaacgtggtgaaggtcggacacaagc

SEQ ID NO: 728676 - DNA, 614 bp, Homo sapiens
caggcagacatcaatcaataaatgtaagctgtacattggttcagcctggaaaggcaggacaattgaagcttccaggtcataggtggattcaaaggttttctgattggcaattggttgaaggacttaagttattatctaaagatctggaatcaatacaagggaatgtctgggttaagataaggggttgtgaagaccaaggtttttattatgcagataaaacttcagggagtaggcttcagagtcaataggttgtaagtgtttcttatcagacttaaaaaggcgccagactcttagttaattctctcctggatcaragtaaagacctggaaagggaaagggattctctacagaatgcagatatcccccacaagagacagctttgcaggaccactgcaaaatatgtcaaagaaatatattttgaggtaaaacacttccatttctttcagagcctgctatctgtcatgtgatgctacactagagtaaggttggaatttggtgtcctattgctacaaggagtctgttttttcattcttcagatctctgtcttcatggtaacgctggtctgttgtgcctgaactccaaagggaggagggtaaaatgaggcacgcccaacc

SEQ ID NO: 728677 - DNA, 594 bp, Homo sapiens
cctcagttcagagcacagtgatgattcgtgactttctttcccaatagaacttcaaatctctgaagacggggggtggggggatgtgcttgagtgtttgtactcatggtcttgttctagaagtgacaaagctgggacrcaatacctttatgcatgaaaaggttgtcacttgtcacaactaacaggctttcacctcacggaaattttcttcccttgtgcacttttcccctggcagtggacatggctgcactcttccaagaagcaagcagctgtcccgtctgctcagactatctagagaaaccaatgtccctggagtgtggatgcgctgtctgcttcaagtgcatcaattcactgcagaaggagccccatggggaggatctactttgctgttgctgttccatggtctctcagaagaacaaaatcaggcccagttggcagctagagaggctggcttcccacatcaaggaactggagcccaagctgaagaagattctgcagatgaacccaaggatgcggaagttccaaggtgagggatctgtatacactgcccccttcctacgaccagaccaggaaaaatcatctgtgcaactggcccct

SEQ ID NO: 728678 - DNA, 632 bp, Homo sapiens
atctcaaatgtttagacatttgctttcagtttggtcaattatgaatacagctattataaaccttcctgtgtcttgtttggaaacacaatttttaaaatgtaactgaggaaatacttaggattatgattacttgcttgtatggtaagactacatttttctttgtaagaatttcggtagaatttaccagtgaaatcatctgaatatagtgttttagttttttgaaaagatattaatcattgattcaatttctaaaataaatataggcctattcagatgatctatttctcctgagttttggtcttctaaaatagattttaacagttagctcatttcatctmctgtatccaattgtgagcacagatgtgttcaggatattcctttattatttactattttttgatttgactcttcttaaacagatattattagtacactgtgacttctttctttcctttgtgggtagccaaggtagaggtttatcaacattactgatcttttcaaagaactggtttttggttttgttgattttctctgaggatttcctgttttctattccattgtattctgcaatcattatttatttttcctctgttctatattacactgctgtctttctctcattgcccaagttg

SEQ ID NO: 728679 - DNA, 613 bp, Homo sapiens
gagggaaagcttttatagggtgaatgtggaagcagagcaaagaaattatttaattggttaaagtggagcagtcctttcatttgaactctccagccagggggagttcctcgtaatagaactcatgcttacttggctgcctgtgattggctgagygtaagtttctttttttctttctttttttttttttttttgagacagtctcactctgttgcccaggttggaattcagtggcatgatctcgactcacggcaatctcgcaatctctgcctcccaggttcaagtgattctcctgcctcagcctaccaagtagctgggattacaggtgcccgccaccatgcctggctaatttttttttgtatttttagtagaggtgggatttcaccatgttggccagggtggtcatgaactcctggcctcaagtaatccactggctttggcctcccaaagtgctgggattacaagcatgagccaccacccctggccttaagtttaattctgcttatgtaagaacccaaggcattagggtacccttagtctgagggcctcccttttaattgttttaacaatatacaaaacataaaatgtatggtatcaatcactttaaagtggctga

SEQ ID NO: 728680 - DNA, 627 bp, Homo sapiens
agctccacctgcagccctggtgcaggatccactaggtgaagccagctgggctcctgagtctggtggggacgtggagaacctttgtatctagctcagggattgtaaacgcaccaatcagcgccctgacaaaacaggccactgggctctaccaatcagcaggatgtgggtggggccagataagagaataaaagcaggctgccrgaggcagcattggcaacccactcgggtccccttctgcactgtggaagttttgttctttcactctttgcaataaatcttgctactgctcactctttgggtccacgctgcttttatgagctgtaacactcagtgcgaagatctgcagcttcactcctgagcccagcgagaccacgagcccatggagaggaacaaacaactccagacgcgctgcgttaagagctgtaacattcaccgcgaaggtctgcagcttcactcctgagccagcgagaccaggaacccaccagaaagaagaagctccgaacacatctgaacatcagaagggagagactccagacgcgtcatcttaagagctgtaacactcacggcgaaggtctgcagcttcactcctgagccaacgagaccacgaacccaccagaaggaagaaac

SEQ ID NO: 728681 - DNA, 627 bp, Homo sapiens
agctccacctgcagccctggtgcaggatccactaggtgaagccagctgggctcctgagtctggtggggacgtggagaacctttgtatctagctcagggattgtaaacgcaccaatcagcgccctgacaaaacaggccactgggctctaccaatcagcaggatgtgggtggggccagataagagaataaaagcaggctgccggaggcagcattggcaacccactcgggtccccttctgcacygtggaagttttgttctttcactctttgcaataaatcttgctactgctcactctttgggtccacgctgcttttatgagctgtaacactcagtgcgaagatctgcagcttcactcctgagcccagcgagaccacgagcccatggagaggaacaaacaactccagacgcgctgcgttaagagctgtaacattcaccgcgaaggtctgcagcttcactcctgagccagcgagaccaggaacccaccagaaagaagaagctccgaacacatctgaacatcagaagggagagactccagacgcgtcatcttaagagctgtaacactcacggcgaaggtctgcagcttcactcctgagccaacgagaccacgaacccaccagaaggaagaaac

SEQ ID NO: 728682 - DNA, 627 bp, Homo sapiens
agctccacctgcagccctggtgcaggatccactaggtgaagccagctgggctcctgagtctggtggggacgtggagaacctttgtatctagctcagggattgtaaacgcaccaatcagcgccctgacaaaacaggccactgggctctaccaatcagcaggatgtgggtggggccagataagagaataaaagcaggctgccggaggcagcattggcaacccactcgggtccccttctgcactgtggaagttttgttctttcactctttgcaataaatcttgctactgctcactctttgggtccacgcygcttttatgagctgtaacactcagtgcgaagatctgcagcttcactcctgagcccagcgagaccacgagcccatggagaggaacaaacaactccagacgcgctgcgttaagagctgtaacattcaccgcgaaggtctgcagcttcactcctgagccagcgagaccaggaacccaccagaaagaagaagctccgaacacatctgaacatcagaagggagagactccagacgcgtcatcttaagagctgtaacactcacggcgaaggtctgcagcttcactcctgagccaacgagaccacgaacccaccagaaggaagaaac

SEQ ID NO: 728683 - DNA, 640 bp, Homo sapiens
agaggttgacaggtagaaggatcctaaaatttaattcctgggctgctaacttcaaatctcatctgtatcaacagttttctcacttaagtcattaacatcgaaaattattttattaaatgatttataattgggagagtactatttctctttctccccacctccagttatgagaagatacttattcccagctttttctgggtagagctattcaattttttttttttttttttttttgagatggagtttcactcttgttacctaggctggagtgcaatgctgcaaaatctgctcactgcaacctccacctcccaggttcaagcgagtctcctgcctcagcttctggggtagctgagattacaggtaagtgcccccacgcccagctaatttttgtatttttagwagagatggggtttcaccatattagtcaggctgatctcgaactcctgacctcatgtgatccacccgcttctgccttccaaagtgctgggattgcaggcgtgaaccaccgcatccagcccaatttgttttttaaatctttttggcactctaccaaatcacgaaggctcttcttagttaggggaacagaagggatttagtcttaataaatttttctccatgccatggggaagactctctcaga

SEQ ID NO: 728684 - DNA, 707 bp, Homo sapiens
agctgtacaggaagcatgacagcttctgggaaggcctcagggaacttttaatcattgcagaaggcaaagggaaagcatgtatgtcttacatggccagagcagggggaagagagagagaggggaggtgctacatacttttaaacaaccagatttgtgagaattctatcacgagaacagcagtagtgggatggtgctaaaccattagaaaccacccccatgatctaatcacctcccacaagtccccacctccaacactggggattaaaattgaacatgagatttgggttggktcacaggtataaaccatatcatctactaaacataaaaagcccaggactacacagattcacagccaaattctaccagatgtagacagaatagctggtgccattaataatgaagctattccaaaaaattgaggaagagggactcctccccaactccttctgtgaggccagcatcatcctgataacgaaacctggcagagacaaaacaaaaaaagaaaacttcaggccattatccttgatgcacatagatgcaaaactcctcaacaaaatactagcaactgaatccagcagcacagtgtaaagctaatccaccactatcaagcaggctttatccctgggatgcaagattggtttaacatagacaaaacatatgtttgtgtgattcattacacaaacagaactaaaaatgaaaaccacatg

SEQ ID NO: 728685 - DNA, 707 bp, Homo sapiens
agctgtacaggaagcatgacagcttctgggaaggcctcagggaacttttaatcattgcagaaggcaaagggaaagcatgtatgtcttacatggccagagcagggggaagagagagagaggggaggtgctacatacttttaaacaaccagatttgtgagaattctatcacgagaacagcagtagtgggatggtgctaaaccattagaaaccacccccatgatctaatcacctcccacaagtccccacctccaacactggggattaaaattgaacatgagatttgggttggtwcacaggtataaaccatatcatctactaaacataaaaagcccaggactacacagattcacagccaaattctaccagatgtagacagaatagctggtgccattaataatgaagctattccaaaaaattgaggaagagggactcctccccaactccttctgtgaggccagcatcatcctgataacgaaacctggcagagacaaaacaaaaaaagaaaacttcaggccattatccttgatgcacatagatgcaaaactcctcaacaaaatactagcaactgaatccagcagcacagtgtaaagctaatccaccactatcaagcaggctttatccctgggatgcaagattggtttaacatagacaaaacatatgtttgtgtgattcattacacaaacagaactaaaaatgaaaaccacatg

SEQ ID NO: 728686 - DNA, 590 bp, Homo sapiens
aattcattaacttaataacttcaatatgttgttcatataaaaatttctggtaaatgagaactgtacattactgatgtgacaaggtacacaagccaatgttgacataatgttttcaaaatggggtgtctgctgtaactgaactaaatataataactttattcaagaaygagtttcaatgataggacaaaacttgataaaatgaataaataaataattatatgccagagttcagtaaaccctgtgtgtacacctgaaaaagctcaaacttgcctagcacatatagagtccgaattcagttgggtttgtgtgaaacgggtaggttgagccctaaaaaagaggtagataacccatataggcagacttccttattttatttatttttttctgcttcagcctcctgagtagctgggactacaggtgtgtgccaccacgtctggctaattttgtttgtttttagtagagatggggtttcaccatattggccaggctggtctcgaactcctgaccttgtgatctgcgcgcctcggcctcccaaagtgctgggattacaggcgtgagccactgcgcctcgccaacttccttattttaaa

SEQ ID NO: 728687 - DNA, 569 bp, Homo sapiens
tgtgtacacctgaaaaagctcaaacttgcctagcacatatagagtccgaattcagttgggtttgtgtgaaacgggtaggttgagccctaaaaaagaggtagataacccatataggcagacttccttattttatttatttttttctgcttcagcctcctgagtagctgggactacaggtgtgtgccaccacgtctggctaattttgtttgtttttagtagagatggggtttcaccatattggccaggctggtctcgaactcctgaccttgtgatctgcgcgcctcggcctcccaaagtgctgggattacaggcgtgagccactgcgcctcgccaacttccttattttaaatgccatttcccactaaaaataaaacmagtaattctttgaaaaaaagttaatattatgtataggactggaagtatataagataaaactggaatatattgtcataccagaaatcaaagattttgtcaaagactaatagttccatgtcaaaaagattcactaatcaatttgcagaggctcccactggccaaagatagagcttgatcatcaacaggaataataa

SEQ ID NO: 728688 - DNA, 607 bp, Homo sapiens
atagcacattcagtgccaacaaagcatctggcacgtagtaggcactctgtcaatagatggcaaacaccagcgttattcttacaaaacaggtgaaactgcatcacctcagtctcttcttggaccaacatcagcaggtgttaattgttggagcaagtggcatctcactactcaaactatggatgataatctgctggctgcatactgtataggaaaagcatttttacctgagaaagataactttcaactttctaatctagccttgtaccagttgcaaataattgttattatatgttatgctttatagacagccttgtttttaattatgaggtttttattggagtggcaggtttcagggtaagtctgccatctgacttgccagtacttgttaaaagtttttatagtgtgactcatttacatatgcatgtgtatgtttaggtgctattattaaattttgctggcatatagtgagraaattgtgattcaaattcgtccgtatgtactcctcccccaccatctgctctgcccctccatttaccagaaggctagctttagctacttgtgcatgtaaaacagaagcaagcaacactgtgaaagtgaaaatctttta

SEQ ID NO: 728689 - DNA, 576 bp, Homo sapiens
tcctctgctcggtcgcgaccgtcgtggtttgcaacgtcccggcccaggcggcaattccttcccttcgttgttttccactgtctttgctctagagtctaaccgagtgggggcttttctggcatgggcaaagggagttttgcagagggtcatgtctaggatccttgggccggctcgtccctgcgctgtggctccccgtggccctcccccagccccgggtcactgccccccgcagtcatctctttcctgtgctgagccactcggaggttgctgtgtggcagccgcccccacccgaacctagctggtgaagcgccttcctaattgccccccgcagcagagacccccatcgaggagttcacgcccacgccagccttcccggcgctgcagtatctcgagtckgtggacgtggagggtgtggcctggagggccgggctgcgcacgggagacttcctcatcgaggtgaggtcgttctggccggtgctgcccagtgggatgctgagccctgagccctgtggtggacgtgcctggggcgtccccacccagctgcctgtctatcccaggtgaacggggtgaacgtgg

SEQ ID NO: 728690 - DNA, 515 bp, Homo sapiens
tgtgtgatgaggatcccccacgcctgaggaagactcagaaacagagcctcatcaggaagaggaagaggaggaagaagaagaagaagaggaagaggaagaggaggaggaggaggaggaagaaaagaagaagaagaagaaacagtttctccactggaggtgggagctgccattatgatgattccgcagttaatggagaagtttaacttggatctatcaacagttacacaggccttcctaaaaaatagtggcgagctggagctagagagctgatggataaatttggtcccaacaagatgacataggtttgtaaaaagatgatggggataacagagaggcattggtcaaaaaatttggtgctcagwatatagctcagaggattagaggattgagtttcgaaagaaataattggcaagataatgagaaaagaaaaaagtcatggcagatgaggtggttaaaaaaaattgtgaccatttaactttagagagttcttgcattggaactggcacttatcttct

SEQ ID NO: 728691 - DNA, 625 bp, Homo sapiens
aacaaaaagtttaagcgatttctgcaaagagcaataaaagccatagagcagcttgggacaaggtcaggtcaggatgagcagaagttgggaaggaaagaaggaagccaggatggacttggagagtttttaccagttcctcaggcaggaagaattgtatggtaggtcagagcatatttctaggaagacctcggttgacaaatttctctgccactgagagatgacaatttaccttggtarctaatctctctcctcatgttcccatctatttgatattgatttaatatgagtagctacctcccatgtgtataataggaaatgtatgggagaatgcatattaattcctgaatagaatatctggttccatgaatgatggaagttggttagaatttattattggaaactcaccctgcactacctatagttggtttattttaattatacttatattcattatatagtaactcatatatatttgtcatttcttttcttatattcaaaaagtctctacataaataaactctgcacctatggtcattgctgggtatctgttctatacacagcaaggagccagacgccctatcttacttgttcactttccagcttctccttagaaaaaaaaatacaa

SEQ ID NO: 728692 - DNA, 620 bp, Homo sapiens
aaatcaccaaatttgctctcatatagatgggttatgtacaaagtaatgggtgtttgtctttatcacatgtgatttctctaattaaattttatattrtctaaagtgagtcaaatatatgatgtggggggaagtgggagggcaccacaacattttaactctgctttctaacaagagaataggatgtaagaggaagaacaagtgggccacatttgaaagcccaagacatgtgaaatgaatctattatgtatttgtagctggaacacgtaaacactgccagtgaatttttaaattcttcatcttttgtcccacattcttacatacatgcacatttttcacatatttaacaagtaatacttttatcaccacgatttttgctattgattgcttctttaataacaaaatgcatcacaaacaaaaatgaatgaagctgtctgaggagaaaattccgtagtagctttactgtcaatgcccatcataaataaccatgacatcataggagccttatctacgggttgccgctactgatcgatggcatcactctagtagtgtaaatagcttctaatgtcccatcttccaccttcaaataggctctgattatttatgatagctgttaggttaca

SEQ ID NO: 728693 - DNA, 620 bp, Homo sapiens
aaatcaccaaatttgctctcatatagatgggttatgtacaaagtaatgggtgtttgtctttatcacatgtgatttctctaattaaattttatattgtctaaagtgagtcaaatatatgatgtggggggaagtgggagggcaccacaacattttaactctgctttctaacaagagaataggatgtaagaggaagaacaagtgggccacatttgaaagcccaagacatgtgaaatgaatctattatgtatttgtagctggaacacgtaaacactgccagtgaatttttaaattcttcatcttttgtcccacattcttacatacatgcacatttttcacatatttaacaagtaatacttttatcaccacgatttttgctattgattgcttctttaataacaaaatgcatcacaaacaaaaatgaatgaagctgtctgaggagaaaattccrtagtagctttactgtcaatgcccatcataaataaccatgacatcataggagccttatctacgggttgccgctactgatcgatggcatcactctagtagtgtaaatagcttctaatgtcccatcttccaccttcaaataggctctgattatttatgatagctgttaggttaca

SEQ ID NO: 728694 - DNA, 487 bp, Homo sapiens
taggaagaatcaatatcatgaaattggccatactgctcaaagtaatttatagattcaatgttatcccatccagctaccattgactttcttcacagaattagaaaaaactactttaaatttcatgtggaaccaaaaagagcccatatagccaagacaatgctaagcaaaaagaacaaagctggaggtgtcacgctgcctgacttcaaactatactataaggctacagtaaccaaaacagcatggtactggtgccaraacggataaagtagaccaatagaacagaacagacacctcagaaataacaccacacatctacaaccatctgatctttgacaaacctgataaaaacaagaaatggggaaaggattccctatttaataaacggtgttgggaaaactggcaagccatatgcagaaaactgaaactggacctcttccttataccctatacaaaaattaactcaagatggattaagatttacatgtaa

SEQ ID NO: 728695 - DNA, 649 bp, Homo sapiens
aatatttaactgttaatgagtatctattactgtcagccaaacatatttatcactgccaaatgctatacagcttcatcagccttcaggaaaattctccatcagcctcagttgatgtagggctcatacctaggacacagagggctgataatttgtcattttgacttgaaatgaataaagaaaagccatatttaactggcacacaattatggggttttgattctggttatttgaaatttctagatagctgaagattagcagaaaatgtcattttacttattttttaaataaactttactttataaaccagttttaggtacacagcaaaatttaacagaaggtatagagatttctcatatatatcctgcctrcacatatgcatagcttccccacccattttatttttatacttgaataacacactcttcccctctttcccatatcccatagaatgtgccaggcaaattgcttgcctttgtagttaagcaaggctttaaggctatcatcttgattgaagatccattctcattattcagaacattatgtgtagaagtggtagatttaggaaattgaggtgaatgtaggctgaccccaggttgactactctggattaatttttcttttttggccttttaaaatttaaactctgatt

SEQ ID NO: 728696 - DNA, 594 bp, Homo sapiens
aaatttatagcactaaattcccacaagagaaagcaggaaagatctaaaattgacaccctaacatcacaattaaaagaactagagaagcaagagcaaacaaattcaaaagctagcagaagacaagaaataactaagatcagagcagaactgaaggagatagagacatgaaaaacttttcaaaaagtcaatgaatccaggagctggttttctgaaaagatcaacaaaatagaaagccagactaataaagaagaaaaaagagaagaatcaaatagatgcaataaaaaataatatagaggatatcaccactgatcccacaaaaatacaaactaccatcagagaatactataaacagccctatgcaaatacactagaaaatctagaagaaagggacaaattcctggacacatacaccctcctgagtctaaaccaggaagaagtmgagttcctgaatagacaacaagttctgaaattgaggcagtaattaatagcctaccaaacaaaaaaagtccaggaccagatggattcacagcagaattctaccagagtacaaagaggagctggtaccgtttcttctgaaaccattccaataaatag

SEQ ID NO: 728697 - DNA, 474 bp, Homo sapiens
aggtgtaaggaagggatccagtttcagctttgtacatatggctagccagttttcccagcaccatttattaaatagggaatcctttccccattgcttgtttttgtcaggtttgtgaaagatcagatggttgtagatatgcggcattatttctgagggccctgttttgttcctttgaactatatctctgttttggtaccagtaccatgctgttttggttactrtagtcttgtagtatagtttgaagtcaggtagcatgatgcctccagctttgttcttttggcttaggatagacttggcgatgcaggctctttttttgttccatatgaactttaaagtagttttttccaattctgtgaagaaagtcattggtagcttgatgcggatggagacctcactctcagaaggaaaactaacaaacagaaaggaatagcatcaacatcaacaaaaaggacatccacaccaaaaccccatctg

SEQ ID NO: 728698 - DNA, 645 bp, Homo sapiens
ctgacatagaaactgtaaggagtttgtgccatttatctgtctttcatcacactaagggtaacagagcaaatgagcaccgtgttaggagtccaaatacatgagttttgggctaaaccttgtcactaactagctgtggccttgagcatgccatttaatctccgtggggcctctggttcccttttgtgraatgaggagagagttttgggtctccaggactcctttcaactccagtgttctgtactaagtcatcagtgagttctggctagtaatagtttcaaaaggtaatagtgctcatcacattccaccgagtaaaatcatagagcagaaacaccaagaaagtggacatcccagctgcttttaacgtttactcatcaacagggcttggctcaaatagttctgaaagtaatccatgcataacatttctgaaaggggaagtaagaatgtcatcttgcatttgaacattttaaatgtcaaaccctctgcattgttagtatttataaagttatctctatggcattatcactatcaaagtaatcaatcatagatttattgagaaatataaacatcaatgttttttatctcacctaagtattttctgtgctaaattttattctgttgcagcatacttgacaattagtgatttgt

SEQ ID NO: 728699 - DNA, 636 bp, Homo sapiens
cacaaaggaagggcaaaatatgttgtttcccaatctaagttcattgttctagatcagagaaatgtgggagatagtctgagctgtggttctgagggaaagacagaccatcctatcatatgtttgcaaatgtgtgtgtgcctgcgaccacctggcatttcaaagatcaaaacataccatgatgttcagtgtgctgggcatccaaacttgcatctcagtctccatttttttwaaaaaaaaacatgattataaatatctataactatataaatgaaaacttcatattctgtccacagtgtcttctatttttactgtcccaaatgtgagattgcaaccagaagctggagaaagcatgcgggcctttgggaaaaacaatagttatggcaaaagtctatcaaacagcaagcactgacaagcagcacattctcaagagcacacaggtaagaggacctgctttacctggaaagtaatatttaatggatattgaacggattctttaagtgaaatatttcagactcgttttttcaccaactatcctatgagtctcttgtgtgcattatggcattcatcagacctattgagatagaatgcactcagtcatttccatattttcaggcacctactagattctaactaaaa

SEQ ID NO: 728700 - DNA, 561 bp, Homo sapiens
tgtatacacagagatggcagtaagagtggctacacagagcaaagatatgtacacatatagaaggatatatgcaagaatgtgttttttacttacagctttgttttatgagaaccaagatcttgcctaaagtcaccttcagaacattatctaatatacatgcaaacatactgcccatagaagtcagaactaagtgcctcaagacaagccacttaaattccccagatctcagtcttctcatctgtaaaatgatacagatctgttttagctctaatgttctactatgaactttargcagcagtttgcagctggtaaataattttagataggtcaactagtaaagtctcacacataaattcacttctttgtgcttcctttgtgttccactttcccttagaattttaggatttagaaaggacaaagacaggtacataccatgtatacacttctcttaatgtctccagtcttttcagattttccttaactctgacatcctggcactgtttctcagtggtggcatcctgggcattttggctgaaaattatttgggtgcagcatttccac

SEQ ID NO: 728701 - DNA, 559 bp, Homo sapiens
cacacacacacacgtacattttctagctctatctgctcaaaggccctaaaagcagattcccagtaccaatgaacacatctacccagaatttggtcttttgcggatttttggagacagagtctcgctctgtcgcccaggctggagtgcaatatcacaatctcgactcactgcaacctctgcctcccaaattcaagcaatcctcctgcctcagcctcctgagtagccaggattacaggcatgtgccacgacgcccagctaatttttgtatttttagtagagatggggtttcaccatgttggccaggctggtctcaagctcctgacctcaggtgatccgcccrccttggcctcccaaagtgctgggattacaggtgtgagccactgtgcccagcccagaatttggtttctaatagcattccccatgcagaggaatcagggtccatggggaaatgctgaagcacaaaagcataaaataaaagcctgtaaaatctagttatgtcacaaagtaggaaggtgctaaaatagttgggcatatcactaagacataggagccaacttga

SEQ ID NO: 728702 - DNA, 559 bp, Homo sapiens
cacacacacacacgtacattttctagctctatctgctcaaaggccctaaaagcagattcccagtaccaatgaacacatctacccagaatttggtcttttgcggatttttggagacagagtctcgctctgtcgcccaggctggagtgcaatatcacaatctcgactcactgcaacctctgcctcccaaattcaagcaatcctcctgcctcagcctcctgagtagccaggattacaggcatgtgccacgacgcccagctaatttttgtatttttagtagagatggggtttcaccatgttggccaggctggtctcaagctcctgacctcaggtgatccgcccgccttggcctcccaaagtgctgggattacaggygtgagccactgtgcccagcccagaatttggtttctaatagcattccccatgcagaggaatcagggtccatggggaaatgctgaagcacaaaagcataaaataaaagcctgtaaaatctagttatgtcacaaagtaggaaggtgctaaaatagttgggcatatcactaagacataggagccaacttga

SEQ ID NO: 728703 - DNA, 571 bp, Homo sapiens
agcaaacttttagtgagcttataccatattgatttagtttctgtttttacatatgctgaaggaactgcttgtttgttatgcaagtttcataaccacaacagtcataaaattcattagaaacaattccattgagcatcaggagagagatgaagaaatgcctagtggtgatatataagctaaagtggagggcattaccctttctcccacaatgccatcaaatgccccctattgagccaccccaagtaacatacaagataaaaatatacgagcttgctatcaaaatgaaacrtcaagacaagccatctcgactgccacacagatttcccttctgtgctgtcctatataaagattttgagtgccactgcaaaggacctaacattggtttgccttagggaaaaaaaattctttctttagttttgtttttttctttcatttgtttacatcttaacattttctgaattgcttctgataaccttattcaagctacagtgaacctaaataaccttcttatcaaggttgcagaagggagatggtggctcagtaatgaagacccgaaaaaagaaaaaaaaaa

SEQ ID NO: 728704 - DNA, 642 bp, Homo sapiens
caagtgtgaactcatagcatccttgcatttctgtgaggaagtaaatgtgattttacaaaggaggaaagtgaagcacagagaggttaactaactgcccaaggttattcctcttaacagaggaattattccataagcattattccactatcatgccaatgaagtattcaaatgaaaatcaccccaaaggcaacagattctttaaatgtccccatttaaatgtccccatctctggctttgccaagggcactttcctcaggggagaaaatcaagagagcaagagagcaaagcaggacttgtatttcactggcacagcataacctgggtgctggttcacttcttatcacccatgggctctgtgacttcccacaagttacttagcttctcagggccttagactctgtcacctgtaaaatgaggagctcatgataaatgataccagaatttctttcagttctaaatgsctgtggtttaaactgatggacttgttgtataccaattctcctaagttccaaacatgtgaaagtgttcctcaaagtattgacaaagttgtttaaaataaagcacacaaatgctttttccaaagtgaagtgacctcatggagggacgtgccaatttttcttactcctttgttgaaatataatt

SEQ ID NO: 728705 - DNA, 641 bp, Homo sapiens
acaaagctggcatcaggacaactctcctgttacccctaaagttaagtaggacgctgtgctgtaataaggacactggtggcccaccaccaacagatggtatatgatgaatggttctagtcattttgatgaacgggactgtgggtctaagtaagcaagtcctttggcaagtgacatacatactcrtcccagcttcctcttgtgattttagaccatatctgatgagaagtaagagactgaatttaggatacaccctatttttaggtgtaaaagaggttttttcacctctgggccatctagagattgaacattcatccatagtcttgtatttcattcattcacatgagtgatgtgtgtgcagacttctagatatcagaaaatatcagatcctttcatccggaaccctttttagtattttagtaatttgtgaattggaaattctgctgtgctaaaggacagaatgactacctctaattaagtttggatctttatatggcagatcttcataaaactgattgtaatttactaatcatcttcataggcttatcaccatttactaacctcagccatatgatatttcataatattttatcatgcccatttgcaagttggttgtttttctgcactgctctacatgccaatct

SEQ ID NO: 728706 - DNA, 567 bp, Homo sapiens
gggtgtccatcctctgaagcattatcctttgtgttacagacagttcagttacgctcttttagttactttaaagtgcacaattaaattattattcgctatcatcaccctgttgtgttatcaaatactaggtcttattcattctttctaacttttttttttacccattaactatccccacctccccactaaccccccactatccttcccagcctctaataaacatccttctactctgtgtctatgagttcaattgttttaatctttagatcccacaaataagtgagaacatgcaatgtttatctttctgtgcttggcttacttcacttaatgacctccagttccatccatgttgttgcaaatgacaggatctcatttcttttttatggctgaatagtacttcatygtgtatatgtgtcacattttctttatccattcatctcttgatggacacttaggttgcttctaaatcttggctattgtgcacagagctgcaacaaatgtgggagtgcagatatcttttccaaatactgatttcctctcagtatttggaaaagattgctggatcat

SEQ ID NO: 728707 - DNA, 667 bp, Homo sapiens
ttagagctgcactcaatggtagcagtagttccaagtccctttaaaactaagttaatttaaaaaaaaacgactaatgaactgttaagcattgtgggcagttgtttcttgttaattcaagttaacagatgagccagttacatttttatttcatggcccttgattaagagggaatcataaaggtctattacatctggcttagcaaaatggtgatgggttctgcatgtatgatttttttcggtggctgttcattacctttgctgtcttctcaagttgctgcgggaagctggcccagttaggcaggaaaagcacagtagcacctctgtttatttggtcataagcaaattcctcctgtggttaaatttgtcttggtagagtttaccaatgcaataacacttcttttaggaatcttccttaattaccagaaggttgcatgcaaaagaaaatatagacaactacctctaagatagggacaaattattagatgtctatgagcaaaaaagccaataacattttcaaaatytgtgtgccttcctgcttttttttctggagattaagagagtgatctaagatggtaagtttgtttttaaattttataagtaaagtctaaatcattgaatcagatttctgcattattatacatgaaacttctttcattttattacacgct

SEQ ID NO: 728708 - DNA, 521 bp, Homo sapiens
ttgctgagtactagcaacagttccaaaaatttgttacatgcacaaaactttgtttggttaaaaccaaccaaacaacaagcaagcaatggctgaccacttcttttccttgtgagctaccatggagctacattttaaagatacaatgggaatatactgtttcctaacttaccttttcccatggaaataaaaatagaaaagaaaaaaaagattagattatgattaggttctctgtttaatttagactaggctgaacttagtacccagatatggattattttcctggcagatctttattatattatttggctatttcttgtgacctgaaaatcaaayaaacgaatcacatgctctcttagagggaacttagagggcatctagcctacgcaccaaccctataaatgctactgaaacatcaccaatgtgtggaggtccagcctcttcttagacacacaatgaaaactcactattctcacaaaccccaatccactcttcagataactgtctaatcattagatttctac

SEQ ID NO: 728709 - DNA, 626 bp, Homo sapiens
caaaagtaccaaatcaggcccggcagctgcagagagattacatcataactcagctgtgcctggattacccactccacactggcagcattcaaggttagaaaaatcaaatggcagcacaattggtcagcagcttctcttcttctggaatttttccaggttcttgaaacaaacagacaaacaaacaaacaaatgaacataaagctgcaatcactcttgcattgatttcaaaacagtaaactaggcggtttccttggagaagcagagcctgtccagaagacagcagctggaaggcctccagatagcaatcctccacagctctgtagggcttgctgagggggacccataagccaccaagggtgttctcygcaggatcagcttaaggcggctgctgaggcctcaggctgtattcagctccgaggtgttctggctgggcggcaggtgggaatccaggttttctttgcacctttccaggtcctggaagtatgggtgagacagggcactgtaggcagatattcttttggctgggttaaatgtcaaacacttctgtaataaagaaaaaaataattggttgatatacaatacatcaatgtaaataatgtacttacagagttatccctttattcact

SEQ ID NO: 728710 - DNA, 632 bp, Homo sapiens
tcagtgagctcatctagttatatacagaatggtgatggcaatacctaccttataacattggactgatccacccaacaagcataccttgggcaccttccagtgttctctgtgtgggggtacagctgaactgccacagggtgacaaaggaactagagctggggttgggggtgggggctgctggggctggcccaggcaggaccttcagtgcctggctaggagccttggactctgtcctcagagcagtgggaacccaccggagggcttccgttgcagggtgggaagggtgatggggtatgccagactcatccaaacaaagccacagtctttggggagggggcagcaactggaggcagggggactgcacaggcagctatttgcaaggattctgcaggcaaaagtagtgtggggggaaattggggatgaacttgaaacttaggtgatgggtggggatgtaaattcrttcaacctttatggaaaacactaggaagatttctcaaagaactgaaaatagaactaccattcgatctggcaatcccgttgctgggtatctaaaggaaaagaaatcattacgtcaaaaagacacctgtatttgtatgtttactgcagcactattcacaatagcaaagacaaag

SEQ ID NO: 728711 - DNA, 622 bp, Homo sapiens
tacatttgtttatccattcatcaaccaaaagtccacttggggccagggatggtagcttgcgcctgtaatctcaacactttgagaggccaaggtgggaggaccacttgagcccaggaattcaagaccagcctgggcaacatagcaagaccccttctctacaaaaaaaattggccaggcatgatgatgcatgcctgtagtcccagccacttgggaggctgaagtgggaggatcgcttgagcctgggaagttgaggctgcagttagcagtgatcgcaccactrcacgtgagtctgggtgacagtgagactgcctcaaaaaatgtttttaaaaatacagtcgtattggctgttccaaatgatggtgccatgaacatgggtgtacaagcatgtgctgctcttatgatacaatgctgatgtgctccccatcaaaagctggggtctatattccctctccttgcacctgggaaggttgtgacagaaatgatgctatgtgacttccaggctagatcataagaggtgatacaacttgctcctcatcctctttagtggctcactcttggagcccagtcgccatgttgtgagcaactcagaccagacttagaggccacatgtagatgttccagc

SEQ ID NO: 728712 - DNA, 633 bp, Homo sapiens
acttccctcctctctctctgcttgctttgcagcagctttactgagatatgattcacataccctacaattcacccctcggaagaagagttcttagtagagttttccatcatttttagtctgttcacagagttgtgtaaccatcaccatccagtttagaatatttgcatggccccaaaagaagcccagtactcatgaatcagtcactcccatttccccctcacctacctcctctctcarcctctcccagcctctcacaaccaccagtctactttctgtccctatggatttgccctttctggacatttcatgtaagtggaatcagatggtatgtggccacttgtgtttagagtggtgagcagagcccaggctgcggcagacatccagaccaaggcggtctgggccaggtgacagcctggctagggtttggcgaggtcagttcctcctgcctccgtggggcccatgagccgcagtccccagggatgcatccggagggcatcagaggcaggacgccgagcaagctgatacccaaggagtcacagccaccctgggagcttaaagggccgatgcagggattgggaggccgtggtctgggtcagttgggaactgggggtgatcagggatggccactcatag

SEQ ID NO: 728713 - DNA, 633 bp, Homo sapiens
acttccctcctctctctctgcttgctttgcagcagctttactgagatatgattcacataccctacaattcacccctcggaagaagagttcttagtagagttttccatcatttttagtctgttcacagagttgtgtaaccatcaccatccagtttagaatatttgcatggccccaaaagaagcccagtactcatgaatcagtcactcccatttccccctcacctacctcctctctcagcctctcccagcctctcacaaccaccagtctactttctgtccctatggatttgccctttctggacatttcatgtaagtggaatcagatggtatgtggccacttgtgtttagagtggtgagcagagcccaggctgcggcagacatccagaccaaggcggtctgggccaggtgacagcctggctagggtttgrcgaggtcagttcctcctgcctccgtggggcccatgagccgcagtccccagggatgcatccggagggcatcagaggcaggacgccgagcaagctgatacccaaggagtcacagccaccctgggagcttaaagggccgatgcagggattgggaggccgtggtctgggtcagttgggaactgggggtgatcagggatggccactcatag

SEQ ID NO: 728714 - DNA, 569 bp, Homo sapiens
cgacttgtccgaatattagtcctgatgcccccaggcagtcctcacacactgtccccacactggtaagcatgactgcccacacccccaagcttgacccgccctcactgcttctctcctcacaccccacttggcagcacgccctgccggctctgccttcaacacacatccagaagctgactatgctttgcacttgccttgcccactttatctgctgtcgctgccccttgcgacatcactgcaccatcctcctctatgcactccctgctccacccttgtccttcactctgtttgtagcatagcagccagaggggttccgctgacccctagaccagatcattttcctcctctgctcaaaatgtccagtctcgcccagagcagaagccagagaagccagagtcctgaygacgacccctgaagtcctgacccgcagaggccaacagctgcctcttcctactgctccccaagcctctctcgctggatggctgtgctccagccaggggctcctgcaccccacaatgctcctcacaggatccttgcacttgccccgctgtcttgttctaagggctcct

SEQ ID NO: 728715 - DNA, 603 bp, Homo sapiens
caggagagcctcgggacttgactgtgtgtccagtccccactacaaagaggtgggagaagtgctgacagtttggggccctcctcaaaggcacctactggcacatgtgtgcagccacccacactgctacggtgtgaatgctagtgttccccaaattcacattaaaacctaatctccaatgtgacagtattaagaggtagggcctttargaggtgattagtgcccttatatgatcagtgtccttatcaaagcggctcttgagggctggtttaccccttccaccatgagaggacacacagcgccatctatcaatagccctcaccagacacggaatctgctggcgcctcgatcttggacttcccagcctccagcactgtgaacagtatgtttctgttgtttataaaggactccatctaaggtatttggtggcagagcgtgaatgaactaagacacacacagacacacacacaagcacacccacgcacagggacccacagctgccccacaggcacacgcaccagcaggcacactcgtccacacccatatggctgctgcttatcccacctagaagtcccgacaggccctttggggggtgggggacatctt

SEQ ID NO: 728716 - DNA, 621 bp, Homo sapiens
tctattcggcattgtaatagaggttctaaacagggcaattagataagaaaaaccacccagattataaagaagcaaaactatttctatttgaaaatgatgtgattttgtataaagaaaatgctaagaaatccaaaacaaaagaaaacaattactaataaactagttcagcaaggttgcagratacaagatcaatatacagaaatccattgtatttctatacagtagcaataagcaatgtaaaaataaaagtaagaagataattcgattataatagcatgaaaaaaataaaatacttgggataaatttaacccaaaaagtgagagacttgtacaaaacattgttgaaagaaattaaggaagacccaagtaaatgggaagacatcctgtgtttgtggattagaagatgtacagttggccaggcatggtggctcctgactgcaatcccagcattctgggaggccaaggtgggcggatcacttcaggtgatcctgaagtggtcaggtcaggagttcaagacctgcctgaccaacgtggcaaaaccccatctcgactaaaaatacaaaaattagccaggcatgttggtgggcgcctgtagtcccagctgcatggcagactaaggcag

SEQ ID NO: 728717 - DNA, 630 bp, Homo sapiens
ttattattttgagaaggcgtgcctggttcattggcaccaggtttcctttcctagtgctatgcagattagatgaaatatggtaggggacctacacagataccagcgcagtgctggctccccgcctccttacagcactaggcctttccatcccaaggaaagcagtcactcacattccattagtgggaatgaaactatttatttatttatttatttatttatttatttatagacagagtttcgctctgtcgcccaggctagagtgcagtggcgtgatctccactcactgcaagctccgtctcccaggttcacgccattctcctgcctcagcctcctgaatagctgggactacaggtgcctgctaccacgcccagctaattttkgtatttttagtagaaacagggtttcaccatgttagccaggatggtctcgatctcctgacctcatgatccgaccacctcagcctcccaaagtgctgggattacaggggtaatcccggccaccgtgcccggccaggaatgaacctcttctaaagggctctctgaggtggagctaaggaaagggaccttctggctgagctagttagacaactcttcctgtggcacagcatgatgatgacaaagatgagttccc

SEQ ID NO: 728718 - DNA, 602 bp, Homo sapiens
tgatatttaatcctgctgttacatttattgatattattagaaatgtacagataacatatattttatgagaacaaaagagtaaaaaggagagtagattatataatcttacatatataatgtgatgccaattttgttcagaaaaggtatagatctaaattttttataaaacaaattgtaagattttttatttttattcttatttatttatttatttattttttggaaatgaagtcttgctccaggcygcggtgcagtggcatgcagtggtgtgatcttgcctcactgcactctctgcctcctgggttctagaaattctcctgcctcagcatcccatgtagctgggactacaggtgcacaccgccatgcccagttaattttttatattttagtagagacggggtttcaccatgttgcccaggctggcgtcgaactcctgagctcaggcaatctgcccgcctcggcctcccaaagtgctaagatgacaggtgtgagccaacgcgcccggccaagatttcttatatattttacatccaactggtttatctacagaggaatgttttctgactctgtgcctttgacacttccacaacaatattctgctc

SEQ ID NO: 728719 - DNA, 621 bp, Homo sapiens
tacatttgtttatccattcatcaaccaaaagtccacttggggccagggatggtagcttgcgcctgtaatctcaacactttgagaggccaaggtgggaggaccacttgagcccaggaattcaagaccagcctgggcaacatagcaagaccccttctctacaaaaaaaattggccaggcatgatgatgcatgcctgtagtcccagccacttgggaggctgaagtgggaggatcgcttgagcctgggaagttgaggctgcagttagcagtgatcgcaccactrcacgtgagtctgggtgacagtgagactgcctcaaaaaatgtttttaaaaatacagtcgtattggctgttccaaatgatggtgccatgaacatgggtgtacaagcatgtgctgctcttatgatacaatgctgatgtgctccccatcaaaagctggggtctatattccctctccttgcacctgggaaggttgtgacagaaatgatgctatgtgacttccaggctagatcataagaggtgatacaacttgctcctcatcctctttagtggctcactcttggagcccagtcgccatgttgtgagcaactcagaccagacttagaggccacatgtagatgttccag

SEQ ID NO: 728720 - DNA, 631 bp, Homo sapiens
tcagtgagctcatctagttatatacagaatggtgatggcaatacctaccttataacattggactgatccacccaacaagcataccttgggcaccttccagtgttctctgtgtgggggtacagctgaactgccacagggtgacaaaggaactagagctggggttgggggtgggggctgctggggctggcccaggcaggaccttcagtgcctggctaggagccttggactctgtcctcagagcagtgggaacccaccggagggcttccgttgcagggtgggaagggtgatggggtatgccagactcatccaaacaaagccacagtctttggggagggggcagcaactggaggcagggggactgcacaggcagctatttgcaaggattctgcaggcaaaagtagtgtggggggaaattggggatgaacttgaaacttaggtgatgggtggggatgtaaattcrttcaacctttatggaaaacactaggaagatttctcaaagaactgaaaatagaactaccattcgatctggcaatcccgttgctgggtatctaaaggaaaagaaatcattacgtcaaaaagacacctgtatttgtatgtttactgcagcactattcacaatagcaaagacaaa

SEQ ID NO: 728721 - DNA, 679 bp, Homo sapiens
gttttgatgcctaaaaagtcctcttagggaatattattttgaagccctttactatgctgttaatagtgcttggcttttaacttggtaccagggaattggaaggtttctgtcattttgtgacgatatttttaaatttctttgcaggtagaagaagaaaggtgccactccggcatgaagacagactcgcttagtcgccagtcacttaagctgagtgcattgtgatttccaataattgaggcagtggttctaaaagctgtctacattaatgaaaagagcaatgtggccagcttgactaagccgccagcgcacagcgcggcaggacgcgcccgggtctcagcggacttgtgcatgttagctgtgtagatttatgtgagggcttgtaaaactctggtcttgtaaactagtcttaagcgcttttaatatggagacagatkagagcccctctccgctcccgtgtgggcccgcaggagaagcggtgatggagagccgagctcgccccttccaagcgctgccccgtgagcagtctccaccacctcccctgcaaacgtccagtggtgcagaggtaatggacgttggctctggtggtgatggacagtccgaactccctgctgaggaccccttcaacttctacggagcttctcttctctccaaaggatccttctctaagggccgcctcctc

SEQ ID NO: 728722 - DNA, 645 bp, Homo sapiens
catcctcaagatatactctggtggagaaaaagccctttttaacccaggagcctggcagaagcctgtgtctgtaatgtagctgatgactgtgaggcaccacctactctcttgagcctgttgcctcacccaaagggtggtgaggayacccgcaagggagaagaggtttgtaacatccttataaactataaaaggaacagtagaaaggcactgctcccccagtctggactgggggctgaggcagagcatccctccacattatccctcctgcaaaaagagatgacatgggtccagagccagctccttgaagctcaaggtgggcccagggcagctctaaagacttaagggttaagatcatgacctcacagctctagagcaggacatgacaaaccagagcctgagtatagtgaaatcacccacctcagctctcagcctaggtgacagaaccaccccctacctggaaggatgggcccacccagtagaggctgaagagtactaccacctcctgctggtactcaagacactcctaaagccgtccctaggagtccacctcatgggaccccactgcctggcagtcagagccctgaggaactccagaaggagcaaaagctccttagggcaagactaagtaaggtaaaaaccagtact

SEQ ID NO: 728723 - DNA, 645 bp, Homo sapiens
catcctcaagatatactctggtggagaaaaagccctttttaacccaggagcctggcagaagcctgtgtctgtaatgtagctgatgactgtgaggcaccacctactctcttgagcctgttgcctcacccaaagggtggtgaggatacccgcaagggagaagaggtttgtaacatccttataaactataaaaggaacagtagaaaggcactgctcccccagtctggactgggggctgaggcagagcatccctccacattatccctcctgcaaaaagagatgacatgggtccagagccagctccttgaagctcaaggtgggcccagggcagctctaaagacttaagggttaagatcatgacctcacagctctagagcaggacatgacaaaccagagcctgagtatagtgaaatcacccacctcagctctcagcctaggygacagaaccaccccctacctggaaggatgggcccacccagtagaggctgaagagtactaccacctcctgctggtactcaagacactcctaaagccgtccctaggagtccacctcatgggaccccactgcctggcagtcagagccctgaggaactccagaaggagcaaaagctccttagggcaagactaagtaaggtaaaaaccagtact

SEQ ID NO: 728724 - DNA, 534 bp, Homo sapiens
ggggacagggtctcactctgttgcctaggctggagtacagtggcgtgatcacggctcagtgcagctttgacctccttggctcatgcgatcctctcatttcaaccttcccaatagctgggactacagacatgtgccactttrcccagttaaatttttaaattttttgtacagacagattctccttatgttgcccatgatggtgttgaactgggctcaagtgatgcacctcggcctcccaaaatgctaagattacaggcatgagccactgtgcccagccttttctgcctgttcttaacctaatggtactgtattagaactttcataattgaataacagaaatacactccacatggagtcactgacatttagaactggaagagactttagagattagttacttataaactactttgatttgtacaaataaattcagtacaattatctgagagagggcatggttccagataggagatagtgtaaatcggttggctaactcatgccaaagagacaaaacttttgggttcttttgataaa

SEQ ID NO: 728725 - DNA, 597 bp, Homo sapiens
taaaacaaattatttatagtatagtgtattcgttttctgttactattgaaattactacaaatgtagtggctaaaacaacacatagttttcagcttagagttgtgttggttagaagtccagcatggctcttactggactaaaatcaaggtgtcagcagagctgtgttcttttctcaaggctttaggggagaatctgtttccttgccttttccagcttatagaggcagccatgttttttggcttgtggccccttcctccatcttcaaagccaacagctggtcaagttgtcacattgcgtcactctgaccataggttatctgcttttaaggycttgtgtgatttgattgggtccacctggaccattcaggatcatcttcctgtccttaaaattcttaatcacatctgcaaactctcttgccatgtaagtgaacatgttcagaggttccagagagtaagacatcaatagcttatggggctaccacagataccttatacaattatctcctgaaagttgagtttctaggatttagttgtgttatttttttttataacttgcataccatacaactcaccaagttggacagttcagtggttttta

SEQ ID NO: 728726 - DNA, 455 bp, Homo sapiens
gacattttcaggaaactgaatccacaggctggagccttctgcttccccacaacccaaacggcccccagccagccaaacagccacgagaacccagctgctagcaactgccagcaggaaacccactaccagccgctcacagatggacagcccatcccaggagctggccccacctccccgcccctctgctgaccaacccagcagctccttgggtgggtgtggccaccctgctgccccaacctgctcccggaccctgtgccaggaggtgcttcrcctcagcggggccttgcctcccccagagccgctctgctgcctgaccttgcaatgtcatgggtcctctgggcaccggcgcagttgggtgggatcagctttggccagcaggtggggggcaggtgggtaaatcctccctctctgccatctccgcttccttcctcctgcccggcttccctgcctttttc

SEQ ID NO: 728727 - DNA, 638 bp, Homo sapiens
ccgggtctgcggagccgagggcaggtctctggtgcgtaggttgctgggcctggctctctctcaagcttgtttgctgtttgggtcctcctctttggggccagggccacacgcacctctgcgacattagcttggtgcctgtgaggggctgggtatctcaggagatcgcagcaggtcctagcactaccctgttgcattcttcaaggactccccgcagcccagtgtctgtggagtggggcgtgaggtgctgcctcccatgttsctgcttagaaggacgcagccctggaaaccctcactgtggagtctctgagcccctcatccgcagagcagcagttgctgctgtttgcacagacagcaaatccggggcatgtttgtttagtaagattacctctgctggggcctggcccaagggacaggccaggcacagaggggtgggggctctgtgcatactgaacacccccccgagagtggctctgtctacagccggaccactctggaagtgacggcactgcgggcctggagggctggggcagtccaattgggcaccatgccctcacaaacaacacacacaccagcggtggggttgcgagggggcgctgagggaggatcctggctgccctgcttaagccctgcagcctgtg

SEQ ID NO: 728728 - DNA, 638 bp, Homo sapiens
ccgggtctgcggagccgagggcaggtctctggtgcgtaggttgctgggcctggctctctctcaagcttgtttgctgtttgggtcctcctctttggggccagggccacacgcacctctgcgacattagcttggtgcctgtgaggggctgggtatctcaggagatcgcagcaggtcctagcactaccctgttgcattcttcaaggactccccgcagcccagtgtctgtggagtggggcgtgaggtgctgcctcccatgttgctgcttagaaggacgcagccctggaaaccctcactgtggagtctctgagcccctcatccgcagagcagcagttgctgctgtttgcacagacagcaaatccggggcaygtttgtttagtaagattacctctgctggggcctggcccaagggacaggccaggcacagaggggtgggggctctgtgcatactgaacacccccccgagagtggctctgtctacagccggaccactctggaagtgacggcactgcgggcctggagggctggggcagtccaattgggcaccatgccctcacaaacaacacacacaccagcggtggggttgcgagggggcgctgagggaggatcctggctgccctgcttaagccctgcagcctgtg

SEQ ID NO: 728729 - DNA, 694 bp, Homo sapiens
aagtaaggttagtttgttttgatgcctaaaaagtcctcttagggaatattattttgaagccctttactatgctgttaatagtgcttggcttttaacttggtaccagggaattggaaggtttctgtcattttgtgacgatatttttaaatttctttgcaggtagaagaagaaaggtgccactccggcatgaagacagactcgcttagtcgccagtcacttaagctgagtgcattgtgatttccaataattgaggcagtggttctaaaagctgtctacattaatgaaaagagcaatgtggccagcttgactaagccgccagcgcacagcgcggcaggacgcgcccgggtctcagcggacttgtgcatgttagctgtgtagatttatgtgagggcttgtaaaactctggtcttgtaaactagtcttaagcgcttttaatatggagacagatkagagcccctctccgctcccgtgtgggcccgcaggagaagcggtgatggagagccgagctcgccccttccaagcgctgccccgtgagcagtctccaccacctcccctgcaaacgtccagtggtgcagaggtaatggacgttggctctggtggtgatggacagtccgaactccctgctgaggaccccttcaacttctacggagcttctcttctctccaaaggatccttctctaagggccgcctcctc

SEQ ID NO: 728730 - DNA, 588 bp, Homo sapiens
gggcagtggcacagacacagagactaccagcgaggcagggatgtggccccagaaggtcctgagcttgcaaaggattgttctggctgtctcagccagctcttgctgttccacctgccccagaacctccgcatcagttgagggtcgtggggttggaatgtgtggcgaagtaggtctgtggcagtggagttgggccatgctgagcctgtgactgcccaggagagaattggaaactaaaaggtgcaaaagcagtcagagactccctaccaccccctcactgtgaacattggcccagcggcctctggggcagtcgctgtaaccatccrcgtggcaccctcggttctcagaggctgagacctccgtggctggagatgcttattttctgctcagttgttgttctgtagaacttatttctgtctacatcctgcctcatccctgagcctgccccacctggtccacattgcctttttttttttgataaagttttattgagatatgactgactagcggcacagttcacccatttaaagtgtatcattcagtaggtttcgtttcattcacagagttgagcaactgtcatcactacctaat

SEQ ID NO: 728731 - DNA, 634 bp, Homo sapiens
accagggtgtgtatgatattatttatgtccgaagaacaaactactcattttcacctctgtggggagagactggagttctaaccatgtctcctgtaccttggcagaggaagagtattgggttctttcagccacttttttgggggtrgacttggtcggcagcccgacttatccatccttgtcccagtttcagagcctcccagtggcgctgctgagttttctcccatcactacagagtccgcctccttcctctgttaacccttgcgattcctttccgaggctcctttaacctaaacttaatgtatttgactctacctttactttgaaaacacttttgatcttttttagagttcctctaagttttcctattagataaaaacagctttttataccttttgtttccatggtaatgaattccaggactgctttagaaaaccactagctttgtgtgccagtggaaagttgcagcattatgtactaatacaataaacatcagcccacccgtaggaggcgtgcaagccggtagaaacactgtagcaccacagtcatgaaatgatgtgagcatattattttttactgcaaaaagcagaatttggaacatgagccctgcattgcaggcaaatggtttgggagctct

SEQ ID NO: 728732 - DNA, 764 bp, Homo sapiens
cccccaaacccgcatgactggatccttgagggctgcagacaggcagagcgctcccctctctctgaaacggaatgttgctttccaggcccttccaccattgctcatcaactcagtttccacttccctcccgcttcggcccaccctcctctgcgcacaggcctggttgttgatggtctttatgaaagctcctgggccaggcatgcactttgggaggccaaggcgagagattgcttgaatctgggagtttgagaccagcctgggcaacatagtgaggccctgtgtctttaaaaaaataataatacattatttattattatatatatatatattttttgagacggagtctcgctctgtcrccaggctggaatgctgtggtgcgatcttggctcactgcaacttctgactccctggtttgagcaattctcctgcctcagcctcctgagtagctgggattacaggcacgcgccaccacgcccggctaatttttatatttttagtaaaaacggagtttcaccatgttggtcaggatggtctctatctcctgacctcgtgatccacacgcctcggcctcccaaagtgctgggattataggcgtgagccactgcgcccggccaataaattaattttaaattttaaattaatttttaaaaaatttaaaaagtagccggcatggttgcatatgcctgtggtcccaggcacttgggaggctgaagtgggaggattgcttgagcccatgaggttgaggccgcagtgagccgtgactg

SEQ ID NO: 728733 - DNA, 623 bp, Homo sapiens
tctcccagccacggttccaccactgagccccagggaaggagacttctgacccagccacctcctgccccgctgcctacctgagggaaagccaggggtattcgggaagaaggacagagcccaacaactgcccatatcaagggctccctgggtactccgggctaggtgctcacctcttctctagtacgggaggagtaagagaacctaccttgcaggctgctrggaggattaagtgagatgacagctggaaagccttcagcataaggtgagccctttgtcaaaaaaagggtagctgctctgacacttatcattcttttgttgttgttgtttttctttttcttttagagatagagtctcgctctgtcatccaggctggagtgcagtggcacaatcatagctcactgcaacctcaacctcctgggctcaagcaatcctcccacctcatcctcccaagtagctgggactatgggtgtgcactaccacactcggctaattttttaaaatttattttgtagagatgaggttctcactatgttgccaagcctagtcttgtattcctgggttcaagcaatcctcccatctcagcctcccaaagtgctgggattacaggggtgagccaccatgcc

SEQ ID NO: 728734 - DNA, 435 bp, Homo sapiens
ctggagggcatcatccttaacaaactaacacaggaacagaaaaccaaatatctcaagttctcacttataagtgggggctaaacaatgagaaaacatggatactaggaagggaaccacagacactggggcctacttgagggttgagagtgggaagagggagaggatcagaaaaaataactaatragtactaggattagtacctgggtgatgaaataatctgcacaacaaacccttgtgacatgagttttctatataacaaacttgtatatgtacccctgaacctaaaataaaattttaaaataaattaaaaatttaaaaataacaatgagatatcaccttatacctactaggatggctacaataataataaaaagaaaatgacaagtgttgacaatattgtgtagaaattggaatgctcatgcttatgcattgctg

SEQ ID NO: 728735 - DNA, 596 bp, Homo sapiens
aaagtggatcacacagtctactgttttacagttattctttgaccaagatattctttattaactgaggaaaaaaagggctttcctgaattttgcagtcatgggatatatgataagcattcttgatttatcatcttcaatcctgttacataacataataaccattgttattacctttagcaatgctttcctcagtattatctaatggcctataaaatgtgactttcatttgcaaatacagtacatctaacaagaayttaccacagctgctatgcaaaataccaatacaattgacccttggacaatgtgggggttaggggtgctgattccccatgcagttgaacatgttacataacataatacataaccattgttattatgtaacaggattgaaaatgataaatctttggaaagtggggcaaatgaattcttatgaattccatatcttccacatgtgttttacttttttgataagaagtagtaacctagttcagaaagaaaataatcatccccttttacttatgcaggataccaagtctatcttagcaccataatagtgaatgataggaatcaagctctatgaatacattcacatgtac

SEQ ID NO: 728736 - DNA, 626 bp, Homo sapiens
cttgtttaaaatataaatgttatagacacctaagatagaaatttgactgaaacagcctcttaattattgtcttaaaaaattggtataatgaaattgcatttgtagtctttggacatttaaatccagaagggatattttctttttcttttttaaaaatttaattcaatagtttttgggctacaggtggtttttggttacatggataagtgctttagtggtgatttctgagattttgatatacccatcacctgagcagtgtgcactgtacccaatatgtagtcttttatcccccccccgctccacccttcctttatcgtccccaaagcacattatataattattatgcctttgcagcctcatyggttagctcccacttgtaagtgagaacatgcgatatttggttttccattcctgagttacttcatttagaataaattgtctctagctccattcaagttgctgcaaaggccattatttcattccgttttttggctgaatagtattccatagtgtatatatgccacattttctttatccacttgttgattgataggcatttaggttggacccatattttcgcaattatgaattgtactgctgtaaacatgagtgtgcttttttttttt

SEQ ID NO: 728737 - DNA, 626 bp, Homo sapiens
cttgtttaaaatataaatgttatagacacctaagatagaaatttgactgaaacagcctcttaattattgtcttaaaaaattggtataatgaaattgcatttgtagtctttggacatttaaatccagaagggatattttctttttcttttttaaaaatttaattcaatagtttttgggctacaggtggtttttggttacatggataagtgctttagtggtgatttctgagattttgatatacccatcacctgagcagtgtgcactgtacccaatatgtagtcttttatcccccccccgctccacccttcctttatcgtccccaaagcacattatataattattatgcctttgcagcctcattgsttagctcccacttgtaagtgagaacatgcgatatttggttttccattcctgagttacttcatttagaataaattgtctctagctccattcaagttgctgcaaaggccattatttcattccgttttttggctgaatagtattccatagtgtatatatgccacattttctttatccacttgttgattgataggcatttaggttggacccatattttcgcaattatgaattgtactgctgtaaacatgagtgtgcttttttttttt

SEQ ID NO: 728738 - DNA, 601 bp, Homo sapiens
gtttaattatttcccatctatttatttttgtttctgttttatttgcttttgggatcttagtcatgaactttttacctaaaccaatgactataagagtttttccaatgttatcttctagaatgcttatgttttctggtcttagatttaagtctttgattcatcttgagttaatttttgtataaggtgagcattgaggatccagtttcattcttctacrtgtggcttgccagttttcccagcaccatttattagatagggtatcctgtccccactttatgtttttgtatgctttgtcaaagatcagttgactttaagtatttggctttatttctgggttctctattctgttccattgtctacttgcctatttgtgtaccagtaccaggctgttttagtaactatagccttgtagtataatttgaagtcgggtaatatgatgcctccagatttgttctttttgcttagtattcctttagctatgtgggctcttttttagttccctatgaattttaggatttttttctagttctgtgaagaattatgatgatattttgatgggaattgtattgaatttgtagattgcttttggcagtatggtcat

SEQ ID NO: 728739 - DNA, 679 bp, Homo sapiens
acagttggtttatgttttagggtgtcatttgacttgtgaagcattgaaatctgggtattaagcacactgttttctatgtggtatggaatgattcttaaagccctgagaaaatggaaaataaaaatatttttcctttttaccataatcacctatgactgtcactctatcataaactgcataaactttataacctcaaaacattttggaaatgaaatgacagaacttgcttactcaattgcttctatatacaccaaatatttttttaaagtattatgttaagtccttgaaaatattttgttctactcaatagaagcagtttaggttggtagttctatgtggaaacmgtgaggaaataattttatattatgatgactagaccagtctttgaacatcactttggttattgttccattagtaaatattataattatttctgagatttactcaccttcaaagaatgttggcaatgccagcattattaacactcctctagttagaacaaagaggaaatgtaataacaaaacataataatagccaaataaagagtgacttagaatgtacacccttatctaggatcctgagtaattcgattattcttaggaaatacacttttgtgctagaacaaagacttttgaaatagctaatttctgggtttcttttcattttgaattaacttgaa

SEQ ID NO: 728740 - DNA, 581 bp, Homo sapiens
gggtcacatgagaactctaggctaaatattttaaggtattagcaaaggttttgtaaggcagctgtgccatttcagatgccccagcaatataagagtgttccaattcctctgcatctgggccagcatttattactgtctgttttctggcaatggccatcctagtrgacataaagtgatagctcaatgtggttttgattttaatttcaatgatgattaatgatattaagcatactttcatttgcatatggtgcatatgtgtttcttcttttggagaaatatctctttaattccttaaatatttaaatttgggttgtctttttactgtcagttaaaagaaatgtttatgttttccggatactaggcccttattagaaatgtaattgacaaatagtttatctaattttgtaaattgatctattaatagtgtccactggggtaaaaactcttttttaattttaatgaaatccaacttatctacttttaaattttttccttgtgattttgttggcatagccaagaaacaattgcctaactttagggcacaagaatttattcttacattttcctataagagtgttgta

SEQ ID NO: 728741 - DNA, 489 bp, Homo sapiens
caccatcatggctcactgcagcattgactgcctgggctcaagcattcctttcacctcagcctcccaagcagctgagaccacaggcatgcaccaccatacctggctaacatttgtgttttttgtagacatggggttttaccatgttgtccaggttggtctcctgagctcaagtgatctgccctactcagcctcccaaagtgctggaatttaaaaataaatttcttttagaccttcmccgtatattctaagaaaatttaatactcctaaaaatgaaaaggagagtaagaattttggaatgtagaaaactcaaagaaactaacttaataacataaatgacattttaaatatctttggaacagtaaagtgtaactggaacaaaactaatatttgtaaataatgcaaaaacttatttgtataaaggctaataatttggttatgaagaaacatcaacttctagtaggtaaaagtaaaggaggctaagacataaca

SEQ ID NO: 728742 - DNA, 609 bp, Homo sapiens
gaatatgggaatcaaagcttctgttttagtcatcttacacgtgatgatgctgacaatttctacaaatagctaacatgtattgagttcttaattggtgccaagcactgtgtaggttactttatgtgtatttccatatttaatcttataatagccccagagttagctggtaccacgattgtcaccattttacatatgagaagacagagtcatgacaaggttactaaatttcccagagttatgcaattagtaagttgctatagacggaaaatgaactcaagtagtctggctagagtttgtgttgtgaatcctcatcctataacacacgttctgcaggagattagagcttgagatatgtaaatgtgggcatcactgacatctataacaactttggcatatattttcagcattttgaatmtacagttaagtttacctttactttgtgaaagtgaaattgctttagttagtgttaagctattaagtcattttatattttttaaaaaaagctattaagtcattttatatttaaaaaaaaaaagcaatggtttccaggagaaaagggtgatacaacaatagtatgacctgatggaaactatttctatttacaaagaa

SEQ ID NO: 728743 - DNA, 459 bp, Homo sapiens
acttctgtcatactctatttatcttctataatgaagctaattagagtattaagtctaatgatccaattagatgtaattagattaacttaaagcagctgtacaccagtgaagatttggggaataggaattggagacagacccagcttctctatgggaaaagtatcaagaaatttgtggctatctttaatccaatgcagacatcaagatcagtgccttaatataagttgtatctttgatcattcaaattaggrctaaaaaatagtgtggatggtttaggataacttgaatgaaaacctaagaaaagataggttgaagacatgaatgtgatctcttcatataggaggctgcagaaagcctatcagagtagcagagtggtaaatcctttttacttactctgatggattgataatgcccgcctctattctcctccctaccttcttcatctctctgaaccatgtc

SEQ ID NO: 728744 - DNA, 603 bp, Homo sapiens
ctcaaagacaggacattttaaattatccagtcagaggaataaaaagataaaataatgaaaaaagtgaagaaagcctatgggacttatgagacaccatcaagcaaaataataaatgcaaaatgtgagtctcagaaggagaagagaaagagaaagaagatgaaacattttttatagcaatagttattgaaaacttcccaaakctggggaggtaaatgaacgtccagatacatcaagaaatatattttccaaattggttaaactttcagaggtccacaccaagacacattataatcaaattgtcaaaattcaaaattaaagaattttgaaaacagaaagagaaaaatgatttgtcatctgcaagggagcctctataagaatataaatgcatttccgacagaagccttccaggctaagagagagtgcaatgatacagtcaaagtactgaaagaaaaaaaaaaaactgcattctaagaatactatacccagaaaaactgtccttaaaaatgaagtagagctaaagacttgtccagataaacaaaaaagcaagaagtttgtcaccactatacttaccttacaagaaatactatagggagttcttcaagt

SEQ ID NO: 728745 - DNA, 578 bp, Homo sapiens
catcctgctctcttcgatttagaaaggttcagtggggaagggtgtgtatgtgtgtgtgtgtgcatgtttgtgttagtgagtgtgtacatgtttgcaacggtgcatatgtatgtgtgtttgtgtgtaaataagtgtgtgcactcattagaataatactttttcagggccactatgtgctaggcactgtgcaagttcttgggratataatggtgaacaaaagagaaatgatctcagctctcgccaagcttactgaacgataaagaagaccaatagtgaatgaatgaatgtaagaattaagaaataaataaattacagtattactgccatgaaggaaataaacagggtgcagtcacagaaagtaacagggtcacaaactttagattggaagttgagggaaggcctttctgaaagggtgacatttaagtttgtatgttgaaaaactaatctggaataggaagtcagggcctccatgcaaggataaagtggagggaaggtactctggaatggcggcaaactcataagtgcctgaagatgttttctagagtgttctggggctcccaaaagtgtatatgggtgga

SEQ ID NO: 728746 - DNA, 385 bp, Homo sapiens
tgcctctgtttgccaatgatataatcatatacctagaaaaccctaaatattcatcaaaaaatctcctagatctgataagtgaattaagtaaagtttcaggatacaaaatcaatttacacaaatcagtagcactgctatacaccaaaaacgactaagctgagaaaaayatcaagaacaaatcccctttacaacagctgcaaaataaaaataaaatacttataaatatacctaacaaaggaggtgaaaggtctctacaagggaaactagaaaacacaatcatcagcgacacaaacaaatggaaacataacccatgctcatggataggtagaatcaatattgtcaaagtgaccatactgccaaaagcaatctatggattcaatgcaat

SEQ ID NO: 728747 - DNA, 553 bp, Homo sapiens
ccccaagctgtactgcttccactgttgctgtgaacacctgcaaagaggctggcaccccagtgcctgccagcaccctgctgcagctgatatatgtgtaccccaccacactgccattgccactgctgctgttatttacaaacgaggacaaatcccactgccactgccctacaaagtgctttagctgacaccactcattgcagtgttgtgcccagtggtctgtcaatacctcaggccctccagtacagcaggcttctaatctccaggagccagagaacaaagccagggctctatataagtcccccagaattagagcacatagtccaggagtcacctgctgagccttgcccmcctaaaatcttccagaaatgaagccagtcaactgaacctacaatcaaatcctcaaggtcatcaaataaaagaaaattaaaaaaaccatctaaaggtcagcaacttcaaagattgaagaaacgtgagcccacaaatatgagaaataaccagcacaagaattctgacaactcaaaaagccagagtgtcttgcttccttctaatgacc

SEQ ID NO: 728748 - DNA, 615 bp, Homo sapiens
agaagatcattgtataatggtaaagggttaaatccaacaagaaaagctaactatcctaaatatatctgcacccaacacaggagcacccagattcataaagcaaattcttagagaccttcaaagagacttagattcccacacaataatagtgggagacttcaataccctactgacagtattagatcatagaagcagaaaattaccaaagatattcaggacctgaactcaacactggaccaaacagayttgatagaaatctacagaactctgtactcaaaaaacaagagaatatacattcttctccttgccacgtggcacatactctaaaattgaccacacaattggacataaaacagtcctcagcaaatgcaaaggaactgaaattatgctaactaccctcttggacaatggcacaataaaactagaaattaagaataagaaaattgctcaagactatacaattacatggaaatttaacaacctgctcctgaatgacttttggataaataatgaaattaaggcaaaaatcaagaagtttttttgaaattaatgagaccaaagatacaacatactagaatatccaggacacagctaaggcagtgttaagaagaaaac

SEQ ID NO: 728749 - DNA, 615 bp, Homo sapiens
agaagatcattgtataatggtaaagggttaaatccaacaagaaaagctaactatcctaaatatatctgcacccaacacaggagcacccagattcataaagcaaattcttagagaccttcaaagagacttagattcccacacaataatagtgggagacttcaataccctactgacagtattagatcatagaagcagaaaattaccaaagatattcaggacctgaactcaacactggaccaaacagatttgatagaaatctacagaactctgtactcaaaaaacaagagaatatacattcttctccttgccacgtggcacatactctaaaattgaccacacaattggacataaaacagtyctcagcaaatgcaaaggaactgaaattatgctaactaccctcttggacaatggcacaataaaactagaaattaagaataagaaaattgctcaagactatacaattacatggaaatttaacaacctgctcctgaatgacttttggataaataatgaaattaaggcaaaaatcaagaagtttttttgaaattaatgagaccaaagatacaacatactagaatatccaggacacagctaaggcagtgttaagaagaaaac

SEQ ID NO: 728750 - DNA, 623 bp, Homo sapiens
agtattattcgatggaacagaaaaagaatgcaaagagacaggtatcagcttcctaggccataatgatgatagtaaattggtcagagaagtgaaatctcaggtatgagtcctcagatgacaatattctgggtataattttttctcccatacttaagaatcaatgaatgaacaattcatttctaaataaataaagaaaatatggtattctcatccagttagtcattcaacaggaawtattttgcaataagaacttaaaccattctgttttgctgaaaagatgttgagtatcttttattgtttcaaattgtttcaaaatttattccatgtggtttattagcaaatgagttctgaaggcaggtgtgtttacaaaggttactggaagaaaatacaagatatagaagtaaaaaattaactggattattttaactggtgttcataaatccagaaataaaattttttggcacttatggagcaaagaaaatgtcagtcttcatgctgatggcagtggtggcctgtctggagcagccactgccatgatgcccgctgcagtgggggaggtgcagctggggctgcagacccaggcatccctgtgtccttgggggctggaagcaggcaggatcccc

SEQ ID NO: 728751 - DNA, 623 bp, Homo sapiens
agtattattcgatggaacagaaaaagaatgcaaagagacaggtatcagcttcctaggccataatgatgatagtaaattggtcagagaagtgaaatctcaggtatgagtcctcagatgacaatattctgggtataattttttctcccatacttaagaatcaatgaatgaacaattcatttctaaataaataaagaaaatatggtattctcatccagttagtcattcaacaggaaatattttgcaataagaacttaaaccattctgttttgctgaaaagatgttgagtatcttttattgtttcaaattgtttcaaaatttattccatgtggtttattagcaaatgagttctgaaggcaggtgtgtttacaaaggttactggaagaaaatacaagatatagaartaaaaaattaactggattattttaactggtgttcataaatccagaaataaaattttttggcacttatggagcaaagaaaatgtcagtcttcatgctgatggcagtggtggcctgtctggagcagccactgccatgatgcccgctgcagtgggggaggtgcagctggggctgcagacccaggcatccctgtgtccttgggggctggaagcaggcaggatcccc

SEQ ID NO: 728752 - DNA, 623 bp, Homo sapiens
agtattattcgatggaacagaaaaagaatgcaaagagacaggtatcagcttcctaggccataatgatgatagtaaattggtcagagaagtgaaatctcaggtatgagtcctcagatgacaatattctgggtataattttttctcccatacttaagaatcaatgaatgaacaattcatttctaaataaataaagaaaatatggtattctcatccagttagtcattcaacaggaaatattttgcaataagaacttaaaccattctgttttgctgaaaagatgttgagtatcttttattgtttcaaattgtttcaaaatttattccatgtggtttattagcaaatgagttctgaaggcaggtgtgtttacaaaggttactggaagaaaatacaagatatagaagtaaaaaattaaytggattattttaactggtgttcataaatccagaaataaaattttttggcacttatggagcaaagaaaatgtcagtcttcatgctgatggcagtggtggcctgtctggagcagccactgccatgatgcccgctgcagtgggggaggtgcagctggggctgcagacccaggcatccctgtgtccttgggggctggaagcaggcaggatcccc

SEQ ID NO: 728753 - DNA, 644 bp, Homo sapiens
tatatcagagccgggcacggtggctcactcctgtaatcccagcactttgggaggctgaggcgggcggatcacaaggtcaggagatcgagaccatcctggctaacatggtgaaaccctgtctctactaaaaatacaaaaaaattagcggggcatggtggcaggtgcctgtagtcccggctactcgggaggctgaggcaggagaatggtgtgaacccaggaggcagagcttcctataacataaaaaagattatatcgtctggaaacaaggataatttagcttcttcctttccaatttgaatgccatttatttctttctcttgtcttattgctctatgacttccagtaycatactgaataaaagtgatgaaagtgggcatccttgtcttgttacaaattttagaggaaaggctttcagtttttccacattcagtataatagctgtgagtttgtcctatatggacttaatcatgttgaagtatgttctttctatacccagtttgttgagagtttttatgatgaaaagatgttgaattttattgaatgctttttatagcatctattgaaatgacaatatggtttttgtcctttattctgttgatgttgtgtattatgtttattgattttcatgtcagagcatccttgca

SEQ ID NO: 728754 - DNA, 636 bp, Homo sapiens
taagatatgaaactacaaaacactaagaagaatacacagaaataaatcttcatacactttgattaggcattagtttctctgacaccaaaagcacattaaaaaaaaatagatgaactcttacaactcaataataaaaagacaactcattttaaatatgggaacaggatgtgagcagacatttctccaaagaagtataccaaagccaaagaacacatcataagacactcaacatcactagtcaccagggaaatgcaaaatcaaaacaaaataccaactgggcatggtggctcacacctgtaatcccagcactttgggaggccaaggygggcagatgacttgaggtcaggagttcaagaccagcctggccaatatggtacaaccttgtctctaccaaaaatacaaaaattagccaggcgtggtggtgtgtacccagctacttgggaggctgaggaaggagaatagcttgaacctgggaagccgaggttgcagtaagccaaggtcgcgccattgcactagagcctgggcatcacaccaagactctgtctcaaaaaaaaaaaaaaaagtatcacttcacacctattataataaaaaaatcaagtaacaagtttggtgagggggtgaagtcaggaccaacat

SEQ ID NO: 728755 - DNA, 636 bp, Homo sapiens
taagatatgaaactacaaaacactaagaagaatacacagaaataaatcttcatacactttgattaggcattagtttctctgacaccaaaagcacattaaaaaaaaatagatgaactcttacaactcaataataaaaagacaactcattttaaatatgggaacaggatgtgagcagacatttctccaaagaagtataccaaagccaaagaacacatcataagacactcaacatcactagtcaccagggaaatgcaaaatcaaaacaaaataccaactgggcatggtggctcacacctgtaatcccagcactttgggaggccaaggcgggcagatgacttgaggtcaggagttcaagaccagcctggccaatatggtacaaccttgtctctaccaaaaatacraaaattagccaggcgtggtggtgtgtacccagctacttgggaggctgaggaaggagaatagcttgaacctgggaagccgaggttgcagtaagccaaggtcgcgccattgcactagagcctgggcatcacaccaagactctgtctcaaaaaaaaaaaaaaaagtatcacttcacacctattataataaaaaaatcaagtaacaagtttggtgagggggtgaagtcaggaccaacat

SEQ ID NO: 728756 - DNA, 624 bp, Homo sapiens
ttatctttctttattgttccaaggcccctactctatttcatctcctctgtagattactgaaaacacctcctgccttcataagggaaatattttaatactttttcttccttaaatacacaatagtttgcccatcagtagctaagatgaaccaggaactagaattttgaaaacaaaatcagctgttacgatgtggaagaaagggaagcaaacagtgyttgggctgcacttgctaaactgtaatgtataacaaaaccagtcttctggaggaaggaacaggtggtacgcatggaacaaagctggagcaagatcaagagacttgagaaaaacaagaatcttttaacctacagccagagagtgatgggggagaaaacacacagataatttaacaggtggatgttgggaagaaacacaagacaatcaagaagcacgtcagttactcactacttgtgacagcaaagctatgtggcaactgagagcaagagttctaaagtcagttcctggatttgaatccttaccctgcttctggtgagagatgtattttggacaaggtatttaacacctctatgttccactttccacatatgaaaaatgggactaacacagcatcttctttacaggtttata

SEQ ID NO: 728757 - DNA, 624 bp, Homo sapiens
ttatctttctttattgttccaaggcccctactctatttcatctcctctgtagattactgaaaacacctcctgccttcataagggaaatattttaatactttttcttccttaaatacacaatagtttgcccatcagtagctaagatgaaccaggaactagaattttgaaaacaaaatcagctgttacgatgtggaagaaagggaagcaaacagtgtttgggctgcacttgctaaactgtaatgtataacaaaaccagtcttctggaggaaggaacaggtggtaygcatggaacaaagctggagcaagatcaagagacttgagaaaaacaagaatcttttaacctacagccagagagtgatgggggagaaaacacacagataatttaacaggtggatgttgggaagaaacacaagacaatcaagaagcacgtcagttactcactacttgtgacagcaaagctatgtggcaactgagagcaagagttctaaagtcagttcctggatttgaatccttaccctgcttctggtgagagatgtattttggacaaggtatttaacacctctatgttccactttccacatatgaaaaatgggactaacacagcatcttctttacaggtttata

SEQ ID NO: 728758 - DNA, 589 bp, Homo sapiens
cttgtgtcacctacttgatcaagttccacagctgtgacctctgctagcgaacagcaagttgtgtggaatatcgccaaatttcaaattatgtgtgctaactgagggtgaccctagactttgattggttactgattctaatttttttcaccagggaagtttaggactggtataatggttgactctcatttctttacctttacccatttattttattagtaaaatatcagctacaagaaagaacaggaaagatgaaggaaaaaaaaaaagaagcactgcctatgaaatctattctgagatctattcacctatatttatacttgagtattataaataaatataaattatacctatatttataattgggtaatataaattattaatcttgagttcaaatatgagttattaagcctttatatttgacatkctgaaaacaaaaggggcccttaaagagcttttgataaataatatggtaactatgaatggctgatacataacttttttcttaccaaatctctcttaaattataaatacactcaaaactataggaaattagtatgataactaaatgaatcagaagaaatcactgtag

SEQ ID NO: 728759 - DNA, 614 bp, Homo sapiens
cataaatttattatttatgttatttaagtggttgttttactttaataaaagtgaacatgactgtaaaaacaaaactcacttaatataatgttaactcagactgccacactaccttcaattcatttaccttgaattgcaagcttacataaaatccctctatagccwtatgagcattttgtgaaaatattctaaatcagaggtaacaattcatctggataggatgaattaaaattttagtttaagaggggataatttgtggaaaataagatgcttaaactgttccgaagagctctaaagaaatttcagcctatttttaataaaagtatcaacttacatcaaaagggctacaatggagattgttcttgttgctctatatgcaaatttgttttttcctggtaatgtgttagattcattggttctctctcttgggaacaaggatagggagtcagttgctgcattctggatgctcacatggacagttactatggggctgggggcctattaaccaactcaagtatggcagtgccaagagcaaagatggcgtggaaatgtgctgtaaattaaagaagggctcaggacttctatgaaggagctccagaacaactccggcatag

SEQ ID NO: 728760 - DNA, 616 bp, Homo sapiens
ctccaagactttcaagttagattcaagtcacattatttcctctgccttcaagttcaattagacttctggaaagtcagcagatttctgtctggttagagaaaaacatcttaccctgctcctgtttcttggcaacaccttttggaaaggtggtaacagctgctgatatggaaagcaccgaggcacaatgacgtgcagcaatcctttcctcatcaagcaggaaaaccatgctgtgttgctgacatcacaggtgcaccagctgcccccagagtgcaatttttcttcttccatttgaatatttattgagaacgaatattttgaagatgttgacagtcttwccagtttccaaaaggtgttcttaaatggagttctcctttgatgacatcagcaagcacatgaaaatgtgaagctggatgcactgagaggcatcaacagtttcattcatttgcatgctgaagagaaatatgcagagctgcccatttcttccaagtctgaagtgagtgatgtcatttgacagaagtagggccttaattttctttcatggaccacatttaagaacctttgagtcaaactatttgattctgcactccccttacactattgtttcccacctctgtac

SEQ ID NO: 728761 - DNA, 599 bp, Homo sapiens
accttaatttgattttaaaggctgaaaaatataggtaatagtgtattctttttagagaaaaattctaaataatcacactttgtgtctagttattaaacatgcaaactgtagtttttatacaaaaatagaaaaaaccaatacctactaaaagctattttgggcaattaggaggaattctsttgtttacattagaggagaaatagtacaaaagtaactgaacacatgccagaataattagcaggctcttggctcatttaaattatgcgcacattgccattttaatgcattttttaaatacccacttgcaattctattttatttttggaagaaaattagtagctttctactaggtatgattagtaaaaccagatttgtttcctgttttcctggaaaacataaaacttcctggctttatagacccatttttaataataattaaaaacataaaataataataatcatactttggatttatacaacacttgtgcatgaaaactggaggcactcttttttgtaagataatttctctgtaggaatattatgctgtttcttcatgctcactatataatatgttgatcctaaggaccatctaatattaa

SEQ ID NO: 728762 - DNA, 447 bp, Homo sapiens
gtaagtacaaatacaggaagggatgcaatttagtgcttagtctttctatttcattgtattatttcccccagttaattaaagcatttgtccattggaagatacttgatttactttctaagatcttttggtattttgcagaatgagaaactggtttgtactaactacaattaataataatgaaaaacagcattccatcaaattatgcatggattctgtgtacctaatataagaatakaagaatgagaaaactcttatgacactaaataagtcaatacattcatattgagacatggtccctcaatttatctacctatgtgcaaaaaataataatacttattttataaagatgttatgatggtgagtggggctaatgcttataacactgaaaatactgagggttaattcgctttgacgagtttttccacgatgggggcagagagggggaag

SEQ ID NO: 728763 - DNA, 563 bp, Homo sapiens
agagaaataactattggcaagaatttgaagcaacaggaactctcctacacagctgaggaaagcatacgttgttgcagtcattacaaccaatttggaacacacttattcaaaagcatatcttgagtgacccagtatttccaataccagataaatttcctagggacactcatgcacatgtacacaacgagatgtgtacatgtatttgtaacttcattgttartaacaccaaagaaacaggaaacaacacaaatgtcaatcaatagtagaatagatagctaggtggtagtgtgttcatacactggaatatgcagaggtgaaaatgaaacacgtggaacagcatgcatacacaaggatgaatcttaaaaatccaataataataatagacactggggactccaaagaggaaggagagaggagagggctaaaaaaagtacccattgggtacaatattcactaattaggtgatgggtacactagaagcccaaacctcaccatcatgcaatatattcctgtatattggctgaattttgtgttttatgttttatcaccttacttcttcatag

SEQ ID NO: 728764 - DNA, 625 bp, Homo sapiens
gctcagagagtaaaaatacgacaaacacagagaacagatatgatcacaacataataagaaaataattaatttaatctttaaatatttgccttctaaaattaaaaaagatttttggaatcttttttaattctgtacccacacagattttgggtacaggttcttgttgataargctgttttttaacaagtcaaagcacttatgacttaactaattctaacttctttttttttttttttttttttttttagacagagtctcactctttcctccaggccggactgcagtggcgctatcttggctcactgcaagctccccctcccgggttcacgccattctcctgcctcagcctctcgagtagctgagactacaggcgcccgccgccgccccccagctaattttttgtatttttagtagagacggagtttcaccgtgttagccaggatggtctcgatctcctgacctcgtgatctgcccgcctcggcctcccaaagtgctgggattacagacgtgagccaccgcgcccagcctaattctaacttctcaataaaaaaatgctatagtaaactgacatagtataacttcattaattccaaattaagaattttaaaaaagaaacctataacaa

SEQ ID NO: 728765 - DNA, 625 bp, Homo sapiens
gctcagagagtaaaaatacgacaaacacagagaacagatatgatcacaacataataagaaaataattaatttaatctttaaatatttgccttctaaaattaaaaaagatttttggaatcttttttaattctgtacccacacagattttgggtacaggttcttgttgataaggctgttttttaacaagtcaaagcacttatgacttaactaattctaacttctttttttttttttttttttttttttagacagagtctcactctttcctccaggccggactgcagtggcgctatcttggctcactgcaagctccccctcccgggttcacgccattctcctgcctcagcctctcgagtagctgaractacaggcgcccgccgccgccccccagctaattttttgtatttttagtagagacggagtttcaccgtgttagccaggatggtctcgatctcctgacctcgtgatctgcccgcctcggcctcccaaagtgctgggattacagacgtgagccaccgcgcccagcctaattctaacttctcaataaaaaaatgctatagtaaactgacatagtataacttcattaattccaaattaagaattttaaaaaagaaacctataacaa

SEQ ID NO: 728766 - DNA, 625 bp, Homo sapiens
gctcagagagtaaaaatacgacaaacacagagaacagatatgatcacaacataataagaaaataattaatttaatctttaaatatttgccttctaaaattaaaaaagatttttggaatcttttttaattctgtacccacacagattttgggtacaggttcttgttgataaggctgttttttaacaagtcaaagcacttatgacttaactaattctaacttctttttttttttttttttttttttttagacagagtctcactctttcctccaggccggactgcagtggcgctatcttggctcactgcaagctccccctcccgggttcacgccattctcctgcctcagcctctcgagtagctgagactacaggcgcccgccgccgccccccagctaattttttgtatttttagtagagacggagtttcaccrtgttagccaggatggtctcgatctcctgacctcgtgatctgcccgcctcggcctcccaaagtgctgggattacagacgtgagccaccgcgcccagcctaattctaacttctcaataaaaaaatgctatagtaaactgacatagtataacttcattaattccaaattaagaattttaaaaaagaaacctataacaa

SEQ ID NO: 728767 - DNA, 627 bp, Homo sapiens
atgttgatcaggctggtttcaaactcccgacctcaggtaatccacccacctcggcctcccaaagtgctgggattacaggcgtaagccaccgcaccgggccttttttgtatttttagtagagacagggtttcaccacgttggccaggctggtctcgaactcctgacctcaggtgatccacctgccttggcctcccaaagcgccgggattaacaggcrtgagccactgcgcctggcctgacctaggatgattttgtaacatgatgtgtttcactggtcatttggaatattttggttcactgaattatgcacatcctccaaatattgatacatttcattatacagtatcgaaaaatatttgttaatatcaccacagtcttaaaagtgttgacgtatttggaaactgtcaaactcaaaatggtggacggaaattttccaaaatttaaattttcacttgaaagcccaaaatttattgttgacaacaagtattgtcagttcttttccttgagttgacatgcctattttattgatttttaagaaagtgtctgtcaaacttccaagtatgaataacaaccatagtttgtctgttagctgatcattcaagtaaaatattccatgaagaaaagcaga

SEQ ID NO: 728768 - DNA, 635 bp, Homo sapiens
gtggtgaaaggctcaatgcttttcccctaagagtctgcaagacacaagactgtccatttcactggaaattagcaagctgattctaaaatttgtatggaaatgcaaagaatttacaatagctacaataattttaaagaataagagcaaatttgaagaattcattaaatgttttctaaacaaactataaaactacagtaatcaacaaagcaaagattggcataaagctagatatagagattaatggaaaaaagtgaagagtttagaaatggctataaagatgccaagaaaattcaaaggggaaaggataacttctcaacaaatggtgctagaactgaataaccatatgaagaaaaaagacacttgattctcataccatgcataaaaattagtcaaagtggacaactgacccaaacacaaataataaaactatacagcagtacacgcaaggatacaaaaatactagaagaaaatctagggaaawctcttcaggacaaaactcttctagacaatgaattcatgactaagacctcagaagcacaagaaaccaaaacaaaactagataaatgagtacttaattaaactaaaaaaccttaacacagcaaaagaaataacagagtgaacagataacctgcata

SEQ ID NO: 728769 - DNA, 531 bp, Homo sapiens
gtgaacacaatggaatattactcattgctcacacacctgtcaagatgtgtgatccttgatgggtcctttaactcttctggttatacaatgttgaactatatagcatttgtaagatcctcttatgttctgaaaattctgtgcttccaggtctgtggttttctcccagaactaagatattttggagccctggggccttccaggccacaaagaacaggagctacaggtgggatctgtggtttggaaagactaagaggctccaagcctttggggcagccccttcctmagctctaacaagaaggcaccagtgaaaagacagctttcctccctcagccaccgcctctctctcacccatacctccgttcagggctttttcccacttattcctatttcttggttcctcttttcccaggccagaagagaaagcagcagaaaggaagatcccaggcctttttcttccatctaatcaagacttcaggatggctttcttgcagtcagggaatggttgcctgggtaaccaagtattaactataa

SEQ ID NO: 728770 - DNA, 612 bp, Homo sapiens
aaagctaggtgatgctacacaatgggatcaagaaggagtatgtcagaaaccccaggggactcactggggcattttctggtgcttccatgtccagtgatatcagtaaatagaccattgaacaaccagtgcctgaccaagctaaggcaactaaggatgaagcccctcaaggatggtctgggtcactccaccagcaaagaaactcagactggtcaaagtattagccaaggaagagggaaatctggaataagtggtagaggagagagatgatggggctgtagttcattttgctctctcactaaaaatcttttcagaaactgcagctggccacacttttgaagatgactctgaattattgaccttgtacctcatttctcagggaagacataaagacatcttcacatcacaaaaataaaggccacatattatagtgtgaaagccagatataatgggggggggkcagagctgatttgagtgatgcaaggggagaattttatcagtatctcttatgtgccagttcagatcttggccttccctcacccctgggcctttggccgcttgtttcagacatagctgcaactgtaatgacctctgtgtggcctctgaccgacttca

SEQ ID NO: 728771 - DNA, 523 bp, Homo sapiens
gagccagctgcatgactttcaggtcctagtacaaactaaaaatgtgaagtcatttgttcaaaaagcaggaaaaagtttttgcctttcttccacagtgtctctcttgacctctcgtggtctattttattttctatttagtgttgcactctctggagcacaggatgagtgcaaacactcccaggagtcaaggaaccctccccatgactgagcakacacaacacagccctcccaatgctggagtcctcatccccacagaggaagagggctgacgcagtaggagtaagggagcaggctgctgagaacacaccctcctgaaaggcagggagaagcgggggagacaggaatacctgtgagcccaggctccaacccaccagcgcatactttcttctccctcagacttcacttacaaaacacaaattcagagataaaattattaagaatttcaaaacagtgactgcaaagcattaaaccccaagagtgggacctcttctgatcccagggccccatatgactgcacaggcca

SEQ ID NO: 728772 - DNA, 635 bp, Homo sapiens
ccaaatgaggaatttgggattttatttgccaatcgctccttccttgtattgcgaggtcgttatggctatgtgggctcctcatcgggccatgacctcatacagtgcaaccaggatcagcccgaccgcattcatctactaccctgccgaccgggtatctaccacttccagggtgagtggctcctcttccctgcccaagggttcacagtctagtccctgccttagccccagctcagacttcagggcctgccactcagggcttgctcattataaaaggaaaaacaggccaggcgcagtggctcatgcctgtaatcccagcactttgggaggctgaggcgggcagatcacgaggtcaggagatggagaccatcctggctaacayggtgaaaccccgtctctactaaaaatacaaaaaattagccgggcgtggtggcgggtgcctgtagtctcagctacttgggaggctgaggcaggagaatggcgtgaacccaggaggcggagcttgcagtgagccaagatcacgccacagcactccagcctgggcgacacaccgagactccgtttccaaaaaaaaaaaaaaggaaaaacaggacctctgttgttttcacacttcaaagccccagggtgggttggcagaa

SEQ ID NO: 728773 - DNA, 535 bp, Homo sapiens
ctcatcttcccttcctaaggtgatcctgttttcctgccttccccagggccatcttgggcattccctcctcccaaatgctcaggctcaagagctcagcatgatctctccaccctttctttcacttccttcatcaaaccctgcaaatacttggctacttctttaacaatgcctcttgtgtgcttgctccttcttaattaccattgccaccacttggctccaggcttttctccagaagcactgcttctagggctccccgaaagcatttcctgctgccagatctgtccatccaatctcatctccgacatccaatctcatctccacagtttgcttttataacgtgstgcttcccttccatcattccctgttcacactcttcagggcaccttgttgctctttgtcctgtcccttcctaatggacctcactttcctgacttattgtgcaaagtgctttgttttttacatcacacagacctggaatcaagagctattaagcttcttcctttaagttaacttcacatgtgtctagggtggatcc

SEQ ID NO: 728774 - DNA, 535 bp, Homo sapiens
ctcatcttcccttcctaaggtgatcctgttttcctgccttccccagggccatcttgggcattccctcctcccaaatgctcaggctcaagagctcagcatgatctctccaccctttctttcacttccttcatcaaaccctgcaaatacttggctacttctttaacaatgcctcttgtgtgcttgctccttcttaattaccattgccaccacttggctccaggcttttctccagaagcactgcttctagggctccccgaaagcatttcctgctgccagatctgtccatccaatctcatctccgacatccaatctcatctccacagtttgcttttataacgtgcygcttcccttccatcattccctgttcacactcttcagggcaccttgttgctctttgtcctgtcccttcctaatggacctcactttcctgacttattgtgcaaagtgctttgttttttacatcacacagacctggaatcaagagctattaagcttcttcctttaagttaacttcacatgtgtctagggtggatcc

SEQ ID NO: 728775 - DNA, 618 bp, Homo sapiens
aaagggagggagaagagaccattctaaacagagggaacagcatgtggcaaaggccatggtatgtcctagaggctgcaagatggttagtgtggctgcaagaggaagatgaacccatggaggagacagagagggagcagccggaggtgaacaagcaaacccagagaggactggacatggaggccatgggaggagatggtttcaaaaaggaggtcatggacagcagaggcaaatgctgctgagaggttaatacgagaacctaaaaatgtctcctggatttcacaacatgtagrtcatcagtgagctcagtggaatgacaggccagaagccagaatgacatggcttgagagtgagtggaagatgaggaaatgtagagatcaagagcattgattaggaattgcacttggccacatgtaatggaatctgctgatgatagccttactatattgggttatttctctcacataacaagaatgacagaggttgacagttcaggctggtgcagtgactccacaatgtcatcactgttctagaatccttctgtctttctgcactgtcatcctcagtatgtggcttttttttttttccattgtgaaagcaagaaggctgctaattctcaaa

SEQ ID NO: 728776 - DNA, 625 bp, Homo sapiens
atcaaattacaacacctaaaataaataggtttcttctctatacctatgggagtaggtactcattccaattttaaaattagcatgtgtgtggaaataatcttgtgatttaaagaaaatgacactgcagaaaactacattaatgaatggtcctctccatcttggcacagagatttaaaatttgggtgtttcaaaattaaagacactaaagctcttcgtttaaaaaaaaaaaatgacaacacagatgcactgagcttttcaaactaaaagtcaggaatatataycaagctactatcacaaaacacttccatcaaaaccctgcaggaagcaaacaattgccagctagcacatcacccttcatgcgaaatgacgtgcgtcattttgtgcaaaggacatcaaaagaacttgtcagttaaacagaggatttagatataccatgagaaaactttcatgcaccactttacatatttccagcaaaattgctatagaagcacttaaggcacaataatttgaacctaacttgacttaagtaaccaacacaaactacttttctaaaatgtctcctattttcataagtgatagaatttagttataaaagtcctactaactcttgtaaaataatctacag

SEQ ID NO: 728777 - DNA, 625 bp, Homo sapiens
atcaaattacaacacctaaaataaataggtttcttctctatacctatgggagtaggtactcattccaattttaaaattagcatgtgtgtggaaataatcttgtgatttaaagaaaatgacactgcagaaaactacattaatgaatggtcctctccatcttggcacagagatttaaaatttgggtgtttcaaaattaaagacactaaagctcttcgtttaaaaaaaaaaaatgacaacacagatgcactgagcttttcaaactaaaagtcaggaatatatatcaagctactatcacaaaacacttccatcaaaaccctgcaggaagcaaacaattgccagctagcacatcacccttcatgcgaaatgacgtgcgtcattttgtgcaaaggacatcaaaagaacttgtcagttaaacagaggatttagatataccatgagaaaactttcatgcaccactttacatatttccagcaaaattgctatagaagcwcttaaggcacaataatttgaacctaacttgacttaagtaaccaacacaaactacttttctaaaatgtctcctattttcataagtgatagaatttagttataaaagtcctactaactcttgtaaaataatctacag

SEQ ID NO: 728778 - DNA, 612 bp, Homo sapiens
taccggaacttgacatgtagtaggtcgaggccagggatgctggtaaacatcctgcaatgcacaggacaggtcctacaacagcaaattatctggcctcaaatgtcacagagttgagaaggctgtaggttgggaaaccctgatctatagtgacttggctatagccatgtctattcaaataccaactacagtcctaggcatatccaaattctttccaccctccttagaamgtggcaatagtttaaaatagcattttcttacttcggttgcactaacaagatccagatggaatgtcacctcccctggcagcctttcctggtccctctttccactcctccatctgtgctttcatgacactttttacacaccaccgtcctaccatccgtctaccttgttagaccatagccgcttagcagcatagatcattcccttttagctcctctagcacagttcctggcatagaattggtgtttaataatccttgtagaatgaaactgaatcttcagagcagctcctccaatcttagtatcaagcctgacagaagagtggcgattatcatgatagctgagggcaatcataactcttgttagagaaggtacaaatgtcatggggatg

SEQ ID NO: 728779 - DNA, 645 bp, Homo sapiens
aacagaataaacagccaagggactcagtgaaaagatagctgagttcagacctcatgctgactttccacatctgcatggatgcaagccacaagcagcaagctgtaagaggtatccatgggtactgcacctgattgaaacctagggacagaaacagtgggtggtgcagaccatgtctcagtggaacctctagtaatactgggggaataacaaagactattcaaagcagaataagtggaggtattcacacacagcttgctacagcaagggaatcagccaccatcacttgcctaattccaagacaggcagggggatgcggaagctttgttcaacaaatacatacatgttaaatagttccagktgtgctctgattggacattattgccatggggaagctgaaggtaggctaaccagaggtggggcatcttatgtgatgggtttgggggatcatttttggcttttttggattggtcccaagttgaaagcagagtggagacaaaaaatagggaagctgacagtcattaagaaggtcaagtcctgacctttctgagccaatttctttaggagttacggtttggctttctaggcgtattattatagggatcatgagttagagttctattactatttatgggctgaccattggga

SEQ ID NO: 728780 - DNA, 585 bp, Homo sapiens
tatgtaactttatatttcctagtagtcacattttaaaaagtttttaaaaaggttaaaagttttcattattatttaaatttttagtataataaagttattttatttgacccaagatacctgaaatatcactttaatatgtaataattatgaaactattattgactggagttcctacaccctctctaccataagggttttttccctaatatatctttattyccttattttctcaaaaaaattcagtaaagttcagtatactcctcctctatgaagccttccctgaccactggcatccccactgaccccacactctgagtcacttggcacactgtggacattagtaattacacataagtaagtgtaattagcttctcattacacttatgcatataaataaataagcagaaaattgagtgattttttttttcttgccagactgtgagctacctaaaggccagtccatgtcttttcatcttcctgtctccagtccctagcacaatgtgtggccataggaagtattcaaaaaatatcattcaaattatataaaaacagaagaaatagcactctctaaaaccaaaagagagc

SEQ ID NO: 728781 - DNA, 602 bp, Homo sapiens
ctatacattgttcctttttaaaagtttgtttggttttaatgaattggttccctcaactgaagtttaatagccatttaaaggaagacaatttatcctaatgtttctgtatttttctaaactttctcatcctctctggcccaagccttaccatagtttttcaaataattggtgatcaaaaatgctgaactgtcacctgtttgcctatatactcttttccatttgtgagttcttcagtgtaatattccagagattgtgtttattcagatacattcatcttccaatcaatcaagataatgccagcttctgttgtgggttttgcagaaaggatttcctagactcctgaattcattttttctctctgtagtgtgagcatttttctgttttaaattattttctgaaaaaatgtgagtatttacrtactcgaaattttaactagaattgcttcccttctaaaaatgttagtttctcagaccaaatgcatcaatctgactccctcagaagtcaggcggttcacaaagagggaatacttcaccttaggtggccaagaaaaaaaacatactggcccatataccaggaaaaatagtagaatgggtcagtgcaac

SEQ ID NO: 728782 - DNA, 655 bp, Homo sapiens
gaaaataggtaaagaaaagaaaaatggaaaggtggttgtagaaaagattctatttccaggatcatgaggcttttaaagaagaactttaattatcttaatatatccaagaagggaagtcaagggaagccctcaggaagcccaaggaaaggggaccacgtgggagaaacaagtattaactgtgacttaactaaacatattggctaactagagttctcatttccctaaaggcacaaataacatcatttatatgtgtaagatctgtagtgatattctgtaagtatcagcaaactactgatactataaaaagcacccagtatggaacaagaaaaattgtggaattgtttccaagtactaaaagataatttttataagaagatgacgctttcaaataycaagctttgtaatgcttcaaaagaaagatctgaatgtcatgctttgtaaaagagattttgtgagcaagtttgtactctgtagaacagccgctcatcttgagaccatttgcttcgaatggttttaaatgtgatggtgtcacggtatgtgagtaccatcatgcccctggaaacatgtagcacaatccccaagactaggagaagaatgttcaacgtacatctattaggaagtgctcccgctcttgaccatcggaaactctacagat

SEQ ID NO: 728783 - DNA, 597 bp, Homo sapiens
ttagaattacacccttaaaccaagacaagcttcatgggtgtgcacttgtacacaagaccctgtaatagaagggccccatgcttggtttaatgctctgccacgaatgttttgaagtctgtaataattgttaaagaaagactcctgcattttcatttcttactgggttccacaaattatatagctagtcctcttttaaaaatcacttatatactgacaaattccgggcttttyttaggaaaggcatttgtcttttgggtcactcccttcggtgcctgacagcatctgaaacttaacaagcctctgattcccaatcttcatccctaaacttgatctcccagtggtctaccctatctcattaataccgtgcttctagttcttgggagagcaggtggacagggaacttgaaattgtcttttactccttttttatactcccaccctatctatgaccatatcctattgattctaccttcaaaatttgctcagaactttcagaatgtctccactggtgttacattgctcagagccatcatcatctctcatttggatcagtactgtaactgtcctagtgttctctttcctgctgcccttgctctct

SEQ ID NO: 728784 - DNA, 597 bp, Homo sapiens
ttagaattacacccttaaaccaagacaagcttcatgggtgtgcacttgtacacaagaccctgtaatagaagggccccatgcttggtttaatgctctgccacgaatgttttgaagtctgtaataattgttaaagaaagactcctgcattttcatttcttactgggttccacaaattatatagctagtcctcttttaaaaatcacttatatactgacaaattccgggcttttcttaggaaaggcatttgtyttttgggtcactcccttcggtgcctgacagcatctgaaacttaacaagcctctgattcccaatcttcatccctaaacttgatctcccagtggtctaccctatctcattaataccgtgcttctagttcttgggagagcaggtggacagggaacttgaaattgtcttttactccttttttatactcccaccctatctatgaccatatcctattgattctaccttcaaaatttgctcagaactttcagaatgtctccactggtgttacattgctcagagccatcatcatctctcatttggatcagtactgtaactgtcctagtgttctctttcctgctgcccttgctctct

SEQ ID NO: 728785 - DNA, 597 bp, Homo sapiens
ttagaattacacccttaaaccaagacaagcttcatgggtgtgcacttgtacacaagaccctgtaatagaagggccccatgcttggtttaatgctctgccacgaatgttttgaagtctgtaataattgttaaagaaagactcctgcattttcatttcttactgggttccacaaattatatagctagtcctcttttaaaaatcacttatatactgacaaattccgggcttttcttaggaaaggcatttgtcttttgggtcactcccttcggtgcctgacagcatctgaaacttaacaagcctctgattcccaatcttcatccctaaacttgatytcccagtggtctaccctatctcattaataccgtgcttctagttcttgggagagcaggtggacagggaacttgaaattgtcttttactccttttttatactcccaccctatctatgaccatatcctattgattctaccttcaaaatttgctcagaactttcagaatgtctccactggtgttacattgctcagagccatcatcatctctcatttggatcagtactgtaactgtcctagtgttctctttcctgctgcccttgctctct

SEQ ID NO: 728786 - DNA, 597 bp, Homo sapiens
ttagaattacacccttaaaccaagacaagcttcatgggtgtgcacttgtacacaagaccctgtaatagaagggccccatgcttggtttaatgctctgccacgaatgttttgaagtctgtaataattgttaaagaaagactcctgcattttcatttcttactgggttccacaaattatatagctagtcctcttttaaaaatcacttatatactgacaaattccgggcttttcttaggaaaggcatttgtcttttgggtcactcccttcggtgcctgacagcatctgaaacttaacaagcctctgattcccaatcttcatccctaaacttgatctcccagtggtctaccctatctcattaataccgtgcttctagttyttgggagagcaggtggacagggaacttgaaattgtcttttactccttttttatactcccaccctatctatgaccatatcctattgattctaccttcaaaatttgctcagaactttcagaatgtctccactggtgttacattgctcagagccatcatcatctctcatttggatcagtactgtaactgtcctagtgttctctttcctgctgcccttgctctct

SEQ ID NO: 728787 - DNA, 588 bp, Homo sapiens
ggtcttgactgtaaaataaaggaaggatgcagagagtagcatagggagtaaggttggtggggaaacagagtcagtggctctcttcggtgatgataggacagaactctgttcacagagagattctgtgattataaagctgtgttcctgaaactcctaatggcctagggtgcaggatagtctccttctgattgacctccaacacagaagcaygtgccctgtgttcagagatgctaagtggaatctatacgtcacattgtcacttctgtgatatgtgacttattaatattaaatgatcaccacaccctcacctttaactccctctcacacctccagctgtgtgatgttctatatctgcattgtccagtacggcagtcaccagccacatgtggctactgagcactttaaatgtggctagtacaactgatgaactgaattttaaattttatttaattttaatatcttaaaattaagtagtcacctatggctttgccttagaagtagcattggtttggccaatgtcacaggctatacaacttcaaacagtttagcagatttaaagttgaccttactttctttctctcttgtgca

SEQ ID NO: 728788 - DNA, 655 bp, Homo sapiens; identical to SEQ ID NO: 728782

SEQ ID NO: 728789 - DNA, 644 bp, Homo sapiens
ctggacaactaatggaaagatggctaaatataggtttatattggagaaaacatacatataaatgtattagaaaatatacaaataaatataaccaaaatttaaatctagtcagagaatttaaaggcaggtgtttatatgagctatatttgacactttaatactttctgaagtaaactgacaaaaattgtctgttatttgtaatcaggagtaaaggtataaggayacttaacaaaaatcagtactactgaatctccaagtcagtaaatcctgaatgagtgggccacaaatttcagtatattataaaatacctggtattacaaggtaagcaaaactggcgattactgaatttcttaaaataaaataaaacaataaactttaaaagaaataatagacatgtgcttcgtaaggcaaaaaaagtaattacaaagatgttaagtttgaaatctccagaattctaaaattctttcaatctctttgcctgcactgttttctcatgcctcatttctccttcatttagttttctaattaactcccacttccttatcacatatcggttcaaatttaactccaactgagaatccttattagaaactgttacttgatagccaagcctcaattaatattttctcaataaatatataaat

SEQ ID NO: 728790 - DNA, 517 bp, Homo sapiens
aatatgtgggtgatctgtacagctggatattgttcatcaataaaaagaaataaaggaaatactgatacatgctatatgatatggataaactttcaaaagattatgtgcagtaaacaaactagacacaaaagaccacatattatatgattccatttatgtgaaatatccagaatagacatatccatggacatggaaagtaaattagtcattaccaagaaatagggtgagggattgattgggaggtttaggattttctttgagcaaagttgaaaaggttctggaattagtggtggtgrttgaacaacattgtgaatatactaaaatccactgacttgtacactttcaaattgtttttaaaaagtcctatttcccctattagaatcacaaatcccctgaattgaaatattcacggtctctttagaagatatacctctctagaagtacactgttacaatgaaagatgctcctgtgtatgctggtccattaagtcccattattgcaaacacaatcaactgcc

SEQ ID NO: 728791 - DNA, 588 bp, Homo sapiens
tagatatgttttggatagcaagccatctaacattttcttgggctccagggatgatcctatcctggcctcccaagtagctaggactacaggtgtgtgccaccatgcctggctaatatttttgttttttgtggagataggggtcttgctatgttggccagctggtctcgaactcctggcctcaggcaatactactgcctctgcctcccaaagtgctgggattacaggtggaagccaccatgcccagcataattctttgaaggactcttgtcaaaatacattttggactagattttattcaaaatagaagacaattagtaccttgagatgcaaggacctcctccaaccacacacacacacacacacacacacayggacacgcacacacacacacgattctattaccttttccttaatgaaagatctacttttagaacaaatcgcaaataataatatatttgaacagaaaaatactatttcactaatgttttaatatctaatttcagcttcataatatcctaatgctatcaggttagtagggtaaacattataaatttatttttacatggaaaaaactgtccccaagatcac

SEQ ID NO: 728792 - DNA, 556 bp, Homo sapiens
aagagtacaatgcttataggtactatagttactgcagatttacataacaagaatataaacttaacatttctcaagtgaccaaatgcatcagcaaaaaagtagggacagcagagtttagagaatgccaaagggatttaggttggtcagtatggmaaatgaagactcgtcatctcacttaccaacaaacgagtaagaagaagcaggagtcttagtcaatactcaaaccaatcctgtgtgctgagcattgtttttatccccattttacagacacgagctgaggcttagagtgggaatatatgccacgtcacttagtacatgcccaaaccacaatttgtgtcaagcatccagtctctacatccatgcttataaacactataccatgctgcctccatgcaattaaactgaatgtgatttaattgctcaagttgttatgttaaacagtgtaaagtttgtaactatcacacattgtgatcagttaaaattgattatataaaatattatgtgtgttgtgaatatggcctttatttttcaaaataatcaaaacttatttcaactt

SEQ ID NO: 728793 - DNA, 619 bp, Homo sapiens
cccataatcaaggagtaatgccaactttgaagtcttattatttaagaaatacattttataaggctatagcggccatagatagygattgctttgatgaatctgggcaaagtaaattgaaaacattttagaaaataatcaccattctagatgaaattaagaacattagtgattcatggaagaacgtcaaaatatcagcattaacaggaattgggaaaaagttgattccaaccctcatggatgactgaggggttgaagatttcagtggaggaagtaactactgatgttgtgaaaactgcaagagaactagaattagaagtggagcctgaagatgtggctgaaatatcattagttattagagaaatgcaaataaaaaacacaatgaaataccacggcccaattattatattatataaaatgagggagatggatgataccaagtgttggtaaagatgtgtcggaggtggaactctcatatgctcccggtgagaatgcaaagtccaaagcgatgcaaccatttgggaaacagttcagcagtttcttgatgtgttaaatacatacctaccatattctacagcgattctattcctaggtatttatccaggagaaataagatcatatg

SEQ ID NO: 728794 - DNA, 545 bp, Homo sapiens
ccatagatagcgattgctttgatgaatctgggcaaagtaaattgaaaacattttagaaaakaatcaccattctagatgaaattaagaacattagtgattcatggaagaacgtcaaaatatcagcattaacaggaattgggaaaaagttgattccaaccctcatggatgactgaggggttgaagatttcagtggaggaagtaactactgatgttgtgaaaactgcaagagaactagaattagaagtggagcctgaagatgtggctgaaatatcattagttattagagaaatgcaaataaaaaacacaatgaaataccacggcccaattattatattatataaaatgagggagatggatgataccaagtgttggtaaagatgtgtcggaggtggaactctcatatgctcccggtgagaatgcaaagtccaaagcgatgcaaccatttgggaaacagttcagcagtttcttgatgtgttaaatacatacctaccatattctacagcgattctattcctaggtatttatccaggagaaataagatcata

SEQ ID NO: 728795 - DNA, 633 bp, Homo sapiens
tctgcatgttggttagatctaggtggcttattgtgttaagtcctctattctgtaacttatcttctgcctggttgttctattcattatagagaatgtggtactgaagtctctcaccatcattgtagaactatttctcccttcggttctgtaaatttttcctttgtgtcttttgatcgttagctgttagaggcataaatgtttayaatggttatctgtaacatcttcttgcagcctcgaacctttaagtgtgcagcgtcctcttttgtctcttgtgacctttctaggtttattataaaaccatttttggctgatgttagtgtagccactctgctttttgtgtttgccgtttgcatggaacctctttctccactctttccaccctttcactttcaatctttttgtgtctttggctctaacgcgagtctctagtagacagcatgtagctggatcatgtttatctattctgccactgccgatatcaccttttgatatacagactttacattttcataaaatttaatttgtccacgtgcttagcccctgtgatccagcaatcccactgctagttatatatccaaaaagaaagaaaatcagtccagcagggacagatccgcactcctacgtttactgcgg

SEQ ID NO: 728796 - DNA, 503 bp, Homo sapiens
tctctgcatgttggttagatctaggtggcttattgtgttaagtcctctattctgtaacttatcttctgcctggttgttctattcattatagagaatgtggtactgaagtctctcaccatcattgtagaactatttctcccttcggttctgtaaatttttcctttgtgtcttttgatcgttagctgttagaggcataaatgtttacaatggttatctgtaacatcttcttgcagcctcgaacctttaagtgtgcagcgtcctcttttgtctcttgtracctttctaggtttattataaaaccatttttggctgatgttagtgtagccactctgctttttgtgtttgccgtttgcatggaacctctttctccactctttccaccctttcactttcaatctttttgtgtctttggctctaacgcgagtctctagtagacagcatgtagctggatcatgtttatctattctgccactgccgatatcaccttttgatatacagacttt

SEQ ID NO: 728797 - DNA, 503 bp, Homo sapiens
tctctgcatgttggttagatctaggtggcttattgtgttaagtcctctattctgtaacttatcttctgcctggttgttctattcattatagagaatgtggtactgaagtctctcaccatcattgtagaactatttctcccttcggttctgtaaatttttcctttgtgtcttttgatcgttagctgttagaggcataaatgtttacaatggttatctgtaacatcttcttgcagcctcgaacctttaagtgtgcagcgtcctcttttgtctcttgtgacctttytaggtttattataaaaccatttttggctgatgttagtgtagccactctgctttttgtgtttgccgtttgcatggaacctctttctccactctttccaccctttcactttcaatctttttgtgtctttggctctaacgcgagtctctagtagacagcatgtagctggatcatgtttatctattctgccactgccgatatcaccttttgatatacagacttt

SEQ ID NO: 728798 - DNA, 503 bp, Homo sapiens
tctctgcatgttggttagatctaggtggcttattgtgttaagtcctctattctgtaacttatcttctgcctggttgttctattcattatagagaatgtggtactgaagtctctcaccatcattgtagaactatttctcccttcggttctgtaaatttttcctttgtgtcttttgatcgttagctgttagaggcataaatgtttacaatggttatctgtaacatcttcttgcagcctcgaacctttaagtgtgcagcgtcctcttttgtctcttgtgacctttctaggtttattataaaaccatttttggctgatgttagtgtagccactctgctttttgtgtttgccrtttgcatggaacctctttctccactctttccaccctttcactttcaatctttttgtgtctttggctctaacgcgagtctctagtagacagcatgtagctggatcatgtttatctattctgccactgccgatatcaccttttgatatacagacttt

SEQ ID NO: 728799 - DNA, 562 bp, Homo sapiens
tgtataaaagtgtttgtagggacttatatttcctttctgcatgggtaaatacctaggtatagaatggctggataatgtggtgagtgtatatttttaactatttaagaaactggctaactcatcaacccttgacgtggtccgtcattttcatgttagccagtctaagaggtgtgcgtggcatcctgctgtggttttaactttcatttcctaaggaccagtgatgttgaatatcttttcacgtgtttcattggcatccaggaaacatctttggtgacatatctttttaaatgtttcacccattgtaaaattgggctgtttgtcatctgagttgtaaaagttctttgtatattctggttacatagatatttgttttacacatgtattctctagtcggtggctttccttttcatttatttagtagyatcttttttttttgtttgagactgggtcatgcactgtgctcaggctggagtgcagtggcgtaaacgtagctcactgcaacctcgaattcctgggctccgaggatcctcccacctcagcctcccaagtagctgggactata

SEQ ID NO: 728800 - DNA, 481 bp, Homo sapiens
caccagcctgatgccaaccagagctctcctgtttgaggtgtctgttgacccctgttgggaggtcttgcctgctcaggaggcatggggctcagggacccacttgaggaggcagtctgtcccttagcagagctcatgcrctgtgctgcgagaatcccccttgtcaggatcagctgctctcttcagagccagcaggcaggagagttcaagtctgctgaagctgtgcccacagccaccccttctccaggtgctctgtcccagggaaatgggagttttatctataatcccctgactggggctgctgcctttctttcagagatgccctgcccagtgaggaggaatctagagaagcagtctggcctcagctgctttgctgtgctttggtgaattctgcccagtccaagcctcccagcctccttagcactatcaggggaaaaccgcctactaaagcctcagtaataccaaatgcccctcccgccaccaa

SEQ ID NO: 728801 - DNA, 515 bp, Homo sapiens
atagaattaatatcaagaaattcccacactattcatgccatattcatgatctccactttggttattattaagcactaaaatttgataacttatttctgaatgaagtcatctctttattgcagttttttgacttatggtgatctttaaatggcagagattcattcattcataatccaagagagaaatgtgattcacagggattcttttatcatgtgatacatgataaatacacccaatgttatatgtcaatttaaaaagtaagtaacttaaaaaatgataattactttatacctagcttgtccaacccacaggtgacaggccgcatgcagcccagaacagctttgaatgtggcccmacacaaatttgtaaactttctccaaacattatgagagttttttgtaatttttttttagctcatcagctagttctagcgttagtgtattttatgtgcggctcaagacaactctccttcttttaatatagcccagtgaagccaaaagattggacctccctgc

SEQ ID NO: 728802 - DNA, 551 bp, Homo sapiens
tcactgatatacttgtccgtgaaaggtgaaagacactgaaatgtaagatgcgtgagtaaaatcttggtagagaggctctttgtggttgttttatatacttgtaagtgatttatgagataggtgtttagaataatactcttctgttagggtcaccctgatcagaccgttcccttcccctcccacaggacttacaatacggtcccttgtgctctcygcacagctaccccagggcaaaaaacaaaccccccttcactgatccctccagtaactgtgcagacagttacaggatgcggttaacatgtctgttcacctcgcataacaaagctggcaaaaaacatctccaggatgcagacaagacacctgcaccctcgactaagctcccccaccccaacccagttctcctgcacccccaactcagctcccgcaccccgacctagttctggccctataaaaacctgctatagtctgtaagcagggctgcctcctctaactgtggtggagcagccaagcagctcaataaagcttgcttgcctgactttgggtctcttcat

SEQ ID NO: 728803 - DNA, 599 bp, Homo sapiens
acacttagcaatttaagctgttgatgagtcgtgtggagtatctatttttctcgtaatactaccaattaacaataatcatgtcaccaatttgctaaaattgagtgaataacaaatacaatggccaattctatcctgtaggatttttttaaaaagtactaatgtcctaattcacttcccatataatggggttagctttgtgtcatttcaggtcaggtttggaaayataatatttttagaaatatattccttatgtcaaaatcaactatataaggccaggcaaggtggcttatgcctgtaattcctagcactttgggaggccaaggcgggcggattgcctgagctcaggggttcaagactagcctgggcaacatggcaaaacctcgtctctcctgaaaatacaaaaaattagccaggcatggtggtgtgcacctgtagttccagctacctgggaggctgaggcacaagaatcacttgaacccgggaggtggaggctgcagtgagccaagatcataccacttcactccagcctgggtgacagagcgagactgtctcaaaaaaaaaaaaaaatcagctacctaaaattgtttgaagtttcatgt

SEQ ID NO: 728804 - DNA, 599 bp, Homo sapiens
acacttagcaatttaagctgttgatgagtcgtgtggagtatctatttttctcgtaatactaccaattaacaataatcatgtcaccaatttgctaaaattgagtgaataacaaatacaatggccaattctatcctgtaggatttttttaaaaagtactaatgtcctaattcacttcccatataatggggttagctttgtgtcatttcaggtcaggtttggaaacataatatttttagaaatatattccttatgtcaaaatcaactatataaggccaggcaaggtggcttatgcctgtaattcctagcactttgggaggccaaggcgggcggattgcctgagctcaggggttcaagactagcctgggcaacatggcaaaacctcgtctctmctgaaaatacaaaaaattagccaggcatggtggtgtgcacctgtagttccagctacctgggaggctgaggcacaagaatcacttgaacccgggaggtggaggctgcagtgagccaagatcataccacttcactccagcctgggtgacagagcgagactgtctcaaaaaaaaaaaaaaatcagctacctaaaattgtttgaagtttcatgt

SEQ ID NO: 728805 - DNA, 581 bp, Homo sapiens
atgcaacttcatcattctgcaaatcagcaagactcacttcaaacagaagacccttgagaccatcagatgcaatttgggttccttgggtcctggcgaccaggtctttccagtatttcttatattgaacatagcaggtgctttcacatcatactgatctttcttagagaatggaccaactactttcttcttaactccctttttgccacctttcataaggcacttgttcttaacaaccgccatggtgctgctyagagtaccaaaaggctaaattttatatttttggtagagacgggatttcaggatgttggccaagctgctcttgaactcctgatgtcaggtgatctgcccgcctctgcctcccaaagtgctgggattacaagtgtggaccactgcacccagctgttatttattttttctttttttgtacagacagggtcttgccatgttgccaaggctggcctggaactcctggcttcaagcaatcctcccaccacagcctcccaaagcactgggatttcaggtgtgagccaccatgcccagcctggaatctatttttaaagccaatcaagcgttgaataaaa

SEQ ID NO: 728806 - DNA, 653 bp, Homo sapiens
taatactgcaaaatttgggatccacagtctacaaaaccccagggctcctaagaattctctcacctgccttctgctcttaggctctgctagattgcaaatgacctgcattctttctgatcccaggctgacttccccctttcggatagtaaatcccaagtaatgtacctgctgttggcagatctgagctttcttcttggacaccttctacccacagtcctccaggtgctggtgtagggcatctgttcccttggcgcacccractgccgtggggtgtcccagcaaacggtcatcaacctactggagaaacatgcagcctaggtctctgctgggaaacttctggaagtctccagccaacacctccccgaaaatggtgggggagttcttgaacccttggggaagcccagtccaagtgtactaagtagtgacacctgactccagatcttcccactgaaaggcaaacagcttctgcctctcaggggctaatctgataggcaagaaagcatctttcaggtccaagcaggtgaaccagctgtcctcagctgtcagcaaccccaacaatgtggacggcttaggtactgttggatgtaaagtcagtgtagcttgatgaagcaagcgcaaatcctgtactggcctgtagttcttggtccgtggct

SEQ ID NO: 728807 - DNA, 653 bp, Homo sapiens
taatactgcaaaatttgggatccacagtctacaaaaccccagggctcctaagaattctctcacctgccttctgctcttaggctctgctagattgcaaatgacctgcattctttctgatcccaggctgacttccccctttcggatagtaaatcccaagtaatgtacctgctgttggcagatctgagctttcttcttggacaccttctacccacagtcctccaggtgctggtgtagggcatctgttcccttggcgcacccgactgccgtggggtgtcccagcaaacggtcatcaacctactggagaaacatgcagcctaggtctctgctgggaaacttctggaagtctccagccaacacctccccgaaaatggtgggggagttcttgaacccttggggaagcccagtccaagtgtactaagtagtgacacctgactccagatcttcccactgaaaggcaaacagcttctgcctctcargggctaatctgataggcaagaaagcatctttcaggtccaagcaggtgaaccagctgtcctcagctgtcagcaaccccaacaatgtggacggcttaggtactgttggatgtaaagtcagtgtagcttgatgaagcaagcgcaaatcctgtactggcctgtagttcttggtccgtggct

SEQ ID NO: 728808 - DNA, 656 bp, Homo sapiens
tctgcgctttgactgactaaagccatgggaatcatgcgctgattatcagggctatcgggatcaaagggagtatacatacgataggcctcccacagtctctcgtagaattgtgctggactttcttcttttccctgaatgacctcagagagcttgttaacgtttgtggccttctgagctctcctctgtaatccttccaagagagsttccctgtctcagttgagcctttgcatatcccctctttcatgtgggtcccactgggggttggttcctcctaactgggtccttagatagtctcggggtttttgataatcagctggtgtatgttcctctagccacttagttgctgcttggagcactctctgcctttcatctctgtgaaagaggaacatgagcaactggtggcagtcagcccaggtgaggttgtgggtctggataacagcttggagcaaatcaattagggcttgtggcttttcagtataggacagggtattgttttgccagtcgagaaggttggcagaggtgaagggctggtacacaaaaatgcgcctctccactacgtgaccatcctcatctatcccagtataccgctgctctctcgggggcatttggatccccatttggggttgtaaaggagctgccaagggaggggtttctcc

SEQ ID NO: 728809 - DNA, 656 bp, Homo sapiens
tctgcgctttgactgactaaagccatgggaatcatgcgctgattatcagggctatcgggatcaaagggagtatacatacgataggcctcccacagtctctcgtagaattgtgctggactttcttcttttccctgaatgacctcagagagcttgttaacgtttgtggccttctgagctctcctctgtaatccttccaagagagcttccctgtctcagttgagcctttgcatatcccctctttcatgtgggtcccactgggggttggttcctcctaacygggtccttagatagtctcggggtttttgataatcagctggtgtatgttcctctagccacttagttgctgcttggagcactctctgcctttcatctctgtgaaagaggaacatgagcaactggtggcagtcagcccaggtgaggttgtgggtctggataacagcttggagcaaatcaattagggcttgtggcttttcagtataggacagggtattgttttgccagtcgagaaggttggcagaggtgaagggctggtacacaaaaatgcgcctctccactacgtgaccatcctcatctatcccagtataccgctgctctctcgggggcatttggatccccatttggggttgtaaaggagctgccaagggaggggtttctcc

SEQ ID NO: 728810 - DNA, 562 bp, Homo sapiens
atgttactactgatgtcccaatgcaggtacgttctctgatattattcgctatatccttgggggatgttacttctaatgtcacatggggtgtactccctgtgttctatttcgtaatatcctggggcaattttacttttaatgayacaggggatgtacacattgtgatattattcgtgatattctagaaatacgttattcctaatgtcacaggggtgtacaccctttgatagtattcataatttcccaggggtctatactcctattggcacagaggataacaccctgtgacattcttcatcatgttctagcgagatgattcccctaatgtcacagggggtgtaccccctgtgatattattcttactattctagggggatgttactcttaatgtcacaggtgtgctccttctgtgatattattgaaaatatgctagcaggatattatgactaatgtcacaatgcctgtataccttgtgatattattagtaatattcaggggggatgttactcctaacattacaggggtgtacaccgtgtgatattgttccaagtattgtaggggg

SEQ ID NO: 728811 - DNA, 644 bp, Homo sapiens
tttacacactactacacagtggatccaataggggagggaacaggtgggagccccaccccctactgagttggcagggcaggagccccacactcatggatgcagttgcagccacccagctatggctccagacctgggcatgcctgcactcctggaagccccccctggccccacaggctcagaagtgcctgctcctgcttctcccctctcctgacacctgctccaattctggagcaaagttgaggctgaacccgggtgctatctcaacctggctggatgtgtgygtgctaggggtggtgctgacacaccagtcccaccaccttgaccccctttgaattttgggcaccaacaagcaggggcgggaggccaagggggccctgagggcggtttggcacaagcctgccggtgcctcttggtaggaacagcctggttgctgtggatggcatgttgatggtggcaggatggaaaagggtgggtcctggtgaaacctcaccttcaagccagggatggcctgaagcctggggcctgagctgccagttccagctggagtccactgcctggagtgagtacatatggagctttttccccagcccacccatggccgcccatggaccgatcagcacacacttcccctcctgagcccataa

SEQ ID NO: 728812 - DNA, 568 bp, Homo sapiens
caactttctcatctgtaaaatgggtatgttgtcattcattaatcaaattctaggtgagcatatactaaacaccagaggcacaaatgagaatcagaacaggcacgtccctggcccttatggtgaccacagtcttgaaggggaaggatgacacgcagagaaataggaagccatagctgagctagtttctaccacagagaggcagctggtgtcatgaaagcagataacagggggttactgggactgagtcagtgtggccagaagtccctgaggatgtagtgactccagtgtcagatgagaccgtgaccaggtgaagaagcagggagagggaaaatttttcaggcagaaagagcaggatgtgcaaagaccctatggcagaaagaaaacaaaggaagtgcaagagyctgaaagaggccagagagaacaagtgaaaatatggataatcacagcaccgacctcatacaggacttgcaagaaatcgagaccctgtctgtaacagattcagcaatgactaaatagaaactatctcctaaaagcacacgatgaggttccttggtggtatttcccacat

SEQ ID NO: 728813 - DNA, 549 bp, Homo sapiens
gataaacaacaaatcattttttagggtaagcaggtcccaaatattgcatgggatatatttgcaccaaaaaaaaaaaaaaaaaaaaaaggttaatgagaaattcaggtttaattggacctcctgtattttacctggcaagcctaaccctgcataaacacaacctcgagcttgaaactcacagagaagacayggccgtgctcacacacgtgcacaaacccatatgccttacagagtcaacggctgtgatgagggtccagacccttgcacacttttctgtcttctgtctgggctcagagtaaacagggggtcacctggaatccacgtctaagctgggcttggaggtgtcctaatgaagcaggatgctgtcctgcaattccccagctcagctaggactgtagccaggcctagcttccagtctcgggcctagaacaaacagcacagccccagaccttggcaagaaggtttcatctcaaaggccactggtgcaggaactattagaagccccacttctttcctctgtttctgctgccattgccccagtctctgacc

SEQ ID NO: 728814 - DNA, 562 bp, Homo sapiens
aagcccagaggctgggaaagaagcagaaagaggactgtggggctggagcgtggtgggcaaggggaggaaggtgtggtgggcagacagattgactgggacccagctgtgcaggggcagaggagataggggatccttgcaggcccccagccggggctcaggcacagagacaatgcaggtgggcaaagggaggagacgtggagaaatattttggaggcatgccctgatgaatgagcccaggatgcacccttagtgtcagtgtggagctccttccttgactgtgtgatgagctgaactcgggggtattttctggacattgaggtgctacaccaagagcccaggacaggctaagtgagcactagcagctcctggcccacctcaaaagcaggagagacaggggagactggggaggccggggyggaaggggaagccagaaaggtaggagaggccagggaagcagaggaggccagggaggcaatggaggcaggagaggctggggaggttatgtcctttccatgattctgccctggatcctaggcccctgaactccctgagcttccccacc

SEQ ID NO: 728815 - DNA, 562 bp, Homo sapiens
aagcccagaggctgggaaagaagcagaaagaggactgtggggctggagcgtggtgggcaaggggaggaaggtgtggtgggcagacagattgactgggacccagctgtgcaggggcagaggagataggggatccttgcaggcccccagccggggctcaggcacagagacaatgcaggtgggcaaagggaggagacgtggagaaatattttggaggcatgccctgatgaatgagcccaggatgcacccttagtgtcagtgtggagctccttccttgactgtgtgatgagctgaactcgggggtattttctggacattgaggtgctacaccaagagcccaggacaggctaagtgagcactagcagctcctggcccacctcaaaagcaggagagacaggggagactggggaggccggggtrgaaggggaagccagaaaggtaggagaggccagggaagcagaggaggccagggaggcaatggaggcaggagaggctggggaggttatgtcctttccatgattctgccctggatcctaggcccctgaactccctgagcttccccacc

SEQ ID NO: 728816 - DNA, 547 bp, Homo sapiens
tggtgccaggaaaactagatatccaaacacagaataataaaactagacccttatctctcatcacttacaaaaataaactcaaaatcaattaaggacttaaatgtaacagccacaactataaaactactagaagtaaacacaggagaaacgcttgagaacaaagattgtatggctaacacttaaaaagtacaagcaacaaaaacagacaaatgggattatattaaattaaataccttctgcatatcaaagaaaacaatcaasagagtgaaaagacaacacccctcccttacaccatacacaaaaattaactcaagatggcttaaagacttaaatgtaaaacccataactataaaaacgctagaagacaacctaggcaataccctccagtacatagtgatgggcaaagagttcatggtaaagatgccaaacgcaattgccacaaaagcaaaaagtgacaaatgggatctaattaaatgaaagagcttctgcacagcaaaagaaactatcaaaaaacaaacagacatttctcaaaagaagataaacacat

SEQ ID NO: 728817 - DNA, 707 bp, Homo sapiens
catgagcatggaatgtgtttccatttgtttgtgtcatctatgatttctttcaacattgttttgtagttttccttgtaggggtctttcacctccttggttaggtatattcctaagtattttatttttacagctattataaaagggtttgatttgattctcagcctggtagatgttggtgtatagcactgctactgatatgtgtacatagattttgtatcctgataaatagatttattgtgtatttctaaatagcaataagatttgaaatattcccaacacaaagaaatgatcaaygtttgaggtgattaatatcctaaagaccctgacttgatcattacacattacatgcatgtaccagaatctcacatggaccccataaatgtgtacaattattctctatcaaaaacatttttttttaagaaacatgcaggaatacactctacctcttccttgctgtgtctggatattgtcacatgaggacttgacatgcggattgtggcagcctctgtgaccaagagcggaagacaacagcagcatagaaacctcaaatgaaaaatctaacatctcaagctactaatttagccaaccttggcatcagctatctctggtcttagtatatgaggcgataagcccccactgttcaagttgggtgtctatcaattgctgcagaatagaagttaatgaggcttcctcctcctggatcccct

SEQ ID NO: 728818 - DNA, 608 bp, Homo sapiens
gcccgctgttgtttctctatactttgtctctgtgtctgatttcttttctgtctctcatcccacccgacaagaaatacccacaggtgtggaggggcaggccaccccttcagtatgagattacaggcatgaataaccccacctggccacctaactcactcttgagaggccagaagtgatgctggaactttcttcctctgtgggtgaaaaagggaaaattagggagaacagaaggcatgagagatgcagygatggatatgtctatatggagcttctgtctgcatccagtagaaaatgcatctgtaggcaccaggtttaagagcaaaatcctggagtcttgtctgttagcattctccttccccacaaaccagagaaggaatatatttgctccagcacacccggatgtaggaaatgtcacattcctatttctgtaacttcacttaaatctgctctgagtctctggatgcctggcaggtggagaattcaatcttgtcgttaccagtattcctttcccttctccatgggcttatgtaagaattctgggcttacacactgttggaaagccaggtaggaactccatcccccgaactctccattcttccagctgctca

SEQ ID NO: 728819 - DNA, 659 bp, Homo sapiens
aatacaaattcatgtacacatatgctcgtatgtgtgcatacacaatacacagatacacccgtacatcaacatgcatcaaagcacatgcatacacagagacatgcgcaatgtgcacaggtacacacatgcacacatacgctttggagctgggttcacatgctgagtggatggtgtgctctgaactagaagcccaaggcattggcccacttacctcagtgaacctcacctgtgytcggtgtcagcagccacacctggatgtcacccggaattgcccaattctggccctgacaacaccgcaaccaaggaagaggcacaagacccaggagacgatggtgctggctgatgccgcccctccctgaaggctcagagcctacacttgctgggtgctccatggccatgtgaagcccaggggagctgagtgatggcaccgcaggccccaggagtgctcctctggcttcacatgcacccaagctgtgatttttcagataaatatgactcagaagacctcggtgtttctgtgtgatttgcctacctaatgtcggagatgggtattacaaaatatttttggttcatcaaatggtttaaggtaatttctcagtaagatggcttggctcacacgccattttcaagaatgctgagaaaggagagtgtgccatcaa

SEQ ID NO: 728820 - DNA, 659 bp, Homo sapiens
aatacaaattcatgtacacatatgctcgtatgtgtgcatacacaatacacagatacacccgtacatcaacatgcatcaaagcacatgcatacacagagacatgcgcaatgtgcacaggtacacacatgcacacatacgctttggagctgggttcacatgctgagtggatggtgtgctctgaactagaagcccaaggcattggcccacttacctcagtgaacctcacctgtgttcsgtgtcagcagccacacctggatgtcacccggaattgcccaattctggccctgacaacaccgcaaccaaggaagaggcacaagacccaggagacgatggtgctggctgatgccgcccctccctgaaggctcagagcctacacttgctgggtgctccatggccatgtgaagcccaggggagctgagtgatggcaccgcaggccccaggagtgctcctctggcttcacatgcacccaagctgtgatttttcagataaatatgactcagaagacctcggtgtttctgtgtgatttgcctacctaatgtcggagatgggtattacaaaatatttttggttcatcaaatggtttaaggtaatttctcagtaagatggcttggctcacacgccattttcaagaatgctgagaaaggagagtgtgccatcaa

SEQ ID NO: 728821 - DNA, 462 bp, Homo sapiens
cctgtgtctgcctcaaactggtcccagaataaagctatatatgttatcacatgcattttctgtaacagccacaactttctttggtcttggctgacctacattatgctttaacacggagatgagaagggtagaggtgcaagtcaracaaatagaggagcccagctattaactttctgtctctgcgaggttaacaatattcttgtttgcagactggaaaagaaagagacagaattttgtctctcatttagctggattcacagagacgaagttgccttactggattctgtgagagcataatcatccctatggcaacggaaatctatctatgatggtgatttcactattgcatcaaagagacacatatggtttttatttgttttttggaacatgacaggatcttattctaatattccatactggcataaaataaaaggaaacatgtaaaatgtgagtggaggtaac

SEQ ID NO: 728822 - DNA, 674 bp, Homo sapiens
gtgtgctaaactaaacaataattgaggattcaaataacttgctggtctcctggaagtcttaatggaacatctgtctaacccaaagtcaggtgtcatgcaatgttaaaatatcaagatgttttaaacatttggatatctactgttgagactgggcttatgttgaccaaataaaataaaacggcattagtwtttcttgcaaaaatccctaatgtaaagacagagaggctattttgtctaaataatctgcaatgattatgtatactgattgacttcatgagataattaccttcctacttttgccagtgttgaaagagtcttactttttctaatcttattaagccctcctgctgagaaggctcactctctgatctctgaaccttgagttgccacttaatggaaaagttgacaaggctaaatctcttaacaaaaagagaaggaggacttaatttcctgaattcaatattcagaatccaaaccaaagcttgagagaataacttgacaaggtccttgagaaggataccctgttaacatttgaaaaaagcaaaagcaaaaacaaattcagtcctgaattttccaattctgttcataacagagattcagagaatgacatataagctagaatgaaagcttgcactatgaccatcagcattctaatatttttctgagctgcccta

SEQ ID NO: 728823 - DNA, 367 bp, Homo sapiens
tttaagatagccagacccttttcctttaataggaggataaatcttagttttcttttccttttgaagagctgcctgtgagagtctttggatggtgctggactaaagaaggtcagttttccttatcagacttgttaaaaccagcatcttaaactgcagagaaacaattttggtaaacatggcattttaatgctgcattccttgttggctcaatagaggaaagattcacagaytgaaaacaatcaatagaaagcagcaggctagtcagcagctaatgttcactctctttacaagtcccgataaaagcttacatcagcgaagaaagtcatggcaactgcaaaatcaaaaataaaatggcaatcttctgctc

SEQ ID NO: 728824 - DNA, 599 bp, Homo sapiens
ggcagctcggactcggaggaggagcgggccaccaggctggcggagctgcaggagcaggtgggcactggcatgcttgggtggggttcaggggctgaggcgggattgctggcacagcagcccaaggtccgtccctttgcatggttccttcctctgcccstgtccctcagcagccgcggtagtgcttccccgtaaagacactcggagtgccctccccaggtctggggtggtgcgagcctaacccacagcacacgtgggtggctgcggggacacgtggctgggatgtttctggagacctggcgggcctcaggtgggagctcaggggtcatgtgtggttatgtgtgccttgctctgctccagaaaggcctgtgaggcacttgcagaggccacagtagtgcctgggctccaagcagtcacttgcagtggggtggggtgcaggctccagggtcctgagggccctgccgtgcagctgcccagccccagtcccgctgccaggctgtgcttcctcccccttctctgctttcctcgtttgcagtatgggacaaatgtcacccactctgagctgtcttgaggtcagattgagaaagatgtgaattgtttcc

SEQ ID NO: 728825 - DNA, 652 bp, Homo sapiens
tcataacaacagaccatggaatggtgagctgggggagggaaaatggagttgctattttatggggacagagcttcaggttggcaagatgaaaagagttctggagatggatggtggtgatggctgcacagcaatgtgaatggacttaamgctactgaacactccaaaatgactaagatggcaaattttatgttaagcgtatttcatcacaatttaaaaaaaatcaaaagcagtgtggccagcttggccttgattgcctaggtcagcactgataaaggcccacatcctgggaaacagccctccaaggccccagacagaacagaccagctggtcatcttctttaaaagccaatttgaaggccaggtgccggggctcatgcctgtaatcccagcactttgggaggctgaggcgggcggatcatttgaagtcaggagttcaagactagcctggccaacatggtgaaacgctgtctctgctaaaaatacaaaaattagccaggtgtggtggtgggcgcctgtaatcccagctactcaggaggctgaggcaggagaatcacttgagcccaggaggcagaggttgcagtgggcagagatggtgccaatgcactccagcctgggcgacagagcgagactccatcacacacacacacacacaa

SEQ ID NO: 728826 - DNA, 540 bp, Homo sapiens
gaggatgcaggtggatccttatcttacaccatatacaaaaattaaattaaggcaaaatggatcaaagacctaaacataagagctaaaactataaaactcttagacaaaaacataggggaaaagtttcatgacattggatttgcaatcatttattgatataaccccacagcaccggcaacaaaaacgaaaacagacaaatgrgactacatcagactctaaaacttctgcccagcaaaagaacttatccacagggtgaaaggcaatctactgaatagaagcaaatatttgcaaaccatgtctctcataaggggttaatatccacaatatgtaaagaactcctacaactcaacaacaacaaaatctgattttaaagtgggcaaaagacttgaatagatattcctccaaagatgatgtaaacctggtcaacaagcacatgaaaacatgctcaacatcactaatcattcggggatacaaagcaaaaccacaatgagcttcagacctaggcagaggacggctattaccaaacaaacaaaaagacac

SEQ ID NO: 728827 - DNA, 481 bp, Homo sapiens
tgggatcctcatggtgatggtctcctgagccctggaagggagggggcctatgggccagagggctcaggactaaatgaccgtgaatattcacaggagccgaaggtgaaaacagcccagtgtccaccaacaggtgcatagatggacaagctgtggtcgatccaaacagtaaaatatgattcagtcacaaaaaggaatgacccactggcggcttccacagcgcaggtgaaacctgaaacttcacgctcagtgcaagaagccgacgctaaaggccacatattgtaggattccacttatawgaaatgtccagaacaggcaaatccacagaaacagaaaatgcattagtagttaccaggaactggtggatggggcaagaggaaatgggattttgtttcagggtgatgaaaaaattccagaacaagacagaggggatggttgtacaacactgggaatctgttcgacgctgctgaaatgcacactttaa

SEQ ID NO: 728828 - DNA, 647 bp, Homo sapiens
gactgaaatattacttctcaactgtttaaagaccagaatgggatgaggacttggaactgccatatgcacccaggatccatatttattcattcagcacccagaatgtggtagataatagatactatagatacagaggaaaatgagatggaacattaaccatgggctgatattgtcacaggactagttatcagctttgcagggcttgagtcaatcagtggacccaaagttgaccaggatcttggggactmactctcactaacccaagttacatgagaatgaagagtcaagcagaattccaatttgttaatttatattgatcagaattttatcatttctagtgtctataaggagtctgctattagaccgttctctgtatcaaggtgcctggaaaggcaagttatcaatgttcactcggttagttaaaggaagaatggatgctgagggccacctcacacacaacacgggaatgcctaactttgatgggtgcctccatgttgaaaaactactatctttatagcaatcctgtcaccatgatatgaaatttgtttttctctagaaaattagctaatacagatggtcaccctaattatcaagtaaagttagaatgagctgtgtgacaaatggtgctgtcatgtcttcttgagaac

SEQ ID NO: 728829 - DNA, 462 bp, Homo sapiens
cagaacttgtgccctccctgtccttagcctaggcctagtcctgcgaaaacccccaaaccagatacggacagagaccaagatggcccatcctgtggtcactgactggaaggcagtctctaatccaccccaatcctcccagaaagcaaacctgtaagtgtcttgggctcagggaccatggcttgtagccctttccaagcttctaraaggtgcttagtaaatacttgataagccccacgtgaaaacagcgaagcaaataggcttcatcttttactccaggcttgactgatcggtggcgggcttccctggggcacttggctgaagagcatgaggctgtgtctgggtcaggaaagagaggtgatcgactggcattgtctgccacagcgcacatggaggcctgggaccaaggccattcttcaggatggtgcctctcggctctcaggtcggaacaggagctggaaagct

SEQ ID NO: 728830 - DNA, 608 bp, Homo sapiens
attgtgtagttctggagatcagaattttgaaatgtactaacagcagagtgtacattccctgtggagcctccaggggagaacctgtgttcacctttgccagctcccagaggccacctgcattccttggtgcctggccccttcctccatcttcaaagccgacagtgtagcatcttcaagtctctatctctggcctctgcgtctatcctcacatctccttctctgaccgtgaccctcttgcctctctttcccatattagaactcttgtgattacatgggcccatggggtcaatccagtgtactcttcccatcacaagatctgtaccgttaatcgcatctgcagagtccatttgccatgtaaggcaacatcttcacatcccaagggctaagacgtggacagatttggggggatggttattctgcctgccatgactrtgcagggccacggtaagccctcaataaatgctttgtctaatggttataaaacctggattaaggtccttaataacattgaattatttgcaggattctgtatttgtgttccatggctgtctcatcctaccacctggcagagcgcgccacacatcttgacagactctcatgcagttcat

SEQ ID NO: 728831 - DNA, 580 bp, Homo sapiens
caaagacattgacctcatccctatttatagaagaaaaacatggaagatgcgcttggttgagcaatttatagacagtttacaagaccagttctacgctcagacagcctggattcaaatcccatctctgcctacactgctaggcaactcgcggaagctactcaatgtctccgygctttagtttcctcatctctacactggaaataactctctccctctctaggagctgccttggtggttaatctgtatcacttagagccgcgtttataggcaaggctggctaaatgtcagctgtttccattttcattgtaatggtaaaaccatcaacggggggggaaattaagaggactaaaaaaaatatacagcaaaaaaagtttatacattcaaacaaaccacttgcacaaaggagaagtgaaaaaacaactttcaaagaaaggtggaggaggaggcggggcatgagggcttaggaagtcaggatcagggagacagtctagtcggtttctagaagggatgacagcaggatctggctaggagctctccactggccttggcaagagcaaaggaagcgggtagggcactgcag

SEQ ID NO: 728832 - DNA, 585 bp, Homo sapiens
aaaaaaaaaaaaaagactaaggatagccttctttggtgaagttcataaaccggtcctatgtgggccgaggtttaggtgaagttactgaattacatccagacctctgagcccttgacagctgcagatggtcacgccccttcctagggtaccctgcagtcaacaactcctgtcaccgggaagatcagaacgcatcctacaccctggggcctggaatactcagagtcacagaacacaagaaccaagaagcctccatggacrtctactctgatcacatctccacttacagaccagaaaacagaaatcccaggagggaagtgatttgtccagagactcagggagtctccatgatgtccaggtccccggggccaggcagcctgtgctgcaccagcaccaggctctggcccagtgacaacatccttcacacacagagcggccctctgctgggggcctgagagtgtggctggcgccagtgcccctgtccaagccccacaccttctaggccactcgctcacctttccccaagggcacggccaggacggttctccgggcttagaggccttccataaggcaaagtcgttgggagag

SEQ ID NO: 728833 - DNA, 585 bp, Homo sapiens
aaaaaaaaaaaaaagactaaggatagccttctttggtgaagttcataaaccggtcctatgtgggccgaggtttaggtgaagttactgaattacatccagacctctgagcccttgacagctgcagatggtcacgccccttcctagggtaccctgcagtcaacaactcctgtcaccgggaagatcagaacgcatcctacaccctggggcctggaatactcagagtcacagaacacaagaaccaagaagcctccatggacatctactctgatcacatctccacttacagaccagaaaacagaaatcccaggagrgaagtgatttgtccagagactcagggagtctccatgatgtccaggtccccggggccaggcagcctgtgctgcaccagcaccaggctctggcccagtgacaacatccttcacacacagagcggccctctgctgggggcctgagagtgtggctggcgccagtgcccctgtccaagccccacaccttctaggccactcgctcacctttccccaagggcacggccaggacggttctccgggcttagaggccttccataaggcaaagtcgttgggagag

SEQ ID NO: 728834 - DNA, 564 bp, Homo sapiens
ccattgtataaacaagaaggcaaggcccactgggataaaggacttggtatggtcaccccgcaagctgatagccaagttggtccttcaagtccagcttccataatagcccacactggaagtgggagacaaagccagaaatgctgtaaagggagaaaaacaggttgctgctgctcaaagtggctccccaggcacttcccacagtgcccacacaggcacagccaggtcaaaggcccaattgcctacagtccaccctcaccctgccctagaggggaggagcttagaacacgcagccctgttacatagaatggtgttgcccactccccaaaggcctcgcccaaagcagaaagccctgtgggtccaaggatcccagcattgttgtgggcaggcaaaaggttcagcrtgtgtgattcggaacagaaacagagcaggagacggcccagtgttctctgcaaacatcagcctcactgagcaggatcagagcttaagcccgatacacagatttcataaggtgtttaaaaccaactcagcatcatcaactttaaaccttcatgccaatcccaattt

SEQ ID NO: 728835 - DNA, 649 bp, Homo sapiens
aggtgactcaagaagaaaaagcaaaaggctgctgggtatccatgccatctgtgctcgatgtcacgctgcacctgccctgcaaagcaccccaccaggggaacaccatacagcccctgtgtgggtagaagctagagtcaactactgactctagggagggaggttgaggaaggaggcgcatgaaagaacccaggaagtaattgagaagggcttgggagtcaacacggccaggagtatttcagtgtcaggacaaagcccttctttctagtgatggtgaccagtaagaagtgatagggaggactgataacagagtcactcctaatcacagtccaactccttstccctcagctcttctctccacatagttgggactgtttcatagtaacttgtataccatccctgtcccaaaagcaattggtcccacaatgctgccatcatatgtccatttactgctgagaaatgtatccccccaccccccaggagtctgggactaagaatcagacaggtctgatgtcacatcaatcccatctctctgtgtttcgctcttgagtcatccgctcctctctttgcagacctcaactattggatcctaggtatttacatcacctccttacttcacgtcatctgatagcttattcttccttccttccag

SEQ ID NO: 728836 - DNA, 561 bp, Homo sapiens
aagagataaatgtcttgtggagaaaaattttaaataatttacgtaggtactccaccctcaaggaagtggaacacaactccccactccatcatatggtgactgcattccaaagagtacaatactggaagagacgggggaaaaagggtaactttacggcagaaaaacctgacaaacactgcctgaagccagtgatcaaggttgacatcaacagcgatatgttgtgttgagagtctgcatccttgacgtgattcaatgagaatgatrcttgaaatgtagtgaataatcatgtgtcaatcaatattgatttacgcattgtgacaaatgtaccatcaggtaaggtgttaacagtaacagaaatggagtgtggggatctacaggaactctccgtactatctttgcacttgctctgtaaataacaaaactattctagaataaaaagcttactttatattttcttattttactttaagttctgggatacatgtgcagaatgtgcaggtttgttacataggtatacacgtgccgtggtggtttgctgcacctatcaatctgtcatctggg

SEQ ID NO: 728837 - DNA, 637 bp, Homo sapiens
aaacgcgaatgaatccttgaagaatgagtgtaggctagcatgaacgtacagaaaattgagagccccagaagcaagggaagtttgcactcacttgcaagctcttttccagaagtctcagctgtgtgatcatgggaaagactagacacagggcaggagattgaagaaggctcaagtcgggggcaccagcatgcaggtgctggtcagctgcagctgggtcacaggaacgaagcctttctcattttctcagaactttctttcccaaagcaaaagccttgagctactgggatgacagagagaaaacccccttcctcccagggcctaagcaaagacactctacttttttgggaagaggtaagagccaaaccatctgattctgggggaggagcagaaacaaaagcctgctgcccttggggaaggggaggaaacagtatcaggtccataatcttgcacttayacaaagcataggtttactcattctgggagaagaaagggtcctgtgccaaccatagacacaaggagtgtcagactgccatggagagagaaccaagactgtcaataaagtcccatccctgaggcccagaggcacaaggtcttcccaagactgaagatcaacaaaaagtgagaagagccctcatgc

SEQ ID NO: 728838 - DNA, 623 bp, Homo sapiens
tttctccattgccttgctacactgttttctccagagaatccatcctattccctctgcccaaaaaaaagggcatggtcaaccttaatgaaataaactgtaatagagtaggcaggtaacttcatctcccttccagaagacacaatctaattcacactctaattgtctcgctggaagcctccgggcctctctccacaagcgggctggaaggatttggaagtgtcatggcctggaactcctcaagtctagtcatataaatacttaattgccactggaacatccacattgtgtcactttggtatacccaaccagtgtgtggccaagttccttctctggtgaggctgagacacgggaagtgccattggtggccttttcatctttctctttccacttccatttctttcccaagacacttccattttggagagctcttcctcctgagagctagggagagggmagcggtatgagtgggaagaccaacggcttctttaactgctgttggctgtgaccttaatcacgacaatgaagtttagtttctcttttggtagagagatgagaatagcagacttcaaatggtagaaaagggtcggtctcctgaacaatgtactccaaaggtcactgctgca

SEQ ID NO: 728839 - DNA, 609 bp, Homo sapiens
agcctcaaaaaaaaaatgtttaaaacagacttggggtaaaaggggaagaggaagaatgtgtctcaacagtagccaacaaaaacattcaagataaataaattcagcattctggcatctgtggacccagaaaaactaggttgcagattaacttaattaggaaaaccacccmcaaccaaccaatagcaccaggagagggagacggaaagaagagactgaaagaatgaagctttgtcaaaacagaggtgtcagaatcacaagtaaaataactcccaaaggaactctcagcccttcataggacatggtggtctctgcatctcattcataatgtttgccttggctgaggttctaaaccacaaaaacatctgtacagaaggaagcaaccaatttcagtgaaatcatactggaaacctttaacattatttagcgtcatttcatgagaggacaatgcagttaatgttccccactggaaggaccgtcttgtggttcgcagcgctaggcagtttctctctttctctctattggtttaaatgtgaaagagaaagaaaagggggatttcagaaatggagggaagaaagaaataaaccatctaaggagcacagccaattatat

SEQ ID NO: 728840 - DNA, 609 bp, Homo sapiens
agcctcaaaaaaaaaatgtttaaaacagacttggggtaaaaggggaagaggaagaatgtgtctcaacagtagccaacaaaaacattcaagataaataaattcagcattctggcatctgtggacccagaaaaactaggttgcagattaacttaattaggaaaaccacccccaacmaaccaatagcaccaggagagggagacggaaagaagagactgaaagaatgaagctttgtcaaaacagaggtgtcagaatcacaagtaaaataactcccaaaggaactctcagcccttcataggacatggtggtctctgcatctcattcataatgtttgccttggctgaggttctaaaccacaaaaacatctgtacagaaggaagcaaccaatttcagtgaaatcatactggaaacctttaacattatttagcgtcatttcatgagaggacaatgcagttaatgttccccactggaaggaccgtcttgtggttcgcagcgctaggcagtttctctctttctctctattggtttaaatgtgaaagagaaagaaaagggggatttcagaaatggagggaagaaagaaataaaccatctaaggagcacagccaattatat

SEQ ID NO: 728841 - DNA, 533 bp, Homo sapiens
gcctgctgtaccctaagcttggatcggtctaactaaccacctcctccactcctagagctgcctacccacgttgcctctacctcccaattgctcactaactcctcaacccactgtaatcccactcctgcttctatcattccactgacaccaaaactgtttgcctttgatacccagcgactcccatgtcactaagagcaacagacattttttagtctgcctcttaggggacttctcagcaccatctaaaactgactgcttttttctttttgaaacctcttcctttagcttccatgacaccacactcttctggtgtccctcctatttcttccagcaactcctcratctccatcgtggattgggattgttctggaggggtggaatatgttggggttcctctggattctattccaagctctcttctctttctatactctcttgttatataaactcacccagttccaagggcttcaatgatcatttatatgttgatgacaactccaaaatggacatatccagtgggtctctctcttctg

SEQ ID NO: 728842 - DNA, 440 bp, Homo sapiens
ggtgaggcaggcggcaggggttggtatccgagcagggatccgaggctgtccccagcctcggcctctcaccccggtgttgctgactgcctggccatgtgactgtgggcattgtgtggtgtggttcggctgccactccaggtttaacagggagcttaccacgtggtttgagggggtggggagggctttccctgagcctcggtttccttgtctgcaaagtgtgacctcgcagccyagccccgtagaagggctcagtggccgagaaggtgtttcctacagtgtgcgcatgtttggttgggtggggggtttaaagaggccctggaaagaagcgctcaactttctttttttcttttttttttgtttgagacggagtctcgctctgtcacccaggctggagtgcagtggcgccatctcggctcactgcaacctccgactcccgggtt

SEQ ID NO: 728843 - DNA, 440 bp, Homo sapiens
ggtgaggcaggcggcaggggttggtatccgagcagggatccgaggctgtccccagcctcggcctctcaccccggtgttgctgactgcctggccatgtgactgtgggcattgtgtggtgtggttcggctgccactccaggtttaacagggagcttaccacgtggtttgagggggtggggagggctttccctgagcctcggtttccttgtctgcaaagtgtgacctcgcagcccagccccgtagaagggctcagtggccgagaaggtgtttcctacagtgtgcgcatgtttggttgggtggggggyttaaagaggccctggaaagaagcgctcaactttctttttttcttttttttttgtttgagacggagtctcgctctgtcacccaggctggagtgcagtggcgccatctcggctcactgcaacctccgactcccgggtt

SEQ ID NO: 728844 - DNA, 530 bp, Homo sapiens
tgctacttttgtcataaatcagatgtgttcacaggggtctgtttctgggctcttttgcctgtcccattatcctgtttgtctgcttgtaccaatattgcactttttttttttttctttttttttttgagatggagtcttgctctgttgcccaggtggagtgtagtggcgcgatctcggctcactgcgacctctgccttagggttcaagtgattctcctacctcagcctcctcaagtagttgggactacaggcacatgccaccacacccagctaatttttgtwtttttagtagagatggggttttgccattctggccaggctggtcttgaactcctgacctcaggtgatcttcccaccttggcctcttaaagtgctaggattagaggcgtgagccaccgcacccagccttcacactttcttaattagtttagctttgtaacaagtctttatttcttgatttctggtaaaaaaaaaaaacttccctccagtttggtacttcaagattgtcttggctattcatttttttgtttg

SEQ ID NO: 728845 - DNA, 530 bp, Homo sapiens
tgctacttttgtcataaatcagatgtgttcacaggggtctgtttctgggctcttttgcctgtcccattatcctgtttgtctgcttgtaccaatattgcactttttttttttttctttttttttttgagatggagtcttgctctgttgcccaggtggagtgtagtggcgcgatctcggctcactgcgacctctgccttagggttcaagtgattctcctacctcagcctcctcaagtagttgggactacaggcacatgccaccacacccagctaatttttgtatttttagtagagatggggttttgccwttctggccaggctggtcttgaactcctgacctcaggtgatcttcccaccttggcctcttaaagtgctaggattagaggcgtgagccaccgcacccagccttcacactttcttaattagtttagctttgtaacaagtctttatttcttgatttctggtaaaaaaaaaaaacttccctccagtttggtacttcaagattgtcttggctattcatttttttgtttg

SEQ ID NO: 728846 - DNA, 530 bp, Homo sapiens
tgctacttttgtcataaatcagatgtgttcacaggggtctgtttctgggctcttttgcctgtcccattatcctgtttgtctgcttgtaccaatattgcactttttttttttttctttttttttttgagatggagtcttgctctgttgcccaggtggagtgtagtggcgcgatctcggctcactgcgacctctgccttagggttcaagtgattctcctacctcagcctcctcaagtagttgggactacaggcacatgccaccacacccagctaatttttgtatttttagtagagatggggttttgccattctggccaggctggtcttgaactcctgacctcaggtgatcttcccaccttggcctcttaaagtgctwggattagaggcgtgagccaccgcacccagccttcacactttcttaattagtttagctttgtaacaagtctttatttcttgatttctggtaaaaaaaaaaaacttccctccagtttggtacttcaagattgtcttggctattcatttttttgtttg

SEQ ID NO: 728847 - DNA, 517 bp, Homo sapiens
tatctaaaattaaaattttatttacaggaagttcataattttatcttgtgactatttgtttatttatttagagacagagtcttgctctgtcacccaggctggagtgcagtggtgcaatctcggctcattgcaacctccgcctcccaggttccagcgattcttctgcctcagcctcctgagtagctgggactacaggcgcgcaccaccacgctcagctaatttttgtatttttagtagaaatggggtttcaccatgttagccaggatggtctcgatctcttgacctcgtgatctgcgcgcctcagcctcccaaagtgctgggattacagacgtgagccaccgcgcccggaygactttttatttctaattaaggtctgtatagtaatatctgtcttttgttactgatattgggtgatttgtatcttttttgttttcagtattttgcagtcagtcttttcaggggtttattaattagtcttttcaagtaattatttgctttgtttatttttctcttttat

SEQ ID NO: 728848 - DNA, 550 bp, Homo sapiens
ttcttctcatgcttgcaagctctctggctttcccttctgccacatttctttctttcctttttttttttttgagatggcgttttagtcttgttgcccaggccagagtgcaatggcgcgatctcagctcatcgcaacctccgcctccagagttcaagtgattctcctgcctcagcctcctgagtagctgtgattacaggcatgcgccaccatacccagctaatttttgtatttttagtagagatggggtttctccatgttggtcaggctggtctcgaacttctgacctcaggtgatccacccacctcggcctcctgaagtgctgggattacaggtgtgagctactgtgcccrgcctctgccacatttcctttggcactttgtcttttgcttcatctctgatttcagctggagaaaattctttgcctttaagggctcatgtgattaggtgttcccacctggataatccaggctaagctctgtattttaaggttggtaaccttaattacatctgcaaaaccctcttttctatgtcatgtaacgtattcataggt

SEQ ID NO: 728849 - DNA, 557 bp, Homo sapiens
gtgacagaaaatcaaacttcagatatagaaaactcagagaatgtcaaatagaacaaaaagaaataagaattccatcttgaaacatctttgaaaaatctttaaaaaatcaagtctaaattttatatcttgctccaaatatatagagatataaataggttatcatcaagatatggagaaagccatatcatggaaacactaaaataaggctgtggaaggactacattgatattagacacaacagagttcggaacaagaaatagtatcagagatgagagayaatagaataatcaattctcaagaagatgtaaacatcctactaattagggtatgcagctaacaacagagcctccaaatacgtgaggtaaaacatgaaagaaatcaaaggtgaactagaaaaatccaaaattatatttgcagacttcaacactttcgtcttagtaatggaaagactaggcacaaactcagtaatcatgtggaagataagaacaacaatatcaccaacaagacatccaatcttcaatggcagatactctttcctttcaagtgaaaaaaaaaaa

SEQ ID NO: 728850 - DNA, 341 bp, Homo sapiens
actctttcctttcaagtgaaaaaaaaaaaaaacagtatggcatattctctaacaaacacagaatttctaatatttgtggttttccttccttctttccatcttcctttgtcttctcttcccttcccttgccttcttccttcctttcttcttttcctcttccttttcttttcttttttyttttcctttctttctttttctttttttctccttccttccttctttccttctttctttctttcctcttattcttccttccctcctccctcccttcctttctccctcccttttcttccttcttttctcatattctttctttctcacgttcttgctttctttccttt

SEQ ID NO: 728851 - DNA, 656 bp, Homo sapiens
tataagatgtaaggaagggatccagtttcagctttgtacatatggctagctagttttcccagcatcatttattaaataggcaatcctttccccatttcttgtttttgtcaggtttgtcaaatatcagatggctgtagatgtgtggttttacttctgaggcctctgttctgttccattggtctatatatctgttttggcaccagtaccatgctgttttggttactgtagccttgtagtatagtttgaagtcaggtagtgtgatgcctccagctttgttctttttgcttaggactgwcttggcaatgcaggttcttttttgtttccatatgaactttaaagtagtttttttccaattctgtgaagaaagtcattagtagcttgatggggatgatattgaatctataaattactttgtgcagtatggccattttcatgatattgattcttcctatccatgagtgtggaatattcttccatttgtttgtgtcctcttttaattcgttgagcagtggtttgtagttctccttgaagaggtccttcatgtcccttgtaagttggattcctaggtattttattctctttgtagcaattgtgaatggaagttcactcatgatttggctctctgtttgtctattaatggtgtataggaatgcttg

SEQ ID NO: 728852 - DNA, 547 bp, Homo sapiens
tgtatatcacatttattgattcaatatatgttgaaccgtccttgggaggatttaatctactgctatctttccatagctgaagtaggctgctatcatattttacttacatctgcatcctgagttgatcttccaatgaacaagcttagcttttttcctcctttagcaatattggaactcccacataggcagagttgccagctgagggagagaatctagtgtcacaatttggataatgtggggacctggatcacctgatcatactgcttacttgtgtcctctagtctttctcatgcccaatccttgatgtgatatggtttggctctgtgtccccacaaaatctcatctcaaattataatccccacatgtagagagagggactkggtgggaagtgactggatcatgggggcagtttccctcatgctgttctcatgatattgagtgagttctcatgagagcagatggtttaaaagtgtttggcacatccccccttgctttctgtctctcttgctgccttgtgaagaaggtgcctgcttcacctttgccttta

SEQ ID NO: 728853 - DNA, 547 bp, Homo sapiens
tgtatatcacatttattgattcaatatatgttgaaccgtccttgggaggatttaatctactgctatctttccatagctgaagtaggctgctatcatattttacttacatctgcatcctgagttgatcttccaatgaacaagcttagcttttttcctcctttagcaatattggaactcccacataggcagagttgccagctgagggagagaatctagtgtcacaatttggataatgtggggacctggatcacctgatcatactgcttacttgtgtcctctagtctttctcatgcccaatccttgatgtgatatggtttggctctgtgtccccacaaaatctcatctcaaattataatccccacatgtagagagagggactgggtgggargtgactggatcatgggggcagtttccctcatgctgttctcatgatattgagtgagttctcatgagagcagatggtttaaaagtgtttggcacatccccccttgctttctgtctctcttgctgccttgtgaagaaggtgcctgcttcacctttgccttta

SEQ ID NO: 728854 - DNA, 375 bp, Homo sapiens
agattgtacttgtgagttttgagtttcttgatttgttgaatggatgtgattaatttatatctttagtgtgatcatgcagagaagtgtatgagggatagtgatggaaaattacaggaaatctgaaaatttaataaatagttggcatttttrttttctcactagtacagggttcatctcagtaattatgaaatgtactacccttttctccttttctatattattttggaaaattacagccttataatagagatcagaaatgtgttaacattatggctgatctgtctgacaacagtgttctaagaaaacagtatcacaaatatactttctcaccataattgttcaaaacagaaattttgtaagcaaagaatcaagcat

SEQ ID NO: 728855 - DNA, 621 bp, Homo sapiens
gccagttctgtcgtgggcttgggtcagacctcacttgaggactgtgattactcttgggctttaagctttgagaggggagaggagaaattagaaaaggaaatggcgggcctcgtatacaggatttatgagcaggttgtctgaaaataggatgagttgcctcacataatagtatttttcctatcatcacacaagcttaagcagagtcttgggtgatactgtaggggggcagtcacatgcttcrtagtggattgggctggattcacttactttcttttctttgtctcttgctgctttcttctgacttttgagcttataaaaatgtatgttagaagcagtgttgacagtgtttggcagctttatgggtgtgtgaagagtggataaggaggaggagatgaaaataacgtagaggttttaaaacggtgtttggggatggcactcttgacgattggaaaaataaaatggaaagccattctggaggtgggtggataagtttcgttttggttgggtcatacagtatttgaacctaagaatcccaagaaaacttttattaaaagctatatttattgaatgttaccattttcaggtactgtgcaatgtgaatcatttaagtttttggtgacc

SEQ ID NO: 728856 - DNA, 669 bp, Homo sapiens
atatattgagagattggtgggaacgtcatacggcacagccactctggaaaatagtttgggagtttcttgtaaaactgaacatacacttaccaaaaaacctagcaattgcattctcaggcattttccccagaaaaatagaaacttatgttcagacaaatacctgtctatttaagacatacataaatgagtgtatgttaaatacctgtacatcaatgttcataacagctttattttaatagacacaaattgggaataaaagaaatgtctttcagtgggtgaatgattaaacaaactctcgtgcaatcatacaatggaatactactcagcaataaaaaggaatgaaatattgatacatgcaatagcttggatgaacctcaagggcattgtgcttagtgaaaaaatgtcaacgttaagaggttgtgtacyacatgtctccctttacacaacattctcaaactgacaaaactatagagatggagaacagattggtggttgctaagggacagggactggggtaaaagcatatggatggaaatatagaggggcagcaggagggagttcctttatgatgatagaccagttctgtatcttgattgcagtatggttacatgaatctatacatgagtttggattgcacagacacccctccccaccccacacataaatgaa

SEQ ID NO: 728857 - DNA, 521 bp, Homo sapiens
tcttcagttctggacattttcttctattattttctgatggagattactgctcttcttgtataactcctgtcaggtgatttttaatgttcaatgaattatctaattttattatgattttctcttttctttgcatctgtttttttttttctattctacttttttggagatttctgcaagtttattttccaattcttcttccctcttctatcaaatctttagtcygggtgcggtggctcacgcctgtaatctcatcactttgggaggccaaggcaggcagatcacctgagcctgagctcaggagttcgagatcagcctggccaacgtggcaaaaccccgtccctactaacaatacaaaaaattagccaggcatagtggcacacacctgtaaacccagctacttgggaggatgaggcagaagaatcgcttgaacccgggaggcagaggttgcagtgagccgagatcataccattgcactccagcctggtcaacagggtgagactctgtcttaaaaaaaaaaaaaa

SEQ ID NO: 728858 - DNA, 615 bp, Homo sapiens
atgagggtaaaatctcgaaagtgtgaatcttccagctaccaagtcatagggtaataactgatgtgtgctgagggaggaaaccatcatgccatagtgctaatggtataacccttggtgaatagagttcaatattttattgaagttttcataatttttatttgaaggtgccatttttcaayatattcagatgcttgtgagtgccattgattctgtatcatatgaacaatggcaataccttccatgtttacataatattaaaaaccatgttaagactgaatatttggtgtaatggtgcatcacattattctagcttccatactagttgttttatttgtttgttttctcctttgttggcatttggtttcaaattcatatgtcaggtctctataatgtaggaatttatttaaaagtgtcttttttgtccattttgatggggcttctaggagacataagaacctcctctgcttgcaacacatttcaaaattacacactaatgtagaacatctgtatttaatcctggtttttagttaattgacaagctctagtaagagaattaacttctccattctgggctgattttacatcaggtataggaatataccctaggtgaaagtt

SEQ ID NO: 728859 - DNA, 583 bp, Homo sapiens
caagttataacttctcctttagtttttccctagtgtctgagtccaaatggacttctctatatccagaatatctactacttgtcttatttttcctcacacttggcacgtgcagttccttccagctactttcataatgttgtattttaacggttcagttgtgtttatatttcactattctgtcaggcaaacaagggtattcgcatggctgaaatctatggtattttttaagtgtaataaaatgtaatgaataaacatacaaatgaatgagttaattaatatattatattcttggttaagtaataagcattatgaggacaaaaattgagtcttacaccttcttataatcctaaagacctcstacaggacttggaatatagcatgcacttaagacatctttgtgactaatgaatttaaatatttttattaattctaagttgacatatgattgtaatttggggaaggtagtgaaatttcaaatggctttcaccacctgtgaaatgacccttttacataccacatgatttaccagatctttgtttaggtgaacctaggtgaaagcggattgtttcctctacttaggaaa

SEQ ID NO: 728860 - DNA, 648 bp, Homo sapiens
aaaatatttgatgtgcactctttacatatatagtttaaatttaataattacccttctcaaaaaataagtgaaacataccacaaacatatcaaagcaagttattcatacttctcatttaagtaactgtattgtcatagcaaaattattttgtatcatcaaaaagcacaaaagccttattagaatactaatttcaacatctgtttcacagatttgctcataatagatgtttttcatgcttctgcactaattcattgaaggacaatgttttaccgattcttgaaaaactatcattatctgccccacagtggtggctcatgcctgtaatcctaacactttgggtggccaaggctgccgttttgcttgagcgcaggagttcaagaccagcctgggcaacatggtgaaaactcatctctaccaaaaaaaaaaaaaaaaaaaagtaaaaagttagccgggcaaggtggcggkcacctgtagtcctagcaactcaggaggctgaggtaggaggatcacctgggcctgggaggttaaggttgtggtgagccatgattatgccactgcattccagtgtgggtgacacagtgagaccttgtatcaaaaataataataatataaaatagaaaataaaaatatcattatctgacattttaa

SEQ ID NO: 728861 - DNA, 539 bp, Homo sapiens
ttgatactggtataggcttacacgtcattgaaactggaaaaggtagctagatattcttctactcatgttttggataatgagatattttatgcttcacacacttggagtatgtcatctactgtaatacggtatctgaatgaatactttaaataaaatacatttctgtaagttaattgtatactttaaaaatctctgaaaaatttgagtagcaagtctcagaaacttggttctaaatattaagaatatatccttccttgggagggagcatgtagtaaacatgttagtgtgattgtaagcatactgtctttctggaggtcgctgtgttcctgcatccactrttttcatttcagggatgttcacggaacgccagacaccaaaaggccagaagcatgcccctgcaggaccagcacttggctctggccatcctgctggagctggctgtgcagagaggcacgctgaggtgagggcttgtgcagaatgggaacgctttggggaaacgcctctgtatccaaatacctgttgcattgtgtgcatttcac

SEQ ID NO: 728862 - DNA, 539 bp, Homo sapiens
ttgatactggtataggcttacacgtcattgaaactggaaaaggtagctagatattcttctactcatgttttggataatgagatattttatgcttcacacacttggagtatgtcatctactgtaatacggtatctgaatgaatactttaaataaaatacatttctgtaagttaattgtatactttaaaaatctctgaaaaatttgagtagcaagtctcagaaacttggttctaaatattaagaatatatccttccttgggagggagcatgtagtaaacatgttagtgtgattgtaagcatactgtctttctggaggtcgctgtgttcctgcatccactattttcatttcagggatgttcacggaacgccagrcaccaaaaggccagaagcatgcccctgcaggaccagcacttggctctggccatcctgctggagctggctgtgcagagaggcacgctgaggtgagggcttgtgcagaatgggaacgctttggggaaacgcctctgtatccaaatacctgttgcattgtgtgcatttcac

SEQ ID NO: 728863 - DNA, 499 bp, Homo sapiens
gtatgtgccgctccctcaagtgaccataagcagttgtaattaacatttgcactggctgatcccatgccttgcaccatgcacaggtctcctttccagtccatcggccctcccgtctccaaggatctatccttcattaaagattgtgtgtttgttaaatattttctccttttcattcctttataagtgctctaggaatacatagcctaccctgaggatgtaattctttgtagaaacccttcagatatgctgttccctgcctggatactcagcgtctgggtcttattcctcatcttagctcagttgttgcttccacaagtcccttactgaccctcagaatagcggtggtctgtcctccrgtctccctggtactcccatagtcatccgttgcacagttttggacttgaaatcctgtgattagttgtgtcagcggtgccctttgctgccttccttgttagagtgtgcaactcagtcttcacacggtatctgtggaaccaggcag

SEQ ID NO: 728864 - DNA, 626 bp, Homo sapiens
tcatagagaagttttttattttgatgaagtttagtttatctgtttctcttttgtcgtctatgcttttgatatcatacccaaaaagccatttccaaatacaagactgatgaagattatcctcatctcatgttttcttccgtaagttttatagttttagctcttatagttagatctttggtccatttttaggtaatttcttttacacagtgtatggtaagagtccagccttttccttttgattatctgattgtttcaataccacttgttgaggactattctttccctgargttctcggtacccttggcaaagatcagttggctgtagatatttaggtttatttctggactctcaattacattattacattctatatgttgataattatgcaggtaccacactgttttgaacattgtagttttgtactgttttaaaattgagaagtgtgtcttctttctcaagattattttggctgctttggttccgttgaattttcatatgaacttcaaggctggcttttccatatctgcaaaaaagaccattgggatttttgctagggattgaatctgtagattgttctggggaatagtgccatcttaacaatgttaacatccattctctgaatgtg

SEQ ID NO: 728865 - DNA, 626 bp, Homo sapiens
tcatagagaagttttttattttgatgaagtttagtttatctgtttctcttttgtcgtctatgcttttgatatcatacccaaaaagccatttccaaatacaagactgatgaagattatcctcatctcatgttttcttccgtaagttttatagttttagctcttatagttagatctttggtccatttttaggtaatttcttttacacagtgtatggtaagagtccagccttttccttttgattatctgattgtttcaataccacttgttgaggactattctttccctgaagttctcggtacccttggcaaagatcagttggctgtagatatttaggtttatttctggactctcaattacattattacattctatatgttgataattatgcaggtaccacactgttttgaacattgtagttttgtactgttttaaaattgagaagtgtgtcttctttctcaagattattttgkctgctttggttccgttgaattttcatatgaacttcaaggctggcttttccatatctgcaaaaaagaccattgggatttttgctagggattgaatctgtagattgttctggggaatagtgccatcttaacaatgttaacatccattctctgaatgtg

SEQ ID NO: 728866 - DNA, 626 bp, Homo sapiens
tcatagagaagttttttattttgatgaagtttagtttatctgtttctcttttgtcgtctatgcttttgatatcatacccaaaaagccatttccaaatacaagactgatgaagattatcctcatctcatgttttcttccgtaagttttatagttttagctcttatagttagatctttggtccatttttaggtaatttcttttacacagtgtatggtaagagtccagccttttccttttgattatctgattgtttcaataccacttgttgaggactattctttccctgaagttctcggtacccttggcaaagatcagttggctgtagatatttaggtttatttctggactctcaattacattattacattctatatgttgataattatgcaggtaccacactgttttgaacattgtagttttgtactgttttaaaattgagaagtgtgtcttctttctcaagattattttggctgctttggttccgytgaattttcatatgaacttcaaggctggcttttccatatctgcaaaaaagaccattgggatttttgctagggattgaatctgtagattgttctggggaatagtgccatcttaacaatgttaacatccattctctgaatgtg

SEQ ID NO: 728867 - DNA, 632 bp, Homo sapiens
tgaggaatcacaggctcgtgctggttggattggctcagataaacattgactggctaatgaccagaatgtacaaagttcacccactcccacctggaaccatctagcccctggccagtgttgcgtgggtgaaacaccctgaaaaaagatgatggaaaagacactggcctggaagtctgagtacttgtgtgtgaccatggacaagtctctctgcttctctgagcctcaaaagtgagaatacggcctttgttggattgctatgcaaatgacatgagaacatgttctttgtctgtataaatgttaataaatattaatataagcattaatagctaacccytattaagcatctactgtgctaaatacttcactgtctcattaatccttacaaccctatggggtaaagatgatcctacacccatcatatgagtgatgaacttgaggcccaaagtctgtagcaaatttgctgctgttaaatggcctctgcgctgggatgccagctcagagcatatactcctagccacgacagcagtccctctttatccttggggagacattccaagacacttagtggaatgtctgagagggaggatagtatcaaaccctaggtagactatgtttttttctctacctacatg

SEQ ID NO: 728868 - DNA, 611 bp, Homo sapiens
ctggatcccgccgggcccatggccgccatgacgcctgctctaggtgaggatgactacgtgtttgtctgttttcatgataggagtttaaccagggagaatggtgaatagggtgagatagtcctgtggattcagttgactctggtcttctcgagtggtttttgtgtaaactggagtgtcttacaatcaagtattctcaagaatcccttgaactgtgtgtgtacatatggaagagtttatgcattcaaaagagatatgcttgtactctggctacgtggggccaggattaaaatgtgagtgtttcctctagttttmtgttcccattctctctttctctgtctcttctttcaatttgaaaaatcactataatcacctaaaactttggggtttcatcgaatatttactgaaacttacaggaaactgtagctgaggcaatcatttcaataagaggactagggacagttacctcaatgatttaagtagagacaatcatcttaataataggaattcggaaccacagtgtacgttattcagataactaaaggctgattctgtgccgagctagggaaccatccagatagacttctcaaagttctctgtatatttatgaggac

SEQ ID NO: 728869 - DNA, 611 bp, Homo sapiens
ctggatcccgccgggcccatggccgccatgacgcctgctctaggtgaggatgactacgtgtttgtctgttttcatgataggagtttaaccagggagaatggtgaatagggtgagatagtcctgtggattcagttgactctggtcttctcgagtggtttttgtgtaaactggagtgtcttacaatcaagtattctcaagaatcccttgaactgtgtgtgtacatatggaagagtttatgcattcaaaagagatatgcttgtactctggctacgtggggccaggattaaaatgtgagtgtttcctctagttttctgttcccattctctctttctctgtctcttctttcaatttgaaaaatcactataatcacctaaaactttggggtttcatygaatatttactgaaacttacaggaaactgtagctgaggcaatcatttcaataagaggactagggacagttacctcaatgatttaagtagagacaatcatcttaataataggaattcggaaccacagtgtacgttattcagataactaaaggctgattctgtgccgagctagggaaccatccagatagacttctcaaagttctctgtatatttatgaggac

SEQ ID NO: 728870 - DNA, 611 bp, Homo sapiens
ctggatcccgccgggcccatggccgccatgacgcctgctctaggtgaggatgactacgtgtttgtctgttttcatgataggagtttaaccagggagaatggtgaatagggtgagatagtcctgtggattcagttgactctggtcttctcgagtggtttttgtgtaaactggagtgtcttacaatcaagtattctcaagaatcccttgaactgtgtgtgtacatatggaagagtttatgcattcaaaagagatatgcttgtactctggctacgtggggccaggattaaaatgtgagtgtttcctctagttttctgttcccattctctctttctctgtctcttctttcaatttgaaaaatcactataatcacctaaaactttggggtttcatcgaatatttactgaaacttacaggaaactgtagctgaggcaatcatytcaataagaggactagggacagttacctcaatgatttaagtagagacaatcatcttaataataggaattcggaaccacagtgtacgttattcagataactaaaggctgattctgtgccgagctagggaaccatccagatagacttctcaaagttctctgtatatttatgaggac

SEQ ID NO: 728871 - DNA, 603 bp, Homo sapiens
aggaattcggaaccacagtgtacgttattcagataactaaaggctgattctgtgccgagctagggaaccatccagatagacttctcaaagttctctgtatatttatgaggacctcaatgaaagagatgtttttttttttgcttatttttgatgagtacttggtgattagaatagttggaaattaattgggaattaaattgccccagtggcactgttgtgaggggtgtgagagatgaaaaatgagtaagttgtaaaaattgtccatcaaggaaagttaacttttaatagcagttagatcctggttagcggagccttcgytgccaggaagaatgacctctgctttagagaagctgatttggctctgttcaggctcccagtcttaccaattggcttacaatatctagaataggaccaagaatgtaggatttgggtgctaaaaactttgagtttttacgtagaacgaaccacagccactttgaggatagctgctgctgccaaaacaatctacagatgggtttcatgagaaccttctgatagttgggccactcgtgcctccacccggtatgcttcaaacaggatcctgcctgcgtcccatcccgtgac

SEQ ID NO: 728872 - DNA, 603 bp, Homo sapiens
aggaattcggaaccacagtgtacgttattcagataactaaaggctgattctgtgccgagctagggaaccatccagatagacttctcaaagttctctgtatatttatgaggacctcaatgaaagagatgtttttttttttgcttatttttgatgagtacttggtgattagaatagttggaaattaattgggaattaaattgccccagtggcactgttgtgaggggtgtgagagatgaaaaatgagtaagttgtaaaaattgtccatcaaggaaagttaacttttaatagcagttagatcctggttagcggagccttcgctgccaggaagaatgacctctgctttagagaagctgatttggctctgttcaggctcccagtcttaccaattggcttacaatatctagaataggamcaagaatgtaggatttgggtgctaaaaactttgagtttttacgtagaacgaaccacagccactttgaggatagctgctgctgccaaaacaatctacagatgggtttcatgagaaccttctgatagttgggccactcgtgcctccacccggtatgcttcaaacaggatcctgcctgcgtcccatcccgtgac

SEQ ID NO: 728873 - DNA, 603 bp, Homo sapiens
aggaattcggaaccacagtgtacgttattcagataactaaaggctgattctgtgccgagctagggaaccatccagatagacttctcaaagttctctgtatatttatgaggacctcaatgaaagagatgtttttttttttgcttatttttgatgagtacttggtgattagaatagttggaaattaattgggaattaaattgccccagtggcactgttgtgaggggtgtgagagatgaaaaatgagtaagttgtaaaaattgtccatcaaggaaagttaacttttaatagcagttagatcctggttagcggagccttcgctgccaggaagaatgacctctgctttagagaagctgatttggctctgttcaggctcccagtcttaccaattggcttacaatatctagaataggaccaagartgtaggatttgggtgctaaaaactttgagtttttacgtagaacgaaccacagccactttgaggatagctgctgctgccaaaacaatctacagatgggtttcatgagaaccttctgatagttgggccactcgtgcctccacccggtatgcttcaaacaggatcctgcctgcgtcccatcccgtgac

SEQ ID NO: 728874 - DNA, 602 bp, Homo sapiens
ctgtctcaaaaaaaaaaaaaagataaaaactgagaaaacataggtcccacttcatcgaaaaaatcaaattttcatccaaaaggaggaaatcattttctgaagaggagagagtaaaagtggggaattaaggagcatctgcagaggtagggatgggtcagacagtaggcatgggctctatgcaggtggcagaggtcttagcctgtttggtttgctgcttacccctagccctagtccagagagagcagtctctggcacactggggccacttggatattttaatggatggttgracaattctctggacgagctctatctgtggggtgctaagctagcaaagctcttggtggaggactatgtggtctagctccctggagttggagaagtcagctgataggttgtgctaaagaccagagaggggtgggtggaggggaagaagagaaggcattatttagtcgtgacggcagccaagacattggtggggagcccaggtgagtgctggagagagaacagtgttggcagagttttcatgacttggcgaagggcaccactggaaagcggggcaggaaaaaacttggagcattttcagatatacctttcaagta

SEQ ID NO: 728875 - DNA, 635 bp, Homo sapiens
caggtgtccagataggcaatgcccgctgggaactgtactgccttgaacttgcaattcagcctgacggtcaaatgccaagtgacaaaaccatcggtggtggggatgactccttcaacatgttcttcagtgagattggggctggcaagcacgtgcccagagcagtgtttgtggacctggagcccactgtggttgataggtcctcgggcactggatggcagctttcctgggagagtgggagagcattggtaaaaccccacgtgcgctcctgtgaatccccctgcagaatggatgggatagacaagcaaatgcccatggcattgytagggcggaaactgaaagtttcatgtttagtgtatgtgagactcagctcctaatttaggatgtatgggaaaagctgctttgccagcagtaagatgggctgtggagagattcccctgtggctgcctcagccctgcacaggtggccctgcctgcagggtgtggggcattgattccctcctgaatgctgtgcactgtctcatgctggtgcatgaagagtcttgatgtgcatcttaggcgtagaaggtaagtacagaacatccatttccttcatccagattagaagtcccagatagtttccaaagagagctgcaaaga

SEQ ID NO: 728876 - DNA, 613 bp, Homo sapiens
ctttagttctctggatggaaatctgaagatgaaggagaccttctgtgccaaatagaagcctgagatttttagtgaaactaacatacgtcatctggtcttcgtgaaacgattctgaggtttctaagaatttcccacaacactgaagattggtggcttagagtttattgacccccaaagaaaagggtatgtttgactgtgagatacagttgtccttgccattttcmagatattacccactgtctttgtattgaattaccttaaaagtattgactcatagaagcaacccacatggttaaacccaactttaatccaaaagtcttggtcatcaacaaggttttctccaactatagaaaaatgtgctccccaaatttgccacattctcattctctccatctaacaaaaaagaaacaaactcttcattgtctggcccacttggatctttttatctcaaataattttttaaaaaatgcttatgttggcttggcttagtgactcatgcctgtaatcccagcactttgggagcccaaggcaggaggatcatttgagtccaggagtttgagaccatcccggggaacatggcaaaacattgtctctaaaaaaaaaaaaaaaaaaa

SEQ ID NO: 728877 - DNA, 613 bp, Homo sapiens
ctttagttctctggatggaaatctgaagatgaaggagaccttctgtgccaaatagaagcctgagatttttagtgaaactaacatacgtcatctggtcttcgtgaaacgattctgaggtttctaagaatttcccacaacactgaagattggtggcttagagtttattgacccccaaagaaaagggtatgtttgactgtgagatacagttgtccttgccattttccagatattacccactgtctttgtattgaattaccttaaaagtattgactcatagaagcaacccacatggttaaacccaactttaatccaaaagtcttggtcatcaacaaggttttctccaactatagaaaaatgtgctccccaaatttgccacattctcattctctccatstaacaaaaaagaaacaaactcttcattgtctggcccacttggatctttttatctcaaataattttttaaaaaatgcttatgttggcttggcttagtgactcatgcctgtaatcccagcactttgggagcccaaggcaggaggatcatttgagtccaggagtttgagaccatcccggggaacatggcaaaacattgtctctaaaaaaaaaaaaaaaaaaa

SEQ ID NO: 728878 - DNA, 583 bp, Homo sapiens
agccactggcccagtctcttttttttttttcctggcagttactttctaaattacatgttttttgttttttcctttaaaacctttattgttgacaggtttttccacttacattatttatcttgcctgggccatgctcttccctaaaaattccactagagagaaactagcttccaagctttttcaggttgttagcagaagtaacttccttgaggctgtagctccgaggagctcagctttttgctgcctgttggctgaaggctgcccacagttccttgccatgtgggcttcctcaacttagcagtttacttcatcaagccagcaaagtggatatgtgtcccagtctcctacgacgcagtcctaaataatgtggtgaagggaagtcgtaatcaatrtcatcaatggactcagataaatcacatcatttttgctgtgttctctgggttagaagaaagtcacaggtcccattcacatggaagaggaagggatttcacaaaagcatggacaccaggcactttatatctatccatgtccacattttacagaacaagagaaagaccataaaatgaaactcttgagaaatgat

SEQ ID NO: 728879 - DNA, 522 bp, Homo sapiens
cttcaaaaaccaaacctgtttgtgagatctccttcaaatactactgtagaccccagtgtttattcattaaatttttaaaatatttgttttatttggaatccatgtatttgtaattttagtgtttgtattaatataagggagaaatgtttaaatctgtctatgccatatgtgcctctggcttattgcccaattaattgtagactcaggctaaactttggtttctgtctttaatttttgtcagaagaaatataactgatctcaaaacatctgcttttattgtagggactcgtgctgccatctccattcctctctcttttcttgcaatctgggtrgaagttctttaatatgaacatttcaaccagcttcattctaccgtgtccactatcagcacattcaaactgatccagccaaggctgtcatattaggccagggattttttaggaatctattatgctgtgatgcggctggcacccctttgactcactgtatcaccccagggttcttttcatttcagaagcccaa

SEQ ID NO: 728880 - DNA, 552 bp, Homo sapiens
agtacaatgcttataggtactatagttactgcagatttacataacaagaatataaacttaacatttctcaagtgaccaaatgcatcagcaaaaaagtagggacagcagagtttagagaatgccaaagggatttaggttggtcagtatggmaaatgaagactcgtcatctcacttaccaacaaacgagtaagaagaagcaggagtcttagtcaatactcaaaccaatcctgtgtgctgagcattgtttttatccccattttacagacacgagctgaggcttagagtgggaatatatgccacgtcacttagtacatgcccaaaccacaatttgtgtcaagcatccagtctctacatccatgcttataaacactataccatgctgcctccatgcaattaaactgaatgtgatttaattgctcaagttgttatgttaaacagtgtaaagtttgtaactatcacacattgtgatcagttaaaattgattatataaaatattatgtgtgttgtgaatatggcctttatttttcaaaataatcaaaacttatttcaact

SEQ ID NO: 728881 - DNA, 567 bp, Homo sapiens
tgggttagtgggttcacggaattcacatcaaatcagaatcaaaaccaaaaccaaagtgcagataaaggcacgcccgttcgtcaagcagtttaaaccaagtgaaaatcaaaaccaaaaccaaaaccaaagtgctgataaaggcacgctgtgggtgatcaggccatgcttccactcaaatggagtggacaagttcccaagaccggtcctgtcaagcagctcaaaccaagtcaaaatcaaaaccaaaaccaaagtgctgataaaggcacgcccgtttgccwaggaattcaaaccaagtcaaaatcaaaaccaaaaccaaagtgccgataaaggcatgccgtgggtgatcaggccacgcttccactcaaatggagtgggcaagttcccaagaccagtcctaccgtattccagatatctggactccaagcgccagttccttcccggtgttcagccactgcactgatcctctgcgggggcctgccatgcactgctctgacgaggcattgcaccggggcaaatgcctacccaggagcatgctcaggaaccgcgtagctcaagctggccggagtc

SEQ ID NO: 728882 - DNA, 567 bp, Homo sapiens
tgggttagtgggttcacggaattcacatcaaatcagaatcaaaaccaaaaccaaagtgcagataaaggcacgcccgttcgtcaagcagtttaaaccaagtgaaaatcaaaaccaaaaccaaaaccaaagtgctgataaaggcacgctgtgggtgatcaggccatgcttccactcaaatggagtggacaagttcccaagaccggtcctgtcaagcagctcaaaccaagtcaaaatcaaaaccaaaaccaaagtgctgataaaggcacgcccgtttgcctaggaattcaaaccaagtcaaaatcaaaaccaaaaccaaagtgccgataaaggcatgccgtgggtgatcaggccacgcttccactcaaatggagtgggcaagttcccaagaccagtcctaccgtattccagatatctggactccaagcgccasttccttcccggtgttcagccactgcactgatcctctgcgggggcctgccatgcactgctctgacgaggcattgcaccggggcaaatgcctacccaggagcatgctcaggaaccgcgtagctcaagctggccggagtc

SEQ ID NO: 728883 - DNA, 634 bp, Homo sapiens
cctggtaattctaatgcacagtgagtattggcacccactgtaccaaacaacctcaccccagggttgggaagagtttggaatggagcacctatggtgtttgtttctgtgagtggggcgagttgcagacgctggtctcctcatyggtgtgccatggacttcaacaggggtcctggctacagaaaatactatcactctccataactctggggaatagggacatttaaatgaagaggttatggtcagcctgggcaaagaattacacctataaatggtggtggcttctgccctgacacccatgatctctactcatccacctacccatacctgactgtgtctctgctgaaatatggaggacagattcaccctgcctaagtcatgtttggaaccctcttcctccttccttgtccatgtccactcatctcatttcattccctaattcaccatcaaacagcaatcagtctcctcaagtcttactgtaatctataaaatctatattggtgatcatcagttttttgacttgaaggatcatatgttctgtagatttttttttcagaatgctctggacaattaattttctttaggccagatcacactgcctcctccatgagaattggcagcttcacctatcaaccac

SEQ ID NO: 728884 - DNA, 646 bp, Homo sapiens
aaactctcacagatataaggaggcatgagtaccacgtggaatgtgggattctggaacagaaagaggacacgagcgcacaactagtgaaacacgaataaaaaaccgaaatgggcggccaggcatgatggctcatgcctgtaatcccagcactttgggaggctgaggcaggcagatcacttgaggtcaggtgtttgagaccagcctggccaatatggtgaaaccccgtctctactaaaaatacaaaaattggctgggcacagtggcgcatgcctgtaatcccagctacttgggaggctgaggcaggagaatcacttgaaccagggagtcggaggttgcagtgagctgagatcgtgccactgcactccagcctggcaacaaagggaggctccgtctraaaaaaaaaaaaaaaaaaaaaagaacttttacatgaagaaaacttaaaatattacagagacataaaagaaaacctgaatcaatgggaaagcatctactcctgttctttacatataaagatccaatattgttattgacatcataacaaggccattctccataaataaacatttgatgtgatccaaatgatacgatcaatttttttttaaggacaaactagttctaaagttcaaatagaatgaaatgggaataa

SEQ ID NO: 728885 - DNA, 672 bp, Homo sapiens
aacttccttcagaccacacactcctcaatttgttcccaagctccaaagtttctaaagtcactgtctaaagggcccacagtgtttttgtggagtggtggaaaagctctggggatggaaagtggtggtggttgcaaagcattctgaatgtacttactgttgctgaatgcacacttacaaatgattgaaatggtttaaaaattgttcattttgccataataaaaatactgcacactctggaggaaagtaaacctagtttaattttgaaattgttcaatggataccaatcaaagaatagtgtagcaagcaccatttcccctstcgctatagcagcaactgatccccttgtgctcttttggcctctctcccctgctctctctctctcgataataagcaatgctcttctctccagtccaagctcacacttccccagttgtgcaggaatgcctattgtaactgttaatttatttccaggcagagtcctcaagattcctctgctcatattctgttctcagctgtctggagccagcatgacaagtgagccaagatcacttgtcatgagagacttgtggaaggttttgcaaaaagttccccaagaaaaaacaatgctcattgttgacagcaggtccatttccacacagtagggccatgctgggtgtgcagtggggctgtgca

SEQ ID NO: 728886 - DNA, 672 bp, Homo sapiens
aacttccttcagaccacacactcctcaatttgttcccaagctccaaagtttctaaagtcactgtctaaagggcccacagtgtttttgtggagtggtggaaaagctctggggatggaaagtggtggtggttgcaaagcattctgaatgtacttactgttgctgaatgcacacttacaaatgattgaaatggtttaaaaattgttcattttgccataataaaaatactgcacactctggaggaaagtaaacctagtttaattttgaaattgttcaatggataccaatcaaagaatagtgtagcaagcaccatttcccctctcgctatagcagcaactgatccccttgtgctcttttggmctctctcccctgctctctctctctcgataataagcaatgctcttctctccagtccaagctcacacttccccagttgtgcaggaatgcctattgtaactgttaatttatttccaggcagagtcctcaagattcctctgctcatattctgttctcagctgtctggagccagcatgacaagtgagccaagatcacttgtcatgagagacttgtggaaggttttgcaaaaagttccccaagaaaaaacaatgctcattgttgacagcaggtccatttccacacagtagggccatgctgggtgtgcagtggggctgtgca

SEQ ID NO: 728887 - DNA, 629 bp, Homo sapiens
cttggatccttacaggaaacttccttcagaccacacactcctcaatttgttcccaagctccaaagtttctaaagtcactgtctaaagggcccacagtgtttttgtggagtggtggaaaagctctggggatggaaagtggtggtggttgcaaagcattctgaatgtacttactgttgctgaatgcacacttacaaatgattgaaatggtttaaaaattgttcattttgccataataaaaatactgcacactctggaggaaagtaaacctagtttaattttgaaattgttcaatggataccaatcaaagaatagtgtagcaagcaccatttcccctctcgctatagcagcaactgatccccttgtgctcttttggcctctctcccctgctctctctctctcrataataagcaatgctcttctctccagtccaagctcacacttccccagttgtgcaggaatgcctattgtaactgttaatttatttccaggcagagtcctcaagattcctctgctcatattctgttctcagctgtctggagccagcatgacaagtgagccaagatcacttgtcatgagagacttgtggaaggttttgcaaaaagttccccaagaaaaaacaatgctcattg

SEQ ID NO: 728888 - DNA, 590 bp, Homo sapiens
tacaaatggccaaagggtgtattttttaaaatgctcaacatcactaatcatcagggcaatgcgaatcaaaatcacagtgagacatcatctcaccccagctagagtgactaatatcaaaaagacaaaacataacacattctggcaagaacgcagtgtaaaggaactcttatacactgttatatactgttggtgagaaggtaaattttaaattaatayggccattatgaaaaacatgatagtgtttcagaaacactaaaaatagactatcatcatacaatgcaataatcccactactgggtatttaatcacaggaaaaaacgtcagtatatctaaggaattcctgcactcccacgtttactgcagcactattcataatagcaaagctatagaatcaacctgttttcatcaacagatgaatgcataaggaaaatgtggcatgcatacacgatgaaatactttccagtcataaacaaaagaatgaaatcttatcctctgcagcaacatgatggaactggaggtcattatgttaagtgaaattagccaagcacagaaaaacaaatgtcacatgttctctctcatgtgggagctaa

SEQ ID NO: 728889 - DNA, 558 bp, Homo sapiens
accagcaatcctcacctgcccattcaggcctctacactgcctaccgtgaacagtcacagatcacaaactgattgccaaatttgtgcagatcatcttgacagtttctgtggaactgggtgccttctcatagaaccaggaagtcacaagccaggccagctctagagaagcaaytgggggagtaacatgcatcacagcgcctggacacaacaaagggattttgctgtagtcctactaggacacatcctagtgatgtctctgagaaccagtcttggtccctgcaacagaaagcctactaaacaggacagtaggctgcaaggttgggcacaatttgtgccgtgtgtgagccatgtagattgtgcatgtgtgtatgtgtgtacatatgtgtacatgtgcatttagtgttgcaaggaagggttgtgtcaaatgtcccaactcaaaacttttctgttttcctaagttatctgcttctatctttactacctttgtactatcataagaataaggataatgattagggttgaaataggagaaggaataatgtttaattattcattctta

SEQ ID NO: 728890 - DNA, 519 bp, Homo sapiens
cgggagcctggagctgcaggatcccaggggaggggtctctctccccatcccaagtcatccagcccttctccctgcactcatgaaaccccaataaatatcctcattgacaaccagaaatcttgttttatctcattttttttctcacataaattgctagcctccccggggttctcagtgtggggtacagggaattctgcacccagtgtgaaaatcacccaagggaggaggctcacagcctccctgagtcatctccccagagggtccttcctctcccagtcaccccttctccaactctccactgtacccctgagcyaccagtctggcatcagttcagaccagtcccacaccctcctaaattttacttctcaataaatacctgatcatgtaaaacgcagcatttctaatgtgcagtctctgtctggtcatgtgtctgggctgaagggtcactgctcagggacagggggcagttccaggtgagatcccatgtctccgtcatcccacaccccacccaacctgcca

SEQ ID NO: 728891 - DNA, 608 bp, Homo sapiens
aactctaaccccacccacgggagcctggagctgcaggatcccaggggaggggtctctctccccatcccaagtcatccagcccttctccctgcactcatgaaaccccaataaatatcctcattgacaaccagaaatcttgttttatctcattttttttctcacataaattgctagcctccccggggttctcagtgtggggtacagggaattctgcacccagtgtgaaaatcacccaagggaggaggctcacagcctccctgagtcatctccccagagggtccttcctctcccagtcaccccttctccaactctccactgtacccctgagctaccagtctggcatcagttcagaccagtcccacaccctcctaaattttacttctcaataaatacctgatcatgtaaaacscagcatttctaatgtgcagtctctgtctggtcatgtgtctgggctgaagggtcactgctcagggacagggggcagttccaggtgagatcccatgtctccgtcatcccacaccccacccaacctgccagggaaccgggtgagctccctgtgccagtgggaactgcaatccaaggcacaaaattgtcctgcagtccttgcc

SEQ ID NO: 728892 - DNA, 501 bp, Homo sapiens
attctcactcttgtagtaatgttagctgcataggatggtcaatagctacatccctcagaagggaaggaaggcagagggatgaggcttcagttcacctccttctcatgagtgctgcagagcatctgtgaattcagaggtctgcagctgggctctgttcacccaggagtgtgcttcatgctctaggaaggagccactytgcacacagatgatccagggcccagccatccttccagggtgaataattaatgtcttctctcatggtgaactctaggattcaagccatctaatgtttttgaagccactgtcattatatttaattgatgatgacaggtggccaccaatgatgaatattttcccagggggagtctccccaagtggctttagacttcctcacatggccccaggggattaaatggctcctgattactcagaggataagaggttctgtcttatcttgttcttttcttatttgtcttatgtgtctttcctgccccaggcctg

SEQ ID NO: 728893 - DNA, 620 bp, Homo sapiens
ggggccaaggccccgagagatctcaggacaggtggtcaggtgtctaaggtaaaacagctccccgtgcagatcaggacatagtggaaaacaccctgacccctctgcctggcatagaccttcagacacagagcccctgaacaagggcaccccaacacctcatcatatactgaggtcaggggctccccaggtggacaccaggactctgaccccctgcccctcatccaccccgcaggtcagcccaaggctgccccctcggtcactctgttcccgccctcctctgaggagcttcaagccaacaaggccacactggtgtgtctcataagtgacttctacccgggagccgtgacagtggcctggaaggcagatagcagccccgtcaaggcgggagtggagaccaccacaccctccaaacaaagcaacaacaagtacgcggccagcagctayctgagcctgacgcctgagcagtggaagtcccacaaaagctacagctgccaggtcacgcatgaagggagcaccgtggagaagacagtggcccctacagaatgttcataggttctcaaccctcaccccccaccacgggagactagagctgcaggatcccaggggaggggtctctcctc

SEQ ID NO: 728894 - DNA, 622 bp, Homo sapiens
cctgcaggggtcaggcctgggttactgtgggtggggcctgggaggggcccttgtggcatcctggggagtctctcccacggctcctgtttgactttcctgtggctgctggctgttatcacaaatgacccctaatttagtgccttaaaacatcacacactgaytctctcccaggtctggaggtcagaagtccaaaatgagtccttgggggctaaaatcagggtcccagcagggccggctccttctggggactctggggagaattcgtttccaggacttttccagcttctagaggacaacctcagctcctggccccttcctccaacttcagagcctgagctcagcatcttcaaatctctctcttgctcttctctccctccctaccttcttctctccctctcttccttctctctctctccgtctccctccatccccacatcttgtcctctcactctgaccctcctgcctccctctttcttctacaaagaccccagcttggacccacctggataacccaggagcatttcccacctcaggctcctaattgacatgacatctgcaaagtccctgtggccacacatgacacatagacaggtccaggattgggacacgactgtccccgcgg

SEQ ID NO: 728895 - DNA, 622 bp, Homo sapiens
cctgcaggggtcaggcctgggttactgtgggtggggcctgggaggggcccttgtggcatcctggggagtctctcccacggctcctgtttgactttcctgtggctgctggctgttatcacaaatgacccctaatttagtgccttaaaacatcacacactgactctctcccaggtctggaggtcagaagtccaaaatgagtccttgggggctaaaatcagggtcccagcagggccggctccttctggggactctggggagaattcgtttccaggacttttccagcttctagaggacaacctcagctcctggccccttcctccaacttcagagcctgagctcagcatcttcaaatctctctsttgctcttctctccctccctaccttcttctctccctctcttccttctctctctctccgtctccctccatccccacatcttgtcctctcactctgaccctcctgcctccctctttcttctacaaagaccccagcttggacccacctggataacccaggagcatttcccacctcaggctcctaattgacatgacatctgcaaagtccctgtggccacacatgacacatagacaggtccaggattgggacacgactgtccccgcgg

SEQ ID NO: 728896 - DNA, 622 bp, Homo sapiens
cctgcaggggtcaggcctgggttactgtgggtggggcctgggaggggcccttgtggcatcctggggagtctctcccacggctcctgtttgactttcctgtggctgctggctgttatcacaaatgacccctaatttagtgccttaaaacatcacacactgactctctcccaggtctggaggtcagaagtccaaaatgagtccttgggggctaaaatcagggtcccagcagggccggctccttctggggactctggggagaattcgtttccaggacttttccagcttctagaggacaacctcagctcctggccccttcctccaacttcagagcctgagctcagcatcttcaaatctctctcttgctcttctctccctccctaccttcttctctccctctcttccttctctctctctccgtctccctccatccccacatcttgtcctctcactctgaccctcctgcctccctctttcttctayaaagaccccagcttggacccacctggataacccaggagcatttcccacctcaggctcctaattgacatgacatctgcaaagtccctgtggccacacatgacacatagacaggtccaggattgggacacgactgtccccgcgg

SEQ ID NO: 728897 - DNA, 635 bp, Homo sapiens
agcaactgcaaacaaaaagtttaagcgatttctgcaaagagcaataaaagccatagagcagcttgggacaaggtcaggtcaggatgagcagaagttgggaaggaaagaaggaagccaggatggacttggagagtttttaccagttcctcaggcaggaagaattgtatggtaggtcagagcatatttctaggaagacctcggttgacaaatttctctgccactgagagatgacaatttaccttggtarctaatctctctcctcatgttcccatctatttgatattgatttaatatgagtagctacctcccatgtgtataataggaaatgtatgggagaatgcatattaattcctgaatagaatatctggttccatgaatgatggaagttggttagaatttattattggaaactcaccctgcactacctatagttggtttattttaattatacttatattcattatatagtaactcatatatatttgtcatttcttttcttatattcaaaaagtctctacataaataaactctgcacctatggtcattgctgggtatctgttctatacacagcaaggagccagacgccctatcttacttgttcactttccagcttctccttagaaaaaaaaatacaa

SEQ ID NO: 728898 - DNA, 601 bp, Homo sapiens
aggctgactcaggcagatcacttgggtccaggagttggagaccagcttgggcaatggagtgcaatcctgactctacaaaaaaatacaaaaattatttgggagtggtggtgtagaccacaaccgtagttccagctatttgggaggctgagataggaggatcaattgagcccaggaggttgaagttgcagtgagccgtgattgcaccactgacagagcaagaccctgccaaaaaaaaagaaaaagaaaaaaaaatgatgagaggtatataggaactctgtaccatccttgcaacttctctgcaaatttaaaactttttttttttttttacagtttggtattttttattattattatactttaagttttagggtacatgtgcacaatgtgcaggttagttacatatatatacatgtgccatgctggtgcgctgcacccactaactcrtcatctagcattaggtatatctcccaatgctatcgctcccccccctgctttaaaactattttaaaatgaaaagtttatcaaatttacaagaagaaaaacattaaaaagtgggcaaaggacatgaacagacacttttcaaaagatgtcatacatggag

SEQ ID NO: 728899 - DNA, 658 bp, Homo sapiens
atgtgtacaactaaacacaccacgcacgctcacttcccaagcacaaggagtgcactgcacatgcaggcagcccactctaagggaagaatcatgggaaaggggccagcctataaagtcctaggatcaaggtaaagcactgcacttgttcttcaagttgcctgattggatctcttccaagtgtactttcctttctttcctgttctaatgccttcttaataaacttccactcctgctctgaaacttgcctaagtctcttttttttctgctttatgcccctccatcaaattctttattctgaggaggcaagaactgatgttgctgcagacctgtacagattcatcgctggtaactcagatactgagaggtgacagcatgctggcagcccttgcagccctcgctggttcttggcgcctcctcggcctcggcacccactstggccgtgcttgaggagcccttcagccccccgccgcactgtgggagccccttcctgggatgggcgaggccggaggcagctccctcagcctgcggggaggtgtggagggagaggcacgggcgggaaccggggctgcgcgccgcgcttgctggccagctagagttctgggtgggcgtgggcttggcgggcccgcactcggagcagccagccggccccgcaggcccg

SEQ ID NO: 728900 - DNA, 630 bp, Homo sapiens
aaccagtgaaagcaaatagtctgtagtttagttaatattctagcaatattaatttttttagttttgaaaaatggttataaaagatgttaacattcgggcaaactggataaagattacatggaatctcttttggctattttygtaacttctgtaaattaaaaagtacttcaaaataaaattatttaaaattgtaattagaacaactctatattaaattttttcataaccctcattattgtgtgtgtgtgtgtatatatgtatatatgtatatatgtgtatatatgtatatatgtatatatgtgtatatatgtatatatgtatatatgtgtatatatgcatatatatgtatatatgtgtatatatgtatatatgtatatatgtatatgtatgtatatatgtatgtgtgtatatatatggttttgttttgttttttttttttttttttttgagacagagtctctctctgtcgcccaggctgaagtgtagtggcgctatctcggctcactgcaagctccgcctcccaggttcacgccattctcctgcctcagcctcctgagtagctgggactacaggcgcccactatcacgcccggctaattttttgtatttttagtagagacgaggtttcacc

SEQ ID NO: 728901 - DNA, 630 bp, Homo sapiens
aaccagtgaaagcaaatagtctgtagtttagttaatattctagcaatattaatttttttagttttgaaaaatggttataaaagatgttaacattcgggcaaactggataaagattacatggaatctcttttggctatttttgtaacttctgtaaattaaaaagtacttcaaaataaaattatttaaaattgtaattagaacaactctatattaaattttttcataaccctcattattgtgtgtgtgtgtgtatatatgtatatatgtatatatgtgtatatatgtatatatgtatatatgtgtatatatgtatatatgtatatatgtgtatatatgyatatatatgtatatatgtgtatatatgtatatatgtatatatgtatatgtatgtatatatgtatgtgtgtatatatatggttttgttttgttttttttttttttttttttgagacagagtctctctctgtcgcccaggctgaagtgtagtggcgctatctcggctcactgcaagctccgcctcccaggttcacgccattctcctgcctcagcctcctgagtagctgggactacaggcgcccactatcacgcccggctaattttttgtatttttagtagagacgaggtttcacc

SEQ ID NO: 728902 - DNA, 656 bp, Homo sapiens
tcattaaattaaaaacatctacacagcaacaacctaatgttcatattaatgagaggtaggaacactgatagtaatcaacatctgttgctggtgttaatattcaacattaaagtaatccacagagggaaaatacaactactgcaggttaaatgacaactacagcttttctgattggtggttgtaagcagaaggtccagtagcagcaaagtaatcaagacggggttttcacatcatgtctttccaaataatcactgtcctaagtgaggagtagaagacactgtcacattgaggtattagtcagttttcacagtgccataaagaactgcrcagactgggtaatttataaaggaaagaggcttaattgattcacagttctacatggctggggaggccttagaaaacttataatcatggcaaaaggggaagcggaaacaagcaccttcttcacatggcaagcaggagagagaagaaagaaggaggaacttccaaacacttataaaaccgtcagctcttgtgggaactccctatcaggagagcggcaggagagaaacagccctgcatgatccaatcacttccctacttccacaatggggattacaaatgaagatgagatttgggtggcgacacagagccatatcgtatcaaagtatgaaagg

SEQ ID NO: 728903 - DNA, 653 bp, Homo sapiens
gatgtttttaattccatttgctgttgtctataccagttgctgctacctattcaaggcccaaagttacaatctacctccaacccagtcttctcccagtctacctccaaatcagtctcacacagcatacaagatgatcttttcataattaaattcttctggttaaatcttgtggaaataaatgaaggctaccacaataaacagagactgtttattcagcggttgctatagggagggattcagccactatcactttttggcagagactccaatgcagyctgggaagctttatagtggtaaaaagaaaggtgtgggggaggcttcaggtctactctaattgtaggttgctgacatgggaaagctagaggtggactagctggaagtagggtatcctctgtgattgacttggaaagcatatttggctttctctggttggtcttaagttggaagcagagggacaaaaaccgggaaagctggcagtcattggccaaatcctgacttttctgagccaattgcagcagaggttgttggccagagttattttgtcacatatagtctgaccagttttgtttatatgttcagtctcaaaccattcaatggctttttaagatccttgtgttacatacaaagccttctataaaatcccatgccagacc

SEQ ID NO: 728904 - DNA, 586 bp, Homo sapiens
tctaaaaattatatttgggaagaaaataaatgctggcaatattttatttgctttgtttgtttgttgagacagggtctcaccctgtcacccaggctatagtgcaatggcatgctcatggctcactacagcctcaacctcctgggctctagcgatcctcccaccccagccttcccagtagctgggactacaagtkcatgccaccacacgaagctaatttttgtattttatatagacagggtttcgccatgttgccccggctggtctcaaactcctgggctcaagccatctgcctacttcggcctctcacagtgttgcgattacaggcgtgagcctgaaatgaattacaatattgcccagtctggcagtattataatgcattcattcaacaaatatttatgactgcctactgagtactagatactgtcttaactactgaaaatacagttaggcttaaaataaatatccttttctctatggagcttaaaatctagatctctagccagaagtaatgactccagtgtggtctaccaaattagtagagccccaatttatttgtattttgttttagttcttagaaaggaaataa

SEQ ID NO: 728905 - DNA, 577 bp, Homo sapiens
aagactttaaggcaaaaggggaaatgctggctaataagagaaagactgatagctaatagttattcagaacctactatctggtgagctttaaacaccttccaagtattaagtcatttagtcctctcaacaaacctaggaggtataggtactcttattatccctttgtatcagatgggtagaactcagtytaagaagctaaataattattcctggccacaagtggcagagcaaaaatttaacccaggttctataatagaacccacaattttaaccaacatgcaatactcagaacagtattttcaactttttttttttttagctagaaacataaagctacttctaaaagcagcttttaaagaaagcatagcataaagaagggaggatttgccttgctatttatcaagacctacgataaagctatagtaattaaaattatgtggtactgggtcatggagagaccaatggcatggaatatatgaaaggttggctttatgagagatgatactgccaatcagtgagggaagggtggtgttggggcagttggtcctccatgtgaaaaaataaaaattagacctct

SEQ ID NO: 728906 - DNA, 577 bp, Homo sapiens
aagactttaaggcaaaaggggaaatgctggctaataagagaaagactgatagctaatagttattcagaacctactatctggtgagctttaaacaccttccaagtattaagtcatttagtcctctcaacaaacctaggaggtataggtactcttattatccctttgtatcagatgggtagaactcagtctaagaagctaaataattattcctggccacaagtggcagagcaaaaatttaacccaggttctataatagaacccacaattttaaccaacatgcaatactcagaacagtattttcaactttttttttttttagctagaaacataaagctacttytaaaagcagcttttaaagaaagcatagcataaagaagggaggatttgccttgctatttatcaagacctacgataaagctatagtaattaaaattatgtggtactgggtcatggagagaccaatggcatggaatatatgaaaggttggctttatgagagatgatactgccaatcagtgagggaagggtggtgttggggcagttggtcctccatgtgaaaaaataaaaattagacctct

SEQ ID NO: 728907 - DNA, 465 bp, Homo sapiens
cgctgggagctgtagactggagctgttcctatttggccatcttcgccattcatatatttctttgctgaaatgtctattcaaataaattccccatttaaaaaaattgtgggggtcttttcatcattgagttttggacctctttatatatttttaatataaatcctttatccaatatattatttggaaatattttctaccaatttgtgacttgtcttttcatttctttaatggtgtctttttaagaggacaactccaatttattgattttcatttatatattacgtttttgctgtcatatctatgaaatatttgtgtaatccaaggrcacaaaattttctaccagatttccttccagaagttttaacttttatctcctacactgaggtctttgatcaattttgagttgaaatttgtgtatattattatataagggtgtatatctttttgcatttgaatatccaattg

SEQ ID NO: 728908 - DNA, 644 bp, Homo sapiens
aaatcctttatccaatatattatttggaaatattttctaccaatttgtgacttgtcttttcatttctttaatggtgtctttttaagaggacaactccaatttattgattttcatttatatattacgtttttgctgtcatatctatgaaatatttgtgtaatccaagggcacaaaattttctaccagatttccttccagaagttttaacttttatctcctacactgaggtctttgatcaattttgagttgaaatttgtgtatattattatataagggtgtatatctttttgcatttgaatatccaattgtcatagcaccatttattgaaaaagttatttctccattgaattgccttgcaacttattaaaaatcaactgcccacaaatgtcagggttcatttttgaactttccattctatgctgtgaatcaatatgtttattttcacaactataacatactgtcttgatcyctgtagctttttacaaagtttctgaaattaagtagtgtaagtcttcctactttgttcattttcaaaactgttctggcaattccagttcattacattttcatataatgtaatatatgaaatataattgtagctcagatggccaatttctacaaaaagctggctgggattttgacag

SEQ ID NO: 728909 - DNA, 644 bp, Homo sapiens
aaatcctttatccaatatattatttggaaatattttctaccaatttgtgacttgtcttttcatttctttaatggtgtctttttaagaggacaactccaatttattgattttcatttatatattacgtttttgctgtcatatctatgaaatatttgtgtaatccaagggcacaaaattttctaccagatttccttccagaagttttaacttttatctcctacactgaggtctttgatcaattttgagttgaaatttgtgtatattattatataagggtgtatatctttttgcatttgaatatccaattgtcatagcaccatttattgaaaaagttatttctccattgaattgccttgcaacttattaaaaatcaactgcccacaaatgtcagggttcatttttgaactttccattctatgctgtgaatcaatatgtttattttcacaactataacatactgtcttgatccctgtagctttwtacaaagtttctgaaattaagtagtgtaagtcttcctactttgttcattttcaaaactgttctggcaattccagttcattacattttcatataatgtaatatatgaaatataattgtagctcagatggccaatttctacaaaaagctggctgggattttgacag

SEQ ID NO: 728910 - DNA, 597 bp, Homo sapiens
tcaaaaatgatacatgtaaatcatatcaatagttgtacatgtaaatcatatcaacagttgtgggaaacaaaccaaagcagtgacagaccacatttagttcatcaataccttgataaattattgcagcaaaccaccaatttatcttgttatggatgaagagaataatagctgtgatcctttcaatgcaaaaataaactgaagtcttatgtcaagataatctgcacttttaaaaatgtagtagaggtaaacctacttatcctaaaacttattaaactgaactgaaaagttcccactgattaaaaaaaaagatattttattctcttggaatacaaaagcctttctatgcaggtaacaaagcaaagatagagctatttratttaataaaaaataaaatcttatatgtagcaaataactacattataaaagaaattttagaaaataacagactagaggaaaatatcacaacataaatgaccctaatatataaagaatgtctatgttatcttcttccaatcagaaaaaccagtaaaagtacagtaaaggatagaaacaaaggaagaaaagaaattcaaatgcctagtaagatggcatgacaaa

SEQ ID NO: 728911 - DNA, 585 bp, Homo sapiens
ctaattttttggggggattctttaacatcatagctggtaccctagttgatttatgcacattactattaatcatagattactcaggtacaaaatctaggaggctagaccatacggattctaagatctattttatttttaaaattctgtgataccgttttgtactgtatgctgtggccatgttaggaacctaatagtgttaatacttggcctttaaactggattatcttgcctcatagcttcattctttatacaataattataaagttacttgctaatagctaatgtttcataaataatgccatttaatacagatggcatacacaatcatcccaattctttacaatttctgagaatgtgtgcctagctttctgccagactgaattaattacctaaagaaaacccagaraatacattgtgtataaaaagataccattatgattttaaaatgtaaagcccatacattttatacattatttcataaatgattacagtggtctaaaaacgtctttggtagttgtccatttgtcattcagcctatgtgtcttaggaaattctctgaaatcagtcctgtgaaacatgaatagg

SEQ ID NO: 728912 - DNA, 626 bp, Homo sapiens
ttcattttaactcttgcctcctgggctctactaaaatgtgtagtcaggtatttaagccaaacatggggcttattagggttgttagataagccctaaggacactagagttcttagataaacaccaaatgctggcttgttttcggagtttgtttttaatttacccaaggtgtgtgcatgataattctctctgcagaagactcttgaagacatcacatagcatataccaaagtggacaatctaaaaaataatccagttctctgactgcaagatgagtatggccttcattagatgcagatgtagcrtgtatgtcagccacctagagcccacttggactctgtcctggaggacaagccatttctagggagcattttaaaattattgccttccaattttattacttcaaaatttattatgttttactgtgttctctttttggaaggagcagttaccatcaaaagaatatagatggcaacggatgaatatatatttgataattgtgcttttacctttagtattgggaatttatcagtctatttttgatatttgaaatacagatgaaaagaaactgtatacacaagataaaacagctttttccttgaaacaatgacatattggcttttcctttc

SEQ ID NO: 728913 - DNA, 539 bp, Homo sapiens
tatgaccaagtgggattcatcccggaaatacaagctaattgtattagtccattctcacactgctataaagatattacctcagtctaggtaatgtataaaggaaagaggtttgactcgcagttccacatggctgaggaggtcttaggaaacttatcatggtggaaggcaaaagggaagcaaagacatttttcacatggcagcaggagagagaagttcaagcaggggaaatgccagacgcttatagaaccatcagatctatgcaaactaactcactatcatgagaacagcttgggggaaccgtccccatgatccagtcaccccccaacctggtccctccctcaacatgtgtggmttatggggattacaattcaagatgagatttgggtgggaacatatagccaaaccatattactggttaaatctataaaaatcaattaatatagtatattatagactaaagaagaaaaagcacatgatcatcctaatggatacagaaacagcatttgacaaatttcaacaccttttcatgaaacatacac

SEQ ID NO: 728914 - DNA, 644 bp, Homo sapiens
tgaatcaccctttctctgtggtatataagccctaggtctggggagtaatggcgcagaggtcaccaccctatctcaccaccacccgagacacagatgtggcttctgtttgtaagtccctattaaatgtttctttctgagaaactggatatgtcatcctctttcttcakcctctcagcttcctcagactttggggaagatttgcgtaaaactgcccaccatgaaacaaaaacgtaacctgaccccttctgaaatagttcctggaaggcctacacacctaaaaatagaggctcctgtattttctgctactaaattctgatatgactaaaggctttaatgcactatgccaaatatattattatgaattatgccaaactatatttccaccaggcaaataaagcttttcatggtccactgactgagaacaatcaaacccttcacaatctagaacctggagattctgagaacatcagagaaagaccgcccttgccactcatacttcagcaaaactttggcaccttggaccttgggttcataatctcacaactcagaaggacccctccagactcttagaactgtataccccttggagatggtaaggtaaagctaatcagggacgtttatctccagaagcagacagcatccca

SEQ ID NO: 728915 - DNA, 524 bp, Homo sapiens
aaattcatttcacccattaactcgtcatttagcattaggtatatctcctaatgctatccctccccgctccccccaccccacaacagtccccggtgtgtgatgttccccttcctgtatacatatgtaacaaacctgcacgttgtgcacatgtaccctaaaacttaaaatataataataataaaatttaaaaaaagaaaaaaaattcatttcattcattcatttttacagcatttcaagttttaacagtttgagaacctggttggcagaaaggaaaatctatgaaataggattttcactaaaatttcacraagaattagcattttcttcaattataaaataagcaaccaactatagtaatatgtgactttgtcaccaatcgaaattacagatatttccatgttacattatggttgatatagagatctcaaaatacggactaaactcattattactttgagattgttagttgctaatcttgctaccatatcttattatttaatgagttaatacaacaccatagtacc

SEQ ID NO: 728916 - DNA, 524 bp, Homo sapiens
aaattcatttcacccattaactcgtcatttagcattaggtatatctcctaatgctatccctccccgctccccccaccccacaacagtccccggtgtgtgatgttccccttcctgtatacatatgtaacaaacctgcacgttgtgcacatgtaccctaaaacttaaaatataataataataaaatttaaaaaaagaaaaaaaattcatttcattcattcatttttacagcatttcaagttttaacagtttgagaacctggttggcagaaaggaaaatctatgaaataggattttcactaaaatttcacaaagaattagcattttcttcaattataaaataagcaaccaactatagtaatatgtgactttgtcaccartcgaaattacagatatttccatgttacattatggttgatatagagatctcaaaatacggactaaactcattattactttgagattgttagttgctaatcttgctaccatatcttattatttaatgagttaatacaacaccatagtacc

SEQ ID NO: 728917 - DNA, 552 bp, Homo sapiens
taaaaagtgtttttatttttacaagtagatttttttagcttcatagctacttaaaacattttgagataacatttattctgacagtttacaaggtatttctcaaagccctctatattttgagtacgttatcagtgttttattttttaattaagcttttttgaggtaattatagattcacacacagttgtaaaacataatgtgtattctctcttcctgtgtgtcctttactggttccccacagtggtataacatctggcaaagctatagtaaaatatcacaaccaggaaactgacattaatgcaatctactgatctcattcagatttccctacttctatttgtattcttttgtgtatgtctrtatatatttggttatatgaaattttatcctgtgcatagttttgttaattcaccaccacagtcaagaccggttccattatcacaaggattctccgtgatactcactgatgaccataccttcctctcttcctccccttccccaattcctgttaactggtaattgctacctctagaattttgtcatttcaagaat

SEQ ID NO: 728918 - DNA, 601 bp, Homo sapiens
ttatatgaaattttatcctgtgcatagttttgttaattcaccaccacagtcaagaccggttccattatcacaaggattctccgtgatactcactgatgaccataccttcctctcttcctccccttccccaattcctgttaactggtaattgctacctctagaattttgtcatttcaagaatttgtttaagcataatcatatagtatataacacttgggaattaacttytttgagtcaggataattcctcagattcatccaaatttttgcatgtattaatagttcattcattttaattactgaggagtattctgtggtatacatataccacagtttgtttaaccattcacctgttgaaggacatctgggttctttcccgttttttggctactacaattaaagctgttaggaacattcatgtactagtttttatgtgaacatgcagttctctggaataaatgcataagtgcaattgcagggtaatacggtaattgcctgcttagttttataaggcgtatatgttttaccacttcaagtgaagtgtggaaaccatactgccattccttttactttctcactttttcagatactgtcttgagtat

SEQ ID NO: 728919 - DNA, 599 bp, Homo sapiens
ttgcccatgcctatgtcctgaatgttattgtctagattttctcccagggtttttacagttttgggttttacatttaagtctttaattcatcttgaattaatttttgtataaggtataagaaagaggtccagtttcaattttctgcatatggctagcaagttctccmagcaccatttattaaataggaagtcatttcccctttcttgtttttgtcaggtttgttgaagagcagatggttgtaggtgtgcagtcttatttctgagttctctattcggttccattcatctatgtgtcagtttttgtatcagtaccatgctgttttgttttctgtagccttaaagtatagtttgaagccaggtaatgtgatgcctccagctttgttctttttgcttaggattgtcttcactattcaggctcttttttggaattttaaaattgtttcttctaattatgtaaagaatgtcaatgatagtttaatgggaatagcattgaacctataaattacttcgggtagtatggccattttcgtgatattgttatctatgagcatggaatgtttttccatttgtgtcctctctgatttcacttcccttgttagc

SEQ ID NO: 728920 - DNA, 609 bp, Homo sapiens
atttcttggaagctttgttcgtttcttttcactcttttttctctaatcttgtcttctcactttatttcattaatttgatcttcagtcactgatatcttttcttccacttgatcgaattaaccactgaagcttctgcatgcgtcacgaagttctcatgctgtggttttcagctccatcaggtcatttaaggtcttctctacactgtttattctagttagccattcatctaaccttttttcaacgtttttagcttccttgcgatgagttagaacattcttctttagctcagtgaagtttgttattaccgaccttstgaagcctacttctgtcaactcatcaaactcattctccgtccagtccagttttgttcccttgctggcgagtagctgtgatcctttggaggagaagagaggctctgttttttggaattttcagcttttctgctctggcttctccccatctttgtgattttatctacctttggtctttgatgttggtgaactacagatgggattttggtgtggatgtccttttagttgatgttgatggtattcctttctgtttgttagttgtccttctaacagtcaggaccctcagctgcaggtctgt

SEQ ID NO: 728921 - DNA, 596 bp, Homo sapiens
tacagtatggggatttacatttagatctttaacccattttgagttgattttttgcataaagtaagaaatggaggtctgctttcattcttctgcatatagatatcaagtgttcccagaacaacttaagagggtgtactttccttagtggatatacttgacacctttgtcaaaagttagttggctgcagctatgtgaattacttcctgggttctttattttgttccattaatctttgtttctgtttttatgccagtatcattctgttttggttcacataacttggtagtatattttgaaatctggtwatgtgatgactgtagctttgtttcttttttctttttttttaattattttatttttattttatttaattattattatactttaagattttagggtacatgggcacaatgtgcaggttagttacatatgtatacatgtgctatgctggtgtgctgcacccattaactcgtcatttagcattaggtatatctcttaaagctatccctccccgctccccccaccccacaacagtccccagagtgtaatgttccccttcctgtgtccatgtgttctcattgttcaattcccaccta

SEQ ID NO: 728922 - DNA, 637 bp, Homo sapiens
tccccttattgctctggaggtttgctgcaaaaaatcaatcagaaaaaggtgaggggtagagctgcacaggaacaagtgtataattatgcagattcatttcctcaagtaatttcttggcgctgctcttagaagaatagatgaaagctctgtctggatgtggtgataactccaagtctcttctcaggtggttgatttttcctggttatttgatgagatcacttagggtgaggatttaagacaattgtatttcttttggaaagaagctttcttggtcagatgaggaaattccaaagagactctctccctgtaattggaagtggagatgcaagacaaggttagaggagcattgattctgagtcatcttcaaaagcctctcagtatatcagagtgccagtctttgggatattgctttttgagtcccaacaaaagggatggataagtgggtttgtgaactttcaaggatgtaaacacttgrtctcaaagattccttgtcctgtagcataggataaatgtagaggtgggcaaaattgggcccagtaaagcctgaagcccaggggcacataccctggttgctgagctctaagggaagtgtcattactgataacattaaacatagagaaaagtagagaggtgctat

SEQ ID NO: 728923 - DNA, 634 bp, Homo sapiens
aaacactataacaagaataggttcattgcctgatgcacacagcaagtcaatacactaagactctgggttgcaacagaggaagaggtttagtcatcgtgtcactgaatgaagagatgggaagaaacctcaaatctatcttccaggggaatttggggttagggttttaaaggttttggagtgggctaaagtgtgaagatcgttgattggtcaaagagtgcagggagaagtcatgggacagggagaggaagaagctgtattttcatgctggtcccatttctctgagggggtcctccaacttgttgctggaatttggagtccaaaaaacatcttaagcgatagattcttaaacaaaagctttatgattgtaaagtcagagatcctgtctataggaacaatggggatgaaagtcaattcttaaacagtcttatgaccccagtgtcaggaatcctgtctgtaggaacagtggggatacaaatggtcagtaaccaaygctaacatgactttcagcgccaagaaaataggtcaaaatgcagccggattgatgcttaactataactatatttctgtccagaaagtggcatgcaattcttatcaaccctggggagggggcagtttcaagactaaagagataggg

SEQ ID NO: 728924 - DNA, 495 bp, Homo sapiens
cagcaaacactgttaacagagacttcacaaggaggcatattttcaggagaggcttctccagactattcaactcacctgagctcctctgcaaatgtagattaatttttttttcttaactgatcacattattattttcttagggtgctaacaatgtcaccacaggccattgagcacttctttgtggactgacagaaggtgttccttcttcatgacagggtcaatactgcactgggcaggtggcttgaccagcaratgaagtgcgtgttggcctccatcgtcttccaactgtgtgcttctgggctgggacacgaccttcagcactatatgcagcagctgtcttacctggtccctctttctgatttcaatgcctaagtttcctttaattcattctcagcctccactgcagaggaaagcttggcagtctttgggcacaagaagttgcatataatggatgaggaatgacgttttaaaattagatttcataaagaatctaga

SEQ ID NO: 728925 - DNA, 599 bp, Homo sapiens
taagggttgttttctgttgctttctatcaaagaaacttagagaatgtgtggccttagatgctgtggatctaattctcatggatgtactaaattcatctgtcacagattgcattgctagaatcacccatggagtcaaacattaaaataaatctgtataaatgtttggttatggctagcttcccattcctgtcccataaaatacatgttttggtacagtaaagaaaaataacatccatacactttgttactaattactattgsgttttttttatttgtcagtaacatcatttttcaacctgatgtggtggcactccaagtaaccaagccatctcctaaatatgcactttacttttttaggttctaatgttcacaaattaactacttaaatttctaccaagttctcatctaagcaccaaaaaaaggtgtttctggttcatttaagtgaaatttctttttccgtatgttaatgtttaatacggacttctttttttctaaaagaaaattttgttttagaaagttgttactaaaaatctattttaacacataattaaacaatcaagttgtggtttacattgataggttagagaaggttattccaa

SEQ ID NO: 728926 - DNA, 599 bp, Homo sapiens
taagggttgttttctgttgctttctatcaaagaaacttagagaatgtgtggccttagatgctgtggatctaattctcatggatgtactaaattcatctgtcacagattgcattgctagaatcacccatggagtcaaacattaaaataaatctgtataaatgtttggttatggctagcttcccattcctgtcccataaaatacatgttttggtacagtaaagaaaaataacatccatacactttgttactaattactattgcgktttttttatttgtcagtaacatcatttttcaacctgatgtggtggcactccaagtaaccaagccatctcctaaatatgcactttacttttttaggttctaatgttcacaaattaactacttaaatttctaccaagttctcatctaagcaccaaaaaaaggtgtttctggttcatttaagtgaaatttctttttccgtatgttaatgtttaatacggacttctttttttctaaaagaaaattttgttttagaaagttgttactaaaaatctattttaacacataattaaacaatcaagttgtggtttacattgataggttagagaaggttattccaa

SEQ ID NO: 728927 - DNA, 581 bp, Homo sapiens
ccaattcaaccattttattacattattggtgtgagtgaagttcattataaattctgagatacacaataaatttttttacgtccctcattcctttgtgaacactaaattcagtatttatttaatggaagaagagtttattttatgcctactcctgataattctagttcttgtaagccatatttaggcctttgagagtaagctcttaatgaaaatatcacattaatattccccctttttactgtcttcgctatatacacatttcttacctacttttctgatatttatcacaactcattatggcaaagtttaaaaagtagagatctttgaatatttattttccccatagaaatgagcatagctgcagcatattttatatgtttaatgcatagttggtaaatgaattcacttctgaaaagattccacacagmtgaaatctcttggagaatttcatgctatttgagctctgagtttacaaggtgacttgcaggctggtgtcctggaggaagtaatctttcagtgctattttttatatatgggaaggaaatagccagatacatgggaaaggagggaggaaaccattt

SEQ ID NO: 728928 - DNA, 394 bp, Homo sapiens
aaggaatgaggtgtctgcactggtattgtcatcgttcatcgatatccaaatctaactcatagtcccaaatccttccttctatttcctccctagttgttcacttttacgtttagcaactattgactgagaccccatgtgctaagcatgctgccaggtgctatcaataaaaagacaaataaaatgtggcccctgacatcaaggaactcacagcctgaggagaagacctgcaagtgaacagaaamtggctatcacatgaaatcaatgctgtgatgggggtcagaaggacagtgtgctgcaggagtccacaggtgggcaccctaccaggtgcaatggatggagatgggaagatagcattcttccagaaccccagaggagggaggaaaatgtgatagat

SEQ ID NO: 728929 - DNA, 537 bp, Homo sapiens
aaactatccctttttttactctctgctaggagaggaaaacaaacctgagaatttcctctccactaggagaagaaaacaaacctgcagccccctgaaggatgagagaaagtcaggaagacagaaaaagctgcccagtgaggctccatatgttaactctgttgaaactggttgcctcatctgtaaaatggggatatataatctctttaggctgttgagagattaaaggataaagtgtctagcagggcgcttggtagagtcagcattgaggaccagttcccttcccccttccccctgtccagacacttcccagcaatctaccagggtccggtcattccacaaaaccacatggtrcactgcttttctgcccagggcctggccacctgactagtatcccggcagcaagatctgggcactggacctagcttagagaagccagaagggaaaagtcgaccaggaccactggtgagggggaggcagcctttttggaacaacaggctgctcccaaagaatgaaaacaaaccccaccctagcctggaa

SEQ ID NO: 728930 - DNA, 580 bp, Homo sapiens
tcctccaaaaatgtgtgtgtgtgtgtgtgtgtgtgtgtgtgtgtgtgtgagagagagagagagagagagagagagagagagagggaggaggaggagaaggagaaggaggaggaggaagcagaggaagagagggaggaatggggaagagggacagagatagggggcgtggagggagagccagacaatgaagtaaaagaacaatcaaaacaaagttccttctccctcccccagttccagatttttgggcagcttccaaacttgctaactttcccaaggacaagttttaaagaaatgttcaaaaagccaacaaaactaaatgtagatacmtttgaaacttcttagataacagttacagacagcagtagcaacccaactctaaaactgggccattgaaaaggaggaggaggagtctgtgtccctgactgccacacttgaaaagaactctagctctgaggagttgatccgtcttcccaatccctcatccacccaagcccaaaaactcagacttttcaatggaatccaccatcctatgcttacactggtgtgggaaaaccatcacatacttttatttctaaatgtt

SEQ ID NO: 728931 - DNA, 539 bp, Homo sapiens
ctgaccccatatttcccttctgcactgccctagcagagattctccatgagggccccaaccctgcagcaaacttttgcctgggcatccaggtgtttccatacatcttctgaaatctaggtggaggttcccaaaccttaattcttgacttctgcgcattcamaggctcaacactacatggaagctgccagggcttggagcttccaccctctgaagccacagcccaagctctatgttggcccctttcagccatggctgcagcagctgagacacagggcaccaagtcctgggctgcacacagcatggggaccctggacctggcccatgaaaccactttttgcccctgggaacccaggcctatgatgggaggtgctgccttgaaggtctcttacatggcctggagacattttccccatggtcttgggggttaacattaggctccttgctacttatgcaatcttctgcagctggcttgaatttctcctcaaaaaacaggattttcttttctactgcatcgtcagggtgcaaattttctgaacttt

SEQ ID NO: 728932 - DNA, 606 bp, Homo sapiens
agtctatttgctaatattgcatgggagaaaataaagtcttgcaattaaatgattacttttgattctgcaaacatccagcacaatcaattcatgacagaaagaaagttccttatataaataattttgttgctggtttcattgacactccaaatacttcattcattaatacaaatatttattgagtgtctattgtttttgccactggggatgcataggtgaatgaggcaaacattttttgtcaccctggagcctacagttgtaacaaaagttagaaggaaaaaaaaaacggtactggagagaatctctaatgaataaatcttaactgatatatcagggaaggcttccacagagaagtgatctttaagcaaaaacaaaaactaagtagaatttatccaggtgactaatgagagagagataaagagattcccagagagagagagagagatrgagatcgccaggaaaacaatatagcatatgcaaaggttctgtttggggataaggggaatttcgggaattcaagaaataaaaaatctgtatggcagatgcatagtaaggaggaagatagggccagattatgcagggatttatataccaacttaagtgttt

SEQ ID NO: 728933 - DNA, 606 bp, Homo sapiens
agtctatttgctaatattgcatgggagaaaataaagtcttgcaattaaatgattacttttgattctgcaaacatccagcacaatcaattcatgacagaaagaaagttccttatataaataattttgttgctggtttcattgacactccaaatacttcattcattaatacaaatatttattgagtgtctattgtttttgccactggggatgcataggtgaatgaggcaaacattttttgtcaccctggagcctacagttgtaacaaaagttagaaggaaaaaaaaaacggtactggagagaatctctaatgaataaatcttaactgatatatcagggaaggcttccacagagaagtgatctttaagcaaaaacaaaaactaagtagaatttatccaggtgactaatgagagagagataaagagattcccagagagagagagagagatggagatcrccaggaaaacaatatagcatatgcaaaggttctgtttggggataaggggaatttcgggaattcaagaaataaaaaatctgtatggcagatgcatagtaaggaggaagatagggccagattatgcagggatttatataccaacttaagtgttt

SEQ ID NO: 728934 - DNA, 578 bp, Homo sapiens
tatgtggagaatggatcggaggtgatgagagtgaaaccaggactgtcatgggaaaagaatgcattgatgtaagcaagagataacaatagatgcatttagatggtagaaaattaatgaagaggaatggatgcatttgtaaaatatttagaaggtagaattaatagtacataaygtgtggttggatatgggagctgatttacagaaaacagtcaacagtgattcattgtttcttggttggttagttgtggatgctattctgggagaaggagcaagttgaaggctgggtgtggggggttgctcgtgtgatgggaggatcataacttctgtttggggcatggtaattttgaagtacccatgaaatgtatggtggagatttataatagaatgcttgatatttttttctagagcctggaagataaatttgagctagagatataaagttgggaataaccactatatagatggaattaaagacatagaaatggtaaaaatcaggcagaacaagtaaagagagaagaaaagggagacaagtgtgaaaccatcaggactcctacagttaaaagcctaacagaggtaaa

SEQ ID NO: 728935 - DNA, 570 bp, Homo sapiens
gatactcattatatgtcagataaataaattaattgattaattatctttgttattataacatggcatattaatagggtagactagatcatgctgcagtaacaaaactgctccaaaatattagataaattcagcaaaagtttatcacttgttcattttacatattctgcacgggcgagaaaggggctcagacctatgctgatctaggaccgactgtctcatcgctggaatatctgtaagtctaaggccttttaagttatcctggcagaggaatagcaaccacaataaaatataataagtgccatgtgctatgaaaattatagccacctcccaccaacacacacacacatgcacacgcgcgcgcacacacacacacacacacacasagagaaacaagtaaaggagagggatcgccttgtgtttgttatcatctaataatggcagggtccacaaatcgtgacatcatcacatctctttagagctcagaaatgtaccttccaggaattattaggcacacaatcaactacaaaaagcagtgcctttgtaatagctaaatcgtattctttgaagtta

SEQ ID NO: 728936 - DNA, 623 bp, Homo sapiens
tgcttgtaatccaagcaattcgggagcctgaggtgggaggatcctttgaggccagggaggtcaaggctgcagtgagctgtgatcatgccactgtacactagcctggatggcagagtgagaccctgtctcgtaacaaaaataaaraacagcaaaaaataactgaatgcataaacaaaccgtggtacatccagagattggagtatagcaggtaactcaacaataaaaagaaaggaactatcatgccatgaacagacatggaggaaacttaaatgcataatactaaatgaaaaagccaatctgaaaagactatatactttatgattctaactatatggaactctggaaaagataaaactaaagagacagtaaaaaatatcagtggttaccaggggtttgagaggagagagggagggataaatagataaggcataatgaaactttagattggtgaaactattctgtatgatattgtaatggtggatacatgaaattacatatttgtaaaaaccaatttaactgtaaaacacaaatagtgaacccaaatataaactatggacttcagttaataataatgtatcaatactggttaatcaattgtaacaaatataccacaccaatgcaag

SEQ ID NO: 728937 - DNA, 618 bp, Homo sapiens
acttaaaacaatcttttagccctttaggcacaacaaaaaaacccacattcccatgctttcttataatcttttaccaaaaacatatttcacttttcttacatacctttcatgtaaaactgtttcttcagtaggctcaattacatgttacaatgctaactcttggcgacatttacttttggtgaaaaccttgataagtttgggattttaattatgtactaggggtggagcctaggacccacccagaagtccagataaggtctgaccctttccagcatctaactccatgtgtcccaggctttacctagctgtaaagcaggcaagttgtacagttaagagtcacagtggcattttatgaagcatttaggaggcctaatcacctttaaactgtacaacatttcttgcataaattctctttcataaattatttcatgatttacacagaccatctataatatgctyggactttctgacttgtcctaaacatctctccttttaaacaacctgttattttactttaggacaagaatttaccatataagatcctttcttatgtaagatttcttttctttataaacttctttgcatagctaggtgacatgactaatttcacatgtctcc

SEQ ID NO: 728938 - DNA, 606 bp, Homo sapiens
tagccaaggaaaaagaattaatctaataaggctttttgactctcctggaaaggagcttctgaagatattcccctattaattgtaatgctaaatagcttccttgactgatatgccctcatatattaataacctttcttctgatgatatgtttcaactaggtggaaattgctaccattgtcatcttcaaggtatagcaaatggaggcaattgtctcaaaccccaagactggttcactcaaccccttctcccaccaccacctgctgacaaatgggctgttactcagagaaatttgactcagggagaaaakgagatggctctatcttctgatagtctacagacatgaccatcatcaaaacagagccagtggggcttccatttctaccatgtacccatctcccatctctgcatgaatcaggcctaacttcagctattcagaaatgctggagaggtacaaaacccaccagagctgcctgccttgggtcaaacacctccctaggaatggctccaatcctctccatttattctcaactttttacattttgcatttggaaagaacactgaagtcagtaaactttggtctgtgactgccaccaactctctgtgagc

SEQ ID NO: 728939 - DNA, 629 bp, Homo sapiens
agtcacactcaagcattccaatgctctgtctctattcttgtcctactaaatcaccttctgagaggagattattcctcatcaggaaaagaggagagtaaaatggaatggtaagaaagaaatgtggagtgaaaaaaatgtaacatataaagaatgaaaaacatgtatcaaattatgtgtcaggagtgggaagataatatattttaaaaagcagccaagagataataaagagacagagagargttggaaaattaatgatggtaaatatgaatctacatactcatatgtacaaaatcacttcagtagggtatcttgctaaaatctaacttaatttaaaatctaatttaatatgacattggcccaatttccatgaccaggttaatacaaagtttaatctcagtcatattggaactttctggcctcccctacccctcataccatgaagtatttcaagggacttagaaaatattatgggtagcacctttcatcttcagtccattgtcattaccactgatactattgtccttgctagacttttggagggttcttctatttctttgggcatgtgcgtttctgccaaagttaggtgaccatgcagccaactttccacccaagttctgtcaccttcccca

SEQ ID NO: 728940 - DNA, 606 bp, Homo sapiens
gcaattcagccacatcttcaggctccacttctaattctggttctcttgccatttccacctcatctgcagtgacttcctccactgaagtcttgagcccttcaaagtctcatgaaccatcctctcctagctttttcttctgcaattcctcagctttctcagacttcaaataattgaagataattaggaccttgagctggattaggctttggtttaagggaatcttgcgtctgatttgatgttctatccagacaagtaaaactttctccatatcagcaataagactctttcactttcttaccatttgtgtgcttgctggagttgtgcttttaatttccttcaagaacttttcttttgcattcacaacttgcttaactggtgcaagagggctagttttgagcttatctcagctttcaacatgccttcctaagcttaatcgtctctagcttttgactttaagtgattctttctytcacttgaacacttatagaccatcataaggtcattaattggcctaatgtaaatattgttgtgtctcagggaataggaggcctgaggtgatggagagagataggggaatggccagtcagtgaagcaatcagaatcagc

SEQ ID NO: 728941 - DNA, 479 bp, Homo sapiens
gtaccacttcctaattctatgacactgagtgagttatttcacctctctaggccttagtttctgtctctaaaaaatgagataacaatcacaataggtacctttaagggctatactgatggcagcagcagccagcctggagtgaccactgccatgaagccggctactgtgggggaagtgcggaccaggcagcacgttccatggagccattkgggcgggaggaggcagagccccgtcctcccaggcagactcaagcttccctgtgctcttgggggccaggagcaggcaggagctccaccatcctgagcacagctgcagctacccaagccatggctgtggaccagggcatcttggcactctcaggggcccaggaagaaccccttcccccacaggcttggagacgtctgctccccctgcctggcctctccccactcctggcaccccttccaatctcagagcaaggttggggctgagcctgggca

SEQ ID NO: 728942 - DNA, 538 bp, Homo sapiens
atcactggcctatctacaatgggaggctacatcttttaattaatatacaatacttttcagttcttagttgtaattatcttgtatgttttagatttcacataacgctgatgaaacccactgaacttttaaaagtactctaggatacaggattcacatgtaaatctaccacaataaaatgactttttaccagttattcctccatcccagagcttcattttatgtttataaccttattttaaccttatttattctacttgttatgttaaaattgtacttattttactcctcccaaggttaaaataaggattaaaatatcatttattttcatttttattactttattatctccataaaagtctagagtcactarcttcttttatccatctttggtgctggtataaaaacacatttcttgcttcacgttatgtctttaagcagcatcactttctttgattttccttttccaattaaaccactatctttgaactttttaattttcatggatacataatagttgtgcatatctgtggggtacata

SEQ ID NO: 728943 - DNA, 597 bp, Homo sapiens
tatacctctctttacagctactccctattcagaacatcagaataaagacagaaagaagactgcaaatacagcttcagtttgatttcatactgaaatacccactataggtcctctatagtaggctggttgtactggcaaaacaaaacaaaaattattattatcacattcgttcaatacttaatatgtaccagtcaatgttctaggatttttgtacatgyaatttccttgatgatctcagaactctatcaagttggtagataaagaacctgagtctaagtcacatgcccaaggctggctatacagctcatgaatgaaaggtcagaattcaaacatcttctgtttgactttgagatctttttcttgatcaccatattacaatgcatctactattcataataatatctattatcccacttagatgagaaaactgaggctcaaagctcagtatcctgtcagaagtttttcttctatggagtcatccactgaaaattaaatcaggttcaaaattattaattcagtttctccttcaaatcacccttccaaattacactctgccactaataattgggcagattgggacacccttgtgaagtcact

SEQ ID NO: 728944 - DNA, 599 bp, Homo sapiens
aaaagccccgagttatttttggcccatacagcatccccagtacacgttctccctgtggacacagagcagcatatggctgttcttttcacagttcaggctcttctgtttactctgaacctctaggttacaatatgttttgtaatcactaataaggaccacctgtctcttgagagattctgcctaataaaatagagagactcattgttcaaatccactctcaggtagacaatacaygcctcatgtgtgggccgagattactgagtagaaaacttaaacaaattatgctgattgtaattgccaaattaagaacatatgttagtttcataaaaagaaaaaagaaacagtaatgtttggaacaataaagataatgcttttgaggaaatgaaatacctaatatattttccaggaaaaagaaaaagaataatctacttatttaaaaaattcgttcaatccactaagagatattcaaggcaaatttactgcattccaatatgcctaaccatataccctctttgtacaaatttatactatggttgaattcagccagaaaaactggctctttgaaaacaagcagagttcaatccaataactgactgata

SEQ ID NO: 728945 - DNA, 599 bp, Homo sapiens
aaaagccccgagttatttttggcccatacagcatccccagtacacgttctccctgtggacacagagcagcatatggctgttcttttcacagttcaggctcttctgtttactctgaacctctaggttacaatatgttttgtaatcactaataaggaccacctgtctcttgagagattctgcctaataaaatagagagactcattgttcaaatccactctcaggtagacaatacatgcctcatgtgtgggccragattactgagtagaaaacttaaacaaattatgctgattgtaattgccaaattaagaacatatgttagtttcataaaaagaaaaaagaaacagtaatgtttggaacaataaagataatgcttttgaggaaatgaaatacctaatatattttccaggaaaaagaaaaagaataatctacttatttaaaaaattcgttcaatccactaagagatattcaaggcaaatttactgcattccaatatgcctaaccatataccctctttgtacaaatttatactatggttgaattcagccagaaaaactggctctttgaaaacaagcagagttcaatccaataactgactgata

SEQ ID NO: 728946 - DNA, 623 bp, Homo sapiens
accaaacatgcaaaatttcttggacagaacttgggggagagagtgaatccagagtgcagacacaggcaggcaaggaggtatgaaacctgaaagtcctgcttgctttctcagctgggaggctggtagcctggggcaagttcttagccctgcttgcccactgcctaaaaacaaactcagtgctattgcggggaggcacagtgagagtgagactggccttttggattgcatgggagccgggtgargcctgtaactgtcggctgtcccccacttccctggcaacctacatgacacagcagaggcagccataatcctactggtaacgtaactccattgacccgggaaccacaaacccatcccccacagcagctgcagcaagccctgcccaaggagaatcagctcagacatgtctaaccctgccccaacttgatggtatttctctacccaccctggtagctgaagacaaagatcagattctcttgggagttctagggctccagccactgcctgatcttccctatactaccacggctcatgctctcttgaaagtgccacctcctggcaagaggccaatcagcacaaaactagtgcaataaacaacaataatacaactacgggccctcaca

SEQ ID NO: 728947 - DNA, 623 bp, Homo sapiens
accaaacatgcaaaatttcttggacagaacttgggggagagagtgaatccagagtgcagacacaggcaggcaaggaggtatgaaacctgaaagtcctgcttgctttctcagctgggaggctggtagcctggggcaagttcttagccctgcttgcccactgcctaaaaacaaactcagtgctattgcggggaggcacagtgagagtgagactggccttttggattgcatgggagccgggtgaggcctgtaactgtcggctgtcccccacttccctggcaacctacatgacacagcagaggcagccataakcctactggtaacgtaactccattgacccgggaaccacaaacccatcccccacagcagctgcagcaagccctgcccaaggagaatcagctcagacatgtctaaccctgccccaacttgatggtatttctctacccaccctggtagctgaagacaaagatcagattctcttgggagttctagggctccagccactgcctgatcttccctatactaccacggctcatgctctcttgaaagtgccacctcctggcaagaggccaatcagcacaaaactagtgcaataaacaacaataatacaactacgggccctcaca

SEQ ID NO: 728948 - DNA, 551 bp, Homo sapiens
cagtgagccaatcaaatacacaggactttataggaacagatgcctaagtgtctaaagaaataaaaaaaatatcaaactaggagagatctactcatctctgacaataatttatggatttaacttaaaaagatagcagataatttatttataatggacctgattttctgtaattacatgaactgtcaatgaatattaggccactgtgataratgtgaattgtctatgttactatggtgatttgaggtgtttctattctacactgcacgcataacaatgtggagcataattaaaagacatagtgaaatatattttaaaattgctgtcaattaaaaagcaaaacatagtctgactttagcataatcctttcagaagctggcctatcaaactgatgaaaacaataattattagttaatatattgtcttttcaaatgtatctaaaacatttacaaaaatgattattttctgccaaaatgaaatgctagcaatcatgattttgaaatcttagttcatattctctgaccattatgtgataaaacatgaaattcttaaca

SEQ ID NO: 728949 - DNA, 551 bp, Homo sapiens
cagtgagccaatcaaatacacaggactttataggaacagatgcctaagtgtctaaagaaataaaaaaaatatcaaactaggagagatctactcatctctgacaataatttatggatttaacttaaaaagatagcagataatttatttataatggacctgattttctgtaattacatgaactgtcaatgaatattaggccactgtgatagatgtgaattgtctatgttactatggtgatttgaggtgtttctattctacactgcacgcataacaatgtggagcatrattaaaagacatagtgaaatatattttaaaattgctgtcaattaaaaagcaaaacatagtctgactttagcataatcctttcagaagctggcctatcaaactgatgaaaacaataattattagttaatatattgtcttttcaaatgtatctaaaacatttacaaaaatgattattttctgccaaaatgaaatgctagcaatcatgattttgaaatcttagttcatattctctgaccattatgtgataaaacatgaaattcttaaca

SEQ ID NO: 728950 - DNA, 583 bp, Homo sapiens
aacagctccagtctacagctcccagcgtgagcgacgcagaagatgggtgatttctgcattcccaactgaggtactggtttcatctcactggagagtgtcagacagtgggtacaggacagtgggtgcagcgcaccgagtatgagccraagcagggtgaggcatcgtcgcctcacccgggaagcgcaaggggtcggggaattccctttcctagtcaaagaaaggggtgacagatggcacctggaaaatcaggtcactcccaccctaatactgcgcttttccaatggtcttagcaaacagcacaccaggagattatgtcccacgcctgactcggagggtcctacgcccacggagcctcgctcattgctagcacagcagtctgagatcaaactgcaaggcggcagcgaggctgggggaggggcgcctgccattgctgaggctcgagtaggtaaacaaagcggccaggaagctcgaactgggtggatcccaccgcagctcaaggaggcccacctgcctctgtagactccacctctgggggcagggcatagccaaacagaaggcagcagaaacctctgcagacttaaat

SEQ ID NO: 728951 - DNA, 600 bp, Homo sapiens
gaatattttcttgatcaatttctagcatttaagagattttttgtttcttccagtttgttgtactaacaggaagagatgtgttttgtggaatgtgttgatagtgggggatggctgtcaggtcaggctagactcttacctgtggtaatttgaaatacctttttatttatttgctcaggctgtgataataaatttgtaggtcagtggatccaaaggagtatttgcaaaaaaggaagaaaagaaagaaaaatcgggatgaccttaayagcttttctgcagagctcatgtgtgtgagtgcagtgagggaactatgctgcggttctgtcaatggtggcatgcagaaaagctgcctgacaaaacggggcactgagtgttggcatcctgttgccctccattttctcaggcaggcaatgccaatttgggggagatgaaatattgacgttttggtgaattgcctttcccctccctgggtttacatagcattcactcaatgcagttctgaaggcaaaaggaccactctcactcagcaaataaggaaaaaggcatgatgttctcatctattgccaaacatttcagcatgaatatctccaaaaatttttaata

SEQ ID NO: 728952 - DNA, 577 bp, Homo sapiens
tccacaatgcccagccagagtaagcacacagaaatgttttctactattattctatattatctcctatcatcatattattataacctgttgttccacctttcctatgtggtataacagaaagagatctgattaaaaataaggtggtctgggttcttgctgcagctctacgctgtctttgttaccttgaatgagtcgcttaacctactatatctctgytgtctcatgtgttaggccattcttgttttgctataaggaaatgcctgaggctgagtaatttataaagaaaagaggtttagttggctcacagttctgcaggcttaacaggaagtgtgatgctggcatctgcttctggtgaggacctcaggaagcttacagtcatggtggaagacagactgggagcaggcatctcacatggtgagagcaggagcgagagagtgggtgtgggaggtgccacacacttttaaacaaccagatcttgtgataactcgctcactattgcaaggacagcatcaagccatgaggtttccacccccatgacccaaacacgtcccaacaggcctcacctccaacattgggg

SEQ ID NO: 728953 - DNA, 511 bp, Homo sapiens
tttctcctcctagttccttcccattgagaacagtgggtacaacagtatttcagaacccgccatgatttattcattagaaaacgactacaatcagaactgcctcaacttctcccttcctttcatcttctttcggagtggatcttctttttccttccaataatttgtgtccctgaactgctgtggtatgctggctccttcctaatagatcacgtctgaaacaaaactatcaaacaaaatattggacaagaaataaaccatgacaagatggcaaaggaggctgttttcactttagggagaycatccagttgtcagtaagttataaaataaaaataaatacagctcagcatttgggtgcacaaatcacagactctcagtaggtcatttaagtccttgtcactgcctgaggattcacaagcttggcaggaccctgtgatggaggctgccacgctcctgacccctggattccagtcaaaacagaactctttatctttttaagcccttagccattagg

SEQ ID NO: 728954 - DNA, 478 bp, Homo sapiens
taatgggttcatccaaagcttcatatgaatacaatgttttttatcatcacatgcgacgatctttaaatataatttctacttctaaggctgtgggtatttaatttgtagttttgcggcagtttttcaaatacgagactctaactccttgaagatctctggtacctccctgacaggctttagtgacagtgttcatgtgtatgctcttattttgaaataactgtactgaataaaataatttatttttacaaaatagtgtacaacaatttggtaaaaatgtcttcccagaggtccagaagtttccacacagcacccagagtgcagcatrttatctgaggggaggccgcaggcaggggctccaagacagacaggccaactggtcacccacagcaggtcccagccttgtccccacccaggcccctcttctctccctcactggcactgctggcatgaatgctcctgatgccacctcacaggcact

SEQ ID NO: 728955 - DNA, 386 bp, Homo sapiens
actctagcagtctgtggtcagccccagtactattattcaaaccttgttattctcacatttttcttcccaagggtggtcaggcgtcccgcctattcaagagtgatgggtgtgtgagccggaatctcattccctttctctccagcccrtgtaccccatgctcctagcacacacagtttccaccatgccctaaccaactgaggctcggggcaccttgataatttgcacacgctgttccagctgcccagaggacccatcccctactccttacaacaccctagtaactcctaaagatccagaatgaatcccatctcctttatgtctcaagccctttagtctcttcactctcagtctctcatggcatttgccatggtctaggttagatcatg

SEQ ID NO: 728956 - DNA, 386 bp, Homo sapiens
actctagcagtctgtggtcagccccagtactattattcaaaccttgttattctcacatttttcttcccaagggtggtcaggcgtcccgcctattcaagagtgatgggtgtgtgagccggaatctcattccctttctctccagcccgtgtrccccatgctcctagcacacacagtttccaccatgccctaaccaactgaggctcggggcaccttgataatttgcacacgctgttccagctgcccagaggacccatcccctactccttacaacaccctagtaactcctaaagatccagaatgaatcccatctcctttatgtctcaagccctttagtctcttcactctcagtctctcatggcatttgccatggtctaggttagatcatg

SEQ ID NO: 728957 - DNA, 541 bp, Homo sapiens
cctaatattaaccatcgcagtcaccaagttccctgcctcctgtaagtggtaaattaggagtatcaaatatggttgtgtatctctataaacagttcattccacagattatcagtgttgtctgtactattagacacatagtcttaggtatttttatgtctaatcagattagagaattgaaaccccaaaaccaataaagaaacttcattcttaaaattttcttcctctacgaccactactagtaccaaagtattagtcaagattgtccagagaaacagaaccaataggataaatatatatggggattttttttagaggaattggttcatacatgtataaaggctgagaagtcccatgaaagaccatctgtgggttgagacccgggataccagtagcatggwtcaatccaagtctgacggcctaagaacccagggggctgctggtataagtcctggagtccaaaagccaaagcctggagagcctggagttttgatatccaaggagaagaagaatgtttcacagctccagaagagaaagagagaga

SEQ ID NO: 728958 - DNA, 572 bp, Homo sapiens
ctgacttaatgtgccacattgctattcaatagttcagtccaccagaacagcatcatgttaaggaggacacaaagtttattgaacacttacgtgatgaaaaaataaaatttgttgatctatgtggagagctgctctgtactaggggagggaataaaatttgaaagtgtttatagttaagagcgggttttaaccccattgaaactcctgtgcttggttccttttcacttctgcaagtttsatctatgttcaagaacttttcttactttcaaaaagctagtgtaaattgactgaaatggctcagctaaaatttctttgaagaagaccatttatgtctagaaaaagagatttagatagaaaaaagagacttagaggctatataacctcagtaagctgctgcactaattctaaggattgaaattctcaaaccccagcagctcagaaatccttcccttgggctgacgccctgcaaagctccagggcacagctccacccctctctggggtgttgtttcaggcctggttggtgctggaccttgagtgatcttcctgggtacatctagtgtccaatggagg

SEQ ID NO: 728959 - DNA, 528 bp, Homo sapiens
aaatcctcgtctctgacataacatactttaaaccaacaaagagcaaaaaagacaaagggcattacataatggaaaagggatcaattcaacaagaaaagctaactatcctaaatatatacacaaccaatacggaagcactgagattcataaaacaagttcttagagacctacaaagagacttagattcccaaacaataatagtgggagaccataacaccccactgtcaatattagacagatcaatgagacagaaaattaacaaggatgttcaggacttgaactcagctctgggtcaaatggacctaatagatatctacagaactctccaccccaaatcaacagaatatacattcttctcagtcccacatggcacttaaaatattcttaaaatcgaccacataattggaagtaaagcactcctcaggaaatgcaaaagaastgaaataataacagtctctctgatcacagtgaaatcaaattagaaccctagtttaagaaactcactcaaaaccatacaaccacatggaa

SEQ ID NO: 728960 - DNA, 528 bp, Homo sapiens
agtaatatgagaattatcaacaaatttaaaacattttatgctctttttattacattcagaactatagattaagtgtctctaatacattttttctctctttgcaaacttcaagaaagcaggaattatgctgtattacaagcatcaataaatgttgataatgttgtgattttaaaaaatatatatgattttataagtaygtttctttagcactctggttcatacttaaaacttctcttttacccatgggcagttgtcatttttttcaattattagtattcaacaaatgtttatattgtgctcactatatactaagtattaatacttcatatactgacttacttctcatggaaactatgtaaggtgcatgctcttattctccgtttatatgagtaaaactggagcacagagtggttgggtgactagtgtaaggtcacatagctagcaaatggagtatatgggatgtgaatctcaaccgtgtgaccgaaccattcgtactatgctgctcctccaataatgacctcaattaag

SEQ ID NO: 728961 - DNA, 528 bp, Homo sapiens
agtaatatgagaattatcaacaaatttaaaacattttatgctctttttattacattcagaactatagattaagtgtctctaatacattttttctctctttgcaaacttcaagaaagcaggaattatgctgtattacaagcatcaataaatgttgataatgttgtgattttaaaaaatatatatgattttataagtacgtttctttagcactctggttcatacttaaaacttctcttttacccatgggcagttgtcatttttttcaattattagtattyaacaaatgtttatattgtgctcactatatactaagtattaatacttcatatactgacttacttctcatggaaactatgtaaggtgcatgctcttattctccgtttatatgagtaaaactggagcacagagtggttgggtgactagtgtaaggtcacatagctagcaaatggagtatatgggatgtgaatctcaaccgtgtgaccgaaccattcgtactatgctgctcctccaataatgacctcaattaag

SEQ ID NO: 728962 - DNA, 617 bp, Homo sapiens
cttacccagggcaagcctggagtcctacacaaactctgcttggaaagagagtttaaatgtagggtgaaattgttggcaaggatttttctttcgcctaatttttcagtgcaatagatgaaagaacaggtttagtgcggacctaataaaagaagccttagatttggaattcagtctgcaagagtagagagtgatttttytggaatagcagtctcctggccatgcgagccatccaggaaaacacagcaagtataatcatttcaaggccatcatgtagcaaatcacaggaaccagtgttcagcctaagacacacatgtgtcctgataattggggttgtatgggaaaggagatgcagtccaggaccacggatagaaagatctggttaaactagcataaacaacatgcattccagggtgaatcctgccacattcctctacaggccatgcttaaccagttagcatggttacgttacaaaaaaaaaaaaaaaaaaaccacaccttttgcttcatctctggcataacaatgtgttcaagaatttaaaagatgtgtatgaggaactgaggactagcagtagagcttctttgtctagacttcagactctgaaaaaactcgttaataag

SEQ ID NO: 728963 - DNA, 572 bp, Homo sapiens
gctctagtggttttccaaatattttcattatgtgatagaaaatggctttctgctcagtacaccagataaatctggccatgaacttacttgcagggtaagtgaaaggtgttggtctgtgcttttattgctctatttatagaataatggctaaacctaacattaccttataacccatgaataaattatatagtcttatattttttaaaatcggatttcttgatagtgtgagaaatgaaactatgctatagccctaaccatagacaactatctcytctctgtaaaatctgagtaacaaccttacaacagaaagatctgagctcggggttcccagttctgaactcttaaaactgggtgcaactttgtccacccttgttctgctattgttcaaggaggtaaaaggtggatatgagaaatcttctctactcaaaaaattgtcctcctcatagtctactaattataaataggtgtaagttgagctctttgttatccttagagttaaaaaaaatgcaaagtaataatattgtaaaagtttggaaaaggaagacaaattcagagaagaattaattggattg

SEQ ID NO: 728964 - DNA, 454 bp, Homo sapiens
tgttagcaaaaatgtggagaaattggaacccctcatacactgcttgtatgaatgtaaaatggagcagtggctatagaaaacagtttagtgattccttaagaagttaattacagaatttccatttgacccagcaattccactgttaagtatatatccaaaagaattaaaaacaggtattcaaacaaatatttgcacacaaatgttcacagcagcactattcacaatagccaaaagttggaaacaacccaawtttccatcaacagatgaatgggtatggttaaacaaattgtagcttaaccacacaatgaaagagtattcagccattagaaggaatgaagttctgaaatatactacgatgtgtatgaaacttgaaaacatgctaagtgaagaagccagacacagaagttcacatattatatgattccattcatatgaaatattcagaataggcaaa

SEQ ID NO: 728965 - DNA, 663 bp, Homo sapiens
tttgcagatcttaggcagttccagaaaaagtgggatctttttcaggaaaagagaggactataattggatgctagcctgctgaagttcatcccaggaggaggcttcgagaaacctgaaggtcaaggaagtccctcaatttcctcacctgcggaattcatactggtttgagactggttggagctacgtatattgagggaagcaggtaataggtgctccacagatgtgcctgtccaggttgtatgtcaatcaatattatcttgataacttgagaccatctagaagcactatgttcttttgcaaagcaaaaattgtatgcctggtgtatttattttgcaaaattagatgtctttgcatagcaaacacagtgctttgcagcagtcagtgatttggggcctctaataaatgkggtcatcttttttcattctggtgacactatcatgtttagagggaaataaatttggtcaatgcatttttaaggtaggaaaaattttcattctttgaaattcagccacaatcctgttcataaagatggcatcttggttagaactttactgggtgccacagggggtggcggtaaattctgaacctgaattttctctgttaatcatcacaatttctccctcaccaaacccagcaccatttgcttattctcagtgggaagat

SEQ ID NO: 728966 - DNA, 663 bp, Homo sapiens
tttgcagatcttaggcagttccagaaaaagtgggatctttttcaggaaaagagaggactataattggatgctagcctgctgaagttcatcccaggaggaggcttcgagaaacctgaaggtcaaggaagtccctcaatttcctcacctgcggaattcatactggtttgagactggttggagctacgtatattgagggaagcaggtaataggtgctccacagatgtgcctgtccaggttgtatgtcaatcaatattatcttgataacttgagaccatctagaagcactatgttcttttgcaaagcaaaaattgtatgcctggtgtatttattttgcaaaattagatgtctttgcatagcaaacacagtgctttgcagcagtcagtgatttggggcctctaataaatggggtcatcttttttcattctggtgacactatcatgtttagagggaaataaatttggtcaatgyatttttaaggtaggaaaaattttcattctttgaaattcagccacaatcctgttcataaagatggcatcttggttagaactttactgggtgccacagggggtggcggtaaattctgaacctgaattttctctgttaatcatcacaatttctccctcaccaaacccagcaccatttgcttattctcagtgggaagat

SEQ ID NO: 728967 - DNA, 536 bp, Homo sapiens
tggcttcatccctaggagctaaactgacctgagaagatgcaggagctagttattatcccttcactgacctcagggtctacagcctaagtttctttcaacagcctgtgggcaagcaactaggacttgcaaaccccagctgctagtcacsagctcggtaggaatgaacatttctgtaggagcttgtgaaacacaccagtaatttgttgttggcttcccagtgtatccgtcactctgtcagctgtcatgtgcctgtgcctccagaatgacagtcactgactcaagttttcagacacatgaggtaaagtcaggaccaaggccgagacactctccaaaggacaggaattgctggggcaggcaggatttgtgctgggaaagtcatagggggaagtgagctcctggacacacatgacaatattgtgacctatctacggcttcacagtgagtgcagcctaggttgaatgtacaaattggttatcaatgccataatcagggcttgattaagagatacaggaatttgccctgtgcttatgagtagc

SEQ ID NO: 728968 - DNA, 625 bp, Homo sapiens
ggggtaattcttttgtgggggcggggagagggatcagtgccccaggtgcccattcttctgagtaataatgatgtcatcatgacagccctgttaaaattccctggtggcagttttgatctattgatcatctccatcagattcccaattccgattggggcactttctctaatgatctggccaaaacatccccaggggctagcatggtgactgctaatgtttggaactgccacacattgcttttttttaatttttatttttctaattagaaaagcaatttctttttttattaaaaaatttgcatacctrcttctctctacatctgctaaaatgttaaaggtaattagtatttttttttaaacaaattagaatgtgattggttggagattttatgttgtcgttgttgactgttagggagatgtggagtttcctcaaaatgtcataaagtcagtgtgggtaatcttattaccagggaggcttatgaaggaacgggagagcgagagagaaagatgatgctcagagcaattgtgaggaagctggaaggagctatttagtgcagtgcctggaggggagagacatctcacttcttcctatgtttacaaggggcagctgaatggtgaacaggact

SEQ ID NO: 728969 - DNA, 625 bp, Homo sapiens
ggggtaattcttttgtgggggcggggagagggatcagtgccccaggtgcccattcttctgagtaataatgatgtcatcatgacagccctgttaaaattccctggtggcagttttgatctattgatcatctccatcagattcccaattccgattggggcactttctctaatgatctggccaaaacatccccaggggctagcatggtgactgctaatgtttggaactgccacacattgcttttttttaatttttatttttctaattagaaaagcaatttctttttttattaaaaaatttgcatacctgcttctctctacatctgctaaaatgttaaaggtaattagtatttttttttaaacaaattagaatgtgattggttggagattttatgttgtcgttgttgactgttagggagatgtggagtttcctcaraatgtcataaagtcagtgtgggtaatcttattaccagggaggcttatgaaggaacgggagagcgagagagaaagatgatgctcagagcaattgtgaggaagctggaaggagctatttagtgcagtgcctggaggggagagacatctcacttcttcctatgtttacaaggggcagctgaatggtgaacaggact

SEQ ID NO: 728970 - DNA, 525 bp, Homo sapiens
ctgtggtttgggattggggattacaccatcagcacctcctggttctccagcttgcagactgcacattgtgggacttcttggcttccataattgtgagccaattcccacaataaatctcctcttatatatctatgtatatagcctactgattctgtttgtctggagaaccctgactaatcaaaattcaaaatactttgcaaccaaaatgggaygggtaccgggtgatcagaacagatgtaaaccatagacgcccagtacagtcacatgagtgctgaatatcattgttaaagttagtcatcatcaccactttggatgatcattaccaacatttgtcgaacacctctttgtgtgagagacgatgccagcagaaacaactcatttaattcttgaaaacttctatgagttagtgccattatttccatttgagtcatggggacaccaagcctctgagagatagtggcagaggtgggattgtgcccagttcctgtgactatttgagttcatactcaagcacatgctattttg

SEQ ID NO: 728971 - DNA, 621 bp, Homo sapiens
tggcaggccaaggtagggggtcttgattccatcctaagggtaacgaagaatttcacttatgtcctagaattttcttaggaccagaggcaaagtttctcctatgcacttaattgaagtggaagcctgaaaaccattggcctttggtgaccggtaactcagctttcaagctaacagacaagtactcctctgtgttaaataagcagacctgctgcaagaggcttccaagttgacacaagccacacttgtcataggttaagctgggagcagcttcagttgcacaggtctcagagttttcattttgtggtagcaaggtgatrcactagtgcatgccgggggctgctcactcacccctcatgcctcaggagggcaacaggctgtgttctcagaccttagatcacctttctcagcgtgatgctccattagcagaagcccttttgtgagcgcaaaagagcagccttggaacagaagaccacacgtggcgttcacagtgacaatgctatcaccttacccctgcttaaacacctcagtggcttccccttgcctgtaacataaagatgcacatctggggcccctggcttttctaaccatgtgtccttgttttctgtgctctgctcagtgtct

SEQ ID NO: 728972 - DNA, 588 bp, Homo sapiens
aaggctgcagtgaacacgagagtgccaatatctgttcaggataaaaattttatttcctgggccgagtgtggtgactcacgcctgtaatcccagcactttgggaggccaaggtgggtggatcacctgaggtcaggtgtttgagaccagcctgggcaacatggtgaaaccccgtctctactaaaaatacaaaaaaattacccakgtatggtggcgggcacttgtaatcccagctacttgggaggctgaggcaggagaatcgcttgaacccaggaggtggaccttgcagtgagccgagatcatgccattgcatgccagcctgggtgacaagagcgaaactccatctcaaaaaaaaaaaaaaaattatttcctttgggtatatacccagaagtggggttgctggatagtaaggtggtttgaggagtctccatagtgctttctagctttctttgaactaacctcctccccttcttgcaaccggagacacacacagcccccaggcctactaattcctgcaaatgcttgtctgccagcaggtggctactggtccctcatgttcagtttttgcttagcttcagcgaagacatccct

SEQ ID NO: 728973 - DNA, 588 bp, Homo sapiens
aaggctgcagtgaacacgagagtgccaatatctgttcaggataaaaattttatttcctgggccgagtgtggtgactcacgcctgtaatcccagcactttgggaggccaaggtgggtggatcacctgaggtcaggtgtttgagaccagcctgggcaacatggtgaaaccccgtctctactaaaaatacaaaaaaattacccaggtatggtggcgggcacttgtaatcccagctacttgggaggctgaggcaggagaatcgcttgaacccaggaggtggaccttgcagtgagccgagatcatgccattgcatgccagcctgggtgacaagagcgaaactccatctcaaaaaaaaaaaaaaaattatttcctttgggtatatacccaraagtggggttgctggatagtaaggtggtttgaggagtctccatagtgctttctagctttctttgaactaacctcctccccttcttgcaaccggagacacacacagcccccaggcctactaattcctgcaaatgcttgtctgccagcaggtggctactggtccctcatgttcagtttttgcttagcttcagcgaagacatccct

SEQ ID NO: 728974 - DNA, 648 bp, Homo sapiens
ataagcaagcttgttagccaaatttatcttaggtaggtcaaatttttatatgagagtgttgtaattttgtatgtgttggctgtatctttatagtaaaggaggaccccttggatcttgaataatcaataagtgtagaatatatgtgtgtaktttatcacccaattttattatttcaaatgactgcagaagttgacagctgaacctttggttttttgacatgttcttgatgaacctgtgatttatcttatactgagttcttagtcgtggttacaactcccaagctgactttttctttttgtaggagacgtacactatgataaaatgcctaggaccacttgggggagtcgggggaaactttccctcagtctgaacttttttttttcagtctgcatttaacaggcagcctctgttaaatgcattgtgcttactcatgtggaccactgatgagatttaatattgcccggcttcctgcttatgaagttcccatttgaagagaactattccaatgagaacaaggcacggtagtttcagagatcaatactggacttgttcctgatcaatatggaactatttggcaattttctcatatagaatgacatttcctcttgtaatctgaggcaaattcaactgaaatgaaaaaaggcaatt

SEQ ID NO: 728975 - DNA, 648 bp, Homo sapiens
ataagcaagcttgttagccaaatttatcttaggtaggtcaaatttttatatgagagtgttgtaattttgtatgtgttggctgtatctttatagtaaaggaggaccccttggatcttgaataatcaataagtgtagaatatatgtgtgtattttatcacccaattttattatttcaaatgactgcagaagttgacagctgaacctttggttttttgacatgttcttgatgaacctgtgatttatcttatactgagttcttagtcgtggttacaactcccaagctgactttttctttttgtaggagacstacactatgataaaatgcctaggaccacttgggggagtcgggggaaactttccctcagtctgaacttttttttttcagtctgcatttaacaggcagcctctgttaaatgcattgtgcttactcatgtggaccactgatgagatttaatattgcccggcttcctgcttatgaagttcccatttgaagagaactattccaatgagaacaaggcacggtagtttcagagatcaatactggacttgttcctgatcaatatggaactatttggcaattttctcatatagaatgacatttcctcttgtaatctgaggcaaattcaactgaaatgaaaaaaggcaatt

SEQ ID NO: 728976 - DNA, 635 bp, Homo sapiens
aagcatattaaacctggagggcatttgggagatcatgtggcaaaatccctccattttatgaagggaaaatgaagcctggatcaggaagtgatttgcccaaagccacatggtcactggtagaactgggttaaaaacccatttgtcttcttactttggtactttctcctttggttatatcatctaggcccccagtgcagattttcttcatagcaaatctagggtttaccatcccccgtccctgccaataccactgtctgtaaaatatagactcctcctcaagttagtttccctcctgttgaggcaaagattggaaaagtgtaattagaccaacaacactcagctttattaatgagyctttcaagatgctgcctgcttcccatgtgtgggactggaccaaatgggacagttgcccaataagagcccaaggaaagaagaatgtgagggatgagtcaatcctgggcatgtgcttactcaacctagactagcacatgtagttggtgggagaacttgaactgtgacagggaggatcaaggttacagctaaaaattagcgctgaatgtcaagttcaaaaggtgaggctagggatgaaattggaggatgaatcatgaagttgaagccaaaaggttcaagaaaag

SEQ ID NO: 728977 - DNA, 635 bp, Homo sapiens
aagcatattaaacctggagggcatttgggagatcatgtggcaaaatccctccattttatgaagggaaaatgaagcctggatcaggaagtgatttgcccaaagccacatggtcactggtagaactgggttaaaaacccatttgtcttcttactttggtactttctcctttggttatatcatctaggcccccagtgcagattttcttcatagcaaatctagggtttaccatcccccgtccctgccaataccactgtctgtaaaatatagactcctcctcaagttagtttccctcctgttgaggcaaagattggaaaagtgtaattagaccaacaacactcagctttattaatgagcctttcaagatgctgcctgcttcccaygtgtgggactggaccaaatgggacagttgcccaataagagcccaaggaaagaagaatgtgagggatgagtcaatcctgggcatgtgcttactcaacctagactagcacatgtagttggtgggagaacttgaactgtgacagggaggatcaaggttacagctaaaaattagcgctgaatgtcaagttcaaaaggtgaggctagggatgaaattggaggatgaatcatgaagttgaagccaaaaggttcaagaaaag

SEQ ID NO: 728978 - DNA, 635 bp, Homo sapiens
aagcatattaaacctggagggcatttgggagatcatgtggcaaaatccctccattttatgaagggaaaatgaagcctggatcaggaagtgatttgcccaaagccacatggtcactggtagaactgggttaaaaacccatttgtcttcttactttggtactttctcctttggttatatcatctaggcccccagtgcagattttcttcatagcaaatctagggtttaccatcccccgtccctgccaataccactgtctgtaaaatatagactcctcctcaagttagtttccctcctgttgaggcaaagattggaaaagtgtaattagaccaacaacactcagctttattaatgagcctttcaagatgctgcctgcttcccatgtgtgggactggaccaaatgggacagttgcccaataagagcccaaggaaagragaatgtgagggatgagtcaatcctgggcatgtgcttactcaacctagactagcacatgtagttggtgggagaacttgaactgtgacagggaggatcaaggttacagctaaaaattagcgctgaatgtcaagttcaaaaggtgaggctagggatgaaattggaggatgaatcatgaagttgaagccaaaaggttcaagaaaag

SEQ ID NO: 728979 - DNA, 529 bp, Homo sapiens
cctgatggatggctaacacaggggtatggagcagcctgcacccctgccttctcatcctcatgccaacatcaaccccaaatgctcttgtcacccagtgccaccagttagcatccaacctattcttcttcttcttcttctttttttttttttgyttgtctgtttgcttgagatagggtctctctgtgtctgccaggctatagcgcagtgaagcgatcatagctcactgcagcctcgaactcctggggtcaagcaatcctcccacttaagcttctcgagtagctgggcaacctgttattcttgagggcaataatcaacagtgaatgggagggaggaaaggcaagcagggaggcagagactgtctgcttctactgcagcctgaggagggaagataatgaatcatccctctcgtaagctagagatgaaaggagggaggttcttaaaaccctaatgaggctcagcacacaaagaccccaagccttcctgccctcacagtcctggtttgtgaggcttcaaaaagcaggggagggag

SEQ ID NO: 728980 - DNA, 505 bp, Homo sapiens
atggacaaaatgtattataaaaatatcaactctcttcaaactgacctataagattcaatgcaatcctggagaagcacttccaaaacggcagagtggagaccccccaaaattcattcctccataaaagcagtgagaacactggcaaaaaaaataaaaaataaataaaataaaaacctttttagaactctgtaaattaaccaaaaacttgcaacaatctcaggagcatttattcaagaaaaaatgctgactctcartaagaacagtgagttctgcagcatttttaacttcccctgttctcatctccctctccccagctctgaggtagacttgaaaatcttacaaccatggtagctgtgcaaagcagcaatgttgcagccactggaggaggcaggtggttttggggcacccccaaaggtcccatcccagagaactgtcactatttgactgcgctggcaattccctggaaaagccccattcacagatgtttttatttgacctgactcag

SEQ ID NO: 728981 - DNA, 630 bp, Homo sapiens
aaacatccaaggatccctttgttttaaaatataggttgtgttggctgggtgcagcagctcatgcctgtaatcccagcactttgggaggctgaggtgggtggatcacctgaggtcaggagtttgagaccagcttggccaacatgatgaaaccccgtttccactaaaaatacaaaaaaattagccacgtgtggtggtgggtgcctgtaaccccagccattcggaaggctgaggcaggagaattgcttgaacccaggaggtggaggttgcagtgagccgagatcttgctattgcactccagcctcagcaataagaccaagactctgtctcaaaaaaaaaaaaaaaaaatgtaggttgtcttattattcaggtaatgccgaggacagcagatcaggagacaactaccattgaaaaaagagtttgctactcacagttmcggagtggaagggacatgccatgccacacagggccacacgggggagcccagggttgggcaagaggcagaaggaacaagaggaaatcagggcaggggccttaactatggtttcggagggaaaggcaggcaaggcaaggtttaggattggcaagtgtgagtaattttggcgggctccaaggtataggggatttctctag

SEQ ID NO: 728982 - DNA, 630 bp, Homo sapiens
cattattaactatagtcaccctaatgtgcaatgaatctcagaaaccgtattcctcccatctaatgaaaacttcataccctttgaccagcatctccctatttcccccaacccccaagtgtgtgtgtgtgtgtttttttttgagacagagtttcgctctgtcacctaggctggagtgcagtggtgcgatctcggctcactgtaacctccacctcccaggttcaagcgactctcctgcctcagcctcccgagtagctgggactacaggtgcacaccaccacgcccagctaattttgtgtattttagtagagatggggtttcaccatgttggccagaatagcctcgatctcctgacctcgtgatccrcccgcctcggcctcccaaagtgctggggattacaggcgtgagccaccgcgcccggccagtttccaaaaggatgatgagagagatctcctgaggaggtgccatttgagtgggaacctaaaaaaggcccgacagcaagccatgcggtatctgcaggaagaacgctctaagcaaagagaatagccaagtcctgagttgcaagggtgcccagtgtttttaagggacagcgtttggggtgcaatgagtgggggacactaggaagatgttggg

SEQ ID NO: 728983 - DNA, 646 bp, Homo sapiens
tctctgtttccctgcagtcagcaagggtaaacccctaaaaattaaagcgacagcctggggcagaggagcagggaggggctgtgtgtatgtgtgtgtggagtggggagtgagagccgcaggagtggaaatggattgaacttgaacttcgtggagctcaagctccaggacctctcacrtgtacaggctccttccaaagttctagaggcttctaacaatgtgtccatgtggtcacaggttgtcagaaaatttgcaaaggtcagatatttttatattcttttgcttaacgatagccctctccccagccctatgagcttagcctccatcaaaacctgggtagcaggcaagaaagaaaactaccatttattgaccacctactatgtgccaatacagtgctaggcctctgaatacattatcttcattgaggatcccactgtcccttcagaaaagtggttccattgttattattcccattttgcagacaaggcaagtagagccagggtcctgggaggataagtggcctgcgcagggttgtaaagccaatgggagatagctttaatccaggtctgtctcattccaaaggccaaggacagcctctcagaggaagcgacatttgagctgagacctggatgagaaggagccagctatg

SEQ ID NO: 728984 - DNA, 646 bp, Homo sapiens
caagtctctatagcaggtcttagtaagttagtaatgtcagtcttctgactttgttcttcttcaatgttgtgttgtttattctaggtctttttcttttcatataagtgttagaatgagtttgtcaatattcacaaagtaatttattggagtcttgatagagattgcatcgagtctagagataaaactaaaagaactgacagcttaacaatagtgagtctttctatacatgaacatggaatacctctccatttatttagatttctgtagatttttttatccattttattgttttctcatataaatcttgtatatattttgttagattcatatctgattatttcattttttggtgctagtgtaaatggtattgtatttttaattcaaattccaattgttcattgctggtatataggcaagcacttgacttttgtgtatttatcttgcactctgaaaccttmctataattgcttagttccaggaatgttgttttttgtcattgttgattctttgggattttatacatagacaatcatgttatttggtgaacagaaacttccttcccaatctgtatacctttcatctccttttcttatatttttgctttacgtaggacttccagtacgatgttaaatatgagtggtaagtg

SEQ ID NO: 728985 - DNA, 606 bp, Homo sapiens
aataatggagacagaaaaaaagtggaatgatttcaccgaatgctcatcacatgcaggagtttacagttgctcatgccttgtaagtgcaacccagaagcagggcactggtttcccaagtttaccgctgtgttcccctaatggtgctcagcacaatgccatgcacattttaagtatttaacatacgtcagtttgttagactgaaattgtccctgaaaagatttaggtaagtccctggraagaatgtccaaggaagtggacagccagcgtgggtgctgtgtgaagcagtgaattcctttggcggcttgtctgggagactctttcatttgccacaggggttgggtatgggaggtgagccctcaccaggaggttgccaatgactaagaaacactagaatggtatgagatcaccttcccttttcccgcccacctcaaaggaataaatccacctctctaacaggtattagcaagttccctgtgtattttgtgtctagtcctagttttcccaggatcagagaaagcacacatacatgttctgccaatgcaaaggagctcaaaggataggcctgccaagagaggtcggcggatccagagctaatctcttcctttc

SEQ ID NO: 728986 - DNA, 444 bp, Homo sapiens
actacttccctcagacactgacaaccggccagaggtggaatcgcgggaaaccttaaacccagggaagaagtgactttaaaggaaacaaagcgttcgcccccgccgcttgggagaaggggctgggatagagacaaagcccgaggaaaacaccgaactaaagttgggttaggagcgggggaggcatgggcaggacccgagagaggcaactggaacccakagtgcgcgagcgcggaggaggtgaaggccctgtggacgcagcgccgggagagcctcagcgggccgggataagaggggcgcccctcacctcgactgggtagagctcgcgcggcagcaccgcctgcaggtccatgaacagggtgatggggatgtggctgaggaagtagaggcccagcagccactccacgcagcgcctggttgccggagcccccatagtctgtcggttgg

SEQ ID NO: 728987 - DNA, 526 bp, Homo sapiens
gcggcatggtgggtgaatttttctaattgtcctgggtcgtaacagttcaccttctcagaacagtttggactgtttccccaaccatgtcacataagctttggctcacaaagtagctcacctctcgcctctccactcttcaagcttagtaagaagattccgcagcttagtcccaaaggtcaggcagttttctctcctgaaaaactctgtggacacacctagagaggtcactgtctgcccacctgccttagtaatgctggtcctaaaactcatctccaaggacatctttcacaacttctccatctaagaaatgaccttgaccttcctacctttgggtttgttttttttctattcatgaccaygtgtttcttccaatcccataataacaatttttatagactgtatagcagagccttgtcaacggctttttgaaaatccatcaaagttctatcagatgcagatctgtgtgtttattcacctgcagggactccggagctcatttgctctgcgtcttcctatccccctcccc

SEQ ID NO: 728988 - DNA, 596 bp, Homo sapiens
caccacacctggctttttttttttttttagttgagatggggttttgcatgttgcccaggctggtcttgaacgcctgggctcaagcaatctacctcccttggactcccagagtgctggatacagaagcaagccaccacgcccagccgcaaaaagtaaacgtatgttgacagacttttcaaatmatcatctttgttattacaccaaaatttgataagtgttagtttcttaaagttacaaagtgaaatttgaaaccacatcaatgagcttttcctgtgttaaaacccactagtctaccttgcactttttttttttttttttgtgacagtcttgccctgttgcccaggctggggctggaatgcagtggtgtgatctcgacttactgcaacctccgcctcctgggttcaagtgattctcccgcctcagcctcccaagtagctgggattacaggtgcctgccaccatacccggctaatgtctatatttagtagagatggtgtttcaacatgtaggccaggctggtcttcaactgctgacctcaagtgatccacctgcttcagcctcccaaagtgctgggttacaggtgtaagccactgcgcc

SEQ ID NO: 728989 - DNA, 580 bp, Homo sapiens
tacagacacaagagcctcactctaaatgtctgaaaatcagaaagattcccttatgaggtagagtctggaagtcaaatacttaaacccattttctttcttaagtgttggagacacgtcaccaactctgttggcatacaatcaggtagcagaccaaggacatctaaattaaacttgaaggagaaattaattagaagaaaatggagggacatgcaaatttaagatattttgggaaaaatccctaggaactgaactaagtcttactccagaaaagaaaatcaacaaagacaaataatgttttccagagacaaagttgcaaaacagataagtaccaaagacactttttaccatagctattctgtgtgtcagcataagggctggtggtgacatcggctgaacgatgaggaaagcgggctgagatttggtgagacacagaatagccatmttcatatgaggcttctgtgggatccagagagattttggcacactcgatcacaacatcatgagtttctaatctcttccacctgtaaaatgcaatgaaagtcaagaaatgcaaactgtaatcaactgaattaaatacttc

SEQ ID NO: 728990 - DNA, 634 bp, Homo sapiens
ctgccggtttcagccgactgtggtggatccaagacataacacctgcaactttaacagcaacgggagtggacaagatgacagtacagggcccaccccatatgggtcctagagaagttggattccactttttaacccaaacagagtctccagatttaaaggggcrcactggtctatcaggcttacaggcatcctttcttgtacccagccatggacctcttgcatggctattcctaaagcctgcatttgctttcttaaggttaattcctctagttcctggagatcacctttaatttgacctatgatttggggttggccaactgaacaaaacctcatagggtaaatactcagtttgtttggtgggggtgcacctgtctcggaggaggaccataggcaaaacctgaacttatctcagatgagcttcctggcaatatttcttcagtagctgcttgagtgtccacttcatgcgttccacttttcctcaactatgcagccaataggctgtgtgtaacttccattttatttttaacagtcttgttaaatctcgtactatttcagctacaaatgccggcccattgtctgactgtaaagatagaggcagtccaaacctggggataatatcttttaacagtacttt

SEQ ID NO: 728991 - DNA, 550 bp, Homo sapiens
ccagctacttgagaggctaaagcaggaggatcccttgagcccaggagttcaagactgcagtgagctgttattgtgccactgccctctagcctgggtgatagtgagaccctgtctcaaaacaaacaaaaaaacccctaaatctgtggactctgggtgattatgacatgtcaatgtaggttcataaagtataacagctgtaccccctggtgggggatgttgataatgggggagactgggttggggcgaggacatacgggaaatctctgtaaccttcttctaattttgctgtgaacctaaatctgctctaaaaatgtatatatataaaaagtggggccttcctttccctctcccctgccccagccctctcccccacctccttcctctccctgctgcctcccctctgccytcccctttcctccttagccactgtaaatgacactgcagtgaatatcctggagcacaaagggcatgtctcccagttcagaattacctcctttatttagggcaggttctcagaactagagtagccgggcaaaggtctgaggcaaat

SEQ ID NO: 728992 - DNA, 541 bp, Homo sapiens
gaggatgcaggtggatccttatcttacaccatatacaaaaattaaattaaggcaaaatggatcaaagacctaaacataagagctaaaactataaaactcttagacaaaaacataggggaaaagtttcatgacattggatttgcaatcatttattgatataaccccacagcaccggcaacaaaaacgaaaacagacaaatragactacatcagactctaaaacttctgcccagcaaaagaacttatccacagggtgaaaggcaatctactgaatagaagcaaatatttgcaaaccatgtctctcataaggggttaatatccacaatatgtaaagaactcctacaactcaacaacaacaaaatctgattttaaagtgggcaaaagacttgaatagatattcctccaaagatgatgtaaacctggtcaacaagcacatgaaaacatgctcaacatcactaatcattcggggatacaaagcaaaaccacaatgagcttcagacctaggcagaggacggctattaccaaacaaacaaaaagacacg

SEQ ID NO: 728993 - DNA, 541 bp, Homo sapiens
gaggatgcaggtggatccttatcttacaccatatacaaaaattaaattaaggcaaaatggatcaaagacctaaacataagagctaaaactataaaactcttagacaaaaacataggggaaaagtttcatgacattggatttgcaatcatttattgatataaccccacagcaccggcaacaaaaacgaaaacagacaaatargactacatcagactctaaaacttctgcccagcaaaagaacttatccacagggtgaaaggcaatctactgaatagaagcaaatatttgcaaaccatgtctctcataaggggttaatatccacaatatgtaaagaactcctacaactcaacaacaacaaaatctgattttaaagtgggcaaaagacttgaatagatattcctccaaagatgatgtaaacctggtcaacaagcacatgaaaacatgctcaacatcactaatcattcggggatacaaagcaaaaccacaatgagcttcagacctaggcagaggacggctattaccaaacaaacaaaaagacacg

SEQ ID NO: 728994 - DNA, 623 bp, Homo sapiens
tttcaagacctgagttcaagctctgggagcggccttggcccatgagtggatcccttgatctccatgccagtggtgtgaggtagggattcttgctcctgtgccaggaaatgtggtgccaggttgggaacttgtacctgcttgagggtcattactgttggctttttatagaaggctgaggggtgaaggaatagaaaccagagtgataaacgcagaggggaggatctgggggcckcttggagtggggccaactccagacagaaaggcaagggtgcagggggtgagttggggtgctgggtgtgggtgtgtggccaagacctcaagagcagtgtttcagtgaatgccaggccccacgggccacctagcacatggatatccagttttcccagccctatttgttgaaaagactgccccgtggaatcgggacaagagcctctgggctgagcctctgctgtgttctctgaccatgggtggcctcccatctcttccctgtgcctactacatcagtagaggtaggagcctaattgaagacttggttaatcctgatcgattggtagtggctgactggagggctcagctgagaagggtcccgaggctcagccattgattagcgttgtctgccgtgg

SEQ ID NO: 728995 - DNA, 623 bp, Homo sapiens
tttcaagacctgagttcaagctctgggagcggccttggcccatgagtggatcccttgatctccatgccagtggtgtgaggtagggattcttgctcctgtgccaggaaatgtggtgccaggttgggaacttgtacctgcttgagggtcattactgttggctttttatagaaggctgaggggtgaaggaatagaaaccagagtgataaacgcagaggggaggatctgggggcctcttggagtggggccaactccagacagaaaggcaagggtgcagggggtgagttggggtgctgggtgtgggtgtgtggccaagacctcaagagcagtgtttcagtgaatgccaggccccacgggccacctagcacatggatatccagttttcccagccctatttgttgaaaagactgccccgtggaatcgggacaagagcctctgggctgagcctctgctgtgttctctgaccrtgggtggcctcccatctcttccctgtgcctactacatcagtagaggtaggagcctaattgaagacttggttaatcctgatcgattggtagtggctgactggagggctcagctgagaagggtcccgaggctcagccattgattagcgttgtctgccgtgg

SEQ ID NO: 728996 - DNA, 636 bp, Homo sapiens
ctgaccagctccctgtgcactgggtgcttcctgcctagaacactattcactcgcgctgctcagcccctggcctctcctgtctccaccccttctcagactctgctccccttggtgggccaccccacccccaccttggcggtcttgatgatctcggtgaagttgtccatgatggacttaatgtcgtccttcagccgcttgttgtaggactgcagcagcgtctccttgctctggggcagggctctctgctgggccatggcygagcctcaagcagcgcagcggggagacctgggacctagagtgcagcacagacctctgagtgcaggcagagtctaccccagccaccctctatgccccaaccttagcagaacacgcagatttctggggattccctttctgccaaataaagtcaatcactgaaacacagatgaactcattccatcagcagacaccgcagggggtgccaggactggccccgcctttgccagagcaagctcatcctggaactcctggccagccctccaagccctgtccagggctccagtccagacttcacgtccaggcccacagcgtgtcccagggagccctgcaaactcaacaccagctccccgtccccagcccttggcttaacttcttagc

SEQ ID NO: 728997 - DNA, 570 bp, Homo sapiens
attacataaagtaataagaacatgtctccctaatattaagttgttttctgatacactctggataattcactttaggaaatgttaaaagctaacaacacataaacccatggtatgtaattttccctgatttccggatcatgagaggtgttatgaaatgtatgtggggtttatatacaggcatcgtcttttttcttcctcctcttgcccatctctcacaacttgcagaaagctgtgtattttaatattttaattccccactctttctcatgtattcataagtgaaaatatgcacattagcacgattttatttttcaagctcataaaggttaaaaggcatcccttwgctcagtaggcaagacattcattctctttctctttgctgcaaaacaaggctcctggtctgctagtttcataaatcattctccaactagcccatgacagacaaaaatcaaagaacaagttagcactcagctagttacagattagaaatcaggtgacagcaggccccattgtttcttctataatgtatccccccaacgggtatgctgctgtgcctgggtgaacactccc

SEQ ID NO: 728998 - DNA, 615 bp, Homo sapiens
attctagatgaatgagccagacaaaaaaaaaaaaaatctctgccctcctgacaataaacaaacaaacaaagtagatgacatagaatgttataaagcaacacatttatgggataaatgagcagggcaaggtggatcgggaaagtgagggagtagaatttttagtagggtgttcacagcaggcctcactaggaggttgattcttagaaaaaataacctgaagaagatgmaggagtgagccatgcgaacacaagagggaaaagcgttccaagccgagggaacagctaatacaaaggccctgaggcaagagagcagctggcttatttgaggaccagcaaagaggacagtgaggctggcagtgtgggagcaaggacagggatagatgagatcagaaaagttgaggacctgatcgaggccagccttgtaggccatgaagggcttttacttgaccttgggggagcccttggtctctgagcagagctgtggcatcaacctaatgcaggcagtagactggtgtgggccggtaactggagaagtaagggccaatttaggaggctgtcgcagtaaccctgacgaaggacggtggtggtttaactccagtggtagcagtcccagggc

SEQ ID NO: 728999 - DNA, 615 bp, Homo sapiens
attctagatgaatgagccagacaaaaaaaaaaaaaatctctgccctcctgacaataaacaaacaaacaaagtagatgacatagaatgttataaagcaacacatttatgggataaatgagcagggcaaggtggatcgggaaagtgagggagtagaatttttagtagggtgttcacagcaggcctcactaggaggttgattcttagaaaaaataacctgaagaagatgcaggagtgrgccatgcgaacacaagagggaaaagcgttccaagccgagggaacagctaatacaaaggccctgaggcaagagagcagctggcttatttgaggaccagcaaagaggacagtgaggctggcagtgtgggagcaaggacagggatagatgagatcagaaaagttgaggacctgatcgaggccagccttgtaggccatgaagggcttttacttgaccttgggggagcccttggtctctgagcagagctgtggcatcaacctaatgcaggcagtagactggtgtgggccggtaactggagaagtaagggccaatttaggaggctgtcgcagtaaccctgacgaaggacggtggtggtttaactccagtggtagcagtcccagggc

SEQ ID NO: 729000 - DNA, 615 bp, Homo sapiens
attctagatgaatgagccagacaaaaaaaaaaaaaatctctgccctcctgacaataaacaaacaaacaaagtagatgacatagaatgttataaagcaacacatttatgggataaatgagcagggcaaggtggatcgggaaagtgagggagtagaatttttagtagggtgttcacagcaggcctcactaggaggttgattcttagaaaaaataacctgaagaagatgcaggagtgagccatgcgaacacaagagggaaaagcrttccaagccgagggaacagctaatacaaaggccctgaggcaagagagcagctggcttatttgaggaccagcaaagaggacagtgaggctggcagtgtgggagcaaggacagggatagatgagatcagaaaagttgaggacctgatcgaggccagccttgtaggccatgaagggcttttacttgaccttgggggagcccttggtctctgagcagagctgtggcatcaacctaatgcaggcagtagactggtgtgggccggtaactggagaagtaagggccaatttaggaggctgtcgcagtaaccctgacgaaggacggtggtggtttaactccagtggtagcagtcccagggc

SEQ ID NO: 729001 - DNA, 544 bp, Homo sapiens
ttaactccagtggtagcagtcccagggctgaaaaatggtcagattctggatatgttttgaaggtagatttaactggattttttggcaaattggatgtggggtctgacgagagagtcaagatactgccaacggttctgggcttgaacaggtggaaagatggagttgccattttctgagatttgcatgtaagaactgctttatccatctcaagaggacttcctttgtattctggcttcagtgtgaggcctccccttccactcgctcagggaaacttcctgaaacaaaygagcttctcggttttttttggttttttgaaaaaggagaatcagaaagaccaaggtcttcataagcactttgataacactcaaatagacagtaaaagaaagccaaacaattagcattgtatttcctcaatatcaaattaatttagtttttgcggtctcttcttcaccccaaccccacccacatgctggaagactacttctgaagagggaagctgctggtgcatcgggcgcccagcagagggagctgaggagggccgagg

SEQ ID NO: 729002 - DNA, 557 bp, Homo sapiens
attaggacttaatgtattttgtgaactctgagtacacctacaggtgagtggtagatatcttcatactttaaattactgctggattttgtctgtaccccgagacagaattttggtcttctcttatatatagcagttaatattaatgaggcttccctgaaagggttcctggatattcagattcttcacacttttcttataaaccattagatttgtttcctccattcatttgggcatcttctagtgacacacggagtggctcttaaaaaagyggaacttgattgctgatagttttattcaataaatcattgttaataaatatttatttgcgatcagaaacacaaggagggagtgtacacactcagaaaagcccacaatgcagggagcctgttcttctaacaataataatggctggctggcatattgaggatttaggatgtgtcagtcactgtactaatcacttaatcctcacagtaaacctacataggtcattattatctccaccttacagatgaggtaaccgggttagtagcttgcccaaggtcacagagctagtaagt

SEQ ID NO: 729003 - DNA, 576 bp, Homo sapiens
aatgtctgttcaaatcctttatccatttttaattgggttgtcttttattgagttgtaatagttctttatattttagctacaactgccttatcagatatgtaatttgcaaatatcttctcttattctgtgagttgttctttcactttcttggtggtttcctttgaagtatgaaagtttttaatttcaatgtcccatttatctattttttccttttatttcttatgctttttggtggcatgtctargaaaccattgcttaatccaacatcacaaagatttatactttttttcctaagagctttatggctccagatcttacattcaagtcttgaatatactttgactcaatttttttttttttttttttttttttttttgagacggagtcttgctctgtcacccaggttggagtgctgtggtgcaatctcggctcacagcaacctccgcctccccgattcaagcaattctcctgcctcagcctcctgagtagctgggattacaggtgcatgccaccatgcctggctaatttttgtatttttagtagagatggggtttcaccatgttggtcaggctggtc

SEQ ID NO: 729004 - DNA, 576 bp, Homo sapiens
aatgtctgttcaaatcctttatccatttttaattgggttgtcttttattgagttgtaatagttctttatattttagctacaactgccttatcagatatgtaatttgcaaatatcttctcttattctgtgagttgttctttcactttcttggtggtttcctttgaagtatgaaagtttttaatttcaatgtcccatttatctattttttccttttatttcttatgctttttggtggcatgtctaagaaaccattgcttaatccaacatcacaaagatttatactttttttcctaagagctttatggctccakatcttacattcaagtcttgaatatactttgactcaatttttttttttttttttttttttttttttgagacggagtcttgctctgtcacccaggttggagtgctgtggtgcaatctcggctcacagcaacctccgcctccccgattcaagcaattctcctgcctcagcctcctgagtagctgggattacaggtgcatgccaccatgcctggctaatttttgtatttttagtagagatggggtttcaccatgttggtcaggctggtc

SEQ ID NO: 729005 - DNA, 652 bp, Homo sapiens
aggtaggtaggggtcttccctttttattcatttaatttatttttgagactctgtcattcaggttggagtgcagaagtacgaacatggctgaccgcagcctcaacctcctgggctcaagcaatcttcccacctcagcctccygagtagccgggactacaggtgtgcaccacgacacccagctaatttttttattatttgtagacatggggtctccctgcattactcaggttgatctctaactcaggctcaagagatctgcctgccatggcctcctaaattgctgagattacaggagtgagccatcacacatggccgagaatttatttaataaactgcaaggggaagaaaattaaaatgccacttcccaggcctaagcaatatgaacatattggtttatattctttctttcctttataatctaagtgaaaaacagaaaactaaataaaaatattagaagaaaatgtatgtagttttattaatctaagtctgacataggacccagaagccataaaacagaaattgacaaatttaaaactttgtagaagtcaaaagataaacaataatctgggaaaatatttgcaacatatgtattagtttaaaataattgaatgaataggcagttcagaaagaaaaaatgtgtaatcagtaaata

SEQ ID NO: 729006 - DNA, 526 bp, Homo sapiens
tctcagtctgtaaagcaactggaaattcagatttaactagagaggagagttaccaatcattgctcatctctccaagactaatgctttgggagagaaaaggcattatggaggcagggaattcatactcctgggcgtctcccattgctcatccagtgggaggtgacggttcccagtctcagtctggggcacttcctttcacttcccctgggtgttcaccattgtgaggaacaggttagatggggaagagctgcacaagaatttcacacagtgtcttttctgtggcagatactattmcagaattggtcatgcaggtctgagaacaccacatgtaagttaaagtacaagaggcctgtgtgtccttgggcccagtgcacctgcaaacacttcctcgattagtcagcgcttagctgacttagtgtcttggcctagagcaatactatccccaattaacaatggaagtgaaatatgcccattgctgtcttcacccagagaaaatagattgctcatatattacttcttccataca

SEQ ID NO: 729007 - DNA, 572 bp, Homo sapiens
tcattttgtaaccaccaaacaaaataaccttagtgtagataaagccaaatagagttgttttgcaccaaacaatgggagtggagggcctcagccctgctgtggtaaaatgagcatatcagcctcgtgcactcgtttggtttttttttttttttttttttgagacggagtctcactctgtcgcccaggctggagtgcagtggcaatctcggcttactccaagctccrcctcccaggttcacgccattctcctgcctcagcctcccgagtagctgggactacaggcgccgccaccacgcccggctaattttttgtatttttagtagagacggggtttcaccttgttagccaggatggtctcgatctcctgacctcatgatccacccacctcagcctcccaaagtgctgggattacaggcatgagccactgtgtccggccccttcttctacttttaatattcgcccgactaagggcacctcttttaaggccgtgggtcaccatgagacgttgacactacactgtttattctgctacaaagaatattttaatttctgaattggtgtcattgagtaag

SEQ ID NO: 729008 - DNA, 592 bp, Homo sapiens
cttggccttctgtgcttgtcatatgctttgaattaacagacctattaggaatgagtatttgacaggaaacagacaatgtggcttccagtcctaactctgccaccagctagctataggcctttgagcaaatcaatgtttttttgtcccatagtttatcaaaagacagctccaaatttgttcattcctttaaaatatgtatttctttttgcaagatgaaaaagttctgggccaggtgctatggctcatgcctgtaattccagcactttggtaggctgaggcaggaggatcaggagtttgagaccaggctgagcaacatggcaagactcttgtctcttcaaaaaaatttaaaaattagcagggtgtggtggcatgcacctgtagtaccagctactccaactccaaaggctgaggcaggcaggaggatcacttgaggcyaggaggtcaaggctgcagtgagctattccagcctggatgacagtgtgagaccctggctcgaaaaaaaaaaaaaagttctgaagatctatttcacaacagtggcagtggaaatattactactgaactgtatacttgaaaatagttaagatggtaaaag

SEQ ID NO: 729009 - DNA, 554 bp, Homo sapiens
tagtccctcttatctgcagttttgctttccttggtttcagttaccagtggccaacaaaggcccaacggaaagtccagaaataaacaatttataagttataaattgcatgttgaaatcttatactatccaacccttcagggacctgcaccatccctttgtacagcaaatccacactgtctactctgcctgactgttagtcacttagtagccctctgtgttatcaaattgactgyggcagaatctcagtgcttgtgttcaagcaacccttattttatttaataatgaccccaaaggacaagaataatgatatggtggaaacgtggatgtatcatagggaagccctcaagtgctttaagtggaaaggcgaatgtcttcaacttaatgcggaaataaaaaaacttatatgctatgattgcaaagatccatggtaagaatgaatctgctctctgtgaaattgtgagcagtatatgggtataattcttctgttttattattagttattattgttgatcttttattgtgcctaatgtatagatcatactttatcatagtta

SEQ ID NO: 729010 - DNA, 577 bp, Homo sapiens
gtcccacttcagcctcttgagtagctgggactacaagagcatgccacaacacctggatatgtgtgattgtgtgtgtgtgtgtgtgtgtgtgtgcatgccaccacacccgggtgtgtgtgtatagggatggaatctcactatgttgcccaggttggtcttgaaatcctggactcaagtactcctcctgccttggcctccaaaagtgctgacattcaagcatgagccactgttcctggcccaatttatgttttaaaagattgttctgaatacarcatggcaagtgggtcacagaggatgaaaatgggaagcaggaggtgttggaatagactagagacaatgcttgcccaatccaggagatggactggactaggacaaatggatgtacagcgatgtcgtgttgcaggtagaattgagaggattgggattgccctggaggtgggtaagaaaggaggtgacaggtgaagggaagcctgatgactgtgcccctaggttggtaccatttctaactccaggaagactggaggaggaaggaggaaggggcacaaggtgatgaactcaagctggtgcctgttgaaaa

SEQ ID NO: 729011 - DNA, 623 bp, Homo sapiens
aaaacagaaaatatttttttccaaatgaaataaatttaaagcgtaggcatgtgcaaaatagaaaataaaatctaatctcattcccatctctatgacacaacggctgttttcagttaggggtatctttttccaggagaagatgtttttacagatattaaacctcgtgcacagagagcttaaatcggacatgttcctttggcttgtgacatgtgggcttaaaatcagttttcctgatattccgctcacttttgtagacttcaaagtcctatcaaagattttgactcatacacactggaagcacattgcaggtgaaaatattagtaagcctggaaaaaattaacaaaattaaaatttttattataaaaatactacctatatattgtaraaaatttgcaagctagaaagaatgaaatttaaaagaccgctgatcagacccactctaagttaaccactgttgtcatctcagtgtgtttcatttaaacatttattttgcattgtcttaaacttcaactttaatcattatggtgagctcagtaggttatatttacagtgtataaatgatcagttatactattattagaatcatcaactgccttgatgcttcatagttttcatgcttgctt

SEQ ID NO: 729012 - DNA, 645 bp, Homo sapiens
gaggcatgagcttagattgtctatttgtgctttttcagactttttatttaggcatttaatgctatgaactttcctcttagcactgcctttggtgtatcccagaggtttggacaagttttatcactgttattgttcagttcaaagaattttttatttccatcttgattttattgtcaaaacaatgattattcaggaacaggttgtttaatttccatgtatttgcatggtttcgagggtttctttcggagtttgtttccaattttattccactgtggtctgagagagtacttgatataattttgatattcttaaatttattgagacttgttttgtggcctatcatayggtctatcttggagaatgttccatgtgctgaagaatagattgtatattctgcagttgttggatagaatgttctgtaaatatctgttaagtccatttgttgtggggtatgatttaagtccattgtttctttgttgactttctgtcttgatgacccatctggtgctgtcagtggagtattaaagtcccccactgttattatgttgccatcaatgtcatttcttaggtctagcagggtaattgttttataaatttgggagctccagtgttaggtgcatatatatttaggattgtgatattttc

SEQ ID NO: 729013 - DNA, 517 bp, Homo sapiens
gtatggtaatgctgtcctcatagaaagagttaggaagtagtcctcctattttctggaagagattagagtattgataccatttacactttaagtatttggtaaaatttactagtgaaaccatttggacctggtgctttcctttttggaaggttattaattattgattcattttctttcattagatataggcctatttaaattatgtttttctccacttgtgagttttagtaatttgtgtttttcaaataattcatgtgasttttcaaacttgtcagtatagagttattcataatattgctttattatccttctaacatccacagcatcaatagttatgacccctctttcatttctaatattagttattagtttcttctctcttactttttttttcctgacagcctgactgtagtttcatcagttgatctttcaaaggaccagttttttgttttgttgagttttctctcttgatttcctggttataattgtcttgaatttcccattaatttttactttt

SEQ ID NO: 729014 - DNA, 602 bp, Homo sapiens
tttccttgctcctggaggcatcattctctcccgtgttcttgtttatatgaatttttacatcatatatattttttactttgcatccatgagttttaatgggatataaatggcacaatgttatctgcatcattccattttcttgcttttatcactaagcctgtgtttttacatccagacaccatgtctttatggatgcagaagtccaatggtgtgctttcaatcaccacaaaaatccatcgtgggtgctgccgcgtactgatkccccgaggtagatgtcctggtgcccttcaatatataccatggcccatcatcctacagcttaatgagataatttctcgaagttagaattcccagcaaagccatcactgggtcatggtatacagaataattattttggtttaaagttcagcagaattgctgtaccagactactgtcccaccagcatcatatgagagtttttacctttctgaatccctgtggcagttgacattgtccatttttctaattatacccagtgtcccttctggaagacattctcactcttttaattgaaatcagtggcttaatttaaattccacataaatagctctattgagaggcat

SEQ ID NO: 729015 - DNA, 577 bp, Homo sapiens
acaaaaaaaggaattaggaatgaaactaaaaataaatattcatggataatattttacagttatcactaattaaaaaatatttttccttctctatttcctgtctcttctaatgataagtaaataccaacccaaaaacttcttatgacacatgaatargcattttatttttacttatttttgtatgttctaagccactcctctcaataactcacacatggaccacttttaatgtggtcagggaaaattttttcccaaaggaccaagtactaaagccagaccagttaatgtttcagaggtaatacgatttggtaccattggatgaataaaccaatgtggtttggattaaagtttcatttttctttgcttccattttggtgtggatgaggccatcacaattaatttttcaagtttagcattgctttgccaacgggatttgtagtactccatttctacattgaatactgggaaattttaaggaaaagaggccaggacaaggaatcacttctagattaaacattgcattgacttactgtgtgactcagacaaaccacttacctctttgtccttcagtttctcc

SEQ ID NO: 729016 - DNA, 574 bp, Homo sapiens
aactatatcactcccttttccacttacccatgggaagcagcttacccaaccagtctggcctatgtgatggagaagcaaagatctgaagagccagttttttttttgttcttggccagctatacaatttctaggtgttctatgcctcagtttcctcatttgttaattgaaagtgttaatcctgatcttcatcgaaagactatggtttgctcacccatgctgacatgtaaagatgacatatagccacagctttcttgacagttatcaggaagacagaccaatattgaatgaccatcttagttttaaaaattatttttcttttatgttcatataatttcctttaaaattctaactagtagaaaaaagatttgttsagtgtttaagaaaatgtcaagtgaatgctgatttactatttttgaactagaattggcaaatagatttcctcctaaggggggtggggtgagatggaagaaacattctatgcgacagagtttttgatattcctcaggaatgaaaataacctaactaaattagtcataaaatatatgcagaaatagcgtgtgccagtatttaaagt

SEQ ID NO: 729017 - DNA, 513 bp, Homo sapiens
cacaaacaaatagacctctactctctgattgaatcttaaatgagccaatgaaaatgaagtccctactcccaatgtaacaacctagtaagaggtggaccaagaaagaatatgacctggttttaatggttaggagaactggtacaaacacttattagatctctgatcaggaaatactgcttctgagatcactgcttttcttaaaatgtgatatttaaggtatgaatgaactcctttgacttctcccttaagtacacaaataatgtgagcagggcaatatgggtagatcatgagctagagaccattgataaaagataaggccaaagcaggaatacytgagccctgaggagattgtacaagtttccagagagacagagagaaaaaatttcctttaaaagatcaagaatttgcatagactttttggcagtactgaaagctagaaggctgttctgaaaatgcacagtgaaaatgatttccaatctagaattctgtactatcaatcaaatgtaaacataa

SEQ ID NO: 729018 - DNA, 626 bp, Homo sapiens
cttaaacgattgcttttgcaaaatcatttctaaaaaagattctagagacaaggaatattaaagagatgtgtataaagatgattaagtaaactatacataaccatgttttaatttttcctaagactgagccataattagataggtttattataaatatatagatttataatatatgtaatactttcaaatatttaaactcacagttctagcccaattttacttgtctacatttaaaagaaaaactttaaaaggatggtgaaatagttttwaaaaaggtttatttgcatgaggtagatttaggaacagtttttcttttgtctgtttaagccacaattgtacatactgaattccttcttcctatttgccaagagaccatccaaccagaaagatttaaaaattctctctatgaaagtcaagaataggcacaggacattcagctgtcatgatgaatcagaaaactaatctatgaaccatttgctggaggttattttagatggattaatttacagaacaccctagtttacagaggctaataaattatagttgatagttatgatcaaaaccattattagataggtatgccattgtttatgtatacatcttagtcctttgggccgtagatttgg

SEQ ID NO: 729019 - DNA, 626 bp, Homo sapiens
ggattgccaccagcagccaccggaagctaggagagaggcacagggcagattcttctcagagcagtcagaaggaaccaaccctgctaacaatttggtctcagacttctatcctctagaactgtgaaataatgcattttggttgttttaagccacctagtttgcagtaatttgttatggtagccacaggaaactacagattacaaccttgtccctttctaccttttccacagtctcaaacttcttatacccattttcaaattcatctgggattctcttgatttcactttattccataccttctctgtacccaatgaacaatcatttcaatagcatcatcttcatcctcatcaattttcctgttctarttgctctccccagtctctaataatgcatccttccagccttttatcctttccagttctgtccctgggttgccaaacagcactggagaaaattgctgtcacttacaaatatatccttaatatgttcatggattctagcttccattgaaccctcagtactgctcagtgatcttatatttgtcttttcaggccctttccatcatttttcatagtaaatgtttcaaattctcatcatacactcccagcctgaatcctttcatccac

SEQ ID NO: 729020 - DNA, 558 bp, Homo sapiens
ctgggcactgtaataagcctctttacgtgcacaattgcatttaattcccccagcagtctttgaaggagctgtttttcatttgagggactcaaggctcagtgatgtgttcaagtaagtggcagagctgggctttgggcccaggactgttttatgagtctgaatccatgaggatacagcacactgcatgtggggctcaccctgggtgtgggaggaggctgttaagggaggcagggcccatttgcctgagttccaagcataaaaaaaggggagccacagaggaaccctgtgtgagtatcacctactctctggaaatccatctggacctaatggacaaagccactcagagtggtggagacatattggtgaagtcacagtggaaccaggctgtgactytccaaggacccagggccaccttgctggggaaatcctcagctttggaaggcttagtttctgctagggcagggcttggtaaacttttcctattgaggatcagatagtaaatatgtttggctttgaggctacgtggtctcttctacaactacccaactctactggtgt

SEQ ID NO: 729021 - DNA, 558 bp, Homo sapiens
ctgggcactgtaataagcctctttacgtgcacaattgcatttaattcccccagcagtctttgaaggagctgtttttcatttgagggactcaaggctcagtgatgtgttcaagtaagtggcagagctgggctttgggcccaggactgttttatgagtctgaatccatgaggatacagcacactgcatgtggggctcaccctgggtgtgggaggaggctgttaagggaggcagggcccatttgcctgagttccaagcataaaaaaaggggagccacagaggaaccctgtgtgagtatcacctactctctggaaatccatctggacctaatggacaaagccactcagagtggtggagacatattggtgaagtcacagtggaaccaggctgtgactctycaaggacccagggccaccttgctggggaaatcctcagctttggaaggcttagtttctgctagggcagggcttggtaaacttttcctattgaggatcagatagtaaatatgtttggctttgaggctacgtggtctcttctacaactacccaactctactggtgt

SEQ ID NO: 729022 - DNA, 549 bp, Homo sapiens
attggcaaatatgacacaagcagaggctctaaaagcacttgcttattgagaatcttccctctcttgttcatcttaggaccctgtgacacccgtatgtgaataaatccaggacagcctgttgggtgatgagggacacacagccaagtcattcccagcaccctagccaacctgaagccaacccaccaaacacatggatgaggccrtcctagaccatccagccctggtagagctgccagctgaccaaagagatcagctgagatgacccagaccaaaagaaccatgtcacttacataatcattaagaataataaacatgccattttaaacccttaagttttgggatgtttgttacatagcagaagctaactgataaaaccgcagtgcacccttgtttaggtttaaatccaagcctcatcatttaattgtttagcctgaaagaaaagttctttaacctgcctgtgtcttagtttcctcacctgtgaaataatgataaaaatggattatgtaatttacagcattcatgtacacagtaaatgagttaatattttaa

SEQ ID NO: 729023 - DNA, 549 bp, Homo sapiens
attggcaaatatgacacaagcagaggctctaaaagcacttgcttattgagaatcttccctctcttgttcatcttaggaccctgtgacacccgtatgtgaataaatccaggacagcctgttgggtgatgagggacacacagccaagtcattcccagcaccctagccaacctgaagccaacccaccaaacacatggatgaggccatcctagaccatccagccctggtagagctgccagctgaccaaagagatcagctgagatgacccagaccaaaagaaccatgtcacttacataatcattaagaataataaacatgccattttaaacccttaagttttgggatgtttgttacatagcagaagctaactgataaaaccgcartgcacccttgtttaggtttaaatccaagcctcatcatttaattgtttagcctgaaagaaaagttctttaacctgcctgtgtcttagtttcctcacctgtgaaataatgataaaaatggattatgtaatttacagcattcatgtacacagtaaatgagttaatattttaa

SEQ ID NO: 729024 - DNA, 625 bp, Homo sapiens
cctggccagtacatcattttgaccccagcttgagcacaaccccgtcattcaaatcctgggtcaaggccggtgccatgactcatgcctgtaatcctagaactttaggaggccgagatggaaggattgctagagttcaggagttctagaccagcctggtcaaaatagcaagacccatatctctgaaaacaaacaaaccaacaaaaatcctaggtcaaagtcagtttccacatccttagcgcaaaataragtcaatatttcacctgagcccaaagttaccatgcaaattgttagattgaaatgcatactttcatttccaatggaataaaactgcagagtccagttcgctttctattaactcctccagagcatgttccctgcccaggtatttccatgcaaggatgacactagttaattgcctgaattaaatattttacagcttaaaagggtttgctagactacatgatttataaatattcattctgcaggcaagaggaagcaagggaaatttggtttctggtgactgcctttgtagcaaactattcaatagtaacactcagagatagcctcagtatctaggtaaagtgtttttggagcctcaaatcccttataggaaaacaatttctcc

SEQ ID NO: 729025 - DNA, 579 bp, Homo sapiens
tattttttttttcaaacacccttgattttttttttaatctttaaatgtgtacagtaaccagccaggcatggtggcatgtgcctgtggtcccagctactctggaggccgagacaggaggatgacatgagcccagaagttcgaatccagcctgggaaacatctccagacctcatctccaactctaagaaaaagaaaagaaaaatgaagaattgttgcttgcatcccaaataaaataygaggtcttgaaactcgctgtgtcttctctctactcttcatttcctgcctttaaggggacctggaaacaaacatgaatggcacagaaccttggtggtagggacacagtggagagtgagtgttggggataagacagagaggagatgtgtgtaactggatggccccagagactgtgaggcccttaacagaagtctgccaggctgagggagcaggttggatggcacaggttatatatccagactgggacaggtttgagacacatgtaagtctaaatgtctaacagaaaactggaagagctagaatggaggtttcatgagggctggggttgtgtctgtctcatctctat

SEQ ID NO: 729026 - DNA, 545 bp, Homo sapiens
ttcactgtccatattcctttaagcattttggtcacagttacttaagtccttaagtctgtaagaagttccaaactttcctttaccttcctgtctccttctgagccctccaaactcttccaacctctacccattacccagttccaaagctgcttccacattttaaagtatctttatagcaatgccccactcctcgatatcaattttccatgttagtccattcttgtgttactataaagaaatacctaaagctgggtaatttataaagaaaagaagtatatttggcccaccgttctgcaggctgtgcaggaagcatggcaccagcatctgcttctggtgaaggcctcagkcctcttccactcatggtggaaaggaaggggagttggtgtgtcacatggcaagagcaggagcaagaatgagaggtgggaggtgccagcctcttttaaataactcgatctcgctgaactcagagtaagaactcactcatcaccacgaggatgatgacaccaagacattcattaaggatccacccccaagacccaaacacc

SEQ ID NO: 729027 - DNA, 564 bp, Homo sapiens
aaaagtaatgtgcagatgagggtcttggactcctgatatcttcagggtttttaagacagaaattcattgatatggggccagatgcagtggctcacccctgtaatcccagcactttgggaggctgaggtgggaggatcacctgaggtcagaagttcgagaccagcctgaccaacataatgaaaccctgtctctactaaaaatacaaaaattagctgggtgttgtggcaggggcctgtaatcccagttactcaggaggctgaggcagaattgcttgaacctgggaggyagaggttgcagcaagccaagactgtgccactgcactccagcctgagtgacagagtgagaccctgtctcaaattaaaaaaaaattataaattcattggtatggatttccattgtatcttataaatcccgtcaagaagggggctagtgccttccagaacttccttttcaattaatttccatttcctattgggttaagtccagcttcttttagtgtagaatactgaatccttcacaatatggctgatgtcagcatctcaagcttctgctcccatcactcca

SEQ ID NO: 729028 - DNA, 556 bp, Homo sapiens
gcacagacatgtgacctaggctctgccaatcatacaggctctcctgagatttcagtttgaatgacagcaacctggggagcagataccacatggaagtcattttctgatgagaatatttagggatgcattggagatgggagaggctgttagcatctgcactgagcagtgacagcattaggtttttcactggagcagtctcaccaggtagagactttgttcctggctgtttcgaagtttgactcagcacccttgaaggctccatgaaggagctatctgatatcctatttaaaagatcccttttctgctcaaagaacctcaggtgaattagttcagttgtctgcagccaagcacattcactaactcagactttactatagctgcagtgcccactatattctcaataytttaaataatactttaaatacatttatctcatggtatcctcccaatcatcctggctcctcaaccagtaagtggaagagctgagaataaatccccagatctgtgaaaactcattcttttttttttgatggagtcttgctctgtagcccaggct

SEQ ID NO: 729029 - DNA, 593 bp, Homo sapiens
ccctgagtatagggtgggaccctctctggggagggtcgtaagacccacaatgggaaagggatgggggaagcacggagtcctgtcttggggcaggtgaaaagaagtcaggagaaagtcagagtcctgtctctgaggcttcacacacccaacattataacacgtgactgttaacgagggctatgggggttatgatccaggaaccatggaggaaactaatatacatcgtaacaccacagggggcataaccagaaggcattttgttaggcttgtccagagcatttaccctgcattcacaaatcgccttctttttcttccttagcaccttttcacacattgtagattcttccctcacaaacgragtctggctgactcctcatctatgcctatgcagtcccctccccatagtcaatggacttctacactgtaggttcagccccacccagggatctgattgctctgaatacaagcctcagtctatagagtagagcttctggcttccaaacaggttcttgaaacaaatctggtctacatgttttctaaaattaaaatctcgttgcacaaattctacatgaatatcttatccttgtaataaa

SEQ ID NO: 729030 - DNA, 427 bp, Homo sapiens
aaaggaaaactccgtgatcctcagtccctggagctcggggtcagaggctggggtttcttggtctctcttcagctctccatcatcctttttgtttttctgtgttctctccctcctccctccctctttctccccttttcctctctctttccttgtttctttcctcctcccatccccgctccacgcttcccctctccatccctcccttcgttcytctttcccgccatcttttctaacccagtaggctcctatttgccaaactcttttttctggaccactttgaaagccctttgtccgagagctcggagagatggcgaggcctgtggggtggccgaaggggaggcagggaagggggcagttgtgggttgctcagtcggggatggcttcacggagggtgccccaggcccatggctgttccctgcctttttgt

SEQ ID NO: 729031 - DNA, 625 bp, Homo sapiens
cttagtaataccaatggaaggagaatttatttttttcagtagttccaaaaaaagttctgagactgggttttattgcctcagcttgaatatttatctctaacttaattatcttagcccagaggataaatatcagacttgccaaacttgagtcaccgtacttgcccctgaagtagggtagaggtaagagataatccctttgaattgcttgggaaatgggcagtttcccagaagaaaatggtggtgtaattaaaagaagaaaggggccaatgyggtggctcatgcctgtaatcccagcactttgggaggccaggcaggtggatcacctgaagtcgggagttcgagaccagcctgaccaacatggataaactccatctttactaaaaatacaaaattaccctggtgtgaaggtgcatgcctgtaatcccagctacttgggaggctgaggcaggagaatcacttgaacacagaatgctgaggttgcagtgagccgagatcgtgtcattgcactccaggctaggcaataagagcgaaactcagtccctgcccgccccacccccccaaaaaaaaataaaaagaaagggtaatggattctggaaagacaataatgacaagtgttttctaaaag

SEQ ID NO: 729032 - DNA, 481 bp, Homo sapiens
gtctctactaaaaatacaaaaattagccacgcgagatggcgtgcaacctgtgatcccagctactcaggaggctgagacacgagaatcacttgcaccagggaggtgaaggttgcagtgagctgagattgtaccactgcactccagcctgggcaacagaatgagaccctgtctcaaaaaacaaacaaagagaccaaagtcccyacactggcctataagactctcccccaagctttgttcccatccccccatcacctctctgaacccccctcttagtctcttctctttgttcacttcctgtctggacacactggtcttgctactcttcaaacacacccagcacacaccccactgcagggcctttgcccttgctgttccctctgcctgtacattcttcttccagatatctgcagagccaacctccatacctcctttaggtccttgttcatgagtccccttctctgatcatcctatttaaagctca

SEQ ID NO: 729033 - DNA, 626 bp, Homo sapiens
gtgcacaggggaactgccctttataaaaccatcagatctcgtgagacttattcactatcacgagaacagcattagaaaacccacccccatgattccattaccttccgccaggtccttctcatgacacatggggattatgagagctacaattcaagatgagatttgggtggggacacagccaaaccatatcacctgtggacatcccaagcmgatctctttgaggccgggttagttctcttctaagctgacttgttatatagaagaatcctttgttggttctacttccagatatttgactggacacccaacaaatcaattatctattgctggatagcacataacctcaaggcttagtggcttaaagtagccactgttttatttagttttagtttctgtgggtcagtaatttgggctgggctcagctgggtggtctgtctgatctgggcagggattggctgttcttggctgggctcatttaccttcctggggcctcagcagggatgtctaggacaactggggcctctcttcaggtctttcatcttccagtgggctatcctgagcatggtcatatgctgatgggtgcattctctgggcatgagcaagggctgcagggcttcttgaagcca

SEQ ID NO: 729034 - DNA, 567 bp, Homo sapiens
acacctgcagtcccagctacttgggaggctgaggcgggaggatcactggagcccaggaggtggaggttgcagtgagccatgattgtgccactgcatttcagcctgggtgatagagtgagactctctctctctctctttttaaagatacatgtgtgaatgtgtcttatttaactatgttacacatacatataaatataaattctgtttattaatagctcatataatatacagactctgcgcctgtacaaatgtaaaggcaatgcattttaygtaggaaaaatggttgagtcgaatgatttaatttttttacaaatcacacaatacttgcatgaaatagcaacaggtgcgaacctcctaggcagataggagtgcagtgctttgtttcacagataccatcaagcctaacctttattgtgggcttactatgtgtcaggcctgttctaggatcttgttaatgaactgattcatttttttctcataacaacatagaggggaaaagatcacatggggaaggcaccaggtccctggactttgcctcgcgtgctcctggcattttgtagagaggta

SEQ ID NO: 729035 - DNA, 565 bp, Homo sapiens
atatcttttcatttatttgtgttttcctcagtttctttcatcagtgttgtatagttttcagtatacagatagtttgcttccttggatacatttacacctaagtaattttttttttgctgctattgtaaattagtttgttttcttaattttctggtctggtagtttgttattagataagctagtatataaaattagaataattagataatctaatatagaaacactactgattgtatgttggttttgcatcctgcagttttattgaatttgttgatcagttctaacagcttttttagtggattctttagggttttctgtatataaaatcaccttgtcaacaaatagagacaagttcacttmttcccttcctattaggatgccttttatttctttctctttcctaattactctggctgggacttccagtactctattgaaaagaaagggtgagagtgggcgtcctgatcttagaggaaaggctttcaacttttcagtgctgagaaggatgttagctacgggtttgtcataatagagcccatagtgtttattgtgttgagtgcatttc

SEQ ID NO: 729036 - DNA, 474 bp, Homo sapiens
tcattgaggcctagggtgaaaaagcaaatatacccagataaaaactagaaggaagctctgtgtgaaactgccttgtgatgtgtggatgcatatcatagtgttaaacctttcttttgattcagcagtttggaaatactctatttgaagaagataaaaactagaaataagccatctgagaaactgttttatggtgtgtgcgttagtctcacagagttaatactttcttttgattcagcaggttaaaaacagtccttttgtaggatctgccaagaagcatttgggagtgcattgtgggctatggtgacaaaccraatatccccagataaaaactagaaagaagctatctgtgaagctgctctgtgatgtgtggattcgtctcaaagatttaaacctttcttttgatttagcagaatggaaatagcccttttgtagaatctctcatactgctttgtgatgtgtggattcatttcacag

SEQ ID NO: 729037 - DNA, 587 bp, Homo sapiens
gccttaaacgtggatgtattttgaggctctctattctattccattggtctaccagtctgttcgtatgccagtatcatgttatatttttgattactatagcatcatagtatattttgaaactggataatgtgatgcctcctactttgttcttttygctcacaatttgctatttggagttttttgtggtttcacatgaatttggggacttttttctgtttacataaaaaatatcattggaattttgatggagattacattgaatctgtagatcactttgggtactaagaacattttaacagcatgaattcttctaatccatgaagatgggatatatttccatttatttgtgtcttcttcaatttctttcaccaatgttttatagttttcagtgtacaggtctttcacctccttcgttaaattaattcctaagtatttgtgtagccattataaatgaaattgctttcttgatttctttttcagatagttcattgttagtgtatacagatgctactcatttttttatgttgattttgcatcctgcaactttactgaattaatttactagttccaacagttttttttggtgg

SEQ ID NO: 729038 - DNA, 563 bp, Homo sapiens
tccatccaaacttcaatgaccactggcctccctgctgacccatgtcccactgaggagccccaagctctgaaccaactgcctacgcaccatcccctcgggctgcacctgctccccaggcctgcccctcctttggagctgcctctgtccaccaagggtgctgtcgctcacctaaccttccaaccagaacccagtggtaccttgctgccccctccactccctgaagaagctgcccccatgcctgtcaagttcttccaactgctcaaaccttctggaactccaggcctcagcatgtcttgtctgggtggctgcaatggctaagcttgcttctctgtctctctccatcagtcagtcamccaatcaatcgatcagtcatctatcaatcagctatccacctattaatctataatcagtaatctattaatctatataatttacttctataatcaatcattgatctatcccatgtatcttcctatctatcctttatcatgtttatccatctatctatcatttatgcctctatcatgtctatctttcaataatttatctatcaccaggcacag

SEQ ID NO: 729039 - DNA, 324 bp, Homo sapiens
tgcttgatggcatcctgtaagtctcttaggctgtcttcactcttcactccttttcccgtttgctcctctgactccataatttcaaatgactagtcttctgtttcactgattctttcttctgcttgatgttattgaaactgcctttgcaaaaattataactgaagaaattatgacagcaaaagayatcagacttaatcaactccatcttgcttctagcatttaaactgtccttgttcattcctggcagtaggatgaactaattttggtaaggtattcagttcatggtttgactctcaaaccaagttgataatagccatttcccaa

SEQ ID NO: 729040 - DNA, 454 bp, Homo sapiens
aagctatctggaaaatatctttgtgatgtgtgcattcatctcacagagttaaacctttcttttgattcaattgtttggaaacactgtttttgtccattctctgaatggacattttgaaactcattgaggccaatagtgaaaaagtgaatatctcagaataaaaactagaaggaagttatctgaaaaaccacctggtttggtgttcattcaactctcagagttataacatrcttttcattcagcagttctgaaaaactgattttgtagaatctgtgaagggatatttgggagcgcattgaggcctatggtgaaaaagaaaatgtcttcagataaaaacaagaaagaagctttctgagaaactgcttcatgaggtgtgctctcatctcaaacagataaacctttcttttgattcagcagtttggaaacactgtttttgcccttatgcgaatggaca

SEQ ID NO: 729041 - DNA, 454 bp, Homo sapiens
aagctatctggaaaatatctttgtgatgtgtgcattcatctcacagagttaaacctttcttttgattcaattgtttggaaacactgtttttgtccattctctgaatggacattttgaaactcattgaggccaatagtgaaaaagtgaatatctcagaataaaaactagaaggaagttatctgaaaaaccacctggtttggtgttcattcaactctcagagttataacatacttttcattcagcagttytgaaaaactgattttgtagaatctgtgaagggatatttgggagcgcattgaggcctatggtgaaaaagaaaatgtcttcagataaaaacaagaaagaagctttctgagaaactgcttcatgaggtgtgctctcatctcaaacagataaacctttcttttgattcagcagtttggaaacactgtttttgcccttatgcgaatggaca

SEQ ID NO: 729042 - DNA, 454 bp, Homo sapiens
aagctatctggaaaatatctttgtgatgtgtgcattcatctcacagagttaaacctttcttttgattcaattgtttggaaacactgtttttgtccattctctgaatggacattttgaaactcattgaggccaatagtgaaaaagtgaatatctcagaataaaaactagaaggaagttatctgaaaaaccacctggtttggtgttcattcaactctcagagttataacatacttttcattcagcagttctgaaaaactgattttgtagaatctgtgaagggwtatttgggagcgcattgaggcctatggtgaaaaagaaaatgtcttcagataaaaacaagaaagaagctttctgagaaactgcttcatgaggtgtgctctcatctcaaacagataaacctttcttttgattcagcagtttggaaacactgtttttgcccttatgcgaatggaca

SEQ ID NO: 729043 - DNA, 498 bp, Homo sapiens
tgcattgtgatgtgtgcattcaacatgcagcgttaaacctttcttttctttgagcagtttggaaacgctgttttaaagaatctgcgaagggatatttgggagcccatatagacctaggttgaaaatatcttcagatagaaactagaaagaagctttctgagaagcagcrttttgatgcatgcattcatctcacggagttaccactttcttttgattcagtggtttcaaaacacagtttttgtccattctgcaaattgacatttgggagttcgaggccagtggtgaaaaagcatatcctaggataaaaactagaaggaagctgtctcagaaacggttttttgatgtgtgcattcatctcgcagatttaaacctttcttttccttcaggagtttggaaacactgtttttgtccattctgtgaatgaacatttgggagctcatggaggccaatagcagaaaagtgaatacccctggataaaaacaagaaagaagatatcag

SEQ ID NO: 729044 - DNA, 498 bp, Homo sapiens
tgcattgtgatgtgtgcattcaacatgcagcgttaaacctttcttttctttgagcagtttggaaacgctgttttaaagaatctgcgaagggatatttgggagcccatatagacctaggttgaaaatatcttcagatagaaactagaaagaagctttctgagaagcagcattttgatgcrtgcattcatctcacggagttaccactttcttttgattcagtggtttcaaaacacagtttttgtccattctgcaaattgacatttgggagttcgaggccagtggtgaaaaagcatatcctaggataaaaactagaaggaagctgtctcagaaacggttttttgatgtgtgcattcatctcgcagatttaaacctttcttttccttcaggagtttggaaacactgtttttgtccattctgtgaatgaacatttgggagctcatggaggccaatagcagaaaagtgaatacccctggataaaaacaagaaagaagatatcag

SEQ ID NO: 729045 - DNA, 498 bp, Homo sapiens
tgcattgtgatgtgtgcattcaacatgcagcgttaaacctttcttttctttgagcagtttggaaacgctgttttaaagaatctgcgaagggatatttgggagcccatatagacctaggttgaaaatatcttcagatagaaactagaaagaagctttctgagaagcagcattttgatgcatgcattcatctcacggagttaccactttcttttgattcagtggtttcaaaacacagtttttgtccattctgcaaattgacatttgggagttcgaggccagtggtgaaaaagcatatcctaggataaaaactagaaggaagctgtctcagaaackgttttttgatgtgtgcattcatctcgcagatttaaacctttcttttccttcaggagtttggaaacactgtttttgtccattctgtgaatgaacatttgggagctcatggaggccaatagcagaaaagtgaatacccctggataaaaacaagaaagaagatatcag

SEQ ID NO: 729046 - DNA, 639 bp, Homo sapiens
ctttctagtttttatctaaaggtattttctttttcaccattggcatccaagagctcccaaatatgccatcacagatccttcaaaaactgtgtttccaaatgctaaatgaaaagaaatgttaacatatcataaagcagtttttcagatagcttcattctagtttttatctttgtattttcacttttttgcaattcacctcaatgagatcccaaatatccattcacagaaagtacaaaaacagtgtttacaaacagctgaatcaaaagaaagttttacatctcatagatgaatgcacaaacaacaaagcagtttctcagaaagcttctttctagtttttatttggagatattttctttatccacataggcctcaaaagacacccaagtattccttcacagatactacaaaaacagggtttccaaattgctgaatgaagagaaaggtttaccttggtgagatgaatacacatcaaaaagcagttcctcagatamcgtttttctaatttttatcctgggatattcactttttcaccattgtcctgaatgagctcctaactgtccattctcagaatggacaaaaccgtgtttctaaactgctgaatgaaaagaaacttatacctctgtgggaagaattgacaca

SEQ ID NO: 729047 - DNA, 642 bp, Homo sapiens
cctcctcggcctcctctctcactgcacaggtgatccccccagggtctcaccaacctgcccagcccaagggttctgggtccagcgtgtccttgattctgagctcaggagggcccttcctgtggtgggcaggatgctcatgaccctgctgcagggtgggaggctggtggggctgaactccccccaaactgtgctcaaaggcttgtgagagcctgagggactgcacctgccaggagagagtagtgagttttcagttcaaagtctccatacaacaggaaagtcatgggccactggggctggggctgattgcaggggataccctgagggttcacagactctctggagcttgtctgggacagcagggcaagggatttcataagaagcatctttcacctgcaagccaacctctctcttatttatttatttatttatttatttatttatttatttatttttatctttgcaggctctgtgacctcctatgtgctgactcagccaccctcrgtgtcagtggccccaggacagacggccaggattacctgtgggggaaacaacattggaagtaaaagtgtgcactggtaccagcagaagccaggccaggcccctgtgctggtcgtctatgatgatagcgaccggccctcaggg

SEQ ID NO: 729048 - DNA, 778 bp, Homo sapiens
ggaccatgagcagtcaatgcaaaggatccagacaatatttcaagggctcttccagagtaacaagacatgaaaaggcagctctggttctctcttgcctggcgtattttaccctcggagtttttttttttttgtgttgttgttgttgttgttgttgttattgttgttgttgttgttacagagtctcgctctgtcgcccaggytggagtgcagtggcgcgatctcggctcactgcaagctctgcctcccgggttcacgccattctcctgcctcagcctcctgagtagctgggattacaggcgcccgccaccgcgcccggctaattttttgtatttttagtagagacggggtttcaccgtgttagccaggatggtctcgatctcctgacctcgtgatccgcccgcctcggcctcccaaagtgctgggattacaggcttgagccaccgcgcccagccaaccctcggagtttttatgagcaccgaagggtgcagggagctggaagctacccaccaggtgcctggctcactcatgtctgggtgcagcagctcccccaacaggcagctggcagaactgaaagggaagagctatatccttctgagcccccacaattgtggtgcaggattgttcccgacactcccatccagcctgcttgctcctgcacacttagaaatgatcattatttctgcccaggacctccctggtcttgctctcccctcttcctccccaggcgaccttgggaactttactcaccctctggcccttccctcctctgtccagtgtt

SEQ ID NO: 729049 - DNA, 778 bp, Homo sapiens
ggaccatgagcagtcaatgcaaaggatccagacaatatttcaagggctcttccagagtaacaagacatgaaaaggcagctctggttctctcttgcctggcgtattttaccctcggagtttttttttttttgtgttgttgttgttgttgttgttgttattgttgttgttgttgttacagagtctcgctctgtcgcccaggctggagtgcagtggcgcgatctcggctcactgcaagctctgcctcccgggttcacgccattctcctgcctcagcctcctgagtagctgggaytacaggcgcccgccaccgcgcccggctaattttttgtatttttagtagagacggggtttcaccgtgttagccaggatggtctcgatctcctgacctcgtgatccgcccgcctcggcctcccaaagtgctgggattacaggcttgagccaccgcgcccagccaaccctcggagtttttatgagcaccgaagggtgcagggagctggaagctacccaccaggtgcctggctcactcatgtctgggtgcagcagctcccccaacaggcagctggcagaactgaaagggaagagctatatccttctgagcccccacaattgtggtgcaggattgttcccgacactcccatccagcctgcttgctcctgcacacttagaaatgatcattatttctgcccaggacctccctggtcttgctctcccctcttcctccccaggcgaccttgggaactttactcaccctctggcccttccctcctctgtccagtgtt

SEQ ID NO: 729050 - DNA, 631 bp, Homo sapiens
gggcatccccagcctccttaaggagacactcttcagagggacagggcttctcacctgcctcagctctgaccatggggctgtccacactcagtgacaggacactgaccagggatctgactggagtgaccaggaacctggctggggcaaccagggaccacccaccctctggagctcacatgctgtgcagagaccatgaccctgggaccccttcagagaccatggggcctgaagttagattttcagtccagtgtggttttctcctgctttttgcaagtttacattaaacattgatgagaaaaacatacataaataacagacgagctgagggtgccaattgctaatctcttgtggcaatgaggggtgatgtagcaggagcagcaccatggctgaaatgagaccagaggccctgttgastccacaggggtgtgtggttgcttaaatgacccaactattcccactgaataatcagcaagtgtcccaatgacacagcacagcatttagatgaaatgaacaagaggggactgagtctgagggaccagggggaggaagatcatgggtccctgggccacctgctgctgagtcaggtgtcagcaagatctctccgcagagcccagctcagcccatggccaaa

SEQ ID NO: 729051 - DNA, 550 bp, Homo sapiens
aaatcaactaggcactatacctagtcaatctaacacttaaaattaaacatcacttaaaccagcaaggagataaaaagaaataatttttaaaaatcagtcaaaaaaaggaaacagaaaaagggaaggagaagcaatgaacatatggcacaaatrgaaaatgaagggcaagttggcatatttcaaccaaattatgttactaatcacattaattgtaaatagtctaaatatcacaattaaaaggcagagattgtcatgttgaaatgaacaagactcaactatacatgctgcctagaaaaaaaaccacttcaaattataaaaccacaaaaatccaagtacaaattaaggacaattccccccactcccaagtctgtttcacaaagcagtacaaagaaggattcacagtaaatttttttttttgaagtcttactgtgtcacccaggctagagtacagtggcaccatcttggctcactgcaacctccaccttccaggttcaagtgattctcctgcctcagcctctggagtagctgggattgcctgccaccatgtctg

SEQ ID NO: 729052 - DNA, 608 bp, Homo sapiens
gcaggacacaggtctataggatatttttgtcattcctttgtcgggctctggtatcagagtaattcaggcctcaaataggtagtagggaaatgtttgcttctcctctatattctgaaggagattgtgtatgattggtgtcatttcttccataaaaacttgatagaatttaccagtaaagtcatttgtactaggtgggcttttcttagcaggaagattttaaattgctaattsaatatatttatgtgtcatagatctattcagattttctcctttatgaatcgattttgataatttatgtatttccagatacttatccacttcatttaagtcatccataattttggcatttattgttcgcattattccctataaccattgtaccttttgtaaggtcagtggtgatgtcactctttaagtcatggttttgacaatttgggtcaggagaagatttggaggaggagagaacaaggttgtcttgatgttgtcttggctggagtgtgacttggagaaaaatgacttgaatgaaaatacagtcagagggagatatctgtcaagtggttctggtgcctggatttccacatgtgtggtgacagagcccagcccagtgc

SEQ ID NO: 729053 - DNA, 608 bp, Homo sapiens
gcaggacacaggtctataggatatttttgtcattcctttgtcgggctctggtatcagagtaattcaggcctcaaataggtagtagggaaatgtttgcttctcctctatattctgaaggagattgtgtatgattggtgtcatttcttccataaaaacttgatagaatttaccagtaaagtcatttgtactaggtgggcttttcttagcaggaagattttaaattgctaattcaatatatttatgtgtcatagatctattcagattttctcctttatgaatcgattttgataatttatgtatttccagatacttatccacttcatttaagtcatccataattttggcatttattgttcgcattattccctataaccattgtaccttttgtaaggtcagtggtgatgtcactctttaagtcatggwtttgacaatttgggtcaggagaagatttggaggaggagagaacaaggttgtcttgatgttgtcttggctggagtgtgacttggagaaaaatgacttgaatgaaaatacagtcagagggagatatctgtcaagtggttctggtgcctggatttccacatgtgtggtgacagagcccagcccagtgc

SEQ ID NO: 729054 - DNA, 561 bp, Homo sapiens
ccgggaacgtctgataatgatgcactcaggcaggttctatcaatgactaacaataataacattctagctgcatgctcatttctccaaaacatttaaacactagtcttaaattttatctttagacatgtttgtcagataacatgttccttccttggtggaggaacctgattcacaaagaggctattggtggcctgctagagaccacacagcatgacgtggtggcagatctggaactggyacccagggctctgatcccttgagcacttgcattacgggaaccagcaacccctgggcccaaaggtccccttttggatcctatgagtaagttcagaactggcactcacagggggcataagcactagtgtcctctcagaggtgactggcacaccactgggggctgacttggatgtcagtgtgacgaggtgtaggaagcattcacacaactgcatccttctaattcagtgagacgcgtcgcttcacattaaacaggcttttagagaacacacatggctgtgtactaacctggcgatgtccattcagagtatttctgtaatactgaaa

SEQ ID NO: 729055 - DNA, 528 bp, Homo sapiens
ataaagaaaagataccgcatgaaattactttttaaatgtttccattccaaattactactggaaggaagctgtctttcccctgttaatctgtcggagaccaccttttgcaatctaatttgtatctacatttttaaagtaagagataaaaaatttaattataargaattttaaaacttctttttttacctttgttttacagcaattatcacaagaaacatctgggtgtttcttacaaaaatcaggattaaatccattttcaccaaagtaggccaaaagctgtattctcctgcattccgttatattttcacagtaatgtaccatgctatacaaattattgaagtgagtttctcttgtatgatggtttccatctttttccactaaaagagatgaagactatagtaagacatacttataggggaaaaatagagcatatcatagaaatatttagaatagattcatataactttaaatattaaataagaaaattactgttaacagcattgtcaacatggcattctatattataat

SEQ ID NO: 729056 - DNA, 562 bp, Homo sapiens
cgaattcctcacctcggaattcacccgccttggcctccgaaagtgctggaattacaggcgtgagccaccacacccggctgataagaaattttattttattttattttatttatttattttaagacagagcctcactctgtcacccaggttagagtgtagtggtgcgacctcggctcaccaaaaccttcgcctacagggttcaagcgattctcctgcctcagcctccagagtagctgggattacaggcgcctaccaccacgcccaactaatttttgtattttgagtagaaatggggtttcaccatgttggtcaggctggtctcgaactcctgacctcatgatccgcccgcctcagcctctcaaagtgctgggattacaggcgtgagccaccrcacccagctgataagaagttttaaaacaatctaagatacaaaaacattagaacaatggctgcctctggatgtgggagatttttctggacagacagaaatgttctatatcaggatggaagaaggatccatttgtccaaaatgtataatgaagatttgtgcatttacatgcct

SEQ ID NO: 729057 - DNA, 595 bp, Homo sapiens
ttagcagcccggcccacacagccccagcttcctggaacccaaaggcgccccaaggattcccacagccacgcctaggagggacagaaagattcagctggaagcctcagggacgcctgagcactggggaccttcacacccactcccgagggctgcctgagacagggacctttgcctgcctgccccaccatggctcrgcacacgccagaggaaccagccacacacatgtcattccactagcacacgtggatgtaagtatacatgcacacgcatgggcacaggggcacgtgggatgcacacatggacacacacacgcccaggatacccaggtacacacagatacatgcacgcagacatacgtatcattagacacctgtacacacctgagcacagcgcggcacacacgctcccgtgcacatccacacaccacttcacacaggcatcagtagacacacctgcacacgcttctcacatactgacaaagccccattggacacgtgcacagacatgaacgcatacacatgtgcccgcaggcactcatccacatactcagaccacatcacactgcaaggggcattcgcatgtacacacacatggg

SEQ ID NO: 729058 - DNA, 623 bp, Homo sapiens
gtgtcctaagagttagaaacttccaagtttcttgttcttgggttgactggccagcttgtgagtgttcaaagtaattacaagttaaattaatgcatcaataaagataatagggaaagagcggaacaaaaggctggagaaagcaaccagcaagggcaccagatggccgatcccagggttccttcctctcttgtcgaaacgccgctaagcgctgccttcaaaaccaggccatgtgctggcaggcacgggcccctgggaacatgcctcacgtggagccgggcatctttggggaaagaaagccatgggctgggggtgaggcaracagctctgggcccaggcaggctcctgcgtcgttcaggctcccctgaactcctggcagcccatcccatggcagcctggcaccggctgtgcagtcacccaggcccgtgtttgggtttgtttccaccacaacctgaatgtatgaccacagtcccccaagacaccaccatgccaagacgtcatcttctgttccgggacattcttaatgatctcacgtctcatctgcttatgtataaatcccaccacaaaacatgatgtgtcttttcttctcagtctctgaaaatgagccgataatgttacccagctgc

SEQ ID NO: 729059 - DNA, 606 bp, Homo sapiens
ggactcaggcagctcggactcggaggaggagcgggccaccaggctggcggagctgcaggagcaggtgggcactggcatgcttgggtggggttcaggggctgaggcgggattgctggcacagcagcccaaggtccgtccctttgcatggttccttcctctgcccstgtccctcagcagccgcggtagtgcttccccgtaaagacactcggagtgccctccccaggtctggggtggtgcgagcctaacccacagcacacgtgggtggctgcggggacacgtggctgggatgtttctggagacctggcgggcctcaggtgggagctcaggggtcatgtgtggttatgtgtgccttgctctgctccagaaaggcctgtgaggcacttgcagaggccacagtagtgcctgggctccaagcagtcacttgcagtggggtggggtgcaggctccagggtcctgagggccctgccgtgcagctgcccagccccagtcccgctgccaggctgtgcttcctcccccttctctgctttcctcgtttgcagtatgggacaaatgtcacccactctgagctgtcttgaggtcagattgagaaagatgtgaattgtttcc

SEQ ID NO: 729060 - DNA, 517 bp, Homo sapiens
aaatagacatttatttttctctcacataaaagtggttttgagaggtaagcagtccagggtgattatggtcactgcacaggctcagaaacattgtcacctttctattctgccatgctgtagtatatttcttttcttttctttctttttttttttgagacagattcttgctctgtctcccaggctggagtgcagtggcatgatttcagctcactgcaacctcttcctcttgggttcgagcaattgtcctgcctcaggctcccgagtaactgggactacaggtgcgcaccaacatgtctggctaatttttatgtattttttagtagagacagggtttcacatgttggccaagctggtctcgaactcctgacctcaagtgatscacccgcctcagcctatgtctcacatacaagatggctgcatagctctagcctttaacattaccattccagaaagcagaaaggaggaagagacgaaggacctaccccctttccaaagacacttgccagaggaaccatac

SEQ ID NO: 729061 - DNA, 602 bp, Homo sapiens
tgtttattctgcttgtgtgctgaattgccttccttcttgttggtgtgcataggggtctgcacattgggcacttataaatattatcccacctatcaagtgaagaaaaaaatgaactctcaaacacccatcacttcctctttttctatcacagatgtgaggaaaaaacagatgtttgaaagaattgatagtttgaaggtgttgtattgattacatcatggccaggagagatgagcaacrgataagtgtgggtgatcactgagaattcatgaggaaatgtttattgaattataactacgatggcgaccatgtactgagtgtgtgttatactaggcactgtgcatgttaattcttccccattttaaaggcagagattacaactttacacattgttgaaatgaaatttttgcctcattaaacttgggcacatgtataatcgcaagtaaaattaaaattattattttgagatggagtctcgctctgtcgcccaggctggagtgcagtggtgtgatctcggctcactgcaacctccgcctcctgggttcaagcgattctcctgccttagcctccctcgtagctgggactacaggcgcctgccaccacgc

SEQ ID NO: 729062 - DNA, 573 bp, Homo sapiens
atgaagatggggagggagggaagggagaagaagggaagaattcagacacagagacaaactttcaccccacaaatattatttaaatgcctcctatggaccaagtactgtgttaggcatcagggacagagatgcttacactgaaggcagagaaagagaacaataaaatccacaacttttcaggttgtgaaaagttcttggaagtaaaaaaaaaaaaaaaaaraaaagaaaaaaaaaagcaaggtgctgtgcttttgtgctttcatcggatggttaggaaggacatttctcagtgggtgacattgcaggctggatgtgaacaaagggagcgagccagctaagcaaagatcccgggatggagatttccaggagatgagtggcttgttccaggaacagcccaggaacagcaaaagagttggtggctggggaagaagtacaagaagcagcaggaagcaagattataagatttcctgtggcctgagcatgaggaggaggcggtggaaggttcagaacagaggagggacgtgatttgatggtacattttcaacaggatccctctggctgccaggttgagca

SEQ ID NO: 729063 - DNA, 633 bp, Homo sapiens
atgacaataatttattgtatatttcaaaatagctatgtattaggattctcttagagagatagaactaatagggtgtatatacatatatataaaggggagtttattaagtgttaacttacatgatcacaaagtcccacaataggctgtctgcaagctgaggagcaaggagagccagtccgagtcccaaaactgaacaacttgctgtccgatgttcaagggcaggaagcatccagcacgggagaaagatgtagactgggaggctaggcccatctcgccttttttgtttgtctgcctgctttatactcgctggcggctgattagatgctgtccacccagattaagggtgggtctgccttccccagcccactgactcaaatgttgatctcctttggtaactccctcacagacacacccaggatcaatattgcatccttcaatccaatcaagttgacactcartattaaccatcacaagctagaaggaaagatttggaatgttcctaacacaaagaaatgataaatgtttgaggtggtgaatctcctaattaccctgatttgatcattacacattgtatactggtatcaaaatatcacgtgcaccacgttagatatcaccccatgatacataatagct

SEQ ID NO: 729064 - DNA, 529 bp, Homo sapiens
ccacagccacggatcaaaaatatctggaggccgggcatgctggcttatgcctctagtcccgggacattgggaggccaaggcagaaggatcacttgagcctgggagtttgagactagcctgggcaacatagtgagacttagtgtctacaataaaaaataaaaaaaaattagcattagccggacttggtggtgcacacctatagtcccagctacttgtgaggctgaggcagaaggattgcttgatcccaggaggcagaggttgcagtgagccaagatcatgcccctgcggcccagtytaggtgacagagcaaggttctgtctcaaaaaaaaaaaaaaaaaatcccacaaaaactcttatgggaaaaaaaaaaaaggcaattaaaaatacaaataaaacatgcagtgtaagaactatttacataacatttacattgcattagatattataagtaatctagagatgacaaagtatatgggaggatatgcatggttatatgcaaatactgtgctattttatgtcagggacttga

SEQ ID NO: 729065 - DNA, 558 bp, Homo sapiens
gaggcacgagaatctcttgaacctgagaggtggaggttgcagtgagccgagatcgtgccactgcactccagcctgggcaacagagtgagactctgtctcaaatcatcatcatcatcatcatcatcatcatcatcatcatcataggggaaactgggtatgtggtatatgagacctcttatgctatcaattatttctgtaactctaaaactattctaaaataaaaaggttattcaagaacaaatgtagatacttggaagatttttttaacgtgaactggatgttaaataatattagagcataggtattattagatgggaaaaatmtgttgagttataaggataatgcccttactttttggcaatttgtgctgtaagtatttaaggataaagtggcttggtatatgaacttactttaaaatgattcagcccaactcctggggaatgactgtctgtgaaaacctattaggttaaaagctgtcagggactttacaatgggtagattaaatgatgcaacaccggaacctacttaatatcacaaaaggagacaaccagacattat

SEQ ID NO: 729066 - DNA, 579 bp, Homo sapiens
accagagcatttactgcagtatctcgaaccacttggtaggggtcccactgagaatgacttgactggccactaccatgctgccctaggtagtttgctacagtaaggaccccagcgcatcatgcatccattactctgtgtgtgcctctcctcattgactytgggcttggctttgtgacttgctttggccaatggtacatgtacaaacctggtgccagcagaagtgtaatgagtacttgtgcactgaggcttcctctctgagaccactgatgagggagctggtctacagtaaaccacgtgagaggccacatgcagaaccaagatgcctcagccaacagctgacaccagctgccagacatgtgactggcaaattcaaagcctttgaattcatgaaagaggaagatttttctcgtacaatcttaggaggtagggaaagtgcccagcagagagctccttcaacacggaaaacaggtagccctggccacgtggagctggagaggggagatgcagacagagctaggagtggccagaagccagaaaaagttgagtctggcaaatctctcggccaccttgactagagtt

SEQ ID NO: 729067 - DNA, 669 bp, Homo sapiens
tgtggacacatgctttcatttcttttgagtaaataggataggaatggttagatcatatagtaggtgtattttaactttctaagacactgagaacctgttttccaaaatggtatatttctgcattcctgccagcagtatatgagagtcccagctcctccacagcatcaccactcttggtgtggccagtctttttaattttagccactctagtaggtgcttagtgatatctcattgtggttttggcatacattttcttaatgactgttaatgttaagcttctttttatgctcttatttgccatctgtattacctttagtgaagtgtctgttcatatcttttgaccgctttttatggagttctttgttttcacattatgtgtatatgtattatttatattctggatacaagttaggtrtgtgatttgcaaatattttctgccagtctgtggctcgtcatttcagtctcttaacagtgcctttcaaacagcagttttcagttttaatgaagtccaaatttatcagtttgtccttttaatatagtgcttttggtttggtatataagaaatctttgactaacctaaggttacgaaggtttatgttttcttcttgaagtttagagtttttactacgtatacttaagcataatttatatctacagtttataggtttg

SEQ ID NO: 729068 - DNA, 577 bp, Homo sapiens
aggacattgttataaccccagaaaactttctttgtgtcccttccttctcactttcaccaccatagacatggactcatacctatctactctttgtgtctggcatctttggcttggtgtgatattttcagattcacctatgttgttgcctgaacctgttgtttcctcctttttatggcgcaatagtwttctgttatatgaaactaccacaactggtttagccattcacctttttttttttttaacttttattttagattcaggggtatatgtgaaggtttgttacataggtaaacacgtgtcatggggggttgttgtacatattatttcatcacccaggtattaattaagcccaatacccaatagttttcttttctgctcctctccctcttcccacccttccccctcaagtggaccccagtatctgttgtttccttctttatgttcatgagttctcatcatttagctcccacttataagagagaacatgtgatatttggttttctgttcctgcgttagtttgctaagaataatagcctacagctccatccatgttcccgcaaaatacatgatctcattc

SEQ ID NO: 729069 - DNA, 621 bp, Homo sapiens
catatttcagactatcacatggggagaaaccttggacaatacctagctttcctaggcagaggtccctgcggccttccgcagtttttgtgtccctgggtacttgagattagggagtggtgatgactcttaaggagcatgctgccttcaagcatctgtttaacaaagcacatcctgcaccgcccttaatccattcaactctgagttgacacagcacacgtttcagagagcatggggttgggggtaaggttatagattaacagaatctcaaggcagaagaatttttcttagtacataacaaaatggagtctccyatgtctacttctttctacacagacacagtaacaatctgatctctcttgcttttccccacaaatactaatttataaccatctttgttgttgttgttgttgttccaggatcttgtgcttggccatcatcttttattcttttattaggatttcagattgaaaagtggttgaggtgtttgttagtggctttaagaaaaactttgccaacattttagttaggtgtttaaaactaaagtgaaaggacaaggggcactgtttccactctctaaatcattattgaaacttcactggaaatatacatgtggcagtgcaa

SEQ ID NO: 729070 - DNA, 618 bp, Homo sapiens
aactccaacgtgttctccatgttcgaacagacccaaatccaggaatttaaggaggtgggtgcagctattgaatcatccgcctggatggaaatcccacccacgagggagaaccttctttttgttccatattcccagcagggacctttcattagatgcctctatcctccaaacaatcccaaattcggcctgaacggatgtgtgaatttttaaaagaaactatttttaatattttcactgattatcaaagtaaaacatattccatgttgaaaaatgttggaaaatttttcagaaaagcacagaaaaggaaataaaaactacctacaattctattacccagagataatcagttcacattttagtatayacccttcaaaccatttttgttatctatgtatatatttattaaacaaaattataatcttctgtgcccactgattacacctgcatttttttcgttgagaaattcaccattaacatttcctatcatgtatttaaaccatttcctatggttaaatatgacatttgtttataatgttttactactataaataacacctctttgcttgtatctctggttatttcttgggggtaaattcctaaaagcagaactgctgggtc

SEQ ID NO: 729071 - DNA, 646 bp, Homo sapiens
gcctctctgcctggctgcttccttccctcactctacctccccatctccactgagatcccgggaaaaaaatccctccccatggcccagcctgctattgtctctcggtccctacagttgctcctcatagggaggctgttggagagagagagaacrcggaaggctccgggtggatttgtgcagcccttaaaacggggctctgcttcatcgaatctcagttttgtgaagctctcctgctgagcccggcctctgctccagattcatccgtatgggcagacctcctaaagacaggttcagtccaaggacaggttcgaggtcgaagatggggttcagagctctctctgagggcccatgctctctagtttcctatttgcaggcacaccttttatgaacagcttggttctgggctaaaaatgcgtgggaaagagctgaggccctaaattcaggcagacctggcttcaagtgctagcccaacaataactggcctggtgacttgaacttctgtgggtctcattttcctgtcctgtaaaatggggatagtagcagaaattgtatatttggaagttaaatgacagaacatgcaaatctcttagcacagagcctgacacaatgaaagtaattcatttttttaaaatagcttttttttttt

SEQ ID NO: 729072 - DNA, 646 bp, Homo sapiens
gcctctctgcctggctgcttccttccctcactctacctccccatctccactgagatcccgggaaaaaaatccctccccatggcccagcctgctattgtctctcggtccctacagttgctcctcatagggaggctgttggagagagagagaacayggaaggctccgggtggatttgtgcagcccttaaaacggggctctgcttcatcgaatctcagttttgtgaagctctcctgctgagcccggcctctgctccagattcatccgtatgggcagacctcctaaagacaggttcagtccaaggacaggttcgaggtcgaagatggggttcagagctctctctgagggcccatgctctctagtttcctatttgcaggcacaccttttatgaacagcttggttctgggctaaaaatgcgtgggaaagagctgaggccctaaattcaggcagacctggcttcaagtgctagcccaacaataactggcctggtgacttgaacttctgtgggtctcattttcctgtcctgtaaaatggggatagtagcagaaattgtatatttggaagttaaatgacagaacatgcaaatctcttagcacagagcctgacacaatgaaagtaattcatttttttaaaatagcttttttttttt

SEQ ID NO: 729073 - DNA, 646 bp, Homo sapiens
gcctctctgcctggctgcttccttccctcactctacctccccatctccactgagatcccgggaaaaaaatccctccccatggcccagcctgctattgtctctcggtccctacagttgctcctcatagggaggctgttggagagagagagaacacggaaggctccgggtggatttgtgcagcccttaaaacggggctctgcttcatcgaatctcagttttgtgaagctctcctgctgagcccggcctctgctccagattcatccgtatgggcagacctcctaaagacaggttcagtccaaggacaggttcgaggtcgaagatggggttcagagctctctctgagggcccatgctctctagtttcctatttgcaggcacaccttttatgaacagcttggttctgggctaaaaatgygtgggaaagagctgaggccctaaattcaggcagacctggcttcaagtgctagcccaacaataactggcctggtgacttgaacttctgtgggtctcattttcctgtcctgtaaaatggggatagtagcagaaattgtatatttggaagttaaatgacagaacatgcaaatctcttagcacagagcctgacacaatgaaagtaattcatttttttaaaatagcttttttttttt

SEQ ID NO: 729074 - DNA, 646 bp, Homo sapiens
gcctctctgcctggctgcttccttccctcactctacctccccatctccactgagatcccgggaaaaaaatccctccccatggcccagcctgctattgtctctcggtccctacagttgctcctcatagggaggctgttggagagagagagaacacggaaggctccgggtggatttgtgcagcccttaaaacggggctctgcttcatcgaatctcagttttgtgaagctctcctgctgagcccggcctctgctccagattcatccgtatgggcagacctcctaaagacaggttcagtccaaggacaggttcgaggtcgaagatggggttcagagctctctctgagggcccatgctctctagtttcctatttgcaggcacaccttttatgaacagcttggttctgggctaaaaatgcgtgggaaagagctgaggccctaaattcaggcagacctggcttcaagtgctagcccarcaataactggcctggtgacttgaacttctgtgggtctcattttcctgtcctgtaaaatggggatagtagcagaaattgtatatttggaagttaaatgacagaacatgcaaatctcttagcacagagcctgacacaatgaaagtaattcatttttttaaaatagcttttttttttt

SEQ ID NO: 729075 - DNA, 556 bp, Homo sapiens
gaatatctgtggccaccagagctggaagaggcaagaagctctctccctgagagcctccagagggaatcaaccctgctgactcttgactttaaacttctggcctccagagctgtgagaaaacacgtttctcttgttttaagacccccagtttgtggcaattaattacagcaacccttggaatctaatatattgaccattccaaatgctggggaagaatgtggaggaactggaactcttgtacattgctgatgggaatgtaagatagtacaagcgctttggaaaccagtttggcaatktttttaaaaaagttaaacacctgctgcaggatccagccattctgctcctaggtatttacccaagagaaaagaaagctgtggtaggcaaaataatggcccctgaagatgtccatgccctaatccctggaacccataaacatgttaaattacatgacaaaggagactttttagatgtgattagattaaggatcttgagatggagagattgttctggattatccaggtgggcctgatgtcatcacaagggtccctataagtga

SEQ ID NO: 729076 - DNA, 556 bp, Homo sapiens
gaatatctgtggccaccagagctggaagaggcaagaagctctctccctgagagcctccagagggaatcaaccctgctgactcttgactttaaacttctggcctccagagctgtgagaaaacacgtttctcttgttttaagacccccagtttgtggcaattaattacagcaacccttggaatctaatatattgaccattccaaatgctggggaagaatgtggaggaactggaactcttgtacattgctgatgggaatgtaagatagtacaagcgctttggaaaccagtttggcaatttttttaaaaaagttaaacasctgctgcaggatccagccattctgctcctaggtatttacccaagagaaaagaaagctgtggtaggcaaaataatggcccctgaagatgtccatgccctaatccctggaacccataaacatgttaaattacatgacaaaggagactttttagatgtgattagattaaggatcttgagatggagagattgttctggattatccaggtgggcctgatgtcatcacaagggtccctataagtga

SEQ ID NO: 729077 - DNA, 553 bp, Homo sapiens
ccaggatggagcagacagtgaaggaaaccaacattctggatgccaaggttgggctcctccgcaaccttgctgggtgataggcttacaaaaggcaggggtgactcagctggacagcattaaggacctccacattcctgcggggtctttggtctcacagtgcaacatgaacatatcacaccggtggccacctgggtagcagtagccttgtcactaaagcgaatctctagagccagactctttgkcttgaatccagctctgccccctcagctgtgtgaccttaggcaagtgacttaacctctctgtgcctcagcggtgctcatcagcgaaacaggaataataacagcacccccctcctggggttcttgtagcacagggccacgcacgtgataagcacaaaataaatggaagccgtcactgttattattctctccatcctgcataattaacaggctagacccgagtttgcaaactggcaggccggggtccaactccccagtaaatctgttttgtttggcacaaactgcattgttaaaatttttgtctgaacttgttg

SEQ ID NO: 729078 - DNA, 553 bp, Homo sapiens
ccaggatggagcagacagtgaaggaaaccaacattctggatgccaaggttgggctcctccgcaaccttgctgggtgataggcttacaaaaggcaggggtgactcagctggacagcattaaggacctccacattcctgcggggtctttggtctcacagtgcaacatgaacatatcacaccggtggccacctgggtagcagtagccttgtcactaaagcgaatctctagagccagactctttgtcttgaatccagctctgccccctcarctgtgtgaccttaggcaagtgacttaacctctctgtgcctcagcggtgctcatcagcgaaacaggaataataacagcacccccctcctggggttcttgtagcacagggccacgcacgtgataagcacaaaataaatggaagccgtcactgttattattctctccatcctgcataattaacaggctagacccgagtttgcaaactggcaggccggggtccaactccccagtaaatctgttttgtttggcacaaactgcattgttaaaatttttgtctgaacttgttg

SEQ ID NO: 729079 - DNA, 638 bp, Homo sapiens
ataatttcagggcagctttgtaacaacattcaaattgacaagggtttcaaaacctttcattttaatggtctcgcccagacaatctgccatttaaatttctgtaggagaaatactgatatttacagaaacttgtggatcctgacaaccttgcttaatttatctatttgaagttgatttttacatgctaggttttactaagcagaaagcaagaaaaaaatgaagtttttaaaagatttagaccaaaatactattatgccatttcggtcttcacttaagtaactctaagacgggatttctcaacctctgcattactgacattttgggctggataattctttgttgtagggggctgtcttgtgcatagtaggatgtttagcagcatctctggtctcctctatccactagaygcccatagcacccctgcctcaccccttcctgaccccacaacttctgacaaccaaaaaaaaatatctccagacatagccaaatgccccttggggtagaggagagggagataaaatggccctagttgagaaccactgctgtttattttgtgcatcatcaaaactaaagtttctactacagtaagcctcggtgtttatttttacaaaggaggcatatagcaagtagaaccaaaa

SEQ ID NO: 729080 - DNA, 554 bp, Homo sapiens
cttgttgaaagatttatcattttccttatagtggttaacacagtcttttgttatatttcttcccaaatactgtatgtgttttatttttgttgttgttatttaaatggtatgtcttaatatatattttctaaatgatggttgctggtttatgggaaatatatatgacttttttccattaatattgaatttactcttataaattctgataatttacctgggatttttttatgtacataataaccaccttgaaatattgattgttttctttctaactttccaattcttaaatctttcaatacttttcctttactacattggctggaacttttataacactgttgaatagaaccagtgataatagcctacttatcttattcctratgatagaaagatagctctgaacatgtcaccattaagtatgatctttgtatataccctttatcaaagtgaagacattttcttccacttttggtttgctagtttgggttttttgtttgttttgtttagttcccatcatgattgatgattgagttttaccaaatgcagtttcttca

SEQ ID NO: 729081 - DNA, 643 bp, Homo sapiens
agtaaaatgctatcaaaaagcatcgcatgctacagagaaatcttttgtgaaaggtagagccaattgatgcagcaaacttccttgctgtgttattttaagaaattgccatagccaacccagccttcagcaatcaccaccctgatcagtcagcagccagcgacataaaggcaagaccctccaccagcaaaatgattacaactcactaaatgctcacatgatccttagcattttttagcaataaagtrttttttgttttttgagactaggtctcactctcgcccagactcctggagtgcagtggcactatcacggctcactgaagcctcaaccacccgggcgcaagcgatcctcccacctcagcctccagaatagttgggactacaggtgtgcaccaccacgcctggctaatttttgtattttttgtagagatggggtattgccatgttgtccaggctggtcttgaattcctgagctcaagcaatcctcccgcctaggcctcccaaagtggcgggatcacaggcatgagccacctcgcccggcctgcaatatagtaattttaatttaggatactacatttttttaaggcataatactattgcacactgaagactacaatatagagtaaacataatgtttatatgca

SEQ ID NO: 729082 - DNA, 632 bp, Homo sapiens
gactgagagtgtagaagttgaagctggggaagagttaacatgatgctatctggagtgaccctgatgaagcagaactgcatgggatttggacaggatgacagatgcctttgcctctgagatgggaggaaatggggcctgtgctgcccatacttgaatttcatttgtgatgaatctttgactacaaggacaaattgacccagtactttcatgtggaactagctataacaaaggatatttaaagttttaagtgagcttgttttaacctcacaaagtattatatataaatartatggtcatttaaaatttcccaattattgttatttgttctggatcttaagctcatatcataagaacattgatggggctaagtttctggaagtgacagatcttgtgcttgtggctggctaatgaatcacccaggaagtttgagagaccaggatgttacctccagattgtgggacttccaggcttccgccctatcaggcaggcacatctgcttctccagatgaaggaaacaaaaccagaatagaagagtcagttggcaaagcaacaaggtcaattcttgccctctccttcctggtttcctgcactgacctggaactatctacgtgaactgccttcaaccaattctg

SEQ ID NO: 729083 - DNA, 583 bp, Homo sapiens
ttaggcatgcattaaaattcccatattaagtgaaatatcatgtctactccacatgcagacattaatgggaaatttagtttgtaaaaaatcatatctgtgtacacagttacaaatttttgcaaaggaaaaatgaataaaatattcctatagccataatggcaaagaaaacactgctgcttctctggttggagtcacctgagccaatggtaaacctgcctctctgtttctcaccagtacccttcctatggttacgagcccatgggtggatggctgcaccaccaaatcatccccgtgctgtcccaacagcaycccccgactcacaccctgcagcctcatcaccacatcccagtggtgccagctcagcagcccgtgatcccccagcaaccaatgatgcccgttcctggccaacactccatgactccaatccaacaccaccagccaaacctccctccgcccgcccagcagccctaccagccccagcctgttcagccacagcctcaccagcccatgcagccccagccacctgtgcaccccatgcagcccctgccgccacagccacctctgcctccgatgttccccatgc

SEQ ID NO: 729084 - DNA, 681 bp, Homo sapiens
gctcttagtaggtggtcattaaattttagcataaaccatttcttgaagagcaaagatagcagtccccctcccccagcttctatcttttcattcactcatttagcagcttttaactgagagatcaataaagttacatctctcagggtaacaagactcccttaatttatcatgtttagcagtcatataaaaaaccctaattttattttttttytaacattctttccttccttcactaaataaaacacacaggaatgtgtctggtttgcaacgttcaattataaggtctgagggataaattcagtatcatgaacatttaaaagtgtaatttgtctttggaattgttcttaataccatcatacccatacagttacaaatgttgatatttaagcctgtagagattatattctgtgcaggcacaaaaacactactgaatataaattattttcagtaagaaaaaagggttataatttttcttagttataacagtatatgtcagaagatgaaaatagagaaaagctaatcaaattgcttacaattctcacatggagaaaggtgaatcaatttaacactatgctctgaatactataaaactcgtttaggaaagcactgggaaataaataaataccagtgcggacctactggtttcaatcatatttcatattaaattggctaggcagagaa

SEQ ID NO: 729085 - DNA, 477 bp, Homo sapiens
gtaagttactaaaactttatcctaaaagcaatattacattgattaggaatttcaatgaattaatgatttgacacacaggctgtagtcatgcgatttctaatcacagaataaaattgatattgacactccagaactgaaggaaaaacatttttaaaaagaccagtttctcatacagtttttcacaaacacaatctatacrctaatgttgaattagaacaaagagtatttcctccacatagttctttaaattcttcataaggtttgtgactgggaagtgctgactggagcatacagtaccaattctcagtgtcataactgtgcttggaaagagagccaattctaaaataactactatccaagcagcagatgtgtttatagatcaacatattgacttttatataatacaaagtaaagatcaaagtgcacaaaatcaatgtagtcaagatgatggaaatcagaattttgttgaactaggcc

SEQ ID NO: 729086 - DNA, 562 bp, Homo sapiens
tttaaaacttttttcctttcttgctttcagccttgaaacatactttgaaactctgtttcctcctttcccaccaggcatttcagtgaacagtgctcgcttatgtaattatgtgcttgccttaaaattccaggggccaatttttaaacaaatcaggcagagagagacccagaggcagaatcctmctgcttaggaggaattacagatacagatagtccaccactaccgagccaaagtcaaggtgatgcaaaccggatcttccaacgggcgattacttgatagccatcggaataaaacatagacttgcaacctcctgcaccactctagcatacttcccacaccttttccctctcaaactccttcatccggcccaaaaaactaagatggcttatttgaggcagaagcctggccatctcccatctgctagcattcaatcaataaagttgctttcctttcaccatatctcacttctcatgtttttggcctctgactggcgagcagtcagacttgagatagttacagataacaaaaaaaaatggaaggaggaggaaaagaaggaggtggt

SEQ ID NO: 729087 - DNA, 646 bp, Homo sapiens
agggatatgaactaagtgagttaatatatgtttaaatactctgtaaactgtgcatggatatatgtgtggaagttgcatattagtagtggtaggagtaaaaagaataggctgggaatttcggtttatgaaacatcagagtcagttgaaaagctgtagacatgcaagcagaagtgagtgggatgcggctaagcatttgtgggctcttgtggctcggttagaattacaagacagcactttagaactgcttagcytgagctagtcaggacttactcgggtctggaatcaattcagaaatacatctggaacaccctcctgaggacctctttgccttttgtttatgtctactaaatttcaagttctttctcagtttacagaagtaacatcaggcacataattcatgttttaaaagaagagagaaagagacgtggttgtcatatgtgaattagctgctttgacttttttcaatagtggattgatcacatgcctctaatttaactcccttttaaaaccacaccaaaactacaataagggattttttttttttaaagaaactcaaaaggactggagatatgtgagaggaaataaccaaatttcagaagctggaaagcatttgagcaaatattagctgatttagcagatctggaaa

SEQ ID NO: 729088 - DNA, 492 bp, Homo sapiens
ccaatggtcaaatcatggacaatttagataactaaataagcagtgatagtaacgggttatgatccatagaatgaaataaatatccatgagttcatactgctatgaattaatgagtgagtgaatgaatgaaataccaagtcaccattagtgaaagaccactctgtaattatcgcaggcaagttcaaacaatgaatatcaaaatctayggatgaatatttgaggagaaacagggtgttagcatagtctgaaaatatctcccccaaatttagaccagttaaaaagggaaaaagagtaactttaacaactaagattattgacatcttgaactctctgatgtgatgcactgagaaaagtatgataactacaatattacttctgtgatatttgcccaaaggcataactccacatataatcatgataaaacctaggatacacacaaattgaggaaacttttacaaaataaattaccaggattcataaaaagtctcatga

SEQ ID NO: 729089 - DNA, 492 bp, Homo sapiens
ccaatggtcaaatcatggacaatttagataactaaataagcagtgatagtaacgggttatgatccatagaatgaaataaatatccatgagttcatactgctatgaattaatgagtgagtgaatgaatgaaataccaagtcaccattagtgaaagaccactctgtaattatcgcaggcaagttcaaacaatgaatatcaaaatctatggatgaatatttgaggagaaacagggtgttagcatagtctgaaaatatctcccccaaatttagaccagttaaaaagggaaaaagagtaactttaacaactaagattattgacatcttgaactcyctgatgtgatgcactgagaaaagtatgataactacaatattacttctgtgatatttgcccaaaggcataactccacatataatcatgataaaacctaggatacacacaaattgaggaaacttttacaaaataaattaccaggattcataaaaagtctcatga

SEQ ID NO: 729090 - DNA, 569 bp, Homo sapiens
tagatggaatgatagacaaaaacctgcttaatactttgtgtgattaaatttgtgaagagatagctcaagaggtgtaagaatgaggaccaagagaagtgctaaaatcacaatgagcagacaggtgggtacaggtaggtgtgttgccttgccttctgtacatacttttctgaaataggatgcttatagaaatgttataaattaaatgttctttatgtgcatcttacttgccaggaataccgtarggaagtctttgttgatgagcaaaatctctcccaaacagccctaaacttatcagatttgtgtacagcattttgagattttagatttttgtgtacagcattttcttgtcatgaggtatacctacatttaatatctgcaacagtgctttaagggtaattgggcagccttaaaaaaaaaaggtgtagtaacttgttaccatccctgaattgtagctttcatctagtacaaaggggggataacagacttcaacatttgctgagtatttttctccgcgcttttgtaacgttgtctcctcttagctagatgcccgtttgcttaatagttcccgc

SEQ ID NO: 729091 - DNA, 618 bp, Homo sapiens
ggtttagcaactgggaggctattggtggtcttgggaagaaaggttttaggtgcatttagtagtaaagggaggaggagataaaattgagaaagcaaacagaatctgcctttttgactttgtgcttaaatgcggatgctcctcagcttgtggtggggttgcattctgataaacctatcataagttgaaaatatcattaagtcaaaaattaacacacctaacctaccaaacatcataatttagcctaccctcccttaaatgtactcaraacacttccagtagcccacagttgggcagaatcatctaacacaaagcctattttataataaactattgaatgtttcatgtacattattgaatactgcactgaaagtgaaaagcagaatggttatatgggtactcaaagtgcggtttctacagaatgcgtatcgcttctgcaccatgtaaggttgaaccatttgtaagtctgagaccatttgtataacatacatataggaaagtaaacggggcataagtgaatttttacaaactaaacatactagcactctagaagctcttctcgtggcccttctagtcactacccagcttgctaagggtatccactattctgccttctaacca

SEQ ID NO: 729092 - DNA, 618 bp, Homo sapiens
ggtttagcaactgggaggctattggtggtcttgggaagaaaggttttaggtgcatttagtagtaaagggaggaggagataaaattgagaaagcaaacagaatctgcctttttgactttgtgcttaaatgcggatgctcctcagcttgtggtggggttgcattctgataaacctatcataagttgaaaatatcattaagtcaaaaattaacacacctaacctaccaaacatcataatttagcctaccctcccttaaatgtactcagaacacttccagtagcccacagttgggcaraatcatctaacacaaagcctattttataataaactattgaatgtttcatgtacattattgaatactgcactgaaagtgaaaagcagaatggttatatgggtactcaaagtgcggtttctacagaatgcgtatcgcttctgcaccatgtaaggttgaaccatttgtaagtctgagaccatttgtataacatacatataggaaagtaaacggggcataagtgaatttttacaaactaaacatactagcactctagaagctcttctcgtggcccttctagtcactacccagcttgctaagggtatccactattctgccttctaacca

SEQ ID NO: 729093 - DNA, 618 bp, Homo sapiens
ggtttagcaactgggaggctattggtggtcttgggaagaaaggttttaggtgcatttagtagtaaagggaggaggagataaaattgagaaagcaaacagaatctgcctttttgactttgtgcttaaatgcggatgctcctcagcttgtggtggggttgcattctgataaacctatcataagttgaaaatatcattaagtcaaaaattaacacacctaacctaccaaacatcataatttagcctaccctcccttaaatgtactcagaacacttccagtagcccacagttgggcagaatcatctaacacaaagcctattttataataaactattgaatgtttcatgtacattattgaatactgcactgaaagtgaaaagcaraatggttatatgggtactcaaagtgcggtttctacagaatgcgtatcgcttctgcaccatgtaaggttgaaccatttgtaagtctgagaccatttgtataacatacatataggaaagtaaacggggcataagtgaatttttacaaactaaacatactagcactctagaagctcttctcgtggcccttctagtcactacccagcttgctaagggtatccactattctgccttctaacca

SEQ ID NO: 729094 - DNA, 618 bp, Homo sapiens
ggtttagcaactgggaggctattggtggtcttgggaagaaaggttttaggtgcatttagtagtaaagggaggaggagataaaattgagaaagcaaacagaatctgcctttttgactttgtgcttaaatgcggatgctcctcagcttgtggtggggttgcattctgataaacctatcataagttgaaaatatcattaagtcaaaaattaacacacctaacctaccaaacatcataatttagcctaccctcccttaaatgtactcagaacacttccagtagcccacagttgggcagaatcatctaacacaaagcctattttataataaactattgaatgtttcatgtacattattgaatactgcactgaaagtgaaaagcagaatggttatatgggtactcaaagtgcggtttctacagaatgcgtatcgcttctgcaccatgtaaggttgaaccatttgtaagtctgaraccatttgtataacatacatataggaaagtaaacggggcataagtgaatttttacaaactaaacatactagcactctagaagctcttctcgtggcccttctagtcactacccagcttgctaagggtatccactattctgccttctaacca

SEQ ID NO: 729095 - DNA, 623 bp, Homo sapiens
gcatatggatctttgattgtatccatggaaatgagtgagtctatgagtgtgggtgtgtgatatatttataaaagtatgtgaaagtgacagtgtgtctgagcacatgttattgtgtgactgtgtataagggggtctggggaggaaaatttttcttatcctaagcttctccaagggaaatgtacaattgtggacttgtttacactgagcacatctctaatacttctgtatctgtcagctattgccacaataatgctgtgtaacaagtatctctctaccccacttagtggcttcaaatgacaaacagaaatgggaakagactggggataagagtaagacttctctaaaaaaaaaaaaaaaagaaaagaaatggggagagattgctaatacaataggtatagggtttctttttggggtgatgaaaacattctaaaattaattgtggtgatggttgcacagctataaatatgctaaaaactgctggattatactgtttacattggtgaatttaacagtacatgaatgacatttcacatactattaaaaagccacaacaacaaacattgattttcttgcttgtgagtgtacgaattaactgtaggtctgctggaatcacttgggcttgg

SEQ ID NO: 729096 - DNA, 362 bp, Homo sapiens
cactgatcatcctcaatctacagtgacttttgcattaagcagggttccttaaattgcaatctggcttaagaaaaaaaggggaatgtgttagtcatagaattgaaagatccagaggaggaagtggggccttcaggcatagctggatccaggtgctccatacatgtytttaggacatattctctgtccacctctcctctgagtggatttcatttttgggtagcccccagtgtgaacgaatgctagtagaaatgaaacatctttttcctaagagtttaatgacgtattctggggagagttcccactgggccagcttgggtcatgtgcccatttctgaaccaatcagggtgggtggtcagaagaat

SEQ ID NO: 729097 - DNA, 572 bp, Homo sapiens
ttgccatttccaccacatctgtggttattttcccccatgaaatcttgaacccctcaaagtcatccgtggggtgttggaatcaatttcttccagactgttaatcttggtattttgacctccttccatgaatcacaaatgttcttaatggcatctagagtggtgaatccttcccagaaagttttcaattgactttgccaaaatccatcagaggaatcactatctatggtagctacagcctaatgaaatgcgtttcttaaataataagacttgaaaattgaaattactccttggtccatgggctgcagaatagctattgtgttaccagatgtgaaaacaacaataatctccttgtacawctccatcagagctcttgggtgactaagtgcatgtctcaataaacagtaatattttcaaaggaatcttttttcttgagcagtaggcatcaacagtgggcttaacacattcagaaaaccatgctgtaaacagatgtactgtcatcccagctttgttgtttcatttacagagcacaggcagatttagtataattcttaagggccctaggattttcagaa

SEQ ID NO: 729098 - DNA, 567 bp, Homo sapiens
aacagctttaactatgacattcttttttttttttgagatggagtcttgctctgttgcccaggctgtagtgcagtggtgtgatcttggctctctgcaacctctgcctcctgggttcaagtgatgctcctgcctcagcctcccgagtatctgggactataggcatgtgccaccacgcgtggctattttttaatttttatttatttttattttttgtagagatggggtttcaccatgttggtcaggctgttctcgaactcctgacctcaaatgatctgcctgccttggcctcccaaagtgctgggattacaggtgtgagccactgcacatgaccaactgtgaaaatgttaattagccaaatgtctccaattctctaccagrttttaaagaatattttattatttagacttttccatatctttctcacctatttaatgattccttatgacattgtttaataaataaccttttcaaatctgtaatttgatctaacttttagataacttctgaattagacaaaattaatcttttttccactaataacataaccctttctggcatattttatac

SEQ ID NO: 729099 - DNA, 642 bp, Homo sapiens
ggttttaagccaggatctctctgggtagaaatgacgttctgtgctgctaatgataaatggtgaacaaggagattctctttagttttttagtctgtgtaagcacctaagtgccccagattctcaacatttgctgttttgtcttctctgggtcctatcttggccatctcacctcactctgagcttgcttctggaaggaggtaacagacgtcaactagcatctgcctgtttatggtgtttttctgttttatactcttgagttaatatgttctaatatctcgttggatggacctttcccaaccccatctcacccttccctttcaggattttgttattttctctcattcatgagacatgaatttttttctttctttttttttttycaattagtctaaggttgaattcccatcaccattgttttccacacacagcttcatcagtgatgatgacgagtcaaggatggcccgggcacgtggcttatgcctgtaatctcagcacttggagaggctgaggtgggtggatcactcgaggccaggagtttgagaccagcctggccaacatggcaaaaccctgtctctactaaaaatgcaaaaaaattttagtccagtggcacgacctcagctcatggcaacctctgcctcctgg

SEQ ID NO: 729100 - DNA, 642 bp, Homo sapiens
ggttttaagccaggatctctctgggtagaaatgacgttctgtgctgctaatgataaatggtgaacaaggagattctctttagttttttagtctgtgtaagcacctaagtgccccagattctcaacatttgctgttttgtcttctctgggtcctatcttggccatctcacctcactctgagcttgcttctggaaggaggtaacagacgtcaactagcatctgcctgtttatggtgtttttctgttttatactcttgagttaatatgttctaatatctcgttggatggacctttcccaaccccatctcacccttccctttcaggattttgttattttctctcattcatgagacatgaatttttttctttcttttttttttttcaattagtctaaggttgaattcccatcaccattgttttccacacacagcttcatcagtgatgatgacgagtcaagratggcccgggcacgtggcttatgcctgtaatctcagcacttggagaggctgaggtgggtggatcactcgaggccaggagtttgagaccagcctggccaacatggcaaaaccctgtctctactaaaaatgcaaaaaaattttagtccagtggcacgacctcagctcatggcaacctctgcctcctgg

SEQ ID NO: 729101 - DNA, 617 bp, Homo sapiens
tcactgcaacctctgcctcctgggttcaagcgattctcctgcttcagcctctcaggtagctgggactacaggtgcccaccaccatgcccggctaatttttgtatttttagtagagacaaggtttcaccacgttgaccaggctgatctcgaactcctgacctcaggtgatccgcccacctcggcctcccaaagtgctgggattataggcgtgagccaccacgcccggccagaaatgtattcttttacagttctgaaggctggaaatctgaaatcaaggtgtcagctgggttggctccttctagaggctctgagggagaatctgttygatgcctctcctagcttccagtggttgctgacaatccttggtgattcttggcacgcaggcccatcactccagtctctacctctgtcttcacaaaggtttcttctccatgtgtctgtgtatctccaaatctctctctccttacacagctatcagccattgcacttagggcctactctcctccagtataacctcatcttgacttgattacatctacaaagaccggatttccaaataaggttatattcacaggtacccagagttaagacttttttttttttttttttttttccaa

SEQ ID NO: 729102 - DNA, 650 bp, Homo sapiens
gtgagagggaagtgagcatgtctgtaaaagagcaataggagggatccttgtggtgatgaagacatcctgtatcttgactatatcaatgtcaatctcatgcctgtggtactatagttttgcaagatgttgccattggggaaaactgggtaaaggctaaagatgatccctctgtattatttcttacaacttcgtgctaatctacaattatctcaaaatagaaaatttaattaaaaagtcaaaacaaaagtgtgctgtttctctgcctaaggggaytggagaaattacacgggggcccagaaaataagaaagcaagagcccactcaatcctggctaaggaattagaaacaaagaagaaactaggaagcaagacaagatttccttcttatgactcggtagagctgacagttgagcccgacgtggaaggttaggtggttgggttatggtcaactgccatttgccatatgctcactgtattagtcagggttttgtacaaaaccagcaagatgtgtacatagacagagacatttattttaaggaggtgtgtgtgtgtgtgtgtgtgtgtgtgtgtgcattcaagcaagtcaagttttaaaaactaggaaaaaaaaccatgactcacctggtgggaaaagatagttataaccatcaga

SEQ ID NO: 729103 - DNA, 637 bp, Homo sapiens
actgttagatttgttattccaggttgtatatctattgtattttcaggaagtttcagctgatcctactgccacactcacagcagcagaagaaagaaaggagaaggtgccaagtccacacctcagtcacctagtggttttgacatctggggatacgytgtatgggttggcagaaagagtggtagccacggaatccttgtaagttgttcaaaacagttgcgttgccattaaatatttaagaaactttataaaagaagcattgtttaattagacttctagttagctgcatacatctaccacttctaaatatcacttatatgtttctgagaagtatattctaacacagattaccaattgattttttaaactgcatggttggtttttcagttatagaaatggaaagaaggaaatcttttaattttcagcctttaacaacatgatccatgctttaagtacaactttaaaaagcattatactatgcttcatattttcctattgatgacttatgatctcaggagaagctgtagttgcattgtcaatttagtgttaagtatagttgatccttgacatcaataagaatgcttcctggggagaagccaagatggccgaataggaacagctccagtctgcagctcccagc

SEQ ID NO: 729104 - DNA, 637 bp, Homo sapiens
tgagtaactaataaatatgtgtgtgtgcaggggacgctttgggatagagagaaataaagggaagaaaaatattttttaaaaaaaccgcatcatttaatacttcaaaatactcctttaatatcagggccagctttctccagccctgccctgtcgggggagtggaggctgaaaattctaccacctgcttaagacaggccttgccatgcctgcagctccctccccagcagcacccagggagtggascaagccttcctctctgctctctgtcgggtagcatgggatgagttctgagcactcaaatatcctctgagctccattattctgcctgcctttctccctcctaccctctcatctactcagatacagcagggttttcatgtctgtacaactcaacttctttggtttctgatgttttgtctcccttaatgagaaagatgatttccctaaaacctttcattgtttcctggagcatggacattttgtctaactctcactagcctggtccccaccagtgcttttgagttttgctcagaataggacagagcacctggaaccatgaatgacgctgtggcctctgagagtctgggaattgctcggaagaccccgtctacccactggacagttcctacttgtgtat

SEQ ID NO: 729105 - DNA, 637 bp, Homo sapiens
tgagtaactaataaatatgtgtgtgtgcaggggacgctttgggatagagagaaataaagggaagaaaaatattttttaaaaaaaccgcatcatttaatacttcaaaatactcctttaatatcagggccagctttctccagccctgccctgtcgggggagtggaggctgaaaattctaccacctgcttaagacaggccttgccatgcctgcagctccctccccagcagcacccagggagtggagcaagccttcctctctgctctcygtcgggtagcatgggatgagttctgagcactcaaatatcctctgagctccattattctgcctgcctttctccctcctaccctctcatctactcagatacagcagggttttcatgtctgtacaactcaacttctttggtttctgatgttttgtctcccttaatgagaaagatgatttccctaaaacctttcattgtttcctggagcatggacattttgtctaactctcactagcctggtccccaccagtgcttttgagttttgctcagaataggacagagcacctggaaccatgaatgacgctgtggcctctgagagtctgggaattgctcggaagaccccgtctacccactggacagttcctacttgtgtat

SEQ ID NO: 729106 - DNA, 603 bp, Homo sapiens
tctgtatactacgggttttttcacagctgaagagcactgagcttgggaaagttgccatttttataacaaagaaaagcaagtctgcttgcattctatttgtctagggtgtcattacttcattcctcaaggttgctagctacaaccccttcctgagaaatggatggagtaaagggtagttctgttagggctttgcattctcagcatatccggcaagaatgttcagggatattcagggcttatggggattgtttctcccaacacactcccattcaacctaataccagaggtcctaggcagtacaagaaggcaagaatataagtaagtctcacatgtttcaggaaaaagtaaactatctctatttgcagacaattgtctatayagaaaataccatggaattcacacaaaaaactcccaagactaatatatgaatttagtaaagttgcaggatatgagttcaatatgatcctaattacatatactaacaataaacaattggatttttttaaaaaattaggtgctacttcaacagtactgaagaaataattaaatacaaatctaacaaaatatgtgcaggatctgtaggccaagaactacaaaatattg

SEQ ID NO: 729107 - DNA, 654 bp, Homo sapiens
cattaatctgtactgttcatctacaaacaatgttcagtatttaatttaaaaattatttggcacatataagtcaagaacatattgctcatcatcaagaggtataatagtcaatacaactagattcagaaatggggtggggggctaggggagggatagcattaggggaaatacctaatgtaggtgatgggttgatgggtgcagcaaaccaccatggcatgtgtatatctatgtaacaaaactacacattctgcacatgtaccccagaacttaaartataaataaatgaataaataaaaacaaatagcctacatgttagaattatcagaaactttaacaaataataatatattaaaggatttagtggaaaaagtaatgatatacaacaaaaatgaaaaatttttaaagtactataaaaaagaataaataaaaatgctagaaactaaaaacatggtatcaaagataaagaatttttctgatagtcttatctgctgactagatataggagaggaaataatcaatgaacttgaatccatgcttataacctaactaaataaaaacacacacaaaaaaacagtgccaaataactgtaatggagcacttgtgatatttagcacagtataaaatcatttagcatatacactattggagtgcaag

SEQ ID NO: 729108 - DNA, 644 bp, Homo sapiens
taactctttagtggtgaaatagtactgctgatcatctcaaatcagtagcacatttcttaatcattcctaaaaagttctccacgttttcagtttctgagttttcagaaacatagttaacattctgaaaaaaacatgtaaatgtcatatccagttttgtaaaaacacaatttaaargatctaaatcttacatatcaatgtatgcagataagatactcaggggcaaaatggacctaatgctcatctctggctcagcaaagctcatgaaaaggtttagttttgattctttaaattagatgaaattctgaaggaaaatgtgctctcattggcaaatagaaacattattaaaaagcatgtgagtggctagttccacacaatagtcaggaaaacagatagttgccttttgtgtttcagactgaaaccacttcaataagatgagcatttcctactaaaatactagttctcgtgccaataagcctgggtctagaggattttcaaaggttatcatttcattccagcaaaaatattatccacttcttctattaggtagacattgaaagtgattgttgtatctttggattaagctatattaaaatggaagcagcagctgaatgggttaggtttagaataagccaatattagaaaga

SEQ ID NO: 729109 - DNA, 644 bp, Homo sapiens
taactctttagtggtgaaatagtactgctgatcatctcaaatcagtagcacatttcttaatcattcctaaaaagttctccacgttttcagtttctgagttttcagaaacatagttaacattctgaaaaaaacatgtaaatgtcatatccagttttgtaaaaacacaatttaaaagatctaaatcttacatatcaatgtatgcagataagatactcaggggcaaaatggacytaatgctcatctctggctcagcaaagctcatgaaaaggtttagttttgattctttaaattagatgaaattctgaaggaaaatgtgctctcattggcaaatagaaacattattaaaaagcatgtgagtggctagttccacacaatagtcaggaaaacagatagttgccttttgtgtttcagactgaaaccacttcaataagatgagcatttcctactaaaatactagttctcgtgccaataagcctgggtctagaggattttcaaaggttatcatttcattccagcaaaaatattatccacttcttctattaggtagacattgaaagtgattgttgtatctttggattaagctatattaaaatggaagcagcagctgaatgggttaggtttagaataagccaatattagaaaga

SEQ ID NO: 729110 - DNA, 624 bp, Homo sapiens
aaggtctgtgttcttcattacaatgtaatatatagcctttcccacttattccaaccaaaggctaaaatctcattttctagaaacaactattacatttataatcacttaaaaattttttggctgatcttttgctgacaaaagaatggaaagtttacttcyagatttctgtacaatctaagctaactgactcactgtactgaatgttcagctatctgtcatagccaatagattccagaaattataatagtgcaaactcaataagtgactattttaaaaataaaatttattaaaatgtatttgtaatagaagcactgaatgaataaataaatccacaagtctcttgaagccagcaggctgataggtgttcttcgtcttcaaattctggctcccaatgctttcttgagtgtcatctttaattcaactgaacagaggtggggaaggaagtggggagcaagaggacatgcaggagaggaatgggaaaaaatataaaacatttaatatggtttaagcctagaagtaatttcagctcacattccattgactagatctcagtcaggtggacccatctaagcgcaagggaggctgggaaatacagcatgtctgtggaagaagaggagaaaatgc

SEQ ID NO: 729111 - DNA, 625 bp, Homo sapiens
atcataaccctagttaatacacttttaaaaggttctgcctatgacttcctttttttcagtttttaccagccttgtatttgtccttccctccagccaaactcaccttcttttttttttttgaaagataattcagtagttactgcccggtacttttaaacaatttgttctttttgataaacycaacactcctccttcattaacaaacacgtgaaatataaacagtgtatacttcctttactagtatgtatgtttgtgtttttacatttattcctaaagccagcattatttttttaatagtcaaacattggaatatttccatcaattcaggaataagaaaaaaatatctattttctttacgatatttaacattgttatagaagtactggccaaataaatttcaacgtagaattaaataaaaggcacaaatattggaaaataagatttaaacagttttatttgccagaaatatgattttatacacattgaatccaagagcatcaaatagccatcagaactaaatgagaattagttatttaattggttaaagattaacatgtttaaatccacaggtttcctttctgaaaattataataatttagaaaatattatgaatagttatgacatt

SEQ ID NO: 729112 - DNA, 564 bp, Homo sapiens
attatttctaatttttaaaaggatatatgttttttcttttaatcatctatgggaacattgtatatattgcattttacttttagctttttattatgtaaaaataagacatccacaaacgtagataaaatactgtcacaaactcccatgtatacacatctatcagtttatgtgcattgcatcaataaataaataattctacagaaattaaagttaattaactagaacaacttatwtgaatagctatgattctcgaaagagttgtataacagatgcaaattcccagatgtgtatgatagaacatcatttaagtttagatgtaataatttatagctaatatttaagaaaatatatcacaaaaatattgctataggctagttttaatactactgctcaattctgcgataatttcactgttatcccttccaaaactgttcttatgttttattatgtcctcacagtctgcagcaacttgtatggcattttagttctgatgtcttccttttcaaattgctggcagagggcacctagtttctggttttagggttcacacagggcattatctcc

SEQ ID NO: 729113 - DNA, 634 bp, Homo sapiens
taacttcctgatattgccatggcatttgtaaactgtcacggcactggagggagtgtagcagtgaggacgaccagaggtcactcttgtcgccatcttggttttcgtgggttttggccagcttctttactgcaacctgttttatcagcaaagtctttatgaccrgtatcttgtgctgaccttttatctcattctgtgacttagaatgctttaacagtctgggaatgcagtcccataggtttcagcctcattttacccagcttctattcaagatggagttgctccagttcacatgcctgacatttcccccctcccttttataagagcacccttagtcctaagggttgctgaggaatgaagatccaccttctgtaagttcttcaggctgaacaggggtgacaatattcctgcctaactattagggtctcttgtattctgggtagagaggagctcagtcagaaagcattggtatatgggccattcataactccaagttctgacaaaaggtgatatctggaagattaataagtgttcagtttaagaaaacatttagtaagcttgttctgcatttttacatgcaacagcaatatatttcacaacagtaaagcaaaataagtaaaattattccgagtaaact

SEQ ID NO: 729114 - DNA, 627 bp, Homo sapiens
gattaaggagaaagtgttttatgcttgatattgtttaagtctgtgttcccctaaaagtctcatgttgaattgttattcccaatgttggagttggggcctgtgggagatgattggctcatgggggccgatttccctcagggtgcttctctcatgatggtgagtgaatgcttgggagatctggttgtttaaaagtgtgtggcacatagccgggtacagtggctcatgcctggaatctcagtattttgggaggccaaggcaggtggatcrcctgaggccaagagttcgagaccagcttgagcaacatggcaaaaccccatctttactaaaaacacaaaaattagccaggcgtggtggcgggtgcctgtaatcccagctattggggagcctgaagcaggagaatctgttgaacctgggaggcggaggttgtggtgaggtgagatccgccactgcactccagactgattgatacagcaagacactgtctccaaacaaacaagcaaagaacaacaacaacaaaaaaatgtgcgtgacacatccccctctctctcttttgcctgctctggccatgtaagacatgtctgctttctctttgccttccgctatgattgaaaatttcctgaggcctct

SEQ ID NO: 729115 - DNA, 420 bp, Homo sapiens
tgtcctcagaggagacctcagagtagagatcacagtagtccaaggttttgatatctgccagaagtggcctgcaatgctttgaaaatccgtaaatatggaagcatagaagatgctgaaatggattaagaaaagaagtttgtacttggatccaaacactagtactaggatgaattttacataggttttgactttgttcacaagagccacttcattattatctcttggactccatgagttaggcaaggatgggagatggctagttcagggtctctgsaaggctgatgttatggatgaaaggcagagtctggtcctgtcacctcacctccagatgctttagcttgtcttaggtgggtcaggattaagtccaggttagatatggtttggttatttcctaactttgtggagagaccgtaaggatca

SEQ ID NO: 729116 - DNA, 584 bp, Homo sapiens
tggaagtattggtcttaatatgatttcatttacgataatatttgtgagtcttgtagaaactctcattgtagtatgttcatataatgtcacatcatgcagccatgaaataataattctgagaactatgtagcaaggtaagaaaataataataaaatattgtatggcaaaaataagacataaagtttaatgcacactgtgaacataactacatatagacatatgctatttatgatatttttcactacaggtaacagaatatctgattaaaagtgtgtaaataataagtgcttatttttttctcacttcactaagtacacaccttaataaaggtatgctatttcagtgttgactctcaaaggtcagtgctgtgtggatttctcttagccgtcacctcatggtcataaaatggctgaacrtttttctcctcaaatcctcacgttcctattttaacaggaagtaaaatatttcccagaagaaataactgccctaccttaatcaaactacctctcggatccctttggccacatgtccttgctgcaagggagtctgggaaaacaagcacttggtattttcagcatctgttg

SEQ ID NO: 729117 - DNA, 640 bp, Homo sapiens
tgaacatgtgaacaccaaaatttataatataataccacttacaattgctcaaaaaatgaaataggtataaaactaaaactaacaaaatatatttaggattgtatgctgaaaactacacaacactgatgaaaatttaagtaaagatataaataaatggagagctataccatgtttatggattggaagactccacaccgtaatgatgtcaattctccccaaattgatatttatgtttaatgcaattcttataaaaatcccagcaagattttttgtgtaaatatagaygagattattctaaaattattatgcaaaggcaaatgaattagctaaagcaattttgaaaaatagaataaagtgggagtatttcaatgcttacatagctatagcaaacaagattgtgtggtattggtgaaggaagaaacacatgaatcaatgcaatggaacagagaatccaaaactagacctatacaaatatgctcaacttatttttgacaaaagtgcaaaagctattcaatgaagaaaagatacttttttcaaaaaatggtgccatagcaatttgcaatgcaatcctgacactacccaaattcaggtcaaatcaaagagatagtgtcacagtcctccacaaaactcccctcacttc

SEQ ID NO: 729118 - DNA, 572 bp, Homo sapiens
tctagaggtagttgatgtctaaagaagctaatatgtgtgtgtgtgcatatgtgcatataatttttttcttcttggagacaggaatatattaaaaataaatacctgaaaaagatacaagtagaacctaacagtgaaatagagaacgttttggcaaagtcttagcaactatcgctttatcctgtggaaaaagctcaagggtgttgcagagacctccaaactagtaggtcaaaggaaccaacaagggaaatgttaaattgctttgctctcacctgccctaaattactattcaccataccccacaagagataacagctattaataatatttttccattattttcaaaatagcttaaatacatatttggctatgtttgtcaagctaaataagctattttttgatgtgtacaggrcataaacacttaaaagacacttagaaaatgctttaactctttcagtaaaatttaatgatcatacaacatactatttgtttcagattataaaatgttctattgatgatatctgaatggaaacaaattaataatttaggatatagcttagtttttgactgtagca

SEQ ID NO: 729119 - DNA, 558 bp, Homo sapiens
aaaatttgttttatttactgttttataaaaactcttttgtgttttacgtattccagatatttggcaaccacatcccaggttagtctcattcgtacttggcctgtataatcttctattttatctcctagaggcaaagacctattcaaagtctgcctgaagatgagttcattgggcagttaggcagctgctgctgtgagatcaacattttgtccttgtggtcccttggaaggccccagggctttcctttttctccagaggtgtgcccccactgctgtttcagatgctaggatttcatccaatcatctagtctgcaaatgtctgtctttgcctcttccatttctagcactttgacttttgctgcatgtcttgacctggacaagtcacttsatttcattgaacctctgttccttcacctgtgaattagaaaaagtgtaacttgcctcccatggttatgtgagaatccaaagagataatgtgtaaagtacctaaaacatgggcacagattgacatatacattaaagaattacatttttgaaattctgagaaaaaaattcagag

SEQ ID NO: 729120 - DNA, 568 bp, Homo sapiens
atggctcaaacaaaaagccacctatacattcaatcctgtcccaggtagagttactttaaaattctgttttttataaaacagttttgtacgtacctctacaaaaaactaagaacatgtaaatttaataaaccacacagaaattcatgctgcctgaatratatcacagtttacccagaatatagtatttttttcagaaaattcagaattattttcctaagaaaaatctattacttcatattgttatgaggtattaggtaatactgaattctaatcaactcctaaaaacatttggagtagtttttgccttgtatgtttcctgctttgttatattagatagtcacttaatagcagtgggctactattattacatactgcattattttaaaactgcattattaaacagtgttgtgctaattgcattttgtctggaaaaaatacatagtgcttagtgtggaatttagtaataggcttcatttttatttccagggcactaaagaaagcttgtcattacagtatactaataattaaacagtggataatttaaatatagcaaacaactgttgatgac

SEQ ID NO: 729121 - DNA, 568 bp, Homo sapiens
atggctcaaacaaaaagccacctatacattcaatcctgtcccaggtagagttactttaaaattctgttttttataaaacagttttgtacgtacctctacaaaaaactaagaacatgtaaatttaataaaccacacagaaattcatgctgcctgaataatatcacagtttacccagaatatagtatttttttcagaaaattcagaattattttcctaagaaaaatctattacttcatattgttatgaggtattaggtaatactgaattctaatcaactcctaaaaacatttggagtagtttttgccttgtatgtttcctgctttgttatattagatagtcacttaatagcagtgggctamtattattacatactgcattattttaaaactgcattattaaacagtgttgtgctaattgcattttgtctggaaaaaatacatagtgcttagtgtggaatttagtaataggcttcatttttatttccagggcactaaagaaagcttgtcattacagtatactaataattaaacagtggataatttaaatatagcaaacaactgttgatgac

SEQ ID NO: 729122 - DNA, 564 bp, Homo sapiens
attgaattcaataagcatccttatcagagtgaagcacagggagatttaatgtagacagaaaaaagggcaacttaaccacagaggagaggttggagagatgcaaccacaagccaaggaatgctgacagccaccagaaactggaagtgacaaacagtggattctcttctagagcctctggagggagcatggtcatgctgacacctggattttacacctttatccttaggaactgtgagaaaataattttttcccatttcaagccttccagtttaagtagtttttacagtagccatgggaatataacagattttggatactaggaaatggggtgctgtggtaacaaacaactcaaactgtggaaatggctatggaactgagcaaggggtagaagatggaagaatagtgaaagtartatgaagaatatagagaaaaagcctagaatgccctgaagatattattgatagaagtacagatgttaaaacagctactgatggggctcaggaagaaatgaggaccacattattggaaactggagtaaaggtgatccctgttatgtagtggttg

SEQ ID NO: 729123 - DNA, 624 bp, Homo sapiens
catgcatgcggccagcaagtatatggaaaaaacccaatatcactgatcattaaagaaacgcaaatcaaaaccacactgagataccatctcgcaccagtcagaatggctattattaaaaactaaaaaaataacagatgctgatgaggttgtggagaaaaatgaactcttatccactgttggtagaagtgtaaattagtttaaccattgtggaagagagcatggtggttcctcaaagacctaaagacagaaatactattcaactcagcaatcccgttactggctatatatccaaaagaatacaaattattctattataaagacacatgcatgcacacrttatgttcattgcaacactattcacaatagcaaggacatgaaatcaacctaaatgacaatcaatgatagactggataaagaaaatgtggtacatatacaccatggaacactatgcagccataaaaaagaatgagatcatgtcctcatgatctcattcttcatccatgggacatggatggagctggaggcctttatccttagccaactaacccaagaacagaaaaacaaatactgcatgttcttccttataagtaggagctaaatgatgagaacacatagacacggagg

SEQ ID NO: 729124 - DNA, 340 bp, Homo sapiens
gcaagtatggtaaaatctaagtggtgagaattctggtgttcactataaaattctttcatcttttcatgatgcttgaaatgttttcaaaataaaatatcgcagggggagggaaggagcatatgtaatgaaatgatggtattccacaaaataagggaaaaygcagtgactataaagtgaggaacgtcccattttttgcacaaatgcaggcccctccccttgccggtcattgagctcttattgatgcgtggctttgtgtgtttgcattcacattctgtttataggccttgcctcccaggaaggctgtgaattccccaagggcaagaacactgtctattatttt

SEQ ID NO: 729125 - DNA, 633 bp, Homo sapiens
tcttttacttttaatctacaaatttccttaaatttaaagagtttcttgttgagagcatatagttaagtgaattttttaatctattctcataatctcttttaattcatatatttagaccatttacatttaatgtaataattgatatgtttgggttgggtataccattttatcatgtgttttctatttgtttcatttattttttattttattttttttctgagatggagtcttgctctgttttccaggctggagtgcagtggcatgatctcagctcactgcaacctccgcctcctgggtttaagcaattctcctgcctcagcctcctgagtagctgggattacagacacccaccaccacaccctgctaatttttgtatttttagtagagatgaggtttcrccatgttagccaggctggtctcgaactcctgacctcatgatctgcctgcctcagccccccaaagtgctaggattacaggtatgaaccactgtgcccagcctattttgtttttgttcctctctttttcctttcctgacattttttttgcttatttgaacatagtttagtcttccattttaagttatcaattatgatttttactataactatttgtataagttttagtggtaactct

SEQ ID NO: 729126 - DNA, 603 bp, Homo sapiens
accttctttaaaaatacatttttaaaaaatcagatgacttgatagaggaatggactgatagatatgtaataaagtaaatacagaaaaatgttaacaattgtagaatctagatgatggggccaggtgcggtggctcaygcctgtaatcccagcactttgggaagctgaggcaggtggatcgatcacctgaggtcaggagtttgagaccagcctggccaacatggtgaaacaccatctctaccaaaaatacaaaaattagccaggcgtgacagcgcatgcttgtaatcccagctactcaggagaatcacttgaacccgggaggcagaggttgcagtgatctgagatcatatcactgcactccagcccgggtgacagagtgagactccgtgtcaaaaaataaaataaaataaaataaaataaaataaaagtgatgatgatcatagttatgaacaacagtgagagttcacacactgcctgtactgtgggcaaagcccgttctcagtgcttcgtgtgaatgaatttgttcactcctcactacaaccttctgagatagatactgttattctcattcacagatgtggaccctgagaccagggaggttgcg

SEQ ID NO: 729127 - DNA, 535 bp, Homo sapiens
ggggtaccactgtttgcacatgcaaagttgttctgtaaggacactccttaaacccaaagtatatgagactcctgctaaacaacacaaatttgctgatggtgaactcacactaaaaaaaaacctacacgaggaagtacatcactatgaggggcaggcagcacataaaaagatcagggttaatattctaaggattacatatggtctctgttacgaactgcatygtgtccctagcaaaattcatatgttgaagtcctaattccaggtacctcagaatgtaactgttcagtagttggagatagggtctttgcggaggcaaagttaaaatgagttcattcaatgagaacacttggacacaggaaggggaacatcacacaccagggcctgtcgtggggtgcggggagggagaaaggatagcattaggagatacacctaatgtaaatgatgagttaatggttgcagcacaccaacatggcacatatatacatatgtaacaaacttgcacgttgtgcacatgtaccctagaacgtaaagtata

SEQ ID NO: 729128 - DNA, 618 bp, Homo sapiens
tgatggtggaggaagctgtcctgaaggcctggacccctgcacagaatgtggttatttatcagagagttggatcaagggtcaggtgctagaaagccccaactgtatctagtgtggcatgcaaagctctttggtcagtttcctaatccagttcctcagaaaactataacaaagcaagaacttaagtcagtgtcttgtgttctcagacttytcgatttgatatgaagggtgaaagatcctggctggggagttatgaatgaatgaatgaatgaatgaatgaatgatctttagcattggccttcaattccagcccccccaccacatctcttccactgccttctactactagtaactggtgactgctttttcaccacctctgactgacccgtaccttttctttgcctgttaaaatatgctaataaggaaacatacttccatttcttttgaattgaggggcccataacttttcatttagaacttctatccctgatgggaaaaatagctgtatatctattggttgttatcttggttacagtagcctgattggagttcccctgtacaaatataatcttgtgtgcgctccggtgctggtatgatatatttagaatgggtgtgcttgcc

SEQ ID NO: 729129 - DNA, 551 bp, Homo sapiens
gaaagtagaccaacgattttgagaaatatttccaaaaaggttgtgacagactaaaagagaggttgcaacctgacaacctctgggtggaactgagcctacagactcattttgtttggcctgtacagtcgtcacttttttttttttttttttttttctttttggagacggagtttcactctgttgcccaggctggagtgcaatggtgcaatcttggctcactgcaacctctgcctctggggttcaagcaattctcctgactcagcctcccaagtagctgggactacaggcacatgccgccacaccyggctaatttttttttttttttttttgtattttagtagagacaaggtttcaccatgttgcccaggctagtcttgaactcccgaggtcaagcaatccacttgcctcagcctcccagagtgctaggattacaggcgtgagccaccacgcctggcctcacattttcaaaaataatgacttagtgtgtttttttgagatgtcatatttttaaaatctggattgccacctatttttaagctatcaggaaatct

SEQ ID NO: 729130 - DNA, 573 bp, Homo sapiens
atcctagctccatcccaaactgtcagaggcattcgaaccagagcaactccatcttgtatagggactgggtaaaataaggctgacacctagtgggctgcattcttaggaggtgagggcattctaagtcacaggatgagacaggagtcagcacaagatacaggtcacaaagaccttgctgataaaacaggttgtggtaaagaagccagtcaaatayccccaaaccaagatggccacggaagtgacctctagttgacctcactgctcattacacactaattataatgcattagcatgctatgagacactcccaccagcgccatgactgtttacagatgtcatgacaatgtcaggaagttgccctatatagtctagaaaggggaggaaccctcacttcttggaattgcccacccctttcccggaaaactcatgaataatccaccccttgtttagcatataatcaagaaataactgtaagtataatcagttgagcagcaacccatgtcattgctctgtctatgaagtagccattctttattcctttacttttttttttttttgagacagattcttgct

SEQ ID NO: 729131 - DNA, 636 bp, Homo sapiens
tgaaacattatctctgcttccaggttacccagtgtagtagagaaggcaggcatgcagatagtttaaattggtagcactgggaggggactgccatgggtgggcagtgaagaaaaagggcttcaaaataatgagagttgagatggatcttcaaggaagataagcagttttcagtaaggccatgaagagaggaggaagttccaggcgggaagagtttgtgctaaagtacagggattgctatacacatggtgtatgtagaaaaaatttggttcacagtgtgatagaagaattggagggggtcctcactgaaagtaaggaaacacatttggaagaatatgtttcagttagaaaatgaaatgagcttaaagtaaacrctaataaggtttttaaaatgtaaaatttcaacgtatttagaaagagaacagctggatgaatcttatgtacctgtcactcagctttagcagttatcagtaaatggccaacgttgtttcagctatactcccctctcctccactgatagtcttttgaaggggaatacaattgttttgtggcctccagaaagggataagtttatgagcaacgggtagatcgttgggagagacttgagtttcctgtcaggaagcattcttggtgcataag

SEQ ID NO: 729132 - DNA, 460 bp, Homo sapiens
cccccacctccctcccggacgggttggctgccgggtggagatgctcctcacttcccagacggggtggctgccaggcggaggggcttctcacttctcagacggggcggctgccgggcagaggggctcctcacttctcagacggggcggccaggcagagacgctcstcacctcccagacggggtcgcggccgggcagaggcgctcctcacatcccagacggggcagcggggcagaggcgctccccacatctcagacgacgggtggccgggcagagacgctcctcacttcctagacgggatggcggccgggaagaggtgctcctcacttcccagactgggcagccgggcagaggggctcctcacatcccagacgatgggtggccaggcagagacgctcctcacttcccagacggggtggcggccgggcagaggctgcaatctcggcactttgggaggccaagg

SEQ ID NO: 729133 - DNA, 529 bp, Homo sapiens
tgtgtcttattcatctttgcatttccagcccattgcacagttcttggcacacaggtaaagttcccaggcttctgagacagtcgtgtaaataaaggcaaggcattgtgaaacaggtgtgtgtagtgcaaaagcaaaaagagatacttgaccaayctctcagtgaacgtgatcttgaaggcctgtgcagaggccaggaagagcctggcacttacctccttgtggttgactcttagggtgtctggaagggaacattgttggggggaagagagtgagcatatcatgaagggagctgtatgctgcagcgaggaattgtgggtattctctgcaaaggtcatagggagtgaacatgaaacagggcttattgaaggaataagccccaggtggcggagaaggaacagaggtctgtaagcaggagttttggagacaggtcaggagttcatttccaaactgttgagtttgagaggtctgggctgcctgtgtagagtggaccagtcggcagtttgtagagacggcctttaaagccctctcc

SEQ ID NO: 729134 - DNA, 506 bp, Homo sapiens
acttggctcatgcccacttggatcccacacctgccatggctccacactcagcccatggctggactgggtgtgccacgagtggcttctgtgttgggtgctggcatctagatgaggggaacatggtggcacccaaaaacttgggaaataccatcagttgtggagctccaaggggtgttatagctcttgtttggggagtcctgagatctgagtccccagcactgtctcagctcttcactcctgtagcttggtgagtgggagcgtgttacagctctctttctcctgtagtctggtgagcgggagcgtgttacagctcttttattcccgtcaccygcagcttggcgagttttgggttcttgtcctgcaaccaagaggaatgaggtgtgcaggtaccatagagtgagtaaggcagagaagaattttattgaatgacagaagggaaactctccactgcgagaggggaccctgaaagtggtagccatctgtgaggctgagtctatcatttttat

SEQ ID NO: 729135 - DNA, 648 bp, Homo sapiens
cacacagctagtttttaaatttttgtagagatggaattcccctattttgcccaggctggtatgaaactcaagcgatcttcccacctcagcttcccaaagtgctgggattataggcatgagccaccatgcctggccaacagattttttttttttgttaaattatagtcatgccctgttgtggaatccttgcagccatttatttatttatttattttaagctttcaggatttgtattaaatcctagtctartttaacggtatctgatgttacacacatcatctcatggtgaacgtgtttaataagcgaaagcaaatcagacagcttatctaagtcgttattttttgtggactaaacagtaaggtaacaactacccagaaccctatgggtcatgatggacacttgctcagttttcatacaagctgtgttggttatcaaagtatatctgctaatatttaataaagtgaaatgtcattggggtggaaaagtcaagcctagacatttggttggaaaagaacagatcaagtatggatttcacaaaccaaaagtttataaactcaatgcaatacaagtcctttctattgtaaaagcttagttgaaactaaaagatctgtaaaaactattactttgggccttaaacagtactagctc

SEQ ID NO: 729136 - DNA, 648 bp, Homo sapiens
cacacagctagtttttaaatttttgtagagatggaattcccctattttgcccaggctggtatgaaactcaagcgatcttcccacctcagcttcccaaagtgctgggattataggcatgagccaccatgcctggccaacagattttttttttttgttaaattatagtcatgccctgttgtggaatccttgcagccatttatttatttatttattttaagctttcaggatttgtattaaatcctagtctaatttaacrgtatctgatgttacacacatcatctcatggtgaacgtgtttaataagcgaaagcaaatcagacagcttatctaagtcgttattttttgtggactaaacagtaaggtaacaactacccagaaccctatgggtcatgatggacacttgctcagttttcatacaagctgtgttggttatcaaagtatatctgctaatatttaataaagtgaaatgtcattggggtggaaaagtcaagcctagacatttggttggaaaagaacagatcaagtatggatttcacaaaccaaaagtttataaactcaatgcaatacaagtcctttctattgtaaaagcttagttgaaactaaaagatctgtaaaaactattactttgggccttaaacagtactagctc

SEQ ID NO: 729137 - DNA, 616 bp, Homo sapiens
gccgattcagtgtctggtgagagccttgttcctgggcccttcccttttccagcccttcgctgcatcctcacgtggtggagggacgagggactctctggggtgtcttttataaaggcactcatctgtgcataagggctcggcctgcatgacctgttcacctcccaaagcccacacctgtgaatactgtccccttgggggttaaaatttcaacatatgaatttaggggaacacaaacattccgaacatagagatgatgcagtaagaacgatcatcctttgctgggcgcggtgactcacgcctgtaatcccagcactttgkgaggcccaggcgggccgatcacgaggtcaggagatcaagaccatcctggctaacacggtgaaaccccgtctctactaaaaatacaaaaatttagccgggtgtggtggtgggcgcctgtagtcccagctactcggaaggctgaggcaggagaatggcgtgaatccgggaggcggagcttgcagtgagctgaggttgcaccactggactccagcctgggcgacagagcaagactctgtctcaaaaaaaaaaaaaaaaaaaaagaacgatcactcttgtctgaaattgaaactcatctgct

SEQ ID NO: 729138 - DNA, 597 bp, Homo sapiens
agggtatagtgcagcagtgaagggcacagaggctgtctagattcagaaacattctgccccttattcacatgtgactttctgtacctcaattttcttgtttgtaaaataggaataagaattgtacccatctcaaagagttgtaaggattggaatagataacatatacgaagttcttttttttttttttttttgagacgtagtttcactcttgttgcccaggctggcatgcaatggcgtgatcttggctcactgaaacctccacttcccgggttcaagtggttttcctgcctcagcctcccaagtagctgggattacaggcatgtgccatgtgccgycatagccagctaattttgtatttttagtagagacggggtttctccatgtggatcaggctggtctcaaactgccgacctcaggtgatccgcctgcctcggcctcccaaagggctgggattacaggcatgagccaccacgcctggcaacatatatgaagttcttagaacattacatggcatttaataaatgttaggtaactatcaccattattttcatccttagaaacagtgatcttggtggcaatgcatagaaacacactcag

SEQ ID NO: 729139 - DNA, 522 bp, Homo sapiens
catctgcctctgcaggtgaccgtaacaacatgcaaatggtgagttctgctggggggtcatggaagctccctggaggaggtgtatctggacaacagggaaagaaaggagctggagaagagaggcagaaaaattgggtcctggttcaggtgaagttttcccagctggaacaatgacaatgtcaatatcccacaaaggcggcttctgtttatttagcgcttgctgtgttcccacaagtcttyctctacctgccctctccccagccctcatctcactctcccagagccccagagcacaccaatggacaccatcacctctcgggcagatcagcacagagacgtgaagcacacaggcagctgctggaaaaataacaaggaattgcaatggtgtgcccctccgttgaatgcaagctctcttctgccttctcaccttgggcaagttaccttccgttccaggcctcggtttctccatgtgtgaaatgaaagggctggagagaaatctctcactattccccaatctacattc

SEQ ID NO: 729140 - DNA, 540 bp, Homo sapiens
aaagctccccttccttcaaggccaactgaaatccaccaacttccaggcttcccaagtcttggccgatgctttccagttcagcataggtctgtttctccctctgatggagcatgagccacattaggtcacctattagcttgggtgaagttgcttcagctctccatgcctcaatttctctatctgtaaaatggagttgataattgcaccccaatcatagaacccttgtggagagtaaatgaagactcagacagtgcccagcacatagtaaaataaatagaaaataaacccccttccctggaggaggcagacagggcagggtcccgggggtcttgtcttgtttgcctattttctactgggatgatggcggccatggtggcagggcgtggcagcagctstctctccaccaggagctctgacctctaggaaagccagctcagaccctctttctccaccctgccaatggctgctactacagtgttctgcttggatggagatcaatgatgtggtcaaattgaacctcctctggtccattaaaacact

SEQ ID NO: 729141 - DNA, 553 bp, Homo sapiens
tccggtttgagaggcaggagtgccagggtaggggcctgaagacgggtgcacagcagacaggcgacaggacatcctttccagacttcggcagttttggtgatcccctgctacttggatgacggggttcacctcctttcttcaccacccctcccccaccatcgaaaggtcaccagcgctggrccaaggtttcacacctccaagggggccaaagattgcctgtagtgaagtgttaaaatgcagattcctgggttcagcctcggagattctccttcacaaggttcgagagagatcccagaaatctgcatttttaccaagtgcccagcgattctgatgctaaaggcttgaagcacaccgaagagctagctccgaggacactgaagaatgaacctctgcccctccctacaaaccccctcccctcacactgagaccatcgtggatgtactgcctccccccaatatttcatggaggtgcggttctgtgggttgtgaccgcagtcagaagttgtgatggaagcaggttgaagagtgctggccaacgtccgggggcagcggaa

SEQ ID NO: 729142 - DNA, 618 bp, Homo sapiens
ctcaatgatgaagggaccgtgtctcctagagcagagggtgagagtcaggggactccagtgcaaagtgggccaaatcccactgctgagtccaggctcacatcagccctgtcccagagcctggggcatgtgtgcagtggaaaccaagtcaccggtgacccacccacctgtcccagctgggtgcagtctcattctgcctggccacagtttaacccatgtgaccttgggcagtgggcctggtgccctggactatgtgcaaggtaggcagcctgtttgttcgaggggtgcartggacagatgagctttaagggctggagccagagtttctctgatgctgtgaaattgagggcattgagctaagtgaccagaggggtccctcccacctaagccttctagtcctatgagcaccccctccctctcccactgtggcagtgagcctctctggtagggggtggggacgacacggagcaaacccagacaaaggctgggacacgagagtgctgctgcccaccagggtgcccacaaggtctgctcctggaggagacgggccctgacaagggcccttgggggagatggggtcctagtctgactcctcggggctcagactcagccaactgatag

SEQ ID NO: 729143 - DNA, 625 bp, Homo sapiens
agcttcacctgcctcctcccaaatcagtggggatggggctaggaatctagcaattgtgttttatatcggcaacggggaagctctgtgtgtgtgcacgcctgtgtgtgagccgtagtccacatcgggtgggaagcagaaacataatgaagagtcacatggctaaaaataagatagatttagttgatttttatagtaataggtatggaatattcctctaatkatttttagattttagacttactatttccagtcaaaattcaacatcagttaaatatataccataagtactatcttacagtaattcccaggaaaggaagaaagaagataaagagaaggtagtgaaaaagagtgggaagaattaatttaattcacatattggtctaagcactcagaaacaaatatgttgctatatgattagtactgctgtcatttgggggagcgagagtaccctttaaattaaaaatggttccaacagacttatctacttttttttttttttctttttgagacggagtctctccctgatacccaggctggaatgcagtggggcaatctcagctcactgcaacctccgcctcccaggttcaagcagttctccctgcctcagcctcccgagtagctggga

SEQ ID NO: 729144 - DNA, 628 bp, Homo sapiens
tttttgtgtaagacctcaaaagcacaggcaaccaaagcaaaaacagataaatagattatatcaaactaaaaagcttctgcacagcaaaggaaacaacaaagagacacccccacaatgggagaaaatatatgcaaaatatccatctgacaagggattagtaaccrgaacacataagcagctcaagcaactcaatagcaaaaagacaaataatccaattttaaaatgggcaaaaggtcaaaatagacatttctcaaaagaagacatacaaatgtccaatagatacatgaaaaaatgctcaacatcactaatcattagagaaattcaagttaaaaccaaaatgagatcatctcgctccaattaaaatggctttcatcaaaaagatagctaataatagatgatggtcaggtatggaaaaaggggaatgctcctatactgttggtgggagccactgtggaaaactgtgtggaggttcctcaaaaaactaaaagcagatctaccatatgatccagcaattccactaccgggaatatatacaaaaaaaaaaaaggaaatcgatatgtcgaagaattatttgcactcctgtgtttatcacagcactattcacaacagccaaaatacaaaatcaacc

SEQ ID NO: 729145 - DNA, 510 bp, Homo sapiens
ctaaatgaagagaggttgagaaaggagtacattgggctcaacaggtagttgctgccataatttagatgcttaaaatgaaaagagccttaaggtaagaacattagaactcacttgtgcctattattttgccttctgttgactacagcaaattgtatttaccaagacagcagtaacagttctctctcatcccacacccatttctacaatgtgatcctaccactccccaaaccagaggcagtctaattcccctmcccttgaattggtgtgggcctgagaatgtcagaagtatgagcagaagggacattacataacctccaagggtaattcataaaattcgatgccatttccaccttatccagtggaacaatcacatttggagcactaagctaccatctatgagatccaaatatcccaaggccacaggtaacatggcccagcagagatctaggcttgtgaatgaagacattccacaggatcccaggccccagctgtggagtcacccccaaccac

SEQ ID NO: 729146 - DNA, 603 bp, Homo sapiens
tccacctgaatatcccataggaacctctaacaaatgctcaaaactcaactaatatctttatatttcaccccaataaaaaccagctcctcctcatctcaatcaacggattcactattacctcagtcatgctagccagaaactgaggaatcaatcagctaagagttccaaatctaactcccaacatccaaactcttatcaagtcatatcaattttatctcttaaatattccttgaatccatgtctttctgtaactccaaatgcttaattcagactctcttcayttctctactggactttgtttttttctattatacaactggcttttctactacctgtaatgtttcccctcccaggtccattctctacactggggctggagttatctttctaaaatacaaatctgacgccaccaccactctagctaaaattcttcaatgactgccccatatcaagaaaaattctaaactctgaatatggtgccaagtactttaagatctggcctcacccactaattgcaagtattctgggatccagtcattcagaactacctagcgtttcccaaatacaaaatactgattcttcaatctatcctttgcttatttt

SEQ ID NO: 729147 - DNA, 609 bp, Homo sapiens
atcaactttttcccaattcctgttaatgctgatattttgacgttcttccatgaatcactaatgttcttaatttcatctagaatggtgattmttttctaaaatgttttcaatttactttgcccagattcatcaaagcaatcgctatctatggccgctatagccttataaaatgtatttcttaaataataagacttcaaagttggcattactccttgattatgggctgcagaatggatgttgtgttagcagccataagaacaacactaatcttgtacatctccatcagaggtcttggatgaccaggtgcactgtcaatgagcagtaacattttgagagggatctttttgtctgagcaataggtctcgaaaatgggctcaacatattcagtaaaccatgttgtcaacagatgtactgtcatcgggctttgttgcttcattatagagcataagcagagtagatttagcataattcttaagggccctaggattgttgaaatggtacgtgagtactggcttcaacttgagcaaggttgccacaaaccttcaatttgtaaaaaatgcattatcagcaaagtgcagtcaataagaatgagacacgcctgtattttaa

SEQ ID NO: 729148 - DNA, 609 bp, Homo sapiens
catatgatcttatttctcctggataaatacctaggaatagaatcgctgtagaatatggtaggtatgtatttaacacatcaagaaactgctgaactgtttcccaaatggttgcatcgctttggactttgcattctcaccgggagcatatgagagttccacctccgacacatctttaccaacacttggtatcatccatctccctcattttatataatataataattgggccgtggtatttcattgtgttttttatttgcatttctctaataactaatgatatttcagccacatcttcaggctccacttctaattctagttctcttgcagttttcacaacatcagtagttacttcctccactgaaatcttcaacccctcagtcatccatgagggttggaatcaactttttcccaattcctgttaatgctgatattttgacgttcttccatgaatcactaatgttcttaatttcatctagaatggtgattattttctaaaatgttttcaatttactttgcccagattcatcaaagcaatcrctatctatggccgctatagccttataaaatgtatttcttaaataataagacttcaaagttggcattactcct

SEQ ID NO: 729149 - DNA, 561 bp, Homo sapiens
aaaacttaataacccaattaataacctgttaagatggacaagggactgaatagacatttattcaaagaagacatacagatggtcaacaggtatataaaaaggtgcttaacatcacttatcatcagggaaatgcaaatgaaaaccacactgagatatcacctcataactgttagaatcgctattatcaaaaagtcaaaagatagcaagygttggtgaggatgtggagaaaaggtgtcccttatacatttttgttaggaatgtaaattgatacagtcattatggaaaacacgatagattttctttaaaaaattaaaattggaactgctatatgatccagcagtctcagttccgggtatatctaaggaaaacaaagtcagtatcttgaagaggtatctgcactcccatgttcattgtagtgttacagtagtcaagaaatgagcaacatagtattcataggcatggtggcttgtacctgtaatcccagtacttgggggtggccaaggtgaaggatagcttgaacacaggagtttgagaccagcctaggaaacatagtgataccct

SEQ ID NO: 729150 - DNA, 459 bp, Homo sapiens
ccatcagctgttgttattgttagtgtattttatgtgtggcctaagacaattgttcttacagtgtggccccgggaagccaaaagatttgatatcgctgccttacaccatacatagaaataaactcaaaatggataaaagacctaaacataagaccaaaacccacaaccagaagaaaacataggggaaaagctcgacatggctctggcagtgattttttggagatcacaccaaaagctcaggctayaaaaacaaataattggtataccatcaaactaaaaaacttctgcacaggaacggaaacagtcaacaaaaggaaaaggcaacctatggactagaagaaaatatttgccaaccatatatcttataagaggataatatccaaaatttataaggaatgcatacaactcaataacaagaaaatagataacccaattaaaaaatgggcagtggaactgagta

SEQ ID NO: 729151 - DNA, 459 bp, Homo sapiens
ccatcagctgttgttattgttagtgtattttatgtgtggcctaagacaattgttcttacagtgtggccccgggaagccaaaagatttgatatcgctgccttacaccatacatagaaataaactcaaaatggataaaagacctaaacataagaccaaaacccacaaccagaagaaaacataggggaaaagctcgacatggctctggcagtgattttttggagatcacaccaaaagctcaggctacaaaaacaaataattggtataccatcaaactaaaaaacttctgcacaggaacggaaacartcaacaaaaggaaaaggcaacctatggactagaagaaaatatttgccaaccatatatcttataagaggataatatccaaaatttataaggaatgcatacaactcaataacaagaaaatagataacccaattaaaaaatgggcagtggaactgagta

SEQ ID NO: 729152 - DNA, 492 bp, Homo sapiens
aaaagaatactatgaataactgtataccaacaaattatataacctagataagatggacgaattcacaawatactaatacagaccaaaacagaaattgaaattatgagcagacccataacaagtagaaagtttgaatcagtaaccaaaaaccttccaatgaagaaaatgctacacagatggcgtcactgttgaattataccaaacacttgaagaattcacaccaatccctctcaaactcttccaaaaaacagaggagaaaaaactttgcaatacattctatgaggccagtattacatggattccaaagccagacaaatataccacaagaaaagacaaactagatactaaaatcttttatttaacaaagtactagtaagccaaattcagcagcatattaaaaaggattatatatcatgaccacatggaatttatctcaagaatacaagggtggttcagtacaagagtatcaatcaatgtaatacaccacattaa

SEQ ID NO: 729153 - DNA, 492 bp, Homo sapiens
aaaagaatactatgaataactgtataccaacaaattatataacctagataagatggacgaattcacaaaatactaatacagaccaaaacagaaattgaaattatgagcagacccataacaagtagaaagtttgaatcagtaaccaaaaaccttccaatgaagaaaatgctacacagatggcgtcactgttgaattataccaaacacttgaagaattcacaccaatccctctcaaactcttccaaaaaacagaggagaaaamactttgcaatacattctatgaggccagtattacatggattccaaagccagacaaatataccacaagaaaagacaaactagatactaaaatcttttatttaacaaagtactagtaagccaaattcagcagcatattaaaaaggattatatatcatgaccacatggaatttatctcaagaatacaagggtggttcagtacaagagtatcaatcaatgtaatacaccacattaa

SEQ ID NO: 729154 - DNA, 597 bp, Homo sapiens
aggcctgccattttcaaaacttttacaaagctgcagtaatcaaaacaatgtggtactgacacaatgtggtctctaggacacaaggatggacatatagaccaatggaatataatagagaatgtagaaataaacactcacatatatgatcaattcattttcaacaaatgtatcaagaattcagtgggaagagtagtcttttaacaaatggtgctggggcaactggatcctcatatatcaaagaatgaagttggacccatamctcatagcatataaaaattatctcaaaatgtatcagagaccaaaaaataagagttaaaggcataaatttcttagtagaaaacaggagtaaatctttatgacttgagattggaaataaattcttagaaaagacacaaaaaacacaatattgtaaatgtactaagtgacactgaattgtacattttgaaatggtttctgttacttaaaaaatttaaagggtgcacagaagactaaaaagcagcacagacagaattatcaccagaaaaagaagactctatattaaatgtcaacatggagaacacatgtcagaaataggtagtccagagcagcagctatagt

SEQ ID NO: 729155 - DNA, 584 bp, Homo sapiens
aggtttgttacataggtatacatgcgccatggtggtttgctgcacctatcaacccgtcatctaggtttcaagccccacatgtattaggtatttgtcctaatgctctccctccccttgtcccccaacccccgacaggtcccggtgtgtgatgttcccctccctgtgtccatgttttctcatgaacattgagatttttgaagaatacagtctccattccttctgtttcaatagagtattcctcatttggagtttgtccactatttcctcatttcgagattcatattatgcattcttggctagaaaactacataattgatgctgtgtccttcttggggcattgtatttgaaggcagaggatgatgtctatcggcctcccgccatgggcaatgataawtttgattacccaatcaagttattttctgatttttcactttatagttactattttttctctagcagctaataagcagtctgtggagacacactttaagaacaatgcaaatattttgctcctcaccaaaaatttccctttgtcttagcatcagttgatgatccaatctttactatgatggttggaaaattat

SEQ ID NO: 729156 - DNA, 630 bp, Homo sapiens
agtctgttttgtcagagactacgattgcaatccctgctttttttttttttcttcccatttgcttggtaaaatttcctccatccctttatttcactctcaccacttttattcaacatttttctagaagctctagccaaacaaaacaaaacaaaacaaaaaactgatgaataaattaaaggcatccaaataggaaaagaaaaagtaaaactctcttttcccaatgacatgatgttatatatagaacatcctaaagaatctaccagaaaaaaaatccctattagggttaataagaaaattcagcaaagtttcaggatacaagatcaacacacaaaaaactacttctatacgctataatgagtaacccaaaaaggaaattttaaaaaaattcaactggtaaaatcacaacatcacagtggctattatcaaaaaggcaaaaataacaagtgctgttggggatgtaraaaaaagggaatgcttgcactctgtggaaaggaatgtaaattagtacagcccttatggaaaacagtatggaagtccctcaaaaagtaaaaaatagaattaccctatgatccaggaattccacttctgggtatatatccaaaggcattaaaatcagtatgtcaaagaaat

SEQ ID NO: 729157 - DNA, 709 bp, Homo sapiens
tggatcccttccttacaacatatacaaaagttaactcaagaacgagtaaagactgaaatgtaaaaccccaaactataaaaaccctagaagaaaatctaggcaataccactcaggatataggcacaggcaaagatttcatgatgaagatgccaaaagcgattgcaacaaaagcaaaaatggacaaatgggatctaattaaagagcttctgtacagcaaaagaaactatcagcagattaaacaaataacccatagaataggagaaaatatgtgtaaactatgcatctgacaaaggtctaatatccagcatctatgaggaactgaaatctacaagaaaacaaacccattaaaaagtaggcaaaggacatgaacagacacttttcaaaagaatatatacatgcagccaacaagcacatgaaaaaaaaamtcaatatcactgatcattagaaaaatgcaaatcaaaaccacaatgagataccatctcacaccagtcaaaatgactactactagaaagtcaaaaataacagatgctggagaggttgcaaagaaaagagaatgcttatacactgttagtgggagaataaattagttcaactattgtgaaaaacagtgtggcaattcctcaaagaactaccatttgacccagcaatctcattattgggcaaatacccaaaggaatataaatcattctaccataaagacacatgcatg

SEQ ID NO: 729158 - DNA, 643 bp, Homo sapiens
ggggtgatcttttgttcagtcatttttgatagagacattagaagagcgatttctttaaaatataaacaagggtgcaaatgggatggtaaagggcaactgacgctactaggaggatagtagggagtgtttgacattgtgtgtaattgggacatacatatttcctccaaaagggaagactttagtacttctgctgattgttgcctagtggaaatgtctgcctaagattaccagttgtctacaaaaagcctgattggcttcaggtttttttttttttttttaatttagatatgatttaacgtatatgataggatgtgtataggttgtatgcaattactagaacattttctataaaggtcatgaatatctgkgggggatcctggaaccaatggggttgggagggcagcttcaattgttttaaaatgtttcaggccaacagaatatgcttataaatgcttttataacctcatagcttctgtttctttatagttttggcttatttgtaatgtttcctttttctcatgtggtacaaaacatggttatgtaccattacctcttcaactcagccagtggcttggcagtttcccttgtgcagtgtttaaaactgggccacagttttgaatgcagttgtggatattaaaatgaa

SEQ ID NO: 729159 - DNA, 643 bp, Homo sapiens
ggggtgatcttttgttcagtcatttttgatagagacattagaagagcgatttctttaaaatataaacaagggtgcaaatgggatggtaaagggcaactgacgctactaggaggatagtagggagtgtttgacattgtgtgtaattgggacatacatatttcctccaaaagggaagactttagtacttctgctgattgttgcctagtggaaatgtctgcctaagattaccagttgtctacaaaaagcctgattggcttcaggtttttttttttttttttaatttagatatgatttaacgtatatgataggatgtgtataggttgtatgcaattactagaacattttctataaaggtcatgaatatctggggkggatcctggaaccaatggggttgggagggcagcttcaattgttttaaaatgtttcaggccaacagaatatgcttataaatgcttttataacctcatagcttctgtttctttatagttttggcttatttgtaatgtttcctttttctcatgtggtacaaaacatggttatgtaccattacctcttcaactcagccagtggcttggcagtttcccttgtgcagtgtttaaaactgggccacagttttgaatgcagttgtggatattaaaatgaa

SEQ ID NO: 729160 - DNA, 570 bp, Homo sapiens
ttgaactcctactgactgtatgcttcaccaactctgtccacctgtttttcttgtgggtttgattttactgaggataatttggaacttcattggccttttggaaaacttaggatctctccaaactagtcatttaagacctcttctttcctattgcttttccttcttcatcctccttttgccacctttgaacttccattcagctcccttcagttttttaatatatcccccttcaaactcctatctcaccytgttctctgtctacctctgccagaactttctcctagctgctcagtcacctgaactttacctccccgccctgtccctgctcttagtcaacccagggtcctcaaaaagcaacttcataaagctaaaaagaaaaaaccttaattggaaataaacttgaaattttatctattcagatggactttggaaacatcctgacagctgctagatgcctcttcattcactcacctaaaatttagtccacagcctccataagatgacttattgaggaagatggaaatcttaaaaatcttccccacaaatattggtaaacaggtaatcttaact

SEQ ID NO: 729161 - DNA, 582 bp, Homo sapiens
ggtactttagccaggaggggatgaatgtccatgccccatggcctgaacatgtagctcaacgttagagtcaaggtgagctgaggactgaacagctgaggttttcagacctgtccgccatatttgctgttaaccctgaactcagatcatgagaccatggatttgctaatkatcccatagtgtcctctggaacagctataaataaactacaaatgtgcaatttttgcctgaacatgccattcccataaacatgtctttaccccaactcaggccattacatctgcttgtgatgtcttcaattcttctgtcctgaagcctgccaatacttcaagaccctcctcctccacaaaacatattcttgatggcttcagctatccatgacatctcgttctcttctgaagcccttatctccaccattctatacataacaataacaataaccaactagcagattgttatttactaataactttgaaattcatcatctgattaaatcttcattacaaccctgtaaggtagactttaatattagctcttagagaggagaaaactgagtttcagagagttaaattaaataacttgccc

SEQ ID NO: 729162 - DNA, 478 bp, Homo sapiens
ttggcaacactagggcctggaactgaggaaagcgttgtgaactgaaatatagattagtgagatgtgcttacatctcgctaatctcatggaagtagaagcctcaggtgtggagggaaggaagtcttggggaggaggttgatcgcatagatggcccctttagcctggtctgttgcagccttacctctcattccctctttgtgtagctcaacaactaggttgagcacaattcaaaggcagagactaatgattgctcgcatcagcatttyttcatctcccccagcaccttatttactgtctggcacagagtagatgctcaatacccattggttgaatatttgaaaaatagtcactagcccaacattgtggcacacacctgtagtcccagctacttgagagactgaggcaggaggaccgcttgagtcccagagtttgagaccagcctgggcaacataacaatactctcatctcaaaaaaaaaa

SEQ ID NO: 729163 - DNA, 587 bp, Homo sapiens
actgagaagaaagaatatacaagtaaacaatttgagaaatgaaaaaggagacattaaaacagatactgcagaaaatcaaaggatcattagtggctactatgagcaactatactctagcaaaatgagtgatctagaagaaatggacaaattcctagacacatacaacctacccagattgaactaggacaaaatctaaratctaaacagactaataacaaatgagatcagaaccttaataaaggttttcccagtaaagaagacccagagactggctgacttcattgctgaattctacaaaacatttaaataagagacgataccaatcctactaaactattcaaaaaaatagaggaggaaagaatacctccatattcattctatgaggctggtattaccctgatagcaaaaccagagaaagatacatcaaaaaagaaaactacaggctagtatctctggtgaatattgattcaaaaatcctcagcaaagtaaactggggcggggccaagatgcctgactagaaagggtggtgttcggaggctcccattgaaaaaaaaaaataatgtttgaatccttcaccagcaaccaag

SEQ ID NO: 729164 - DNA, 587 bp, Homo sapiens
actgagaagaaagaatatacaagtaaacaatttgagaaatgaaaaaggagacattaaaacagatactgcagaaaatcaaaggatcattagtggctactatgagcaactatactctagcaaaatgagtgatctagaagaaatggacaaattcctagacacatacaacctacccagattgaactaggacaaaatctaagatctaaacagactaataacaaatgagatcagaaccttaataaargttttcccagtaaagaagacccagagactggctgacttcattgctgaattctacaaaacatttaaataagagacgataccaatcctactaaactattcaaaaaaatagaggaggaaagaatacctccatattcattctatgaggctggtattaccctgatagcaaaaccagagaaagatacatcaaaaaagaaaactacaggctagtatctctggtgaatattgattcaaaaatcctcagcaaagtaaactggggcggggccaagatgcctgactagaaagggtggtgttcggaggctcccattgaaaaaaaaaaataatgtttgaatccttcaccagcaaccaag

SEQ ID NO: 729165 - DNA, 587 bp, Homo sapiens
actgagaagaaagaatatacaagtaaacaatttgagaaatgaaaaaggagacattaaaacagatactgcagaaaatcaaaggatcattagtggctactatgagcaactatactctagcaaaatgagtgatctagaagaaatggacaaattcctagacacatacaacctacccagattgaactaggacaaaatctaagatctaaacagactaataacaaatgagatcagaaccttaataaagrttttcccagtaaagaagacccagagactggctgacttcattgctgaattctacaaaacatttaaataagagacgataccaatcctactaaactattcaaaaaaatagaggaggaaagaatacctccatattcattctatgaggctggtattaccctgatagcaaaaccagagaaagatacatcaaaaaagaaaactacaggctagtatctctggtgaatattgattcaaaaatcctcagcaaagtaaactggggcggggccaagatgcctgactagaaagggtggtgttcggaggctcccattgaaaaaaaaaaataatgtttgaatccttcaccagcaaccaag

SEQ ID NO: 729166 - DNA, 587 bp, Homo sapiens
actgagaagaaagaatatacaagtaaacaatttgagaaatgaaaaaggagacattaaaacagatactgcagaaaatcaaaggatcattagtggctactatgagcaactatactctagcaaaatgagtgatctagaagaaatggacaaattcctagacacatacaacctacccagattgaactaggacaaaatctaagatctaaacagactaataacaaatgagatcagaaccttaataaaggttttcccagtaaagaagacccagagactggctgacttcattgctgaattctacaaaacatttaaataagaracgataccaatcctactaaactattcaaaaaaatagaggaggaaagaatacctccatattcattctatgaggctggtattaccctgatagcaaaaccagagaaagatacatcaaaaaagaaaactacaggctagtatctctggtgaatattgattcaaaaatcctcagcaaagtaaactggggcggggccaagatgcctgactagaaagggtggtgttcggaggctcccattgaaaaaaaaaaataatgtttgaatccttcaccagcaaccaag

SEQ ID NO: 729167 - DNA, 640 bp, Homo sapiens
aagaatcaatgaagaaatgctgaatacccaaaaagccagagtgcctcttctcctccaaatgattgcaatgtctctccatcgatggcacagaactggatggaggatcagatggacgaattgacagaagtaggtttcagggctgggcgcagtggctcacgcctgtaatcccagcactttgggaggccaagacaggcagatcacgaggtcaagagatcgagaccatcctggccaacatggtgaaaccctgtctctagtaaaaatacaaaaattagctaggtgtggtgccacgtgactgtagtcccagctactcgggaggctgaggcaggagaattgcttgagcccgagaggcagaggttgcagtgagctgagatcacgccacggcactccagcttcagcctggcgacacagcgacactccaaaaacaaamaaaaaaaaagaagtaggcttcagaagatgggtaataaaaatctacgctgaggtaaaaaagcatgttctaacccaatgcacagtagctaagaatcttgataaaggttagaggaattgcaaactagaataaccagtttaaagaggaacataaaatgacttgatggagctgaaaaacacagcacgagaacttcctgaagcatacacaagtatcaac

SEQ ID NO: 729168 - DNA, 682 bp, Homo sapiens
aaaagaaaagagaagagactcaaatagacacaataaaagatgataaagggaatatcaccactgaccccacagaaatacaaattaccatcagagaatactataaacacatctatgcaaataaactagaaaatctagaagacatggataaattcctggacacatacaccctcccgcgaccaaaccaggaagaagtcgaatccctgaatacaccaataaaaagttctgaaattgagtcagtaattaatagcctaccaacaaaaaaaaagcccaggaccagacagattcaaggccgaattctaccagagatacaaagaggagctggtgccattccttctgaaattcttcccaacagttgaaaaggagggactcctccctaattcattttatgaggctagcatcgtcctgacaccaaaacatggctgagatataacaraaaaagagaacttcaggccaatattcctgatgaacattgatgcaaaaatcctcaatataatactggcaaaccaaatccagcagcatatcagaaagcttatctaccactaacaagtcagcttcatccctgggatgcaaggctggtttaacttaaccaaattaataaacgtaatccatgacataaatagaaccaatgacaagtaccacatgatcatctcaatagatgcagaaaaggcctttgataaaattc

SEQ ID NO: 729169 - DNA, 682 bp, Homo sapiens
aaaagaaaagagaagagactcaaatagacacaataaaagatgataaagggaatatcaccactgaccccacagaaatacaaattaccatcagagaatactataaacacatctatgcaaataaactagaaaatctagaagacatggataaattcctggacacatacaccctcccgcgaccaaaccaggaagaagtcgaatccctgaatacaccaataaaaagttctgaaattgagtcagtaattaatagcctaccaacaaaaaaaaagcccaggaccagacagattcaaggccgaattctaccagagatacaaagaggagctggtgccattccttctgaaattcttcccaacagttgaaaaggagggactcctccctaattcattttatgaggctagcatcgtcctgacaccaaaacatggctgagatataacagaaaaagaraacttcaggccaatattcctgatgaacattgatgcaaaaatcctcaatataatactggcaaaccaaatccagcagcatatcagaaagcttatctaccactaacaagtcagcttcatccctgggatgcaaggctggtttaacttaaccaaattaataaacgtaatccatgacataaatagaaccaatgacaagtaccacatgatcatctcaatagatgcagaaaaggcctttgataaaattc

SEQ ID NO: 729170 - DNA, 567 bp, Homo sapiens
tctgtctccaaaaaaaaaaaaaaaagagtttttttttagatcatcagctattgttagtgttagtgtatgttatgtgtggctcaagacaactttgtttcttttaatataggcagggaagtgaaaagattggatatccctgctttataccaagaaagacaacaccccacatttgcaatgcctaaaaacactaccagccatctgaaaaacatgagacttctaacttctgttcttttttgtagcagtggaatcccacggtgatatctgagggatgtggttaccttttggaggaggttgacggtttctaaggatgattctttctgagtgaaatattgtcggtgtcattgaccttttcattatttcaactattattattccaggttatcaatagtctggctgtctatcgtcatcgtgagactgactttggtgtaggagttcgagaccaccctggccaacatggcaaaaccccatctccacaaaaattggataatttgataattatcattattgggtttctgagacgttacacatttaacrttctcttctgcacaagttgcctttgtgtgagta

SEQ ID NO: 729171 - DNA, 507 bp, Homo sapiens
acttggaagaaaataagcagagccaggcgtggtggctcacacttgtagtcccagcactttgggagcctgtggtgggaggattgcttgaggccaggagtttgagaccagcctggataatatggtgaaactccgcctctacaaaaaaaaaaaaaaagaaagaaaattatccacgtatggtgtcacgcacctgtagtctcagctactcgggaggctaaggtgggaggatcgcttgagcccaggagattgaggctgaagtgagctatgactgcaccactgcactccagcctgggcgactggacccagagatttagagatagaagcgagaccctatctctaaaagaaaaacaccaaaaaccaaaaaagagggcgaragagggaaacaaagccagacagcagttaaagtcacaaggacagatcttaatctgtaatatactgttgcaatagggaacagagtccagtgtgaactgaactcctatttgtacagagaatgagggaatgggagtgggg

SEQ ID NO: 729172 - DNA, 606 bp, Homo sapiens
aatcaccaaaaccaaacagtcttgaacatagaagattctcaaaaaatgtttgcttaatgaacacagttaatagttattcagggccaggcgcggtggctcacacctggaatcccagcactttgggatgctgaggcgggcagatcatytgaggtcaggagttcaaggccagcctggccaacatggcgaaaccccatccccactaattagccgagcgtggtggcacacacctgtaatcccagctattcaggatgctgaggcaggagaatcacttgaacctgggaggcagaggttgcagtgagctgagatcgtgccactgtattccagcctgggcaacagagcaaggctcggtctcaaaaaaaaaaaaaaaaaaaggtagttattcagtgccttgctgatgttgaaaatggcccatgagacagaatgtccctgccttgaataaatagatgaactggtttaatgctatgctttacttttgttaaaaaaaaaaaaatacaagttaaattgccaggtacagtggctagcactttgggaggccgaggcgggcagatcacctgaggttggaagttcgagaccagcctgaccaacatggagaaaccccgtctctac

SEQ ID NO: 729173 - DNA, 588 bp, Homo sapiens
catgttcaaaataaggaacattcaggccgggagtggtggctcacgcctgtaatcccagcactttgggaggccgaggtgggtggatcacgaggtcagaagatcgagaccatcctggccaacacgatgaaaccccgtctctactaaaaatacaaaaaaaattagccaggcgtggtggcaggcgcctgtagtcccagctacttgggaagctgaggcaggagaatggcgtgagcccgagaagtggagcttgcagtgagccaagatcttgccactgcactccagcctgggcaacagagcaagactctgtctcaaaataaataaataaataaataaataaaaataaggaacattcttttgtcttccaagttctctggactggagagggtaagcacataatctacagacwgtccccttcttgggttctttttaggccttggtagaaggcaggttgtattgtggatctccagttatacctcttggtatattttcctataattattcattttaaaataagatgactatagaaaaacttatggataaaataaaagaaaaataattaaatgaaaaataatgtatacaatatgtttggct

SEQ ID NO: 729174 - DNA, 605 bp, Homo sapiens
aaaataagacacgtagaaacgacgagcagatgataatgacaacattttcaaaagccaggaggaaaattcaatttatgttccatcctgtccttggcaaatagtcggtttcctccccctctgttttcctgctaatcacaagtgaatgtggatctggcttgttwacttctttgatctgtttgctcattgacattcatacagctttgagactggggtttttatttcctttgtcatcttgatgaatgcctgggcaaatacatcgcaaaatgactgtgaagctcaataaaaccaattcaacaggggaacttaggctatggggaaggcaagatgacatcttataaacaagaaaataacctatgatggcacctactgtgtcatgtggagttttggggaaataggtctcaaagtttggactcataaaaagttgtgcagcttaagctggatatcaaaactagatgtaaatgcaactgaagcagagaaccagttatctagacagttcatatctgaactatttctttaggaagtgtctatgtaattaaggaaaaatattttctggtcaattggtcaatcattttgattctctacttcatatttcaacagtatacaat

SEQ ID NO: 729175 - DNA, 635 bp, Homo sapiens
tctggggctgttggtgccacttgacccttctgcatgcctagtaggtgctggcaaccagatgctacaattcctagctcaaatttttccttgtttgattgccagcttatttagtgattttccccatccccctcaagttggaacactttgaattattgccacacagacgccaacatttcaggggtaagattgtgtgattaaaatgaaattaacagtgtcaacagtgatgcacaatggaaggattactagcattttctggttcaagattgtattttgctttactgcakgattcaaattaactcataaatattggatggtgtataacaaatatcccttttaaataaaaaaaaacagggattcttcattagtgccaaacaaatgagatttatgtaagtgcttgggaacatctaacattgaagctttattcagtgctgtgactaactcacagtagatcatcagcatagctgtgaggctgcttcctgagctctcagtctttctaaaataattcagatggaatcttagcagaacactaagctggggtatgaaaaggataggtggacaaaagtctatttgcacaagatggtgaggatccatgggaaagtattcattgagagggaaagaggagccaagctccttta

SEQ ID NO: 729176 - DNA, 411 bp, Homo sapiens
aggttctgttgcctttttctcacgttagggagactctcttggctccaggctgattttggccaagcaggctgcctcagttctctcttcctccttgctttaggggtctcttttctcttttctgttgaattccagtgttctcttttgaataatctaatagtagtgtgacaatctactcactattttagttcttcttagtggaggaggcatatacaagatgcctctaatcagccaycttgaacctctcattctgacattttttcccagacttattttcaaaacatggtcccagagcctcctcttctgtgcagaataccagacttagcactgtggatctagtggtgccatcaaatacctcatgagagaaaagagcccgcagtccaagtgagtcatttccacagtcaattcaggaga

SEQ ID NO: 729177 - DNA, 527 bp, Homo sapiens
ttcataggttttgggcttatgaaactggatggatggggatcctaatccctgagacagaggacattggaaagggactaaatccatattttggagaggatgagatcaaggtacctagaagcatctatgtagagatgtcatataagtagtcagatctagaagctaggctaatgatttatattaatgagttatcatgtatagataacaattgaacccatgagtatcaataagaaaacctaggcagaaaacatagagttaaaagagtacataatgaaaagtagamgtgactgtgattaaattttgataaatactaatatttaatgacctaaagaggcagtggatggagatactggaggaacataagggagatgtcatgtcacataagccaaaatagagtgtgattcaagaggggagtgaacagtcaacatgaagatatgtgaccaagaggtcaaataatagggagctgaaaggtggatttagaaaagtggtcatcttagcgggcattatattgctagcttgatatgattgta

SEQ ID NO: 729178 - DNA, 501 bp, Homo sapiens
ttgcttggtgttgtgtgtcggctcataaatgtgatgggattccaactctcaagcagttataacccattagcagagacaaggccccttcaggaacaatgacaacatgacccagaaaatgatgagagcagataaaagctttggagagggggattgtggggaggagctggcctttaatgcatcctctggtaagaaacgaccacctaaaagcaagttcccacacaaacgtaaatgacttgagaactgtcaggcacagatagaaacctactctgattcctgtataattttctaagttwaagaaacagaagtggtcattttgtaaaggtagaaaccaacccttttcatttccccagtttcctcagtctctgggcactgtggtatcagagttggtgcaggcctctgtcactggctaggatatcaggtggccttccttcaggagaggtgccagcacctcgcagcagcctccagggtgcaacatgtccctgggaaaggggctgatggaca

SEQ ID NO: 729179 - DNA, 562 bp, Homo sapiens
ttattattttaaattttcagcattatttttttttacaattcactatgcacatttcatctttgcatcatttccaatactggaggtataaattgtgtagagactttcagaaagttctaattcattgcatacatttttgcaaatttgacttcgcaaaagtatattatcacaacaatgactttgtgtgtaaacatcgtgcctgtacgtaaaacgttgaaacatcttcagtaaataargagatgttccttttgtgcatctgcatttgtgaaagataaaatttctcaagatctcagatctttggacaactgtatgttatgatggtgattcactgtggtttttgattgatcccatcaaaagacttgggttgtgcatcacagtatttcagataactgcaatgttaaatctggctgcacacaatttccaacaatagtaatatgtacttatacatttccctttttgacctatttctttatgcatatgattcattttctcatcactattatattcatatgaccgttgttagtatacccaagtgcttatgcttgcaaaaatgtgtatttttgcc

SEQ ID NO: 729180 - DNA, 651 bp, Homo sapiens
tttacaccttttatttttttaaagaattctttatatattagggagatgagttccttatctgtcatattatatgggttatagatatttttttcagattattatcttttgactctgatcaggatactgttggctttgtagaaagttttttttwttattgttataacgcatttatcaaatatttccttcagcacttctgggttttttaacattctttgaaaagtccaacccataccaagaccattaaaaatcattcataatttctcctagtatttctatggtttcagttcatttcttttctttctttcctcctcctccctctttctctccttttgcatacaaatgtttggttcactttgatatggattgaacttttatttatttatttattttgagacagggtctcactatcttacccagggtggagtgcagtggcatgatcgtagctcactgtaacttcaaactcctggattcaaatattccttctgcctcagcctcccaagtagctaggactgcgtacacacacaccatgcctgactaagttttaaaaatgttttgtaggaatggggttttgctatgttgcctaggctcgtctcgatctcctggcctcaagtgatcctcccgcacaggcctcacaaagtgctaggattacat

SEQ ID NO: 729181 - DNA, 651 bp, Homo sapiens
tttacaccttttatttttttaaagaattctttatatattagggagatgagttccttatctgtcatattatatgggttatagatatttttttcagattattatcttttgactctgatcaggatactgttggctttgtagaaagttttttttattattgttataacgcatttatcaaatatttccttcagcacttctgggttttttaacattctttgaaaagtccaacccataccaagaccattaaaaatcattcataatttctcctagtatttctatggtttcagttcatttcttttctttctttcctcctcctccctctttctctccttttgcatacaaatgtttggttcactttgatatggattgaacttttatttatttatttattttgagacagggtctcactatcttacccagggtggagtgcagtggcatgatcgtagctcactgtaacttcwaactcctggattcaaatattccttctgcctcagcctcccaagtagctaggactgcgtacacacacaccatgcctgactaagttttaaaaatgttttgtaggaatggggttttgctatgttgcctaggctcgtctcgatctcctggcctcaagtgatcctcccgcacaggcctcacaaagtgctaggattacat

SEQ ID NO: 729182 - DNA, 632 bp, Homo sapiens
tttgcttaacaatctataaacaaagccactttcagcaatgctaaccataatggatagatacttgcatttactcaaatcccacaaatcataaatgctggcacttctgcaagagttgaatgtgaaatatttttgaaagcttctaagttttaggtaaagctagatctcctggtactccaggtattggttttgttgtttggttactccatcaaggtataaatacacacataaaagtgcacaacacatccatgtatagctccgtgaatttcaaaaagtgaacacacctgtgtaatcagcacccaratcaagaaaaagaacatcacccacatcccagagatcccttgtgctaccacttagtcattattcccagcaagataatcactatctcaagttctaacatcatgtattagttcttcctgtttctaaaaatggtataaatagaattaaacagcatgcactctttgggtcttctttcattccacatcgtgattatgcagtttatgtttttgtatccacgttctttctgatgcatgatattccattatatgcgtatactttcatctatttatctattcttcctcagatggacttttgggcagtttccagtttaagatgattataaaattgctgctacg

SEQ ID NO: 729183 - DNA, 632 bp, Homo sapiens
tttgcttaacaatctataaacaaagccactttcagcaatgctaaccataatggatagatacttgcatttactcaaatcccacaaatcataaatgctggcacttctgcaagagttgaatgtgaaatatttttgaaagcttctaagttttaggtaaagctagatctcctggtactccaggtattggttttgttgtttggttactccatcaaggtataaatacacacataaaagtgcacaacacatccatgtatagctccgtgaatttcaaaaagtgaacacacctgtgtaatcagcacccaaatcaagaaaaagaacatcacccacatcccagagatcccttgtgctaccacttagtcattattcccagcaagataatcactatctcaagttctaacaycatgtattagttcttcctgtttctaaaaatggtataaatagaattaaacagcatgcactctttgggtcttctttcattccacatcgtgattatgcagtttatgtttttgtatccacgttctttctgatgcatgatattccattatatgcgtatactttcatctatttatctattcttcctcagatggacttttgggcagtttccagtttaagatgattataaaattgctgctacg

SEQ ID NO: 729184 - DNA, 415 bp, Homo sapiens
gctggaaataattccaaaagataggaaatcagtatattgaagagatatctgcaatctcatgtttattgaagcactactcacaatagccaggatatggaatcaacccaaatgtccctcagtgggtaaatgaataaagaaaatgtggtacatatgcagaggaatattattcagccataaaaagaatgaggtcctgtcatatgcaacaacatrgttggagctagaggacattaccctggggttttgtgatgtgtacagctggcctcaggtcagagccagtagaagttgcagctcttctctgatttttgcttaagtgcctgtatctccacaaatgtttccaacttccactctactatgaggtctcactctacacaggaacttcagctcagaggagaaaaaaatagaaccttctagacca

SEQ ID NO: 729185 - DNA, 543 bp, Homo sapiens
atttcttggtagaaatcacatttaagtaatcctcaggtagtcagccaagtgtattaatgggcaaatggcattttatgacaaaagctacttggtaatcatttcatgcttgaaattttggataaatgaattgctaaagatgaccaagcaagaaaagactgcaacgctttttttctttattacccatggccagatttcctagttattttctcattgcaaaagaatgtgaaacaaactgattaagtgtaaaataactcttaactcttatttagactatcrtagtcatcttcaaaactctttgagatcatcttgagaattcacagttttctattctttttgttgctagcaggtgaaattatgtacctttggaaccctctgtatgggtcagtctgtggtactcacagtagtctttatataggagtgtttgcatgtgattgcaggtcagcggagaagcaaacaaagcaataaccaaaaaaggtgtgctgaaagttgctgtttcaactcatagacatagtaatctagttgaagtattttaacaatctcttc

SEQ ID NO: 729186 - DNA, 395 bp, Homo sapiens
cctctatcagcatttgaagcagtttgagattgtagaaaattgtgcaacctttgttttattatttgactcttacagatagtgctaaacctcaagtatgaattctctttatatgagaccagaacactgtggaaatacaggattttarataggcctttacaatgcatatattttacataatttcaccctaaaaatgtaacatgtatttggcaaaggaagggcttttgttgctgtcattctccctcatgtgttcctcttgtgcctgactgactctgcagggggaactttagttctcaggaccttggtttgctcatggccttctgagattgatgctgcctttcctctttttgctcttgttgcaaggacagtgcaatcatattcttgccttccttcttctg

SEQ ID NO: 729187 - DNA, 567 bp, Homo sapiens
tcacctcagcctcccaaaatgctgggattacacgcatgagccactgcgcgcccagcctcacatacattatatttatgtcttcaagtgacaagaatgagcacattcattaacatgatataaaatcatggtaacatcgtaacattttaaggtaagaagtagagttgtatattgtaagcgctatgcttgctattcaagatcttgaagttaagtacacaagaatcttagaaatcacatttcagaggacactaaaaaatgtaattattgatataaaacattgttagaatcatgattcagttcagtcaaacagttttacttttttatcattttaagctttaggtatggatatcattagcttatctgatcaatacactattatcagaattttaagaagttcaggttaactagtattttctgaaaacagaaackcaacatccctacaaaattatggagaaaacacagctatgtatttcagacaaaatttttaaatcagtctgatttgtccaaagaatcagtttttagctttaaatttttaaacagtttttaattgataccttatattggtacata

SEQ ID NO: 729188 - DNA, 602 bp, Homo sapiens
gaactctttgcctaagccaatgtctagaagagttttttccagtgttatctagaatttttatggtttcagatcttagatttaagtctttgatccatcttgaattgatttttgtataaggtgagaggtgaggatgcagtttcattcttctacatgtggctttccaattaccccaacaccttttgttgaatagggtatcctttccccacttcatgtttttgtttgctttgtcaaacatcagttggctgtaaatatttggstttatttctgggttctctattctgttccttttttctacatgcctatttttataccagtaccatgctgttttggtatagccatgtagtataatttgaagtcaggtaatgtgatgcctccagatttgttctttttgcttattcttgctttggctatgcaggctctttttttgttccatagaaatttttaggattttttttttctagttctgtgaagaatgatgatagtgttttgataggaattgcattgaatttgtagattgcttttggcagtgtggtcattttcacaatattgattctaccaatccgtgagcatgggatatgtttccattcatttgtgccatctat

SEQ ID NO: 729189 - DNA, 522 bp, Homo sapiens
tacctagtttattgagagtttttagcatgaaggcctgttgaattttatcgaaggccttttttgcatctattgagataatcatgtggtttttgtctttggttctgtttacatgctggattacatttattgatttgcgtatgttgaaccagccttgcatcccagggatgaagcccacttgatcttagtggataagctttttgatgtgctgctggattcggtttgccaatattttattgaggatttttgcatcaatgttcgtcagggatattggtctaaaattctctttttttgctgtgtctctgccaggctttggtatcagggtgatgyttgcctcataaaatgagttagggagaattctctctttttctattgattggaatagtttcaaaaggaatgggaccagctcctttctgtacctctgatagaatttggctgtgaatccatctggtctcggagtttttttggttggtaggctcttaattattgcctcaatttcagagcctgttattggtctattcagag

SEQ ID NO: 729190 - DNA, 617 bp, Homo sapiens
tgctctattttatgtattttatatatttctgggttctctattctgttccattgatctatttgtcttgtgttgatgccagtaccacattctgttatggtagcttaataataatccttaaaagcaggaacagttagcctttgaactgtgttcttttccagttgtttggctcctctaagtattttcwtttgtctatgaattttagaattagcttgtcaatttatacaaaagagcctgctggtattttgatttgtattgtttggaatctgtgaatcaatttggggagaattggcatcttagcaatatggagtttttgtgaacaagctgtagctctatttgtataggtctctttaatttctctcagcagtgctttctagtttctagtgtacatatcttacacactttttttttgctgggtttattcctaaatatttcctatttttgctgctaaggtagatggcaatttttaaaatttcaattttcggtgctagtatctagaaatgcagtgggttttaaaaatacttttattttatatcttttaatcttactggactctattagtagaagtagcttggaaattttgtcagattttttacccagactgccatgttgtctgtgaa

SEQ ID NO: 729191 - DNA, 635 bp, Homo sapiens
gcatagaataaaagcttactggataggctcaataatagaatggatatgactggatatgactgagagtagataccgtatactgtggtatgactggtgacctgttggatgtcgctgtcctgtagtcattggttaaatatactcctgatgacagatgggtacatgcacttcatccagctttgctgctgcacgttgtcatggtgaaggggaaggacacactacaaatgatgattccttcccacagactacagtccatatcttaacaaagatctgtcgaatgtttccctgtggaaaagaggattttaatatatttttctcttgctgacttgagtaaagatttctgattatcctagaacagagataatggargtaatttttcatggaaaaactatatactttcgtttgtaagctgttagaattggcattttgttggttgggtgccaggctgctagactatgcaccacgtgggcagggattttgttttgctcaatgttgtattcctgatgaaaggtaaatgattttaattttgataaagtgatttatttactttttaattttttcattttttccacttgttatttcactttgtaattatatgatataatctatttttagttttctccacagggctaaatatg

SEQ ID NO: 729192 - DNA, 542 bp, Homo sapiens
tctcgaaacactgctttagccgtgtcccagagattctggtatgttgtgtctttgttttcattggtttcgaagaaatgttttctgccctaatttctttgtttacccagtagtcctttagtagcacgttgttcagtttccatgtaattgtgtggttttgagtgagtttcttaatcctgagttctaatttgattgcactgtgatctgagagactgttaagatttccattcttttccatttgctgaggagtgttttacttccaattatgtggtcaattttagagtaagtgtgatgtggtgctcagaatgtatattctgttgatttggggtggagatttctgtagatgtctgttaggtcacttggaccagagctcagttcaagtcctgaatatccttsttaattttctgcctccttgaggtgtctgatatacacagtggggtgttaaaatctcccactattattgtgtgggagtctaaatctctttgtaggtctctaagaacttgctatatgaatctgggtgttcctgtagtgggtgcatgtatatt

SEQ ID NO: 729193 - DNA, 593 bp, Homo sapiens
atagagggtgcaaaacagcctctagtttttttttttctttttttgagacagggtcttgctgtgtcacccaggctggagtgcagtggcacaatctcagctcactgcaacctccgcctcccaggttaaagcaattctcctgagtagctgggattacaggtgcccaccaccacgtccagctartttttgtgtttttagtagagacgggtgtgggccaccgcacctggacaagcctctagttttcaacatgttctttacatagggaattaaataggcttttcgcccagcagtttgaatattaatcaggtatgtttggaggggtaagccacaggaagggaatcctggcagaaagtgctagtttatcttccaatctgtacttttcttcttatataatggaatttttagctgaatacagagtcatccagtttccaagcctcccttgcagccagatatggtcatagatgggagtaaaagtgatgtatgcaacatccagattcttttttttttttttttttgagacatggtctcactttgtcacccaggctggagtgcggtgacaagaacatggctcactgcagcctcagtctcctaggctc

SEQ ID NO: 729194 - DNA, 521 bp, Homo sapiens
agagtccagaacagggtccaatcaggtcacagagcatgaagtgtaaggacgtctcactgctgccaccaagcagcagacattgcagcttgcactggactggcatgggtcagtacataccacctattatgggttgcattctgtctccataaaaagatatgaagtcctaacatccagtacctcagaacatgacctcatttggagmtactgtagttgcagatgtaactagttaggttaagataagtttacactgcagtcaggtgggttcttaatccaataggaccagtattcttataagaagtcaggagagagacacaaagggagaagatggccaagtgacaacaggtgcagggagtggagtggtacaactagaagccaaggaattccaaggattgctggtaaagatcataagctagaagaggcaaggaatgattctcccctacaaggtttcagggagaacatggccctactacaccttgattttggatttccagcctccagaacattgagataacaaatatctg

SEQ ID NO: 729195 - DNA, 494 bp, Homo sapiens
atctcaaccaccccatggaaacagtaagatttctttcaggcatttattttaaagagagactacttcatacaaccaggtttgggggatttgagggcttaagagagttactagaaattactgtcagttcttgctgtaaagctatctctgcccctgggacgmatggcctgccaaatggcctcataaatctgattattctcctttcctttttctctttccatgttaaaattcttctgatttaccagcaacttcaggagagttaaaacaaatgaaacctaacagaaattctgaccctccactgccaccaatgcactcaagatgcatcatcatgaactgtatttttagagacttgcaagtgttatattgggctaactcatattttggtcatctttgtcacctcctccaaatccctctgatatttattttgaagaccttctgagagtctacaaccacacttgctagaaattcttactcacttaatcttacatgtctcatgc

SEQ ID NO: 729196 - DNA, 619 bp, Homo sapiens
gaaaggatacctacagccagtgagggcagtttttgttttctaacaacatatttcacttaaaataattttttatttaccaagacaaacttacaagaaagtgatctggaataatttagaaccatttcccttatatgtaatgtgacaagaaatgtgacaattggaagagatgttagaaaataatgtgatgtcaaaacaaacagtttttataaaagtgagattttaagmaaacatctgtgaaaaataaccggtcccatataacccatacaatatattgttaggaatttttttcttggtgcaaggctgcacaatcaacaagtttcccactgtaaaaatataataaagtacttctatatttccgtaagtaaataatataataaaagtctaaccagaatgtggtatcagaggcttaatatgaaaacacctatttggtaatttttgtttggcatgttgctaccactcaggaaagaggatccagatggccaggctagtatattgcactgtatgtacatacctcagaaatctttcaaagggagtaaaatgaaaaaaaaaaaaaaagaaacagaagagcatatagctagagttccagtatgtggctcagtgcacttctgtgtgtggtatc

SEQ ID NO: 729197 - DNA, 644 bp, Homo sapiens
agttctatgatatgcccactgcacaaggtcctggtactattcatagtttaaattgtcctaactataatcttgagtgagtgcatttctcaccttttttgcttaaaaaaaaaaaaagaaaaataaggggcttgcaaggggaagataaatagtttttcgaccaatgtagacatgaaccatatctgactactattggctagaatgaaagaagaaagcaaaccttttggaaatagagttgctggcacagaattgccatacttgagttctgatatctcccccaccctaatgaaaccaagggctgcagcagggtagggctgctatgtgtgctcaacaggaagaaagatcctaaatgattgtctgagtgaagttgatcttctagttgcaggaaattttawgattatgacttatcaatgaaagggctagtggaagggcagtgaaaaataatgggataaatgaaaaatagttgtagatctgaaaagaggccctaactcagaagcagacatgcacaacctaaataatcaagggggttctccacattctatgccctgttagagaacaatggcagataggattttgaaggggattcaactttagctttagtacagaatgcatcacaggccctttttttttaagtgtttgtagactcc

SEQ ID NO: 729198 - DNA, 612 bp, Homo sapiens
ggagtgataatacagtattgtgagatccaagtaagatatgaaggtggtttgtgaatttttaagtattacaagagatgtcgttataaatatccttgtatggtgatttgtaaatgttggggcaaagggcaatatacaggttgctgtgttattcgttggtttgctttggaaatgttctyttgtgattttcttatacattgtccagtgaatgggtggatcatgaattaatcagaataaaacaccatgtttctcattgatcatacttctgagtaaaggaaaatgtctatggcttaaacatgctttcccaaagttttcctgagagcttctttacaaaaaaaaaaagcagttccctgggcaaataagtttgtgaaatgctgcatgcactattttctgctagagattcataacacatattagcatattacaggttctgagaaatcccacaataattctggtgaactttgttaatccaacatttcatatttatttgactattaagacctttctcccctgtgacatctaatgtaataatgtatccctttggtatattctgctttaagccaatttttcaagacgaggtgcctgaattttaattggaaaagatataaaagaaaa

SEQ ID NO: 729199 - DNA, 510 bp, Homo sapiens
gatccaagtaagatatgaaggtggtttgtgaatttttaagtattacaagagatgtcgttataaatatccttgtatggtgatttgtaaatgttggggcaaagggcaatatacaggttgctgtgttattcgttggtttgctttggaaatgttctcttgtgattttcttatacattgtccagtgaatgggtggatcatgaattaatcagaataaaacaccatgtttctcattgatcatacttctgagtaaaggaaaatgtctatggcttaaacatgctttcccaaagttttcctgagagcttctttmcaaaaaaaaaaagcagttccctgggcaaataagtttgtgaaatgctgcatgcactattttctgctagagattcataacacatattagcatattacaggttctgagaaatcccacaataattctggtgaactttgttaatccaacatttcatatttatttgactattaagacctttctcccctgtgacatctaatgtaataatgtat

SEQ ID NO: 729200 - DNA, 558 bp, Homo sapiens
caaagggccacagctcttctccccttctcatcgcccacaacatggcaagcgggagggtgtgtttcagccctgttcgtgttaacagctcttttagtcccaccatttgatgtgtcccgagttcttgtttcatacccaggaagaatgaggtatgcggacagctggaggctgagcaaagcgaagaggagcttcactgaytggcagaacagttctcaagagacccaaagtgggcagctcctttctgcaagcaggtcatcctgacgagtgtccagctctcagtggagaggagacccacagtggttagctcctttctccaggcaggtcatcccaacacgtgtccagctttcagtggagaggagacccacagtgggtagctccttcccccagtcagtagtccagacatctgtgcagccctcagtggagaggtgacctagaacgggtagcttctatcggcaagcaggtcgtcccatcctctgcctcagtctggctgagtccagggtcgttatgcgcttcagaggaggggaagtatgtgctaattggtccatggacggccatgggtgg

SEQ ID NO: 729201 - DNA, 667 bp, Homo sapiens
ctttgagaagggccatatggttgtatatgcacaaaattgcgcattcttaaagttttttcatacgtaaggcttgcaagttgtttacttaaaacattaaaatggttggcatcttgcttaaggcagctgataaagtagcaacgaaagagtccggtttttgaacatatgaaaattctgtttgttatactatgaatagcagcatctaaagtgaagaagtaagaaatactctgtggtaactagattatccttagtactctgaatgaactctttaacgacccttgaattaaaaaatatttgttacagaaattgaaagctaaacgtgaatgttcatgttcatgctcaaataaatgtaattattatgaacacctacatgatttgggattttggttttattttgaaatgagagctctttcatttacaagttcactaaaaactcaaatgtttcttgaaaatcacaggagcttatgaacattaaaaagaaggartaactattgaacaaataagacagacactgtcaagaacgggcaggactttgcaaggtgataattaagactagttaatatttatgtggaaaagttctgactgggcatttggaacataataatatgaacaatataatataataaatatagcatacatttgcatttatttgcaacctcagacaagcaag

SEQ ID NO: 729202 - DNA, 589 bp, Homo sapiens
cggttagactcgtcaaaattatctgtgtttaattaaaagcatagattacagacccaactgtaaagttttgacatttacataccagctcacatcattgagtctgcagagcgtctcaagaagcaaacgtaacattatctggcaaaggtgctgatttctgttgttttgaaccttaaaaataatgtaattctaaagcagtctaatatatgccatcttgtttaataatcagcttgtatccacatctcctgactatgccttccttactcctggccaagtaataattgctctctaagtaaagccttgcctccatttagttttggcatactcaaacttkgagaagatttaagacataacacatgcaaaagaactatccacaagagggagacagatccaaataattcccctgtattaggtcagttcaaaatcaggtcgtagcaaagtttaaaatttgatgacttgaactggaattgtcagcaatatttatttgtttaatgctcaaagggtttttttaaaaactaaggttttcaaactagcaactcagaaaagattattttaatgtgtttaagggatttaatatggatctaatccctca

SEQ ID NO: 729203 - DNA, 601 bp, Homo sapiens
cagaaaatgtgcatgcagttctgctcccatttttcctacagtatttcaagtgaaccactcagtgacaatcccatcaacttatactgccttactcttttaatttaatatgaaatagaactgtcattaactgaaagggaaattgcttcagtgaatatatttgtgaagaaataaaatygcttcagtgaatatatttgtgaagaaataaaattcatgagatattataaatttgatttgccttcaaaattttaatttaacttttaaaattagttacaaaatatagttttaaaaataatctaattattcataaacttttaattgagagtttctttctgattagttgctgtctgcccctgtgcagctgacccattatatttacaaattggttgatctctgcatataggccataatagttttataaactgtaggttataaacgtctgctctaattaattttctttcatatcaactgaatttgatgttgttgaggcattagtgagttttttaaaaatagtttacatagagcttcattttgttgattagtcaaaagtattgttaaactggcttcatggtgtttgaaatcacctattttcaggtgataagac

SEQ ID NO: 729204 - DNA, 631 bp, Homo sapiens
atgtatctaagtaagttaatgttggaaaaaagtttaaacattgagaaaattactgagggtgtctgggtaatatctcagaattagatttgaaagtcactgaacgatatgttgtggctcaatgaggaagttgttagatttgtgataataccgaaaaaaatccctcttttggttttatctaaattagcattcacaatacaaaagtcattctaagaattataattaggagtctgacattttacacagaatttggtagttatttttggtaaataatttttacagargatgtttgatcaaattaaaatgtaaaaattttaaggatcaacctatgattttcttgtattaatatattcacgtgggatctaaatgctgaaaaattgtattattattttttctagtttcaaatctaccagaatgtttatctataacaacttctatacagaagttgtttaaagttcatggaaactatcttctgtaggagacagtttacagtttacagttctgtaaaatgaatcataaaatccagaattttgctccacttgtcccattactgatccataaaaactggatttaatttctactgtagttatttttaaaaaatacacatttggtaccttaagaatgaaataattat

SEQ ID NO: 729205 - DNA, 614 bp, Homo sapiens
tttacatttgtctaaagaagagcttggggcaatctaaggagatacatagactaattctccagagtcttatttgcaatcctatcagcaactgaattttagtgcagaaaagtcattagtgtctgttagagaaaatgtgcaaagcatttgaaaataaggtgaattttacaagtcacatattttctagcagaaatttaaagtttttctttcttttcttagtttacctgttggattcaaggccctgggctttcctcaagttcccacatgaagatggcacacattaaagctacatttcagaccctaatttatttgcattttcaagatttttctcttcacagacattagctatcttaggtggtaccatgaagaataaatgccattaaagggttrcagaagaaagccatggtatactgtggtctaatccgtttaactattacaatgaaaagattttttaccatgggattagggtcataaaaacaactagactaggaattgccattcccatccaggtacctgctgccaatgaggctagcaatagtaacaaatttgacaaccctcccttcccctgaccctaacacaaatgtacacaacactattctctttgaaatgctccaaac

SEQ ID NO: 729206 - DNA, 620 bp, Homo sapiens
atgctacatgaatattcacatacaaatttttctagtgaacataagtttttatttttagggggctatatacttagaagtagaattgtgggatcaaatggtaacgctgtatttaactttccgagggccaccaaattgtcctgcacaacagctgcactatttttatttccaccaaccaaatcgagcgtttcaactccccattcttcccagcactcgttattgtctcattttttattatagtcattgcagtggatgcaaagtcrtatctcattgtggttttgacttgcatttcactgatggctaataatgtcaagcatcttttcatgtgtttgttggccttttgtatatctttttttttttttgagaaatgcctgtttagatcctttcctcatttttcgtttgggttactctttttattattgagttgttagggttttttaatatattcaacaaacgagccccttatcagatatatgagttgcaaatattctctcccattctgtgggttgtctttccagtttctggatgaggtcctttggagcttgaaatgttctaattttgattttcaaaaattagttattttttctttgattgtttgtaccaaatctaaggtcatgaagatt

SEQ ID NO: 729207 - DNA, 620 bp, Homo sapiens
gatgtccttaaatatatgaatattgccctgggagttacccttttagtcattaataactgggcataaatcacttatctgccaggtaatcaagaacaggacccagaacaagtgtttttctttctttctttctttctttttttcttaggctggagcagtggaaagagaactatgcacaaggatgaggagaataattgtgattgtgggacagggccccaggagagaggtatagcagactggccttggaaarcctgcagctgcatcaggaaggcaaagcatgcttggaaaaaatgctgactgaagtaaggcagaacctagagggtgggtggatactccataactgtattcaaattgggcactctcttgttgtaaagcctttgcgtaagtgcaactgagaaaatatatggtagaaaaaaaaggctatgttctgaccagctcgaggatgggggaatatcatgcataatatgtgcaaactatgtgaagaaaagtacaagttaatatgatcacaaaaatattcagaaaaacacagagtgaaggaggtaagacaagaggtaatgaaataattagtgaagtatgggctcctgtgcaagggaatatcttgagacagatttttgaagagaagt

SEQ ID NO: 729208 - DNA, 462 bp, Homo sapiens
ttatggtgtgtgataaggttgatgatggtgggtgttatgggttgaattgcatcccccaaaaaagatattgaagtcctaccctccaggacctgtgattgtcaccttatttggaaataagttctttatagatgatcaagttaagatgaggtcattggggtgggccttaatctaatatgactgggttcatataagatagaatagaaacggaaggaasagaagatggtgtgaatacacagggagagcaccgtcaacaagtgaaggaactcctgaggctcctgatgctaagagagagagacatggaagacattctccctcacagcccccagaaagaatcaacttctctcatactttaattttggactccaaactctcagaacaatacagttctgttgtttaagccacccaatttgtgctttcttacagcagtccctggaaagtaatacagtggaggaggacccccat

SEQ ID NO: 729209 - DNA, 514 bp, Homo sapiens
ctaatgagtgaatgggaaaataaaaagtaaaaagataataagccacgattgttctaacagtagactggcaaataaagaaaagattgctaatatctccttggcaaggcctggggaaatgaacactctcctatattatttgtgggggtgaaattggcaaatttttgttggaaggcaattggcagaatctatagaaattttaaagatagctaccccatgtctcagccatttcacttctggcaacttatcctacacttttactgacagagagaataaagatagatgtacaagattgttcattgtarcattacctgtaaaaacaaaaattgaaaagtaacttgtttagccaataatccatagtgtaaataaatgatacacccatgcactacactatgcagctgatataatgaatgacatagatttttgtagcagctttgaggtctgccctgagatttcttttaaggaagtgcttgccgttagttgcaaggaatgaaattagctaacagccttcagctac

SEQ ID NO: 729210 - DNA, 638 bp, Homo sapiens
ataaatcacatcaggtttctcactattgcctcttgaactagaagagactctcttgttataggggtgcagaagagaataaaaactggaggagacttgacagtagcccagatgagccccaaaagggggttagtgggtgcatcacagaaaccatatacaggttttgtggatctgagaaaaaggaaaacctacatctcaattcctcagtaaagcagatttctcaaaacttgtataagtatttttggctccttctgtgagtcatggtccagttgcccaaattggggagaggatcttgagattattagaaatattggtggaaaacacacgtggttaatattttaaatattatatgcacaaacatatayacaaatctatgcataaggaaaatgtatcagattatccatagtggttaattttgggcaatggaattaccagtatttatatttgcatttgaaatgagttttcaaatgataagccatgaaatatgtgttacttcttaattgtaaagaaaataaatgttattccaaaagttgaaatgaaaatagatgtagcaagagaacagacagaggaagttgccaaatatctgtccaaaataggcttttcactgacttggaaggcaaaattgggaccaggaaatgggt

SEQ ID NO: 729211 - DNA, 545 bp, Homo sapiens
gtcaaatcccttaatgtagttgggtctggcagagaggtaaagaggaactctggtttaaaagttaagtttttaatccttaaggaaggtcctaagtgagaaggaagctgacagattataagagacctcctcttacttttgccttgggcttagatcaagtcaatgaaccaggggacagaagagaaagctattccacttaatcaccaattccacaacattcctttccagaaacttccacaaagctggtgcatttccagtaataaacactgargcctggttccctagaatttatgggagggccagttacttcactctggaaagaaaaagaagagtttttttcttagtatatttcaatatttcttttacaacatctatgtatttctttaccttgtttcacaatttagtgcataattacactgtttttttttagaataggatattgctttgttcatctttatcctgagtctaaatatgttagtttgctagtattacacacaatatggaatgagtaggatttgcccattagaagtaattactactttattatc

SEQ ID NO: 729212 - DNA, 484 bp, Homo sapiens
ttggagttgtcattttcgatgtttttgtctcttctcacttattttctttttactgagctataatctatatctcttctcatttaagcattgtcttgtgtaaatttttaattctctatttcttttcttgactggacttcgctccagaktcatgatccaggttaaacctaactgtctgcttatcctattcccatgtctgagcagttaaaatggctggaaaaaatacctacacacacacaaacacaaacacacacacagacacacacacacacacacacacacacacacccatccccccagtgttgcttggtctctctttaagttctacagacataaatctcaggtggacactcaacatctccagaatcttactaaactttcataatattttcatcagcttacacgtcctgatgaccatgtcatgccttctgtgtgaacctcctacattacccaacctctctgccatgctcatgctcactataagctt

SEQ ID NO: 729213 - DNA, 509 bp, Homo sapiens
tatattatagatttattatatatctaaatatatatatcttcttttcctatcagtataaagaaagattcctcattttttttacagcttcccaatgtcctatgtataggtacatcattgtttattgaactagatcctattgatagacatttagttgtttccagtctttggctcttacaaacaatgctacaataaataactttgcacaaaagtcatttytcacctgtgcatgaatatctgcacaatacatttttccataagtaattctgagtctttaatggcttttgttttttgaaagaattcacctgattatcctttctgtgggaatgaacactggtggaagaaaggatgtgtttctaaaaagctaaaaagctataacatattagggctgaagccactctgttacagggactccttaagatagtccaacccaggaagaagagacatgtttttgtctacttttgcagaaaggatgagtagtggtctaaacatagccaaagagatgaaattgg

SEQ ID NO: 729214 - DNA, 534 bp, Homo sapiens
ctacaatttatctattctattgttaatgggtaatatagtttggctctgtgtccctaccaaaatctcatgtcaaattgtatccccagtgttggaggaggggccttgtggaaggtgattgaatcacggggacggactttcctgttgctgctcttgtgatggatttctcacaagatctggttgtttgaaagtgtgtagcacctgccacttcactccctctctctcctcctggccatgtgaagactgtgcctgcttcctctttstcttccaccatgattgtaagtttcctgaggtctccccaggagcagaagcctatacatcctgcagaactgcaagctaattaaatctgttttctttataaattacccagtcccaggtatgtctttgtagcagtgtgagaatggactaatacaatgggcatttgggttgcttctagtttggtgctatggagaataatgtgctaggaatattctcattctcataactatcattttgtgcacatatgtatgcatttcatttaattttatacctgcagat

SEQ ID NO: 729215 - DNA, 612 bp, Homo sapiens
gctgggagctgcagactggagctcttcctatttggccatcttgccagccttgacaaaatcttaagagttgttctgtatttctttagctatcaagtatttatggaggtcctggtatatatttaatgttaggctaaggataattcaaaaatcactatataaaatgaagcagttggtaagaaaayacaaacaagcaaacgactgcctgtagcaatttgctttgtattttgttgcagagggtaacaatttgagaacaattcaagataatacattaaagagtcatatttcacgattaaacagtcaatttggacagttcaaagagtatacactgaaaacaccatcatagattgtataagacttgaaaagggtctagagggatgatggagaaaggctctttaagagggtaatggcataaacaaagccgtagaagtgggaatgatcttggttagctcacaaagcagccaaacagacttcagagggagaggtgggagtgtagctaaaatgtcgtgggaaatagggttgagagagagacaagagccaactaatggaaggccttgaaagtcaaacagaggagttgtcactgtcttgggagaaaaataggatccttttaatatt

SEQ ID NO: 729216 - DNA, 612 bp, Homo sapiens
gctgggagctgcagactggagctcttcctatttggccatcttgccagccttgacaaaatcttaagagttgttctgtatttctttagctatcaagtatttatggaggtcctggtatatatttaatgttaggctaaggataattcaaaaatcactatataaaatgaagcagttggtaagaaaacacaaacaagcaaacgactgcctgtagcaatttgctttgtattttgttgcagagggtaacaatttgagaacaattcaagataatacattaaagagtcatatttcacgattaaacagtcaatttggacagttcaaagagtatacactgaaaacaccatcatagattgtataagacttgaamagggtctagagggatgatggagaaaggctctttaagagggtaatggcataaacaaagccgtagaagtgggaatgatcttggttagctcacaaagcagccaaacagacttcagagggagaggtgggagtgtagctaaaatgtcgtgggaaatagggttgagagagagacaagagccaactaatggaaggccttgaaagtcaaacagaggagttgtcactgtcttgggagaaaaataggatccttttaatatt

SEQ ID NO: 729217 - DNA, 618 bp, Homo sapiens
tgaacatcagagatagaagtcctggggatcaaaacaacctgcttagggggaggtctcacttgatgtgcaatccttcacaaagtcctgtctgttgcctgtcacttagggcacaatctgggacatagatgaggatctcgtgaaggcttagaagccccttttcagttttggaagtgaaaagtatcatgatgtctaagaaaccatatccttgttagatgggaagattaaatgcaagcactaaggggaactggcctgagactaagatgcaagcattcaggagaggcccttggcaggcaaggtgtttccttagaaacatgggctccagttggccagccctagaagtgagctagctagcaacagaaacttccatctttggagattatcttagatgtgatttttgatttattttatttgttttctttcttttttctttttttttttttttttgktcttcatcagcattttgataaagtcttaagacgtgaaaaatttccggtatgagtccagtttgctagggaacaaaaggaagaatttgtttttatgtttgggcctatgctttcaggtgctgtttgttgggagaaggggccaggatggcactggaacactatttctcttagagta

SEQ ID NO: 729218 - DNA, 582 bp, Homo sapiens
gtttccacaaataataattatttaaaaattagccaagcatggtggtgtgcgccagtagtcccacctactcaggagactgaggcagtagaatagcttgggccctggaggttgaggtttcagtgagctgtgatcacaccactgcactccagcctcagtaacatagtgagactccgtctctcaaaaaaagaaaaaaaaagaaaagaaaaaagataaatgaaaacttcaggtaaagctttaaaatktaaaggaaaagaaattccccagcaagtaaaacaaaaagataaagagagggaaagtggagaaaaaaagatgagaaaggtacagactagttcaggaagttcaatatctgaataatagaagtttacagaaagaaagaacaaagaaaatagaagagaggaaattatcaaagaaataattcaagaaaatttcctttaataaaggaaaatgactttccaaattgaaagggtctattgagttcccaagaaaacaaatgaaaataaatctacactgagacacttcattgtgaaattgcataaccctgtgaaccaagagaatattcgaaaagctttcagaaaacaaaat

SEQ ID NO: 729219 - DNA, 612 bp, Homo sapiens
tgggggtggatgagattgctcaggtagaaggtatacagagtaatcggtggctaggtatatgcccaaaagaattgaaaatagggtctcaaagacatatttgcacacccacgtttataacagcattattcacaatagctaaaatgtggaagcagttcaagtgtctattgacagataaatggttaaacaaagtgtgatgtagacacacaatgggatattactcaaccttgaaaaggaaggaaattctgacacatgttacaacatggatgaaccttgacattatgttaagtgaaaaataagccaattacaaaaagacaaatattgtatgattccacttacatgaggtacttaagartagtcaaaatcatagagacagacagtaggatggtacttgccaggggttgaagcaagaaggaaatggggagttactgtttaatgggcatagagtttcagttttataaaataagaaaagttaagatagatggtggtgatgattgcccaacattatgaatatttaataccactgaattgtatatacttaaacatagtaaattttgtgttatgtgtatattaacagaattgaaaaattgaagaaaaaggaaagaataatcagtg

SEQ ID NO: 729220 - DNA, 656 bp, Homo sapiens
agacacagactagcaaattggataaagaatcgagacccatcggtgtactgtattcaggagacccatctcacgtgcaaagatgcacataggctcaaaataaagggatgaaggaagatctacaaagcaaatggaaaacaaaaaaaggcaggggttccaatcctagtctctgatgaaatagactttaaaccagcaaagatcaaaagagacaaagaaggccactataatggtaaaagggtctattcaacaagaagagctaactatcctaaatatatatgcacccaatacaggatcacccaggttcataaagcaagtccttagagactgacaatgagacttagaatcccacgcaataataatgggagacttaacaccgcactgtcaatattagacagatcaatgagacagawggttaacaaggatatccaggacttgagctcagctctggaccaagcagacctaatagacatctacagaactctacaccccaaatcaacagaatatacattctcagcaccacatcacacttattgtaaaattgaccacataattgggagtaaaatactcctcagcaaatgtaaaagaacggaaattacaacaaactgtttctcagacaacagtgcaatcaaattagaactcgggattcataaactcactca

SEQ ID NO: 729221 - DNA, 627 bp, Homo sapiens
ccacctcattagaatccattcctagatgtggaaagacagggttaaaatatatgaggactggattgtactattgtcaatttggttgggtctggacctgtttcccagaatttctttccctacaggctaggaggcaagagttggccaaaggaggaactcatgtgaggtttgaacagtggaagttaggcagtggcttccttttctctttgaaggtctttgttgtcagtacatgaaaasttccaggtagtccttgctcttttcctcttggtgcctagcccttcttcctattcctggccctgctgatggagagtggccccagacctgccaccagatgcctggctgcagatcttcagaggcaatggattcccaaaaaccgcctccaaatcacctcactgtccatgccagtatctcagattgtttcctttaacactggttctcctccaaccccagtggttgagtactggttaatgattctttttctgattctcaaacttccccttatctgggctttcacttccccagcttttcccacaattgtgtaagatctattcataccactcatcttttattctataatctttgtagtggtatacgaaatacgaatattttgattgttcttatcacatattg

SEQ ID NO: 729222 - DNA, 601 bp, Homo sapiens
gactaataaagaagaaggaagaaaagctccaaataaacacaatgagaaatgacaaagggaatgttactactgaccccacagaaacaaaaacaaccaagagaaactactatgaacacctctacatacacaaactagaaaacctagaagagatgagtaaattcctggacgtatacactctctcaagacagagccaggaagaaactgattccctgagcagaccaataatgagctctgaaatcamatcagtaataaatagcctaccaaaaaaaaaaaagccaagggcctgatggattcataactgaattctaccagacatacaaatgagagctggtaccatttctactgaaataattccaaaaaaatgaggaagagggactcctccccacctcattctctaaggccaacatcatcttaatacccaaacctggaagagacacaacaaaaaaagaaaatttcaggctgatatccttgatgaacatcaatacaaaaatcctcaacaaaatactggaaaaccaaatctggcagcacatcaaaaagctaatccatcaagattgagtaggcttcaaccccaggatgcaagtttggctcaacatattcaaat

SEQ ID NO: 729223 - DNA, 553 bp, Homo sapiens
tttctcatgttacaactcttcagccctcttgcctgcctccttccccttcgtcatccagcccatcaataatgtgacctagtttgtgtagatctatctattgatgttagtattaattagtgctggaaaaagtaaccaagtatgagtcttaaaagaatttttattttctcatttgttgatgctggattcatgtttcagccaggaacataaatacatgtatttaatcctgattcaccagagtaggaagcagggagtttggcacttactgtatatgtgccactctgacatcactgccatgtcacccactagtaaataaatgcatgaacaatttgagccctgtattaccttattgcctagtagtgcctacaaatcctcggwtaaagtgaatatgcttcatttcctctgttgacaaagagtcaaactctgtaaaatatttgaggagatttattctgagccaaatataagtgaccaatggcccatgacacagccctcaggagatcttgagaacatgtgcccaaggttgtcaggctgcagctgggttttatgcattttagcg

SEQ ID NO: 729224 - DNA, 650 bp, Homo sapiens
aatatactccaatcagaataatgggaatgttgactggatgtttgatcttatcatgaaataactaattttctaagtgtgatcatcatatggtaggtatgattatgcagataaattcttagtttttggagataaataataaaatacagaagaagtaataaaatgtttgagatttgcttcaaaattatggagaaaagattggcaatgtgttaatttactggtaactgttgaagcttagtgataggtgtgttaggtctgttatatcatttcatataccgaaatatatacttcggtatatatttgagattttccacaattaaaagtttttgaaaacatccttaggatctagggctttgcagctattttgttttggtgagaaaaaaaataggctacatasaaaagactggcatttgcgtgaaagaaaggtagaagcataagaaaaaaatgaggaagcatgattatgcaagcttgtagaggcattagccgagacaaccccagctgatccatccacaatctacaatttattaaggacataacttcagaaaaatgacatacctagtcttccctacaaaacgttttttgaaagaaaagagactcaaaggaaataataacaaaattctcagaagtactttaaactcttttgaaattactct

SEQ ID NO: 729225 - DNA, 609 bp, Homo sapiens
cagctccaaggatatttgtagaaaatataaaaaatatttaaacctttgttctagtatagactaaatatccagaagatttatttcttacctttatccatatgttttaaaatgacctgaactatttcaagtcagcaacttggccagcaaattttataacataacattttgagttcattgatgctagacctacctttgattattcatgtggacctgactgtgagaaaggaaccaaggaaccaagggtaaatgaataggcttagccaaacatttggtacaaggttgaaacattgtaggtacacaaatatataccagagagatagaatttttactatactgcatgctactgggcagaagtgctggaagagggcagaaatttgaatattgaaagtggaaaaaaatatatctgaaattctatctcagatgtacccctcatgaaaagtaaaatcaaaacwcctgtagcatgaccaaaatggtatagtgagcccaagtatttagttatttagtgttcaggctgattggtattaggaatttagtaattactcaatgtgaattctgccctcagggagaccagggtagcagtgaatatgaaatacaaaacaaaataaatgt

SEQ ID NO: 729226 - DNA, 602 bp, Homo sapiens
cccccatcctgttttcatgatagtgagttctcacatgatctgattgttttataaggggcttctcccttctctggacactcattctctccttgctgtcaccatgtgaagaagaatgtttgcttccccttccaccatgattgtaagttttctgaggcctccacatccatgctgaactgtgagttaattaaacctccttcctttataaattacccagtctctggtatgtctttattaccagcatgagaacagattaatacacacacccccmaaaaaatgtttataattttgtagggaaactaaaattcataaaaacaactgcaattaattacaaaaagtgtataatgcttttaaaaagaaggatactcttccaactcctcactgcacattttctatctgcctattcttattggatctactgaaagagaggagggagctgctaatctcacaggtctaagcacctgttgatgtcctggagagcaagcactttctttctggtccataagcactctctcattggcttattcttattttcagtatctctctttccaggcacaattgattattctggtctcaatatatagatttacgttagtggtgggggg

SEQ ID NO: 729227 - DNA, 573 bp, Homo sapiens
gtaggcatagatatgtttataagagtatccaatttcatgcaatgtaatagtcatttttcttacattaaatatatcatatatcaaaataaacactgatgaacaaaaaaatgagacatgttatcaccattaagcctatactaaataaaacgctagtgggtattttttaggtagaaaagcctcagatggaagctccaaaaaactaggaaagaatggcaaaaacaaaaatatgaggctgggcatggtggctcacgccctttaatcccagcactttgggaggccgaggcaggcggatcacaaggtaaggagatccagaccatcctggctaacacrgtgaaaccctgtctctactaaaaataccaaaaattagccgggcatggtggtgggtacctgtagtcccagctactcgggaggctgaggcaggagaagggcttgaatataggaggcggagcttacagtgagtggagatcacgccactgcactccagcctgggcgacagagtgagactctgtctcaaaaaaaaaaaaaaagtattgtaaatataaatgaattttaataatataaaacaaaaatggt

SEQ ID NO: 729228 - DNA, 585 bp, Homo sapiens
tacaccaataatagacaaacagagagcaaaatcgtgagtgaactcccattcacaattgctacaaagagaataaaatacctaggaatacagcttacaagggatgtgaaggacctcatcaaggagaactacaaatcactgctcaaggaaataagaaaggacacaaacaaatggaaaaacatcccatgctcatggataggaagaatcaatatcatgaaaatggccatactgcccaagtaatttatagattcaatgctatccccagcaagctaccattgactttcttcacataataagaaaaaatctactttaaatttaatatggaaccaaaaaagagctaatatagccaagacaatcctaagcaaaaagaacaaagstggaggcatcatgctacgtgacttcaaactatactacaaggccacagtaaccaaaacaacatggtactggtagcaaaacagatatatagaccaatggaacagaacagaggcctcagaaaaaaacaccatacatatacaaccatctgatctttgacaaacatgacaaaaatgaccaatggggaaaggatcccctatttaataaatagtgttg

SEQ ID NO: 729229 - DNA, 653 bp, Homo sapiens
tgcattgttagggaatttccttattgtattcatattatagggtatacttaataaacctatatggtatagcctaccacacttctaggctatataatataggcaacaaacttgtatagcatttgactgtactaaattctacaggcaattgtaatacaatggtaagtatttttgtatctttctatctaaacatagaaaagttacaggaaaaaatatggtataaaagataaaaaatggcacacctatacatggcacttaccataaatggagcttgtaggattggaagttgctctgagcaaatcagtgaatgaatggtgagtgaatgtgaaggcctaggacatgactatagactttatcattattgtacacttagactacactaaatttataaaaaatatttttagttttgatgatatattaatcttagcttactataacttyttttgctttacaaacatttcactttttttaaaaaaatctctcttttttaataaagcagcttaaaatacaaccacattgtacagctgtccaaaaatattttatttatttatatctgtattctataagtatatatattaaatatttacttattttttactttttaaactttcttgtgaaaaattcagacacaaataaacacatcagcataggcctac

SEQ ID NO: 729230 - DNA, 653 bp, Homo sapiens
tgcattgttagggaatttccttattgtattcatattatagggtatacttaataaacctatatggtatagcctaccacacttctaggctatataatataggcaacaaacttgtatagcatttgactgtactaaattctacaggcaattgtaatacaatggtaagtatttttgtatctttctatctaaacatagaaaagttacaggaaaaaatatggtataaaagataaaaaatggcacacctatacatggcacttaccataaatggagcttgtaggattggaagttgctctgagcaaatcagtgaatgaatggtgagtgaatgtgaaggcctaggacatgactatagactttatcattattgtacacttagactacactaaatttataaaaaatatttttagttttgatgatatattaatcttagcttactataacttcttttgctttacaaacatttcactttttttaaaaaaatctctcttttttaataaagcagcttaaaatacaacyacattgtacagctgtccaaaaatattttatttatttatatctgtattctataagtatatatattaaatatttacttattttttactttttaaactttcttgtgaaaaattcagacacaaataaacacatcagcataggcctac

SEQ ID NO: 729231 - DNA, 654 bp, Homo sapiens
atcatcattaatataaatgaaaattctaatattattttattttattttctatcttagtccttgtcctcagaaattcaggtaccaaattttaatgtgtttcttcatactttagtgtatgaaaattttctacgctaactaaaatctattctcaaaaaaagaaagagaaaaatttttcctctatccattccatgcattcaccagttttctttccaaataatcagaataattttataaaatataaaatatgagcaagtctaaatgaggcagtgatacaattatgacaattcactttcatctccgtcaattctaatcttacttaatataaggtaacatgaagttctctaatatgtatatttcayagtgagatcacttatttctaaatttaaatactaagaaaattgttaaaattcatatttaaaatgtatgaattttatattaggtaacaaatggcaccttattaaggagatgaagtggagtcaaaactttgacagtgtcaaaattagattatacaactcacaattaactctaaaaggctagtagcatttttttttaactaaacaactgggtaatcgagttcacatgtaataattactgcctaaaagtatgaaaacagttaagcaaactttcttctgacattgtaatcttataaacatt

SEQ ID NO: 729232 - DNA, 605 bp, Homo sapiens
aagggtgatgctgggattcaaatccaagcacgtaagaaagcaaccagatacaaacttgaggcaacctatcaagacaaatgctaggtagggcaggctcatagcaggcaataccaacaagcttgatggagcgaaaattgggagttctttaatttctatagaagtagatgtgttgccttttaagtgaagttgtagtgttaatggaaaggggtcccgatcctgacccctttccacttcttggatctcactcaagaaagaatttgggacgaatccataaaatgaaagcaattttattaagagagtaaakaaataaaataatggttacttcatagccatagcagcactgagggctgctggttggctatttttatggttatttctttattatatctaaataaagggtgtattattcatgaattttcaggtaaagggatgggctatttccagaactgagggtctctctgctttttagatcagataggataactttggaatgtcgccatggcatttgtaaactgtcatggcgctggtgggagtgtcttttagctaatgccatataattagtgtataataagcagtgaggacgaccagaggtcactgtcttgatt

SEQ ID NO: 729233 - DNA, 460 bp, Homo sapiens
cgaaccgaaccgaaccgaaccgaaccaaaccaaaccaaacgcaataaaaaaccaaagtaaaagatccaatatacaaaagattcttgttaatcagtaagaaacatgtgaaccaccaaacagcaaaactacaaagtacacaggcaattagtagacaaagaaatacaaacaacttacaaaaatgcgcaagactaatcaattattattaaaaagcatgcaaactaaaatgagggatcattacttgcaatcaaactgtaaagctgagaacataaaaaatatctagtgctgtcactatgtatgtcctctcaagwactgttggagatagtgtaaatgttttcaattttttcagaagacgatttggtaacacctattgaggctggagaatagggtctgaaggcagggaatttaaggccaattcgtgctaatttcctaaagctggaggaaaacacctgggtctgaaggc

SEQ ID NO: 729234 - DNA, 563 bp, Homo sapiens
acttccttcttctttgattcttaatgcaggtcgctgtcaagattccattttcagccttctcgtatgctcctgttctcaattctcccagcccccatggttcttaatatcaccaactggccagcacaattcttaatcaktccccactcctccccatgtgccttaatcccatctaagttttactacgtggcatcctgtcaataaatacttgttcatgtgacatagctatgctaaaaaagtagttttttgatgacttctaaggacagcaggactcttttggtgtttagcttcatagaaaccatttttagcttaatatataactattctcaacaaaagctcttcaataggctcataactgcttcagtgctaaaatcttagcagatttttttatgtggcccttcattttttatttattttgagcattttaagcctttgacctgcagaggctattttctaattttaaaatttaagaaacttccattttttagtgttctttttttcttttaaacaaacttctagatattagcattctataccagacgcagaagtctgtttaaaaaaaagag

SEQ ID NO: 729235 - DNA, 609 bp, Homo sapiens
aaagtatttgtcagtagttcaaactatgtcaaagaattagaaataagaaaataaacatttttttcctgaaaagtatctttttttttagaaaaaaaatccttttttcagtattcacaattcaatctgattaccactgtcaattcaaattaaggcacattttagtgtatcctaaaaatatagtaattctactaagtttgtattttaaaaataacacagatttatagattctgcctacaacatcaaagagcattggatgtgaaaagtatttttgctgttaatatgagaattaggaactactcagggaggccmctgatagtagtgagtgaaaaatgcccctccaagagtaaaagaactgagtctctgctgccagttaaaagcgatagatatagtctgctgatgcattagttcacgttagacttttttttttttttttttttttttttgagacagagtcttgctctgttgctcaggctggagttcagtggcacaatctcggctcactgcaagctctgcctcccaggttcacgctattctcctgtcagcctcctgagtagctgggactacaggcgcccaccacaacgcccggctaatttttttgtatttttagta

SEQ ID NO: 729236 - DNA, 629 bp, Homo sapiens
taggtcagatctctgtggttagggtccaggagtataaattctcaatctcaggtgaatctaatggaaactgtggccgaaaatttaaaatacaaattccctaccatgttctaggaaaacctttcatgactttccagcttcatcttatttattaccaccacatttttcctaccatcctttatcttattttgccaagtcatagtaaactacttcatatatatatatatatacacacacacacacatatatatagatatgcatagagcagcataggtagatctaactctgttttkttttgttttgttttgttttgagacagagcctttctctgtcacccagactggagtgcagaggtgcgatctcagctcactgcaatctctgcctcccgggttcaagcaattctcttgcctcagtctccacagtaactgggattaaaagcatgcatcatcacccctggctaatttttgtattttcattagagacagggtttcaccatgttggccaggctggtctagaactcctgacctccagtgatctgcctgcctaggcctcccaaagtgttggattacaggtgtgagccactgcactcagccaattagatctaaattattgttctgagtagaaaatatagg

SEQ ID NO: 729237 - DNA, 629 bp, Homo sapiens
taggtcagatctctgtggttagggtccaggagtataaattctcaatctcaggtgaatctaatggaaactgtggccgaaaatttaaaatacaaattccctaccatgttctaggaaaacctttcatgactttccagcttcatcttatttattaccaccacatttttcctaccatcctttatcttattttgccaagtcatagtaaactacttcatatatatatatatatacacacacacacacatatatatagatatgcatagagcagcataggtagatctaactctgtttttttttgttttgttttgttttgagacagagcctttcyctgtcacccagactggagtgcagaggtgcgatctcagctcactgcaatctctgcctcccgggttcaagcaattctcttgcctcagtctccacagtaactgggattaaaagcatgcatcatcacccctggctaatttttgtattttcattagagacagggtttcaccatgttggccaggctggtctagaactcctgacctccagtgatctgcctgcctaggcctcccaaagtgttggattacaggtgtgagccactgcactcagccaattagatctaaattattgttctgagtagaaaatatagg

SEQ ID NO: 729238 - DNA, 630 bp, Homo sapiens
gatatatttgttcgtaatgttaaaagacattactaattatttggaaagagatggccaaaataatcaactctacaggcttcaagctggtgggggaatgctgttactcattaatgcttttttactgaatggtcggaatcacatatgcaccacacatactgatcttaagtaacattwttttatagaactgtttaaatgggtttaaatggtgttctttagatgaaatgtgttctgttttgttcattgtcttaaactgaatagggctgaataggctttatgtaattcttcatttcatggtagagtttgatgctgtgtttaagtgggttcttgtttataggattttcaactacagtttgaatgccatggaggaatttgaataatatattaatgaaggacatattcttgtaatcacaaatttgcatttgctcaggtttcattgctgtgtgataggatttttcctctaacttgaaatttaaaaacttttatttcctattccttttgtcggtaaagcagtctgaatttggaacattttatcatggagtcaacagtgaagactaccagataattttgtattggagaagaggaaataacagctaaattgtggatttcagtgctttacatggtgcctttcga

SEQ ID NO: 729239 - DNA, 630 bp, Homo sapiens
gatatatttgttcgtaatgttaaaagacattactaattatttggaaagagatggccaaaataatcaactctacaggcttcaagctggtgggggaatgctgttactcattaatgcttttttactgaatggtcggaatcacatatgcaccacacatactgatcttaagtaacattattttatagaactgtttaaatgggtttaaatggtgttctttagatgaaatgtgttctgttttgttcattgtcttaaactgaatagggctgaataggctttatgtaattcttcatttcatggtagagtttgatgctgtgtttaagtgggttcttgtttataggattttcaactacagtttgaatgccatggaggaatttgaataatatattaatgaaggacatattcttgtaatcacaaatttgcatttgctcargtttcattgctgtgtgataggatttttcctctaacttgaaatttaaaaacttttatttcctattccttttgtcggtaaagcagtctgaatttggaacattttatcatggagtcaacagtgaagactaccagataattttgtattggagaagaggaaataacagctaaattgtggatttcagtgctttacatggtgcctttcga

SEQ ID NO: 729240 - DNA, 517 bp, Homo sapiens
ctcaaccaactattaccttatgtctgccatgtgcaaaactctggctgagtaataagaaagatcaaaagataaattagacctgaatcttgccctcaaggaagatagaacatttatatattcctgtagtactgacagaaaacgtgtggtataataatgagggaaaggagcaatctagtttttttcctttattgttttcttagttttaaaawaattcccagcacatagtatgtcttcatattttttgttgaatatatgagagagatatagatcatgtactatgaaaattctgagaaattttcctcttggtgggtatctgggaaaacttgagcagataccgtctaaacgtgcctaggatttgcagaaaagtggaggaagagaaggtacacagttatgaagatggattcttctgtttacagaaagctttcagtgacagagggagagggagcgtggagggcattgtggccaccaggatctgggatggagtgggtggcatgcaatgggaaggaaggtgataatc

SEQ ID NO: 729241 - DNA, 500 bp, Homo sapiens
caaaattaaaagcttctgttcatcaaaatacacaatcaacacagtgaacaggcatctcactaaatgagagaaaatattttcaaactatatatctcatgaagggtcaatagaagaactatataaagaactcctacaacaacaacaaaaaaaaacaggcaaaggrtttaaatagacatttttccaaagaagatatacaaatgccaataagcccatgaaaagatgctccacatcactaatgattagagagatgaaaatcaaaaccaaagtgagatagcacctcacatctattaggatagctgcttattaaaaaaaaaaaaagcacaaatatgcacagaaaataacaagtgctggcaaggatttggagaaactggagcttgtatgcatacttggtaagaagctttgtatactgttgtttggtaaatggtgcagccactgcggaaaacagtgtagtggatcctcaaaaaactacaattagaattatcatacgatccgttatctac

SEQ ID NO: 729242 - DNA, 599 bp, Homo sapiens
ctgcgtggggtgggagcaaaggcccgctggatcagctagagaaaggaggggaaactgctcagtctgcagatccccagtgggagcagttaaataacaaaaacctgagcatgcctcttctccctgccgacttccccaaggaaaacaccgtcaccaacgactggattccagagggggaggaggacgaygactatctggacctggagaagatattcagtgaagacgacgactacatcgacatcgtcgacagtctgtcagtttccccgacagactctgatgtgagtgctgggaacatcctccagctttttcatggcaagagccggatccagcgtcttaacatcctcaacgccaagttcgctttcaacctctaccgagtgctgaaagaccaggtcaacactttcgataacatcttcatagcacccgttggcatttctactgcgatgggtatgatttccttaggtctgaagggagagacccatgaacaagtgcactcgattttgcattttaaagactttgttaatgccagcagcaagtatgaaatcacgaccattcataatctcttccgtaagctgactcatcgcctcttcaggaggaattttggg

SEQ ID NO: 729243 - DNA, 481 bp, Homo sapiens
tgatcataaatgtgtgggtttatttttgacctctgagttctattccattgttctatatgtctctccatatgccagcaccacactgttgattactatagctttttgtagtaattttgaagtcaaggaagtgtaagtcctctaactttgatgcttttcaaggttgttttggctattcaggttcctygcaattctatatgaatttgaggattggttttcccattgctgcaaaaaaaaaggctgttagaattttgatagggattgtgttgtatttgtagatcactttgggtagtattagctttttttttttttttttttttaatttcttttatgaggcagggtctcactatgttgcccagactggtctcaaactcctgggctcaagtgatcctcctgtctcagcctcccaaagtgctggcattacaggtgtgagccactgcacctagccaatattaatatcttaatcataagtctttccatccat

SEQ ID NO: 729244 - DNA, 599 bp, Homo sapiens
ttggatcctttccctgaatgatatgagattgtgctgggaactctagccctctgtgtgctgacctccagaatctgacaactttcctttccaaacagttcaagcaccaaggcacgatcacagtgaacgaggaaggcacccaagccaccactgtgaccacggtggggttcatgccgctgtccacccaagtccgcttcactgtcgaccgcccctttcttttcctcatctacgagcaycgcaccagctgcctgctcttcatgggaagagtggccaaccccagcaggtcctagaggtggaggtctaggtgtctgaagtgccttgggggcaccctcattttgtttccattccaacaacgagaacagagatgttttggcatcatttacgtagtttacgctaccaatctgaattcgaggcccatatgagaggagcttagaaacgaccaagaagagaggcttgttggaatcaattctgcacaatagcccatgctgtaagctcatagaagtcactgtaactgtagtgtgtctgctgttacctagagggtctcacctccccactcttcacagcaaacctgagcagcgcgtcctaagcacctcccgctccgg

SEQ ID NO: 729245 - DNA, 480 bp, Homo sapiens
cgatgcgagagacagctctattgattgggagctttcacatatgcaatctcattcccaactgcaggcaggttctcatttggcagatgaggaaactgaggcacagaggttcagcattttctgaggtcatgcagctacatggcatggctccacagctgcactcccacccactaaactgacrtggagagaatctcagaggaaggcctggacttcacagtcagaagggaggagcccggaggtcaagaagagtaacgcctgcaaaggggctctcttcttccctccccaccctactgtcctcatctgacttcacctctccccttccctctcttccaaacacggatgaacatgtccctgtcctcaaggcattcctagaggagggtaaggaatagccaagaagcatctctcaatctgtcagggaaaactggtcagactttatacaagtatcaaatgttcaaggacgtttaacgcctacttccttggacc

SEQ ID NO: 729246 - DNA, 480 bp, Homo sapiens
cgatgcgagagacagctctattgattgggagctttcacatatgcaatctcattcccaactgcaggcaggttctcatttggcagatgaggaaactgaggcacagaggttcagcattttctgaggtcatgcagctacatggcatggctccacagctgcactcccacccactaaactgacgtggagagaatctcagaggaaggcctggacttcacagtcagaagggaggagcccggaggtcaagaagagtaacgcctgcaaaggggctctcttcttccctccccaccctmctgtcctcatctgacttcacctctccccttccctctcttccaaacacggatgaacatgtccctgtcctcaaggcattcctagaggagggtaaggaatagccaagaagcatctctcaatctgtcagggaaaactggtcagactttatacaagtatcaaatgttcaaggacgtttaacgcctacttccttggacc

SEQ ID NO: 729247 - DNA, 563 bp, Homo sapiens
aaaaatacaaaaaaattagctgggtgtggtgcaacgcgcctgtaatcccagccactcagaaggctgaggcaggagaatcacttgaaccgaggaggtggaggttgcagtgagccgagatcacgccactgcactccagactgggcaacagagcaagactccatctcaaaaaaaaaaaaaaaaagtaatagctaatggatgctgggcttaatacacaggtgatgagaagatctgtgcagcaaaccaccatggcacacatttaacaaacctgcacatcctgcacatgaacctaaaataaaagttgaagaaaaatgaataaataaaaatktaaaaagaaaaacaactgtaataatcccagcactttgggaggccaaggcaggaggattgcttgaacccaggagtttgagaccagtctgggcaacatagtgagtctctaaaaaaaattttagaaattaaccaggaggctgggtgcagtggctcacgcctgtaatctcaacactttgggaggctgaggcgggtggatctcttgagcccaggaattcaagaccagcctggggtacatggtg

SEQ ID NO: 729248 - DNA, 606 bp, Homo sapiens
gaggagctgtctgggggcccagggcaggcaggggtcattctggaaaaccaagcttctagtgctgcagggacagcctctgtgcccctccccggctcaggccccttcctcccctcttctggctcctcctgtgtggaatctctcaggttccagtggtaayctgagagataggagtctctgctcttctgtgtccctttgccccttcatcttgtgtccggtcagctttccagggtggctgtgttcagtggctgaggggtgagaaaccctacgcctcaaggacagaccccgcttttcccagaggccactagggagctcagtggagctgacaggtcctaccagtagcttgggcacacaagaccccatctgggtgatgtgtctccaaagagagtcatgttgacaggagtcagtctccctgagcccagagctggcacatagcagagccagggctgggtccccaaggttgtcagaggcaaagccttgagctccaaatcccgttcagattcagttcttcactgatgatgaggctccgggaggagagcctgatggccaggcaggcagcgtgcagggatcctcctggtgcttcagccagtcctggggctgccacttccc

SEQ ID NO: 729249 - DNA, 628 bp, Homo sapiens
tcctataaataaatgtcttactgttttcaaacttacgtttagttcattttatttgatggttaaagtattttgaatgccttatcttgtgtctgtatctgataacttttttattgtctctatgtctgtataggtacgtttgtgtgcttgggaatatggtccatgcaattcaaataaaaacgaaactgtgtcagttggttgaagtaacgatggcaaggagagatgacctctcattttgccgagagrtgaaatttaggtgagttctcaaaagagcaatgtagggtcttgtaaatcttaatttgttgaatgaagtacagaaatagagtagatatctggttattggtaggaagaaagacataaaaagagagcagtttacatgtttgtttttctctgtgtctctcctcaaatttccctaagctttgtgcctgtggcaagcctccctttttctaaaactctgctgtacttgagctaagaatttgattctgtttccaatctgatagcataactaaaggccatgatggaggatcagtatccacgttgcttgttccttctggcttttacatctatgatagcagtatctcttttataaagtcgtcatgtcacctgggttatctgccaaattatttgcacc

SEQ ID NO: 729250 - DNA, 642 bp, Homo sapiens
gggcaggcaggtgtccagataggcaacgcccgctgggaactgtactgccttgaacttgcaattcagcctgacggtcaaatgccaagtgacaaaaccatcggtggtggggatgactccttcaacatgttcttcagtgagattggggctggcaagcacgtgcccagagcagtgtttgtggacctggagcccactgtggttgataggtcctcgggcactggatggcagctttcctgggagagtgggagagcattggtaaaaccccacgtgcgctcctgtgaatccccctgcagaatggatgggatagacaagcaaatgcccatggcattgytagggcggaaactgaaagtttcatgtttagtgtatgtgagactcagctcctaatttaggatgtatgggaaaagctgctttgccagcagtaagatgggctgtggagagattcccctgtggctgcctcagccctgcacaggtggccctgcctgcagggtgtggggcattgattccctcctgaatgctgtgcactgtctcatgctggtgcatgaagagtcttgatgtgcatcttaggcgtagaaggtaagtacagaacatccatttccttcatccagattagaagtcccagatagtttccaaagagagctgcaaaga

SEQ ID NO: 729251 - DNA, 597 bp, Homo sapiens
ttgaagccatgttccggtccttcatgcccgaagatgggcaggtgaacatctccatcggggagatggtgcccagcaggcaggccttcgagtccatgctgcgctacatctactacggcgaggtcaacatgccgcccgaggactcgctgcatcctcactccccagtgaactcccaggtccccaccaaggggtcctggcacccacctcrggtggctttgaggcccgctctcctgccccagctaggtgatctgggcccagcgcctccctccagagggtttgctggtgcctggggctgggcctggtgctctctgaagcagttggcagctggcaaggaggggtttgcagccaggaggaaccagtgggttcctgaccctcacaactgcccagaggacggggtgggtcattgctttgtgtgacagttgagcacagacatggaggtactccttatgtcacttcagtaggggtctgaacatggagggtcaggatgcctgttaggcctgcaaggccatggaacagcgctacagatgtacagacactatttttctcgggaggggattcatggttttctttggatcctgaatggggcctttgacccactaa

SEQ ID NO: 729252 - DNA, 616 bp, Homo sapiens
cgggctgggatcctgggtggctcctgagtgcaggccctgctcgcctctgtccctgcatctctctttctgccaacaaccccctggctgaaggcctccccaggcctgcagagatttgaaggtctggagttcatcttttgttttctaggtgtaaaaacaggccagwgtgtggtgttcaatgggacccacaggacctgtgagatctggagttggtgccccgtggagagtggcgttgtgccctcgtaagtgtccccacaatcccctaccccaactggcgcagggccccaggcctggcagaggctgtcacctcccttccacctgcaggaggcccctgctggcccaggcccagaacttcacactgttcatcaaaaacacagtcaccttcagcaagttcaacttctctaagtaagcagagtgggtctcatctgccccaagaccctccttgtcccctacctcatctgacctttcccactcctcccaggtccaatgccttggagacctgggaccccacctattttaagcactgccgctatgaaccacaattcagcccctactgtcccgtgttccgcattggggacctcgtggccaaggctggagggaccttcgaggacctggcgtt

SEQ ID NO: 729253 - DNA, 621 bp, Homo sapiens
gtttcactttactcgtccaggctggagtgcagtggtgtcatcaacccttactgcatcctgtaactcctgggctcaagagatcttcctgcctcagcctcccaagtagctgggactataggctgtaactaccatgcctggcgtcaaccagaatattacgacagcctgctgcttctagtactgaagatccaggggagagctgggccctgcacctgccaggatggagwggaggtgagtctcccatcccacacacagcagcactggcatggcagggcacaggtgagaagacagaaagctctgcctgtggtcaaagggtggccaaggatgttggaaggggaggctgaccctccagtgctgcccatgagaacactgaatttggggaatgcatgcccaggaacggaaggtgagggctgtgcagagggtgctgagagtggcagccattgggattaggagggatgggtggccactatcattggcggggggcctcctgagggtagaaacaggggctgcaggctctcatgatgcctggtgtgaaagttcagcttggctgctgtgtggtgtgcaccaagcagtagggaggaggcgagaggggcatctaagggccttctaggaggccatagtctc

SEQ ID NO: 729254 - DNA, 617 bp, Homo sapiens
ctaaaggaagagagagtaaggcacattcaggacattgcaaggagactagttattagagtgtaacttcagtcctaaccagaaactctgaagagctaatgaaggaaatgaaggcagcatcccaatctcaagtctggtacagcaatcttaggcctcttagcaccaaatcttactcaaataccctacttgctgttggagctgtggctacagataacacttcttgccttgagccacactggttcaggaattggatttacaagtcaggctcactcttagatataggaggtgagaatcacaaagsgggagaatagggtttgacacgtgcaaagtaagacaagggcagacttgataataagaaccacaatactgggcaacactacaaaaattcagataaactacagcagggtttggaaaccacagcccatggaccaaaccctgtcctttacctgtttttgtaaataaagttttattggaacattgcaatatttatttgcctatgtattttctgtggctgcttttatgctaaaacagcagagtttagagttttgacagagaccgtatggcccacagagtctaaaatagttcctactagttccttaacagaaaaaaaaattgccagt

SEQ ID NO: 729255 - DNA, 622 bp, Homo sapiens
tacttggaatgtatggatatcgggggaagaacgcctaccaggctgtaaatagcaggaagtcctgttgtcacctggtttcatctgtaatgttaagataaattattggccgggcccagcactttgggaggctgaggckggtggatcacctgaggtcaggagttcgagaccagcctggccaacatggcgaaaccccgtctctactaaaaacacaaaaattagctgggtgtggtggtgcatacctgtaatcccagctattcaggagattgaggcagaagaaccacttgaacccaggaggtggaggctgcagtgagccgagactgcaccactgcattccagcctgggagacagagtgagactccatctcaaaaaaaaaaaaaaagataaattatttattttctaaatgtacatatgcaagtttcatccaagcacttctgacatcttttggtgaggattctccaagaagaaactatttactttttgactgacatagcctgtgggtatgtttctgaaaaatgtaacttggagagatgggtctccaacctaactcaggactgtttttactgtttttgctcccatgcatgaaacattaatagctaacacttatggaatagttatgttccag

SEQ ID NO: 729256 - DNA, 640 bp, Homo sapiens
gaaggtttatttcctctccaacttaaacccttgatttcattccttcctaattccccacaaaacgtttctacataaatatcctgttatctcagacctgtaagttccttcattcaacaagcaatggttgagcgcctataaagtaccaggcacttagaattctgtgatcagaattctcctccgttcactggctcctcctttccatgagctcagtctagtggggaatacaaatatattcacgaatgataatgacacaaccaggtaaatgctacagttctggtaggtctgaactctcggcaatattcgctaacaagacaggaggcggaagggggtagcgggagaccagggcactatatgaaggggcctgagggtaagggaaaatkaaaaggacgaataaagggttgtcgtgggtggattaaagaaagggatgaaaatgggcgcaaggcaagcagagtgagcgaaatgcgaatagtcagaagcggaatgaatgatagatcggactccaaaggcacgtaggctcgtacaagagaaagtgcggccgtctcactcacttctgccgcaggctctcctccctctccttgtcgaggaggctaggccaaggcttgtcgctcccgtaggggcgcgagtagctgccgtaatagac

SEQ ID NO: 729257 - DNA, 594 bp, Homo sapiens
gtgggatcctggatagcctcaggatgggggctggttgccaggggaaccaatcatgtaattagagggttggaactttcaaccccacatcaccccacaaacctagacctctggggaggggagaagggctgaaggttgagttgatcaccaatggccagtgatgtaatcaatcatgcctatgtaatggagcctccataraagtcccaaaggactgagttctgagagcttctggctagctggacatgagttaccttgagggtggttctgagagagagagcatggaagctctgggccccttctcacatgccttgccctacacagcttttctatctgactatttgtctatatgcttcgtaatatcctttataataaatgagtaaatttaagtaaagtgtttccctgaattctgtgagctactctagcaaattaatggaacctgaggagagggtagtagaaacccctgatttatagctggtgggtcagaagtatagatgacaacctactacttactattggcatttgaggtggggggcagtctcataggactgagccccaaatctctgtataggatctatgggatctgatgctatctccagg

SEQ ID NO: 729258 - DNA, 637 bp, Homo sapiens
gggatcagtgattcctctgtggctagggctggtttaaatgtcccatcagtgggcagatgtcagctgagtttgttccagttttcctctttgctgtaacaggacagcactaagtccaatgcctcacaattgctgcaccctccctcccccagtgcacagaaatgctttccacacctcacctcactgctagatggtgggggatgggggatgtcagcaattcaagactgttttttctgtctcttcagtgcctctttcagcaatatgaagttaaaacaaggtactgtgagtgcttacctgatttttggttcttatgaggtttttttttttgtgcgtagatagttgttaaattgttgtccttgtgggagggaatgatccatggagtcttctattctgctatattattccacccctctccccaytaagtattctgaatatcaggtgtatcctatcattcacagggaaagagaaccatggaggcccacgtgcttttatgtctaaataggtacactttattcatgaatcaggcaaactcctaaataatcttttcttatactactttggcaaatatagcttcaaatgactcagaaggccaaacttcaagtttaaggattctttaagctctcaaaattgctcatgtgcc

SEQ ID NO: 729259 - DNA, 602 bp, Homo sapiens
tacaaaaatagctgaattcaacaccccactttcagcataggacagctcttccagacagacagaaaatcaacaaagaatcatcagacttaatctgcaaatggatctataacatagatccattattaccctgacaccaaaacagacaaagacacatcaaaaaaaaaaaaaagaaagaaaagaaaattacaggccgatatctctgatgaaatactgatgcaaacatcctcaacagaatgytagcaaatagattacagaccaaatgaatctattaataatagatatttatagaatatttcatctgagaattgaggaatacacattctttttctcagcacatggatcattctcaaggatagatcatttgtttggtcacaaaataagtctcaaaacattaaaacaaattgaaataatatgaaattaaacaatttgctccccaatgaccagtgggtcaatgaagaaatattcttagtttttctttttgaaaaatttcttaaaataaattataatggaaacataacaaacaagaacctatgggataaagcaaaagcagtactcagagggaagcatataggtataagcacctacatcaaaaaaagaggaaa

SEQ ID NO: 729260 - DNA, 602 bp, Homo sapiens
tacaaaaatagctgaattcaacaccccactttcagcataggacagctcttccagacagacagaaaatcaacaaagaatcatcagacttaatctgcaaatggatctataacatagatccattattaccctgacaccaaaacagacaaagacacatcaaaaaaaaaaaaaagaaagaaaagaaaattacaggccgatatctctgatgaaatactgatgcaaacatcctcaacagaatgttagcaaatagattacagaccaaatgaatctattaataatagatatttatagaatatttcatctgagaattgaggaatacacattctttttctcagcacatggatcattctcaaggatagatcatttgtttggtcacaaaataagtctyaaaacattaaaacaaattgaaataatatgaaattaaacaatttgctccccaatgaccagtgggtcaatgaagaaatattcttagtttttctttttgaaaaatttcttaaaataaattataatggaaacataacaaacaagaacctatgggataaagcaaaagcagtactcagagggaagcatataggtataagcacctacatcaaaaaaagaggaaa

SEQ ID NO: 729261 - DNA, 530 bp, Homo sapiens
agtggatcctaaaaaggatcctaaaatccttttcaggaagaatcctaaaaagagcccaggcagccacctttaaccactagaagcaaggtggtcacaactgtcataatccatggagacagttaatagaatacaggatttctagggcaagtcattaagagtaatgttcaatatatagacccccacttccccccacccccccaaaaaaatcaaggattcgtgattaagagactaagggcagcccaatgaaaagtcattatccctggcccagtttctggatctgagccagtgttctgacccagaatctactgactaaaggaggggcaagttctctaggagggaggatcctgtracaccatggtaagtatatatagtaatgattatctcaatctttccctaaaagaatctatgatcctttactcaagtaactgtacacttggaaagggggaaatcccaagcattttgagaatggctggacacagaacacaagtttgcactgaaacccagggatccaaagtaacatcatgctccac

SEQ ID NO: 729262 - DNA, 542 bp, Homo sapiens
atccactggcctcagcctccaaagtgctgggattacagccatgagccactgcacctggtctgtaacctcattccaatcaaactaatcttctagtagtatatgtctgtactacccaaagtgatgcacagaktcaatgcatcctatcaaaattcctactgaatttgtggccgaattagaaaaacacatcctaaaaatcatataaaacctcaagagacccccaaatagcaaaaacaattttgaaaaaaaaaaaagacaaatttgcaggactcacaactcctgattttaaaacatattacaaatcaacaataatcaaaatgtcatggtgctgacataaagacagatatacagagcaatggaatagaatagagaccccagaaataaactttcacatatatggtcaaatgatctttgacaagggaaccaagaccaatcaacggaaaaggatagtctcttcaacaaatggtgctgtggaaacaagatacctgcctgcaaaagaatgaagttggatcagtatcttacactatctacaaaaattaactcaa

SEQ ID NO: 729263 - DNA, 483 bp, Homo sapiens
taaaggatctcatttgttctcttgaaaactgtgtttgcataagagatttaatggctcatcaaccagaatacacttaatcactaaatatgacctcctgggtcttgtaataataaacaagtccacaggaaacctgtgaattttttcttggagttaaaaatggttcttcattttgactttctccttttattggcttatgtaaataaaataatctttaaatagtgtgactgtcagattcattacttaaaacacaattcaaaactctttttttaaagagctaaataggccgggtgtggtggctcatgcctgtaatcccagcactttgggaggccraggtgggtggatcacgaggtcgggagatcgagaccatcctggctaaaacagtgaaaccccgtctctactaaaaatacaaaaaaattagccgggcatggtggcgggtgcctgtagtcccagctactctggaggctgaggcaggagaatggcgtg

SEQ ID NO: 729264 - DNA, 585 bp, Homo sapiens
gttgaagccatgaaaataaatgccttcaaggaaggtatgtaagcagactgcagtattggagggtactcacagttggtaagtagggcagggaagaggaatgagaaaaggtaagaaggagagagagaagtgagagaatgagagtgaggtagtgacactaggaaagtgacatgtcatgggagacaaaaacaaaaacaaaaaaaacgagagagagacgaaataacagtgccacatcctgatagagtcatcaaactctgatgaaagtctattaaatatggcaataaagaggtcattagcaagatgtaggagaaaaggtttagacatgtgatgagtgagaagaaagccaggagagatgtggctgcccaggaaggtgaggcagtggtggtgcctgatgtattcaagtatttggataggaaagaatgttgccctgtagwggaaagaatgttgccctgtagtgaaaagaaccaccaggttcaaatgaagatcatgtcaatgtgggcaaatctcagtacacaggatgataggagaaaaagaatcagaagagagaggatgtttcaaagggaagagtggctgagggatccagatttt

SEQ ID NO: 729265 - DNA, 585 bp, Homo sapiens
gttgaagccatgaaaataaatgccttcaaggaaggtatgtaagcagactgcagtattggagggtactcacagttggtaagtagggcagggaagaggaatgagaaaaggtaagaaggagagagagaagtgagagaatgagagtgaggtagtgacactaggaaagtgacatgtcatgggagacaaaaacaaaaacaaaaaaaacgagagagagacgaaataacagtgccacatcctgatagagtcatcaaactctgatgaaagtctattaaatatggcaataaagaggtcattagcaagatgtaggagaaaaggtttagacatgtgatgagtgagaagaaagccaggagagatgtggctgcccaggaaggtgaggcagtggtggtgcctgatgtattcaagtatttggataggaaagaatgttgccctgtagagraaagaatgttgccctgtagtgaaaagaaccaccaggttcaaatgaagatcatgtcaatgtgggcaaatctcagtacacaggatgataggagaaaaagaatcagaagagagaggatgtttcaaagggaagagtggctgagggatccagatttt

SEQ ID NO: 729266 - DNA, 612 bp, Homo sapiens
atcccgcaagagacctgcattccaatcccagcttcttcctcctagtttttctgtttgcaccccctttcatgcctcttactaggttggtattctccaaacagtcttggagggcagacatcatcaactccatttcactgatagagaaagtagagtttgagagctaaagtgacttgcccaagagtgaccaattgttagagcccggtcttgccttctgactctacttggtgtctgtcacactgtagaagctacacccaggctgtcccctggaccttkggcctcccagctttacccgagtaacctcacaggttcccttccttgggtcttgtactgaagctgtcagttcagttctctgtgtttgccccaactcatggttctcctactagccctcaccccagcctgtccaagttcaccattcctcctctttaggtaggaagaggggagatagagttggtgagttcaaggagaagcctgctccaaccccagagtggctgaccacgtttctgccctccccagagagaagcaaaatgatgcctgccacactcactgctcttgctgtccacatcttccggccacatcccagctagcagcaagcacaccagggctgtggtgatg

SEQ ID NO: 729267 - DNA, 630 bp, Homo sapiens
ctgctcccctgcaacacggagagcctgagctagcacaaaggtccccttccacacgctggccatcacacatctgttggggagatgtcattgtggccacaaactccgtcgtctgtgatcgataacggatgactgatgtgagtggaaattttgaataaaggaacatgatcgtgccagagaagatatgagaaataaacatggcgaagcgggtcctcttctgcaggagcaggctcttgcctgtgccaggacctggcacataacatggtcacattaagcattgaataaacatttgttaaatggatggatggattatgattatcctgtgaatccacacaaatttggtagtaccacaggtatttcaaaatygatgtgccacaatctgaattcatcatctccgcaacattctcttttctctcatggtccattggttatccaaccaggacatagctgccagccttgactcctccctgtcccccactccgccccatcctccctgtcaccaaagcctggcaagtctgtacacgttaagtctcaaatgtcgttaaacccctgtctttcccccaccctggaggccaccctcttggtcaggagtgattgagatcacaagctcaggagtaggcatgcctgaacaag

SEQ ID NO: 729268 - DNA, 641 bp, Homo sapiens
cagctagaagtagctgcagggttaaaagagagttttataataacgaagacagtagattatattaagtattgatgggaaggagccagtagagatgagtttgaggctccaggacagagcctgtataatcaggagagtgaggttccttcctgactaggctccaggaggaatagatccacacatgtgcaaggatcccagtgtgaccgggaggagaaacgaaagacagggttgggaagaraatggggatggtggaagcaccagaggatccccagcctcactgagcttggacgctgcacactttctgcagcagcagttcatgcggctgtgtgatcttcctttgagagtgctgagcagcccaggtgtgactgaggcggtgctggacatttggatagattctgatctggggctttgctaggagagcaaaaccaaaggacagtgagccaagggaattgaaaatactggcactgaagtggtggaaagcatgttctgtgagctccagactgactgaaggagctgtgaatcttctattgtcatcctctgcccaacccatcaccctcccaccaacatatttaccacgggacttttagagtacagtcaagattcccttttggttttctctctctctggatatcgaaaccaatttc

SEQ ID NO: 729269 - DNA, 641 bp, Homo sapiens
attttaacatctgttaatatattttcttaattatataattttggggatttatatgcttcccataaaaggccagacagcaaagactgcagtagtaagaggaaatcatgcagcaattagtttctaatctaggcttgttttatcatcttggaagtctggcagagttcgcccttacacttcaggccaggcaaggtcatccattttccgacagatataaaaataatcccagctgttaaaracatctggtgagcaaactagtagaactgtttaaactactcactgtgttacaaatgaacaattagaagagatctctaggctctaacactgtacagctattgaggatatctgaaaacatttctttccttggctgattggaaagccctgtgcaactgcttcctcttctccagggtcctcaacagctcgtgcaaaagctctatggatgacaaaagtcataagattattaagaaaataatcttatgactgcccacaaaagcagattattttggaagacaacatattatgtgttttatttttcatataaacaattttttattaattcttaacaaacttgtaaaagcacaataaaaggtaatgtcacagagcaaaattgctgcttgattatgatctttagattacacagagga

SEQ ID NO: 729270 - DNA, 649 bp, Homo sapiens
ttaaagctgctgtttcagaagatcccgtggattatcttggtataattcctggcatctgtgttctattatttagcagccatgagccctctaagcgagattgcattgccacactggatcataacacctgtatgagaccaagctttctaatttccctgaggataaaataccttcttctctagatatgagagataggagattacatcggagcctactgcatatacataatgctgtgcttctctatcttagaaagtttatttggattataaaattaaatgctgctggcagtgaaacaatgccaaaatgctctgagagaaagtaatggtgaaataactggaccagacctagggcttcactgtttggactcacgtgtctcacaggggacacacagcccttggcaggcacyttccacatgcttagcagttttcaagacgactctgcaaagtgggtttattcttcctagagatccgcatgtcactttttaacagccaatgtttcatggaagacactttgtaagacactgggtcagtggaaaggtaatcattggtgttagactgatcctaaccacaatttataaaagcctgatggatgataggcactgtgctgagcacattgcattcattatgattatatcttttagtcattacagtag

SEQ ID NO: 729271 - DNA, 651 bp, Homo sapiens
tacttttaaatgatccttggaaaaatactcaatttaaaagttaaagatgtatttatatatattaagcaggtagaatactaaaaagttaaaatgcttgaattataaaaggttgaatagattattttttcatactagactgtctttttattttataatcaagtattaattactatcattttcatgctttaaataaaatatttttctctattcttaatgtgaaaagcaatgtctaattgtttaatttctttttattttctatgaaacctgaaaaagaagctcacttgatagtaaaaatggcttaagctatcagtaatgcggtctaattttctcacaactaagacttagaagggttygcaattcaaaactgaatctgcaacttatcaaaaatttctcatttatattgttccatatatatttcgttatgctgacccacttatgacatcaacttgaagaaagagctgtaaaaaaatacacctatccagcagagagaagcattacatttaaaagtactattaagttcaagaaggttatatcagaaaaattgtaagggataatttaaaatatgaaaataggtcaagagtaggacattaaataaagataacaattcttttttaagaatgtgctttcattggcagatttcaaaccatggca

SEQ ID NO: 729272 - DNA, 651 bp, Homo sapiens
tacttttaaatgatccttggaaaaatactcaatttaaaagttaaagatgtatttatatatattaagcaggtagaatactaaaaagttaaaatgcttgaattataaaaggttgaatagattattttttcatactagactgtctttttattttataatcaagtattaattactatcattttcatgctttaaataaaatatttttctctattcttaatgtgaaaagcaatgtctaattgtttaatttctttttattttctatgaaacctgaaaaagaagctcacttgatagtaaaaatggcttaagctatcagtaatgcggtctaattttctcacaactaagacttagaagggttcgcaattcaaaactgaatctgcaacttatcaaaaatttctcatttatattgttccatatatatttcgttatgctgacccacttatgacatcaacttgaagaaagagctgtaaaaaaatacacctatccagcagagagaarcattacatttaaaagtactattaagttcaagaaggttatatcagaaaaattgtaagggataatttaaaatatgaaaataggtcaagagtaggacattaaataaagataacaattcttttttaagaatgtgctttcattggcagatttcaaaccatggca

SEQ ID NO: 729273 - DNA, 581 bp, Homo sapiens
gagtaaataacatttttctagtgcatttcaaatgttgatgctttatataactcactattaattaaaataaaagccctgagatatagacattaagttcccccattatagacaaggtaatgtaggtttgtagaagtggcaaaacaaggtttctagtacagacatatttgactataaagttttgactatttcactttatcaaaatattaacatccmggcagcagcttgccaaagacatcactgagtctatgggaattctgtgtcagtaagaaaactgaacctcctacaaaaaaaaatctctttcacctgtcaacatggagaggtaaccctagggagaagtaacttaaggacaacgaacctgaaaccttctgcaccatcagaaatatggttcccagaggacgtcacacacagagggtagaagccaggaataatgcaaagcctctgattttattcttgaggtagcaaagttggattgctcaggttcttgttattgattatctctttatgcctcaaattttaactcagtatttatcaatgccataccatagagtctattgtcataattatatttcaccagggatcag

SEQ ID NO: 729274 - DNA, 581 bp, Homo sapiens
gagtaaataacatttttctagtgcatttcaaatgttgatgctttatataactcactattaattaaaataaaagccctgagatatagacattaagttcccccattatagacaaggtaatgtaggtttgtagaagtggcaaaacaaggtttctagtacagacatatttgactataaagttttgactatttcactttatcaaaatattaacatccaggcagcagcttgccaaagacatcactgagtctatgggaattctgtgtcagtaagaaaactgaacctcctacaaaaaaaaatctctttcacctgtcaacatggagaggtaaccctagggagaagtaacttaaggacaacgaacctgaaaccttctgcaccatcagaaakatggttcccagaggacgtcacacacagagggtagaagccaggaataatgcaaagcctctgattttattcttgaggtagcaaagttggattgctcaggttcttgttattgattatctctttatgcctcaaattttaactcagtatttatcaatgccataccatagagtctattgtcataattatatttcaccagggatcag

SEQ ID NO: 729275 - DNA, 581 bp, Homo sapiens
gagtaaataacatttttctagtgcatttcaaatgttgatgctttatataactcactattaattaaaataaaagccctgagatatagacattaagttcccccattatagacaaggtaatgtaggtttgtagaagtggcaaaacaaggtttctagtacagacatatttgactataaagttttgactatttcactttatcaaaatattaacatccaggcagcagcttgccaaagacatcactgagtctatgggaattctgtgtcagtaagaaaactgaacctcctacaaaaaaaaatctctttcacctgtcaacatggagaggtaaccctagggagaagtaacttaaggacaacgaacctgaaaccttctgcaccatcagaaatatggttcccagaggacgtcayacacagagggtagaagccaggaataatgcaaagcctctgattttattcttgaggtagcaaagttggattgctcaggttcttgttattgattatctctttatgcctcaaattttaactcagtatttatcaatgccataccatagagtctattgtcataattatatttcaccagggatcag

SEQ ID NO: 729276 - DNA, 619 bp, Homo sapiens
ttaatgtagaagcctgagtcttaattgctgcttgaacatttgttttacatgtaaagttaaagctgaattccatataaatttggaagcagaattccatgacaaacttggagatggcaggcagaaatgagcttctgaatctagcttaaacttcagtgctcctaattataattctaaactaaactatcaaatgagagtatggaaatagtttaaaaaataaataaattagaaatcatgtgataatatttcacaaggttgtcataatagtttatatagaggaggttaaaaacactgtggcctataaaatttgactgtgagacaaacagaatgtgagacaaacagacattataatgtaaagggttccttatgtataatgtgaaaaatttgaagtttgaaattwacttcatttctaaattttttttggtaaatgtttttaaagtactaatatcatgctagattattgttattagtgaatttttaatttctaaacatgcacaggataggacagaataataaactgtcacacgcccttcagaaaggtttagtagttattattattttgctattcttgtctcatcatctcgcacatattctctctctctctttcttcctccccatctgt

SEQ ID NO: 729277 - DNA, 590 bp, Homo sapiens
ttggcccatattatatattgtcaggctatttaatttcagctattttagtaggtgtgaaaagaaattgttttgtaatttgtctttctcaaagattaatgattttgagcatcttttctttttttctttttttttttttttttttggagatggagtctcactctgtcactcaggctggagtgcagtggcaygatttcagctcactgcaacctccacctcccaggttcaagcgatactcctgcctcagcctcctgagtagctgggactacagtcacatgccaccatgcccagctaaatttttttgtattttaagttgagacgggttttcaccgtgttagccaggatgttctcgatctcctgacctcgtgatccgccctccttggcttcccaaagtgttgggattacaggcatgagccactgcacccggccttgagcatcttttcgaatgccctttgtacatcgttttttttgtgtgtgtgtgtgtgaaatgtttcttcaaatcttttgcctatattttacagaactttaaaatttattattgatttgcatatatttcttatataatctggacacagatttgttatacattttct

SEQ ID NO: 729278 - DNA, 590 bp, Homo sapiens
ttggcccatattatatattgtcaggctatttaatttcagctattttagtaggtgtgaaaagaaattgttttgtaatttgtctttctcaaagattaatgattttgagcatcttttctttttttctttttttttttttttttttggagatggagtctcactctgtcactcaggctggagtgcagtggcacgatttcagctcactgcaacctccacctcccaggttcaagcgatactcctgccycagcctcctgagtagctgggactacagtcacatgccaccatgcccagctaaatttttttgtattttaagttgagacgggttttcaccgtgttagccaggatgttctcgatctcctgacctcgtgatccgccctccttggcttcccaaagtgttgggattacaggcatgagccactgcacccggccttgagcatcttttcgaatgccctttgtacatcgttttttttgtgtgtgtgtgtgtgaaatgtttcttcaaatcttttgcctatattttacagaactttaaaatttattattgatttgcatatatttcttatataatctggacacagatttgttatacattttct

SEQ ID NO: 729279 - DNA, 590 bp, Homo sapiens
ttggcccatattatatattgtcaggctatttaatttcagctattttagtaggtgtgaaaagaaattgttttgtaatttgtctttctcaaagattaatgattttgagcatcttttctttttttctttttttttttttttttttggagatggagtctcactctgtcactcaggctggagtgcagtggcacgatttcagctcactgcaacctccacctcccaggttcaagcgatactcctgcctcagcctcctgagtagctgggactacagtcacatgccaccatgcccagctaaatttttttgtattttaagttgagacgggttttcaccgtgttagccaggatgttctcgatctcctgacctcrtgatccgccctccttggcttcccaaagtgttgggattacaggcatgagccactgcacccggccttgagcatcttttcgaatgccctttgtacatcgttttttttgtgtgtgtgtgtgtgaaatgtttcttcaaatcttttgcctatattttacagaactttaaaatttattattgatttgcatatatttcttatataatctggacacagatttgttatacattttct

SEQ ID NO: 729280 - DNA, 487 bp, Homo sapiens
aactgtcaaaacctatatttcatcaatataatagataccgtggaggacggtggatctccccagggcggagccccagaatcatcgtcctcctccagccgcccaagctcctccgccactcgtcagagtcctccttcagccgttcccagcccggggcctcccaggtgatgagggccaagtaccctccgscaggagccacacagcagtgacttccagaccctctggggcagcggactggctcgcactgcagattcttcctaatcctttggtgaaaactgcaacacaagaaggccgcaaataagcccaagggtcagaactctatggccttacacaaaatcatcatggtggacagtggtggtgtgggcaagtccgctctgactctatgtgtccggagttggttccttccggtgggttcctggtatctctgacttcaagaatgaagctgccaaccttcttggtgagtgttacagctcttaaaggtggcacaaac

SEQ ID NO: 729281 - DNA, 600 bp, Homo sapiens
ttacaatcgtatgtaccttatctctctctccatttctgcatgaacagtccatcctatccaaaccgttctcatttctctaccatgagataattcaccttgcattcctaaaactatgcccttgttcctcctccacatttttctacttactgaaaccttagccttcctccagaaactaacctcagggccatcctcatctgtgggcgaaaccattttagatcacaatgttcttcctcagtcttcttagatactagaatagtcactctttgtactattcatcacataacgtctgtcttgccaggtatattaggttcccctagagaaatagaatcaataggccgtgtgtgtgtgtgtgtgtgtgtgtgtgtgtgtgtgtgtatgtagagagagaaagagaaaacasgctcatgtaattgtggtgactggcacttccaaaatccacaagccagactagaaggctggaaattctggcaaaaaattgataccttgtatctgaaagctttatcctatcctcttcagaagacttcagtcttttctcttaaggacttcaactgactggatggggcccactcaaaacagcatctaaggaattaaagtaagtca

SEQ ID NO: 729282 - DNA, 678 bp, Homo sapiens
aggatcctgtgaacctctggtgacaaacttttcgtcaaccaaataatacacaacctcactttatgtgtgcttttttttaaagacaccttatttaatgtgtgttggtgattctttaacattgaactcatggtcaacagcactatatctcactcctgaatgaaacttatctgacacacctgttttctagatagggcacgtcacagccttcttgcactaaggagcgctagccatcagttcagtgtgatgcttgggaatcattacaaatagcaaaatcatcaacaaaaagcacaaaaatgagaaaaacttggcactaaataaaccacgaaaataacacttgcttacagtacaagagctgaaacaagaaggcagagtacgtgtgcatcaggcaaaccaaatttttggccactctgtgcatgtccataaataaccatgaaaacaccacaagtattgacttgggacttagaaaaaaaactttagcaaggaagcagatttgcaaatacaggattttcaaataatgagcatcaattgtattttcctctccygtgttgcttggtacttcactctcctggatttccaactacctcactggcctcttggcagattctttctcttcatcccaagcaacatctttgcagagtcactaacagtccttggccctcttctcttcttttcctatac

SEQ ID NO: 729283 - DNA, 630 bp, Homo sapiens
gaatgaagcttgtatcttatccaggtttccaggtttacatatctaggatcaaagatgggcacaaaatgaaacaatcttgttttcatttaaatactattttgatattttcagtttgcatatctgttttgttttagtacatctaaaaacacatggtttggtcttgtttctatgtggggttttaaaagaaaaaaaggcccaacgaaaaaraaagtttacttacagcccctacccccaacacccccaacacacacacacacacacacacacacacactcacacttacatcaccaccatcaaataataatcatggtgcagtgaacaaaggcagtttctggttttggaatatgactgaggcatctggataaaagtccgaatttaatagcaaccgtgcatattatgttatattttataaatttgtaagtatataaataagcaagaaattatttataatcacaaggttttgaaattctttattcttctctaaaggatccaatttcttcttctcccctctctcctcctcccattcctccttcctgtcctcctcatactccttctttttgttagtcagtttcattgccttccttctcttctttgtcgtattttctttctcctcttccacctcctcactta

SEQ ID NO: 729284 - DNA, 607 bp, Homo sapiens
caacaccatctccagcacaaccacacacaaagtcttcagcaggggccccctgacccctgaccagctgcgttgcctccaccaccttagtgaatgcccacagggaggcaggcactccagcacccactaacactctgctgcagstggcatgccttagccctcacaacagcagtggattccatacctggaggagtcagagaacaaagtcagggcccaatacaagtcccacagagttatagcaggcaggccaggagttggaagctcagtgctggtcccctaaaatctcccagaaatgaagccagttggctgaattggccttataccacaatcaaaccctcaaagtcatcaaacaggatagaagaaaaaaaaatctgaaggtcagcaacctcaaagattgtaggtagataaggttacaaagatgggaaagaatcggttcaaaaatgctgaaagctcaagaagccagcatgccttttgtcctccacatgaccacatcacctcttcagcaagggttctgaatttgatgagatggctaaaatgacagaagtagatttcagaatatggctaggaattaagatcattaagctacaggaatatgttgaaacccaaggca

SEQ ID NO: 729285 - DNA, 620 bp, Homo sapiens
tattcacagtatagtgtttgggacatgatggggaatgtctgttttttagggaaagttcactagcttaataaatattttttaaaatatatgaaataactaaattaataatacaagttggttagatcagatatgctcctattatattttcaagaggttttaaatttataacttattacacataaaagagttcgttctctctaaactcagtaccccacaattattcgctccatacaatatttttctgccgtgtagaaaattaaaactacaattgaacaattcatattcttacgaactcacctagagctatgcccttggaaaactttgcacccttcaaagggtatgtttggagttgaagaaagttagaaagaaagacaatatgtgatgctgytgacatatttttcctgagttcttttgaaaccaatctcataatcttatagacagttttttttaataaaaatagaaatttgctcttctagccttaaagcttataacttacatttgccttatctgagatccttcctcaggaaacaatccttaggcctctcaaaaagcatcaaagaactaaaactcaccagatcaccacactcaagacaatgagatgccagactcattcatcatga

SEQ ID NO: 729286 - DNA, 573 bp, Homo sapiens
caggagagcctcgggacttgactgtgtgtccagtccccactacaaagaggtgggagaagtgctgacagtttggggccctcctcaaaggcacctactggcacatgtgtgcagccacccacactgctacggtgtgaatgctagtgttccccaaattcacattaaaacctaatctccaatgtgacagtattaagaggtagggcctttargaggtgattagtgcccttatatgatcagtgtccttatcaaagcggctcttgagggctggtttaccccttccaccatgagaggacacacagcgccatctatcaatagccctcaccagacacggaatctgctggcgcctcgatcttggacttcccagcctccagcactgtgaacagtatgtttctgttgtttataaaggactccatctaaggtatttggtggcagagcgtgaatgaactaagacacacacagacacacacacaagcacacccacgcacagggacccacagctgccccacaggcacacgcaccagcaggcacactcgtccacacccatatggctgctgcttatcccacctagaagtcccg

SEQ ID NO: 729287 - DNA, 515 bp, Homo sapiens
tctaagaaaaaaattatatatataacaagtatgtaaacaaaatacataagtaaaaggtagaataaaaaaagatagcataatacacacccatgtatttattgcttagaattaacactaatattatattttctttgtgcattttttttcttaagtggttcaaaaraaagtacagacatcatgatattaaaccctaaatcagtggctctcaactgaggttgattttgacccttgtcctccgcaagaggacttttggcactgtctggagacaatgttggttgtcacaaaaggaagcatgcctgcatccctggtagagatcagggatgttactaaacatgctacaatgcacaggactgccccctccaaaacaaagaattatctggttctaaatgccggtagtgctgaggttgaaaacctttggtctaaatgattaagaatgcgtttcttaaaatgcaaaatttcacataaccacatagcaccatcacttctaacaaagagaaaaataactctttaaaatt

SEQ ID NO: 729288 - DNA, 643 bp, Homo sapiens
agaataaaaaaagatagcataatacacacccatgtatttattgcttagaattaacactaatattatattttctttgtgcattttttttcttaagtggttcaaaagaaagtacagacatcatgatattaaaccctaaatcagtggctctcaactgaggttgattttgacccttgtcctccgcaagaggacttttggcactgtctggagacaatgttggttgtcacaaaaggaagcatgcctgcatccctggtagagatcagggatgttactaaacatgctacaatgcacaggactgccccctccaaaacaaagaattatctggttctaaatgccggtagtgctgaggttgaaaacctttggtctaaatgattaagaatgcgtttcttaaaatgcaaaatttcacataaccacatagcaccatcacttctaacaaagagaaaaataactctttaaaattgtctaataaccagtccatgtttccccaccattccactaaaatgttytttatagctggttttagcaaacactttccattttattagcactgttaatagaatctcactctaaatgactacagaatagtctgttaaatggattccctgaaatttattcaaaggatctatttttggatattagttttgct

SEQ ID NO: 729289 - DNA, 651 bp, Homo sapiens
cacatgcaaaagaatgaaataggatccttatctaacaccatacatgaaaatcaactaaaaaaggactaaagacttacaagtaaaacctgaaactgtaaaactcctagaagaaaacataggggaaacacttcatgatgttggtcttgccaatgatttcgtgaatatgacaccaaaagcacagacaacaacaacaaaaataaatgatgagaactatgtaaaacgaaaaagtgtctgcacagcaaatgaaacaatcgcgttaaaagacaacccacaaaatgggaaaaattatttgtagaccatctatgtaatgagttaatttctaaaatatataaggaatttctacaactcaatagcaaaaaaaaaaaaaaaactctaacaatctgattaaaaagtgggctaaggactttaatagacrtttctctaaagaagatattaagtaggtttctaaaatcgtgatgtgtttttcatttgatgtgtgcatttaattgacgctcattactccatcaaaagcatcctgaaatcaaggaaacagtacttactagaatgtttcagtgatcgatttctgcctattaaaccaccccaaaacttaatgcattaagactaatttattattgctgtgattctgggacaaaacataactaactttttatt

SEQ ID NO: 729290 - DNA, 623 bp, Homo sapiens
taccatacttctatggcacatactatgttccagatattgttcatataactcatctaattttcatagcagttttacaagatgagtactatttgtttttgtttttttgttttttttttttgagatggagtctcgctctgttgccaggctagagtgcagtggcgcaatctgggttcactgcracctctgcctcctgggttcaagcaattctcctgcctcagcctcctgagtagctgggactacaggcacataccagctaatttttgtattttcagtagcgacagggtttcaccatgttagccaagatggtcttgatctcttgacctcgtgatccacccgcctcagcctcccaaagtgctgggattataggcgtcagccacagctcccagccaagatgggtactatttttatacctattttatagaagaggaaactgaggcatagagaagtcaagtcacttgatcatacagctagtgtgtggaggaggcagattcaaaccctggcttcggtcttagtcactgcattggcttcatgggcttatcatgaggattaaacgcgtgaacatgctcagtgtttagttcagtgtctggcacaggatcaatgttcagaaaatcctaacagctgct

SEQ ID NO: 729291 - DNA, 572 bp, Homo sapiens
aaaaatctagaactagttgcaggaacatcacagacaagggaaagtttgaaccacaccatggatgagtgacaagcttggaaaagaagggcacttcacctctgtggtattctttgcaaaaactcatgacctgagtctaatcatgaaaaaagaaaaaaatcagacaaactcaaatggaggctaatacggtttggctctgtgttccaaatctcatcttgtggctcccataattcccacttgttgtgggagggacctggtgggagatgattgaatcatggggacaggtttttccygtgctgttctcctgatagtgaattagtcttatgagatctgatggtttttaaaaatgggaatttctctgcacaagctctttttgcctgctgccatccacatcagatgtgacttgctcctccttgccttccaccatgtttgtgaggcctccacagccacatggaactgtaagtccaataaacctctttcttttgtaaattgcccagtctcaggtatgtctttatcagcagcatgaaaatggactaatacagagatatatcctgcaaaatctgtccccagtactc

SEQ ID NO: 729292 - DNA, 572 bp, Homo sapiens
aaaaatctagaactagttgcaggaacatcacagacaagggaaagtttgaaccacaccatggatgagtgacaagcttggaaaagaagggcacttcacctctgtggtattctttgcaaaaactcatgacctgagtctaatcatgaaaaaagaaaaaaatcagacaaactcaaatggaggctaatacggtttggctctgtgttccaaatctcatcttgtggctcccataattcccacttgttgtgggagggacctggtgggagatgattgaatcatggggacaggtttttcctgtgctgttctcstgatagtgaattagtcttatgagatctgatggtttttaaaaatgggaatttctctgcacaagctctttttgcctgctgccatccacatcagatgtgacttgctcctccttgccttccaccatgtttgtgaggcctccacagccacatggaactgtaagtccaataaacctctttcttttgtaaattgcccagtctcaggtatgtctttatcagcagcatgaaaatggactaatacagagatatatcctgcaaaatctgtccccagtactc

SEQ ID NO: 729293 - DNA, 573 bp, Homo sapiens
atacatatttcaaaacatcaggttgtacacaataattatagacaatttttgtttgtcaattcaaaaagtaataagtaaaggaaaagaaaaatgtaagatactttaaaaaatgactggctcgtgttgagaagtaacttttactatttatttgtttttttgtttgttkgttggttggttttttttttttttttttttttgagacggagtttcgctcttgttgcccaggctggagtgcagtggcatgatcttggcttactgcaatttctgtctcccggggttcaagcaattctcctgtctcagcctcctgagtagctggcattacagatgcccaccaccatacctggctaattttttgtatttttagtagagacagggttttgccactttggccagactggtctcagactcctggcctcaggtgatccacctgccttggcctcccaaagtgctgggattacaggcatgagccaccgtgcccagcctaacttgtactatttatttgagttaagccaacacacacttgagttccccacatgtcatagagtgatgtggacaagcccttgaaatctggct

SEQ ID NO: 729294 - DNA, 558 bp, Homo sapiens
ccagcctatatttatctttttcacccatgaccccagcttcagtgaggagttctgttactttgtacttttactgggcattcgtttccttgtttggaaaatagtgactataattaataaaagtgtttgtattcttgcaaattgctaagagagtaaatttgaagcatccccaccacttgttaattagcttgatttcaccagtccgcaatgtatacatatttcaaaacatcaggttgtacacaataattatagacaatttttgtttgtcaattcaaaaagtaataagtaaaggaaaagaaaaatgtaagatactttaaaaaatgactggctcgtgttgagaagtaacttttactatttatttgtttttttgtttgttggttggttggtttttkttttttttttttttttgagacggagtttcgctcttgttgcccaggctggagtgcagtggcatgatcttggcttactgcaatttctgtctcccggggttcaagcaattctcctgtctcagcctcctgagtagctggcattacagatgcccaccaccatacctggctaatt

SEQ ID NO: 729295 - DNA, 573 bp, Homo sapiens
atacatatttcaaaacatcaggttgtacacaataattatagacaatttttgtttgtcaattcaaaaagtaataagtaaaggaaaagaaaaatgtaagatactttaaaaaatgactggctcgtgttgagaagtaacttttactatttatttgtttttttgtttgttggttggttggttttttttttttttttttttttgagacggagtttcgctcttgttgcccaggctggagtgcagtggcaygatcttggcttactgcaatttctgtctcccggggttcaagcaattctcctgtctcagcctcctgagtagctggcattacagatgcccaccaccatacctggctaattttttgtatttttagtagagacagggttttgccactttggccagactggtctcagactcctggcctcaggtgatccacctgccttggcctcccaaagtgctgggattacaggcatgagccaccgtgcccagcctaacttgtactatttatttgagttaagccaacacacacttgagttccccacatgtcatagagtgatgtggacaagcccttgaaatctggct

SEQ ID NO: 729296 - DNA, 437 bp, Homo sapiens
aatgactcatagctagctaacattattatattatatatactatactgtattagtgggaaatagctaacatttattgagtgtttactgtgtggcacgcactgtgcttactgcctcccatgaaacattccacttacctctcataacaactctgtgaagtattcttgctcacctcagcttacagatggggaaactgaggcaggacactcaagtactttgtctgktgaaacactgtgaacaaacgacagagcttatatttgaactgaagccacttgtcttggagggctcctctgatcccacatcctgttcttttttttttttttttttgggagatggagttttgctcttgttgcccagtctggagtacagtggcgcaatctcggctcactgcaacctccctctcccaggttcaagcagttctcctgcctcagcctccggag

SEQ ID NO: 729297 - DNA, 622 bp, Homo sapiens
aaaaaaatgaaagaaaaatatgtaaagattcaactagatgaaattttcttgagcttagagctaggagattaaaagaatgcaacatgttcaaagaaaaagtgacagagagaaatcaaactgaggtataaattaatagacatatagggttttaaagattttttaaaaaatatttggacatttagacaaagaacttaaataaaataatcagacttttgttaatatagaaaatagcagggtaattattacaaaatcctcatggaaagaaagtgtgagtccctcagaatttcctatcctgaataagagaagaagcaatagacaatacatttactcattcaagatgcaatgatttttgtatrtggtgagagataagggtctagttttattcttcggcatgagactttctattttccccaacactacttattgagaaaagtatcttttccccagtgtatgttcttggcaccttaattgaaaatcagtttgctagaaatacgtggacttatttctgggttctttatttttttccatgggtctatgtgtttgtttttataccaataccatgctgtttgcttactatagctttgtgctttttgtattacagtacattttgaggtcaggtagt

SEQ ID NO: 729298 - DNA, 604 bp, Homo sapiens
taaagtgtgaatgtatgaaattaaatgaggcttgcaatgtaatcagtgtggttggctgctttaatatattccatttcaatttcaaatcaccgtaagccaagagtgacgaatctaatttgatcagttgttcacaaaaacacagaaaagcaaatgtggatctagcaacacagccagatttttaaaggaattaatattttccaccaccaccagaagcccttaacatattttttaaaaaatactaattaaaaacaaatccaaacaaaattcttttctcactaaaaattcaaccctcacactcaaaagttcaaaagagacaatacttaaaagcataaaaagcatatttaattttaaaagccagtgacatatttcaaatgtwccaagagaaaactaaaaccaacaggtctttacagtgcacttcctggaactaatgtggaaggttctccagcactggttattagtatctagcaagaatttgtatacaaacatatttctttatccccatccctactataatttggggcaacacaactcacaaatgtactcactgtcatactagaggtctttaggactctagcagctgcttagcagagcacacaagaaacaa

SEQ ID NO: 729299 - DNA, 609 bp, Homo sapiens
aatcttagggatacattgacaaaatatgatcaaaacatgtaaagtaaaatacacaaaatattttggagaaaaattttaaaaggcacaaagaaatggaaagatataaccaaacatgaatcaaagattcaatattattaaatggtagtccttcccaaaattgattgtaaattcaacaaataccaattaaaatcactcttttttttgtacaaactcacaaactaattaagattttatgtgtacatgcaatggatctaaactaaatcaaacaattataacaacaacaaaggtggaggatttatactatataattttaaaacttactataaagctacaataatctagacaatgtagtttgatgtaayaaatgcatagatccatagaacagaagaaggaattcataaataaacctccacatacatgaccaactaattttcaacaaagtgctaaggtggctcaatggtcaaagaataattttttcaaactgtagtggtgaaacaattgggtatccatatgcaaagatacaaagattgacctttaccacagattatgttccaaaattaactccaaatagattgaggacataaaaatagcaggaaaaacattacatct

SEQ ID NO: 729300 - DNA, 716 bp, Homo sapiens
agtcacaaaattatgaacctatcttctcaaaagctgcatatagatgagaacagagcctataaatatgtacatcttagtatacaactatcttttttaagacaaatagaacaactatcttttttaagacaaatagaattagattagcacaatccatatctgatatcataatatctaaataatttccaaaattcaccaaactgggtatgacgtggtaatcagagtattttatcaaatcttctagtactatggattgcctctctaatagcagcctgaaagaatgtttggctgagaaaacaaccactaattatctgtaaactcacaatgatctttaaaatttctaagtacgtggttctcagcgggacaatcgcccttctaaatccagatgcttcaaaaactataacaaacttgaagtagtcaggtgacccctgagaaatacagtaaggagtaagccaaatttagtaaccttagtgtaggttaatagtagttaaggatacatttcactgggaagttcttcccttctctctartaagtacagattatgtttagtcagttataaaatacctggaagagtaaaataccttttctccctcctcggtagattagattgtgatttttctgcccaaaaatatagcaagcctgttgattagcaatagcccagtgtctagctctcaataaatatttgatgaataaataaatgactaaaaatgtatatattt

SEQ ID NO: 729301 - DNA, 616 bp, Homo sapiens
tacattttttagtctatatttacatcatccacaatcagttgtatataattctcaggtggaaaagtcatggtgacttagaggcatacttctgaaattttattgtgttcagcaataaactgcagaactggttcaaatgcagattctgattcaggagatctggggctggggctggggctgcgtttccgcatttttaacaagcttaccagtgacaccaatgcctcaggtccagaggccacacttttgaatagcagagaggttgaacactgaasgaagaattcagggatgatgtggaattgagagttttatgaaatttacaggttataacataatagcaagaatagtagaatcctttttgaacacttactatttactagatgtcatcctagcagtttttcatgtattgataaaaaccacaaaaatctatatgagaaataatactattcttcctctttaataaaaatattttgctgacccttcccctctctgtctcaagcctgaaaaaaaattttttgccaaatatctagtatatagtagagcttattttattatttatttatatttatttatttttttatttattattttaccccagtatctaacttagaattcattttaa

SEQ ID NO: 729302 - DNA, 616 bp, Homo sapiens
gaggacaaagattcagttgatgtgttccagaagcagactggagtgtctactgagaacacactcacggctttaccccagaactctgttcctacagacattctcatgtggaaaactgcaatatggttccaccacgtctgattggtccagtatccccttctctattcttcactttctccttccttattcctttactgtacataaattawcaagtgtagctgcacaagcatattgatgattttgtttgcttgcttgtttgattgtaccgaatggccaccagtttgtgttgagtgattgccaatggacacaaggcgagggaaaacactgattctgggaaaagactccctttctccaccaggggatgctcacttacctcttatctctatgttccaggactttaacaacataacaaacataatgatccttaacgcttgttgcagggagaagaaaaaaccataataatctttgcatacattgttcgattggagaattttgtttttgaaatattccattgtgaaactaaggacaatttcttaactttcttaaatgtagctgttacacatagggcaaatctgtcctcacacaggactaagtgacacttacaacaacagaatgaatc

SEQ ID NO: 729303 - DNA, 616 bp, Homo sapiens
gaggacaaagattcagttgatgtgttccagaagcagactggagtgtctactgagaacacactcacggctttaccccagaactctgttcctacagacattctcatgtggaaaactgcaatatggttccaccacgtctgattggtccagtatccccttctctattcttcactttctccttccttattcctttactgtacataaattatcaagtgtagctgcacaagcatattgatgattttgtttgcttgcttgtttgattgtaccgaatggccaccagtttgtgttgagtgattgccaatggacacaaggcgagggaaaacactgattctggraaaagactccctttctccaccaggggatgctcacttacctcttatctctatgttccaggactttaacaacataacaaacataatgatccttaacgcttgttgcagggagaagaaaaaaccataataatctttgcatacattgttcgattggagaattttgtttttgaaatattccattgtgaaactaaggacaatttcttaactttcttaaatgtagctgttacacatagggcaaatctgtcctcacacaggactaagtgacacttacaacaacagaatgaatc

SEQ ID NO: 729304 - DNA, 620 bp, Homo sapiens
gaacactctcactagatccaaaccaagctctcaggacacaaaacaagacaatcaggaaagaaatgactatccaatgggagggaaaatactcaaaactgagtcacccaagagtcataataaccaaagaactagttctttcaagtattttctccttccaatctatattgagaaagaaaagacaagaagaggctcttaccaccttcattccacccaacactaagcagagatcagggagtctgattggttaaaaataagttaattaacataaacataaaagtttactttcactagctkggccagagatcccgaaatctcagctgtagtctccagagacagcagagtcccaaccatccattccatctttgtcaccaaactgccagggagttaaaaatatttctccaccttcttagatttttttgactgggggtctgcaaattaaactgataagaaatagattagcaagagaaaagacagattttattcacatatgtacatatgggagtccatagaaaaatgtgactcaaggaggcatttgtaatttggggcttatgtaccatctcatacccaactccacactacctccttttaacagggaaaagggagggggagaagggcatata

SEQ ID NO: 729305 - DNA, 620 bp, Homo sapiens
ccaaaaaaaacacaagaatgaagtaaaaggagaccatttctagtgggaatgccgttatagtctgggaaactcctggagtggctaggacataaagtaaccagctaagtgcttttagagcagattattatttttttatatttctctggaacagaggttactttgtgttgacacaaggtgaataaataagccttctattgattcaggtagggttcagggcatctgtcttaaaggggcagcaccttacttcagctgyccagctctaagccagagttcccagggagaggacctcatttttcccactcgtgcttccagtgagaaccacgcccctccaacccacatgccattgttccatcatgacctgattgcattttcaccccagagccacttaggggaaggattgccacctccttgaattagagttctcggagcaaggccaataagctgagcagtgggagcagggagaggagaagaataaatggagtgagtgcagcacagcctgcctgcaagagcgtgacctgcgtttctcctttcttgccctggcttgaattagtgaaaaggtgaagtgggcgggcagtgaacaaaggagtaatgtagacatggattcaaaaatgaggtttttc

SEQ ID NO: 729306 - DNA, 620 bp, Homo sapiens
ccaaaaaaaacacaagaatgaagtaaaaggagaccatttctagtgggaatgccgttatagtctgggaaactcctggagtggctaggacataaagtaaccagctaagtgcttttagagcagattattatttttttatatttctctggaacagaggttactttgtgttgacacaaggtgaataaataagccttctattgattcaggtagggttcagggcatctgtcttaaaggggcagcaccttacttcagctgcccagctctaagccagagttcccagggagaggacctcatttttcccactcgtgcttccagtgagaaccacgcccctccaacccacatgccattgttccatcatgacctgattgcattttcaccccagagccacttaggggaaggattgccacctccttgaattagagttctcggagcaaggccaataagctgagcagtgggagcrgggagaggagaagaataaatggagtgagtgcagcacagcctgcctgcaagagcgtgacctgcgtttctcctttcttgccctggcttgaattagtgaaaaggtgaagtgggcgggcagtgaacaaaggagtaatgtagacatggattcaaaaatgaggtttttc

SEQ ID NO: 729307 - DNA, 531 bp, Homo sapiens
cccgttggagctgtccttgcaatagtgagtgagttctcatgagatccggtcatgtaaatgtgtgtggcaccccaccccatcttgttcctgctctggccacggatgagcctgctccctctttgcttcactgcatgactgtaagtttcccgaggcctccccagaagctgagcagatgccagcctcatgcttcctgtacagcctgcagaaccaggaaccaattaaatctctctcactctctctctctctttttttttttttttaaataaattacagcaatgcaagaacagactaacatactcagctaccgatgcacttgtttytggttggtggaaggcattgttcccattgtcccctgatcctgagcagtctttagttccagttacagtgaaagcccaggagttcttcccagggcccttcagtgggagaaggaggctgctgctctgcaagtggattcctcacaggctgagatccccagatctcatgtcaaggaatcaggagccactcttcaggagtgggagtcagtgagatgat

SEQ ID NO: 729308 - DNA, 593 bp, Homo sapiens
gaatggtatctctgcccagaatccaggcatgtctccgtgtcagtctagaggccccagtgggagggtgttaggtgggtgggggaacctcctgtgtctagggttttgataatctgtggcagaagtgggccatgagggctctcactcacttgccatttcctrtaatagggagcctcccttggctccataccagttcctggtgggtgactgtcctgcctcactcatctctgcgctctgtgggttccatttcttccttgatgaatcccctgttgttttaactcttgctgcctcgttagtcctcagaaagttcaatcctaggaggacctacctggtggcatggataaatgagtctgtgactggcagcccctcacaaatttgtgtgatactgaaggcgctgtacacacaaacaccattctcacccatctgtaacaaatcttttgctaccttagtctgtttctggtaatgaatttttttggcaatcctaagggttacaccatctttgcctactttaaaaataccacttacatttatggtattctaaacctggaaagttatctctgggactatccatgaaaaaggcttattggttttacttg

SEQ ID NO: 729309 - DNA, 569 bp, Homo sapiens
cttttgtagaaaggtgggactggagggagaaaaattatatttaagaaaaaagaaactatagtgtacttgttattagattacagccctgtccattttttagtttttttaaaattctggactgaattttaaagttgtagttccctccaatatctggctgcaactgtcttgactaatgttttaaatttttctcccacctttttgacttgaaattactaaaattaaaactgcctttttcctaaagccctgaaagatgaagctagtcaacttgmctttaaagaaaaattactgcaatagtttatatttggacaaactttacacatatactacaacccaggaaaatctatcagattgccactggtcttctcagatgactgccctctgctctagatgaacctactttatagactgctccagacattaatgtgtttttttttccgatttcataaacatgtctcttattaaagatctgtttgcctgaatatagaggcctaactttaagatcccatttgcaactcggttttctaaaatgagacacaactgtgtaattggactggcctattcccagaatg

SEQ ID NO: 729310 - DNA, 623 bp, Homo sapiens
tgactattgtgaatactgctgcaataaacatgggagttcagatatctctttggcacgtgaaaggcacatctcacatggcagcaaagagaaaagggcttgtgctgggaaacccccccttatttaatcatcagatctcatgagacttactcactatcatgagaacagcacaagaaagacctgcccccaatattcagttacctcccaccaggtccctcccacatcacgtgagaaatcaagatgagatttgggtggggacagagccaaaccacatcattctgcctccagcccctcccaaacctcatgtcctcacatttcaaaaccaatcatgccctcycaactgtcctccagagtcttaactcatttcagcagcattaactcaaaagtccatagtccaaagtctcatctgagacaaggcaagtcccttccacctatgagcctgtaaaatcaaaagcaagttagttacttcctagatacaatgggggtacaggcattggttaaatacagccattccaaatgggagacactggccaaaacaaagaggctacaggtcccatgcaagtccaaaattcaatggggcagtaagatcttaaagctccaaaatgttctcatttgactccatgtct

SEQ ID NO: 729311 - DNA, 553 bp, Homo sapiens
gatttgtgaagctgaaacaaattccttcttaatcattttagacatttctgtaataacacatgtacatggtttctcagctcttttgattcattgtacattagaaacattcctttaaggttagtagctataatttcattttgtggtagaagaaaagaactgcagaggagtttgacagctattttaagacaatgggaaaaagtttgtatgtgtttttggatgatatgagcttaatgaaagctttttatgcttcctgctcttgcatgaggaggcaggtctaccaaaaatggtagatcacagattgacaacttttactacttgtcaaagagacttcaggagccacagggttggatggatagttgctgagggcagactgtcttytggagattctctgttaaattttgcactaagagttcctcggagtcaaaatagtattcagagtatcagggagtatgtaaactgattcttttcttcccatttcaacttcatattctgctttattgtagacatcattacagaagttaatggcctgcagaatagctaattatattagtac

SEQ ID NO: 729312 - DNA, 510 bp, Homo sapiens
acacaaacagatggaaacacatcccatgctcatggatgggtagaatcaatgttgtaaaaatgaccatactaccaaaagtaatctacaaattcaatgcaattcccataaaaataccaccatcattctttacagaattagataaaaacatttctaaatttcatatggaaccaaaaaagagcctgcatagccaaagtaagactaagcaaaaagaacacatctggaggcatcacactacctgatttcaaactatactgtaaggccgtagtcaccaaaacagcatggtactggtatcaaagtaggcacatagacccatggaacagaatagagaacccagaaataaacccaaatacagctaactgatcttygacaaagcaatcaaaaacataaagtggggaaagaacacccttttcaacaaatggtaccggaataattggctagccacatgtaggagaatgaaactggatcctcatctctcaatttatacaaaaataaactcaagatgaattaaac

SEQ ID NO: 729313 - DNA, 580 bp, Homo sapiens
tttatacaaaaataaactcaagatgaattaaacctaagacctgaaactttggaatttctggaacataacattggaaaaacccttctagacattggcttaggcaaggatttcatgaccaagaaccccaaagcaaatgcaaaaaaaaaccaattrtaaatagctgggacttaataaactaaaaagcttttgcatggcaaaaggaacagtctacagattaaacagacaacccacagagtgggagaaaatcttcacaatctatacatctgacaaaggactaatatccagaatctacaacaaactcaagcaagtcagtaagaaaaatcagtgccatcaaaaagtgtgctaaggacatgaatagacaattctcaaaagaagatatgtgaaaggccaacaaacaaatgaaaaaatgctcaacatccctaatgatcagggaaataaaaatcaaaaccacaatgtgataccacctgcattcttactcctgcaagaatggccatccataatcaaaaaataaaacagtagatgttggcatgatgtggtgatcggggaattccttctacactgctggtgggaatgtatacta

SEQ ID NO: 729314 - DNA, 673 bp, Homo sapiens
aactggatcctcatctctcaatttatacaaaaataaactcaagatgaattaaacctaagacctgaaactttggaatttctggaacataacattggaaaaacccttctagacattggcttaggcaaggatttcatgaccaagaaccccaaagcaaatgcaaaaaaaaaccaattgtaaatagctgggacttaataaactaaaaagcttttgcatggcaaaaggaacagtctacagattaaacagacaacccacagagtgggagaaaatcttcacaatctatacatctgacaaaggactaatatccagaatctacaacaaactcaagcaartcagtaagaaaaatcagtgccatcaaaaagtgtgctaaggacatgaatagacaattctcaaaagaagatatgtgaaaggccaacaaacaaatgaaaaaatgctcaacatccctaatgatcagggaaataaaaatcaaaaccacaatgtgataccacctgcattcttactcctgcaagaatggccatccataatcaaaaaataaaacagtagatgttggcatgatgtggtgatcggggaattccttctacactgctggtgggaatgtatactagtatagccactatgggaaacagtgtggagattcggtaaagaactaaaagtagatctaccacttgatccagca

SEQ ID NO: 729315 - DNA, 574 bp, Homo sapiens
tcaggttaatttattttaatcaggttataatagtagtagtaatttattattactactatttttataattttgctgacatacaaaaaagtcattctcttcttgctttttcagttgtctacttagcaatcctttatattagattctggtaaaataactggtacakttcctgtcttttgactggaccctagctgatatgatacagacacacatggattaatttcagatacaagccttgtaaaaaacatctttgtgttatgaaatatgttaagtcatcatcaactagcattcattagcaaattaagaatttcttccatggaaagctcagtattctctaaaaactgtgtttgtaatgcctttgggttagtgacaacttcaaatctcattttgctatggttttttttttttttgatacgggttcatcagattagagctattgttttccatcaactcaacaactgagaaacaagatgtgggtaatagtattgactggaggcaaaaaaagttatttgcattttagacacgttttctggggagaaacgactggttattttgagatactggtatggtgtttcca

SEQ ID NO: 729316 - DNA, 526 bp, Homo sapiens
tctataaaaacataccggtaacccatatagatgcataatcccagacactgaagtttgattaaggtgtgtttctgtctgggcttttagttcaaagacaaaagacaaaaggcaaataacaacacccccctccccctagaaaaggggaggggagaaagaaaacagaaaagaaaaagaagaaaaccttaaaggattaacacctagttatttacaacttacagcttttttaaaaaatagatgttttgctaacttttaacttggtttaatagatttaaagagaaatgctataaatatggaattttcaccttaattttaaacatttgctaggttttaataasattttaccatatggccattataaaagaatgctacagaaatgctatttgtagaaaaataacttgtgtgtttctggagttctttttttactcatccttagttatttatgtagcctaattttgttttttagaactagaattagtttttaataattggggaaaatgaagaactaattatttgtagtttacttaga

SEQ ID NO: 729317 - DNA, 627 bp, Homo sapiens
atatgtgagtgatcaagaataatctccagaggttatttatgatcacaaaaagaggctgttaaataaacgtatttaaaacttggaaataaggcaaaaaggtagcttggcaaaaaggaggaaacttcaatgtcatagtgttttttttttttttaaacaggcttaaccaaggattatttaattatctaagggaatgtatctgaatttgacttggctattttctgttaattaaatatctggtctctgacacatgtgtttacttttagatacagccaggaggagaacagatttaacagggactgcttgtgcatttaccagtgacaatgaagtttgaaggaggaaagaattttttattgagcatcacctagatgtcaagaactatacattactcattgagtcacagaaacaactttgagtgataagtgtgattatcttcattttacagaaggttgaagttcaacagrtaaaatgatttgccacattatttagctagtaaatggtagagccaaatgtcaaatcccaaatgttcttcttccaaaacctacactcttttagccatattattctacccccgtagaaaaaccttttttctaacgaccacaaagttatacctgccacttctccaaactg

SEQ ID NO: 729318 - DNA, 619 bp, Homo sapiens
aacccagatacttttggtgtcacttataggttagagctaacatgcagtacacataaacataaagatgagacaataggcatgaggagtactacagcagagagagagggatggggccaagggctgaagaactacctattgggtactatgctgaataccagggaaactgattcagtcatatccaaaacctcagcaccatgcaatatacctctgtaataatccttcacatgtaacccctgattctaaaataaaagttgaaaaaacaaataaaaagaaacacttgagttaagataaggggagttgtagaagccaaggttcttgttaagaggatgaagcctccaagtagcaggctgcagagagagtagttggtaaatctctctcttccraccttaaaaagatccagaaaagacctacaaagggaaggagattctctagagaatgcaaaattcctccacacaagacaatcttgcaaagtcatatcaaaatatgtcaaatgaatatattttggagtaaaatactttgatttctctcaggaaccactgtctgtcttgtggtactataccagaatcaggttggaattagttatcttattgcaacaaagaatctgttttgtccatcttat

SEQ ID NO: 729319 - DNA, 611 bp, Homo sapiens
ctcctaaagtcctgggattacaggtgtgagtcacaagtgtttagtattagtgacagtgcctcagtgttgcagatggtttccagagttcccagaatttttgttttggggatggggtggggagttgcatgggagaaagaaaagtgtctcaactcagaatcttggggagattcaggagataattggataaccagacaayccccacagatatctttagtgattttttaaaaattactttattttcttaatttttttactctttacaactatgttggtattctgtttctagactgtgatttaggttaaacacaaagtttatttagtatttgtttacccaattatatcatctttacacataaaataattttataaaaacattaaaattactaccatttgtaacctgagtatcatgattttatctatcctatgtacaggattcaaaacataaaaagtttcccaaaaaaactttctgtcaaacagtaggctggttagcatcaatactaccatagaaatccagtctggcctgatcttttatcctcagatctctagttgtatctgaaatggaatagataccccaaaagtagaaaatactccttattagatgcattgtgtga

SEQ ID NO: 729320 - DNA, 611 bp, Homo sapiens
ctcctaaagtcctgggattacaggtgtgagtcacaagtgtttagtattagtgacagtgcctcagtgttgcagatggtttccagagttcccagaatttttgttttggggatggggtggggagttgcatgggagaaagaaaagtgtctcaactcagaatcttggggagattcaggagataattggataaccagacaatccccacagatatctttagtgattttttaaaaattactttattttcttaatttttttactctttacaactatgttggtattctgtttctagactrtgatttaggttaaacacaaagtttatttagtatttgtttacccaattatatcatctttacacataaaataattttataaaaacattaaaattactaccatttgtaacctgagtatcatgattttatctatcctatgtacaggattcaaaacataaaaagtttcccaaaaaaactttctgtcaaacagtaggctggttagcatcaatactaccatagaaatccagtctggcctgatcttttatcctcagatctctagttgtatctgaaatggaatagataccccaaaagtagaaaatactccttattagatgcattgtgtga

SEQ ID NO: 729321 - DNA, 611 bp, Homo sapiens
ctcctaaagtcctgggattacaggtgtgagtcacaagtgtttagtattagtgacagtgcctcagtgttgcagatggtttccagagttcccagaatttttgttttggggatggggtggggagttgcatgggagaaagaaaagtgtctcaactcagaatcttggggagattcaggagataattggataaccagacaatccccacagatatctttagtgattttttaaaaattactttattttcttaatttttttactctttacaactatgttggtattctgtttctagactgtgatttaggttaaacacaaagtttatttagtatttgtttacccaattatatcatctttacacataaaataattttataaaaacattaaaattactaccatttgtaacctgagtatcatgattttatctatcctatgtacaggattcaaaacataaaaagtttcccaaaaaaactttctgtcaaasagtaggctggttagcatcaatactaccatagaaatccagtctggcctgatcttttatcctcagatctctagttgtatctgaaatggaatagataccccaaaagtagaaaatactccttattagatgcattgtgtga

SEQ ID NO: 729322 - DNA, 396 bp, Homo sapiens
gtatcaacctatctaattctgacatagctctcatgaagtagtactattattattattcttcatttaataaataatgaaactgaagcatagagaagctattacacactcaagttaccacaactaggcagaggttgtgctagaatttaacatagaaagctgtctacacaatgcaggttaatgagtacaaagggactgttactaagcaataaggggctaaacagaggggtgttgcccttaaggaaacytaaaaatatcccagaggtacaaacagaaagccttgtgtaaatgttggttaccgttattttatgcattctagcaggtactatggaaaaagatagcctcatttagattgtgagtgctataagggtaatgataatatcctatactatacaccat

SEQ ID NO: 729323 - DNA, 502 bp, Homo sapiens
aagcatttggttttccactgggaggactgtcacacaatagcttttaattcagagatgcacatgatatgtctgcaagggtagagaattttgtaagcatcagttgctctcctctctgcttaccctgggaacaggccaggatttttccttgtaactctggtcctgaatgtggcagaagaactgaaatgtcctcaagaagaccggtctaacacgagctgacrgcatgatgtcatgacaagaacaaaagttctgaggagcaccacaaatagagactaaaatcctagctttgttatttacgatagtataataataaggggaaattatttcccttattaatctccctgagccttcgtttccttctttgtaaaatggaaataataggagccactttcacaagattgtgggaagcagtacagcatgatgtttaagagtggatgcaaatcccaatgctgtcacctacttttaaaagactaagttccttgtctgtaaaatggggatcccaaga

SEQ ID NO: 729324 - DNA, 629 bp, Homo sapiens
gtatttagccaagagaaacaaaagcatatatcctcacaaagagctgtacttgaactttcataaaagctttattcttcacggggaaaactggaaacaatccaaatgtccatcaactaatgaatgaatacacaaattgtgatatrcaaaaagggaggtgggcaatgaatgaactaccaatagacacaacacaggtaaattttaaaaacttcgtgctaagtgggagaaagaacacaaaatctgcaaaagatataactccattcatattaccttttttaaattaaaaaaatctactgatagaaagcaaatcagtgatttctaagaaatgggattcaggacatgacactgcagagagacaggagagaacacttgaggtaataaacatgttctaaatcataactgcagtggtggttacaccactgcatatatttgttaaaaaaatgaaacctcaaattgtacacttgaaattgatgggttttaccgtgtctatattttacctcaattaagccgacgaagaaaaaaataatgggctggaaagaaccttaatgtccactcctcagcctcaaaaaagtcatgaatgttaatatccaagcctcaaatatgactgtaataaactttcaaaagatttacct

SEQ ID NO: 729325 - DNA, 567 bp, Homo sapiens
agaaacagctcttgccctgcttctgggcctttgtagaaattaaacacttggcagtgtgaatctataatcccagcactttgggaggctgaggtgggcaggtcacctgaggtcaggagttcaagaccagcctggccaacatggcgaaaccctgtctctactaaaaatacaaaattagccaggtgtggtggcgagtgcctgtaataccagctacttgggaggtggaggcacgagaatcagttgaacccgggaggcggaggttgcagtgagccaaaatggtgccgctgcactccagcctgggtgacagagggagactctgtctcataaaaaaagaaaagaaaagaaagaaaaaaagaaaaggaaactaaactagacaagggccaccaagttaccacgtgacttgaayggctcatcatgatctggggactttctgacccacgtagccataaagtcgtgtgcacagcagtgctgcatcagccagtggaagcaggggataggtgatcaggcccaagcaggtcctgaaggcacaaggaagttacgtgaagtagtggcccaaagcctgtggcccca

SEQ ID NO: 729326 - DNA, 528 bp, Homo sapiens
cctcagcagaggacttcagtaatcaggtggacagcatgagctactctatggacaccagtgagccttttcccagccacccctctcatcacccagtgagctcctgagcgaagtggctgtggtggcagggatggaggttgtgcgtgggctcagcaacatggacttccactgaccaaggccaagctgagtaccaccagcactgtatgcccagtgtgccagcagcagagaccaacactcagcctgataagctccattcctgagtgatcagcccagtgcctgggggcaggtgggtgacactggacagctcccatcatggraggggcgctgaggctccattccccagcgtgttgagcccggtgcctgggggcgggtgggtgacactggacggttcccatcatgggaggggcgctggtttgttctcactgggataggcgcctgccatggatatggatttgtcttccctgcacacagtgcttctgtcgtcactaccatctgtgggctcagaactcctcatctaatgccgtgctgtcc

SEQ ID NO: 729327 - DNA, 603 bp, Homo sapiens
atacgacaacaaaggacagtagtcctcaagagatggcaaacaggtgaacggggccctacagcttcccagctgctcccctgagtttcccaaccatggcccagaaggaggtacctgggcagagcccagtggagtacttggaggaggagacagagctcagagccaaggaggcccaggcagctgggttctcaggacagaggagtggattggagagagctgcatagagggagagccctagagagctgcagaaagttcctccaaggactcagcagagaactgatcagggatgtgtgtgaagagccagaggctagggaagaaattgtccggaaggatcagagagaagtgcccagttctcactcaggactggaggagggctgtccyaaccagcccacatgggaaactcatagttcatgaggccgtggacagagtatacagcaggctcttgcctcactggcggggatcatttgccctagactggacaccgttccaatcccacctcaccccaaaaaatcaagtgtttctaagtaactcaactatgccccaggcaaaactaaaaaataggaatacaaaaatatctggcatctaaaaagataaagattacaatgt

SEQ ID NO: 729328 - DNA, 632 bp, Homo sapiens
ccataagtgctgccctcactctcacccgtaggcccccggcctgtggattctggtttaggggaacggcaccattcaccagggtccagggtcatatgctgtaggactctctgcagtcttgtggtggcatcttccagctgagctcctaaataatcctgagtggtcctgagaagccagatcaccatcccacagggstgggtcctgtggagggacagggtacatggaaccctagtgaatcccatggggtctccccactgccctgtcctttggctgtaaaggcgatgccttggctggaaacagcagtacgtgcaggagcaggcagtaggctgggaaggaaagtgccggtgccggaggaagcagtgctagtggaggggagtgggtccagatcaagaagggttaagtgcagtcatctttcccatcatctcatagttgcacggtccagggatgaagacaggacagttagcaaggagaggggaaccggatcatttaagaccacagctggaagatgtccctgaatgtttgcacaatttgttgaaggttctaagtcccgggtcgaacaccaagttggcccagcctaggctgaggccctaatgtagcttggctaacaagagagaaggaatgttggggcccttcta

SEQ ID NO: 729329 - DNA, 622 bp, Homo sapiens
agtgaaaaataaccccgagacctcagggggtatttgttaactgcaacgtagcctactttcaaagcatggttcctggaccagctgcatcacccgggaatgcggtagaaatgcagattctcaggccctgcccaggcctcccaaattaaggatgctggggtggagcctagcaatctgcgtctaaaaagctctccagggcaatctgaaggctgttcctggccaggmacagtggctcatgtctgtaatcccagcactttgggattacttgagaggaccttcttgccgtgtcctcacatggcagaaaatgaaagggcacacagggggatcgaggcgggtggatcacttgaagtcaggagttggagacaagcctggccaacatgatgaaaccccatctctattaaaaatacaaaaattagccaggtgtggtggtgcatgcctatagtcctagctactcaggaggccgaggcaggagaattgcttgaacccaggaggtggaggttgcagtgagccgagatcgtaccactacgctcccgcctgggcgacagagccagattccatctcaaaataaataaataaataaaggctgttccaactatataggagttcaggatactggcaagggtgt

SEQ ID NO: 729330 - DNA, 590 bp, Homo sapiens
tcacagcctatgccccttccttatttggtgatgttattgcctcctgagacttttcataagcaacttatttgttcttccctgcacttacctatttaggaaagtttcaggttattagcaaatcgggtatcactttaagattgtgaggtcccactccagccaatggatgcaggacatagcagtaaggacaacccaaatgcgtaagggataaatacatctgcttttcctttgttcaggtgtgctctcaccattgttccatctgcgactgagcaccatttctgcaaaaagtaaagatggccttgctgagagatcttttgtctctgtgctgacttttcttcacggcactgattatctttttctaacaattttggtggcaattgtatggggatatactttcctccaggggcgtctctagtcctctctcacgagggggcactcygctgcctcttgcagtggcctcaggggtaagggaccgagacccatccggtgtgaccaataaacccggactctcagcaatgtggaaagaaactggccaacaacctggggtaaaggatcctcacataccgaggtgacgactctgtgcacagaccaac

SEQ ID NO: 729331 - DNA, 598 bp, Homo sapiens
ctcagtatgtaaatatttctataccacttggtaaactagctgctaccctgaatccccttaccatatcttctgcagcctcttgaactcaccacaatcccacaattaaactgttaacctttgggcagagcagagggccccttgttttctgctccagattaaggtcgatgtccattccagttgttccatacctgagatgcattggttgttaagtattttagctatgattcctgatggtagctgtgctattgaaagaagatgacacatggaggggcacccagtcaccaaacaaagaaagggaggattgaaaagaaataaaaggaaaggaaaaagcttcctgaagccaagagcagctatctttcaatgtggtggaataaaacttgcaccgtcactctgyttggggaacaataaatgggaaatctggaaaataaatacaaagtacacacttgttttttgcactaccaataccacatgaagagcagagtaattatgtattcgaatatcattgctgggaaaaactctgtgtgacccaaagttcaatactcaaacacattggttccaggcaggattgcttttcatggtagtataccctttctcttct

SEQ ID NO: 729332 - DNA, 546 bp, Homo sapiens
gcaagtacagttttatttaccctttctaaaatggatgctttttaaaaattgcctaattaccctcactaaaactttctgtatgttaaatagaagtgacaagagtagatatccttgtctgtttctgatatttgggaaaaagatttcattcttttttcatgaagtatgatgttaatcggaagttttatcagagtgaggaagtcccttactcttcctagtttgagtgttttttgtgtgtgtttttttttaacataaatagttgttgaattttgccaagtgctctttctgcatcaattgaaatgaccawgtaaagaagttttcttttattttattagtttggcctattacatactgattttcattttgtgatcccccttgcattcctgagataaatctcacttgatcatgtcatacaatcttttttatatattgctggattggtttgctagtattttgttgagtatttctgcaattatattaataagggatatggtctgcagttttatttccttgtgatgctttgtgtggttttggtatttggtataatgc

SEQ ID NO: 729333 - DNA, 490 bp, Homo sapiens
tcttgcttggagcagatatagcttcttccatcagtgggagcgggaagttgggcgccgtgagatggaagcaaaaaaggcgcagccaacaacaacaacggaactttgtgtcaacactgtcctgtgctgatgtgaatgaaatataaatattgcgcagtaagcccttttttaaaattcttcaaaatattacactcttacattayggatggctaagtggaggcagcagccttctgtttcatcccagcagaagttaatagtagtccaggagctggaaaaccaacttcagaaacacttaatgtttagatccacttagtggttggaaaaaaaaactttagaaaaaaaaaaaaaatgtttaagagctgctccagcaagtggaaacagcaattccttgtaaacaaacctttaacatgaagctatttctcagtggcggaaaacctaacttcataaagtcggatttctgagattttttttcagctcctcggagactacagaa

SEQ ID NO: 729334 - DNA, 586 bp, Homo sapiens
ttaaaaagccaaactttggcccaaagacagccctaaaggcaattttctgtcaaacctatctggccatctaatgtcattaaaatggaaatgctgatggtattttcagtgaaaaaattttcctcttgagataaatatatagctacctctgcaacagctgaattttattaaggaagttccaaaaatattaggttggtgcaaaagtaatggaggtttttgccattaatagatgcttaccttcaaagtcagaatgttcaagtttattctctctctcctttgggcacctggacaaataaaggccaagaaaaccaaaacaaatgataaaatgagaaatgggcaaacaaccttttgttcattcarattcaaaaaaatctcttgaactggtttcaaaatatttgattcagaaaacctaaaccatgtttgtcaactgcattcttgttctcatttaaaaagaaaaagaaaaagacaaaagggcctcctatcttcccatgagtataatggtggaaattcaacctgtatgttttctgattcatttacacttatctcatcaaaatattttgtaagagctgagctctttggtggccaaaga

SEQ ID NO: 729335 - DNA, 649 bp, Homo sapiens
gggatccaaccactggtggtgagaggcttaatgaatgtctgccttcgtcagacccaacagggatctagcatcatgggaggttgcccaagtgccatactgcaggcatctcaaaaacaaacttttgaccatttaacttattctttccagttactcttcaacgtcaacaataacaaccaccaaagaggaaaaaatggctttgcttcttttcttactttaaatattgttctggattttaagatttcaagatatcttccccaaaacattgaattagacaaaccactgacctttttgaacacctttgggttttgcttcttcagggcagcatgttcagcacttttttttttttttttttttttgagacaaagtctcactcttgtttcccaggctggagwacaatggcgcaatcttggctcactgcaacctccacctcccaggttcaagcgattcttctgcctcagcctctcccaggtagctgggattacaggcgcctgccaccatgcctggctaatttttgtattttttagtagagacaggatttcaccatgttggccaggctggtcttgaactcctgacctcaggtcaccacccgcctgacctcaggtcaccgcccgcctcggcttcccaaagtgctgagattacagacataagc

SEQ ID NO: 729336 - DNA, 561 bp, Homo sapiens
tacttgtgtgtatgtttgcctcttctggaatactgagagctttttgaggttacagatatatcctgtgctttttctttgcatagcacataacataaagtccaatacataataggtagtcaataatgagcttaagtaaatgaattgcctctgatttgtgtatgatagttggaatgcctcaagatttttaaatcgtctgcacattgatatcatactatcaacagatcttttgctgttaaatgttcagtaactatcaataatagttcataatgctctaagcaataccgtctamcaatatagctgaatttggcatacccagatacttagttttgtactttttggtgtgacagagactgcacatatgcactaaaatccattgccatttcccactgggcacacacacacacacacacacacacacacacaaatacattttctatcacactttgcaattaaatatggccatatgacttaattgtgaccaacagaatgtgggcagaaaagatgttaatcaatttcaggcccattttatcacaatatcccacaagtgatccttgttgtttt

SEQ ID NO: 729337 - DNA, 587 bp, Homo sapiens
ttttacaaattaaggctatacaatgtcaaagtccatttcatttccctgtgcaaagcacagggaaactaaaagaaggtgaatttgtaaacattggatgtccttatgccctttcaactaaagcaaattaaaccaatctaagtaccttctaatttccttctccttgaaaagaagacatrtactttctgaaattccaagtcactaagggtagagaatgaccttaaattgccaaaaggagatctagtagagccaaatcttgcagaatctttctttgccttctcattaccaggaatgcagctcattctcaataagtgtatttctgatgtaattgttaagttcaaaaaatatgtttccagttatcatttgcttatatacggattcccaacttattctgttggtttaaatacgacttatttcttaatatatactagctagagaaatctgcacagaattatgaaaggactatactagtaaaacgttgatcagagttccaatattatagttctttatttcaatatttctgccactttggcttataaatgtctatagtgatactgtaatgaattctagaagatggttttatagataga

SEQ ID NO: 729338 - DNA, 615 bp, Homo sapiens
ggtgatttttgaaatggctcagaaactgttgttggcagtgcatgctcataaataatttttaatcaaaatgtaaaaaactaaagacagatatgaaaggtcattcctgctatgttgacaacaacaaaagacaagacccaaaccaacaaaaacaaaaacccagcatacttttgaatgggcttagcgaggagtgatggactaaaggaagctttggtgaactgaattccagagagaaacaagccctccataagtgagctagagtcacagcagcttccacacctgcaggaaggctcctgggctgggtacaaacaaggaggagcaggtrcattgtagacaagggatccctttggagggatgaagagaaatcagctgccttacataacagtgagggctagtgaaaaaaagagcttcaaacacaaaaacaaatcctttaaccttacaagagctccatcccagttgcaaactgtgtggggaaaaaaaaaaaagcagtaattgagggtgggctaaagggcaaagagagctcacatagtcctgtgcattcttgcagtgcttggattccaaagtcctgccagaatggaatctaaaggtgaaactgtatgtcaaacaccttcgacacca

SEQ ID NO: 729339 - DNA, 632 bp, Homo sapiens
acattaaactggcaataaaagcagtgtcctaagtggtatgctaagctaaggacaaaactaagaatcagaatctatgtagatggtttgaggatgacattcagaagactaaacttggctgagtgtaagaagagacatgtcttaagttcagatatctaaatgggccaaagtgagaattttaayggatgtacaaggcacaggtcaaaatcttgggtctttaatgtataggaaaaaggaagcacaagagaattccaagcaggaacagcatctcaagttcaaagacaggtacatctgcatgctaatgtagaccagagctgtgtgcctactgccctggattgtcaataaccaataaagtctagacaatatgagctcctttccagggcaagtcagggctctgcagatgggcagcagagcttctctccagggagtgttcttcttactcattgctcactgcacccatgtgcttgctgaggctcctgtggtttgcaagcctgggtgactttttcaaatgatgcacctttttcaaagctgtgagctggaattcatgcagtgtccttttcatttgcacccttgcctgctcagtcttacataaaacctgattacacaaacctattttgctattcaaggtgcaaatc

SEQ ID NO: 729340 - DNA, 577 bp, Homo sapiens
agttggtacaatattggcaaggttatgttcttacaatcaaaacaacctgatatcagccctgagcttggcttatttttgttgttttgcctccagttttaaagaaaagtcaagggaaaaaagaagtcatgaaagtctaaattagtctcatgagagccacacatagcttattttttactctattctgtctctactacttggggactaatcttggttccagaggagcctacagaaagtattcataaagtctttctttctttcctttycttttttctttctttcttttttctttctcttctttctttcctctccttccttccttcctttttctctctctctttcctgaattcccagatataaacagaatttaaaagtcaacgtaagatgataatggtcttttgaggatatttatttatggttgataacaacagcaacttttgccagtggctgtgaatttggggaagagtgcagctgaaaagctgagcaaaaagaagagtgtttatacatgtgggtgaatgcagatgtgtggtgcagggagaagacaaggagggagaaagtgatataaaaatcttcttgctca

SEQ ID NO: 729341 - DNA, 571 bp, Homo sapiens
gcataccaattttacagtatttttctgttttttaaaaaaatttccttgggaattaattctgattgttatgtgaggatgttaagaagcagggcgtagacctttctttaacaggtaggagaggacagtatagggagctaaatgatttgctaaagaccacataaccttcacctgttagtgtggggcaatcaagactcacccctttgaraaatgccagcattccatgacagaagggcaggcaggtaatgtgttttgaatcacctgctcaaagattgtaaagattgttttaaatcttctaagattcttggaagacaaaaagtctacaagcaaaagcaaaagtgcaaaagttgtggaaaaattcatgaaaatgtatcattttagcctcccagagccccaccacccaggctaccccactacttctcggaccatgtcagggatcagtcccctcctctctgcctgagtggactggaggctgcctctgaacccggtcccacctcacccctgaaaaacttatcagtctaacccttgctcgccttgcctgggtgtcctgtatacctaaagggaggcacagact

SEQ ID NO: 729342 - DNA, 571 bp, Homo sapiens
gcataccaattttacagtatttttctgttttttaaaaaaatttccttgggaattaattctgattgttatgtgaggatgttaagaagcagggcgtagacctttctttaacaggtaggagaggacagtatagggagctaaatgatttgctaaagaccacataaccttcacctgttagtgtggggcaatcaagactcacccctttgagaaatgccagcattccatgacagaagggcaggcaggtaatgtgttttgaatcacctgctcaaagattgtaaagattgttttaaatcttctaarattcttggaagacaaaaagtctacaagcaaaagcaaaagtgcaaaagttgtggaaaaattcatgaaaatgtatcattttagcctcccagagccccaccacccaggctaccccactacttctcggaccatgtcagggatcagtcccctcctctctgcctgagtggactggaggctgcctctgaacccggtcccacctcacccctgaaaaacttatcagtctaacccttgctcgccttgcctgggtgtcctgtatacctaaagggaggcacagact

SEQ ID NO: 729343 - DNA, 571 bp, Homo sapiens
gcataccaattttacagtatttttctgttttttaaaaaaatttccttgggaattaattctgattgttatgtgaggatgttaagaagcagggcgtagacctttctttaacaggtaggagaggacagtatagggagctaaatgatttgctaaagaccacataaccttcacctgttagtgtggggcaatcaagactcacccctttgagaaatgccagcattccatgacagaagggcaggcaggtaatgtgttttgaatcacctgctcaaagattgtaaagattgttttaaatcttctaagattcttggaaracaaaaagtctacaagcaaaagcaaaagtgcaaaagttgtggaaaaattcatgaaaatgtatcattttagcctcccagagccccaccacccaggctaccccactacttctcggaccatgtcagggatcagtcccctcctctctgcctgagtggactggaggctgcctctgaacccggtcccacctcacccctgaaaaacttatcagtctaacccttgctcgccttgcctgggtgtcctgtatacctaaagggaggcacagact

SEQ ID NO: 729344 - DNA, 586 bp, Homo sapiens
gtaggaaaaagcaaaagcatgtgctacacaagctcaactgtcatattagctactaaacacatatcccttcttttcttgatattattaactataggttttctaataaattcttagcaaccactgcgtctaagcagttttgacaaaaagaaggcttattgctaaacaccttaaaaacatttaccaaggtaataaaagaaatgtcattccctcctactgaatgtttgggcacaaaagaggtatttttataacgcagttcatgatttaccatatctatagtgtccaaaaaaagcacaatgaaaaggaagcatttttccagtggtttgacaactgtttgaatcaacggttatgcttttattacactagtggccaactgctcacttttaaaagcacaggaggggagggaaactgggaaagagattggggrgaagggtaagtactcttttctaaagatattttctaaatatccttttctgtgcaactacagttaagtaatttttttcctgtgcatcaatctgtagccaacttggaggctacatcctgaatgctctaaacaattaagctttcccttaatttttcctcaaatttt

SEQ ID NO: 729345 - DNA, 632 bp, Homo sapiens
atctccagtacggctttagctctatatgtaccttgacgtttataatgtagagtcgtggcccttctcattaaacatttttaagtagttttaagaaacaggtaatgaggcagggtgcagtggctcaaatctgtaatctcagtactttgggaggccgaggcgagtggatcacctgaggtcaggagttcgagaccagcctggccaacatggcgaaatcctgtctctactaaaaatacaaaaatttgytgggtgttgtggcatgcgcctgtaatcccagatacttaggaggctaaggcaggagaattgcttgaacccgggaggcagaagtgtgccattgcactccagcctgggcaagagcaaaactccgtctcaaaaaaaaaaaaaaaaagaaaagaaaaaaaaagagaaacaggtaatgagaagattgtagtgtgtccatccatttaactacatttctacagatttctctttcttcctaatgatctaggttaaggcctatttttttttttttctgatttgcctcatgagtggcattaagagtaacactctagttgacaggaccggctaatttgcagggttcagtgaaaaatgaaaatgtggcgttccttcctgacaaatttttaacaattttaaga

SEQ ID NO: 729346 - DNA, 632 bp, Homo sapiens
atctccagtacggctttagctctatatgtaccttgacgtttataatgtagagtcgtggcccttctcattaaacatttttaagtagttttaagaaacaggtaatgaggcagggtgcagtggctcaaatctgtaatctcagtactttgggaggccgaggcgagtggatcacctgaggtcaggagttcgagaccagcctggccaacatggcgaaatcctgtctctactaaaaatacaaaaatttgctgggtgttgtggcatgcgcctgtaatcccagatacttaggaggctraggcaggagaattgcttgaacccgggaggcagaagtgtgccattgcactccagcctgggcaagagcaaaactccgtctcaaaaaaaaaaaaaaaaagaaaagaaaaaaaaagagaaacaggtaatgagaagattgtagtgtgtccatccatttaactacatttctacagatttctctttcttcctaatgatctaggttaaggcctatttttttttttttctgatttgcctcatgagtggcattaagagtaacactctagttgacaggaccggctaatttgcagggttcagtgaaaaatgaaaatgtggcgttccttcctgacaaatttttaacaattttaaga

SEQ ID NO: 729347 - DNA, 632 bp, Homo sapiens
atctccagtacggctttagctctatatgtaccttgacgtttataatgtagagtcgtggcccttctcattaaacatttttaagtagttttaagaaacaggtaatgaggcagggtgcagtggctcaaatctgtaatctcagtactttgggaggccgaggcgagtggatcacctgaggtcaggagttcgagaccagcctggccaacatggcgaaatcctgtctctactaaaaatacaaaaatttgctgggtgttgtggcatgcgcctgtaatcccagatacttaggaggctaaggcaggagaattgcttgaaccygggaggcagaagtgtgccattgcactccagcctgggcaagagcaaaactccgtctcaaaaaaaaaaaaaaaaagaaaagaaaaaaaaagagaaacaggtaatgagaagattgtagtgtgtccatccatttaactacatttctacagatttctctttcttcctaatgatctaggttaaggcctatttttttttttttctgatttgcctcatgagtggcattaagagtaacactctagttgacaggaccggctaatttgcagggttcagtgaaaaatgaaaatgtggcgttccttcctgacaaatttttaacaattttaaga

SEQ ID NO: 729348 - DNA, 632 bp, Homo sapiens
atctccagtacggctttagctctatatgtaccttgacgtttataatgtagagtcgtggcccttctcattaaacatttttaagtagttttaagaaacaggtaatgaggcagggtgcagtggctcaaatctgtaatctcagtactttgggaggccgaggcgagtggatcacctgaggtcaggagttcgagaccagcctggccaacatggcgaaatcctgtctctactaaaaatacaaaaatttgctgggtgttgtggcatgcgcctgtaatcccagatacttaggaggctaaggcaggagaattgcttgaacccgggaggcagaagtgtgccattgcactccagcctgggcaagagcaaaactcygtctcaaaaaaaaaaaaaaaaagaaaagaaaaaaaaagagaaacaggtaatgagaagattgtagtgtgtccatccatttaactacatttctacagatttctctttcttcctaatgatctaggttaaggcctatttttttttttttctgatttgcctcatgagtggcattaagagtaacactctagttgacaggaccggctaatttgcagggttcagtgaaaaatgaaaatgtggcgttccttcctgacaaatttttaacaattttaaga

SEQ ID NO: 729349 - DNA, 612 bp, Homo sapiens
atcaagtaattacagttagttttaatattgatgtttaacacacagaccttctatttttaactaatgagggcctctaaagttaagttctgagctcttgacatgacaacggaggtagctagaattgttctagatttaagttcccatttctccaagatgtgttggtttctaaaacgacagggaatggtatttagagaccatgatcaaggtattatggagattcaatcctagagaactgatgatagtttctaggccttttcagtagacaaagsaaggaaataggcatttcttaaaagggaatgcagcataaagcctgagttcatatcagtaattcctattcgaaattaaattgtttctatctcttttctcttgcactgaaaattttcagttcctaatgacattaacatattttacttattttattctactaataataaaataacaatcctaatgatacaggaattaaaaagaaattacttaggcagagagtgagggtatggaagtcctcgataaggttttccttttaatgaaaagcagccccaaattatttttccttctaacaaaaaaaagcagcctgtaaaatcgaactgcagacatagatgctggcagttgtgc

SEQ ID NO: 729350 - DNA, 607 bp, Homo sapiens
aaatgcattgctgaaagtcactcagccaaggagaaatggagccaatatttgaagttaggcagccgctgttcagagtccactctcctaagcattactctctgctgctttagacatagcatggccagagaaaacatgggacattcagttaactatcagtaaaatataaaccaccagggataggttacttttagcataaatatgttccaaatattacatagtgaatacctataccaaaaaaawtttatttgaaattcaaatgtaactgagtgccctgtattttatttgctgaatctggcaaccccaggaagactgtcacttaccctgacttttctgaataatgttccttattccacatggtctacacaaccttcactagtggcttggcaattaccaaggctatctcctaatccatcaccctaggttgctttagctgcctgcaaaaatagcaacactttagagtaagttctcaatattgtagatcagtggttggcaaactttctctgaaaagagccagatagcaaatattttaggctttgtgggtcatacaatctctgttgcaactattaaactctgccaatgtagcaggaaattcatagacaatatatga

SEQ ID NO: 729351 - DNA, 648 bp, Homo sapiens
ttattttatattttaaagtaactaaaagagtggaattggaatgttcctaacatgaagaaataataaatgcttgaggcttgaggtgatgaatacctcaattacccttatttgatcgttaaacattatatggctgtgtcaaaacatcacatgtagcccatatatatatatatatgtgtgtgtgtgtgtgtgtgtgtgtgtgtgtgtgtgtgtgtgtatatatatatatatataactattacatgccagaataattaaaaagtaaaattaaaaaaaaatgaaacataagttccagaacagtggargatgatcaggataagttctctagtctctgatttttattattctaataatcaatctgaggccccttcaattgcagtcataggcccgggaaaatgaaaaagggagtaagagttgatatgcaattgggatgtaacaaaacaagttcatttgtttgcatgttggttaaaatccttgtaagcatttctcaaccccagacatttctacggatttatcttaaagtgagtttgctgtatactttttacctcagtatcttgaaccaaaaaatattcttaaaatgtcccggttgggactgacaaactcattttccattcaaaaggtgtgaagtttttatgtatgcacagacgtatt

SEQ ID NO: 729352 - DNA, 602 bp, Homo sapiens
ggagagacaagctcctgacggtccacacctgttaacattagaagtgttcattgaatacaggccccccagggaagaagcttcttcttgggcatgcgtgttaagagacataatgaccaagtatgacgttccaggggcacgcgccactggaaaaaggaaaaaaaagcctcagatgggcatacctgtaactccctaaatacacacgtgctgaattccaaagggyaaagaaagcactgtccatgcgggaagcccaccctaagggaagaatcatgggaaagaggcggcctataaagtcttaggatcaaggttaaaggctctctttttctttgcccttttttgctatcttttttctctctttgatcttcagggcgcccacttggacctcttataagagctcttttctttctttcctgttctgaagtattttttaataaacttccactcctgctctgaaacttgcctctgtctgaaacttgcctcagtctctttttctgcagaatgttcctcagttgaattatttcttcttgaggaggcaagaactgaagttgctacagactcatacaaataggccaccagtaactctgggtaacttggatctcttccac

SEQ ID NO: 729353 - DNA, 620 bp, Homo sapiens
aaggaattgaagtcaaggaagttgaatgatttactcaaggtcaacaagctgcttcgtgactaaaccagattatttaaataaataaatcaaccaaaggaacaaagcaactctataaaccctaggtttttagggtgtggtagatacacattaactgtgattattttcattctactttttcagcaagttgtttctttttccattcttaatgaaaacatacattgtaaaagtacacttcagtacagtacaaatgacatttaatatcagagaaaaattattccattgcccttttaggtttggctcagttttgaatactgcctggtatgcagtggatgcaataaaaattcattgaatgaagaaatgcaatattttaagcaatcaaatcttcttgattctgattgtaacytattttcaacagcttgaaagaatgtaagaaatgcaattcaacataattatttttgttagtttaatgtgagattatcacaacagacaaaatctctatattcagccttttctaaaactacgatttgatatgaatgtggtctttaaagactacacaatttgaactgcaatataaatgtgccagggggatcagcaatggggaaggaaaacattttttaagt

SEQ ID NO: 729354 - DNA, 577 bp, Homo sapiens
ctcccattctgtaagtggtgtatttactctgttgttagtttcttttgctgtaaagaagctattgagattaattaggtcccatttgtcaatttttatttggttgcaactgcttttgttttcttcatcataaaatctttgccaggtcctatgtcaggatggtacttcctaggttatattccagggtttttatactttcaggttttgtatttaagtctttaatccatcttcagatgattttgaatatggtgtaaagaacaggtccagattcaacattctgcatggggctagtcagttattgcaacagggagttgcaatatttattaaacaggcagtcctttcctcattgcttatttttgtcaactttgtcagggatcagatggttgtgaaacaggagagttctgttatcccttttgcagggtgttcaacaggggtgtrgctcacttcttcggtgccccactgctcaaacccctaggggaaccgtgcagacaagcaggtgaagaggttgtggggaggatttttgggcttcgaccccatggcagtatctaggggtcagtgtttacaaagcctgaaacccaaa

SEQ ID NO: 729355 - DNA, 593 bp, Homo sapiens
cagctcaatcagactctacaccttgtcataaggacagatggctttttgtatcccgggtccttgccctagtgtaccagaaaaatggaatcacacatgggcttgcaggatgagtgcaaggttttattaagtggtggaggtagctctcagagaaatggagatagatggggagtcagagggggatggattaggaaggtggtcttcccctggaattggattgcccagcagccagactctcctctgatatccccaagctgaattccccttggcatccacatcatttcaccattcctggtctgctggtgtctgctgaagtctgtcagtgtgttctgctcctctsaactccagctgcttgtgtctgtacccactgtggtcttgagtttttatgggcacaggatggtggcatggcgggccacagtggtcttggaaaatgcaacatttgggtgtaaaaacaggagtgcctgttctcacttaggtccgtgggcacaggcctgagggtagagccctcaccaaggaccccatccttctctatccagcacttccctgctcccatcccatgtcagttgcaggtgtgcagcattatttctgagctctct

SEQ ID NO: 729356 - DNA, 646 bp, Homo sapiens
gcttgtggaagaaaacatcgtggtaattgtatatgctaatggagtacctacaggacattgttatagtgatggaaattctatttcatgcaaacactaaagcagtcctccctttatatcttggtaaagctgattgacagagtataaaattgctttttaatccaatttaggaaacaaaatgtgtagtgggttttagcattttaaaatgcttgaagcgtggaagcagaaattcaaaataccctggcagactgtctatgatattatatatcaacaggacattttagaaatattatttcgatataagtttctttgaattgagtcatattttgttccaaagcttttttggattagagtaaggagaatgtattgtggaaatatgacccagaggaaaatgaacagaaaccagtttttagcmacatttctcaggaataggaagtttaagtctctttctttaacaaaaagcactgcagctgctttccccaagactactcccatacaggccacccccaccaggctcattacctctactgaggtcactcttattaaggccgctgccacctaggccaccagatctgttggcctcttctcaaacctcatcctatttcatctctcctcagcatttggtcccactgaccaactgctttttatg

SEQ ID NO: 729357 - DNA, 571 bp, Homo sapiens
tttttttagatggagtttcactcttgttgcccaggctggagtgcagtggtgggatcttggcttactgcaacttccacctcccaggttcaagctgttctgcctccgccctccaagtagctgggattgcccaccaccatacccagctaattttgtgtatttttagtagagatggggtttcaccatattggctaggctggttttgaactcctgatctcaggtgatctgcctgccttggcctcccaaagtgctggaattacaggcgtgagccactgcgcccagcctccagcagcttctaagttatatttattttcatagttctaaactccagtcaagattggcccttgagtaattcaggmtaaatgttaccacatcttcttgtttttctctctgagaaaagccagctaaccagatttttatataaaatttcccaactttaaaatatatgttaggcctttttattatttatttatttggaacagggtctcactctgtcacccagactggaatgcagtggcacgatcatggctcactgcagccttgacttaccaggctcaagtgaccctctcacttc

SEQ ID NO: 729358 - DNA, 441 bp, Homo sapiens
tgtagcataaggcctcttctggcccaaacaatcttccctacctcttaagatctgttcttcctaccattaaaattagcatattgtctttataaaatccctgctaaaaagtacctaggaaagtttctcccatgcaaaaaataattatcattactgtgttggccgctccgtttgtcagattttcaaagtgagagcaaaacccaaagagataggagtggtaagaaacaagaagctagagctagaaaaggaagtctgaaaagagaaggataagacttgaggcaaaattctgtctgctttygactgatgattctcggttctccaaagaaatgcaacctttgttttgtgcttacttacttcagtgacaaagtgaggactcctgagttaatggtctgcaaaagcattgaagattaagagcaatagacagaattcctagcttggggtggg

SEQ ID NO: 729359 - DNA, 551 bp, Homo sapiens
aagggggctgttgggcacctggaggaggtggaggaggagaagaagaaaggggtctgggaaaggatccggttcaaattaagttctcaagcgctggtggaaggtttagctacaggtcacggagaagatcagggaagcaacaggacacgcggggcaagggagcgtgaggcttaggagcaattagagggagacaaaaaggttctgctatccgccaaaccttcttcggtctgggccctcccttagcaamcctggggctttatactccctctccaccaatccctgatgaccccggtggtgcctcacaatggacaatgccaagtagcgcccgcatcattccaatgacccctcccccatctcagtctcccacactcccactcctcgcaaggacaggtcctctctggaaccttcacaaacctgatttctggtcctccccaaccagctccctgtccctgcttctgggcgctccttccttcctgagctcccagggttcctcaaggtcacttttggcgacaaaacataaaaaacaaatgatggcaggatggcaggaagaacct

SEQ ID NO: 729360 - DNA, 590 bp, Homo sapiens
ttcaaattaagttctcaagcgctggtggaaggtttagctacaggtcacggagaagatcagggaagcaacaggacacgcggggcaagggagcgtgaggcttaggagcaattagagggagacaaaaaggttctgctatccgccaaaccttcttcggtctgggccctcccttagcaaacctggggctttatactccctctccaccaatccctgatgacyccggtggtgcctcacaatggacaatgccaagtagcgcccgcatcattccaatgacccctcccccatctcagtctcccacactcccactcctcgcaaggacaggtcctctctggaaccttcacaaacctgatttctggtcctccccaaccagctccctgtccctgcttctgggcgctccttccttcctgagctcccagggttcctcaaggtcacttttggcgacaaaacataaaaaacaaatgatggcaggatggcaggaagaacctcatacccaagcagagtgccaggttttacagcctccgctcagccattcatatcctaagcaacaaaacatcagcagggtgcggaaggtcccgatagtaaaccatctccat

SEQ ID NO: 729361 - DNA, 590 bp, Homo sapiens
ttcaaattaagttctcaagcgctggtggaaggtttagctacaggtcacggagaagatcagggaagcaacaggacacgcggggcaagggagcgtgaggcttaggagcaattagagggagacaaaaaggttctgctatccgccaaaccttcttcggtctgggccctcccttagcaaacctggggctttatactccctctccaccaatccctgatgaccccggtggtgcctcacartggacaatgccaagtagcgcccgcatcattccaatgacccctcccccatctcagtctcccacactcccactcctcgcaaggacaggtcctctctggaaccttcacaaacctgatttctggtcctccccaaccagctccctgtccctgcttctgggcgctccttccttcctgagctcccagggttcctcaaggtcacttttggcgacaaaacataaaaaacaaatgatggcaggatggcaggaagaacctcatacccaagcagagtgccaggttttacagcctccgctcagccattcatatcctaagcaacaaaacatcagcagggtgcggaaggtcccgatagtaaaccatctccat

SEQ ID NO: 729362 - DNA, 528 bp, Homo sapiens
tgcccaggctggagtgcagtggcatgatctcggctcgctacaacctccacctctcaaccgcctgccttggcctcccaaagtgccgagattttgcagcctctgcccggccgccaccccgtctgggaagtgaggagcgtctctgcctggccgcccatcatctgggatgtgaggagcccctctgcctggctgcccagtctggaaagtgaggagcctctctgcccggccgccatcccatctaggaagtgaggagcgcctcttcccggccgccatcccatctgggaggtgaggagygtctctgccaggctgcccatcgtctgagatgtggggagtgcctctgcccggccgcgaccccgtctgggaggtgaggagcgtctgagaagtgaggagaccctctgcctggcgaccgccccgtctgagaagtgaggagcccctccgcccggcagccgcctcgtctgagaagtgaggagcccctccgcctggcagccaccccgtctgggaagtgaagagcgtctccgcccggcagccacc

SEQ ID NO: 729363 - DNA, 559 bp, Homo sapiens
agaagaaaggggtctgggaaaggatccggttcaaattaagttctcaagcgctggtggaaggtttagctacaggtcacggagaagatcagggaagcaacaggacacgcggggcaagggagcgtgaggcttaggagcaattagagggagacaaaaaggttctgctatccgccaaaccttcttcggtctgggccctcccttagcaaacctggggctttatactccctctccaccaatccctgatgaccccggtggtgcctcacaatggacaatgccaagtagcgcccgcatcattccaatgacccctcccccatctcagtctcccacactcccactcctcgcaaggacaggtcctctctggaaccttcacaaacctgatttctggtcctccccaaccagctccctgtccctgcttctgggckctccttccttcctgagctcccagggttcctcaaggtcacttttggcgacaaaacataaaaaacaaatgatggcaggatggcaggaagaacctcatacccaagcagagtgccaggttttacagcctccgctcagccattca

SEQ ID NO: 729364 - DNA, 594 bp, Homo sapiens
tgcatgatgctgaggcttgggctatgaatgatcctgtcatccaggaagtaagcataatacccaacagtttttcaactcttactctccactgtccctccccactctaggaggtcccggtatctattgttcccatctttacatccatgtgtgtactcaatgttttttttttgttttgttttgagatggagttgcgctctgtcgcgtaggctgaagtgcaatcatgcaatcttggctcactgcaacctccacctcccgggttcaaatgattctcctgcttcagcccctcgagtagctgggattaaaggcacctgccatcatgcctggctaatttttgtatttttgtagagacagggtttcgccatattggccaggctgatcttgaactcctgacctcagatgatccacctgcctcagcctcccaaagtgctgggattacaggtgtgagccaccrcacccaggcaatgtgtactcaatgtttagatctcatttataagtgagaacacgcagtccttggttttctgttcctgggttaatttgcttaggataatgaccgccagctacatccatgtcagagcgaagaacatgatttcatta

SEQ ID NO: 729365 - DNA, 580 bp, Homo sapiens
actcagttggatgggcaggtagtattccagtggacatcggggaagatcaccaggacgtcagcaattgggcaggctttagggtgagctcttgttttgttagagtagggccaggcagaatagagacttggattttgatcaggactgagacagagtgtgcaaatagaaacttagaccagggaaccaacgtaagrgagacagagaagagtaagtaggagacctgaacttttccctctatacttgatctcatataaaaatggcggtgaaggaatctacccatgtaacaaacttgtacatgcatcatgtgactctaaaatgaaagttgaagttactttaaaaaattgcagtggaggagatcatgggacatcgggccagacagaggcaacccagcggcccggcagtcaagatagtagggccgccaggtctgagagcagggctacaggccaactccccagcatgtaggggtggagaggggccagtcacagccacgactggcaggctgagactgagacctaaggtgaaagggactggcggagccaactaaggaaaggtaggggattgaggggctaggagccagaaccta

SEQ ID NO: 729366 - DNA, 623 bp, Homo sapiens
caggtactgtcatctagttccgaaacaagcgcattttttcagctttaaaaacaacacgcaaaatacaatagatccagtatgtgcatggttccctgttattgcatattctttcttccctaagtcaaatcactaatacctgtacctctggaacgatgtccagtccttaagctggtggatctcaaagttacttaacgcacatacatgtgcgtgcaaacgcacacataccttagtagctgaagtcagaggaaaggggagtacaactgtgtcctacctgcaggcagggacgttrgtatcaccccctcttccagcctttggggacctacatcataaatgtttctttcatcatatatccttttcagcaaaaaagttttcagaaggtgctcctaactcatgtaatttattaaatatataaaatactcaagtaacatgcatttcatggacaagaaatatattttttacaagtattagagattttcttaatggacattttcataatttcttcctgcatcccaataaatcttgctgtgcacctgccagagggcatgaaactcactaagacccttttgggaattaaaatctgaaacaagtcatttctgtcccctgtccttcccccaaatttagag

SEQ ID NO: 729367 - DNA, 623 bp, Homo sapiens
caggtactgtcatctagttccgaaacaagcgcattttttcagctttaaaaacaacacgcaaaatacaatagatccagtatgtgcatggttccctgttattgcatattctttcttccctaagtcaaatcactaatacctgtacctctggaacgatgtccagtccttaagctggtggatctcaaagttacttaacgcacatacatgtgcgtgcaaacgcacacataccttagtagctgaagtcagaggaaaggggagtacaactgtgtcctacctgcaggcagggacgttggtatcaccccctcttccagcctttggggacctacatcataaatgtttytttcatcatatatccttttcagcaaaaaagttttcagaaggtgctcctaactcatgtaatttattaaatatataaaatactcaagtaacatgcatttcatggacaagaaatatattttttacaagtattagagattttcttaatggacattttcataatttcttcctgcatcccaataaatcttgctgtgcacctgccagagggcatgaaactcactaagacccttttgggaattaaaatctgaaacaagtcatttctgtcccctgtccttcccccaaatttagag

SEQ ID NO: 729368 - DNA, 623 bp, Homo sapiens
caggtactgtcatctagttccgaaacaagcgcattttttcagctttaaaaacaacacgcaaaatacaatagatccagtatgtgcatggttccctgttattgcatattctttcttccctaagtcaaatcactaatacctgtacctctggaacgatgtccagtccttaagctggtggatctcaaagttacttaacgcacatacatgtgcgtgcaaacgcacacataccttagtagctgaagtcagaggaaaggggagtacaactgtgtcctacctgcaggcagggacgttggtatcaccccctcttccagcctttggggacctacatcataaatgtttctttcatcatatatccttttcagcaaaaaagttttcagaaggtgctcytaactcatgtaatttattaaatatataaaatactcaagtaacatgcatttcatggacaagaaatatattttttacaagtattagagattttcttaatggacattttcataatttcttcctgcatcccaataaatcttgctgtgcacctgccagagggcatgaaactcactaagacccttttgggaattaaaatctgaaacaagtcatttctgtcccctgtccttcccccaaatttagag

SEQ ID NO: 729369 - DNA, 551 bp, Homo sapiens
attcattctttttttattatttatttttgggacacggtcttgctctgtcacctaggctggagtgcagtgatgccatcatggctcactgcagcctctacctcctgggctcaagtgatcctccacctcagcctcccgagttccagcaactacagccatgcgccaccacacctggctaattttttaatgtttttgtacagacagagtctcactgtgtcrcccaggctgcagtaacactactttctaatgaactgactgctaagctgttgacagtctccatttgtgggctctgatggctccaaagataggccatgaacgtggctaaatcaacaagtaattttcccagaattttctgatagacgattatggactcaaaaggagttattctctgaccaaggtgcccatttatgggtgtaaaagacaaagagagacgtgacaggcagcttctcagacggtcggtccccgtgagccctggcattcacactccagtaccggcctgtcccacattcaccaggttgatccacaggaccaagagaattgttgcacatggtgca

SEQ ID NO: 729370 - DNA, 533 bp, Homo sapiens
caggctaggtcaaagtgcccacacatagaaccacataacactgtgtcctttttcttcataactcatattagtttttgccttatttgaaatttataaaaattagtgactatcttttcttttctttctttctttttttttttttgagaccgagtcttgctccgtcgcccaggctggagtgcagtggtatgatctcggcttactatgacctctgcctcctagcttcaagcaattctcttgcctcagcctcccaagtagctgggattacaggcacccatcatcatgcccggctaatttttgtatttttagagacagggtttcatcatgttggccaggctggtctcgaactcctgatctcaagtgatctgcccaccttgrcctcccaaagtgctggaattacaggcttcagccagcatgcccggcattaatgactatcttttctaataggctatatgtttggtaagggaagtgcctggatctgttgtctcaccattatttccccacagaatactggctgaatgaatgaacgaatggat

SEQ ID NO: 729371 - DNA, 598 bp, Homo sapiens
caatacagtgtgagaagtgctatcacagaaggacagagaaagtgagattttaatacagaaaccagtcacctgactcttccagcaatatcaagaaagcctttgcagaaaaggtgatgtgcaggctacttcttgaaggatgactaggagttttccaggccaaggaatcagtacagtcaaagtcagagagacatgaataaggaaggttgcaagatcatggtgcctaaagcaagtgggaagtggtagcaaggagccataggttactccagggccctttgatcatgtcccaggyttatgagaatataaaattgagtcttatttagtggaggtgggacaggagtgcaggggagataaattgtgtggctcatcagaaacactgaccaatcgagaaattcatccagacatatctaccaacacttttgattgtaaagtgtcatcattcctataatgaaagggcatttgtcaggctcagctgggtccagggcctcaaaaatggcaagaagacctggtctttctccttccatctctgggctgtcccggccagctctgaggagtaagctggggctgaactgcactcagcgtcgtgtgagttacatgacct

SEQ ID NO: 729372 - DNA, 557 bp, Homo sapiens
aggaagttcaataaaattctggacttttccaacttcttcttctttttttttttttttaatatagaaacctaaactctttaaaaaatacattgtttgggccactcgtgctttattgaagtcctgggagatggcttggcactgaggtggaacggtcccgggcaggcaaggcaggaggctggggcagacagcctgggttcacatcctggctctactactagctgtgtagttttcagcaattacctaacctctctgcgcgtcagtttcctcagctgcagaatggagctgaaaatagagtacctcytcctggagttgttgagagaattaaaagactaatacatgtgaagcacttagaaccatatctgtaagggctgtttaagtgtttgctgtttattattcattgagtccctctgtcagatcctgtccacaccgtgttccatcagctggagtagctggggttggggtagggaggcagggttggtgtagtttacacctgcagatagccaggccagtgggccctgcattcgacatttaatttctttctgattccacaactaatg

SEQ ID NO: 729373 - DNA, 640 bp, Homo sapiens
ggcgagaccctctaaatgaccagccccctcttcctggctcagatgatctggagcagggtccacacggatgagcttggctgtcagtctagtggctttgttgtgacagagcctcaggtggcaccaaggcagggcctggcgctcactctgtgctgtcctgggaggctgcgggtccgtgcacactcctggaactggttcatcttcatcccttggatatgtcgcccttaggtggttgtcctgaatggtggtgcctcgctcttctctgctctggccacggtgctgtgtgaggccgggggtaagtgagctctgtggcctgccccgcactgtgagcctcattgtgcttgcagggttcccagttgcctggcctcaagggctgcartagtatgctttcgggcacaatagaatatactagactgcagggggcttgaataagtggcttgacaaagcacccgggggtcagcagttccaggggaggttagtttgatgtcagggtcctgggctttctctctgccatgaccttggctgcttcatgctcataaggtggctgtcgcgtcctcacgtgacagtgtgtcttagagcaggaagaaagggatgtggtcgtgccgtgcctgtctcttttttatcaggagatggggatggggat

SEQ ID NO: 729374 - DNA, 577 bp, Homo sapiens
gaactccaagaagaggcctcaggatcccttaagttagggctgagtggatggcaaattggcctctttgctgtttcctttacctccagagtcgctccagttttattcattcattcatttactcattcatgctctcattcactcagcacctctggagccccttacacacagagtgtgccaaacacctmtggatatttaaatgttgggctttttcattaggtttactgtaagcaaagcatttgtggccaaaatacctttgggaacacttggagcagatcatcctcaaggcacactggcccatgcctgtaatcccagcactttgggaggccaaggtgggaggattgcatgagcccaggagtttgagaccatcctgggcaacatagtgagactctgtttctacgggaaagaaaaagaaagtggggaccagatcatgtgtgtagtctgtgaatctcaccttcaggggttctaacagttccggctgtttgttcagaaccttcagcccagccaagccctttccattagccttctcttcttgtcctcacaaagccttgaggagttgatggagcatggattgtgactc

SEQ ID NO: 729375 - DNA, 645 bp, Homo sapiens
tataaggccttatattagttgtttattactgtgtaacaaattaccacaaatttccaggcttaaaatgacacacctctcaacctctgggtcaggaatacaggcacagcttagctgggtcctctacttcaggatctctcaaaaagctgcagccaacrtgtcagctggggctgggatttcatctgaaggctggactagggcaggatctgctcactctagtgttggtggaatttagttcctgagggtttttcgactggggtctcagtttcttgcaggctgttgactgcaggtggtcctcagctccttgtcacatgggtttctccaccatgacactccggcaaagctagcaagggtgagtctgctactgagtaacctaactgcagaagtgatacgccttctttgctgtattctgtcggttagaagccagctactatgtctggcccacactcaaggggagaggattatacaagagaatgaatatcagggggtgggataatcggaggccaaggtaaggttggcagccacggtctttcaatccccttcctgatcccatgtagtaggtataatctgctctcagtatctgtgggttccacatccacagatcaaaaatattcagaaaaaaataaatcataaagagtaacaacacaa

SEQ ID NO: 729376 - DNA, 623 bp, Homo sapiens
ctttttcttgctgatttgtttgagttccttgtagcttctgtatattagttccttgttggatgtatagtttgcaaaaattttctccccctctgtggatttctgtttactctgctgattatttcttttgctgtgtagaagctttttagtttaattaagtctcatctatttatctttgtttttgttgcatttacttttgggttcttggtcatgaactctttgcctaagtcagtgtctagaagagtttttccaatgytaccttctagaatttttatggtttcaggtcttagatttaagtctttgatccaccttgagttgatttttttataaggtgacagatgaggatccagtttcatttgtctacatgtggcttgctgatgatcccaggaccatttgttgaatagggtgtcccttcctcaccttatgtttttgtttgctttgttgaagataatttgctgtaagtatttggctttatttctgggttctctcttctgttccattggtttatgtgcctatttttataccagtaccatgctgtgttggtgactatagctttatagtatagtttgaagtcaggtaatgtgatgccttcagatttttttttttgcttagttttgctgtagcta

SEQ ID NO: 729377 - DNA, 623 bp, Homo sapiens
ctttttcttgctgatttgtttgagttccttgtagcttctgtatattagttccttgttggatgtatagtttgcaaaaattttctccccctctgtggatttctgtttactctgctgattatttcttttgctgtgtagaagctttttagtttaattaagtctcatctatttatctttgtttttgttgcatttacttttgggttcttggtcatgaactctttgcctaagtcagtgtctagaagagtttttccaatgctaccttctagaatttttatggtttcaggtcttagatttaagtytttgatccaccttgagttgatttttttataaggtgacagatgaggatccagtttcatttgtctacatgtggcttgctgatgatcccaggaccatttgttgaatagggtgtcccttcctcaccttatgtttttgtttgctttgttgaagataatttgctgtaagtatttggctttatttctgggttctctcttctgttccattggtttatgtgcctatttttataccagtaccatgctgtgttggtgactatagctttatagtatagtttgaagtcaggtaatgtgatgccttcagatttttttttttgcttagttttgctgtagcta

SEQ ID NO: 729378 - DNA, 605 bp, Homo sapiens
ttcttcttgatttaatttgagtagtttgtgtctttctagaaatttttccatttaagttatctaatcttttggcgtatgtggtttctggtattcgcttatgatcctttttatttctgtatgattggtactcatgtcctcctctttcatttctgatttttgtaactsgaattttttctttcttttttcttggtcagtctagctaaaggtttgtcaattcattatcttttcaaagaaccaacttttagttttgttgattttatctgtttttttttttctattctctatttctgctgcagtttttattatttccttcctctggcttgctgtggatgaagtttggttttaattttctaatttctgaaggtggaaagttaggttatttatttgagagctttcttttttaaaaatataaatgtttatagttataaattttcctctaagtactaatttagtggtctctcataagtttggtatgttgtgttttcacttttattaatctcagatcatttctactttcccctgtaatttattatttaatccagtggttattgaagagtgtgttgtttaatttccacatatgtgtggatttcctgaattttctgttg

SEQ ID NO: 729379 - DNA, 605 bp, Homo sapiens
ttcttcttgatttaatttgagtagtttgtgtctttctagaaatttttccatttaagttatctaatcttttggcgtatgtggtttctggtattcgcttatgatcctttttatttctgtatgattggtactcatgtcctcctctttcatttctgatttttgtaactcgaattttttctttcttttttcttggtcagtctagctaaaggtttgtcawttcattatcttttcaaagaaccaacttttagttttgttgattttatctgtttttttttttctattctctatttctgctgcagtttttattatttccttcctctggcttgctgtggatgaagtttggttttaattttctaatttctgaaggtggaaagttaggttatttatttgagagctttcttttttaaaaatataaatgtttatagttataaattttcctctaagtactaatttagtggtctctcataagtttggtatgttgtgttttcacttttattaatctcagatcatttctactttcccctgtaatttattatttaatccagtggttattgaagagtgtgttgtttaatttccacatatgtgtggatttcctgaattttctgttg

SEQ ID NO: 729380 - DNA, 605 bp, Homo sapiens
ttcttcttgatttaatttgagtagtttgtgtctttctagaaatttttccatttaagttatctaatcttttggcgtatgtggtttctggtattcgcttatgatcctttttatttctgtatgattggtactcatgtcctcctctttcatttctgatttttgtaactcgaattttttctttcttttttcttggtcagtctagctaaaggtttgtcaattcattatcttttcaaagaaccaacttttagttttgttgattttatctgtttttttttttctattctctatttctgctgcagtttttattatttccttcctctggcttgctgtggatgaagtttggttttaattttctaatttctgaaggtggaaagttaggttatttatttgagagctttcttttttaaaaatataaatgtttatagytataaattttcctctaagtactaatttagtggtctctcataagtttggtatgttgtgttttcacttttattaatctcagatcatttctactttcccctgtaatttattatttaatccagtggttattgaagagtgtgttgtttaatttccacatatgtgtggatttcctgaattttctgttg

SEQ ID NO: 729381 - DNA, 534 bp, Homo sapiens
gttgggtgcatagatgcatagaattgttatgtttttatgatatatttatcattttattatttaaaaatgcccttctttgtttccaatgatgattttgtcttaaagtctattttgtcttacatttgcatatagcaattccagctctcttttaggcacrtttgcatagtaaatattctattcttttactttcaatctgtttatgtgtttgattctaaagtgtatttcttataaacatcatataattggatgatatgtcttatccttttgcttggagtatttaatccatttacattattgtaattaccgtttaggtagggtttacacttgccattttgttatttgttttctaaatgtcctatgtctttttctctatgtattctatcattgctgccctatttgtattaaatggatatttttaaatatataattttaacttgcttcttgtttcactttttttaaaaaattactttcttagtggttgccctgggaattacaattaataccttaacttaaaacaatctagtttgtactagt

SEQ ID NO: 729382 - DNA, 534 bp, Homo sapiens
gttgggtgcatagatgcatagaattgttatgtttttatgatatatttatcattttattatttaaaaatgcccttctttgtttccaatgatgattttgtcttaaagtctattttgtcttacatttgcatatagcaattccagctctcttttaggcacatttgcatagtaaatattctattcttttactttcaatctrtttatgtgtttgattctaaagtgtatttcttataaacatcatataattggatgatatgtcttatccttttgcttggagtatttaatccatttacattattgtaattaccgtttaggtagggtttacacttgccattttgttatttgttttctaaatgtcctatgtctttttctctatgtattctatcattgctgccctatttgtattaaatggatatttttaaatatataattttaacttgcttcttgtttcactttttttaaaaaattactttcttagtggttgccctgggaattacaattaataccttaacttaaaacaatctagtttgtactagt

SEQ ID NO: 729383 - DNA, 595 bp, Homo sapiens
acatacacaaatataagcaagtaattccaatataatagatcactgtaatgctagctctaagtatttttgttgttgttttgcttactgctctattccaagacgtagaacatattaggagcacaataaatgtttgctgaatgagtgaayggttaggtgaattcattattatacaatagctgtatagtctatggtctaaatgtattcctataaaacagtgtttataatcatcttaaaatcatttgataaaaatataaactttacaaatctccaagactgtatatcccaaagaaataatagccttactctcaactcattggaataaatgatgttaagaagatagtatctagcttttgtgtgttttcaccagaacgatttgtattactaagttgtattacaaaattgtttgtacttatttcaatatataaagtaacatgataacgtcttttattttacacaatgtttctaaagagtgacacattcccagaatgaggttggcttcattgtgagagctattgttgaaaacaaatcatgattaaatgtttctttgttgcaaaccttattcatccagccctggggacaaactctttaaagatac

SEQ ID NO: 729384 - DNA, 470 bp, Homo sapiens
aaagagaaaaaagtagccttgctagaaattaaaacgtcatgacgtgaggagatgatggagtcgtggtcttgtgacagaaggactcatttaggacagatctgacactcagtttcaacttacttctctgttactgtaatgccacagccctcaaccctccttctatttgtttaacactgtgagaacaaacaattccttaacgtcaacccaaaacaatatgcaagatgacccayccttggtttgagacagaagtgcaggccttctgaatttatttaatgttgcattttctgtggaagcagtagatgctcttatttggctttacaagagccaagaaaagtctctctgagtttttgtcatgtaagatcctcagtcaaaaaggaacttctttccaaaagagccaagccagtgtctcattaagtcaaacatactttcacggctactcaccccagtgccaatatggagtgaatgcaggg

SEQ ID NO: 729385 - DNA, 634 bp, Homo sapiens
aatgagcattgacttaaaccccataccttattaaaaatttaactcaaatgaatcatggatctaaatgtaaaacataaaactattaaacttttagaaaaaaatctttatgagctagggttaggcaaagacttcttaaacataacacccaaatgacagtacataaaataaaaagttgataaattttatcaaaattaaaactctttgcttggcaaaagacattaatgaaaatacacacaagtcacagcctgggagaaaatatttgcaaatcccataaacaacacagattgtatctagactatataaagaactctctcagtaataaaagaaaaatcagttcaattagaaaataagtaaaacaattgaatggacatttcaccaaagagagtatatggatggtaaataagcaggtgaaaagatgttctaaatcgttagccattaaggaaagtgattaaaaaccaccattagatacaatggctaaaaataaaaactrctgacaataccaagtgctggtgagaggatgcagtgcagcaggattcctcgtacactgctggtgggaatgtaaggtgatattttacacaggagttcatagcaactttattcataaaagcccaaaactggaaacaacccaaaattc

SEQ ID NO: 729386 - DNA, 601 bp, Homo sapiens
aggtcaaggctgcagtgagctacgatcagagcctgggcaacagagcaagaccctgtttccagaaaaaaaggaaaaaactcacatatcaaaggcacttacgttgccatgagaaagctacaggattgtgatatttggtgtaatttgatgtacaggttctgtatggacaaagccaagrgtacagggaattttagaggaagagagtgattcaagtcaggtcaaacctaagttggttgttaggctcaaaataatctaaagaacctggattttagagcctggccccaaaatctagccatgagcaattgtagaaaactcggtcaacttctctaaaagccagtaagatagcttcatcattttccattttgaagagccagatgacattagcgttattatatacagtatttacaatttgtaacattttttgcaactctgtgctaggtgttttaaggtcattatctctaatattcattctgaccctgccgggacccccagaagccagaattcaggatagttgaattctgaaagttgaagagaagagcaccaaactcagtgcattaattcctgagcccaagctctgttcattctgacaagttgccccatacat

SEQ ID NO: 729387 - DNA, 584 bp, Homo sapiens
ataaagacagcaaaacgcataagacaagctttggatgctctcaatgaaatgtgtgagtgttaattagatattaggtgctacagagaataaatatctacactcttaaaaattactgaggaccccaaagagctcttgtttatgtagtatccacctacacttgcaacattagaaattaagactgagatggccaggcrcagtggctcacacctgtaattccagcactttgggaggctgaagcaggtggatcacaaggtcaggagttcgagaccagcctgaccaacacggtgaaaccccttctctactaaaaatttaaaaattagctgggagtggtggcgcatgcctgtaatcccagctactcaggaggctgaggtaggaaaatcgcttgaacccaggaggtggaggttgcagtgagccaagatcgtgccattgcactccagcctgggcaacagagggagactccatctcaaaaaaaaaaaaaaattaggcctggcgcagtggctcaagcctgtaatcccagcactttgggaggcagaggcgggtggatcacaaggtcaagagatcgagaccatcctggccaacatggt

SEQ ID NO: 729388 - DNA, 647 bp, Homo sapiens
agacatgcataaacatgagtactacccaaggcttagacctcagaccgctgtctgcttaacaggaccttccttaagaaagatcatctgctttttgaagaattccatcacaaatatttgagcaactattttacatgagacattgtatcttccctcccagcctgggtgttcagcttccaacaaccactatcctgaactccagttgtgtctctgctggtgccagcgaaccctgctgctaggctaaaagccctcgtgtcaggaacaggtctgtcttgtcgccactgtagacccaggctacaaattggcacacagcagacatctgacaaatatacagtgactacataaatgtaaccttatggcttcaatcaacctcaacatgtctacaacccaatttgytgtattttcctccccaaaacctggccactcttcccagcctccttatgtttttgaagagagctacctttcatcaatcacacctaaatttggttttgtcttttaatctcccaccgtcattatgagacagacctctgccaccagcactgggccaccatggctaagctctgactaggtcacggggctgtcattacatcttgataaaggaggaattgctctgctcccatttgacagatgcacaaattgacacgctcccc

SEQ ID NO: 729389 - DNA, 535 bp, Homo sapiens
atgcagattctcaacacccacttggctggaatctggctaagcctggcgagttcctggagggaggggcagccatcaccacagctgcaggggcctgttgtctaggccacctgagctccttgggggaagcgtggcagccatcactgcagctgctagccacctaacacactaagctccagagggggtaagggcagcacccatcactatagctccaggctgtgttttcccctgctggagccagggaggctggatagcttggtcccaagaggtattaccccaagcccagcacatcagctgtggcaraccacagccagactgcttcttcagtatagaccctgacccatccctcctgactgggtggggccaccctacaggaactccagccaggggctcaggggtagaactctgatctccctgggcctgagcccctatggggagggtggccataatctccatggaccaacagacttagtctttcctcctactagctctgaagaatctgggcgtccagatgcatgggtttccccccagagcagca

SEQ ID NO: 729390 - DNA, 535 bp, Homo sapiens
atgcagattctcaacacccacttggctggaatctggctaagcctggcgagttcctggagggaggggcagccatcaccacagctgcaggggcctgttgtctaggccacctgagctccttgggggaagcgtggcagccatcactgcagctgctagccacctaacacactaagctccagagggggtaagggcagcacccatcactatagctccaggctgtgttttcccctgctggagccagggaggctggatagcttggtcccaagaggtattaccccaagcccagcacatcagctgtggcaaaccacagccagactgcttcttcagtatagaccctgacccatccctcctgactgggtggggccaccctrcaggaactccagccaggggctcaggggtagaactctgatctccctgggcctgagcccctatggggagggtggccataatctccatggaccaacagacttagtctttcctcctactagctctgaagaatctgggcgtccagatgcatgggtttccccccagagcagca

SEQ ID NO: 729391 - DNA, 584 bp, Homo sapiens
tgatctcaattaaaaataaaacttcaaaattctagataaagaattcaaaatattaattttcaagaagtcagtgaaacgaaagagaattttgaaaaacaatgcaaagaaatcaggaaaacaattcaggattaaatgagaaaattatcaaaaagataggtatcgactttttttaaacagaactaaatagaaattcaagaagaaatataaaatacatttgaaagcttaaacaacagactagattatgcagaagaaagaatcttagaacttgagcacaggttttttttaaataacccagtcggacaaaaataaagaaacaaatatttwaaaaatgagcaaggcctttatgacatttggtacaacataaagtgatgaaatatatgaattatgagtgtcccaagaataagtaggaacaatgaaaggattacaaaatatatttaccaaaagaatagatgaaaactttccaagtctagcaagaaatttagatattcagataaaggaggctaaatgatctcaaggaagatataatgcaacaaggccttctccaaagcacattataatcagactgtccaaataaaaagcaaatc

SEQ ID NO: 729392 - DNA, 499 bp, Homo sapiens
tggggcattgcctcacacaggaagcacaaggggtcaggaaattttctcccctacccaagggaagctgtgagggactgagctggaggaaccatgcacactctggcccagatactgtgcttgaaccactgtcttcacgacctgcggaccaggagattccctctggtgcctaccccaccagggccctgggtttcaagcagaaaactgggcagccatttgggcagacattgatctagctgcaggagttttttgtttgtttgtttgtttgtttgtttgtttgtttgtttgtttgttttccataccccagtagcrcctggaacaccagcaagacagaaccacttactctggaaatgcggctgaagccaaggagccaagtgttctggcttggcaggtcccacacccatggaacccagcaaactaagatctactggcttgaaattcttgctgtcagcacagtagcagtcagattgacctgggacactcaggcttggtggggggaggg

SEQ ID NO: 729393 - DNA, 631 bp, Homo sapiens
ataaatgcttatggagtggagatgaggactaactggggtcatttgaacacgtaaggctcttagcatggaattcatttatacttaacctgcaataattttagctattatcaatattaactttaaaattgtagcaatcctcggccaggtgcagtggctcacgcctgtaatcccagcactttgggaggctgaggcagraggatcacctgaggttgggagttcgagaccagcagaccaacatggagaaaccccgtctctatttaaaaaaaatacaaaaattagccgggcatggtggtgcatgcctgtaatcccagctactcgggaagctgaggcaggagaattgcttgaacctgggaggtggaggttgcagtgagccaagatcatgccattgcactccagcctgggcaacaagagtgaaactccatcacaaaaaaaaaaaaaaaaaaaagtagcaatccttgtgaaactctatataagagaaggcaattgcctaacactaacattttcaaactgggctttactgtgttctttggtgttgtggactgaatgtttgtgtgcctccctcccctaattcagacgttgaaaccctaatccccaatgtgatgctattaagaggtgaggtgtttgggagtta

SEQ ID NO: 729394 - DNA, 631 bp, Homo sapiens
ataaatgcttatggagtggagatgaggactaactggggtcatttgaacacgtaaggctcttagcatggaattcatttatacttaacctgcaataattttagctattatcaatattaactttaaaattgtagcaatcctcggccaggtgcagtggctcacgcctgtaatcccagcactttgggaggctgaggcaggaggatcacctgaggttgggagttcgagaccagcagaccaacatggagaaaccccgtctctatttaaaaaaaatacaaaaattagccgggcatggtggtgcatgcctgtaatcccagctactcgggaagctgaggcaggagaattgcttgaacctgggaggtggaggttgcagtgagccaagatcatgccattgcactccagcctgggcaacaagagtgaaactccatcmcaaaaaaaaaaaaaaaaaaaagtagcaatccttgtgaaactctatataagagaaggcaattgcctaacactaacattttcaaactgggctttactgtgttctttggtgttgtggactgaatgtttgtgtgcctccctcccctaattcagacgttgaaaccctaatccccaatgtgatgctattaagaggtgaggtgtttgggagtta

SEQ ID NO: 729395 - DNA, 604 bp, Homo sapiens
aagtccttgtctcctctatatgttgctcatgtctacttatggtttgtggtctatatatttactctcttttgggtgacttctgataaatagaagttctttattttactataaatgaattcatccaaatattcctttatgttttatatcttatttaagaaattctccatacccaaagtcataaagcttttctctatttgctaaaggtttctggtcctttcaaatttaagtctttaatacttaatgtgtgtgtgcacgcacgctcatgcttgtgtgtgtatgcacatgtgtatgtggtaratttatgctgtctcgtcctcattttgtcactgtggaagattaaccactgcttcaattttgtttatatttatgggactatttaaaatttttaaaacattaaaaaaacttgtatttgagtattttgttgggttgtatttatgcaagaatttgtcaatttcatctaatctatttcaaacgtttgcataaaactgttcatgaaatgctcttatttcttttatctctgcagcacgtttaaggccttcttttttcctaatattttaaaatttgtgctttcttatttgtttcctctctttatttatattgtcag

SEQ ID NO: 729396 - DNA, 598 bp, Homo sapiens
ataaagccataactttaggtgacacttcttactggccttaaaaataaaattatacaatataaatgttttctgccagattaaattggtctctttgcacatgaaagttgggtgggtgggtggaaaacatctaaaatttatggaaaatattttcttatgaagaagctgagacatactttccccaaaagcagcattaatatcctgagagcactttacttgagtggctcaatttttgtttgtaggttcctaatgactgatggacatttaatcatttttgcctgatgtatgtttttcagttgaggttcttgatgcatgagaagtaacctactgaatttcttgaaaaatagcttgcctctcaatgttaagagtgtggacttgacatatttagagaagctttcatrtactgtcttttacatgcaatctttggatgctttctttactttgatctgtgtaaatgagaaaggataaaaatgtatggtttaaccaaattctggtgaggtgacttcttgattatttatgaagctggaaatgtttaagtgtttcatttattcttaaaattctgtcttactattagatgtatattgaagattacatttatctt

SEQ ID NO: 729397 - DNA, 595 bp, Homo sapiens
tgttattcgggggtagggccttgctgagacttgggtgaggggcaggcctcccttggaaggagggtactccagggcctagggtccatgtccatgcctctcaaagaggcctgcttcaggggtggccaagacccggggccatggacggcaccctcacccctgcccccattggcacggcaggtgatggatgaggcagaccggctgctggaacagggctgcactgacttcaccgtggacctggaggccatcctggcggctgtgccggcccgcaggcagacactgctgttcagcgccacgctgaccgacacactccgggagctgcagggtctggccaccaaccagcccttcttctgggaagcacaggccccgtgagtccacagcccagacagcgtggggagggcagccccatcctacagacagggacactgaggcrtggcggtctatctgtccatccccagggtgagcaccgtggagcagctggaccagcgctacctgctggtgcctgagaaggtcaaggacgcctacctggtccacctgatccagcgcttccaggatgagcacgaggactggtccattatcatcttcaccaacacgtgca

SEQ ID NO: 729398 - DNA, 618 bp, Homo sapiens
cagtcagggcagagagagagagagagagagagagccattatttcttctatgcatttcaaagacttttagtattttcactaattctgttattgctatctagaaggcagagccaggtgtacagggtggaacatgaaagtgaaacacgggcatgaccgctgaagcacagcatcacagggagacaggcctccggatggctgycggcgggcctgactgatgtcaggccttccacaagaggtggtggagcagagtcttctctaactcccccggggaaagggagactccctctcccggtctgctaagtaatgggtgccttccctagacactgatgctaccgctaggccaaggagccctctagtggccctatctgggcgtgacagagggctcacactcttgtcttctggtcacttctcaccatgccccttcagctcctatctctgtatggcctggtttttcctaggttataattgtagagcaaagattattataatattggaataaagagtaatgtacaaactaatgattaatgatattcatatataatgatatctataatctacttctagtataactattcttattttatatattttctttattatattggaacagcttgtgccc

SEQ ID NO: 729399 - DNA, 578 bp, Homo sapiens
cttgggaaatgatctcttagatcgctgcttgtccaactttagtgcgcacgggatttacctggcgatcttattcaaatggagattctaattcagcaggtctggggagggactttatttatttttatttttaaattttattcatttattttttttgagatggagtttcgctctcgttacccaggctggagtgcaatggcgcgatctcagctcactgcaacctcygacccctgggttcaagcaattctcctgcctcagcctcctgagtagctgggattactggcgccccccaccatgcctggctaatttttgtatttttagtagagatggggtttcaccatgttggccaggctggtctagaatacctgacctcaagtgatccgcccacctcagcctcccaaagtgctgggattacaggcatgagtcaccatgcccggcctggggcaggactttagattctgcatattccttcaactgtcctcttaggggatgctgatgctgtgtccatgaccacacttagggtacctcagctactaaactactggatgaatacactagttggcataagttggtttattggg

SEQ ID NO: 729400 - DNA, 619 bp, Homo sapiens
atatcaacacattttgaacactggaaaacagccgaatgactgaatgacttagcaggcaagagaaagctgaaatttaaatctacattgatgatagtcaacaagcactttcagatttatgcatgaaaaagcctaggatttggagcaatctaaaatgtcaatgaaagtaaggtttaaaaacaggtggcttggttgcaaattagtataagaaacaattagcctcctccctcacccaggtttacttctggaaaggttgaacaacagagactctgtattcttcaacaccaggcacagctgaggaygtattaaagatggaggttaatattatatacggggattttacatactgaatgtgagaactccaccccccttttcttttcagctctgagtaggctgacaatcagtcttacatctaccaagcgtgtagaattcctttttagggaaactgaccaccccatgagaaaatatctacaaattggcccagttcctgccaaattaccctatagcaaacttcccagcctataagctctacccatacattcagagctgccaatcagtgttttagtgccttactcttaagtaagtgcagagtcttcaccagattgtcaaagaaagtctgtaa

SEQ ID NO: 729401 - DNA, 667 bp, Homo sapiens
atttgaattatttttcatatacggttttctcttttatggttatgccttatcatatccattcatattacactcatattagtaagttaggaaattacctcatcacttattatttgtgttgattgaatataaccgtcacccacattcctcaaaaatagctcactttcattcttttgttcattcttatataatattagcacaccaaaaatcagatattatttttaaacttatttaatgaaatgattctcttaaactatgaagatatttgagaatctgaagtctgaaatgattgtatgtgcaaatgtgctgtgtgccraatggattgtttctgatgtttctggatttaccgaaggtggtttttataactattgttggcagtcttattgatgaaaatgagatatgttctagagatatttttaatccagatatatcacttgtacctgagtaatcaacatcccacagcacagtcgatactttgttccaacctgcagctacctggaaaatctctattcccagggtgttgtagctatttgatttaactgagagttgaggggtgggacggagcaggggcagtgggcctccaggaccctatggaagcactactggtcttctggcaacatcacagccgcctaaggctgtgcttgcagatgggacaaacaagagtctggct

SEQ ID NO: 729402 - DNA, 592 bp, Homo sapiens
ggtcttgactgtaaaataaaggaaggatgcagagagtagcatagggagtaaggttggtggggaaacagagtcagtggctctcttcggtgatgataggacagaactctgttcacagagagattctgtgattataaagctgtgttcctgaaactcctaatggcctagggtgcaggatagtctccttctgattgacctccaacacagaagcaygtgccctgtgttcagagatgctaagtggaatctatacgtcacattgtcacttctgtgatatgtgacttattaatattaaatgatcaccacaccctcacctttaactccctctcacacctccagctgtgtgatgttctatatctgcattgtccagtacggcagtcaccagccacatgtggctactgagcactttaaatgtggctagtacaactgatgaactgaattttaaattttatttaattttaatatcttaaaattaagtagtcacctatggctttgccttagaagtagcattggtttggccaatgtcacaggctatacaacttcaaacagtttagcagatttaaagttgaccttactttctttctctcttgtgcaggag

SEQ ID NO: 729403 - DNA, 634 bp, Homo sapiens
tcctaaggaaactgaacactcaaacaaaggattcttagccaagcaattttacttgcgcagaggggtgcttctccttggccagttgccatgagagcacacctgaacaaaggggcacgagagcctttattcctaatgcaagtcctgcccctgtaccctttccccattggccggagtcrggccatacaatctaaactagtcccagttggctaaacatttgaactttctttagataaggtgggcacgtaagggagagaggggaaaggggaaggggtgtctgcagtgagctagagagctagtcttctttccaaataaggaaaagaacgtgagctggtactaataacgcctggtactgtggcgtgtctgggcatggaacaaaggcagaaaggaaaaagaaggagcaaaaggaaaagggggtggggggatactatgaattaaagaataaaggattgatcggctatttgaagagaaacctcatcatagcccacatttacttattttattatttattaacttttttggagacagagtctcgctctgttgcccaggctggagtgtggtggtacaatcatggctcactgcggcctccatctcctgggcccagacaatcctcctgcccaatcccctaaaagcattg

SEQ ID NO: 729404 - DNA, 701 bp, Homo sapiens
cattaagatgaaataaaattcaaatgtcagcgttcataaataaagttctactggaacacagccatgctcacttatctctccctggaactcaaaagtaaggaaaacaaatattttaccatcattacacatgcacatacacacacacatcacatgcgcgcacacgagcatgctccttctctgtgcccactgtgtacgggctttgcagaaattgcatttcttgcagagaaactttgaacctcacaatggaaggtaatttaccaatctcttatctatctatttatcatacttcacgttttagtaataactgaatttcacccttttcaagcttggaaattatatctcctcattctgctgaacgtgtctatggccactttggggctacaatggcagagsagagtagttgtgacagagacgctatagccctcaaaaaatattttgcttactactatttatttacaaaaataaaatatttactatccggcccttcatagggaaagtttgccgactcctggtctactatgagccaggtactgtgctaggactttcacatcttctataattctatcaaaaactttagtggtatattaggttatagagacctgaagaatgtatctagaatctagaataataacatgctttatttgtaaatattcaaatgatttgcaaagataaagagttactttctttaggatcctatcctt

SEQ ID NO: 729405 - DNA, 646 bp, Homo sapiens
ttgttcaccttttcctttctatacctttcttcactctccttcactttcttcatcgaattgtctaccattacaaaatagaaaagaaatgaagggagggaggaagggaaactgcaacacacacaggttttattggggtgaggcatacctcttattactctggtcagtctaatttgtcaaatcctcgagggtagggccgatacattttttttttaacgtcgtccaacatctattagaggttcagtcattgattatcctcctccctttcttcgtttcccttgggaaacctggaaaacagaaaatcttcccacagaaactcctcaggggcgcgccgagatctgggcttgcgcacttggacttggccggcgctcagcccccgcctcaagccggcggggtctcgcactaacctagcgcgggcgcctcgatcwcccgcgcgcgcgcgtgcgcgagacccccctttggccccctaccctgcagcaagggtagcgtgacgtaatgcaacctcagcatgtcagcagcaatataaaggagaatgaggcggcgcgcctcccagacgcagagtagattgtgattggctcgggctgcggaacctcggaaacccgaatgtgaggaccttaagggatccacagctgccgccccccgcagccat

SEQ ID NO: 729406 - DNA, 579 bp, Homo sapiens
agaacttgctgtgcttcacaatccgatatcataggtccctcacatttctgtgagtatcctagaccttacttcaagaaaatctggttatgtcgcctttaagagcaacccaagccccgtcctgtccgtggagtccggcactctgtttaccagctcccctgacggtgccactgagcctctatccgccatataaggactgaccaacgctctaaggcaagtccagaagcggtgtcgaaacttcataacccagaagacactgcggttctcggcagcgcgactgacccaatgaatgtgcargaaggaacctttgcgtgcgtgcgtgcgtgcgtgcgtccgtcctcgtgctcgcgcatcgtaggagggcgggacttccggcgtcctcttgccgtggttgatttgattttctctggtgttttcactagttccggcctttggcgctctatgacgtcaccgaagtgacggagcggaaaagcgcgagaagcggcttggttccttgtacgcagaggcggtagtgacacaggcacaactgacagtggcagaagctcagctgacaaggactggggacggcggtgtccttgtctt

SEQ ID NO: 729407 - DNA, 579 bp, Homo sapiens
agaacttgctgtgcttcacaatccgatatcataggtccctcacatttctgtgagtatcctagaccttacttcaagaaaatctggttatgtcgcctttaagagcaacccaagccccgtcctgtccgtggagtccggcactctgtttaccagctcccctgacggtgccactgagcctctatccgccatataaggactgaccaacgctctaaggcaagtccagaagcggtgtcgaaacttcataacccagaagacactgcggttctcggcagcgcgactgacccaatgaatgtgcaggaaggaacctttgcgtgcgtgcgtgcgtgcgtgcgtccgtcckcgtgctcgcgcatcgtaggagggcgggacttccggcgtcctcttgccgtggttgatttgattttctctggtgttttcactagttccggcctttggcgctctatgacgtcaccgaagtgacggagcggaaaagcgcgagaagcggcttggttccttgtacgcagaggcggtagtgacacaggcacaactgacagtggcagaagctcagctgacaaggactggggacggcggtgtccttgtctt

SEQ ID NO: 729408 - DNA, 595 bp, Homo sapiens
ccatctccataagaaaaattttttaattagccaagcatggtgatgcacatctgtagtcccagctgtttgggaggctgagatgggaggatcacttgagcccaggatatcaaggctgcaatggaccatgattgtgcttctgcactccagcctgggtgacagagcaagaccctgtctcaaaaaacaaaaacaaaaaaatgtgatcacagcagcattattgataaaaaccacaaaaaaaatgaagacaacccaagtgctcaccaacagatgaatgactaaacaaatgtggtctattcatagggtggaatattattcaagcataaaaaggaatgaagtaacgatagatactacaacctgaatgaacctgaaaaacattatgctkccagtcacaaaagaccacatgttgtatgattccatatatatgaaatatccagaataggcaagtctatagagatggaaagtggattagtggttgccaggggatgtgtggagggggaatagaaagtgagtgctaataggtatgggattactttgtgaggtgacaaaaattatctgcaattagatagtggtaatggctgcacaatattgtaaatgtaca

SEQ ID NO: 729409 - DNA, 595 bp, Homo sapiens
ccatctccataagaaaaattttttaattagccaagcatggtgatgcacatctgtagtcccagctgtttgggaggctgagatgggaggatcacttgagcccaggatatcaaggctgcaatggaccatgattgtgcttctgcactccagcctgggtgacagagcaagaccctgtctcaaaaaacaaaaacaaaaaaatgtgatcacagcagcattattgataaaaaccacaaaaaaaatgaagacaacccaagtgctcaccaacagatgaatgactaaacaaatgtggtctattcatagggtggaatattattcaagcataaaaaggaatgaagtaacgatagatactacaacctgaatgaacctgaaaaacattatgcttccagtcacaaaagaccacatgttgtatgattccatatatatgaaatatccagaataggcaagtctayagagatggaaagtggattagtggttgccaggggatgtgtggagggggaatagaaagtgagtgctaataggtatgggattactttgtgaggtgacaaaaattatctgcaattagatagtggtaatggctgcacaatattgtaaatgtaca

SEQ ID NO: 729410 - DNA, 515 bp, Homo sapiens
ttattaaatctgggctgtaagcccttcacatatattaacccatttaattcccacaacaaccatatgattggtgtctttactatccctattgtacagataagaaaactgaggccagggagttaggaaacttgcccacagtcatccagttagtaaatggcagagccaggactcatgtcagactctctaggagaaagagagggtggtattgaaaggatagtggagcagtttatagtatcaaaagaggtgaatcaccaaggcctcaggttagctctgggaatctctagactaggtccccatggacttctctctagagcagtgcagcccaacaaatacaacatgggctgcatattaatgggccatatacatgggyccatatacatgaccctaactttaaattcctaggaaacacattttagaaactaaaaagaaataggtgaaatttactgtaatattattttatggaacccgatacatccaaagtgttatcatttccacaagtcatcaaagtaaaatat

SEQ ID NO: 729411 - DNA, 613 bp, Homo sapiens
tgaagaagggaactggacttctgggtacttgcctgtccccagagggtagccttagggtgctggagattaagcgaaatcagaagagaaaacattagagcaaggtaccgtgcaaggtgttactctatagtcattggaggaggagaactaaaagcattttgtgagagtaaagtttccacttactgatccctttccccataagytttaaacaaggcttaacattttttaactgtgtttgctaccaaaattcccatacttcctttgatccattcagcaggcatcctaatggattcatgatcataattataaaaataaatgatcacactgcaaatagccgccagccctgtgaaggaggaaaatgttatttgcctcttcaccaaatggttccattctattgtagttttttgagttcttgtatctgtctggtactcacaatccactatattaagttactccagatgggaaaaccagatgactgagtttatttgaattatgtctaaatccatgagcattaaataggttcttagagaaagccctcttcatggattttgtacatagacttgtgacatcaattctgaatgttttgatttttttttttttcttgccacactccata

SEQ ID NO: 729412 - DNA, 516 bp, Homo sapiens
cattaacaagacactctatgggatcctcctgtgtgccagacatatttttccttttctccattgtagagtagtatccagtttccccttggtagtccagatcaatcaccctacccaacaccataactcccttcttagcctgtagactcagaggcatgagcagccyaaagtggccaggtgccagtcttaactttcaggtcaatagaatcactattgtgtttcctggtagaagcattcttccctctgcaactaagatctctagggcagcagaacataatgtcatggaacaggaagcaaaacaaacaaacaaaaaactgctagtgggtcagtaggagtaatagtgagtggagctactcctatgctcactccttgattcctggacccgtgaatactagctaccagagaaacaacaccatatctgattcagagtatatacagccttctggagaaccttgccccacccctataaagtattgttaactagctggctgtgatttcaaaagaccattccactgttcc

SEQ ID NO: 729413 - DNA, 657 bp, Homo sapiens
ccctgcccgagttgggaacccagggcacggtctcacgggaagggatgggctgcagcactgtgaggcccctccccagtcaagtgcccctcacacctgcacatggaggttaggcctgctgttgaagaagtcaaagagccgttggtagttgaagaactgggcatcccactcctggggcttgtcatatcggaagtcatctccaagaggcaccaggaggacgttgcttcggaacagcygggacttcttccggtattggtccagaagcagggctgccctggggcaggaaaaaaaacatgggcccaccacgaagtctcatcagtaaaagagcaccacgcacagccatcccgccagcaagcccctagagacatcccatccaccaaggagtggttcagcgcagacagacacctcctgcacatgaatcccagccccaggggagtccggtgctctctgggcagttctgacagctgacatgttattttttatgctaggctgttgagatcttttgggatcctggttctgacactcccgcctcattttgcccaccagttagcgatgcagcaccaaagtgaagggtctggaccccggagccatatcacaccagctccacaagtactagctcagtgactgtgggcaagtaacctctctgagcctccatttcta

SEQ ID NO: 729414 - DNA, 406 bp, Homo sapiens
ggtttatatccattacaaattagatctcaccatgagagcaaaatcccttaataaacctaggtaaaagcaatttgaagtaatatgatgcttattccagtgtcaccactaggtgtggtgtttgcatcaagtcattttggggtgctttatggaattgcttcctagtagggaattccctgacttcacactttccagagaygacgctctctctctttttctctctaatacttacaagaatggactgcaaggctacatttagtcaggcgataccatccccagcacatggtggcttgttggtgtgaggtctaaggattccggtcatttgaaacgaatggcctcctagatttgtggcatttttctgtatattgagaataggtaactaaaataagtggtaactatatttgcatgt

SEQ ID NO: 729415 - DNA, 638 bp, Homo sapiens
atcaagtcattttggggtgctttatggaattgcttcctagtagggaattccctgacttcacactttccagagacgacgctctctctctttttctctctaatacttacaagaatggactgcaaggctacatttagtcaggcgataccatccccagcacatggtggcttgttggtgtgaggtctaaggattccggtcatttgaaacgaatggcctcctagatttgtggcatttttctgtatattgagaataggtaactaaaataagtggtaactatatttgcatgtgatttgtatgtkatagttaacatttaaattctcttatgtactaaaatttttttggttgccacagtaagcctctttatcctgtaaggcacagagtgtctttccacctcaatttttgctttaatgtatgaaccctaatgggaccatagttcaactaaaggcacctaactcatgaatgatatttgctccatgtttgaacaacaaatgttttaacccactgtcttcactaatattgtaactactgtcttacagattgacttgatgcacaacatcacaaaggcgatttttgaggtatgagctttagaaacttacctctcatgtggcatgtacatcaggctttaacttcagtttgatcgt

SEQ ID NO: 729416 - DNA, 479 bp, Homo sapiens
caaacactgctgtcacttttacaccatagagggaggggcaaagcgtagaggaataggttagtttctggccttgccagtgtcctaaacttttctaaaagattcaggttctaaaaggttgagaaagcatttttagtaaatatcatagaagtgattttctttttctttttctttttttttttcctcaaaattgttcctctcaggagaaaatcagtaggggaagaacttacttggatttttcatatgctataacarattattttgttgtcttctttcttgatagtttatgattgatggctgaaagagtaacactcatgagaagtcttgtaactcagctctgttttacttatgaggcagttgaagcatagagcagatacttagatgaggacacacttttacccttggctgtaccctacttgtttactaataagcatcaggtattattctaaacagtacctgaattttaaatagattacgaacta

SEQ ID NO: 729417 - DNA, 582 bp, Homo sapiens
gtgattaaattatggtattgttgtgtttggaatatctgatattagggttttttttttttttttttttttttttttttacagtttttgatatgctttattttgggtatgtagtttaaaaaatataaaggaaatataaggaatattctttttttttttttttaataaaaaatgtatttttaactgggcatggtggctcactcctgtaaccccagcactgtgggaggctgaggctggtgaattgcctgagtccaggagtttgagaccagcctgagcaacatggtgaaaccctgtttctatcaamcaaaaaaaaaaaaaaaaggaaaaaaaataagttgggcatggtggcatgcacctgtaatcgcagctacttggaggctgaggcaggaggatcgcttgtgcctgggaggttgaagctacagtgagctatggtcaagctactgcactccattataggcaaccctgtctcaaaaaagcaaaacaaaatgaaacattttccccttgattatagaggtttgagaaaaatttgagggaagattcagaaaattacctgtaactgaacagaatgccaccagcttgggctta

SEQ ID NO: 729418 - DNA, 582 bp, Homo sapiens
gtgattaaattatggtattgttgtgtttggaatatctgatattagggttttttttttttttttttttttttttttttacagtttttgatatgctttattttgggtatgtagtttaaaaaatataaaggaaatataaggaatattctttttttttttttttaataaaaaatgtatttttaactgggcatggtggctcactcctgtaaccccagcactgtgggaggctgaggctggtgaattgcctgagtccaggagtttgagaccagcctgagcaacatggtgaaaccctgtttctatcaaacaaaaaaaaaaaaaaaaggaaaaaaaataagttgggcatggtggcatgcacctgtaatcgcagctacttggaggctgaggcaggaggatcrcttgtgcctgggaggttgaagctacagtgagctatggtcaagctactgcactccattataggcaaccctgtctcaaaaaagcaaaacaaaatgaaacattttccccttgattatagaggtttgagaaaaatttgagggaagattcagaaaattacctgtaactgaacagaatgccaccagcttgggctta

SEQ ID NO: 729419 - DNA, 490 bp, Homo sapiens
aggttatgaagttttaatgagaaagcataaagcagaaattatatcggcaagcaggggcactggagaaattccccctccccaacttccccctccctttttgctgctaagggtaggatggttgccttaaaacagggtagtttacgttccagatatttatgcaacaattttccttttatttctaatggtttttaggacatctctactgatctccttcattcaaaccttttagtaggtgaatgaaacctggatcattatctctgcaaagttagacaatttatcccttcgaaaacatgaygtggctcttggctccaggaagtctgagattgttggaaaatgtccagaggacctattcaccctggatgccatgaaatatgcatgacaccaaaacagacagccatgaaatcctccctccctcctggatattgggagggcagtgtctgggatccatacacatctcagtcaaatgtacacccaaggacgagcttgaatc

SEQ ID NO: 729420 - DNA, 561 bp, Homo sapiens
cttggcatccagactcctggcgttgcccatgtcccactctctggtccattctgcaagctgccctttttctcccaacaagctccccgtctgctattgatagtttctgctgttcccaaccagagagttttgaaaagattcaaggaggaagttctgacctctggggctctactggcctctggaagcagctagggactcagtctggracagggaagctgtaatgtgtgaagcctgaagttcagctgaggaaagggagagaaggaacacgaagataccaccaggcttccttccttaaatgcacagagaacaggtgacttgcaggttgcaggaggtgcatgggcttgcatcaggctgcccaggtttaaattttggccctttcttactgactgtttaactttgaacaagttatctaatatctctgaaccactttcctattcttgaaggaggtgtatatttatgcctgctttgtggagtcaatgggaggatcaaatgagctaacactatattgaattactcttcagacacatgtttaccacattttatcatctctggaattggaatgtg

SEQ ID NO: 729421 - DNA, 584 bp, Homo sapiens
caagatcagaaaaccaaacactacatgttctcactcatgcgggagttgaacaatgagaacacatggacacagggaggggaacatcacacatggaggcctgctggggggtggggggctaggggagggataacattaggagaaatacctaatgaaagtgaagggttgrtgggtgcagcaaacaaccagggcacatgtatacctatgtaacaaaactgtacattctgcaaatgtaacccagaacttaaagtataataataataataaaatgccaagttttaaaaaagaaaagttattatttctgtcttttagtttactccttcattttggtgtaataaattgtgcaacagctttctgaaaacttgcaaatttgaagaaaaaatctaggctcccctttatacttgatcgatagtttgaatgaggatagaattctaatctggaaattattagtagtcagaatttttaactcactgttatagtgtcttctagtttctaacattactgtggaaaaatccaatgtcatactgatttccaatgctttgtacatgatctgctgtttctctcttttaaagcattgaaacattttc

SEQ ID NO: 729422 - DNA, 578 bp, Homo sapiens
gggtgcctcagttctccccacagaagccctcgccctccagtaagttgggcagggcttcttttttgttcatttgtttgttttgtttttgtttctgagatggagtctcactctgttgcccaggctggagtgcaatggcrcgatctcggtttactgcaacctgcacctaccaggttcaagcaattctcctgcctcagcctcccaaatagctgggattacaggcacccaccatcatgcccggctaatttttgtatttttagtagagacggggtttcaccatattggccaggctgctcttgaactcctgacctcaggtgatccacctgcctcggcctcccaaagtactgggattacaggcatgagccaccgcgcacagcctaagggcttcctttttgcgcagcagtgctggggtctaaggaggcaaaagtggagcctggtgcagtgcctcacgcctgtaatcccagcattttgggaggctgaggtgggagaatcgcttaagcccgggaggtcagaaccagcctgggcaacctaaggagaccctgtctcagcaacaataacaacaacaacaacaaaattagcca

SEQ ID NO: 729423 - DNA, 528 bp, Homo sapiens
ggaagtgcaataaaatgaggtgtgcctgcacaaccactgcccaactgtgcttaccgcgcgaaggaaaatgtttcagaggtatcacaactttttagtctggaaatctgaatgatattttactttttcacagtgagcatgtattcatgtggaactcagataactaaaaaagtaaagttgtatctgaatgcatgtaggctacaactaaaaaggaacatgaaataaaacagrtgtataacagcagaaagatttatgggtctaactctgtgtcatatttagattttctagtaaatgggtataggaacagaaggagagacagagagttagataaaaggtgtaggctttgctgtttcgagaccttggtgctgattagaggtgtgattgcatccatggtagtagagatgagtgtcacgaactgctgcgtgttctgccggtgaacttcactgcaatactgtgctaaccagtgagagtaagcctgcagcgcagccagggactgagcatgcctgcagaaagaaaagaagatgtgatttt

SEQ ID NO: 729424 - DNA, 502 bp, Homo sapiens
cctagcctgttaatcactttgaatgagtagattattttcattcaaactggtataattcattattgtccttattctttcttgatgactgaactgtcaagtttgaccaggaagaaccctttcaagctgggtcctgcatcctcttcacatgttcccaacagtcactgagcacttccttacttgctgacttggcaagattgtccaacatcacccccccagacttgagcttttttctccaaggtgctctggagaatggatttgagaaaccaagacctggggaaaagggataggattgctactggattgtcactgtttctaggagctttcagcagacagaattaggatataggcagrtatcactttatttacttatttatgttgctgaaacagggtctcgctctgttgcccaggcaggagtgcagtggcacaatcatagctcactgcagcctccaactcctgggctcaagcaattctcctggcttgcaattctaagtggctggggcca

SEQ ID NO: 729425 - DNA, 502 bp, Homo sapiens
gtttctaatgtcttttaacatagcccaatatcacaatggcttaataaccaaaatctagttgtgagaaaaggtagcatcatacatatatgccagaatttctaaatcgagcatgctttctgtttttaactccacggcacctgactccctgactccaggtgatgtcaactgttgagcttagtgataaagaggagctttcatctaattaatataaaggtatgcwtagattttttattctagtgacagcagtgccaccttaattgattttatcctacctactagctgtgagatcaccacaccttttgccatacatggcaaagcagaaattccatctatgcaaataaaaactttacttaagattcacaggaaatcattttatcaactcactttaacttcaactaaaactactttggcccctgagtagaaacaacccaagtagataataggcatttaaaaatactgaaaaagtgtaaaatgacatttcaagatcattctgaaagaaaaa

SEQ ID NO: 729426 - DNA, 502 bp, Homo sapiens
gtttctaatgtcttttaacatagcccaatatcacaatggcttaataaccaaaatctagttgtgagaaaaggtagcatcatacatatatgccagaatttctaaatcgagcatgctttctgtttttaactccacggcacctgactccctgactccaggtgatgtcaactgttgagcttagtgataaagaggagctttcatctaattaatataaaggtatgcatmgattttttattctagtgacagcagtgccaccttaattgattttatcctacctactagctgtgagatcaccacaccttttgccatacatggcaaagcagaaattccatctatgcaaataaaaactttacttaagattcacaggaaatcattttatcaactcactttaacttcaactaaaactactttggcccctgagtagaaacaacccaagtagataataggcatttaaaaatactgaaaaagtgtaaaatgacatttcaagatcattctgaaagaaaaa

SEQ ID NO: 729427 - DNA, 502 bp, Homo sapiens
gtttctaatgtcttttaacatagcccaatatcacaatggcttaataaccaaaatctagttgtgagaaaaggtagcatcatacatatatgccagaatttctaaatcgagcatgctttctgtttttaactccacggcacctgactccctgactccaggtgatgtcaactgttgagcttagtgataaagaggagctttcatctaattaatataaaggtatgcatagattttttattctagtgacagcagtgccaccttaattgattttatcctaccyactagctgtgagatcaccacaccttttgccatacatggcaaagcagaaattccatctatgcaaataaaaactttacttaagattcacaggaaatcattttatcaactcactttaacttcaactaaaactactttggcccctgagtagaaacaacccaagtagataataggcatttaaaaatactgaaaaagtgtaaaatgacatttcaagatcattctgaaagaaaaa

SEQ ID NO: 729428 - DNA, 502 bp, Homo sapiens
gtttctaatgtcttttaacatagcccaatatcacaatggcttaataaccaaaatctagttgtgagaaaaggtagcatcatacatatatgccagaatttctaaatcgagcatgctttctgtttttaactccacggcacctgactccctgactccaggtgatgtcaactgttgagcttagtgataaagaggagctttcatctaattaatataaaggtatgcatagattttttattctagtgacagcagtgccaccttaattgattttatcctacctactagctgtgagatcacyacaccttttgccatacatggcaaagcagaaattccatctatgcaaataaaaactttacttaagattcacaggaaatcattttatcaactcactttaacttcaactaaaactactttggcccctgagtagaaacaacccaagtagataataggcatttaaaaatactgaaaaagtgtaaaatgacatttcaagatcattctgaaagaaaaa

SEQ ID NO: 729429 - DNA, 550 bp, Homo sapiens
cataagcaagtgatgcctttcagtggagtgaaattcaggtaaactttatattacacaattgtattagtcagggttctccagagaaatacaaccaataggggaaatacacacacacacacacacacacacacacacaaacacacacacacacacacagagagagagagggagggagagagaaacttatttttaaggaattggctcacctgattgtggaggacggaaggctggagacccaagaaagggttgctattgaagctccagtggaaggcagtctgttggcagagtccttccgtcttgggagggtggwagtgagtctttgctttattaaggtctgtaggtcagatcatgtaagctggagttcaaggcaagggttgaacctcaaattgaggaactggagtgaaaatcaagaacccaaagcaggaggctacttctttagactgagcaaaccaagtcggggttagaaggataacttggagtgagtatgttcaggtttcacttcaggtctacagattggatgaggtccactcacattgtggaagatattcta

SEQ ID NO: 729430 - DNA, 637 bp, Homo sapiens
tatcaaaatttaaagaattgtattgacttggatccaatgagagggaatttaatgtatattggggcaaacttccccctttttttcttcagccacctcctagccgaaccccaaatttccacaaaactgatggggggttctattgtctgccagagaatcaatcccctttctcctcccagtgatggaaaaaaaagaaaaataaattggggggaagggaacatgggctcaaggttgttttggtttggatgctaccaatgttgccctctgctggtggaacgctcaacttgcagatgaccagttgcgttcttttgctgctgtcaatctagtccaaccccaatttataaacaggctgtgcatgctgaaattcactgtttaaagcttacctgcattttcccataaatggaatcactgtttctcacagtggctgagcccccagggtcacctcccaaatcaataaagtaatcaaaacctacccatgtttctagggaaaatgctatttggatyaagtattcaccaagtgtttcctatgtgcaaggtattgcaaggggtaaaaatgtaattcaagaagagtctttgcctctaagacagttatttatcttgttaggagaaataaaacattagcatgagagactataagaag

SEQ ID NO: 729431 - DNA, 621 bp, Homo sapiens
gtgtccacaacggttaagtgaaaagaggggaaaaagatttaagtaaagcttgtatctggtaagcatcatttgggcataattagattgttattaaagcttgtatttcttttaccttgtggtcttatttggctgtacctcgttttataagagcacctgctttaatgaatatgtgttttcttaataagagagattgtaagctccttgacaaatgagccagggagatcgaactagtagtttattaattcactattatatgtatatatatacactgtatatatatgtgtagatatatatatatacagtgtatatatatatactgtatatatatgtgtgtaratatatatacacagtgtatatatatatatatatatatatacttactatgtgtgtgtatatgtgacttgttttattgcaataattgtttttttaaaaaaatttttatttccataggtttttggggaacaggtggtatttggttatatgaataagttccttagcgttgatttgtgagattttgggtgcacccatcacctgagctgtatacactgaactcaatttgtagtcttttatgtctcacccacttctcaccctttcccctgagtctgcaaagtccattgtatc

SEQ ID NO: 729432 - DNA, 628 bp, Homo sapiens
tcctttaccccacttatttgctacaaatgtccacaaatatgggtagatggaataatattttatacgctatgacaaatattacatagtttgcatagtaatagtttggctagcaatgacttcctaaagatgagaaattgtattcattkgttttcattgttagttcagcagctgtttctagagcatccctatctttacccacacatttatgtctattcctgggtgcaagagatagcttcagtttccccaaaacacatgaactaagtaaccacaaaggctggtcccacattctggaaaatcaaagcaaggcacaacaattttggtcttctggaagctggcaatcctgtatctggagacagctgctttgaaggggagaggcagcagcaagacccagggcagcttctatatatgaaaatctgaaatacccagttctatccttgcgaggtaatttgtaaggaagtattgtatctttgaagggcaggaaaaataaatttgactcctacgacaaaagagaaccatttgagtttggaccagggcagaaatggcactgcttgtttcaagagcacacattatcatcttccatgtgtccaatccaatggttgtgcagccacatatatgcaaattcatatga

SEQ ID NO: 729433 - DNA, 674 bp, Homo sapiens
cattctccaatatagaccatatgatgggtcacaaaacaagtctcaatataatttaagaaaatcaaaattatatcaagtacactctcggactacagtgaaataaaactggaaattaactccataaggaactctcaaaactatacaaatacatggaaataaataatctgctcttgaataatctttgggtcaacaatgaaatcgagatgcaaattaaaaaaaattatttgagctgaayggtaatagtgagacaacttattaaaacctctgggatgcagcaaaagcagtgttatgagaaagttcttagtattaaatacctacatcagaaagtctgaaagagcataaataaataatctaaggtcatacctcaaggaactagagaaacaagaacaaacaaaccccaaacctggcagaaaaaaaagaaataacaaatatcagagcagaattaaatgaaattgaaacaaaaacaacaaaaaagataaatgaaacaaaaagctggttctttgaaaggataaacaaaattgatagaccattagtgagattaaccaagaaaagatgagagaagatccaatagtctcaattagaaatgaaacaggaaatattacaaccgataccatagaaatacaaaaaattattcaaggcaactataaacacctttacacacataaactaaacaa

SEQ ID NO: 729434 - DNA, 674 bp, Homo sapiens
cattctccaatatagaccatatgatgggtcacaaaacaagtctcaatataatttaagaaaatcaaaattatatcaagtacactctcggactacagtgaaataaaactggaaattaactccataaggaactctcaaaactatacaaatacatggaaataaataatctgctcttgaataatctttgggtcaacaatgaaatcgagatgcaaattaaaaaaaattatttgagctgaacggtaatagtgagacaacttattaaaacctctgggatgcagcaaaagcagtgttatgagaaagttcttagtattaaatacctacatcaraaagtctgaaagagcataaataaataatctaaggtcatacctcaaggaactagagaaacaagaacaaacaaaccccaaacctggcagaaaaaaaagaaataacaaatatcagagcagaattaaatgaaattgaaacaaaaacaacaaaaaagataaatgaaacaaaaagctggttctttgaaaggataaacaaaattgatagaccattagtgagattaaccaagaaaagatgagagaagatccaatagtctcaattagaaatgaaacaggaaatattacaaccgataccatagaaatacaaaaaattattcaaggcaactataaacacctttacacacataaactaaacaa

SEQ ID NO: 729435 - DNA, 593 bp, Homo sapiens
aaactaatttacattaatcactgatcactaaaaacttgtagtggtatattagcaaaaacagtactactctgtgatgtcaatttttagcatatagatttacataaatgatttcctatatctgttcctggagaaataaataagatagctagagaaaggtacagctcaatatggcagttcatttcctaataagattaaaaattcacatggaaaaatcttaatatattgaaaatccattttttcaacagctgatttccccaaaaaggacacaaatgatttaagagaaaaagactctttgcttatgtagattgtggtgtatacatgacatatatatatatagaaagaaagaaacaagcttttgaaaaaygtgagtggagactttagctcccaggttctttttgatatgaaatatattttagaaccaaaacattttgtagctaataaattccagtgtgaaaatgtataaggatgcctgaaactggtaatgcttttttaaactctctatggctttggggaaaattgatgaacagaatgcatgaaaagtacaatctgcattttgaaatatctaaaaattacaagttaatcatttatcgcca

SEQ ID NO: 729436 - DNA, 492 bp, Homo sapiens
aactaaattacttgaaacaatattatgtatacttaatatatacagttgagtgctttaaatacatgtacatatgtatataaatatatacttcagtatcaagtttggcagtctaaatgttagctaagttatcattataaatatttattcttactttcttgggtagaacatagtatttcatgttgtgcatgtaaaacagttggtaaactgggcatttttgatatatatcatacacactgagattgaagctatatgccaaatggctactttgtatgayttttaatggagttctaaaaaataataataaatgacataagctaacccatctgaaagaagacagaaaagagcagcttcaatggtcatatacttttattgagagacctgtctatggctgggaatccatgactgttgaagattgaaagaaataatgtttgctgagttatgaaaggtaagtttgttgaactatgtcacattagaaaatgcaacttggctgtc

SEQ ID NO: 729437 - DNA, 492 bp, Homo sapiens
aactaaattacttgaaacaatattatgtatacttaatatatacagttgagtgctttaaatacatgtacatatgtatataaatatatacttcagtatcaagtttggcagtctaaatgttagctaagttatcattataaatatttattcttactttcttgggtagaacatagtatttcatgttgtgcatgtaaaacagttggtaaactgggcatttttgatatatatcatacacactgagattgaagctatatgccaaatggctactttgtatgacttttaatggagttctaaaaaataataataaatgacataagctaacccatctgaaagaagacagaaaagagcarcttcaatggtcatatacttttattgagagacctgtctatggctgggaatccatgactgttgaagattgaaagaaataatgtttgctgagttatgaaaggtaagtttgttgaactatgtcacattagaaaatgcaacttggctgtc

SEQ ID NO: 729438 - DNA, 663 bp, Homo sapiens
agtggagctgtttgaaaaatcattacccttctatttatctaaggagtccaccagagtatatttgtttaaaagaatgccctatttaaaatctctgcctgccatttttaatttctatttatggtctggtatctcatagcatattaagctactgtgttagcgaaacaaataaaagagaaggtgcttctttaaaagacaatacattaycttagctctttatgttgtattccttttgtatattctactacaggaagagactgtatttctcagctgcttcaaagtctccaagttatctttattttgtttctcaatacatttaaagatgtagttaactgagatctttaaagagtttcacccactgtgcataccttactgaaggtgttggataagcaatggtgaagacatgagacataatgtcaatggtgatgatgattctggtagtcagattttcaaagtgccaaaaatttggattaatcccatagcagtattaaaatcaccatagtcaatattttcttcctttgacatacatattataaaatagtttattattctcgcttgccaactgcattctatagcagaaagcacaacaaattgtgaagaactcattatagtttgaattgggcaaacctgagtcagattactggcagttttattaactacttgtgt

SEQ ID NO: 729439 - DNA, 669 bp, Homo sapiens
ataggtattatttccctttccctctttgaggatgaggaaatgcagactcaaagagattaaatgtctagcctgaggtcaaggagcttgaaattaacagagccagaatgtggaggtttgtctgtcaccaaaacacaggcactttctaccacacaagagaatcacaattcttacggataaagtagtttgaagagaagattcatatttggggaagtttataaaccttaacaggaataggccgggggtggtggctcacgcctataatcccagcactttgggaggcagaagcaggcagatcacctgaggccaggagttcaagatcagcctggccaaaatggcaaaaccctatctctactaaaaatgcaaaaaaagcagctgggtgtggtagcacatgcctgtaatcccagctactcaggaggstgaggcaggagaatcacttgaacccgggaggcagaggttgcagtgaaccgagatcgcaccattgactccagcctgggcgacagagagggactccatctaaaaaaaaaaaaaaaaagctagccattcttttggaaataattatttgtggagctcaggattctgttcaatctcttctgaaacctaagcggtagggatcttagaggtacacttccttccctccacatctccaggaggaaactgtggccatcaact

SEQ ID NO: 729440 - DNA, 595 bp, Homo sapiens
gaaatattatctcatgaagaatcagaaaatgttcatgatgggaaatcctggtgccaacgtcaaccaaatagcgtaaggacatacattcttgtgcctcagtgagtctggcaataaaatccaacttcccctctctttctttycttacactcaaagatacctgagtggtgaaatcacgatacttcactctgtctcctttacaaagatcctagcacatttactgcctttaggaacgataactgaagcatagaacatagaacaaaaagggaaataataaggatataaacattaaattagcaagagaaaaatagtagaacaaattcatatataaatatagttagaaacatcctaagtcaaacactaatttagccatgccaaaatctggaaacaattcaaagatcccttcaacaggtaaatggatagacaaaatacagtaatacattcaaatcatggaatactactccacaataaaaataaactactaaaaatgcaataacatggataaattccaaatgcattatgctaagtaaaagaagcaaattcaaaaggcttcctattgtataattccatgtaagtaacataaagaagatcattggct

SEQ ID NO: 729441 - DNA, 595 bp, Homo sapiens
gaaatattatctcatgaagaatcagaaaatgttcatgatgggaaatcctggtgccaacgtcaaccaaatagcgtaaggacatacattcttgtgcctcagtgagtctggcaataaaatccaacttcccctctctttcttttcttacactcaaagatacctgagtggtgaaatcacgatacttcaytctgtctcctttacaaagatcctagcacatttactgcctttaggaacgataactgaagcatagaacatagaacaaaaagggaaataataaggatataaacattaaattagcaagagaaaaatagtagaacaaattcatatataaatatagttagaaacatcctaagtcaaacactaatttagccatgccaaaatctggaaacaattcaaagatcccttcaacaggtaaatggatagacaaaatacagtaatacattcaaatcatggaatactactccacaataaaaataaactactaaaaatgcaataacatggataaattccaaatgcattatgctaagtaaaagaagcaaattcaaaaggcttcctattgtataattccatgtaagtaacataaagaagatcattggct

SEQ ID NO: 729442 - DNA, 595 bp, Homo sapiens
gaaatattatctcatgaagaatcagaaaatgttcatgatgggaaatcctggtgccaacgtcaaccaaatagcgtaaggacatacattcttgtgcctcagtgagtctggcaataaaatccaacttcccctctctttcttttcttacactcaaagatacctgagtggtgaaatcacgatacttcactctgtctcctttacaaagatcctagcacatttactgcctttaggaacgataactgaagcatagaacatagaacaaaaagggaaataataaggatataaacattaaattagcaagagaaaaatagtagaacaaattcatrtataaatatagttagaaacatcctaagtcaaacactaatttagccatgccaaaatctggaaacaattcaaagatcccttcaacaggtaaatggatagacaaaatacagtaatacattcaaatcatggaatactactccacaataaaaataaactactaaaaatgcaataacatggataaattccaaatgcattatgctaagtaaaagaagcaaattcaaaaggcttcctattgtataattccatgtaagtaacataaagaagatcattggct

SEQ ID NO: 729443 - DNA, 577 bp, Homo sapiens
gcagcagaatcacttgaactgggaggcagagattgcggtgagctgagatcatgccattgcgctccagtctgggcaacaaaagcaaaactctgtctcaaataataataataataataataataataataataataataacaacaacaataatataaatactggaactatcaggcagggaatttaatataattattattaacatattaaagccttaaaggaaaaaatggttaacacgcatgagcagttgagaaattccagcaaaaagatgcaagctataagattcagaaagaaacgctagaattgttttaaataatgtaacagatattaagaatgtcgttgatagactcattattaggctcatcatggcaaaaacaaaggattactrgagttatagataactcaaaaaatattaccaaaattgaaacataaagagaaaaataagggaagaaacagagaaaaacatctaagagctatgggaaaatatcaaacaatctaacataggtgcaattggaattcaagaaagataagagaaagaagaagtatttggaaagacaaaggcaaaggattttcctaaagt

SEQ ID NO: 729444 - DNA, 567 bp, Homo sapiens
ggagacacagtcctgccctcagccagctcactgtctgccccagctctccccactttacagatgagtaaactggggcacagaggagtgacatgcctgcttcaaggtcgctcagtgcctccaatagcagagctggcasccggccccaaggagcagagagatgttttttgtttgtttgtttgagacggagttttgctcttgttgcccaggctggagtgcaatggcgcgatctcggctcaccggaacctccgtctcctgggttcaagcgattctcctgcctcagcctcccaaagtgctgggattacaggcatgcgccaccacgcctggctaattttgtattttttttagaagagacagggtttctccatgttggtcaggctggcctcaaactcccgacctcaggtgatctgcccacctcagcctcccaaagtgctgggattacaggtgtgagccaccgcgctcggcctgagatgtttttaaaacagatattattggctgcgaatcaatgagaaaactgtgtgatggaagtctcaggatcccaagctaaatgttaagtcagtaattccactt

SEQ ID NO: 729445 - DNA, 512 bp, Homo sapiens
atacttgttatcttaactacttgggaggctgaggcaggaggatcactgaagaccaggagttggagaccagcctgggtaacataatcagaccctgtctcttaaaaaaaaatttattgccaggcgtggttgcacgtgctggtagtccagctactcaggaagctgaggcaggagaatctcttgaaccccagatgtggaggttgcaacgagccaagatcatgccatggcaactccagcctgggcaacagagaaagattctatctcaaaaaaaaaaawttttttttaagttaaaaataaaataaagactttggggcaatacagggggtcctgggagtgtaacccataacccccaagagtgatttctgcaatctcgtttcaaattacagggtcaactgctatgatgtgtttggagcccagtcaccctttggtggctacaagatgtcggggagtggccgggagttgggcgagtacgggctgcaggcatacactgaagtgaaaactgtgagtgtgggacc

SEQ ID NO: 729446 - DNA, 613 bp, Homo sapiens
taggactgttaagcatgccttgaggtaaaactttccattgatagtgagaaacaggttctctatgattaatagaagacacagagaaggcaaattgaggcttatccttctcgtgttatggtatagtaaagaaacaatccttaagatctattcctacaagaggcctgtctcttggaatggctgctggggaaggtaaaccttgctgtaaggcacccatyggtttaatttgcgcattaataactctcaaatcatgcagtagtcaccatcttccagacttttttggaataacaaataccggtgaattccaggggctgacttctctatatgtcctgcattcaattgttcttttaccaacagatgaagttgatctagcttctcctgtgttaggggccattgatccacccacataggtttgtcacaaagccattctaatggtaaggcagtgggtcgaggagaaatatcaatgatccccatcagaaatcctgacatccttgcccttttctgtttctccagttatagatatcgggttagggtttccttgtaggaatttccctaaaccttttccactctgatatcccatgtccttcaacattttaaatcctgggttatgaaagtt

SEQ ID NO: 729447 - DNA, 598 bp, Homo sapiens
ccgcatgagtggcagagaccatcgggcttcagcctcacctccctggccctctgccttttttatgggcttttcagtgcctggagcacctcctgctcccccttttcctggagaactggcccctcacttcccatacttgccacacatgctgccctgccccatgcagtcctcccacagagtgcgatgagttarggtctcctgctgtgctccggatccaccttccagcaaccaccgaggctcttgtcaggtgcaggttgctctgaatgtgtgtggcacatgcgagtcgctggggacagcgttaggcttgtgtgcttgggaccctgggtggtctgatgggctgtggtcagtggcctggactagcctgggaactgttggaacatggaactttagggcacagtggtccctgagttggagcctgttgtctgaactgccttcctggtgtgcatcttcagtgccatcccgcagttctgcctgtgtcagcccttcctggagccccctccctcccctctgagagactgactttgcttatagccaagcatctttcaaatgcctcttgctcagaaggactaaccttgccccccaagacccattctccagttga

SEQ ID NO: 729448 - DNA, 587 bp, Homo sapiens
agctgtggccctttcaaaccgacctttttcgcagtgtctgtacttccttaactggacgtcactagatcccgcagttcgaagatgttaaatttgaagcagcaagtctgttgtctgaattgtactgtcaagaggtaagaacatattaaggtttctgaaagcaaagtgtctctccgtgtcgctaagacatgacagcacattggtaaattggggttccgggagttggaatccctccggctttttttgtttttttggtcggggtgggaggacagggtctcactctgtcgcccaggctggagtgcatggcacaatcatggctcaccgcagccttaaactcctgagctcaagtgatcctcccacctcagcctccygagcagctgggactataggcatgcaccaccatgcctggctaattttttttatttgttctagagatgatctcgcccaggctggcctcaagcaatcctgcctcgacttcccaaagtgccaaaattatacacaggaaccactgtgcccagcccggtggcttttaacactcagattactttcctgcctcttatgccccagccccagggctttggtgggtagcc

SEQ ID NO: 729449 - DNA, 624 bp, Homo sapiens
ctgcagcatgatttttaatgatgtagtaaatagtatatatccactgctgtttatgccttttatcggaccaagggatgatgtcccagttttcactagtaaaaatacactataatgaatgtgtagtagctaaagttttattgctttctcttgttgttttttgagaactagaatttgtgtttgtgtatctgtgttatgtgtatagttctgtatatctaaagtgtaacttagactctattcagtgtcatatccagttacttgccatgccattcactatgataaccatttgctaagcccctttcttagtatcttatttcattcctataaaaatcctgtgaaataagctgtcagtatctgttttatgggcgaaagcactgaagcacagagtttaagtagttcaaagtcagctagtaaggtagcagagtaaatttgagttttsatctgcccgatttctaagtccacaggtgaggcaggtctcaaagataagaggaggctattactttatctgagctcctagagccaaaagcatctccccaggctcatctgggccagtctcaataaaaggattcacctaaactattccaggcagatagatcagagatctgagtttaagactcttgggttccc

SEQ ID NO: 729450 - DNA, 606 bp, Homo sapiens
ttatttgtgtcttcttcaatttttacatcagtgttttatagtttccagtttgcaggtaatttactttccttagttaaatttatttctaagtgttttattttttcactattataaatggaattgttttcttgattacttttttagatagttcattgttagtgtatagaaacactattaatttttgtatgttggttttgtgtcctgcaaagttactgaatttgtttattagttctgtttgcagatgacaggatcttatatgtagaaaaattctaaagattccattaaaaaataattgtgcactgccaaaaggtgttrttgttgttgtttttaagacaggcttttactctgtcacccaggctgaagcgcagtggcacgatctcagctcactacagcctccaccccctgggttcaagaaattctcctgtctcagcctcccaagtagctgagattacaggcatgtgccatcacacatggctaatttttgtatgtttagtagagttgaagtttcaccttgttggagagcctggtctcgaactcctgacctcaagtgatccacccgtcttggcctcccaaagtgctgggattacagtcatgagccaccatacc

SEQ ID NO: 729451 - DNA, 608 bp, Homo sapiens
gcaggatcaagtccaaatagggctttcactaaacatgaggcagatggggccatttccaaatctggagttaggaccacagtcaatgagtttgccacctgggtgtgggtctaccctctcaaaacaactctcctaggtcttgggctccactggggttttacaactcctgcctaaatcctcaggttctcacaaaggcacttttgcctgtgaatggatgagacatttttgttgctattggggaatgtgagtgggagacaacctactctgccatcttgctgacatcgcttcctagcttcctttgtttctgttgagaagtcagtggtaatttgaacaaytgtcccacttgtgtaatgtatcattttcctctgtcttcattcaaaattttgtcttctttttgattttaagaagcttgattatgacatgcctaagtattgttcttttttgtatttctcccattttagatttttctaatattcttggatctgtaaatttatatctttcaccaaaatctggaaaacttttggtcattatttcttaaaatattttttctgtctttttctggaaccccaattatatatatatatatacacacaattatatatataatatat

SEQ ID NO: 729452 - DNA, 696 bp, Homo sapiens
gctgctccaacctcttgctctgggctcctgaagtgctgccaaagctccatgccccaggcctggcacccatgttccatgtgcaagcactgcaccaccctgggcccagttccaccttggggcccccttctgccagacctcactgctcctccrccagtgggcaactcatcctggacccatcgcagcagctttcagggcttccagggctcccagggctcccaggggcaggctcagggcctgtctacctcttgtccatgcccttcttgcagtggcagggagcaagagtggtgatgcggggtcaaggtctggagtggtggaggctctggtcctgggggcaggtcttgcctggccacacaaagctggggttggtgcagttggctgccttggggatgcagggcacaggggtctccccactgccactgctgctctcacagttgcttctgccaccaccgcttgcacctccccactatggctggcaaagtggcagtggccactccagatggcccaccactgccatcaatcccccctctgaagacgtacatctaactgctgtaaggatagggatgatgaccactcttaactgcttcatgctgacatggggtgttgttttgaggaaaacggcagttggatctctctcagagacctatctaaggatccctggtaaaaagggagctattgtgtgaggctccagttgcatta

SEQ ID NO: 729453 - DNA, 591 bp, Homo sapiens
acttacctcccagagtgcttgtaagcatatggaaaattctgcataatacaaggcacacaccacgtgttcaatgaatgatgactactggctattactcaagctacaagagaagtcaagggaaagattctctttctgcagcatttctcctatacttccattgcagcccacagggcattataattatttttgtttgtctgtttccttcagtagataatgagcatcccaagaatagagactgccctatttatccctgagcttccaaaatctggaacaatagccaccaaaaatagcaaggaccacagcagctgcaaggtgagcatatacaacaggygggacaccagccagagcattatatacttctttttatttaccttatcacaatctgttaagattggcattataatttccatttaaaggtgggggagctgaggtgagaaagcatacataatatccttatggtcttcaagctgtaattggcagagctgagacttggacccaggtctgtgctcctgggataggaagatctttgcccactgccacatcactgctcacactgtaggcatgtgaaaaacgttgcacacatgagtgaac

SEQ ID NO: 729454 - DNA, 584 bp, Homo sapiens
cacaatctgttaagattggcattataatttccatttaaaggtgggggagctgaggtgagaaagcatacataatatccttatggtcttcaagctgtaattggcagagctgagacttggacccaggtctgtgctcctgggataggaagatctttgcccactgccacatcactgctcacactgtaggcatgtgaaaaacgttgcacacatgagtgaacagatgtgaaagtgttttcagaaattaagcaccacctagtgctgcaaatattggagtcgtgggtggagtgtgtcttcctggcccaccctcctccttgtccaaatatgacctgtgagccattcaaacataggcccgaagtgtcagcattwttcaggtctggaagcagacaaattaactgaattgctatatattttttacaaaataatgtcagctgagtatgtgagttggcactaaagtaataattttgcacagggcctgggatagcagtcatcctttatgtgctagagggataatggagacagagggagaaagtggctctgtccagcattggaaatggattgcaaatatgttggaagagatgctcacccac

SEQ ID NO: 729455 - DNA, 510 bp, Homo sapiens
tgctgagaaaatcctgtgtgcccagctctgagctagccctgctgtatatgatttcattttatttaccgtaagttaaatttggcaattttatccccactttacagatgggaacactgaagtttggagaagttaacacattgtttagggttatggttttcagtctatttttctcttttctccccctgtatcttctttctccttatctgtctctattgttattggagtatgaggtgagcctagtctcaatcttttgtccacctgctcctccaataaatgacttcagagagagctgtaacctcattcatgtccccagttttctccttttyccttgacctggatcaccgggggtgcaaatgaggagatacaagggtgatggaagtcttaatgccaatttcacattattccaggagatgactacacactctaatcccttctctctggccttcatcttttttgcaggtggtgaaggcatttgtggtcctggccttgcagttcctgtcccatgaccca

SEQ ID NO: 729456 - DNA, 555 bp, Homo sapiens
ttcccgtgttaccataaattaatcgcaaatatcattctcatggctacaaatatcacatcatataagcataccattatttattataccagcagttggcaaaacatttctgaaaaggaccaggtagcaaatatatgaggcatgatgggccctatgatctctgtcctacaagtcaagtctgttgttcaagtgtgaaagtagccatagacrccgggcgcagtggctcacgcctgtaatcccagcattttgggaggccgaggcgggtggatcaccaggtcaggaaatcgacatcatcctggctaacatggtgaaaccccatctctactaaaaatacaaaaaaattagccaggcgtggtggcgggtgcctgtagtgccagctactcaggaggctgaggcaggagaattgcttgaacccaggaagtggaggttgcagtgagccgagattgtgccactgctctccagcctgggcgacagagcgagactccatctcaaaaaaaaaaaaaaaaaaaaagtagccctagacactatgtaaacaaatggatgtggttatgttccaat

SEQ ID NO: 729457 - DNA, 622 bp, Homo sapiens
ttactaaaatagttttcatcatcttttgttctcattaagtggaaagacatgaaggatctagtcacatccttagttaccttgatggcctttccaaatttagaattcatcttcttagctgtaatcaaatctaaccagattaagcccttaaggcaaccttcctgcacgttccgtccttagtcatgtcttcattacgtttgttcatgtgtttgagagatgcaggagttggaagagaaaggactgatttcccccttgtttagagatccgttttctatagccattgatctctgccattcctacatcccagcccccacaacctagactcctccctgcaaatggagactataagtcaatgttttytgagacatctgaccatacttgcaaaatagttccagcgcaaaaagaacaagaacattggaagcgagggtcagaaggagcctagaaaacctgctatattgtatgtgcattgggtcactgttttagatttagaaatgtttcacaatgtcttcccgaaaagaatgtttaaatggtggattttaagatgggtgcttaaattcaggcatctgttccttcacacaatgggcaaagaatggaaatgtaattagcaatgtaagtcaagctctta

SEQ ID NO: 729458 - DNA, 655 bp, Homo sapiens
aatcatcacctcatccagggacactggctatcttcaaagatgggtgcggcgactccacatcactgtgaccttctttgctaagtgtttcggaaacagaacacgaataaaatactcatctcagaaccagagcactttttggtcttctgggacatgaataattcacatacccaagtggaggccaatcaatgatctgagaatgatcaacgcaccctggcttttgcaggtggtcctggcacgttccaagttccacagaagccctgacccttccccgatggctgggttttggctccgcagatgaatgccaccttcacaataacaccgtctcactgctggaacacacaccagattgcaccctacccrctgctggtgacccagcagcccccacgggctgggccatcttcctcagcccttctgcccacaggaaaaccaatgggagaagaggcccttgtcctttggccttttcccccttgctaatgacaaaaataagtccgtgtcgggttatgacagcaagcagatggaggtcaccagattcactgaaatgaagctcttctaggaacacaaagccttgtttaattttttaaaaacagcaaaaagattatttaaaaaagatctttctcctagtcttctgtgagacaaagaaattataaagatggca

SEQ ID NO: 729459 - DNA, 431 bp, Homo sapiens
aaacgattttaaaattaaggtgctatgtacttaatgccactgaatcgtatacttaaaatggtaaattttatgttatgtgtattgtgtgatacctaaaaaaattaatttaaaaagtaaaattgctctgtttaggataaaatattattgtgtaccaaagaaattttatataaaaacaagcagtctttaccccagcatactgtgaagctgaagtacatgtaattgccgtttttgtaggtttaaaatggttgactatcagcaatttcatatggttcagcctgtatctttataaataaaaygaagttttgtccccgtactggcgaattactctttagtgactatcagtggacgcaagggctgtgagaaataaccttagcatgatggctttttatattagagccactgcggttacagaatatgtttttgggcattta

SEQ ID NO: 729460 - DNA, 588 bp, Homo sapiens
cgaaaccccgtctctactaaaaacacaaaaattagccaggtgtggtggtgcatgcctgtaatcccagctactcgggaggctgaagaaggagaattgcttgaacccaggaggtggaggttgcagtgagccaagactgtgccactgcactccagcctgcacaacaggagcaagactccatctcaaaaaaamaaaaaacaaaaaacaaaaacaaaaacccacaaaaaaccaaaaagcttattcccaatttttaagtaaaaatatttcatggccgggcgtggtggctcacacgcctgtaatcccagcacttcctgaggtgggtggatcacgaggtcaggagttcaagaccagcctgaccaatatggtgaaaccctgtctctactaaaaatacaaaaattagccaggtgtggtggtgcacgcctataatctcagctactcgggaggctgaagaaggagaattgcttgaacccgggaggtggaggttgcagtgagccaagatcgtgccactgcactacagcctgcacaacaggagcaagactccatctcaaaaaaaaaaaaagcgagcttattcccaatttttaagtaaaaata

SEQ ID NO: 729461 - DNA, 529 bp, Homo sapiens
aggaaagttgaaagaatactaaagtcatttaatatccacatacccttcatctagattgtatctgttgttaacattttgccacatttgatttatttatgaggctatattttatttttgtgctgaataatttgaaagtttgctttattcctcatttataaactctcttgcatgtatctcctaagaacgaagacattttctgatataaccaccgtacccttatgaggaaaattaaaatacaaatacaatactatctccycagttgacctcaataatgtcctttataatttgtcctgtccccaccccgattccatagctagatgtcatagttcttcagtctccttcaatttggaatagtccccctagcctttctccctaccttctgtgacatttttcccccagtataggcctgtagttttgcagaatgtatctcaattaggacttctgtggtgatttcctcttgattagcttcaggttaaatatttttggcagggattctaatgagtgatgtgttctttacgtactacatcac

SEQ ID NO: 729462 - DNA, 675 bp, Homo sapiens
caggcgtggtggctcatgcctgtaaccccagcactttgggaggccgaggcaggcaaatcacctgaggtcaggagttcaagaccagcctggccaagatgatgaaaccccgtctctactaaaaacacacacacaaaaaattagctgggcgtgacggcaggtgcctgtaatcccagctacttgggaggctgagacaggagaattgcttgaacctgggagggggaggttgcagtgagctgagaccatgccagttgcacactagcctgggcgacaagagtgaaactccatctcaaaaaaaaaaaagacatttgaactggttagcaacaacctaaatgggaaattttcccatgataactttgatttctgacctatttggaaaaatctgaaaatctgtctgtgttggacgagtgttttcacatggcaacaattcacctgttgctgatcagtggtcgcctcttttagacagcctgtgctctccrgttcaagttctacagtgtctggtccatacttttactttgtttgcctagccgtctcagtcagcatttggattttcaagacaaatctattaaggcaaatccacattgacttataatgaattttttttaatttctacaatttgtttgaattcattatctgagtctccagtctttgcatgttttttattttttagaggctgcc

SEQ ID NO: 729463 - DNA, 586 bp, Homo sapiens
tcaatagataaagctgttaccaagctccgtgaaatgcagcaaaaattagaaaagggggaatctgcttcccctgcaaacgaagaaataactgaagaacaaaatgggacagcaaatggatttagtgaaattaactcaaaagagaaagctttggaaacagatagtgtctcaggggtttcaaaacagagcaaaaaacaaaaactctgaaaagctctaaccccatgttatggacaaacactgaaattacattttagggaattcatcctctaagaattatgtttttgtttttaatcatatgttccaaacaggcactgttagatgaagtaaatgatttcaacaaggatatttgtatcagggttctacttcacttcattatgcagcattacatgtatatcacttttattgatgtcattaaaacattctgtactttaagcatgaaaagcaatatttcaaagtatttttaaactcaacaaatgtcatcaaatatgttgaattgatctagaaattatttcatatataaatcagaatttttttgcatttatgamcggctgtttttctactttgtaattgtgagacattttcttgggga

SEQ ID NO: 729464 - DNA, 533 bp, Homo sapiens
agaagctaccccctccctgagtgctggcctgcctgtccccacagggcacatgctagtgctgcctgaccttggtcttcggtcaggcactgactccacttccttcagacctcaggacggggcccttccccagccccccacatacaaggctgccctcagtcctctggtttttatttgagctctcttgccctgggggctgaggaaggagtgactccaggccatacacagacagatggagaggctagagactgggaggtgggggtgtggaagctgggccaccagttcctgagggggcaggggagatgagtgaaggagcgccaaggtcaccagaagaatggagcaggcttccccaggggctccctgtggcttgggcacccctgcctcctggcccarcgtgctttcttccgcagcccgtgctgccaaggcagaaagctaaggtgagcagacgagatcttccccgagagaaccctggctgggtgggtagcgttctctggaagggtagcctggattgggggactcttgttgaagaaaggtgg

SEQ ID NO: 729465 - DNA, 634 bp, Homo sapiens
gaaatatatcagacctgaggccatattatgaaaaagatgtaaggtcttgagggtaaattgatcaaaaagggaacactgagactctctcatcagaaggattgtctgtttatgaatagaatagagagctcctttctttcaagcagagcttggtttgatgcagacctcttccaataaaccactttcttttgctctgacgctgccccaaaccaaaatgggccaattacataatcactgctcacgtctaggaaactggataaaaaagagaaatcctcccccgtgtgcctgyaattggagggatgtgggagagacaggaccagggtcataacattggaaagtagtgggcaaatcaggatggtgtagaaagggactggacagaggagaaagaagtcatgatgcttggtgaccttgggcaggcctcatggcctctctgagctccaatttcctcattcatataagaaggtaggatgatttggaggtctcttcttcagcttgaaactatgatgctgtggttaggttccagaaacctgtatatttttctttctaagtacagttctgccccagactagccctgagtcctaatgcacagcacctcattcctctgtttattaacaatgtgtttctgatgctttgacac

SEQ ID NO: 729466 - DNA, 602 bp, Homo sapiens
aattggaaaatctggaagaaatgaataaattcctagacacatacagcctaccaagattgagccatgaagaaatccaaaacctgaacagaccaataacaagtaaagagttggaagccgtaacgagaagtctcccagtgaggaagatcctgggacccaatagcatcactgctgaaatytaccaaacatttaaagaagaactaataccaatcctactcaaactgctccaaaaaatggacaaagagagaatacttctaaactaattctgtgaggccagtattaccctgataccaaaaccagacagagacacatcaaaaaagaaaactacaggctaatatctcttgcaaatattgctgcaaatatcctcaataaaccagcaaccaaattcaatgatacattcaaagctcactcatcatgaccaagtggaatttatcccagggatgcaaagatggttcaacataggcaaatcaatcaatgtgatacatcatatcaacagaacgaaggacaaaaagcatatgatcatttcaattgatgctgaaagagcatttgataaaattcagcatccctttattacaaaaactctaaaaatcttggtatagaaagaa

SEQ ID NO: 729467 - DNA, 602 bp, Homo sapiens
aattggaaaatctggaagaaatgaataaattcctagacacatacagcctaccaagattgagccatgaagaaatccaaaacctgaacagaccaataacaagtaaagagttggaagccgtaacgagaagtctcccagtgaggaagatcctgggacccaatagcatcactgctgaaatctaccaaacatttaaagaagaactaataccaatcctactcaaactgctccaaaaaatggacaaagagagaatacttytaaactaattctgtgaggccagtattaccctgataccaaaaccagacagagacacatcaaaaaagaaaactacaggctaatatctcttgcaaatattgctgcaaatatcctcaataaaccagcaaccaaattcaatgatacattcaaagctcactcatcatgaccaagtggaatttatcccagggatgcaaagatggttcaacataggcaaatcaatcaatgtgatacatcatatcaacagaacgaaggacaaaaagcatatgatcatttcaattgatgctgaaagagcatttgataaaattcagcatccctttattacaaaaactctaaaaatcttggtatagaaagaa

SEQ ID NO: 729468 - DNA, 602 bp, Homo sapiens
aattggaaaatctggaagaaatgaataaattcctagacacatacagcctaccaagattgagccatgaagaaatccaaaacctgaacagaccaataacaagtaaagagttggaagccgtaacgagaagtctcccagtgaggaagatcctgggacccaatagcatcactgctgaaatctaccaaacatttaaagaagaactaataccaatcctactcaaactgctccaaaaaatggacaaagagagaatacttctaaactaattctgtgaggccagtattaccctgataccaaaaccagacagagacacatcaaaaaagaaaactacaggstaatatctcttgcaaatattgctgcaaatatcctcaataaaccagcaaccaaattcaatgatacattcaaagctcactcatcatgaccaagtggaatttatcccagggatgcaaagatggttcaacataggcaaatcaatcaatgtgatacatcatatcaacagaacgaaggacaaaaagcatatgatcatttcaattgatgctgaaagagcatttgataaaattcagcatccctttattacaaaaactctaaaaatcttggtatagaaagaa

SEQ ID NO: 729469 - DNA, 639 bp, Homo sapiens
gggatgctgctcaatattctataatgcacagacacccccagccccaacaaagaaccgtctccaaatgtcagtagcgctgagattgagaaatcctgctctaaaagatagacactttctaaaaatacaactacaatgccattatcatacatgaaaataacaaatactattatattttaataaagcatgaagtgcccaggacaggaattaggcatttcatgcttatggtttttatttgaaagctaaaaggatctccatgggcatatgtattaagacctcaaaggagmattcaacaattaactcacatggtgtcagtgaactcgagtcctcaagctactttgagaatatcaattatgattctcattttcagataaagccagtgaaagaaggagttcccccctttaatgttactttgagtcccctcctctatcaaccccacttctgttcatggaattttttaaatatatagaaggttacagtggaggaagaaatcagaaatcacccggctccacattcagctttcagatgactaatctaggtcgagaaggcttccctacttttccaaagaacacacagctggctttaaaaataaaaataatacaagtaaaggcattttttcattcaaaatacaggatcttattt

SEQ ID NO: 729470 - DNA, 598 bp, Homo sapiens
gtgctctccaatgttgctgagaaagcagtgggaatggccaggttagggtctggagagagaagggttagaaaaaaaaaagtcacgtcaaaaagttaacaagatagggaggaattatccccactacatagtggactattgagcacacgctgtcctatgtggaaaagcatctaggaacctgcacgcactaggtgatcatgaggtattcttgttattgctgagaatctttaaaaacaataatgctgggagccaatgcagagaggttagatgaggttacaaaatgctgatctgctgcttttaaggaggtgccaataaagaaagtcagaaataaattataacatcattccagaaacagaagtggagacctcagggtggtgatcagttcttgtttctcctctttattgtttttgagttrttttgggtatgaggcattgaactctctatttggagacaattcgccattgtgcaggtgttgataaattttccaaaggggaagctaaaggacctcagacaattccctctcccagagttttctgtggctggggtttgagcacatgacctaggctcatccaatgagaaagttgcacctaggactttgtgt

SEQ ID NO: 729471 - DNA, 610 bp, Homo sapiens
atgtcctcccttccccaacaccatcacccagcaggctccagtacccttgaattctttcctgggtgtagccaagagccctcccaggctaagcctcaattttggagttcatctgctctgcatcattacagtacgctccagcagttcaactcctaggtgtatacccaaaagaaatgaaaacatacatccacagaaaaactcctacacaaatgttcatagcaatgttattcataatagccaaaaaggggaaacaacgtaatatccatcaacagaagaatggataaacgatgtggtctatccatacattggaatcacattcagctttacaaggaataaacaagatccacgtgctataacatcggtgaaccttgaaaacattatgctaartgaaaaaaaacagacaagaccacaaattgtatgatttcagaatatacgtaaagtggactttatacaaaatgttcaaaatcagcaaatatgaagatgcagaaagtggattagtgactgtcttggaaggaggggaggaaacaagtgactctcacggttacagagtttcttttggggagatgaaaatgttgtaaaattagattatagtgatggttgcacaatcttctgg

SEQ ID NO: 729472 - DNA, 610 bp, Homo sapiens
atgtcctcccttccccaacaccatcacccagcaggctccagtacccttgaattctttcctgggtgtagccaagagccctcccaggctaagcctcaattttggagttcatctgctctgcatcattacagtacgctccagcagttcaactcctaggtgtatacccaaaagaaatgaaaacatacatccacagaaaaactcctacacaaatgttcatagcaatgttattcataatagccaaaaaggggaaacaacgtaatatccatcaacagaagaatggataaacgatgtggtctatccatacattggaatcacattcagctttacaaggaataaacaagatccacgtgctataacatcggtgaaccttgaaaacattatgctaagtgaaaaaaaamagacaagaccacaaattgtatgatttcagaatatacgtaaagtggactttatacaaaatgttcaaaatcagcaaatatgaagatgcagaaagtggattagtgactgtcttggaaggaggggaggaaacaagtgactctcacggttacagagtttcttttggggagatgaaaatgttgtaaaattagattatagtgatggttgcacaatcttctgg

SEQ ID NO: 729473 - DNA, 644 bp, Homo sapiens
ggccaccgccttcatcaggctctcaaattgaccttgacatccactgactttaagagccctaagccttgtctgcttttattcttttttttttttttttgagatggagtctctctgttgcccaggctggagtgcagtggtgcgatctcagctcactgcaacctccacctcttgggttcaagtgattctcctgcctgagcctcccaagtagctgggattacaggtgcctgtcaccacacccagctcatttttgtacttttagtagagacaggtttcaccatgttgtccaggctggtctcgaactcctggcctcaagtgaactcctyggcctctcaaagtgctgggattagaggtgtgagccactgtacctggcctactttcattctttatatatatgcacactcctgaggaagactgatgtcatgaagcaaactccaggactgaaaatctcaggggtagagtgctgtttctatgatgtggcatttttacaggctctctttcatccctttcttcttgctcgccctccctccccacctcccatcctgacccccgctgaaacacacagtcacgggacaggtcctcaagcaggtacaactcaaaatgctagagcaatggagcagcaggattgtgagggagaaacacagctt

SEQ ID NO: 729474 - DNA, 546 bp, Homo sapiens
atcttcagcctctagaagtgtgtttggctcacagctggtgctctataaatatttggggaaagagtgcttgaaatgagatcaagtacgctgaatgcttgacaaagagcaagcgctcagcctcacccacaccaaggctgcccaaaggctgctctgatgcttcttggctgtcctcccacggggtctaggattctgccattgtcatgaaagcagccacaggcaatacatacatgaatgggtgtggctgttttccaataaarctttatttaagaaaataggctgagggctgggtttggcccataggtcctagtttgctgattcctgatccaggacagtctcctctggggtccctcttgtatgaaatggaagtttcagggcaggaactagcatttgcaaagcagctatgtctcagtcaaggcccctgaaacggtgcgtctcagcaggaccctgggcgtgaattacaacaaagttacagttcataaactttattgttcagcagggctttgaccccaactttgctttctgctgattttttcaaagagccttgga

SEQ ID NO: 729475 - DNA, 509 bp, Homo sapiens
ggaggccgggaggactggagtggagtaagtgagaagagtaatgggatgtgaaggcagaggggcacatggagtcgattacacactccacagtaaggaccctgcctttactaggagggagctaagaggccactggtttcaagcagatgagtgaaatgatacgtttggtttatttatttatttatttagtgcaataggtagtgatctcagtccacaaacacagaaagaaaatgaacatcacttcattttccataagacatctctcactcatytctcacaggagagaaatctcatctcagtccttaccatgcctcctaccttcatctgaggtcactcttgaatgaggacagtgtgtataaaggccgtgacatgaaggcctacctctaactgaattgtgtcatggtcaatacaacaatcaccaatgtccttttcatctgatctgtaagaggtcctgtgtcgtgaatggggtacggcttgagacccctgtcctaggatcctatctttttctgcaa

SEQ ID NO: 729476 - DNA, 509 bp, Homo sapiens
ggaggccgggaggactggagtggagtaagtgagaagagtaatgggatgtgaaggcagaggggcacatggagtcgattacacactccacagtaaggaccctgcctttactaggagggagctaagaggccactggtttcaagcagatgagtgaaatgatacgtttggtttatttatttatttatttagtgcaataggtagtgatctcagtccacaaacacagaaagaaaatgaacatcacttcattttccataagacatctctcactcatctctcacaggagagaaatctcatctcagtccttaccatgcctcctaccttcatcygaggtcactcttgaatgaggacagtgtgtataaaggccgtgacatgaaggcctacctctaactgaattgtgtcatggtcaatacaacaatcaccaatgtccttttcatctgatctgtaagaggtcctgtgtcgtgaatggggtacggcttgagacccctgtcctaggatcctatctttttctgcaa

SEQ ID NO: 729477 - DNA, 721 bp, Homo sapiens
agtcacaaaattatgaacctatcttctcaaaagctgcatatagatgagaacagagcctataaatatgtacatcttagtatacaactatcttttttaagacaaatagaacaactatcttttttaagacaaatagaattagattagcacaatccatatctgatatcataatatctaaataatttccaaaattcaccaaactgggtatgacgtggtaatcagagtattttatcaaatcttctagtactatggattgcctctctaatagcagcctgaaagaatgtttggctgagaaaacaaccactaattatctgtaaactcacaatgatctttaaaatttctaagtacgtggttctcagcgggacaatcgcccttctaaatccagatgcttcaaaaactataacaaacttgaagtagtcaggtgacccctgagaaatacagtaaggagtaagccaaatttagtaaccttagtgtaggttaatagtagttaaggatacatttcactgggaagttcttcccttctctctartaagtacagattatgtttagtcagttataaaatacctggaagagtaaaataccttttctccctcctcggtagattagattgtgatttttctgcccaaaaatatagcaagcctgttgattagcaatagcccagtgtctagctctcaataaatatttgatgaataaataaatgactaaaaatgtatatatttctcaa

SEQ ID NO: 729478 - DNA, 575 bp, Homo sapiens
cagtgttaagattgcaatattgaaataccattacacacttttagaaaattatgaaaaaaaagaaaaataaatttatctataaaaatgaaataaagcaatcaaacaggtaagggaacaaaataagtaacagagttcaaaattcaacaaaatgagaaaaaaaaagtagttttcaaaaagaatgagataagcagcttaactcaactccttaaatcactgatatgatttggctgtgtccccacccaaatctcgtcttgaatttcatgtgttgtgggagggacccaatggaaggtaattgaatcatgggggcaggtctttcccatgctgttctcatgacagtgaataagtctcacaagatctgatggtttttaaaaaaaggagtttccctgcacaagctttttttcacctgctgccatccatataagatgagacttgctcytccttgccttccaccatgattgtgaggcttctccagccacgtggtactgtaagtccaattaaacctctttctttgataaattgtccagtctcagatatgtctttaatagcagcgtgaaaactaatacagtaaatttata

SEQ ID NO: 729479 - DNA, 578 bp, Homo sapiens
tttataggttctggctcctagcccctcaatcccctacctttccttagttggctccgccagtccctttcaccttaggtctcagtctcagcctgccagtcgtggctgtgactggcccctctccacccctacatgctggggagttggcctgtagccctgctctcagacctggcggccctactatcttgactgccgggccgctgggttgcctctgtctggcccgatgtcccatgatctcctccactgcaattttttaaagtaacttcaactttcattttagagtcacatgatgcatgtacaagtttgttacatgggtagattccttcaccgccatttttatatgagatcaagtatagagggaaaagttcaggtctcctacttactcttctctgtctcycttacgttggttccctggtctaagtttctatttgcacactctgtctcagtcctgatcaaaatccaagtctctattctgcctggccctactctaacaaaacaagagctcaccctaaagcctgcccaattgctgacgtcctggtgatcttccccgatgtccactggaatactacctgcccatccaa

SEQ ID NO: 729480 - DNA, 607 bp, Homo sapiens
ctcaggagctgccacatcttctcttctgccttccggactgctaaatagggaaaaatttcatcataaccaggctagggatatgctgagtctgataggagcagaaagcaattatatgcctaaaagactacatccctaagaactggcaggagtcagggaagttctcctgtgatttgaatttgaggatgcttgatcaaggagacaaaaacgtaaagctggataagcaagatttcattgaattagaagtattttatttaacacagtttaatgttctagcaaggtatggagggaatgagacaaactcattgctactgtggctcttagaaacctggaaaaaaacaatggtcagctttcagcaatgtagaaatgcctgcatttccctagcaggtgatagaggaagaaataaaggagctaagggaatatacttgctaaaatggataaatgacatgagtctagaaggtccamcagataagcatgttccatgggaagcccagagaacacagatagctttcaccaagatcgtcaggaatgcactggtgacgaggggacagactgccatcactaagaagttcaaaggcagtttcttcgcagactagggttgaagggaggt

SEQ ID NO: 729481 - DNA, 598 bp, Homo sapiens
tggattgtctagaagcccttatcgttttgttttattttgaaagccaggacaatatgattaccaactattagtttaatgacgaaatcttccagatggttatgatgattagaatgatcaagaaattagaagctgttcaatcctcataggaaggcttcagtggaatagactccctgctgcctcctgtagacttggacttatttaaggaaaaccctacaatgactagtttccagttgtagaaattggaagaagaaagaaatagcacctgcaagcctaaaagttctcttccttccaatgaaaaagsagcttaaacctgtccaaagtcatgtatgttacctcggcaagtaaaattttatcattctgtgtactgagtgagtcttcttcccctcccaagaggctttaactatagaacctttaggttttttttgtttgttttttaagaagggggtctagcaacaacctcaagttccaggacagtcattctttactgacaaaggaagcaaagatgaaagtccaattaaaagcccatgaaatttccatcatgtttctttgaattgagtttggagtctttggaattctcaaaataattcacatgaagatc

SEQ ID NO: 729482 - DNA, 471 bp, Homo sapiens
attttggggtttgaaaaattcatataatgattaaaggagaaagctcttatgagttattgtatgctgagatatatgtggacacacacacacacacacgcagtttattgcattgttgggttttatacataaaattacccaagttgcaaatatatgtctaccacccttgactctcaggatagtgcagcaggatgcagcggaacccccctgacttgctgacaagcrcagaccagtctagaagtggccctgtacatgtttctgcggaaccctgacactgaagctgttctggttgccatgtcctgtttccgccacctctgtgaggaagcagatacccggtgtggggtggacgaagtgtcggtgcgtaacctcttgcccaactcttaacacattcatggagtttgcctgtcagcaatgtgatgtcaacaggtaaatatgaatagtggtttttttactcaacctccctaaagcacatgg

SEQ ID NO: 729483 - DNA, 578 bp, Homo sapiens
tactagttgaaggagaagaaattcactcttgagattcaaatttgcagcctggaaggtcaagaagaaacatcaaacctcagagcaaaagtacaacaagaatgaaataaagagaccaaagataaactgggggggacccagttgggagcgctcacatgcaaaggaaagaaaaggtaaaagaaacaataatcgagcaacagtccgggcgcagtggctcatgcctgtaatcccagaactttgggaggccaaggcaggcagattgcttgagcccagaaatttaagaccagcctgggcaacaaggtgaaaccttgtctctccataaaatacaaacaaaattagctgggcayggtggcgtgcgcctgtattcccagcttctcaggagactgaggtgggaggatcacttgaacccaggaggtcgaggctgcagtgagccgtgatcgtgccatagcactccagcctgggtggcacagtagaccctgtctcaaaaaaataaaaaataaagaaacaataatcaaatcaagcaacaaatagatgttcctaagctgagaaaagaccggagtctacagagtgacaggttctgt

SEQ ID NO: 729484 - DNA, 598 bp, Homo sapiens
aaaatacgcatttttcttatgtgtctgtgaaaaacttagcaaaatcatttacttggtcacaaagaaattcataataaattttaaaagtggagagtttacacatctggagaaaatgaatgctttcctagtaaaatataaaatggccaaaattaactagaaggtgagtagaaacttaaataaactaattaccattgatgagaaaaaaaatctgccactgaaaaaggcacccggtccagagggtttcatgagcgggaactgtagaaacctttcraattcaactctgccaacaccttcctcctccaggaagcactcctggatttccctcttgccaacaagattctgggagggcagctcctccaacatgcccccaacagctctctgcagacatatcatatcatatcatatcttccataccataactgccatgccatacaatatcataactggatctgctgttcaatttctcctggacagtaagctacctgagggcaggaaccatcctttatttttcattgctccctagcccccagtacagcggctgacattcactgactaggtgaatatggtaaatgaaaaagcagaaggcacaatcgtcatt

SEQ ID NO: 729485 - DNA, 560 bp, Homo sapiens
cctggagcagtgaactaggttctcagtactcaagggttctcacaccccatccatttcaggtctggaaatagcgttaagactgtgctattccgaaagaatcgcagcttgttttctgatactttacaaaaagtaagccagatagacttagagtacttcatgtgcataacctcactgaatgttccctctaggccagggtttctcagcctggcactatagacatttggggttggataattcattgttgggggacggggcttgtattcgcctgttttcacgctgcygataaagacatagctgagatggggtaatttataaaggaaagaggtgtaatggagtcacagttccatgtggctggggaggcctcacaatcatggcagaaggcaaaaggcatgtcttacatgacagcagacaagagagaatgatgagagccaagtgaaggggaaacccttacaaaaacatcagatttcatgagacttacgcactaccatgagaacagtatgggagaaactgctccagtgattcaattatctcccactgggtcccttgcacaacacggaatt

SEQ ID NO: 729486 - DNA, 541 bp, Homo sapiens
ggaaaaaatattcttaatacctatatctgacaaagaacttgtatttagactacatttaaaaaaatctacaacataataataagacaactccatttttaaaaatatcaagaatttgaagacatatcacaggaaaatatgtattaatgggctgggygtggtggctcacatctgtaattccagcactttgggaggccctggtggaaggattacttgagcccagtagttcaagaccagtgcattggaaaatattttatcaaattcctataaacatatacttactatatgatgcagaaattttcactcctaggtatttacccaagggaaataaaggtgtacagtcacaaaaagacctgtacattaatgttcatagcagctttattcataatagttccaaactggaattaacccgcgtgtccatcaataggtgaaaggatcagcaaattgtggtatctttgtacagtgaattattactagcaataaaaaagaacaaacaaatgatacatgcaaaactgttaatgaatatttaaaagtcaaaaaattc

SEQ ID NO: 729487 - DNA, 527 bp, Homo sapiens
agatctttctacaacactttactttgagcctgttggtgtcattacatgtgagatgggtctcctgaagacagcagatggatgagtcttgttttttttattcaacttgcaattctgtgccttttaactggggcatttagatcacttacattcaaggttaatattgatatgtgaggttttgatcctatcttgaagttgttagctggttgctttgtagtttctattttgtggttgctttataaggtctgtgggttatatatctcagtgtgtttttgtggtagtatgtatcattcttttgtttccatgcttagaactaccttaaggatctctgctaagggtggtctagtagtaacaaattcccttagtgcttgcctttctggaaaaawattatttatccactgtttatcaagcttagttggtgggatatgaagatcttgattggaatttttttttctttaaaatgctaaaaataggtcctcaatctctccttacttgtaaggtttctatttggaagtctactcttgatgggg

SEQ ID NO: 729488 - DNA, 563 bp, Homo sapiens
atttttataaaaagagtgtgtgaaactttggctaccccacctgaagccacagacaaacagccttatattggggccactgcattccataattattattgccattaggaataattattatttgcttggttgagttggcagtttggagcctgcctgagacagaggcttctcaaaggagccacagaacacaaaggcccgaccaatcacccacaagtgcttcaacatgtttggacgatgtccttctcttggttcatttcattgggtttcatacccattgagcttcaaattgaatgaaarctgcatcagatacaaaaccagcatgaatgagtgctggtactcaggaagcttttttgattggaggtctgaattcttggcttttctcaagtctggagatgaaagttaatttttttcatgacactgtgttcctctaattaaaaatagaaaaatgaataacaagatgggtcttcagttagaggctaggttcgaaacagtctgagagacaaagtgcagaagagtgaggaaacccccagccaaaaagcagcaaggctgtttaggaggcagaacag

SEQ ID NO: 729489 - DNA, 574 bp, Homo sapiens
gttatttaggctattaccttaaacatttaccatttctttggagaacatttcaaatcttccaactattttgaaatatacaatatattgttgttaactatagttaccatactgtgctattaaacagtagaacttatttyttctatccaactgtgtgattgtgcccattaccaacccctcttcattccccgaaccccacccccgacccttcccagcttctggtaaccatcattctactctctaccttcatgagataaacattttaggcatcacaagtgagtgagaacacatgatatttatctctctgtgcctggcttatttcatttaacgtaacgaccttcagttccatccatgttgctgtaaatgacaggatttcttttttagggcccagtagtattccattgtgtatatataccacattttctttatgcacttatttattgatagaatatttgattgattccatatcttggctattgtgaatagtgctgcaataaatgtggaagagcaggtatccctttgataaactagttttatttcctttggataaatactcagtagtgagattgctggatcc

SEQ ID NO: 729490 - DNA, 574 bp, Homo sapiens
gttatttaggctattaccttaaacatttaccatttctttggagaacatttcaaatcttccaactattttgaaatatacaatatattgttgttaactatagttaccatactgtgctattaaacagtagaacttatttcttctatccaactgtgtgattgtgcccattaccaacccctcttcattccccgaaccccacccccgacccttcccagcttctggtaaccatcattctactctctaccttcatgagataaacattttaggcatcacaagtgagtgagaacacatgatatttatctctctgtgcctggcttatttcatttaacktaacgaccttcagttccatccatgttgctgtaaatgacaggatttcttttttagggcccagtagtattccattgtgtatatataccacattttctttatgcacttatttattgatagaatatttgattgattccatatcttggctattgtgaatagtgctgcaataaatgtggaagagcaggtatccctttgataaactagttttatttcctttggataaatactcagtagtgagattgctggatcc

SEQ ID NO: 729491 - DNA, 574 bp, Homo sapiens
gttatttaggctattaccttaaacatttaccatttctttggagaacatttcaaatcttccaactattttgaaatatacaatatattgttgttaactatagttaccatactgtgctattaaacagtagaacttatttcttctatccaactgtgtgattgtgcccattaccaacccctcttcattccccgaaccccacccccgacccttcccagcttctggtaaccatcattctactctctaccttcatgagataaacattttaggcatcacaagtgagtgagaacacatgatatttatctctctgtgcctggcttatttcatttaacgtaacgaccttcagttccatccatgttgctgtaaatracaggatttcttttttagggcccagtagtattccattgtgtatatataccacattttctttatgcacttatttattgatagaatatttgattgattccatatcttggctattgtgaatagtgctgcaataaatgtggaagagcaggtatccctttgataaactagttttatttcctttggataaatactcagtagtgagattgctggatcc

SEQ ID NO: 729492 - DNA, 611 bp, Homo sapiens
gtgaatgaaaaggagaaacggaaagtctgtacactgcaaaaatagagtttctagctccctaaaaccctttgagctgaaaggtgacaatcaaaacataaaagaaaaataaaatgtctgcaaaattgggttttgtgtgaaacatttaccttagttaaattagcagaattctgtattaagttggtgtaagaaaggatatgagtgtgcaygaatgtttttgttagaagcagcataatttgccagagattatgagttccacagttgaacttcacaccatctgaccaattcttcctttcccagacactgagaaatatctttttcagtccaatagacatccttaccaatttagggcttaatgtttgaccaaggctacaagggggaactgttaatattttttaaaaaaattacaatggattggaccttgagtataattagaagcagccttttttctagagcctagaaataaaaatattaataatgtgagcctgcttgttgagttccagtctcaactgattattgttgttctccttctcaagggagtgttaagtctttttggaagactagaggacattacatggataatattttctccaggtcacacgttaaggatccat

SEQ ID NO: 729493 - DNA, 612 bp, Homo sapiens
ctggtttctataactgctagtagaaaaaagaaaaataaaaaggaaggacatgaagatgtatagctctgtagagttttatagattacagagcctttatattttagttagtggacgttctggaaactttaaaacagattaaaatcatatccttaattgcttcaaataaaatctrcctttgtaaagcctacataactggcttcagtaatcaaaatgttaattacttcacagatcctccaaaacatatataaaatctatagtaaaaatcatataacctgtatcttcaatgaatggcaacactgtaaattctttaaataaaaagttagtattacctggccagataatggtgagtttaaaatgattttttctcattactcataacacaattcatgtcaccattctctttaaacatactgtacacagcagtgtaatccaatagaaatataatgtgagccacatacagaacttaaatttttggctacagtagattaaataaaatacatttctaaagttaattttacctgtttctttttacttttgtaatgcggctactgaaaaaactaatcatttcaacatgaaatcaataataaaagatgagatattttacattctttt

SEQ ID NO: 729494 - DNA, 538 bp, Homo sapiens
tatcactagggaaaaacattctatttaattatataatggcctttttgactatcttcatgagacaaaataaataaacactttcatttccaaagagaataaaataaacacaggatttgttctctttttctgagtagggtcactaagtatggggcaacagtctaagcaaagttayagtagattctataatgaaagttatctttgatattttcttcttgaaggtaggaacatgaattggacgtaaagttgcttcagagcctttaatttcccaaccttcattactccaaaaagaaaggaaatatttattgagagtctactatgttggagatacttcagtgggattaaattgaacacatttaaaatgtatttcctactaataaagataattttcaatgtgagagccgccactagggggggttgatttttcttaataaattcaactcaagattgaaagagcttcaggttacaattgtcacctactttactccaaaattttatggaatacttatattccataaaatttatatttaattggctgtct

SEQ ID NO: 729495 - DNA, 623 bp, Homo sapiens
agctgtcataatatgaaataaaaatgaagccagagtggcttcacacgcacaagctaataatccaagtgtatatattcaggattcgaagaaaatgaatgaatttattatctgacattttctgttcaatactaaccatttgccttgctcagtgaaggcaatttacrcccattgaaagatgttctgacacttttttcagaacatgctagttaaaacacagcagttttctcatcatgccttccagctcaaaccagtctgtatatcacaaggtggtccatggtacctcaaccaatagttaaccttccataatcttcattgactacagagccctcatgtctagcaggaaatttttactaaacaaattactacccgaaggatcaagtttacatctcaccaaacaatccacccactccccacctaaatccagataaaaatggcaatacaagcttagttttaacgtaaccttgaaactgaaatctaaaacctaaagagtaattcagcaaagaaactcccttgatttcacaacgactaatcaaccatgttctcttcagcaacattatttagtaacataatgatttaatctccctgggtctcagtttcctctctgtaaaatgtgtgtaactcag

SEQ ID NO: 729496 - DNA, 595 bp, Homo sapiens
ccaaatgttccacatagaatgtgaaaaaaaattattttaaaggaagatcatttatgtaataaatgttttaaatgaaaaagatctttctaataacatctgctattaaaagaagtatatataggtttatttactaggacaccttattaaatactacagtatagaaccactgctttctcacagaatagctggttttaaaagctatttcttctctttttatatttccatttatttgagtagtagtcccatgtttcattcttaatgtttctgtatgtattataaaatgtaatgttttctagaaggttggtttttcagtaaaaccacttaaactttgcagatggcatcgtggaatgagtaagctacagctgaatttctgttatggtctttacaagttgtgtgaccttsgaaaagttaattttttgagactccattttctcatttgaaaaatggagattgtaatgcccctcttgcagtgttaatgtgatcttcaaggaggttaggtccataaaacagttgacatgcaataagtatttaatatgtagatatttgtttttatttataaataaatatgtagatatttgtttttatttacaaataa

SEQ ID NO: 729497 - DNA, 576 bp, Homo sapiens
atctcatttgttgattttttatttcgttgcctgtgcaagaaaaaatccttctccagaccatgaagcatttatgctatctttcaggtcatacattcaagtcttaatccattttgagttttttttttataaggtgaaagatactgttctagtttcattcttctgtgtatgaatactcagtcttcccagcacaacttattgaaaatactctttccccagtgtatgttcttggtgtctttgttggaaatcagttggctccrtgtgggtttatttctgtattctctattatgttccattggtctgtatgtctgtttttatgccactaccatgctgtttaggttatatagctttgttgtatattttgaagtcaggtagtgatgccttcaggtttgttctttttgcctaaggttactttagctattcggggtcttttgtggttccataagaattttaggattgtgttttctatttctgtgaagaatgccattggtattttgatagtgtttctatcaaatctgtagcttgctttgggtagtatggaaattttaacaatattaattcttctaatccatgaatgta

SEQ ID NO: 729498 - DNA, 592 bp, Homo sapiens
cttggtatatgattctatgggctagaggacaccacaagattgtgacttatgtgctaacgtacaaagaaagttttgctgagtgcaattcaagttccatcctatccatttgtccatgtgcaaatttcaagagctatgtggctggaactattcacccttcttaaagagtttggtctgtggctatccacggtaaactggatctccagacttctaaataatccctacagtctgctatagggcattagacaaatctgtgatgtttttactttctgagaaactaattgctaagcattatgttaaaattcatattagtagctggttttttttggatrtaaacacagtatggctgattacataaaatttggaaaattagaaaaaaatacatagagaaaaagtcaccaaaaactaataaataagtgacaatctttgctgccattttgatatatttacctctcagtctgtttttctatgaatacaaatatatacagtgatatgttgcttaacaacaaagataagttctgagaaacgcatccttgggcgattttgtcattgtgcaaatatcacacagtgtacttacacaaacctaggtgatata

SEQ ID NO: 729499 - DNA, 614 bp, Homo sapiens
tacatatagatctgcctcattcttttgaaataggtgtatggcataatacatttgagtatttccctattgattggcatttaggcaatatccgtctttgaaatactacaaatgatattgcaaagaatattctagatgcacctaaagatatgtacagaaagactcgcatttctgtagggtagaaaatatgtagaaatgctgagccaaagcwtatgggatttgtaattttcacaagtaatactaaattttctgcttctctttgattattagtgaggctaaatgtcttatcataactaccttggccatttggttcatctcccatgacttcctacattttgtcctttttattttgaatttatagaaactctttttacctcagtgtttaataactttggagtcagagacatctgaatttgaatcccagttttgcctctttcttgctagatgactggcactttaccaaatgtctccaatctcagactgcttatgtataaaatgaagataataagagtacacatctgatagtttttatttctttaaaaaatttaaaaattgacaaattaatattatatatatatttatggtatgcaactttatgttttgatatatgtatacat

SEQ ID NO: 729500 - DNA, 638 bp, Homo sapiens
cttccagggtgcccttgtctctgctgaatgtcaccgacaagaatacatttacagcctttttttcccatgaaaaattttctgagtatggcagatagatgttttgaacaatcaaaactggtaaaagaaatataccacagattttatttcaaaggaaataaatctggcagaaagtatgtgtgtgtttgtgtgtgtgtttggggtggaatgttattttcaggtctttgactggaaggcatttgatcaacaccaattattatgattgtgatgatcagaattgccattgcagtgattaaattgtatccagtctattcttagcatgaccagatttggaaatctagaaattgttgagagggtgtacatayggatgagaaggccagggaaaggaaagattagtctctgtggaaggctggggctaaaagagaaaaaaaaaaatagtaaaagaccattttgagtaaattttgacctgttttaggacaggaaagagcaggagaacctgttacctgatgtggaaccagcaggatagtgatagcctgatttctaacctcactggatggttaaggaaacagggtgcagcgctgctctccttataagggagcagccatgcagatgaggtgatctggtgaatatcctagacagcc

SEQ ID NO: 729501 - DNA, 603 bp, Homo sapiens
tttctcctgttaaaccatttatggaaggagctcattgtctgtttgcttatgttatcatttgctatccagttaaaaattgctgttcacctctattgcttagtcaatataagaatcttgactaagatatagacaaagattgaaaaatgatgaaggaaaaaaatagtacttgtactaaggatgtatttacaggtgattattctccccttggtttaattttccttagtactatcctgacaatattttaacaaaaatcaaattaagattctactatgttttaaatttattttttgmggtaaagtatagatgtataatgtaccatctttaccattttaaacatatagttcagtagtgataaatgcatatatattcttctcccccctcattctatatgtgaatcactgtacatttaatcacataccacattttttaagtgtggatgattgttggtcatctgagtctacaaaagggcttttctttatcatttctgtgataccaccatgactattattactaccaataataataataataatgatatcaaacacatatttcacttattatgtgtcagacatgaatccaggcaccttacatgtattatttcat

SEQ ID NO: 729502 - DNA, 635 bp, Homo sapiens
aaaaagagtagcaacttttaccacccactaatttcaccaaaagttttcaagtttaacatcaacatcacaggtgttttcctttttaagagggatgaagagagttaccggtcctaaaccacagactatagataaatctttgtcaatgaattattgaatgtgttacataggtcccattggatggagagtagaaaaatccatgaaaccctgcagcagaggtcaaaaaggcaattttaagtatatgtcccataggcagtgggccacttgtgttaccatcacctatgaaaaatctactggcacatattaggtatattaacacaacctccagaatggaatacgaaagccagttcactcatggaggtagccaayggtgtggtcctcaaaccaggagtgtggaaaccctaataagtctgctctgaagatgttgctgtatattaggcctcaacgtccaagcctgtggggaggtggcacggtggtgtgggccaaacccatgtgcatttaaaaaaatcatttaacttaggatttggaatatatcaagtaactgtcttagtagagaaccatgggttaaactgtatcccccaacaaaggtaacgttgaagtcctaacccccagtacctcagaataagaccttatttgaa

SEQ ID NO: 729503 - DNA, 632 bp, Homo sapiens
attgctaacaatttataaaatattatggcccccatcaaacatcttccagtagagaagctaggtgccttaaaactgttggaaaagacgatggacaataacctaaacacacttgagcatgaggaacttgaaccaaaacatttggcacaaaacatttacattaggaaaagagaaaccaaaggtctgacatggccaaggtagcttcactcctagtatcaaaaatctaatacctctgagttaaacttaatatttgtttctaatggcactgactaccattccagtgtccagggaaacatttagataattttctctttcccagttactcagaacactaggaggaaaggagtttacttatagagtttacaacacacagattttcaaaccaacaaagtctgtccccaaaacagacayttgaaacctcgaacacaggtaaaaatagctagataaggcagaatccagaggaaattcaactttgttccccactagtagctatataaaaggaaaagtgtttgtgttctagttcagctaatggacaacactcacactgtcattatttttataactcttatatcgggtatttggaatgcagtggtttgagcatttcaaatagtttctttttccatgttagtgccatg

SEQ ID NO: 729504 - DNA, 620 bp, Homo sapiens
cagggagtcagtaaattccccaggtgggaaaagggtctactgtgagtgagattttgaactagagtatggactggagaaaacaaatgggaataaacagtcttcccattaggtgaaaggctaagagtcaatgaagtcatagaaatgaggctggaaaagtatggtttggcactgcctgtgytttaattggaaatattaagtgcaacagaatagtggttgggtgcttaaatgcctaaaaatctgagcaatacaggctcaacagcaccaaactgcagatgtgagattcttgtgctgcatgtaattgagagatggctttgttaccatggtaaaatccagctatactcctaacctggatggggtggttaaatacggatcatttgcattctgaggaatacttgtaaaaccacagtttaggctttcacatagagaatattttttctaccaaacccagtgaaggcatggagcatggcaatgtggatatgagagtaagaagacactgtcttctctactagagaactcgttttcttgtggaagacacaagcacagctaaagtgttaccagtgttatggcagatgtatgctggcagatggatgagggaagaattaatgaagccatttgttttt

SEQ ID NO: 729505 - DNA, 611 bp, Homo sapiens
tatagaagtaccttgccttgctgagaattaaaaagaaaaatttatattcaagtgctatttattttgtggcaccgaaactttatatataacaatttgggggctcgcccacaattacatttccctctggggatggtctctggttctctctcatgaggaagtacacaccccgctccttgtggcagcctcaggggtgagaaatcagaacccacccagtgcgaggaataacctgagcactgaacaacgcagaaaaaagaaaaaaagattggccagcaacctagcttaaaggatcctgatactgctgcgatgactctgcgcacagaccaaggaaggagaagccacgggagccggtacagtatttccytggtggtcaggaccccctcggaggggggtgtggtggtgaagtactccttggttggggtggcttagaggttaaaaagcggcgagacgtctccactgggggggtttcaacctcacatgaacctccagtagtagaaaaggcaagaaatttccagtggggaaattgagcctcacctcaaaaaggcaagaaatttccagcggggaaattgagcctcaccccaaaaggtgagaaatttccagtaagggaaattgaa

SEQ ID NO: 729506 - DNA, 646 bp, Homo sapiens
accatgactatgaaaattttaaatgacagtcttagttcatctgaccataccttcttcataggtttataatgctgcagtgaaaatgtgtaatgagatacagaaaatagaaaacagctgtagattaaaatgttttttagtatggcaacgaatctttcagtagaaaagtcawtttttttgtacaaatctggagacctaaacagcatattcgctagagctacagagaacagagcaaagtacctcttaatggagttaccccaaagtttatgcaccctaaagttcctatctggcgtccattcctgcaattgcaattaggaattaaagcaaatatctcaagaactgtaagaaatgtttaattcggattttaagtagaaaatcaatacctaaaaatgaactttaaataactgcccaaagtgcagattgtaagaaagtagtaagttaaagttaactccacagttaatgcatttttcataagacctataggaatcccccttcttaaggatgctgaaacttaaaatgaactcaaaaccaggcaaataacagaacaaaagatcaagaacagaactaagaataataaacatagccactttaacaatatcaagtaagaaggtttaaagttataacaatatactcagaccacagtgtggtt

SEQ ID NO: 729507 - DNA, 494 bp, Homo sapiens
atgaagataactttttggtaatttatgggatatttttaattgaagtttttctattcaaaccaagatgaccccatggatcagtttaccagcctgcaatgagaggcctcgtgaccatgtggcctacttatttaagcagatggaataacacatttggtgttaattaaacctttaaagggtcttcaaagggtagcaataaatactacatatttcccttatttaaaacactagctgatgaagagttcttttttytttttaatgaatataggattcccatctgttatctttacaaaaatgcagcatgtaatgcaaaagcaagaaatagaattggaaaaattgtgtcattctctttctttcacagtaaaccattcttttccagacgaagcctttttttttttttttctgccaccatatctcagagccatgggaaactattgatcagtccttgataaagcataagtaggtcttttggttcctcctgttttaaaggcatagtg

SEQ ID NO: 729508 - DNA, 636 bp, Homo sapiens
gctgagaatttttcaaaattaatgacagacacaaaaaccacagatacagaatgctcaaagaacaccaagcaggataaatacaaaaaaaaaaaaaatctacatctaggcctattatattcaaactgcagaaggtcaatgacaaagagaaaatctygacagaagcctggtagagaggagtgtgggatacattacctacagagaaacaaaaataagaattacattgaatttctctttggacaccatgaaagcaagaagagaagagtgaaatattggaagtgtggaaaggatattcttattttttttctttctttgagacagagtcttactgtcacccaggctggagtgcaatgatgccatcatggctcactgcagcctcaacctcctgggctcaaacaatcctcctgcctcagcttcccctccaagtagctaggactataggattgccactatgccaggccaatttttgtattttttgtagagtccgggtttggctgactgtaatatatatatatatatatttgtcatttcataagtcttcgaaaagtcttcttagtaatcttcccagaaattgagaaaatgaatgactcaaatgactaacaggatccttttaaagtcaggtggggctgggtgtggtgg

SEQ ID NO: 729509 - DNA, 636 bp, Homo sapiens
gctgagaatttttcaaaattaatgacagacacaaaaaccacagatacagaatgctcaaagaacaccaagcaggataaatacaaaaaaaaaaaaaatctacatctaggcctattatattcaaactgcagaaggtcaatgacaaagagaaaatctcgacagaagcctggtagagaggagtgtgggatacattacctacagagaaacaaaaataagaattacattgaatttctctttggayaccatgaaagcaagaagagaagagtgaaatattggaagtgtggaaaggatattcttattttttttctttctttgagacagagtcttactgtcacccaggctggagtgcaatgatgccatcatggctcactgcagcctcaacctcctgggctcaaacaatcctcctgcctcagcttcccctccaagtagctaggactataggattgccactatgccaggccaatttttgtattttttgtagagtccgggtttggctgactgtaatatatatatatatatatttgtcatttcataagtcttcgaaaagtcttcttagtaatcttcccagaaattgagaaaatgaatgactcaaatgactaacaggatccttttaaagtcaggtggggctgggtgtggtgg

SEQ ID NO: 729510 - DNA, 637 bp, Homo sapiens
cttccagatgctcgactgacctctactggaataaaggggcagaatgcgtcagctggaaatcagatcagtactttctagagaggtccaagatgatacaatgggatggaggaagaaaatagttaaaactacaatttgtatttgtcttagcctttgaaaaattctttctacatatgttttataatataaacaatatgattgtactgtaagacatatataatcaataaacaaatgtacatatattgtaggcatatttctattgacaatgtacacaatcaaaaaagtgtgaagactactagacagtgcactttcttaggactattagcatcatggtaaacaggctgaataagccacagaatgttcaacagaaattctattaataacaaactaaaaataggtgaaaatgtaagccaaaattcytaacaaaaagtaacaaatctataaacgtttcttctaaatctgtcacaagtaaatttcatgtcttgtgtataactcatcctccatggaagtttcttccacacaaacttaacatgccccaaacttgagtatctttcccagtccccaaatttgccctcttctgactaaagatatcattatcacaatcactatctaagagtcatttgtgataaaaatctaaaag

SEQ ID NO: 729511 - DNA, 620 bp, Homo sapiens
gtgaacatcacctttattagttttttgctgataaggacacttgcattttacatatccacctcaccttatatggtaaacgtaattccttaccatcatctaatacccagtccattgcattgtctcaaaaatgtattttttcagttgtttgttacaaacagagttcagaagatgcctacaaactttatttgattatgtatctatgtcttgttattctaggactgtccacttttccccctccattasagaaaacagttgtacgagatctagtcatgtagaatgtctcacattctagatttggatgactgttttctcatggtgtcctttaactcattctttcaccacttggattccatataaactggtgtttggctacagaggcttaattagattctggttctttttcaaggcacgaacactacacaggtggtactactgcacttcctgttgcatcgcattatgagtcatgtaatgtctggttattccactctgagtgatagtgagtctgatcagtagggttagatggtatatcctgatcctttcattagaaaattttcaatcagtcttacaactaatggctttaacacccattgataaatgttgcccagatccattatttcttt

SEQ ID NO: 729512 - DNA, 601 bp, Homo sapiens
tagtatatagaaataccattgatttttatgtgctgaccttggatcctgtaaccttaataaaaaactcacttattattctaatagccttttttggagatgccatcagattttctacacagacaattatgtcgtctctaattaaagactacattatttcttyttttccaatatttataccttctatatctctttcttatttcactggctagaacctccagtgtaaagtaaaatagaagtggtgagagtaggccaggcacggtagcttatgcttgtaatcccagcactttgggaggctgaagcgggcagatcacttgaggtcaggagtttgagatcagcctggccaacgtggccaaaaccccatctctactaaaaataaaaaaattaattgggtgtggtggcacatgcctataatcccagctacttgggagactgaggcatgagaattgcttgaatgtaggagacagaggttggagtgaaccaagattgcaccactgcactccagcctaggcaacagagcgagactccgtctcaaaaaaaaaaaaaaaaggaagtggtgaaagtagtcttattcccaattttagaggcaaagtattcattcttt

SEQ ID NO: 729513 - DNA, 601 bp, Homo sapiens
tagtatatagaaataccattgatttttatgtgctgaccttggatcctgtaaccttaataaaaaactcacttattattctaatagccttttttggagatgccatcagattttctacacagacaattatgtcgtctctaattaaagactacattatttctttttttccaatatttataccttctatatctctttcttatttcactggctagaacctccagtgtaaagtaaaatagaagtggtgagagtaggccaggcacggtagcttatgcttgtaatcccagcactttgggaggctgaagcgggcagatcacttgaggtcaggagtttgagatcagcctggccaacrtggccaaaaccccatctctactaaaaataaaaaaattaattgggtgtggtggcacatgcctataatcccagctacttgggagactgaggcatgagaattgcttgaatgtaggagacagaggttggagtgaaccaagattgcaccactgcactccagcctaggcaacagagcgagactccgtctcaaaaaaaaaaaaaaaaggaagtggtgaaagtagtcttattcccaattttagaggcaaagtattcattcttt

SEQ ID NO: 729514 - DNA, 618 bp, Homo sapiens
tctagggcaaaccttcaatctcatttggagagatgtcatgctattgttagatcaaaccctggcctttaatgaaaagaatgcggctttagctgcagcccaaaagtttggagatacctggtatcttagtcaagtaaatgacaaaatgacagccgaaaaaagggaaaattccctaccggtcagcaagccatcyccatactgggacctcaactcagatcatgaggactggagtcgtaaacatctgttgacctgtgttctagaaggactaaggagaattggggaaaacccatgaaatactcaatgatgactaccataactcagggaaagcaagaaaatccttctgccttcctcgagctgctacaggaggccttaagaaaatatactcccctgtcacccgactcactcgagggtcagttgattctaaaagataagtttattacccaatcagccgcagacatcaggagaaagctccaaaagtgagccctgggccctgaacaaaatctggaggcattattaaacctggcaaccttggtgttctataatagggactaagaggaatggcccaaaaggaaaagcgagatcagagaaaggccacggccttagtcatggccctcagacaaa

SEQ ID NO: 729515 - DNA, 618 bp, Homo sapiens
tctagggcaaaccttcaatctcatttggagagatgtcatgctattgttagatcaaaccctggcctttaatgaaaagaatgcggctttagctgcagcccaaaagtttggagatacctggtatcttagtcaagtaaatgacaaaatgacagccgaaaaaagggaaaattccctaccggtcagcaagccatctccatactgggacctcaactcagatcatgaggactggagtcgtaaacatctgttgacctgtgttctagaaggactaaggagaattggggaaaacccatgaaatactcaatgatgactaccataactcagggaaagcaagaaaatccttctgccttcctcgagckgctacaggaggccttaagaaaatatactcccctgtcacccgactcactcgagggtcagttgattctaaaagataagtttattacccaatcagccgcagacatcaggagaaagctccaaaagtgagccctgggccctgaacaaaatctggaggcattattaaacctggcaaccttggtgttctataatagggactaagaggaatggcccaaaaggaaaagcgagatcagagaaaggccacggccttagtcatggccctcagacaaa

SEQ ID NO: 729516 - DNA, 645 bp, Homo sapiens
aagtcaaatttttaaatgtcattttcatattgttctagttcactttcatattgttgcatttctatagaaatgaatttttgtatactgattttataaactacaagcatgctgaacgtatgagttccaaagttttttgtgtattccttaagattttctatatacaagatcatgtcacctgcaaatagcaacagttttacttcttcctttccaatctggatgccatttattcctttttcttgtctaattgccctggatagaaacaacactacaatgttgaatagaaatggcaggagtggacattcttttcttgttctttatcttatgggcaagcatccagttttttaccatgaagtataatgttagctatgaattcttyggctatttttagtttgtttagtgctagctgtgggttccttgctatttttcatttgttgagtgtttccatcataacagggtgatggattttaagtgcattttctgcatttattgagatgatcataggtttttgtctttattccattaatatagtgtaaatacagtgattggttttcaaatactaaaccagccttgcattcctgagacaaatgctacatgttcatggtgtatattcctttttaaatgttgctagattcagtttgctagtat

SEQ ID NO: 729517 - DNA, 632 bp, Homo sapiens
cctagtaaaatttcagaattttaagaataaaaggaaaatagcctccaaacataaataataagttatttaaaaagagaaggagacagcaatcaatcatctcatttgtaacattagaagttagaagaccatggaatgacaactacagacatgagtgagaaggtctgaaacctgagaatccattattctaaccaagatagcattcatctgtaaggagaaaggaagatatttgctgatatacagtattttaaaattacatccaatttttataagcaaaacactttggaagggattcctaccaagtgacaaaaaaatctcaagagagttatcaagagagggaaaaagagagaaaacactaatcagcaatgaaccaattcctytcatatgtatgtaaatagataaatcagtgtataatgttaaataatgatgcagcaattaaaaaatttaaaaatagtctgggaccaaaagaagtaggggattttgtcaaattcaataaattgaggtaggaaaaggaataaaaaagtaaaaaccttttccaaaggtaatttagagtgaagcagtaaagatattttacaagtttcatcttttgggcctgagggaaggcacattgttggaggagaaatggtggctgtgtt

SEQ ID NO: 729518 - DNA, 639 bp, Homo sapiens
ttgattaataccttccactactacccattctgtattctctttgccttcagcaagcacctcagctggtcgtggttttacctggtggagtgactcaaatcttccttgttgaagggtctgggccatttgtagttctacctggattgggttgttgtagtttcccattgaccttaatcacaggacatggtaatactaagagacaccctaagggatctccagtattccacacgtactcttctttacctccattgtggagtagtagactgatttcatcttgatagtccaggtcaatcaccccagccaacactgtaactcycttcttagcctgttgacttagaggtaggaggagcccgaagtggccaggtggcaatgttaacttccagcttaatggaatcattgttgtgtctcctggtggcagcattcctccttctggaactgagacctctaggccagcagaacataatgtcatgagaacagaaagcaaaaattttgctagtaggtcactggggatgatggtcactggtgccacttccacttccatccgttggttcctggacctatgaatcctggctatgggagaaaaagtaccatatattggatgctgattcagagcatccacagccttctggagaactctaccac

SEQ ID NO: 729519 - DNA, 509 bp, Homo sapiens
aaaagtgagaaagcttcagaagaaaagtttgaaactagtggaagctggtttatgaggtttaaggaaagtagctatctccatatgtttcacgaaagtgtaaggtgaaacaggaagttatcaagaagacttagctaagatcattcaggaaggtgactacagtaaacaacagatttttgatgtagacaaaacagccttctattggaagaagatggcctctaggactttcatagctagagaagagaagttaatgccyggcttcaaaacttcaaaggacaagctgactctcttgttagagacgaatgcagctggtgaccttatactgatgcccatgcaaatttaccattcaaaaaaatcctagggcccttataaattgtgctaaatctactctgcctgtgtctgataaatgaagtaacaaagcctcaatgacaacacatctgtttacagaatggtttactgaatattttaagcctatttttgagaactactgctcaaaataaaagattttattc

SEQ ID NO: 729520 - DNA, 509 bp, Homo sapiens
aaaagtgagaaagcttcagaagaaaagtttgaaactagtggaagctggtttatgaggtttaaggaaagtagctatctccatatgtttcacgaaagtgtaaggtgaaacaggaagttatcaagaagacttagctaagatcattcaggaaggtgactacagtaaacaacagatttttgatgtagacaaaacagccttctattggaagaagatggcctctaggactttcatagctagagaagagaagttaatgcctggcttcaaaacttcaaaggacaagctgactctcttgttagagaygaatgcagctggtgaccttatactgatgcccatgcaaatttaccattcaaaaaaatcctagggcccttataaattgtgctaaatctactctgcctgtgtctgataaatgaagtaacaaagcctcaatgacaacacatctgtttacagaatggtttactgaatattttaagcctatttttgagaactactgctcaaaataaaagattttattc

SEQ ID NO: 729521 - DNA, 619 bp, Homo sapiens
caatctctggctagaggcttcagagagtgcatggccttgctgacatgttgatttaggacttccaggttccagaactgtgagagaataaatttctgttgtttcaagtgactctgtttgtgataattttttataacagaccttaggaaataaagggaaactaatatatctaagaagaagcaaatgttatccaaatttattgctaaagcrtctgtggggaaaatgagtatattttgagtgctggtgtgtgagagagctatatataatttattttgtctgatcttcataataatctgtgaggtagatattagtatctacacttaaaaaatgaggaatatgaggattgaaaaagttcaggacattttctatagtcatgcatatcttttagtttcaaagcttagggcagatcttaagcactctcattttctctctctcaaacctcccccgcccccccaccccacacagtggtaactgggtgaggtgatggatatgttaatttggttgattatggagggtatttcacaatgtttatgtatataaaattatcaagttgtacaacttaaacatacaccatttttaaccgtcaataaagttgggaaaagaagaaaaaataaataaacaa

SEQ ID NO: 729522 - DNA, 582 bp, Homo sapiens
catcaaacactttttgttactatttttataagccactgcaagttgggcaccaaaatgaatgtgtactcctcagtaatttcatgaggataaagtaaaattcatctactgtaggactaacaccatgtttcttatggctctttcaattatgattgccttctcccctctaaatcaagagttgtgtaatctaaaaatagcagtatctcacacagagatattttatgttgctgacttttataaagcaatgaactgtttgcaaataaatatctctgctatgctttctccatttataatctcaggcaacctcagtctgaggttattccagggcccagggtcaggagatggaacagagaataaaaggtcatacctgaagaaaaaaatyatcagtgctctcaaccagttcttacacctctccttttcttttctttcatgatctgtctctaaattttacttggcttctcactgggccccatttgttcaaattcctcccagatttgtcatgtcctgcctttctctggcttttgtgagttacctgtgatttattcaattaaggactattgatatggtttggctgtgtcctcactc

SEQ ID NO: 729523 - DNA, 655 bp, Homo sapiens
caaaagtcactatttcttagtgaacagtactccaggcctgactcctctggcagtacatcaacaggatgcagttctgcaactctgctttttatcagttttgtgttttgttttgttcttagcaatcagaagagcaatcgcccacccattctctcagcgattacttaaaacatcaagaagggatctagcccactgttctcagtgatgggctctaggcattataaaccaggcatttctgcttgtcaacattattcactcaktcaacaaatgcttattgaccacctatggtatgcaaagccctgggccaagcattagggagaattgtctgtatttcatagattctgaaacagttatttttcaacatttgaatgtctctgaatttggggagtttacttggcaaggcttttttctttcttagtgatacctaaaacaatgccgtcctataatcaatggcctctcagatttgatgaaatcctacattgtccatgacatctctgctttcaccaaaaaagggattatacagaagaagaggaggtaaaactcagctatcagtgggcttttcactgatcgtcaactttcagagcaagagaagtctgagcttctgtggtttgaagatgatctgtgtgtttcatctcctcgtgccctccctggccttaca

SEQ ID NO: 729524 - DNA, 607 bp, Homo sapiens
ttcacaattttccttggtcatgggagatttttccaatcttctttctacaattaatcaaaatgaaatgccatttaacttcagagagatgctttttttcctttgatgatgaaagcaaataatggaaataaatgagagttttattacattcaacttttctttgctgaacatcaattcattctataattaaaaatgtwttttataatttacacatttttaatttatgaagttaagtgtctttgttacctggtctcagtcatctacagcagggagcagggacaggatgttatgaactgatggtctccacagtccagcccctagtgctcagaatccaggggtactcaggcactggacgttggatctcagcatcagcaatgagctgcatcatctctgacaggaatgggtgataagaacatttcccttcaccatttttaaaagccaggtccttgatttgcatgggcaggaagggggaacatggttgtgggggtggttagtttaccacatcacattttcacattttcatctatcataatttagatctttacatttcttgagttggtgactgatagcctccaaacacataaacactctccacctgtacagaatgcac

SEQ ID NO: 729525 - DNA, 635 bp, Homo sapiens
gcagctacaagtggcagaactacttaaggtactcagagtaataagagcctggacaccagagcctgcctgccaggttcacaacagacgccaccactcactagctatgtaacttcaagtaagttacttaacatctctgtgtctctctttccttatccatagaatatgaaatggaattttgtcaaaaactgtgagggtcttaagttttaccccacttgaaaactaacaaattaacttgccacggtttcattaatactgatgaaagacatatgactccaggatcagagacaaaatattactcataccaaacacagtaggcagagtatcagcttggccgagtcagttctctgaatcctggtagtaycacaggtctgcttatatggatgctggcacccagtgtgttgtgttacagcagaggaatacaggtccaggggaaattgttgctttatagcagcctgtaagcaagcctactctttgtcccagagggagacattagctcatctcctaagattatcactgcaaatataagcctgaaaagtgtcctgggtaaagagtgctcaaagctttgtattcgtggcatactcagcaagatgagtaagagtgcagggggcccatggaagactgtctccatcaggttg

SEQ ID NO: 729526 - DNA, 619 bp, Homo sapiens
gcaacagtaattaagacaacatggtattggcacaagggtagatgtacagatcaatggaatataactgccagtactaaaataaacccatacatctatggccaactgatttttgacaaggctgccaagattatccaatggggaaagaatagtcttttcaacaaagggcactggggcaaccagatagctaccatgaaaagaatgaaattggatccttacctcacacatccacaaaaattaactcaaaatggatcaaacaccaaaatatgaaagctattactatagtagcttaagaagaaaacaaatgggtaagactttaygaccctggatgtgacaatggattcttagatttgacatcaaaatcatgaagtcttaaaataaacttcatcaaaattcaaaacttttgtgtttcaacctccttataaaagtaattctttatttttttcctgtttttctttccttttttttaaagagaaaattgttcagagccacaaaaaacttttgtgcttcaaagaacaccatctagaaagttaaaacctacagaatatatatgcacttatatgtgtgcatatgtatgtgcaaatcatatatcagacaagggactaacttgcatctagaatct

SEQ ID NO: 729527 - DNA, 562 bp, Homo sapiens
ttatgaacaacacagatttgagctgtgtgggttcaattatactcagatttcctcctgcctgtgccaccccgaaataacaagagcgacccctcctcttccttctcctcagcctgcttaacgtgaagacgatgaagacaaagacctttattgtgacccacttccacttaataacagtatatgtattttctcttcctaatgtttttcttcgtaacatttgcttttctctaggtttattataagaatacagtctatattacatatatgatacaacagatgtgttaattatctgtgttgttgggaaggcttctggtcaacagtgggctattagtaggtaagatctgggggagtcaaaaattctgtgtggattttaactgcatggggyattggcacccctagcccctgtgttgttcaagaatcaaccgtaatattttcatagcacactggaatcgacagaggggctcctggggctggaggtgtcctgtctggggctccagttgcctcagttctctcttccaagggctgagggggttctacaattgtggcgtgccttggaaatgttagg

SEQ ID NO: 729528 - DNA, 583 bp, Homo sapiens
catacacaggcagaagaggagccgccgccacagtagatgctttcatgccatttcccaaacagccgatgaaccgcttttccactcctgtcaaacactgtgccttcaatctcatgggcattagtgctccagtattttgcctaggattcaaatgagttgttggcttagtcctttagcatcagcttattacagatattaaggaaagaaaaaaggaaaagctagagaaaggactgtaagagtggctccatactgcatattagtttgctagttctgggttccgtttttttaaccgacaaataaaaaatttatatatttatcatgtacaacatagtgtcttgaaacatgtatacattgtggaatggctaaatcaagytgattaacatatgtattaccttacatacttacttatgataacacttaactctctcagtggccgggcacggtggctcacgcctgtaatcccagcactttggagaccaaggcaggcagatcacctaaggtcgggagttcaagaccagcctgaccaacatggagaaactccatctctactaaaaatacaaaattagccgggtgtggtagcgcatgc

SEQ ID NO: 729529 - DNA, 590 bp, Homo sapiens
aggcctaaagtatgagtagcaagaaggaaattagatttgaactaagaggaaacttcttaacctgtctaggaaagatgtttcatctcttagaaggggtttgatgtctttttacacatggggaaactgaggctggttatgcatggcctatccagagtcactcagcagagatttggggctcccacccagccacttgaaattytgcaaactttcaagaacagactaaatttttatttacaggagatgatttcatgcttagaagcaaatgatgaaataacttctctggagatctcattcaatactatgattctatgaaatggacaggaaaagaaccaaactagagttggtgacagcacaagaaaaattatggtatccatgctggtctttttttaagaggttagttaccttgaaaagctcagcacccatccctgaccacacacatgctgggtcacccatcctagacagactcaggttctctgggcttcagaaagtagccctggaactggagtgagtagctaggaaagtcccatctcaatgtaatcacctgcccagaatagaaacaactcacgtgtccatcaacagatgaatggaga

SEQ ID NO: 729530 - DNA, 659 bp, Homo sapiens
caccaccacgcccggccaattttgtatttttagtagagacgggggtttctccatgttactcaggctggtctcgaacttctgacctcgggtgatctgcctaactcggcctcccaaggtgctggggattagaggcatgagccacaatgcccggcctcagagtaattttttaaattaaaattttaaaatgtggatataattataaatttaaatatacttataagaaataaaagcctgggcaacatggtgaggcctagtctctacaaaaaatttaaaaattagctgggcatggggtcgcacgcctgtggtcttagctacttgggaggctgaggtgggaggttcacttgaggttgaggtcgaggctgcagtgagccatacttgggccactgcactccagcctggwtgacagagtgagaccccgtctcaaaaaataaaaataaaaaaaagaaaatgcagactccgtgtatcctttatccagtttcccacaacaataacaccttgcgaaactataggacaatatcacaactaggatattgatattgacacaatttaccaatcttacccacatctcccgtggcttaacctctactgtgtgcgtgcacacgcattcacgtgtgtgtatacttagttctatgcaatcttgtcacgggtaaatttgggga

SEQ ID NO: 729531 - DNA, 657 bp, Homo sapiens
gccacagacctggacaggagacagtggtggggatgattaaccaaccaaatggcagccccagggggaggaagatggagaaggatttaagcctcttagcaaagcaaggaaaccctccatgctctggcccctgccagcttctcctgcctcatcttatgacctcttccctcactctggccatatcgaattgccagcagcttccccaaatagactggtggtttcatagccatgctgtcccctctgtctggaatgctctttcccaccttctctggagaaatgcgccctctcatctttcacaccctccgcagtgtttgtctcccctccattccatttggccccatgctccctaagctgtggtgggggtgtacatagccaactggttacagatgggctctggaaccagactaactgggtctgcatccwgcccaggtactagccaggcaaccttaagcaagccatttaacctttctgtgcctcagtttccctctctgtaaaatggggataacagtgccttctccttgaggttgttatgagtattaaatgggctattccattgacagagctggacacggtagtgagcactatgattctaatgcttgattgtgcttctgtgtttagacatccagactgtgagctccttgagagaggaaccatgtctgc

SEQ ID NO: 729532 - DNA, 631 bp, Homo sapiens
gtatgtgatgaaaattaggctctttcatttctaagtggcatacattatttctgccccagcaataatgattccccaatagctattcagagcagtaactattttaccccttttctaatcatctggaaattcttcaagcctatggcatgtgggagctatgacaataggtgtttctgaggatcagatggcactggtgacacttccatcctaaacaattatttctaagttgtctttgcccttgtcactaaatatatttctygttggtggatcatatctgatagtattcctagttaagcaccatcgctatgaggtgttattgcaaaggatcaagaatatatttcatgacagcttcctttaaacatcttgggggtgcatagacttcaacatcttgttggtactaaggagatcagtttcttgatacactttagtcacagcaatatagcaaccagtacctaacaagtaaagtacatttttccaaatgcttgcctcatagaatgtcaccacccaaacatttatatgatgtctaacttgtttatgatcctaaacaaattgagttaaacaaggttctcaccagctatgttaaattagtgaaacctcatggcatgttcgttttcatcagaaaggcagacaatgc

SEQ ID NO: 729533 - DNA, 633 bp, Homo sapiens
tccataaaaaggcttgtacataaatgttcatagcaacttaatttgcaatagaaacaactggaaacagccccaatatccatcaataaatgaacaggtaaacaaattgtgatatatctatgcaatggaataccactaaacaacaaaaaggaataaactactgatacatataacatcatgaatgaatctartaacagttatgctgagcaaataaaaaaggagccagaaaataatagagtagatgtcttataatttcattaagagaaaattctagaaaatgaaactgcagccatgacttggtatccatgggggattggttccaggacccccatagatatcaaaatccacagatactcaagtaccttatataaaatggcatagtatttgcatataatctatgcaaatcctcccatacactatatatcatatctagattacttatataatacctaacacaatgtaaatattatgtaaatattttttatattttatttgtattatttttatgttgtattgttactttttaattttttaaatatttttgatccatagttggttaaatctgctgatgcaaaatccacaaatatggagagtcagttgtaaatcatagtaatggaagacagatcagtggtttcc

SEQ ID NO: 729534 - DNA, 615 bp, Homo sapiens
gcccttccctatttggcagctgaggcggagagagagaagacagcttatgccatttatttctgcatatcagagacttttagtactttcactaattttgctactcctatctagaaggcagagccaagtgtacagaatggaacatgaaaacggaccaggagcatgaccaatgaagcacagcatcacagggagatggttaggcctccggataactgcgggcgggcctgactgatgtcaggccctccacaagaggtggtggattagaatcttctctaaactcccccagggaaagggrgactccctttcccggtctgctaagtagcggctgtttttccttggcactgacactaccgctagaccatagtccgcttggcaacgggcgtcttcccagacgctggtgttaccgctagaccaaggagacctctagtggccctatccgggcatgacagaaggctcactcttgtcttctggtcacttctcaccatgtccctatctctgtatggcctggtttttcctaggttatgattgtagagcaaggattattataatattggaataaagagtaatttctacaaactaatgattaatgatattcatatataatcatatctatgatct

SEQ ID NO: 729535 - DNA, 784 bp, Homo sapiens
ctatggatccctcacccacttgtggtgcctctactcatattgctcctcctccctataatcccgactttgcggaataaccatcttgtgagcctgcccccaccaacctattaagtatccctcattaaaggagcttcaacgtgagatagagcaatgtaaaaaggatattaaaaactttccatttctctccacacctasagagccagatctgactctttccactaagagaggtaccacaaggatggggcggggggctattggctttgtgaacgcccccttgactagttcggaagtcaggtattttaaaaagagcctaagccactactggatgacccttatgaagtagcagatcaaactcatcaatttctagggcctcacatatactcttgggctgagttgatgtccatcttgggcatcctcttttctgaggaagaatgaagtatgattcggagggctgctatggcactttgggaacgtgagcaccctcctggtcaaaatgttctttctgtgggctataaatttcccactcaagacccccattgggacagtaacaatgcaaatcactgggaaaatatgcaggacctaagggagatgataataaaaggaattcaagaatcagtaccccaaactcaaaatctttctaaagcatttgatattcaacaggaaaaagatgaggaacccactggattcttaaatagattgagggagcaaacgagacagcatgcaggccttgatttggaaaacccctcagacaaggaatgtgaaaacttcactttgttactaaaag

SEQ ID NO: 729536 - DNA, 690 bp, Homo sapiens
actcatcaatttctagggcctcacatatactcttgggctgagttgatgtccatcttgggcatcctcttttctgaggaagaatgaagtatgattcggagggctgctatggcactttgggaacgtgagcaccctcctggtcaaaatgttctttctgtgggctataaatttcccactcaagacccccattgggacagtaacaatgcaaatcactgggaaaatatgcaggacctaagggagatgataataaaaggaattcaagaatcagtaccccaaactcaaaatctttctaaagcayttgatattcaacaggaaaaagatgaggaacccactggattcttaaatagattgagggagcaaacgagacagcatgcaggccttgatttggaaaacccctcagacaaggaatgtgaaaacttcactttgttactaaaagttggccagacatttcaaaaaaattacaaaagatagaaaattgggaggaccatcccctgagtgaattgctcagggaggctcaaaaagtatatgcaagaagagacaaggaaaaacaaaaacaaaagacaaaacttatgttatccaccttccaacagatagctccaaatccgcatatccctaagcaaggctttcaaggggccagagattataaggggcctaaaccctccttgagaggatccaagcctccatctggagggt

SEQ ID NO: 729537 - DNA, 671 bp, Homo sapiens
atatactcttgggctgagttgatgtccatcttgggcatcctcttttctgaggaagaatgaagtatgattcggagggctgctatggcactttgggaacgtgagcaccctcctggtcaaaatgttctttctgtgggctataaatttcccactcaagacccccattgggacagtaacaatgcaaatcactgggaaaatatgcaggacctaagggagatgataataaaaggaattcaagaatcagtaccccaaactcaaaatctttctaaagcatttkatattcaacaggaaaaagatgaggaacccactggattcttaaatagattgagggagcaaacgagacagcatgcaggccttgatttggaaaacccctcagacaaggaatgtgaaaacttcactttgttactaaaagttggccagacatttcaaaaaaattacaaaagatagaaaattgggaggaccatcccctgagtgaattgctcagggaggctcaaaaagtatatgcaagaagagacaaggaaaaacaaaaacaaaagacaaaacttatgttatccaccttccaacagatagctccaaatccgcatatccctaagcaaggctttcaaggggccagagattataaggggcctaaaccctccttgagaggatccaagcctccatctggagggtcaagg

SEQ ID NO: 729538 - DNA, 690 bp, Homo sapiens
actcatcaatttctagggcctcacatatactcttgggctgagttgatgtccatcttgggcatcctcttttctgaggaagaatgaagtatgattcggagggctgctatggcactttgggaacgtgagcaccctcctggtcaaaatgttctttctgtgggctataaatttcccactcaagacccccattgggacagtaacaatgcaaatcactgggaaaatatgcaggacctaagggagatgataataaaaggaattcaagaatcagtaccccaaactcaaaatctttctaaagcatttgatattcaacaggaaaaagatgaggaacccactggattcttaaatagattgagggagcaaacgagacagcatgcaggccttgatttggaaaacccctcrgacaaggaatgtgaaaacttcactttgttactaaaagttggccagacatttcaaaaaaattacaaaagatagaaaattgggaggaccatcccctgagtgaattgctcagggaggctcaaaaagtatatgcaagaagagacaaggaaaaacaaaaacaaaagacaaaacttatgttatccaccttccaacagatagctccaaatccgcatatccctaagcaaggctttcaaggggccagagattataaggggcctaaaccctccttgagaggatccaagcctccatctggagggt

SEQ ID NO: 729539 - DNA, 601 bp, Homo sapiens
ggttgccccacacggctcaggaaatgaagtttgggtcacagcctgaggatggtgccttccatccttgaccctgcaaggacaacctttcctgacagtctcctccctgggtgaagtattgggacagtggctctggactggaaaactgaagctttacctctttgctctggattcccatcaggtctagattgctgaggcccagcgcccacagaggcatcttcccctctagggggtttgtcctataagcccggactccgtcagctccgaggcactcctgctgggcctgggccagagtggctgatgtggaactgctccctcccctgccagcttccttggggtgcagacagcccagcacaggcaggaagggctttctgtttggctggactggtggggaagcaattagtgcttactttctgttttgattcttgtakctaataggcagagtttgtgatgtcacggaaaagcagccttgggcccgcgtgggtttgaggtctgtccctgatagtctggccaatgtggaattgtctggaggtaggggtgtatgctgacactactccctgggtatgaggtggccatctgttggctttccatgcccccttctgat

SEQ ID NO: 729540 - DNA, 643 bp, Homo sapiens
tcccaaagtgctaggattataggcgtgagccgccgggcccagcctcttctccccatttgtttctcctgtgccagacccgcaggttcaaggatcatacttgcctgtgtttgaacatggctatgaggagacctgtgctgtcagtgtgggggacccccccagctttctcaggctgatcaagcagaagttggccatgccggccaacagttggtggcattcttcccatctcgtgggcccactcatgacagagcagctgttactgtcatggttattttatttttattcctccctctgggagcccagaatcaaagggaaacatcagcactgctgcctcattacagagagcagagaaaatggggatggggatkggacattatctctttttttcttttttctttctttgagacggaatttcgctcttgttgcccaggcgggactgcagtgtcatggtctctgctcactgcaacctccacctcccaggttcaagcgattctcctgcctcagcctcccaagtagctgggattacaggcgcccaccaccacacccagctaattttgtatttttagtagaaacgaggtttcaccatgttggtcaggctggtctcaaactcccgatgtcaggggatccacctgcctcggcctcccaa

SEQ ID NO: 729541 - DNA, 510 bp, Homo sapiens
ttacctaagtctaatttcttggcataaagttgctcataatatttctttataatcttaattttggtagagccactagcaatgtcccctctttgattcctgattttggaaaattgtgttgtttctctttttcttcttgtcaattttattgtttttttcttttcttttctttttttttttttttttagatggagtcttactctgtccccaggctggaatacagtggtgcgatctcggctcattgcaacctccgcctcccgggttcaagtgattctcctgccttagcctcccgagtagmtgggattacaggcgcccaccaacatgcctagctaatttttctatttttagtagagacggggtttcaccatgttggccaggatggtctcgatctcttgacctcgtgatccacccacctcggcctcccaaagtgctgggattacaagtgtgagccactgggcccagcctgatttttttcaaagagctaactttaagtttctattgacttttctctgt

SEQ ID NO: 729542 - DNA, 520 bp, Homo sapiens
atctcgtaatgttttaagaaagtttacaaatttgtgttgggccacatgtggcctgcaggccacggttggacaagtttggcttaggtgaaagagggtgaccttgtctcttaaaaaataagtccccatgaaatcctaaaaatgcacacttttaattaaaaaatttaaagagttaaacagagacgaaatatcactggtcaaataagaagagctaacactattgagatgttactgtgtgctggtactgttaaagtactttttatctcatttaatccttacaacaatcctaaaagatgaggaaactgaggcacaaaaaagtaactcacccaaggccacaaagctaggcaayagtggagttgtgattttggactaggtaatctggtttaagagcccatgctccttaaacaaagcagttcaaattgacttgaaagtatccgcagcacagtggcctatcaggtgttccctggagccaggatacaaagaaaagccacatttctcctccatggtatcaaaggtgaagaga

SEQ ID NO: 729543 - DNA, 622 bp, Homo sapiens
gtctgattgagggctgaaattcccgttcccgtctttttggctaccatctcccatagacagtgtacttctctttcccaaggcccccctcttcctcctctcaaagtgtccttggccctggatccaggagtctccttcctcctccctcctgtcccatctccagctgccttcccggggggagagttgcccatccgctccccactttgccttcagttagtatactgcctgccagcaacgtgccttttacaggtcaataaaattagcgactgggggcagagggagggggcagkggctcaggggtgctaagctcaaaggccttgaatgtggctagactcacggagtcaggacgcctgtcattccagggctaaacagtgacagctgggggacctgggctggcgctgggggcggaggaggggctgtgtggcagggagggagatgggctgaggataaagatggtctggttgcctaatggccccctcagcggcctaaacccctacacagctgagccctggagagggcacccttactttagaggagtgtcccgtctcacacccaaccctgccaggcccgaagagctcagatggaaggggactcaggccaggagaggtttctgagctttcttctt

SEQ ID NO: 729544 - DNA, 642 bp, Homo sapiens
gccgaggacctcgagggcagcgcgggagaacgaggcagcctcttccacctgtccggtcctctcgcctcaaaattgggggaccccaagggacagtgaggatatccctatctcggctctgagcgccgacgttgggcatctgctgggcgggactgaactctggggcagttagagggtcctggctggttatccctgatgccaggcgggctccaaaggatggaaaagaaagagccgggcattagacacgcagctttytggagtggggcaggttggggatggtgaggacgggggtccggagtaaggaacctcgttgactgagagtgcgccatgcctcatccaagggcagcctcttccccaccctagggggtgatggcttgacccaaactgggcttctgttccgtgggctaatgaggtaaaagccgccgcatagctgagctggggcctgggattttctaatgagccccagggcacctgcatcatttatttacatctgggtacaagggggtgagcaggggattaccccgatggcctagggaacccggaaagtctgggaactcagtagatcttttctgtgtctgtgtcacagagccggctggggaaggtgatcgcagatgtggccttattgcagacaggggagcatttgca

SEQ ID NO: 729545 - DNA, 561 bp, Homo sapiens
catttaattctttaatctgtctcgagtggatttttatcatggtgtaaggaagacacccagtttcaatcttctgcatatagctagccagttactccagcatcacttattacatgtactcaccggcaggcggtggtatggtagggttcgtgtatgcacactgacttatagctcttatggtatttcttcctctaggagtcttaatctaatgccaaagtatttggraaaaaaaaattattgtaccaaactctccagctagaaaccatgcatctgagtcctgagaaaattaaagtcaagcaatagtgtcctaccaataagccaaatagcaatgtttattctagactgtaatctatgttatcagaatggaaatacaagtgcacacaaaatgtgaaaatgaaattttcacaagaaagctgaaaagtcaattaaaggaaatatctgatatgagaggattagtgaatattcatacttctgattgtgacaatattccctaatcaatagttaatcaatagtttctaatctttgatagatatgaataatgtcaaagtaaacagttggctaaag

SEQ ID NO: 729546 - DNA, 618 bp, Homo sapiens
tgggaatctatcccacctgtaatagcaaactataagaagcaactcaagtggccatcaataggagctagctcaataaattatggtgtgtctgtatagtggagtactagtggctctgtgaaatgaaaaggctgggcatggtggctcacacttgtaatcccagcactttgggaggccaaggcgggcagatcactttgagcttaggaattcgagaccagcctgggcaacatggtgaaacccgtctttactaaaaatacaaaaattagctgtgcgaggtggtacgcgcctgtaatcccagctactcgggaggcttaggtgggggaattgcttgaacccaggaggcagaggttgcagtgaactgagatcaagccactgcactccattctgggtgataaagtgagactctatctcagaaaaacaatcaaaccaacaacaacaacaacaaaacaacaacaaagaagggaaggaaagggcygggcatggtgactcacacctgtaatcccataatcccagcactttgggaggctgaggcaggaggataacttgagtccaggagttcaagaccatcctgggcagcatagcaaaaccccatctctacaaaacatttaaaaaaaatagcta

SEQ ID NO: 729547 - DNA, 579 bp, Homo sapiens
cttgagcccaagaagtttgagactgcagtgagctatgatggtaccactgcaccctagcaaaagtaagaccctgtctcaaaaagaagaaaaaaaaaaaagaaaggaggaaaatgtagactacatgttggtattcacttgtgtctccctaaggagacattaaaatgatagccaagaaaccgatagaartggtttctctcagagggtgtgcagggcagtgaggtggatgggatgggccaggagagaaactgcgctcggtaccttctgcagcttttttgaattttgaaccaagggaatgttttacctattcaaaaccaaacattcacacagagtagctgctttcagcacttcccaaggtccctgtccttcctctccacttcagaatggtgttcccacggtgctgttgtttaagtctattgtgaataatattcctcaggactgttgaggcagcctgcatggacagatgctcaaagagtctttattaaggtttggggctaatgagtgttcactttataaaaaaggagtgaaaccctgacttgcttggtggaaatgtggagtcctgagctccatttttctgcacat

SEQ ID NO: 729548 - DNA, 561 bp, Homo sapiens
tgcgcacgcgcgcgggtgggcgggtttgactggccgtagagtctgcgcagttggtgaatggcgttggtggcgggaaagttgagtctctcctgcgccgagccttcggggcgatgtgtagtgccttccatagggctgagtctgggaccgaggtgagagccgccgggttgggagtgagggagatgggaacaaggccgccggtgggcgaggggagccgagggaacccgggggattgggaggcttggggcggcgcggcctggccgggctgggaccggcctctcggcctagacgcccgcgatgctggcaccctctgccacctctcacctgggccccaggggtccgcccctgggcagyctggagtcctccgaggtgggaggaccgggcggaggtggaggaagtctttctttggaagacttgctgcctgcccagatcgatataacatacgaggtctctcctcccaagagttatggtctaaaaacccctcacaaattaactaccgttggaaatgtcaagctatgcaagaaaagctagaaaaggggaggggtcgcccgttggagcatttgg

SEQ ID NO: 729549 - DNA, 652 bp, Homo sapiens
tcaaacaaatttacaagaaaaaaacaaacaaccccatcaacaagtgggcgaagtatatgaacagacacttctcaaaagaagacacttatgcagccaaaaaacacatgaaaaaatgctcatcatcactggccatcagagaaatgcaaatcaaaaccacaatgagataccatctcacaccatttagaatggcgatcattaaaaagtcaggaaacracaggtgctggagaggatgtggagaaataggaacacttttatactgttggtgggactgtaaactagttcaaccattgtggaagtcagtgtggtgattcatcaaggatctagaactagaaataccatttgacctagccatcccattactggctatatacccaaaggattgtaaatcatgctgctataaagacacatgcacacgtatgtttactgtggcactattcgcaatagcaaagacttggaaccaacccagatgtccatcaatgatagactggattaagaaaatgtggcacatatacaccatggaatactatgcggccataaaaaaggatgagttcatgtcctttgtagggacatggatgaagctggaaaccatcattctcagcaaactatcgcaaggacagaaaacgaaacaccacatgttctcactcataggtgg

SEQ ID NO: 729550 - DNA, 616 bp, Homo sapiens
tttttaaaaacgagaattaagttatattgaatgagaaaatgtaaataatgtgactcgcacagtatctacatggcatattaaaagtaattttaaaaataaaaaataaaataagaatttaaaaagtagtggcaaagactgcaaaattacttttgcatcaacctaatatattctcccatttctttgggtttccttttcactgcttgttgcrttctttcctgcacagagtggtttttattttgatgtagttcaactcatctacttgtcacatgtcttttgctgtcatgaggcttttctcctatggtttcttctaagagctttatagttataattcttatatttagattcttgattgattttgagttaaagggtgggtatgatacaaggaaagggtacaacctcattgcatgtagatatctaagtctcaataaattctaaacaactgaaatcttattaggtatatactctcgttacaacataattaaataagaaataaataacagtaagatatctagaacattcttgagatgtgtggatgataaacaatatacttctaaataataggcaagtcaaagaggactcaaaaacttcttaaaatattttgaactaaatgaaaatg

SEQ ID NO: 729551 - DNA, 616 bp, Homo sapiens
tttttaaaaacgagaattaagttatattgaatgagaaaatgtaaataatgtgactcgcacagtatctacatggcatattaaaagtaattttaaaaataaaaaataaaataagaatttaaaaagtagtggcaaagactgcaaaattacttttgcatcaacctaatatattctcccatttctttgggtttccttttcactgcttgttgcattctttcctgcacagagtggtttttattttgatgtagttcaactcatctacttgtcacatgtcttttgctgtcatgaggcttttctcctatggtttcttctaagagctttatagttataattcttatatttagattcttgattgattttgagttaaagggtgggtatgrtacaaggaaagggtacaacctcattgcatgtagatatctaagtctcaataaattctaaacaactgaaatcttattaggtatatactctcgttacaacataattaaataagaaataaataacagtaagatatctagaacattcttgagatgtgtggatgataaacaatatacttctaaataataggcaagtcaaagaggactcaaaaacttcttaaaatattttgaactaaatgaaaatg

SEQ ID NO: 729552 - DNA, 580 bp, Homo sapiens
ttagaaagaaaatctaaaaatcaactcaagactagaagcaagagagacattctgtttagaataatgaagaataggagaactactagcaagaagttaacctttgaagcgcaaaatgtttaactgtacaccggatgcttcatcctgaggtcagacaaccaaaagaaactccgcccctggtttcctccactctcaagatttaaaacaggccagcacggtggctcaagcctgtaatcctagcactttgggaagccgaggggggcgaatcacttgaggtcaggagttcgagaccagactggccaacatggtgaaatgctgtctctactaaaaatacaaaaattttaggcatggtggcgtccacctgtaatcccagctayttgggaggctgaggcacaaaaaacactgtaacctggaaggtggaggttgcagagagccaagatcatgccactgaactccaacctggacaaaagagcaagactcagtctcaggaaaaaaaaaaaaaaaaaaagatttaaaacaatgtctccctccctaactcccctattgagttgtagaagcagacacaggtgatgacagccaccca

SEQ ID NO: 729553 - DNA, 536 bp, Homo sapiens
tttaaccacagtaactggatccagatagtaccaggaactttgagagggttaagtggggtgctagaaattgtggaaccagaaaactccaggtttagattctcgctccagcacttgctctgtgaccttgagtaagacatttaacctctcakttcccttatctttaaaatggagttatgaaccctttcaaggttactgagaggattaaagatcaggtatgtaaaggtcctagcatagagtagaagtttaattaagatgattgatatggtttcactctgtgtccccacccaaatttaatctctcattgtaatcccttcatggaaggaaactggtgggaggtgactagatcatgggggcagttcccccatgctgttctcatgatagtgagtgagttctcaagagatctgatggtttacaagtgtggcatttcctctttgctcactctctgtctcctgccaccatgtgaagaaggtccttgcttccccttccccttccgccatgattgttagtttcctgaggcctcccagccacgtggaact

SEQ ID NO: 729554 - DNA, 515 bp, Homo sapiens
ttatgttggcataagcagggcttttgctacatataactaatattgatgtagcgccagtatagtttataaattgctttaacataaattctgccaaatcatcctgtgaacacagggatggcggccttgggccagtttctctcaaagcctcagtttattctgtaaaatggagaagaataatggtttcccatcagagagactagcacggagtaggcgagtaggccttcagtgcataataaccatcatcaaaaccataagtagcaacaccaccaccaccatsatcataaccttacggataagcaaactgaaacagcacaggttaagaaactagtccactgtcacagaagtgggccctgccatcaggtattagctgtgtggctcttggcaatgtttataagatgagaatgatgagatttgccccacctccccacctttcaaccatgaatgtcaaaggtatctgaaaactattccatggatgagaaaactggggcacagggaggctaagtaacttgcctagg

SEQ ID NO: 729555 - DNA, 600 bp, Homo sapiens
gagagaataaaatgctgttgggtagttcatagaattgctgagatgtctggagaaagggaaaagtggagacaagcaaaaaaagaggctgaccagtagaaatctctggccatatcctctcaaaaatggtctagttagggtactgctgctgctaccccagcagtagatgcagcttgccatcaacaccaccagcaatggactctgaaagaccccattcttcgtgctaccacttgcctttggaatgttaatcttgytgcagctgccactgccatgcagacaaacacacacacacagccacaaagacacacacacacactgccacacagacacacacacacacactgcctccccccaccacacacacaaacagtggtgggtggagactctctgtagtccttgcttccttgtgtcttttgctcctgattcaaagaccagagcaggtgcacagacaattcctaacattttcaggacttagagcaagagcacaattgaaggccaaactactgtatgcttaaacatttagaagttataaaccaaacctaggaaactattacataaaatatattctataatatgccttcagaacatcctgaaaggcccagt

SEQ ID NO: 729556 - DNA, 535 bp, Homo sapiens
gacataaagatagacacatcgaccagtggagcagaatagagaacacagaaaaaaatccgccaacttacagccagctgacttttgagaaaggtaccaaaaacacaaaatggagaaaaggcagcctctttaataaacggttctgagaaaactgtattcacattcagaagaatgaggctagaccactatctctcaacatgtacaaaaatcaactcaacatgaattaaagacttaaatgtaagacctgaaacaataaaactcctggaagaaaacataagagaaatgyttcatggctggtccgggcaaagattttttagtgacctcaaaagcacagtaatgaaagcaaaaatagacaaatgagataaccccaaccaaaaagcttcttcacagcaaaggaaataatcaacagagtgaagaggcaacttagataatggtagaaaatatttgcaaactatggatctgacaagggattaatatccagaatatataagaaattcaaatgactcagtagaaaaagaatctgattaaaaatggacaa

SEQ ID NO: 729557 - DNA, 526 bp, Homo sapiens
ctggtaagccccttaattgctggtgctatgtttcatttgttgtttattcttaacatggctgcagcgaaatgtagctggaagagcctggattttggcgtcaaaggagcctctaccacttattgcctgtttcatcttaggcaggtcacttcatcttctgagcctcagtttcctcacttggaaaacaagggcaagaagacttctgatggctrtcacaaggactaaatggaatttggactattgccaatacagttcctacaataggcactcagaaaatgctagcttcctctccttgattttatttcctgcaatccccaacacattataggtgttctgtcaagattttttgaacagacattaactgatgttcaccagagactggagcagaagatgatggctttagctcaagctgaaaaagaacttccatacagcatttttttaaaaagcctcaggattgcttctgagtgcagttgtgaaatatgctcctttgaatacctttagaaaggaattctctaccttcacatacgcc

SEQ ID NO: 729558 - DNA, 585 bp, Homo sapiens
aatggccctccaatgcagtgctgaagtgctgtctagtgtttctatgctcaagaaggctgcgattggggcaggcttagtggcttacacctgtaatcccagtgctttggaaggccgagacaggagaatcacttgaggccaggagttagaggctagcctggacaacatagtgagaccctgtctctacaaaaaaaatttttttaattaactgagtgtagtggcttacacttatagtcccagctactcaggaggctgagatgggaggatctattgagcccaggaggttgaggctgcaatgagctataattgctacactgcacttcagcctgggcaacaaagtgagaccctgtttctaaaggaaagaaaaaagtaaaaaagaagtctgtgatgtgccttatagagaaaatatgtgcrttagataagctttattcaggtatgaattatggtgctgttggctgtgagtttgatgttaatgaatgaacagcatatattaaataatattttaaaacagaaatgcacataaaaaggttatgtattgatcaattgatgatgatgttatcagaggccggcaggaatctaatgctgtat

SEQ ID NO: 729559 - DNA, 595 bp, Homo sapiens
ctagaccctcactccaggccctgttctccacgcagggagtcgtggatcttttaaaaaacaagaaccagcacacccactttgtcacaaaacccagacaatcacaagctttgtcgaggatatagggaagttgggaccctcatacactgctggtgggaatggaaaattgtgcagccgctgcaggaaacagcttggtggttcctagataagttaarcagagttatcatatgacccagcacttatactcccagctatatatcccaaagaattgaaatcaggccttcaaacaaaagcgtgtacatgcatgctcatagcaggactattcatgataacttggaataggtggagagaacccatatgtccatccactgatgaatggagaaactgcggtctctccacacaagggaatagcattcagccataagaaggaatgacgttttgatacctgctaccatgtggatggaccttgaaaacattatgctaagccgaaacacattatgctaagtggaaacacattatgctaaatgaagacgccagacacaaaaggacacatattgtacgattaattccacttacgtgaaacagccaaaacaggcag

SEQ ID NO: 729560 - DNA, 595 bp, Homo sapiens
ctagaccctcactccaggccctgttctccacgcagggagtcgtggatcttttaaaaaacaagaaccagcacacccactttgtcacaaaacccagacaatcacaagctttgtcgaggatatagggaagttgggaccctcatacactgctggtgggaatggaaaattgtgcagccgctgcaggaaacagcttggtggttcctagataagttaagcagagttaycatatgacccagcacttatactcccagctatatatcccaaagaattgaaatcaggccttcaaacaaaagcgtgtacatgcatgctcatagcaggactattcatgataacttggaataggtggagagaacccatatgtccatccactgatgaatggagaaactgcggtctctccacacaagggaatagcattcagccataagaaggaatgacgttttgatacctgctaccatgtggatggaccttgaaaacattatgctaagccgaaacacattatgctaagtggaaacacattatgctaaatgaagacgccagacacaaaaggacacatattgtacgattaattccacttacgtgaaacagccaaaacaggcag

SEQ ID NO: 729561 - DNA, 488 bp, Homo sapiens
catctaagcgcttggtgctgagtccgatgtgagaatctcggatcctgcccccgtcctgtgtctgtctcacagggaagttgtggattcattcactgcttattcagtaggtagtcaccaggtgccactgaatagcctgccagctcatgtgggcctgctgggctcctggcctgtggacagtgccaggctgtgccctgcatatctgcccctgtggtcctcatctttctatacttctatcagttagccacgtgctttttatttgatgttattttgggggagatgttggggtcactgtcaagttttatagtgtagagrcccattcagtctttcttttaaaaacatttatttttaattcattgaacccaaagcacctactataagccaagcaccatgttaggtcctaggggtagagtgatacaacaggacagacaaaggctctttggggacagacattaaattagacaaatgattatccacatcataattacact

SEQ ID NO: 729562 - DNA, 567 bp, Homo sapiens
tttccaatagaaggcacagatttaaaaggctggaagataccacttaacaagctaatcccagagcaaatacagagacaattcttaactataataaatgctttacctgtgaatagctttatcactgagagtgtatgaagataataaaatacagaacattaagttttaaacaggaaaagctcatgggtatgttcaagcttttttcaagattttttttgagacagagtcaccttgtcgctcaggctggagtgcagtggcatgatctccgctcactgcaacctctgcctcccaggttcaagcgattctcgtccctcagcctcccgagtagctgggattacaagtgtgcactaccacacccggctatttttgtatttttagtrgagacagggtttcaccacgttggcccagctggtcacaaactcctgacctcaagtgatccacccacctcagcctcccaaagtgctgggattacaggcatgagacaccgcacctggccttcaagatttttttacatttctgtaatgctttgctctcaaaattcagcactctgaggaacaatgtaacctggtg

SEQ ID NO: 729563 - DNA, 498 bp, Homo sapiens
atttaacccatctccctaaagttcaaaagttttactcataatccattccctagagacgctctggtttactgtcttcagaacataaccctccaatcttttgccggggaagggaattggcccagacattaatagaaactaatttctaaaatgcgctttctttttaagacagggtctcacgctgttgcccaggctggagtgmagtggcacgatcacaacttactacagcctccacctcccaggctcaagtggtcctcctacctcagcctctcaagtagttgagaccacaggtgtgtgccaccatgcctggctaatttttatgtagagacagggtttcaccaggttgctcaggctggtctgaacccctgggctttagtgatctgcctgcctcagcctcccaaagtgctgggattgcaggcgtgagccatcacactgggcctctaaatgcttttaaccaagtcttgttattttagcctcctactctctctttttctccacttc

SEQ ID NO: 729564 - DNA, 498 bp, Homo sapiens
atttaacccatctccctaaagttcaaaagttttactcataatccattccctagagacgctctggtttactgtcttcagaacataaccctccaatcttttgccggggaagggaattggcccagacattaatagaaactaatttctaaaatgcgctttctttttaagacagggtctcacgctgttgcccaggctggagtgaagtggcacgatcacaacttactacagcctccacctcccaggctcaagtggtcctcctacctcagcctctcaagtagttgagaccacaggtgtgtgccaccatgcctggctaatttttatgtagagacrgggtttcaccaggttgctcaggctggtctgaacccctgggctttagtgatctgcctgcctcagcctcccaaagtgctgggattgcaggcgtgagccatcacactgggcctctaaatgcttttaaccaagtcttgttattttagcctcctactctctctttttctccacttc

SEQ ID NO: 729565 - DNA, 624 bp, Homo sapiens
tcccatgatttcaaatgatatataataaacacttttcttttgtgtttccaatctattttctttcaacacttattaccttagtggattagtctattttcacactgctataaagaatacctgagactgggtaatttataaggaagagaggtttaattgacttacagttctgcatggctggggaggcctcaggaaacttataatcatggtagaaggaaaaacaagcacattttacgyggcagcaggtgagagggagagtgaatgagtatgaaggaggaacggtcaaacacttataaaaccatcagatctcatgagaactcactatcatgagaacagcatggagggaaccgcccacccccatgatccaatcacctccctccctcgacatgtgggaattacaggtccctcccttgacatatggggattgcaatttgagatgagatttgggtggagacacagagccaaatcacatcctttggatgaaagtgataatcaaacttttaaatgtatacagttgaaagataaagtcttaaaatacttgaattcagaataattctgaaattctgaaatacttgaattcagaataattctgaaattctgaaattctggaaaggaaaataatggaga

SEQ ID NO: 729566 - DNA, 571 bp, Homo sapiens
ttattctttccactatgaaactatatttatctataaatgtataagtaagaatatattttctgtattatataattatacttgtatttatatattatataattatatataagattatatttataacaatatattatatatttataatatgtaagaatatattaatatatcaataatataagtagatataaaagtaaatatttatattgtatttatgtaagtatataagtacatttgtaaatatataagcatatttaaatatatattatatataacaaatatataagaagatatattcttttaaaaagtttcttttaattgcagtatagtattccagatgtgtatatgattatttaaarccttatagctgccctataagattctatcacgtttctaaggttttactattacaagcaatgcttcagtaaacaatccttgcacttattttcctgtgtttgtgtgcaaatatttactgaggatagttacttgacgtgtactctctgataagatatgtgcattttaattttgtgtgcttctgacaaaatttccccactcctgctagcaaagtatggtg

SEQ ID NO: 729567 - DNA, 588 bp, Homo sapiens
atagactgaattccaggacataaaacacacttttataaatttaaaatatagaaatcatacaacatatgttcttacaccacaatggacttgaactagaaattattaacagaaagaaaagaacattctcagatttttggagattwgacaacatatttctaagtaatatgtggatcaaaaaagaagtctcaatatacacttagaaaatattttgaactagggtcaggtgcggtggctcacgcctgtaatcccagcacttgggaggtcgaggccaggatcacctgaggtcagcagttcaagactagcctgaccaacatggcgaaaccccgtctctactaaaaatacaaaaattacctgggcatggtggagcctgcctgtaatcccagctactcaggaggccgaggcaatagaatcacttgaacccgggaggcagaggttgcagtgagcagagattgggccattgcactccagcgtgggggacagggcgagactctgtctcaaaaaaaaaaaaaaaaaaaaaaaaagcaaaaaagaaactattttgaactaaacaaaaatggaaatacaacttaccaaaacttgtggcatgcg

SEQ ID NO: 729568 - DNA, 573 bp, Homo sapiens
tctttttcagtatagttgcacatttttatatttctgaattttggattatttcaatggactgccttaggcttagtattttaaatgggaaatctccaaacatgtttattgagtacagattatagaagtgacacatgattaacctcctttatttaaaatgtatatgtgaagaatgataagagaaaggtacaaatctcccgattttatatcaaaataatatttttgccattctggtaactttttcccttgtcttagagtttactacagacaaaaaaaaaaatccccttaaaatatctattgctttgccgtttttaagtagcagtgaactggcctacaaatttattctaactgcatccacagctttttgctctcacaactgtcctgctggaatcrataaactgttgattaaaaaccttgttacttaatacatttagtaagcttaaactgttttttagaaacctaatcactttcatgtcactagctgcagggatagagacaaaagctgtggctaattattaacaacttcacaaagctgatattgaatttctaatgtatcccaaatgcccgttttctctg

SEQ ID NO: 729569 - DNA, 622 bp, Homo sapiens
agaaaaacttgaaacagtagcagattctctggtcattttgaaacagtcttgtactgttgcaacatctggataccaaggggaataatcgctggctggtagaccgccaacagcatcctcatacaccacctgcttcaagatggctgactcccagcggctgagtaaagaggaggaagaggatcagaattgccttgtagaacagccaccctggttcagacatattctaactctgagatatctgtctcctcccttgaattctctcctgagccccagaactgtatttccaatggccaaatacacaaatattccccaagttgcaggggaccacagctatctgcctgaaacactatattgagaattggagactagagactgagaatttgaagtgaaaacccrttgtcaatctgtccctggggttatgtcccgggagtgaaggtgaaataattaaggcatccaattaagttggcgtttattggtgaatgctctgacttctgagtagctcacctgcgtatgtcatataatcttagaaagagcatgctggaatcattatgcttcagtcatgagtctcactggtagaacaaggtctaagggcaagacagaaagatcattttcccctgaaatctgc

SEQ ID NO: 729570 - DNA, 514 bp, Homo sapiens
gtggacaccaaggacctgcctggacttccctggctgacaatactccctgcatgtggccaaacgtagtaggaggagttaatgttgtctatgactccatggggaaaggaggactagaactctgtgtattaatatttcctgggcactgcccaatgtgtctcttctcttggctgattttcatctgtgttctttccatgtaataaatcataaccatgagtataaacagctttccatgagctctgtcagtcttttagtaaattatcaagccagagggaagttttgggaaccctcctkatatggtttagctgtgtccctatccaaatctcatcttcagttataactcccacaattctcacatgttgtggaaggaacctggtgggaggtgattgaattatgggggcagggttttcctgtgctgttttcataatagtgaataagtctcatgagatctgatgattgtattagagggagtttccctgcacaagctctctcctcttgtctgctgccatgcaagaca

SEQ ID NO: 729571 - DNA, 558 bp, Homo sapiens
agccattgatccctctgtcacccttctgtcccttggccctctcttttgccaggctggctttggaacggagcagctctgcccaggaggccttgcatgtgatcacagggttactggagcactatgggcaggggggcaactgcctggaggatgctgcgccattctcctaccatagcaccttcctgctggctgaccgcactgaggcgtgggtgctggagacagctgggaggctctgggctgcacagaggatccagggtgaggtgttccctttctcccagctttgggaagtgggagagatggtaggggcagggaggggcccgatccaggtgcaagcctgtcrggacatccagggagatgggagatgagcccacttgggaattctcctccccttcacttggttaagtcttccgtgtgctacagcctgttgcttcctctgggaagccttcctggacttccctgggtggtcaggtttcctgcttatatgcaagcaggtacttctttttcatcgcattcaacacagttgcatgcttacatttatctctgtgattattttgtctgcct

SEQ ID NO: 729572 - DNA, 578 bp, Homo sapiens
cccaggaggtcgaggctgcagtgtgccatgattatgccactgcacttcagcctgggtgacagagcaagaccctatgtcataaaaaaaaaaaaaaaagaggctgggcgaggtggctcactgtaatcccagcactttgggaggtcgaggtgggtggattgcytgaggtcaggagttcaagaccagcctggctaacatggtgaaaccccatctctactaaaaatacaaaaaaaattagccgggtgtggtggcgcacacctgtagtcccagctactcgggaggctgaggctggagaatcgcttcaactcaggaggcagacgttgcagtgagccgagatcacaccattgcactccagcctgcgcaacagagtgagactccgtctcaaaaaaaaaaaaaaaaaataggaagaaggccaaacatctatgacaagtggataacagaggcaagtacaggggaaaggaagaaggaggaggaagaagggaaagaaggaggaagaggaagaagaaagaaagaaagaaagaataaggccaaacatccctgacaagtggataacagaagcaagtacaggggacaaagggagt

SEQ ID NO: 729573 - DNA, 595 bp, Homo sapiens
ctcccaggaaaccagggggcaccacaccaacaggggtagcgacctgagctcttgaacagggaacagggagcagtatcgggatctccatgaagtcagtgttgggagagtcatgtccttgaggctgggttcggtggctcatgcctgtaatcccagcacttttggaaaccaaggtgggcagatcacctgaggtcaggagttcgaggccagcctgaccaacatagtggaaccccatctctactaaaaatacaacaaattagccaggcatggtggtgcgcacctgtaatcctarctactcgggaggctgaggcaggagaatcacttgaacctgggaggcagaggttgcagtgagccgagatcacgccattccactctagcctgggcaacaagagcaaaactccgtctcaaaaaaaaaatgaatggtgttcttgttcttgttctttttccccgcagagctctctgagtgtcaggggaagctccaggaactacacaggctcctccagagcctggagtccctgcaccgaatcccctcagcccctgttatccccacacaccaggtaagatccaggggtacacacagggtcctgctcaggccccc

SEQ ID NO: 729574 - DNA, 659 bp, Homo sapiens
accagttgagggacatttggattatttccagttcttggcaattatgaaaaaagccactatagacatccatgtcccaatttttttttctccctctgtcacccaagctggagtgcagtggtgcaaatctcagcttactgcaatctctacctcgcaggcccaagcaatcctcccacctcagcctcccaagtagctgggaccacaggcgtgagccaccatgactagttaatttttgtattttttgtagagtcggggttttgccacgttgcccaggctggtctcgagctcctgagctcaagtgrtccgcctgcctcagcctcctaaagtgctgggattacaggtgtgagccaccaagccaggtcccatgtaccaattcttgagtgaacctgttttcttttacttggataaatatcaaggagtgaaattgctgggtcttatgttaggtgtatatttgactctataaaagttgttaagtgtatgtttaattttattagagactgccaaacagtttcctaaagtggctgtaccattttgcattcccactaagaacatatgagagctccaattgctccccatcttcatcattacttgttattgtcagggctttagagtgtttgtgtgtttgtttttactcattctaatagatgtatagtagtatctca

SEQ ID NO: 729575 - DNA, 538 bp, Homo sapiens
gacagcaagtcccagtccccggagcagagagaagtggggccggcccggggcgctggtggtggctgtctggacacgtccttagcgcctgggaaccaggacataaaagcgcctccggagccgccctgcggcggggtccctttcatcccacttaaagtgcttctgcccctagggtttccggagggagagccgagatgggatgggggagcctgggggtcccccttggcaggggtgtctctttctggtttggagggttgttgctgtaaaaataactcctttgatgagcttccttattaamcctttcagacccagtctgttggagccatgaaggaagagggaaagagggctgccattcctgacagcctcccagccagggctggcgataaaggaccgagatagatggagggggcgagtagggaagtcctcttctaaaatgagagatagggatttggtggggtatggaaggaactaaccccttccctctccacctctgattcagcccttaattcttggtctatgataaataaagttcagtagtctc

SEQ ID NO: 729576 - DNA, 576 bp, Homo sapiens
gggaagggttttgcaagtgaagtttgagtggtagcattagagctggaaaaagcccgtcatctagtgttaagccacgaacttcagagcaggcacttgaaggtgaaatcacagacattcacaaatctcccagcagcattcccaagcacgcatggaacggcaggggtccccagccaggaccctgcccaaatacccacctctgactgattcaccagcagctccgaccatttctgccacaggggacacttgtctctgtcctcaaaagtggtctcgttagaagtccagcaacactgctcatggctataccagaaggcagacaggcagaccccctccttcaggtcygtcatccagtccacggcgagatcgatgaccccagccaaggtgcctggaagaagtaacacgagccactaagaggaatcgccccatgatgcgacaagaatgagaccaacacggcggccagacaggggcacatcagcaatgatggcccagattccagagcaggcaataaacttgcaatggggctgtcacttacataggaagcttctttcattaaacttgcagcacttgaacatttatgtt

SEQ ID NO: 729577 - DNA, 548 bp, Homo sapiens
tctggaaatgtcttcagctcaaattgcatcaggagggatttccaaagggagagggcaagagctgacgtcccacaaacctggtctaacttggcttcaagaggattagtaagtgtgcatcccaaggaggatacagtgtgaggttagctgaatagaaggggaggtgacagctgatttttgagaaggcattttgatgaagtttctaagcaaggaaaaaatacttgctgacagacagcagtcaatactgtgatagcagacaattttctggggctttgactaggaaagcattttgtcttaagcaaagcatccatattgcaaatgccagacagttagcataggcagcacacagtcacgacatttgaaactttggatgttggagttcactgctcttctaattctttctaaacatactgyttctaatatttgtctttgaagattatatcataaaagacaagacaaattcattggtcactgttcccaaaacattagtttgccaaaactgaactatgtatcacaagaataaatagaatcggatccctggtgcttgcatt

SEQ ID NO: 729578 - DNA, 646 bp, Homo sapiens
gcccacagaccttgctggagcaagctgccactgttagtggggagaccagccagagcatcaccctctgccccctatttccccctctgttcccacaacctgcctcccaggccagtggcactgatcagggcccacactggacaccgcctacacagtgaggtctctgctgtgggcgactgctgggcttcaagcagtccaggacccttcagtcarctgcccaagttcagatggcccagttctccaaaaggagagaagggtgcaccagaatgtcaccagggcagagagcgaaacagatcatggtagcgatccttccccagatccaggccctcccccttcctcccagagcctatggttcagattcaaagggcggtcacttttcccctagagaaagtctgcagtagatggcacctgggcagaaagctgcctgccatccaggaccagccaccctaatcaaatggggcagggagccacaggacttctctctcgttatctcagaattcacatggtattctcagttttgccttttggcctgcaaaacccgaaatatttactatctggctctttgcaggaaaagttcaggacccctggtataaattcccataaaacactggatccaaatagagtaatcattaaggtgaggaggaggctg

SEQ ID NO: 729579 - DNA, 607 bp, Homo sapiens
tttgaataaatatggtgatagagggaggttgtgcccacctcttgccaaggctatcctatcaattccctctctgctgtgcagacctactgtcttttctctccattctgtgtcttgtgtacgctccagtgggatcatttctcaacacacagatcctactgccayagccctgctctgggggagctcatctgatattatcactacctgagatagttcccttctttacctggtcaactcctactcatcttaaagatttgtctccagtggcacttccttggcacagccttttctaaaactcttcctacattctagggcagacacctaggctcccttttttgggccccagaacctggagcatgagtcatttttaaaagctggccaggtggggcgcggtggctcatgcctgtaatcccagcaatgtgagaagccaaggcgggtggataacctgaggtcaggagtttgagaacagcctgaccaacaaggtgaaaccccgtctctactaaaaatacaaaaattagccaggcatggtggcagttgcctgtagtcccagctactcaggaggctgagacagaagaattgcttgaatccgcgaggcgcaggttgcagtgag

SEQ ID NO: 729580 - DNA, 646 bp, Homo sapiens
ccactgtcctttaggggcaaacccaagaggggctgtaatgctgtagtcatccacttctggatattgctggcatatcatgcaaactctctgtaaaccatctattaactggtcatgaagaactccccatgaggtcaaaggtctgtgttaaggaagaggcaatgaatcaagagtaggtccaacactttgggagggtgaggtgggtggatcactcaagcacaggcgtttgagaccagcctgggcaatgtggcacaacctgatttytacaaaatacacaaaaaattagttgggcatggtcgtgcgtgcctatagtcccagctactcaggaagctgaggtgggaggattgcttgagcccgagaagtcaaggctgcagtgagccatgatcatgccactgaacctgcactccagcctgggtgacagaacaagcccctgcctcaaaaaaaaaaaaaaaaaaaaaaaagaagtagggatcataaaagtatgatcatttagactgcttcctcttgcaacttgcttttccttcaggacctgcccaagtttcatcttgtatatgccacttacatttgatgatagctctgctgtgtgcatataactttatggctttgtggatcaaacaacaccaccctgttcatgatgagcagctcagtt

SEQ ID NO: 729581 - DNA, 585 bp, Homo sapiens
aaaagaatagatcatctggctgagatgttgggcactgcagtggtgaccaggtagagtcccaccactatgagagtcccttagaaccttggtgagtctctgacaggtgaggagatggtgaaggtgccccaatgatgaccgagatggaattcctattagtcctgcgtgagaatgtgctttaaaggatatggtgcacatgtaccctagaacttaaagtataataaaaaaaaattttttttaaatcatctttcccacccacatgattttcctgactccattcctgtcctctgtatcattttcccctatcagttttattgaggtataattgacaaataaaaattgtatatatttcaaaaaaagaatatggtggaagaaagtgragaaaagagaaagctctttttttatagaagaatgccaacgaatatagaaagagtaataggaacagaaaatcaccatataataataattgattctgatgaggattatcaatggatactaaaccattatgtgagagacggttggagaacaggatattcacatggtttcaagatatcacccccataagcaaaatattaattataaaaggac

SEQ ID NO: 729582 - DNA, 632 bp, Homo sapiens
gagtaatgtctccttatggtattaatcattttccccagtggttttgtctatggtctatttggtctattatcattacctagcaggtcagattccagctttgacaatgccctaactttctggaaggagcaggaaaaaggccagagagagcactgccttgggattgccttcytaggctctgtctggatgacactcaccatgtgttctgggtgccacaggtgctgtgcctctgaggaaaactacagagtgtagaggtgttgcagctcctgagcagctgtaatactgtctatctgtccaagtataatttattcccttggcttcttctgctgagctactgggaagtccatgggcataacaactaaaagagaaaaagttaggtgtctttatttctttttgtccaagatgccttgatccatcctctttccaggatacatggcctacataggagttgggccttatataggaaagctacagaatcactccagatgttgtgtctggattcacttaatctggagtattgctcacacaagctggttcattcttttaattcataacattgagtgtttctctttgttttgtttaaagttccttctgatattactttgttttaatgttcagatgctaatctgcatact

SEQ ID NO: 729583 - DNA, 634 bp, Homo sapiens
ctgcccctaccccaaggcatttacagggaagtggcaaaatagactaatacacagaccattacaaagcagtgagggtgagagttaaggtggaggtcagcagaatgcatccatggagtcccaggatgtggaagtttcattcctcactccaagaggctagaragatattctattggaggtgacactcaagttgagaaggacaagtaaaatttaacccagcaaatatgagaaggacagtggtacaaaggaagcagcaggtgtcaaggcactgatgagtgaaacagtatgacacatttagagagcactaagtagtccctatgaataaagaagcccatgtgacagtgaaagagatagcctggagaggtgaccatgctaaggagttttcattttaccctgaagtattttaaacaatggtatggtatgtagtgtatgctggtagtaccttttggaagtggcctaatctaagtcatgccctacttttcttatagcataaaatcttacatttctgatccaaaggtagatggattgtctttcagatggcctgactacccagtgctagtattaggaacctgtggccaaaaatgaaatacaataatccagttgattaacaacccatacttcccatttggaaaaaata

SEQ ID NO: 729584 - DNA, 492 bp, Homo sapiens
caagctgcaatgaatcatgatcatgccactccattccagcctgggcaacagagcgagacccttcaaaaaaaaaaaaaagtatgggcctcatgctctctcttcacagcttctggtaactcaccaagaaatagctacaacgtgtccttgattttgttttttggcgaggaattgcttgatcctgaaagtcttgtaagaaaacatgatgagaaatggtcaaccacacataccacaatggcagagaaagggagagaactttggaaacctgttttaaccaagcttttttttccatatctctatctgatggrcttctccacacttctacatcagcagctttatgacactatactgatcaagtttggatgccttctattattttgaggtatattctcacagcttgacataaggatcaccacttaaggatactgttttgggatctgtgagagaagaaattcctaaatccttgcacttgttaaagcatctggctttcccaga

SEQ ID NO: 729585 - DNA, 660 bp, Homo sapiens
caccccaaagtaatgtttagctaaatacctggcatccggatccagtcaagttgacacaagcaattaaccatcaaatcccacatctctaaggccttcatggcacctaatacaaagtaggtgctcagtaaatgttttcttattgagtggatgaatgaatgtatttttattatttccagtgaaatcgtaaagatgactatggatgaagaactacaaagttagtaaaaagtaactgacagaccgctcttagcctgctagcctgctgacagattgtactgcttaggttgattgacagttactctcagagtattaactgtataactgagagtaactcaaagtagtaacatgtctacatatggggaagacttcacttgagtctcactgatcctcaaagcagacactcaaaataaatgtgctrtgagtttagtttagatccagtccagatgctatttgaagaaagaagggaaaggaaaggaaaagaaagaaagagggaaggaaggaaggaaggaagaaaggaaggagggaaagaaggaaggaaggaagtgaagtaagttcaaagttacttgtttaaaaaataaatacaaagaaaatattcttttctggctgccaatctgttaaaaaaattaaaaagtaatatatagtttggggttgtaattatcaggc

SEQ ID NO: 729586 - DNA, 607 bp, Homo sapiens
tggttggttgtatttgcagatgcagaatcctcatatacagagggccagctgtaactcatatgttttcaagaggatcttctcaatataacaatgtgtagcttatggccaggcacagtggcacacgcctgtaatcccagcactttgagatgccaaggctggcagatctcttgagctcaggagtttgagaccagcctgcaaaacacagtgaaaccctgcctctataaaaaatacaaaaattaggtgggcatggtagtctgtgaatgtagttccagctacttgggaggttgaggtggaaggatcacttgaccccaggaggtcaaggctgcagtgagtcatgagtgtgccactgcactccagcctgtgcgacagagtgagactccgtctcaagaaaagaaaagaaaaaggwaactgcaacgatgaacagatcagaataggcgacatgcactgaacaaggtaaaaaagacagaaaattatctggagaggtggccggaggacacatcaagaagcgccttgtacattggtaaggattgtggattttatggtgattaaaagttgctgtggggttttttgagtacaggaatgacttaaccggtataatgtttgtaaa

SEQ ID NO: 729587 - DNA, 627 bp, Homo sapiens
ctccacctccagtcctggtgagggatccactgggtgaagccagctgggcacctgagtctggtggggacgtggagaacctttatgtctagcccagggattgtaaataccccaatcagtacttggtatctagctcagggtttgtgaatgcaccaatggacactctgtatctagctactctggtggggccttggagaacctttatgtctagctcagggattgtaaatataccaattggcactctatctagctcaaagtttgtaaacgcaccaatcagcaccctgtgtctagctcagggtttgtgaatgcaccagttgacactgtatctagctactctggtggggccttggagaacctttgtgtccacactctgtgtctagctaatctggtggggaggtggagaacctttttgtctagctcagggattgtaaaygcaccaatcagcgccctgtcaaaacagaccactctgctctaccaatcagcaggatgtgggtggggccagataagagaataaaagcaggctgccagagccagcagtggcaacccgctcaggtcaccttccacactgtgaaagctttgttctttcactctttgcaataaatcttgctactgctcactctttgggtccac

SEQ ID NO: 729588 - DNA, 595 bp, Homo sapiens
gtcacccaggctggagtgcagtggcacgcttacgactcactgcagcctcaacctcccaggctccagccaccctcccacctcagcctcccaagtagctgggactatgggcatgtgccaaaacacctggctaatttttgtatttttttgtagagacagggacccaccacattgcccaggttggtcttgaactcctcggctcaagggatcctcccaccttggcttcccaaagtgttaagaatacaggtgtgagccacggcacccagccaataattacttcagatgtgaatggtctaagcatagcaattaaaagacagagattattagtgtggattaaaaaaaataaaaccaaacagcatgctgcttaaaaataaaacctcttcaaatataaagactcaaatgggttaaaagcaaagagatggagaaagaaacacatgttaacaataataaaaaaaaagctrgagtagctatattaagctcaaacaaagcagaattcagaataaggaaggttatcaggggtaaagaggggaatcagaaactacaattgcccaagaagacataacaatccttaacagcatgtacctaatgatagcgcatc

SEQ ID NO: 729589 - DNA, 582 bp, Homo sapiens
gctattgtgaatagtgttgtggtgaacatacaggtgcatgagtcttttcagtagaacaatttattttcctttgggcacacacccagtaatgggattgctgggctgaacggtagttcaacttttagttttttgagagatctccaaattgctcttcacagtggctaaactaatttacacacctatcaacagtgtataaaaagtgtataagctttcctccttcttctcaaccttaccgactttttttttttttttactttttaacgaaagccatcctgactggtttgagatggtatgtcactgcagttttgatttgcatttatctggtgattggtgatgctgagcattttttcacacttcttggccacttgtatgtcttcagaagtgtctgttcatgtccttttgcccactttttaaaggktttttttttcttgttgatttatctaagttccttacagattccagatactaggcctttgtcagatgcagagtttgtgaatgttttcttccattctgtgtgttgtctgtttattctgctgatagtttctctagctgtgcagaagctcttcagtttaactgggtccc

SEQ ID NO: 729590 - DNA, 595 bp, Homo sapiens
tcttctctcctaaagcctcccggcccctcgggagtgctgatgtggagcaagactggaaccgctgcagggtagcctggagccagtgagtgataggaatcacgtattacacgacagacatatatgtggtcccctctgtgacagggcacacagtgccctggggaacacaagttcacgggtcctgtgggaggaattctagaatgacagagggtggtgcatccactcagccagscatggaggggaattcaggggagatttcagagagaaaggcacagcagagctgggctttgagggaaaagtaggagtttccaaggcagaaagtcagggaagggcaccaatgacagaggaaacagaagtgacgcggctgtgatgagtgaagagtgagctagatgtagctgtctgccttgtggccacagcccttcagccctggatggctgtgttcctcgccaaatgccacccctgcacccagccaagtcccgctggtacccaggggagtcatgatccaagggcgcccacccaaaggctcagcaggaatctctgacacatgtggagaggtggaaggagaaactgtctcaggagtaatggtcaggaagagctg
